United States Patent Application Publication US 2014/0057251 A1 - sequence listing, part 124

SEQ ID NO: 226406 - DNA, 2524 bp, Cannabis indica
ggaccttggatgaaaggttctaaactcccaacaaataattatgaccgatatcgcaccgacttttctaagtccaatgcctggccgttcctcacacgattggcaagaaacacccttacttcctcactgcccattcccccttcccgtgcccctccacagccaagaattctccaccatggagaatcttcacgcaccattcctacacaactttcacaccacggccagtccaatattcacacccctgaccacattctgcaatctttagcaaataccagcctccaatctccttcccctggttcccaccaacctgctatctcaacccctccacaaattacactaaatactgcccatttatcttcatctcatccactcgctcaatctgctcatcctggctcttgtgtcactaatatcttacccacccctgatgctctcaaccacatgaatcactttcctcaagacacatcatctcacgtctccaacaccaactctactgccattactaccacttctactaaaacttctacacactctgttgctgacctttcaaatgtctatatgcatgacattgactatgtatccaacactcttatgccaagtaatgtttttgctacttacccgccatcttacaacactcctttcacatctcagactccacctccacttcatacaccaatgccacatgcacctattttccattctatcaacacctgtgctactactgctatggatcaagagaatatctccccaaatgtcattcctaaacgacctagtgaatcaatgtcagtgaggaaaatgcttaagcggagtcgtgttttaaatggtgcttcagcatctttttcggaggctgctgatcttgtgactgatgtttatgtgaccacggattctacaaccactttctttccttgcttgttcaacaacaatcgccccatgtcttgtttctcatggaaacaaagcttaatccaaattctcttactcgtttgcgtaatagtcttcactttaataatggtttagaagcaccaagggttggtttaagtggtggattgatgcttctttggaaagacaatgttaatgttcagctcctacattttggtcataccttttttgactgcatcatggcttttgaagatggcccatcttttcacttttcagctttttatggtgcccctgctgcacaagatcgaaatgcttcatggactcttttgaataggttggctgactctgctcctctccaaccgtggctagtaattggcgattttaatgagattttatcaaatgcggacaagaatgggggtcctctgcgtaatgaacgcttaatggcagactttagaacctctcttgatcactgccatttgtctgatactccttttgaaggtgatgctttcacctggatcaagaaccgaactgcagcaacctctttaaaggaacgtcttgactggtgtttcaccaacaatctttgggacaatgtttttctggtgccgagactaattcacttggattatttccactctgaccatcgtgctatagctgctgtactcacttctcataatacaccagcacaacaattcaaacgtaaaagccggtttcattttgaaaaactttggttggctgatgctgagagtagagacatcatttctcaatgttggttacatcattcttctcaaccttcaatcgacaatgtgctacacaaccttgactcatgtgctaccaacttgcaacaatggcacattaggaaatatggacgcatgaagaaaacaattgctgaagctcaaacccgagtgacagatttgaacaattctgtcatccgatctgataacactatggaggagctcaaagcttctaaatctattcttgatgaccttttagaacaagaagagatgtattggcaacaacgctcacgtgtcgattggatgaatttgggggaccgcaacacaaagttctttcatgctaaagcttcagcacggtaatccaataacataatcaaatttctttttaatgattctggccaaaaaatgacagctcgttaagacctggtgtcggttgttgaagattatttccaaaacatttttcagacctcacattcagatgtcgaggctttgtctgctgtccttgaaacaatacctgccatggttacgcctgaaatgaacgatgatctcaccaagcctttcaccaaaacagagattgaagatgctttgcgaaacatgagtcctgataagagtccggggattgatggtatgtccgcgatgttctaccaacaaaactgggatttggtggggaatttagttgctgaagctgtgttgggagttctaaatgatggggctgaccctaccaaactcaaccgcaccatcataactttgataccaaagattaaaaagcctcaaacaatgaaagactaccgtcccatcagcctctgcaatgttatctctaagctcatcaccaaggtattggttagtcgatttaaggttgtcctcccatctgtcatttcagagacacaaagtgcctttttgcctaatcgtctaatcacggataa

SEQ ID NO: 226407 - DNA, 1981 bp, Cannabis indica
ttttacttcataatgtaattattcaattttttttcttcctattcaattaataagttgagttaagaagtttataatctaattaagacttataaacccaatctatgtaaaaacttcctatatttctatgataaatttaatcacacaaatatcattaactaataagatcatacaaacaatctaggttctttcgtcctaaatcaatttacatccgtatcaatgagagcatattcaaatctcacatttcaaaattttaacttgaatttataaataacaattataaatggccagtaaataattgtaaaattaaaatagattgaatagaaattgaataaagagaataagaaaaaattgtatcatcacattaatccataaaataatctcaagtggttcacataataatccttaaaagaagttatccaataaaagacattctaaaaaaattgaatgaaaaatatgaaagatagagatggaagatctaagaacacggtttggagtccttcactggtgccttctgctccttgctcttcttcttcactcagaattcctctcaattttagaatggtgacaaagctttgtcgtcagccccctttaaatatagccaaaaattgatgtttcccatttttatatactaaggccgcggccttacaaacgatttcctcttttcttcgcagtttcccattttaagtttcctgctgttatatttattttgccattattatgtgttctggagagtttggtacgatttggggaagttttgaacatgtttcaaaattcgttgggttttctctagaaccggttaattggtttctcaggcaggacccaaaaaatagtttaccgttttagaaatctagtttgccagtttttgcaattttgggagccttagtttttgtgttttctcgatatttaggatattgtcatattatttatcgatagagaaacctttagttttaagtttaagtcactgaaaaagtgatttagcgtatcacttatcagttttacgtatgtcgtgacttaagagcctgtaaatcatctagcaacagttcctctcaggttgaacgatacacttgaatttagaatcaaggtaagactagtataataaatgcatatgtgcttacatatttagcgtgcatgtttatgaatacctactagataacatatcagtaatgacggtattagtgtacatagagttggactgaataccgacggatatatatttagcatagtacagattgacgctatcatattagtatgactagagtactgagtataggctgatattatggtcaatagtactgtcgtacgaacgttctagactcagtacacatgggatgtgagatacgattataatttatgtatggacgcctagttgtaatcagtttatgtttatgttatgattatacttttcttactgattttgtcgactcacatatattgtttatatgtgtaggtaaaggcaaagctaaagctaaatagctgtgagcaattttttgcttcacaactcatagttctagatttcgatagggataacccacatcagttcgaaagagaagggtaccgtggacgagcgaatgaagactgtacatattgaggcggttagacttggagtgttcaatcttcggaacagtaagctttattttgatagtcgctttactttaatctaccatcatattaggattacaattcacctaatagtttaggattctaagtatttgtgacaaattgcaattttaattgtgatgaagaatagaacctaggttaaataaattatatgcttcattaatttgttgcctagattagtttatctccataaatctcaaagttttgtctaataagtttaataaattgcatgcttcgtggatttactgcttaggtaaaagagtttattattgagtgcttcaccttaattacatacaatagggaaattgagatgattgactgcttcagcgttatttgtgggattaatagtttgattggaaattga

SEQ ID NO: 226408 - DNA, 2576 bp, Cannabis indica
aggttatgggtgcctctgacacgtactatacgcctagtatataaatttatgtatatatataaaatctcactacttgttattattcagaaggattttgttaagcaaaatagtttgagggacaagattgtacaaaaataaatgggaaaagatattatttgtctattgttaaaaaaaaaaaaagaaaaaatagatattatttgtctaattacttgtgagaaatgttatcattttttgtttttttttttggttaacattgaggagaggaagatacaagaaatatattatagggacccaagtgggacctaagtgcaaacaaataataaataaatgattatttgtcatgatgagtgtccgtagtgggcaactagctagctagggcatgaaaaaagtttgtcatgtggtgaccacaacacacacgcaagttgttgggaattcaattcacacctcccacacatatatgtgctggctgtatgagacaataatttattgtcatatcccttactcctctcgtactctattgtggccaaactccaatctaatttaaatatttaaagcttcgattggtacgccgtataaggattgtattgtattaactaataaataacgttatgtttggattaaacaatatactatattaattattacaaccaaattttttaatacaatgtatgttgtattatttaatacataataaattatctgtattagcttgtattataatatttacaaagaatttgtggtcaacaccaatctccgatctggaccccggatcggaccccaaaccccggaccccggatcaaaccccaaaccccagacccgaacccgaaccctagcccagaccccggactcagacccggactcgggaccccgacccggacccgaacccctaaacccgaacctagaccctggacccgaacccgtaattggtgttgggatcgagtgtattaaaaatatattataactttacataatcaattaatacaagtcaataccaaacattgtattgtattaaataatactaatacaatacaatacaacacaatccaacacaatacaatacaatacattacaatacgacgtaccaaacgagccctaattgaattaaattatctaacctaatttaattataaaaaaaatatatatttaattacattttaaatagattagatattacatgttagtaattaattgaattgaatcgtttattgaatgtcatttcaaataagtttctacaccacatactgaaatttttaatttttttttcttttttattatgggacaaatttttttaaagaaatattgtataagttttatactgtgtactatgttaaattttcactcttgttctgtgattgatttttagttgttccactgttgtttttaactgttctattttgttgttttacagttatttaataaaaagacaatttttttgtaaaaaattctgtgtggcagtaaaattgtaaatttttaccaaaatccagtatttttgtaaactctcccttttaaaattcaattaaaaatccatctaatccaattaaatttatatatattaaaaaaattatttatatataataaaaatatttaaaaattttaaaaatatatattttttgtggctatttgattttttggttttgaaatttgtaacacttagttgttttgtattatatttttcatgttttttttttttgttgttttaatttatttcttgtgagtgttattattttagttatttggaacttttaattgtattaaacttataaggatgatattattatggagtattaaacctaaataaattgtgatatttagtttttgggtatttttcttcatatttttaagttaatattaaaaattaaatgtgtaattggatatttaattaaaaattcgatccaatttaattattattataattagattggattagattgaatttcaaagtctaattagattagattaaaggggttttcacatcacatactgaaatttttaacttttttatttttttactgtgggatagagttttttcaaaaaaatactatgtacattttatactgtgtactgtgttaagttttcactgttggtccatgattggtttttaattgttctactgttgttttaactattatgttttgttcatttgttcatttagggttgttacaaaaggatagtatttttgtaaaaaaatgtgacagtaaaattgtaaatttttacttaaaatctaatatttttgtaaatgacatcaaataataattttctaaatttaattactaattgaattgaattgaatttttttttcaaaaaaaaaataataaattagattggataactcattatacctacgtcacaagcgtctatccatatgacctcataacaataatattaagtcaatatattgatattgtatatgtatacaaagcccattgggcaccaaatcgttttacaaaccaaattattgtactacaggaatgacaagtaaacttatttttgtctctaagtcacatataagctttctaaccatcttaccgtgaagtcttatcttcttctttttcacgtcgatttatattgattaagat

SEQ ID NO: 226409 - DNA, 1010 bp, Cannabis indica
ttttgggtacaatacatataaaaagaggtatatttcaattaaatataaaaataaaggtaaatttgattaattgattaataaaagtggtatttttcaacttagtaacccgaactttaaattaggttaaaaaatatataagataaactgctcaaaccgaccgatgtacaactctagatttcagagcataatgttattactgttctaatagtatgtattataacttaaaagatagtaaactaagatactaaactgtactcgcaatcattgaataataacttgaaaaaaaaaaaactaaaatgcagaaaatgtgacaaaatatactaaagaaaaacacccaaacttacccacatggaaattttgcaccatgtgtgaaggattagtcttagaccaaggagagaattctagggaagtgttagcaagtcaacttggtattgtcacttggccacacaaactattcttacctactttaataatgtgatcttctacacatactagtcttacctactttaacaatgtgatccgttataatagaaacttatatatattgtgctgagtattttgactagaattttaatgtaagaatgcactaattttttttactagaattttcaaagagtcaaaatgttcacaagggcatacgcgccaaaaaaaaaaatgtggtcgttgtttactcaaagattgggtggagactccctacatttttttttatgttaccagtatcataatacttcgaataattaaattcacatcattaatgaacaaaaccattacaattgaaagatgataagaaaaaaaatcacacttgcccatcttagaacacacatttttcaaaaaaacatcttttctttcccttgctcctcttatgttttctgaaaggtaaagtaaaagcttcatgacacccaccattggccatttcggttcttatatgctcagattaagccacgtttcccaaactcaatagattgaaacttctccaaaaatatttacagagaaatttaaaaaaaaaaaaa

SEQ ID NO: 226410 - DNA, 1904 bp, Cannabis indica
aacaacaagaaaaatactcaaaacccaaaaataccattaatgactcaagtttgagttttcaaactcaaacttgctcattctccactcaaaatcataaaaactagttacaattaatcaatttcaacttaaatagactcaaaaagtgaaccataatcaattctaaccctaacaaccattaactctcaaaattgcatgatcaaacaaaacataaagcttgaataatctaataactaacttctagggttacctttggctagaacttcctcaatcttgatgaattcaaagaaattagatgaaaagcttttaggtttctcttggattgcttcagcagaaagagagaaagagaaggttcaagactttggtttttgtttgtctaaatgatttttgtcttttcttaattgattataagaaataatactaaggattttaggctaaaataaaaaggattaaccagctgtcaatcccaaatttagccacctaatccaatggacaaaattcatgaaatgcccatttcttccattttaagtaacctttaggcttaggggaaaaatggtccaaaaccataatccctgcctaaattcggcattctaaatatctctatctttgtcctgttaagacataggttctaaacttacccatgtgactcttgagcaaaaatcataaaaatcgcataattcatatttagcataactctaatgcccatttctaaaagtgaggcccacaacaaatatataatcatatataattataaaatatcaatatttaatgctaattgcctttacttatccataatctaacatgcggtatccctccattaaaaggatttcgtcgtcaaaatctaacctgagtaactctggatattatcccctcatactggactctagctcccaggtggcttcttccaccttactgttcttccataatactttgaccaaagatatggtcttttttcgaagaaccttttctttcctattgagcatttgaagtggctgttcctcataggataagtctaactgtagctctagggcctcgtaactcaagacatgagtcgggtctgaaatatatttcttcagcatcaaaatatgaaatacattatgaacaaccgataacgctggtggtaaggctagtcagtacgctacctgctcgatcttctcgactatttcaaatggccctataaacctagggcttaacttgcccctctttccaaagcgcctgatatccctcactggcaaaacttgcaggaaaatatgttcttctgcctgaaatgcaatgtctctacgcttcggatctgcgtaacttttctgcctgctttacgaagcaagcatccgagccttgatcttgtctattacttcattggtcctcaaaactaactcaggatccaaatacttccttttccctattttgtcccaatgaattggagaacaacacttcttgtcgtacaacatttcatagggatccatccctattgtactttgatagttgttattgtaggaaaactctatcaaaggcaagtatttactccatgaaccctcaatgtccatgacacaggctcgcaataagtcttttagtatctgtattattctttctgattgcccatcagtttgagggtgaaaatctgtactgaacttcagctttgtacccatagctctctaaagacttacataaaattttgatgtaaactttggatccttatctaaaacaatgaattttggagctccatggaacgaactatctccttcacatacaactctgcatactgatctattgtataggttatttttactggcagaaaatgtgctaacttcgtgaaatgatccactataacccatactgagtcatacattcctatggatatgagcaaactaaccacgaagtgcattataatatcctcacagtttcactga

SEQ ID NO: 226411 - DNA, 2378 bp, Cannabis indica
cttcaagaaagaagatatcaggtcagtaccgatttggattcagttacctgacttagaattgaagtattggggagagaaatcccttttcaaaatcgttgggcagatggggaagccacttcaagttgatgaaatgacgaaggtgaggaataagctaaattatccgagggtgctagtagaagttgatattcagcaagattttccagcgagaataccttttgaagatgaacatggttttgatgtttatgccttaattacctatgaatggaaacccattctttgtcaacattgcaagggattagggcatgctacggttgattgtaagaagaagacagtgaaagagcaaaaatgggtgattaaagggtctaaagataatacagatgctgctgttacagagattttagatgagaattctgatgtgaacaaagcagcaggtgctaaggaaggagaggcgtctctacaaccggttgttgttggaaatgagggttttaagcaaggtgtgaaaggaagtaaagctagaggaaaagaggtcatggctgagactcacattgaaaactcttataatgctctggaaggaatttcggagcatggaattgatgtgttagttggagctgttacagtcactagtggcaagcatagatctctcactgttgacaagaaaagaggagggggagcacctcctcttggagatggataaaatagtatgctggaacgtccgagggatcaacgacccaagtaagcaaaaccttgttaagaacatgttacatgtccataaagttgggctcgttggtctccttgagacgagaactaaggcctcaaagcttggggccttatatgttaatgttttcaaagggtggtgtttcacatcgaatatagcgtggcatgaaagagggcggattatagtagcatggaacccgtgtagtttctcggtgaacattctcaaatgtaccagccagcttatccatttgcaagttgctactttagatggtaagtttgactttctagttacatttgcttatggttttaatgaagttgaagggagaaaggtgttgtgggcagatctaaagcatttgagtactcgagaaccttggatggttttgggtgattttaatgatattttgtccaaagaagaaagagttgggaaaagagtaaagtacaacacagccactgattttattgactgtgtagagcaatgtcagctcgaagacattaaatatagaggcagttttttcacgaggaacaacaaaaagacaaggaaatgaaagaatgtattcgaagactgatcgggttctagccaatccactatggttacatcatttccctactgctgaagctatttttgcaatggagttgttatttgatcataccccagctataataactttgtctcatggatttctaaatgggaagaagccttttaagtattttaaaatgtggacctcccatccaagatacaaagagattgtaggtgaggtttggaagtagcaggttgtaggctctaagatgttccaagtcacttcaaaattaaagaaattaaaagtggcacttaacgagttgaataggaggagcttttcaaacatccaagaggtgacagaagaagccagaaagggcctgacagagactcaaaggaaattgcaagatgattcgttaagtcatgagttgattgaacaagaattggcatcgagacagaaatataggcaattactcaaaggtttgaattcttttcttcgtcagaaatccaagattagttggattaaggaaggagatgaaaacttagccttatttcatgctagtatcaaggagaggaggaaaatgaatagcatactgtccattgaagataatcagaggatgagaacagatgaccaaaagaagatatctgaagcctttatttcattttatcaccaattgctcggttctaaaatggaattcaggaagaaggttaattcaaaagtcatgaagcttggccctttagtaaacaatttacaagcagaatacttactaaaagagttctccaaagaggaagtcaagaaagctttatttgatattcctggaatcaaagctctggggccagatggttttaccagttgcttctttcaagacaattgggaattactgggagatgacatcagtgaagcagtactttcattcctacattcagggcagatgctcaaggagatcaacactactgttcttacactcatacctaaatgtaagtgtcctaatacagttagtgaatttagacccattgcttgttgtaatgttttatacaaggtggctactaaactcatctgttcgaggcttaaagttatcttacctgatttagttgctcagaatcagggaggatttattacaggcaggtttatagcacacaatattatgat

SEQ ID NO: 226412 - DNA, 1536 bp, Cannabis indica
acaatggtatttcaagctggggaagatttaattcttggaaagagctctcctgagagttctattttcagttctctacttcaagacaaacacctggctgactggaggatgttgtcgaaataaagcaaagacaagatgaacccttgaaagactacattaaacggttcatggctgaggccaccaaggtcacagacctaacagaagaaggtcgatatacaaccatactcggaggtatcctactgttgagtgacttctagaaagatatcaggaggatctcaatgaacatcatggaggagttccttgagaaagctgatggcttcataaagcgggaagaagctgtccagaaggcccagacaaaatggcaggacaatgacgaataaacacaaggtctcatagcgccccaaacactgtctagcatgctgaccagcgtagacaatctctattaattctcaagcaacgagattggtggaggcaagcgcaacaacgatggccctgacccacataatggcaaaagagggaattcaactatccctttatgccatgaagtccaaggaagaaggaggagaagtgtgtatgcttaactcttctatcaaaactcccaaagcaaggcatgactagacgtctcaacagggtggatcagcaataggaaatcaaaaagctagcctccatcccagaaggctggtgtccatcaccaaagtctggcccctacctctgaaggctggcttccatcccagaaggctggcctccatctctgaagtctggcccctgcctccgaaggctagcctccatctccgaagtctggcccctacctccgaaggttggcctccatctttaaagtctgatatcttcctctgaaggttggcctccatctttggccaggcgtataggcaggtaccaccaaccctgccaaaacctccaatggtaggacactcaggggtcgttattgatggaccccatattgcaggcaagaccaataaagccagagagccctacgctcgaacactcagtcacgagcccaaaagagacttcgtggcaggacaagaacaaggctctaagcaactaaagcttagagcacccacgatctctttcttaaaaaggagatcctatccaagacagtttctcgcacaacgaccccctggtcgttaccgcccaaatcgagaatataactgcaacaagatatatggtggacaatagagcctccctcaatagccttttcaatatcaacacatgaaaaaatgaggctccaacttgttgactgggcaccctttaatcaagtgatgtgtggcctctttggccgaagcatcacactcatcaggtatatcagattacccctcactattggagaaagtccaaccaccagaactctgatggtgcagtttgtcttaatcgacgttccctcagcttttaatgccatgataggctaaccagtcctctacaacttgaatgcgtaacatccatctaccacctctgcctgaaattcccaacaagacatgaagtaagatgtcaagaggagatcagtaatctgcccgtcactgttac

SEQ ID NO: 226413 - DNA, 1924 bp, Cannabis indica
gcaacttgcgatgcaacctaaattgacaacaaaaaaaattgtataaaaattcctatcgcaactaccgctgacaactactttaaaaaacacaaaaccataaaatttaaaaaaaaaaaattaaaaaataagtatataggataatttttttttaatgtattaaaacaactaatttattttccatattataattaataaaaacttcttgagaaaatttatataatacctacaaaaattttggtaaaaaactatttttttgtaggaaaaaataagtgcatcaatgtgccctctttttttagaacaacattatagaaacactatataaatacttctcacaagtttttttaaaaattctcaataattattaagaaaattttacaatgtatctccttaaaatagatatattgatgtactcttattagtatctgcaaaatcattttttagtcaacgtttttcttatggtcatgtacgttacagctatttaagacaacttgtaaaattttaaaaaatttgaaaaattttaacacgctgaaaataaggttcaaaaagtgtgtagcacacgtgacttttttattttatacgtgtgtgaaagaaattgtttgaacactgttttctatattgtaaattatttcgaatttcttaaaattttgtaagacatattaaataattataacgtaaacgaatatataaaaaaaaaatagattaaaatttttttctagatgtcgaaatagataaaaattcgttggaataaaaatgatgagtacaaaatgaatcacttctcttatctattaatcatactacaaaattaatcctaaataaataaaaacaaagcataataaatgacacaaaaactataaaaaacacaaaaaatcgtaaaaaaaaaaaaaaaaacgatcaaaaccaataaaaaaaaaactaattaaaacttacttgacgaataattttaacaattttaaaaatttataaaatattttaaataaccacattataaaataaatttggactaaaaattatcctatgaatagggaaacatatacgagtgagcttcgtagaaggttcgtgctgaaatgttgagatgattccttatacattaagaatttaagacgaaaacgtagtcaaccaaccaaccaacctataagttgaatacaaattagaaaccactacataactcaaaataattttgtaccaccgatcggccgtacttatggaactctcgttttccgtttcctttttggggtagtaactaaaaaccaaatctatatataatgtatactttctatgatcctttcgatgggacctcagttgaaattttcgagacaaataattcaatttagggatatcaattaccccaattctacctaaagtactatatcataaaacctaaaagaacgacaatatactatttttatattcattattggcatgtaagttgtttaatattataccgatataatattcaataattagaaaatatatagcatttcgcatgcgattatattttataagtaataattaagccataaaattatattaaatttaaatttttaattatattattctaataatatattctactatttttttacttaataaataatcatttttatttgattaacttattataaatataaatttatattatttcaaaaattattaatattactgtattttacattattacatttaaaaatattgtagatgatcacatcaccggcgctttgcatattatttaaatttttatctcataatataaatcaaagttaccataaaaaaatttaaaaaaataacatggagttattaaatctcaatcccgtctataactctatattgagcccttatctcctaatagctcttattaaatttaatttaatttactttatacctatccaaacgaattataaacttagacttaattataaaaataatt

SEQ ID NO: 226414 - DNA, 1485 bp, Cannabis indica
atgatgctcatgctcctcttccatttgagaatatacaaggatatcgtcgataaacactataacacaattattgaggaaatccttgaataatctgttcatgagatccataacggctgttggagcatttctcaatccaaatgacattaacaaaaactcatagtgcccacatctggttcagaatgcagtcgttggtatatcttcttcctgaattctgagctaatgataactagatcgtagatcaatctttgaaaatacagtcttcccctgaacctaatcaaacaaatcatcaatcccgagcaacgaatacttgttcttcgtcatcatcttgtttaattctcgttaatcaatacacattctgagggaaccatccttcttttttagaaatagaaccggagctcccctgggcgatacacagggtcaggtaaatcctaaatcaagcatccctctaagttgtatttttagctccttgatttccgctggagccattctatatggcccttttaaaataggttctgctccgtgtgccaaatcaatcacaaaatatatttctcgttgttgtggtaatccttgcaactcctaaggaaatatgtcgagaaattagtttacaaccctaactacctcaggcccaaattttttaggtttcctggagtcaatcacaactgctaaaaatcctacacatccactgtgtagtaaatctccggcccttaaaactgaaatcactcagatacgagacccctgaatagatccaacataaataaatggatcttcgcctccgactgaaagttaccattactgtttataatcaatgctagccgaatacttagatagaaaatccatcccaagtttgatatcaaactctgctaactccagttctactaagtaaacactcaactccctatctttcattctaactggcgtagacttaattttcctattggagataaccaattccatgctaggtagtagagttccaaaccctctttcaataaagtcataaagcctacccaattgattaattaccagtgtttccacatatgagtgtgtagctctagagtcaaataacacagtaaaatagtaattgttgacaagaagctaccctgtcaccatggaaggactggctgcagcatcagcttgagtgattataaacacccgagtaggtacgggtttcgcttcttacttctgctcttctttctttgcctgggggaaatctttcttgaagtgtccaaccatgccatagtgaaagtatgttttctatttgcactctcccggatgatgtttcgtacaacgtgggcactcagggtaagaataaccctggcgtccacctctgccttggttcccacaaaactgcttgttttatcccaaaccaccagatgctgaggtggtctttcgttttttgatcagcagtggaatcacaactatccctaccataggtaggagtaggaagagcaggggttctgccaacacctggagtcactcggggctcct

SEQ ID NO: 226415 - DNA, 2660 bp, Cannabis indica
tttttggtgtccaccattgtaattctctgagttatcttcttcaagtaataaaggcaaagcctcaaggcagttcctcccaaggattagatccaagtgatttcacttgtgattgaaccttgtaatcctttgtgttctattattttattgctactgctgttattacttttgttttctggtttatgatttcaagtttgtatcttttggtttcatttgatcttgtttatgttgttcttgaatggtgttgattcaccacaaatagtatcaaagcacaggttgctattgaggaatcaagaaccgtgaagatcaaaacttgaaactcaacaatggcgacaccaagatttgaggtagataagtttactggtgtaaatgattttggccttttgcatatcaagatgaaagcactgcttgtgcatcatggccttgcaaatgccattattgaatctgttcctaaagaaggtgatgatgtcaagaaaattgcccaagaaactgaaatgaaggctcacagtgcaatcttgttaagcttaggtgatgaagtgcttcgagaagttgcagaagaagagactgctctgggtttatggaataaacttggttcaatctatacgaagaaatccctggcaaaaaaaatcatatctgaagaaaaagctttacaccatgaagatggaagaaactaaagaattgagaaggcaccttgatgatttcaacaagctaatcttggacctgaacaacattggagttaaaatcgatgaagaagatcaagcaattcttttactgagttccttaccaaagaattatgaacattttatggatacaatcctttatggcaaagacactttaaccatgtctgaagttaaagctgcactcaactccaaagaaatccagagaaaggttgatgacaagtcagagactagtggggaaggattaatatttgctcgaggaagaccagaaaagagagatttcaagaagtcaaagattggtcacaaatcaaactccaagaatagaaatacagtgggaaagaaatgttactattgcaagaaagagggtcacttcagggatgattgctatctactaaagaacaagcttaaaagagacaaaagcaaggaaagaggagaagtagatattgcatcgagtggttatgattctgcagatgtattggtggtttccagtgaggattctggtggtgaatggatccttgattcgggttgctcatttcacatgaccccaaagaaggatatgttcactgactttgaagaaagcttagttggtacggttctcttgggaaacaacaatgcctgcaaaatccatggaattggttttgtcaacatgaagatgcatgatggcattactcgatcagttcagaatgtgaggtatgtacctgatcttaagagaaacttattgtctataggtatgtttgataatcatggttatactgttagaatagacaatggcaccctcaacatctctaaaggctcactggtggtagctagaagtagactcaagaatggtctttactatatgattggtactgctgtaataggggcaacatcaccagcaataaataatgccaagaatgatgtacaattgtggcatttgaggcttggccatgtcagtgagaggggtttcactgagcttgataagcaaaggttgtttcaaggtggattaagtggaaagcttggtttctatgaggaatgtgtgtatggaaaaagttgcagggtcaaatttgccactggacaacacacaactaaagagaaacttgcttacatccactctgatttgtgggggccctctagaatcaagattcttagaggtgcaagctactttattagcatcatagatgacttctctatgaaagtgtgggtattcctattgaagagcaaggatgaggccttcaatacctttgtcaattggaaaaggttaattgaaaatcaaaccagatgcaaaatcaaaaaattgagaactgacaatggttgggagtattgctctaagcaatttgatgaatattgtaaagaacatgggatagctagacatctaactgttagagatacacctcagcaaaatggtcttgcttaaaggatgaatacagctcttattgaaagagtaaggtgtatgttgaaaggtgttggtttggatagatctttttggggagaagcagttaagacaacttgttatctaatcaacaggtgtccatctgttccattaaggttcaaaactccacaagaattgtggacaggtcaagtaccaaagctagatcatttaagggtctttggttgctctgcatatgcacactacagacaagacaaactacagcctagagctctaaagtgtatgttcctaggctaccctaatgaagtgaaggggtacaagttatggtgcctagaactagggcataagaaatgcattattaatagggatgctgtgtttaatgaggaggaaatggctatgaagaaaagtgtcaaggactctacaccagaaaccagcaacctaagagaacaaattgagatggacacaatctcatctagacttattgagaacacagagatcactgaggaagataacactgatagagacacacaaactagtctagatacttaccaacttgctcgagacagagaaagaagaaccacaaaagctccagataagtatggctatgctgaattcactgc

SEQ ID NO: 226416 - DNA, 3329 bp, Cannabis indica
ctgaggatgcagaagaggcaccaggtgagtgaaaaaataatgtaggatcagtagtgtgtacctgagagtgtgttgatgttgaaggttctcttccaggtatgctcgaggatggaggagaggctgctgaaatatgacttgtgggcagagaaaaagtgggaaaaacagaccaggaggagctttgtataacaactggttttttctgaggcatagttattgagaaatccagatttgaaagggaattcaagttcattgaataccacatttctggaaatgtaaactttgcccgtgagagttaggcatttataacctttgtgagattcactatagcctaaattgacacatttgagagagtgaaactaaaacttatgagtttgataaggcctaatgcatggaaaacatgcaactccaaacacttttagaaaggcacaatcttgtttcttagaatatagacactcaaatggagacttatggttgaggataggtgttggtagtctattgataagatagactgaagtttggaaagcctcccaccaatacttgagaggcatttgagcttgggccaaaagagtgagacccatctcaacaatatgcctatgttttctttcagctctgccattgagcagaggtgtgaggacataggtgatgaaagtctattccaagggttgtgacagtgtcttgaagtgcttggtattctcctcccaagtcagtcctaagtcttttaattttcctttcaaattgtgtttcagtaaagtttttaaattgtaggaaagcagtactagcctcggccttggttttgagtggataaatccaagtataataggtgcaatcatctatgaagtgtatataaaatctgaaactattattagataccacgggtgaaggtccccatagatcactgtgtataaggtcaaggatgttagaggctttgctattagaattcttaaaaggaagtgcatgagatttgccaaattgacaagcatcatagaaatggatcatttcatttttggaaactttgacatgacatgaacttaggacttgactcaacactttcggtgatgggtggcctagtctcctatgccacacatcacctttagaaactagagacttatcagtatgtaactgatttacaccaggtctggttttaacagcaacaccagagaaaatttgacccttagttttattagactcgatagacttagagaacttgtaggttggttgaagctgtggtggttggagttggtagagtccatccttaagcatccttgaagaagaactttccttgttagcctgtccttcacaacacaacaatcagaatgaaactcaatgagaacattgttatcatgcgtgagtttggacatacttaataaattctttgcaatttcaggaacaagaagcatttcttttagcaataattttttaccagtattagttaatatcacaccactaccagatgagaaatggtaagttgagtaccattaccaactatcactttctccttaccaccatagtcctgtttttgtgtcattaaggcaacatctgaggtaatgtgattgcttgctctgctgtcagcaaaccaagcttcactctcgagaattttaggagttgcgacaaatgcagagggattgttgtttttggtctgagttccactgtttggatcaatgcccatgtaatgttcatcaaaacggttgtagcaaacagccgctgaatgtccatacttgccacatacctgacaagttggtttcgagttgtttattctaccgttgaacctgccccttcctcttgcacgatttcctcctctgttggagtgtcgacctccataatgctgagaatatggcttgatcctctgccttgtccactgccttgaggtttttgagcaaagtttgcttgcggttcagacaagttcgtactgatttttttattcgatgagagagcctggagcctttcgattttactatcgaagctcaaaagcagttcctgaagctcttgccaggaagttttaggcctcgcttcaatctgcagaacaatagtgaggtaatgacatcgaggccagagagaacattcgttaccagttgcgattcggggtatggctcccctgccaaggctagtaggtcagcccatttcttcttctgcctcaaatattcagtcatgggagtgtttccttttcttgttacttgaatcaaagttcgtgtctcatccatcttagatttagaatgagcaccatacagctgttcgaaagcctgccacaatccagctgcagttgcaacccccatcacctcagttgctatagtctctgccatagagctatacaaccaccccataagaaattggtcatttatgatccagttttcgtaggcaggattgacaatctgtgagtcagcaccatcaatgctctccataacggttcctgcatcaataaattcagggggacaaatgttagtaccagtgagatagccatctaatctgtggcctctaactatggtggaaacgatagttttccataggttgtagttgtgcctatcgagctttaaggaaaaaggatggtttagggtactgaaatggtgagatactagattttggagctcagtattgttgaggcttgcaccagaaacgtttgatgcagcagtagtgggtgatggttgtgaacggttggtgtttccagggttttgaggatcgttagacatcgtgttaaggcacaataaatgctctgataccaagttgaaattcagagaagattgatattgtattgctcagctcaataaatgctgagatattgatttccttatatagagttcagggccataggccgaatacaatgaatgagatgaaattgctctgtacagctggctggaaatcaaaacagaaaaagagaatattctaaatacaatgatttcctaatcattacaaatcaaacggtacaattccacaaaatcagcaatgcactgaatgatgacacctggcagaggatgaggaccacgggataacagaattgatcatgacagattccttaatttctttacaggacattttattttacttttattgtttattttgtttgtaagggaagtgctgacattttaaattaatgtaagtttgtaccaatgagattttgagccttttcagggaaggaaaaaattcacacacaaaaaattgaactaacttcatccccttaacatagatgaagctttgagaagcagcccaactgtgacgtatctgaccttgggcatatataccctaaaagataatcaatgttagaactcaagcaaataaactcatcaatcttattattcatccatgcggccacctcaacaccatcatcagttgtagtagtg

SEQ ID NO: 226417 - DNA, 1128 bp, Cannabis indica
gttataaccactcaaaattagcctcctttttcttaggaaaaagtaaaataataaacctttattttattaatatcattatatattcatgttacaaacacacgaaacgtataatttacattttactatcgtcgtctccctttaataatttgcaagtctttttctctacgcaaactttaatgtttatacagcctacagccaaaacatttccctttatttcccctttgaaaatgttttttttttctttcttaatgttgattaactttggaattctatacagttataacatgagtactgatgtgcactgtgcacaactacacataattagcttgctcatataagactgtcaaatgtgcacagtgcacaccatggaactagacattattttataactgcacaaatttatgggtaagccaaattaaaaggtaagggttctatttaaaaaggaggagtatcatccctctaaatttttgaaaatttcctaatagtttatagtagcgaaaatagagttcctgatattccaatttaccacgcaagttcaaaaaactcaaacgtatttttgacactttaaactattcaaaaattttcaaaaaattacaagaatgatgttgtgagaataactaacaccaccatgaaaaaagattaaaaaacaaaatattttagcatttgttttcaagtgtggaggttgattaagagattgtaataagagcttgacgttaatactcctctattaatctatgactcagtaaatttttagttgttttagtttataacactttttttttctaattttaaaataattatattaggtggaccaatataaatatactacgtgtataaaaatatacacataagcatttaaatgagatttaagaatgattaagtgcaagtgaaataataattaaaagaatttaggtgtcaaaaattctaaaaggattgagttattgttaaataattacaatttttttttctctttttgtaataaaattatcatctttattaattgcaattcatagtgattacgtaacgcttgcaccactgtaagattatctgatccttctaattttttttttcttaaatacgaaaaatataaaaattgtattagaatggagtattttttttttatttttt

SEQ ID NO: 226418 - DNA, 2058 bp, Cannabis indica
attggctttgctttcgttactttaagaatttctttttttgtttagaaaagattgcatgggatcataatggtggcaaatatattaatatatatacatacatttatcaaattaataaacatcatattctagttctaaatctgacaattttgggctagagaggccttttaacatgtccctaatttaatccaattgtacttgtacaaatagatatgatgcggtggatacttgttcaaatggcctttcttggccaaactgatgcccttggccggccagcccttcgctaaacaattgtccttggttggtcagcccttagctaggtagctggttttggacgaccaactctaagctgggcagttggatatggccggccagtcctaggctggttactttccattggccggccaaactggacagattctcctagccggcggttcggtggatccacctacttgaaattattgttcagtggtggaacaaagtcacttgggatctcgctcctcgaattattgtggtcctatgcgttttcacttatcccaggatctagtatgtcaaaaataggccttagaacgacatgttctcaaatattctgggaggagcatcactatgctggttgggccaaagactggtctattggtgatgcctctactctaggaatgtttggttgtcccccaacacatactggtgctagggattggctactcatgctgtatgatctatttggcaagatatgaccgtcttcaggcagggaaaggtttgtccacgtgctcgagggacctagttggacagtttgtccaatgtctacctgcctttagaccctacttaacctgtcgatgagccttccttgtaagggttctcttataaaatcatggctccttccgacagttctctcattgaaccaccttataatcaggtcactggcttccatgttacggcggttcagctctgcctaatgggcccggaggatggtctcttagtcatccatccatcttaagaattcacatttctgttgggcgaaagcatcacaaccaacagcgcgcggttcttctatctgggtgacctggccagctcaatatcctctcctaggtccacatgaggttcgccaatagctggttcgccaattcctggtcatatttctcctgcataatattggggaacagtcccagttgtgctccgtggaggctatttcgtgttgacaagatcttttgttcaaggtgtttttggtggatctgttctgggcggcaaaggcttttcattaagattcactaggttagtaggatcaataggattagtggtattggttgaatttgttgggtttgcgaaattggcaggattgaaggtgttagtcagattagtaggaccttacgtggtgggaggaacacgaacatcgggattagccatcataggatcttgaggaagacccgaggaagtggatgtagtggttctcctagttacaaccatgatgattgattcaaaggacaaacaatgctctcagttaaagtaccaaatattaaccttagatttggtcaactgacagtagagccttatataattattattgataatcaccacatgtaaagtgtaaaagcaaatgataaaattgacacaacgatctatagaggttcggcccccttatttggcaggtaatgacctactctcttattagttgtattaatcctagagataatactacgtagattacatgtttttaccttgtaatttctagctatgactctctttgaatgttacaatggtgagaactgatggatgaaaaattctgaacaagtgagatgagaaaataaactaagtgtcaataaagaggaagtggcgtgagtgagagggagtgagagagctctagggcttaagagaccagaattcatgtcctttttcactttgccaaatcctctttatataattttaggacttacaaaagatttgtattcaaataagtaaatattccttcaaaatagggaaataaactttttattgatgtatttaagttataaaaataagctaattgatatctttaaaagaatacgtagatatttgtgaattgtaatt

SEQ ID NO: 226419 - DNA, 1388 bp, Cannabis indica
tttatttttattttttaaattcaaaactttttattaatagttgttgttcaagattacataaagaaagtcacgagtaatattctcactcctaataacatgattaacaacataatatgaaactctagcaagataatgagtaacacaattagtagaccgcttaaaagaaaaaataacagaaacaattgataaccccagcaacaaatccttacaatcattaataacactcccaaaataagaaagcattaagagtggacttatgagcaattgcacaactgtaagactatcgatttcaatgatcatacaaggccaagactcgttttcatccaactcaaagcctctttcaccctcaaagctttgaccatttttgatgcaactaacccacacccaaaatagctcttggattgtcacgagaaatgcacggaaagctgtgatgaccgacctctgaaaaataatgttgcatcgacattaatttttaccacccctttcgctagtttagaccaagtatgaccccatctccagcaaataagaatgcagcaacagggatgatagaccagtcttgagcttgcatccaatattccaaagaagagaagacaagtgaaagaacactagagacagtcgacacttttttattccacaccagttcgtttcgaactttcaaaaaaaacccaacatgccatagaaattaattttctattcttctcttaacacggtcgccaactactatccaaccatctacaaaacgaattatccagagaagtagacacatctacaccagtctgttccaacaagctctagcaaaagaacactctactagacagtgatttatcgactccctctcatattagcactgaggaaggagagaatctataggaacatgtagggccaactctggacataggcgggctaggcgtgtgcttagggcctacctagcatagaggcccaaaaaagatctctcttttaaaattacacatttttttgttgattttaaaaaataccatattttactctaaataagagtcaaaaaatattttttttctatgacctactaaatttcaagaccaaccttgagattatgtttaagacgcagttgagttttgataggaagacaatctaatgcagcacaccagagcaagtctttaactttcgaaggaacttggagcttccaaattgctttgtctcctgtatcgtctaatagttggtgtgctataactagttctcttgtctggatggttgtagttattctttgtacaagcctttttctttctcatttcgttataataatagtgtttatcactcttcttccttgcgacttttgcctataaggctatttattgtaatcaatttggtttaatcgttctataattatctcattgtgtcacttgtttgac

SEQ ID NO: 226420 - DNA, 2531 bp, Cannabis indica
accctcaaaaaggcctcaagagaactataaactttacaatgagttgaaccaagcctcttcactactagttacatttttaggccatatacaagttattctattcttaatgacatctttaactttgcacacaactctatcacaatttcctatctctccattccacaaaatattgtttcgggtgcaccaaatcaagtaaatcaaagcagttacagcagcaataaacaccttctttttgaagccattgtaccttgccttagacaaccatctgcatatggctttcagggatacagccgtggcctcccaatgcaaccaccctttgattttgagcaagcagtatttcgagaacttacagcagaagaagatgtgctcaatggtttaactgctgtccttgcacagtaggcataagtcttcttctattactccaaatctcattagtttttccttcattttcaacctcccaagcatcaccaaccaccaataaagctatgcttaggaatgttaaaccgattccaaacaatcttgtcccgatgtactctaactggctgatcatgtagagctctatatccagtagcaactagataactgccttgagccgtggttatggaaccaatattcttcatttgttctttcaccattaccactttcttccaataccaactagcttggtctgtaggttgatatgtccaccaatcctcatccttgatgtagacattatggacccatttaacccataggttatcttccttcttggcaatagcccaaacatatttgaaaagggccgctttgttccaatccgagatacatctaaatcaatcctcttgaacattttgtttggctaaccgatgcccaagcaacagcaggtacacctgttagagtatattgtccattccatagaaagctacgacaaatagactcaatttcacttacaatttttttaggcagcaacatcacttggcaccaatatgaatgaatggccatgagaactgagttgataagtactacacggccagcaaaggataaattcctcgagctccaagttttgatccgagctatcatcttttccaccaacaacttgcattccactgaagaaatcctttttgcacaaataggcacacccaagtatttgaaaggcaagctctgcttttggaacccagagacattaagcaccctttgaacttctacctctgacatgttgctgcaatatactgctgatttagaagggttaggaaccaagccagaggtattggagaagagtttaagcccctgcaataagtagtaaatactcttgaagtcaccattacaaaataataagacatcgtcagcaaaacttaggtggttcagttcaaggcctccacatctttcatggaatataaactctgacttcttcccaatcctcctcatgattcgggaaaggtattccattccgagtacaaataaaagtagtgacattggatctccctgcctcaatcctcgcttagcttcgaaaaaaccatgtaatgatccatttatcattaatgaaaaccgaggagttctgacacaagtcattaccagtttgatgaagtctggtggaaactggaatccatgtagcatctcttctataaaatcccactcaatggtgtcatatgctttctggaggtctaacttaatcatacaattcgctttttttgttctccctccatagtgcctgatgaggtcttggcaaatcatgatgttgtagccaataaatcttccatgtataaagcccccttgattttgtgccactaattcaggtagtatccttttaagtcgagtgcatattaactttgtggccgccttatagagcacattacaacacgcaattggcctataatccccctccatgctaggacacttacatttcgacaccaaagtaagaaccgtggaatcatggacaataatagtcttacctcccattgaagttggatgggaaaagaggatggaatctagaagaccaaaaaaaaaggacggaagttagctgggaaaagaaacaacataacaaatgcagtaaaatgtggggagctggggcacaacaagagaacatataatagaagacatcgaaaatgaaaagaagcagaataactaaaaaacaacattggaacaacacgaaagaaaactgaacatatattggagtataggatacactacaacatttttcttaattagtggcggacaaaatccgctgctaataatggtactattagcggcgaaaaatggggtccgccactaattgggggtttttgtttttattttttttaaatgttcctataaaaggagagggttagtttttaggctaattaggatttttgccccctgaactttgacatgtaccaaatcatgcccctgaacttttaaggttgttgaaaatgccccctgaactattgagattgttagatttaaggacttttgtctaatttcattcaattttactatttcagtgattgcttatgtactaaaccatgctccccagattttgatatctaccaaatcatgcctcttgaactttaatatgtact

SEQ ID NO: 226421 - DNA, 1962 bp, Cannabis indica
ccaaaactcacatgattagatttaagtgtgtctatatataggttggattcgtaaatttgatagaaagattttttatatccgcactttatgaaactttacgaaaatatggtgtgtgaatcgatttaccataattaaaatggaaagcaatcaatttcttattacaaccatctttaaaatataaaataaataataataaagttaaaaatatggttaaaaatatttataaaatttgaaatttaaatttctttatataaaatatttacttaatttttttaattttaatttaaaattaaactaataaatttaaaaatataattaaaaatatttataatattttaagtattttaaatttaaattaaaagttctttatataaaatatctacataatttttattttttaaatatatatataataatattataaaattaataaataatattttgttaattgatatgatattcgtttaaagttaatataagaactaaaaaaaaaaaaaaaatcattaaaccaagaatttttttccacacttcatattaaaccaacaattttgttaaatagacacattttatatagaatagatatgtataaataattagtaaaaatgaagtgaagcactttatactacgtatttaaattaataatattgttttaatttttaatatgatcgatctgaccaggacactgatataatgtggctacgagacccattcgagagatttttcaaagaagcagatttccaaatagcatgcgattacttcaaaggaaatccttacgacagaaaaaacaatcccaacggagggtttacatacgtgagatcaaacacaagatccattaatttttacaagttttggtacttttcgaggtgggctcatccaggtctacacgaccaagatgttctcaacttgataaagtttgatcccttcataaacagaattgggctcaaaatggtatttttagacactgcttactttggtgggttttgtcagcccagtagagatttagaccttgtttgtactatgcatgcaaattgttgtgtgggtctccacaacaaaatcaatgatcttaccattttgcttgaccaagattggaaaacatatatgcaacaacacaaacaacgaactctcaattctagtacaaattctactactactcatgcttcatggactgtacctcaaaattgcaggtacgtatatttatatttattgagtccataccctttttactttttttttttaatgtagtcgatagtgaaaattgattacatgattcgtcctgaaatgatatcaatattagagtacatataattattgaccatattaaaattatcaagcatattcacgacgaactgtactattctcttaaaaaacaaacactagttacttggactttcttaaccggaaatatctagtttatatataatatatagagtaaatattaatttaaatcctatattttgtaaaaattatggattgaattatttattttattaaatgataattaagataatatatattttaaaatagtacaaaatagtacgatagactaatttttcttttaaaataaaatttaataataatttaatgacacaaaaagattataatgaatttaattttctacacatttttatatcatatagacattagttttaagttggttatattaaaaaattaaattataaaattaaaccaataatactatttcgtacggttttaaaaaaaaatatataatttaatttatcccaattaataaattttacaaaataaaaaatctaataattatcctaatatataagcttttgttgagttaaagagatggacaagctaggcagtcggccacgtccatatgagaaatatttaggaatttatatatatattttttgaatatttacatatatacatatatatgagtcaatcaatactgtaataacttaatcttttggattggatatatagatacggtgt

SEQ ID NO: 226422 - DNA, 2399 bp, Cannabis indica
gtggttgtttttctaatatttttagttgttttatagtttatttatagttgatttatagttgctgtaagattggtttctctttattttttagtttgttttttttttaagtttttgatgagcaaataaagtgtattcttgtaattttaaaactttacaagcgtatttttgtaattaaagattttatgctgtaaaattgtaaataaaacataaaagatgggtgattaatattaatcgtgaatttatgatgcatacatccgtaaacagtgcatgaaccttcttgaacctggataacttctcgtctaaccgaaagacatgctttgtcaaaccatgaactgttaaagtcaacgagcaatatgagacaaattaattacccccaaaaatttatacaataaaactataattttctcaaacagtacactcaaagagctagagctttaacttgtatcgctgaatactacacgctaactcattaacatatcaagaatagtccccaaacatctacaaaataaaataagataaaaaaataaatcaatccctatcgatgatattaaaacataatataagaaattctcaatagttagaagataacgactctcaaacaaataatatttaaattaaacttatcgaaaaaaatttctctaacagttggccctcctcaaaaccgataaccacaaattaacaatacataaaactattaccatacaatttaatgaaaaatattaatttgaaatggtaagataattcatattttaatgtcaagacttgaaacacttatttgtcggattagacaagtcgtaatttgaagaaggtatacaaaataaaatacttctcatacacattaatcatatcacaaatctaccttaaacaattaggggcaagccataaaaatagcataaaagccaaaaaaggcatgaaaaccatcaaaaaatggtacaaaaaaactagcatagtcatcaaacataaaatctatttttaaagatctttttgtaccttaaaaaaaattaattgagttttaaattataaaacaataaaacagtcaccatacatatactagccaccaaaaatggtactattgttaacaagagagaaagagtgaaaatgatctgatttacagagcaattgctcaagagtttaaatacagctgaggctatgtacataaagcaatagaataactaactaactaacagaaaagtagttacaatgagctgtacaataaacaaaataacaacccttaactaacacccccctcaaactgagctgggctaaggaagccagactcagtttgcgacgaagacagagaaaacgagtggaggcaagagccttagttaagagatcagcaatttgatcgagagctggagtgtgacgaacttgaagtttctgctgcataacacgttctcgcacaaagtaaagatctaattcaatatgttttgtacgagaatgaagaacgagattggcagataagagcacagtactctgattgtcacaccaaattgtaggagttggcagctgggaaaaaccaatctcagccagtaaagattgaagccaaatgacttcagcagttgtatgagccaggctgcgatactcagcctcagtgctggatcgagaaacagtcttctgtttctttgaactccaagaaatgagattggagcctaagtaaatgcagaaccccgttgtggaacgacgatcatcgggatcagacgcccaatcagcatcacagaaacccgtgagaacaagattggagcaaggccaaatatgaagaccataatcaaggttcctttgagataacgaaggatacgcttgactactttccaatgaggttcacgaggttggtgcatatactgagaaactttgttgacagcaaaggatatttctggtctggtaatcgtggcatactgcagtgcaccgactaaacttctatagagatgaggatcaggaaataaatctccatcataggcacttagtttatctccaccaaccataggaataggaagtagattagcattttccatcttggctcgacaaagaagatcaatgatgtatttttgttgactgagatgtaaacctgtagtgcagtgatgaatctcaaccccaaggaagtaatcaataggccctaaatctttcaaggcaaaggaggaatggagctgagatattaaagctgatatatgtactttagaacagccagtaacaagaatatcatctacgtatacgagtacaaatatcgtgtgagaagatgtaatcttgaagaacagagactgatctgctttggaacaaagaaagccaagatgtgaaagggcagatttgagcttgtcaaaccaggcacggggggcctgtcttaaaccatatagtgccttctgtaatttgcagaccatatgaggatgttctttgtcaacataaccagg

SEQ ID NO: 226423 - DNA, 1462 bp, Cannabis indica
ctttcattgattagtaaataagattgtattagaaatgagttttattaagggcataaaaaatacaatatacatgtcgattaaccttttaggtttcctaaatataatcacattaatagatttaggatatacatgtttattaacaataaaccaataaaataatatttaaaggtttaattaagataagatatttatttattcaaaatattaaataatacatgttatatgttgactttaaatatagccaaccgacgcggagtctgactaggattgtagcttatgacttccatgtgtggaacgataataaatgtaaagagacacacaaatttaatagaggtttgacccctttttttaggtaatgatctacttcccttttagttgtattcactcttaagataataccaagtatattacaagctaagaccttgtaatttctagctaggctctcttgagtattacaataaaatttgcaggtgaaaagtatgaaaagagagaggacttatagctatagagcctatgagcgagatttcatgtatgattgagacttaaaacgtgagtgtgagacaaaacttcagttttgagtgtgacttcttgcccttcatatagtagtagggcatacaagctgcacatatagatattcctaggaaaatagagaggttataacatatatttgaattccaaagtacataatacctaaagaatagggttgttatttgtttatggagagtctttatctttatggtcattttgaactaatccagagtcgtaggcatgttgaaggctagttggaaggcttgtgagaaaagtacaagtactagtgtgttcttgcacctttggccagctagccttgctgaaggctgcctagtttgtggaagctggcactcatggtcagccaactataggtccgattagggctttgttggtaggtatatggatccatgttgacttgtatgtactgtgcaacatataatttctaaggctaaaaagctactcgacactaatcctgaaaggttagtgctgagttgtcttctacatatttggattccgaattcaaagactatttgctggaagaaaggatcttatcccaacttatagcacctagaacacctcagtagaatgattttatagagagagaaaatcggaccttgttagacatggtcagatcgatgatgagctacattttgataagctactcatcactgccattgacttacaaagaagtaatggaagaccctgactcagacaagtggaataatgccatggattcagaaatggattccatgcgcaccaacaaagtatgggaatataaaaatgcacctgaggacattgtacccattgggtgtaagtggattttcaagaagaagaaaaatattgaagggaagctagagacctttaaagctaggcgtgtagccaaaggctacacacagcgagaaggtatctgttggaatttattttaccaggatct

SEQ ID NO: 226424 - DNA, 1362 bp, Cannabis indica
tttttttttaataatttttttagatgggtggacactcactcttggctctttatgagtacgcctcacccatttaggtccccaatttcaaaatttttgtatttaaatagtcaatttcttaaaaacttagaattacttttactttttcatgcatttttttttattaaaaaaaatagagatggcaaaatctctaatctatacttttagttaggtcccaaattcaaactacttttattagtttaatttttcaaactaattattatttttttgtaagatttttctaactaattgttaattaatatgcatgtcaattaaattaatattcagcattgaaaattaactttgattgtcctcaaaataaataactttgattatttgggacagaagatagggtatatatagtagttgtcaattattgctatacttactcaattattataattttctcaattatcataattaaatacaaataatacatttttatttaagaagacagaagtgggctataatattagttgaaaatatagtattatatgagaaatggaatatcctttacatggatatggtagtgtgagtatcgtgtagcatatgaaatagtatattcctgtcggctacaaacgcggtacgtaactcccaccaaaacaaacatgtgcattattcatttgaattttgagcaccaaatctcttataatcatattcatgtccttatatttttttcaaattttatttcatgacggtattcgttgtagctataatatcttttttgtaaatttttaaaattttttaaataatttatagtgaattaatgtattgactttatttctcacacttatgtagattacaaaaattttcttattccttcatcatctccaatccctcctgcagctaggaaaactccctacaatactggctcaaattaaattgtgatgttaaagtaggaggggaacatatatgtgttgcagttgttgctagatactacccgaataaggtggcatgggtgtatacggtcaagctggacttttttgatgctttttgtggtgaagctgcaacggtttgtttggctcttgaacagtggcggactagcacttactaggaggggggccgatgtacatattattttttaaaaaaaaaaaaaagaaaagcgattctaaagttgtgatcaattctctcaatgacttagggtgtatttttttttaagatctagacatttgagtttaaatgtacatctaaataataagatatcaactctcaatctgaataataaaatatttagactgtctgtttttttttatatctgaaatatatattagtatttttaatttatataagattgacaaattcattaaattatattttattttaaaa

SEQ ID NO: 226425 - DNA, 2074 bp, Cannabis indica
ttcttcttctttatttggttatttcttaagctctatttattttataatcggtttcttaaaaaaaaatcggtaaaaatttggtgctttcttgagatcttgaagaaaaaaatttcaccaacgttatcatttagaataatggtggctactaaaaaaccaccaggaaatctgctgcttatgaggatgaagaagactctgaaatggatgatgttaacgggcctcctcaagtacacactcatgcgggtactgtaggatcctaaagtaatacgactctagaaaaagctcatagatacccaaaggaggttaatggagcagaaagaagcctcccgacaaatgcaagaaactctagcacggctacaagctcaagctaacctcctcaacgaaaaccctcatgttaagaatttaaccatcctagagttggaccctctaccctagaaattataaaggaaaaggtgtaatgggtgcccctttgcaaaagcccacgaacaatgctccacggaacaacagaaacacagttaacccacccagtagaaataatttaagggatgatcgagccctagggctaggacaaccaatcaatctgcatggcagagtcgtgcagaacgataggttgggtatttaggtacaaaggcccaatgtttagggatggaaaaactaccccaacaattctgttaaccagagcatacctgtggaagatctagacccaaaaaacaaatgttaacgacgggcctaagggaccgtttgaatgcaaaataaggaaaaaagtaagaggtgaaaaggctagacctcatagaggagatctctagaacaatatcaacgacaaaatccatggatgtgagctcccagatgatcataccaggcggctaaaagatcacatagcctcattaacaaaactcacagattgtttggcctggaagaaaagtggagtcgtatctgactcagaagatgaggatccagaactatgtgtgaagagaatcattgaggcaaaaattgccaaaaaaattctgaatatcataaatggagtcgtacggaggcaaaatggaccccagggcccacctttccaagtacaatcggttgacgtaagtggcacaagtcagtgaagatggcaaatgtctgtatttttcattgacattgtccaagtcgatgactggtggaaaatattatcgtctggctctatccagaactgaaatgatctgttgtgcatgttctagaagcagtttgtagtcgtaaaggactttgatggtaatgtatactcagaattcagactgacctactaatgatcatcattgtgatatgaataaatctttcatggtaaacaatacgttaatgaaagatgtaattacatatcggtccaataattcataatcaaattatacacaacacatttactacatgtttatctatatatgtgatctgaatcataatcatacacactatagtatattgtatagtaaactgtacttagtagttccatattaaatattctttttacttaatacaccactgactagttttattcatatcgtataatcttaattctcttgtgcatccttacaagattataccttctccatacaaataagaaatgtttagatatttattaattatacttttataattaatgtattcatttatcttataattgtatttcatatataatatattatcaattaattacttacttttagggcataaatcccaataaatacatgtattaatagaatttacttcactatggatgaatatttaagatatctaaactcctctaacatgcatatataatctacacatctgactgcagtatatttattcacagaacctacttcactacgaatgagtatttaagatattcaaactcatccaacatgcctattcataattaattaataaattaaaagttagaaaaattatacctctagctagctagcaaaccaatcaaaacttgcaaataatcgtctcctcctccaattaagatccttgatgcttaactttaaaacttacaaacgaatccaattattaaaaaagttaaagaaataaaattgtactagttactaaattcatgtaactagtaattagg

SEQ ID NO: 226426 - DNA, 2712 bp, Cannabis indica
tactcggagaaataccatatctccgatttggaaatcaatgttccaccgctttggatttgcataactcttttgtctgctctgagctgcgagcattcgcgctctgattttatcaactgcctcatttgttctgtgaacagcttcagggcctaagaactttctttcactcacttcatcccagtgaataggtgatttgcatttttttccatataaaagttcataaggagctatcctgattgttgcttgatagttgttgttgtatgagaactcgatcaggggaaggtactttacccatgatccttcaaaatttaacacacatgcccaaagcatgtcttctaagatttgaatggtcctttcagactgtccatccatctgaggatgaaatgttgtgctaaatttcaattgagtacccatagctcgatgtaagcactcccagaatctcaatgtgaacatcagatccctattagaaacaatggactttgggacaccatagagacgaactatttctctaacatacaagtcagcatactgatcaatagagaaattcatttgaacaagtagaaagtgcgctggctttgtaaacctgtcagctatgatcgacacagagtcatactatcccgtagtcttaggcaatccaaccacgaagtccatagcaatgtcttcccatttccatttcggaaggttcaatggctgcagcaaccctgcaggcctttggtgttcaactttcagttgctgacaagttagacaccttgcaacatattcaacaatatcatttttcatgtctggccaccagaacatggccttcaggtcttggtgcatctttgttgttcctgggtgaaccgaggaaggagtcgtatcagactcgtttaagatttctcttttaatgttatcatctataagcacacaatcactattcataaaccgtaggtttccattgtgggtcatagttgcttacagacctcatccttgggtagcttttagttctagttgtgcccgtactctctcgatcattacggcgatgatttctatcccctcctcatatagatcgactatgatctcaagatcttgtatgtctcgagctagaacttgcctcgtcacgtacatgccttttcctttgggaacgagttggtacatgtcccctactggcgtttgtatacgccccttccctatcagtgtgagaaggacgttgacgatgtcttaggggcgatccacttgtcctaggttgagtcccaggatctctcttgttaccacgagggatttcttgttccccagtccagggttgccttctattcgcatttctgcgagaaggctctggtaaatcacggttttcattccattgggttgtaaatcctcaagatctccgtggcacttcttggcgaggtgcctgatcatctggttgttcatcttcatgtgcatccccaggttgctcctcctaagtgttcttggggttttcctgatctatttcttgcctcctggtttgtgagccgcgaggtctgcctcccattccaacttagcgtttcattggtttgcctcctccaaacgtcaccggagttgatgattttccaactcaaccaacggtacgtatcttgtggtgtcataggcaccctcactcacaggcgtagaaccgccagcctttgtgttgggttcttcattcccaattttagggttttagtcaccattatgttggcttctccttgaacgtgtcaattgtgttaaacgcgtcgttcgtgaattgggtggcctccgtgagcccattggctctcttccaagatgatgagtagtctcttcaggatgagtgttgttgttttccccaattatcagccatggagaaagaatttctcctttggttaggagggattaaactgagcttttatcacgtaagctctcaatgaaagcaccaaattgttaacgcagatttttgttaacgataatgagcctatttttgtaatatatttgacacaaaatttataaaacattaaatagaaatagtagaaacaaatttaacaccaggttttttacgtggttttgtagttaactctacatagtccacgagtcaatcttattcagatttttctgatacagaacaagggttccttacaatcagtgtattcttttttctctcaaggatttttcgtccccctttttttttcgtacattctatccatatttttaacaacataggttggcagttaattacattcaaatttgaatcccacaacgatattttcccgaaattatgggatataattatgttccacgtaaataaatgcagttattatttgaaaatcacgcagttgtgatttaaactacttttaaagggtcaacgctgacttaaattaagacacactgtaaaatgtctcactgaggtgtcctgccttgtacgtgaacaacttgatttattcataagtcttccagcaatggcatgagcaccagtgtattgagcaaatttaagaactgctctttgaccataaggccttgcagactagacaatcatgtcctgggggttctcaatagcaacaataatcctggcatcgagctggagtttaccaggagtatgccttcctatagtgagatggatttctctctatccattatctatgtcctccttgggattatgccttctgatgccaaaaggtttcttgtcaatacgcaaatttatagtttgtatgtaacgccctgtccaacagggacgccacgtgtgtgcaatttaataaa

SEQ ID NO: 226427 - DNA, 1795 bp, Cannabis indica
atatattatatatatgttttaaattaaacttaagaaatagtacgaacaaaagcttcctccttcagtgtgacgaaactctcacccttagtatcaaactttcttcgattttcaatcagaaaacctagtgattcaagcttcggtagtagcacgatagtttatcattgaagagggagagcttaaggtaagaattggtttcgttttaagttaaaaataattgattttatatgttgactttgtgatttagagtagttatagggattttgatttcatgaatctgttttttggtagctatgagattagtttcgatgtttacttgttgaatttgaggtggttttaaaactcaaactcgagttttaatggcatttctcatttaagggctcatttttaatttctgttacgttgagacggtagtatatatggtatatgtgtgttctttgaagtttggaataatttggatagacttcggtggtgttttggagagtgtaaaatttgggattctcgtcccctactacgaaatggtccaccgtttggtacaaacggtcaaccgttttgtgccaagaaacggttaactattttaccaaatggtttgccatttctagtaatttcgggaagatcaaaaatcgtattttggtcataatttttcactcgggtatttattttagacgttctatataccatttcaaagcttgcaatgagctttacaacatggtgtatattttagagccaaaatataagttttattttactgtatctataccgcggtgtttagagaaaaacctagattgtcttatgtagatattgagaagtattttcggatagacacttattggttaaccgttgttgcgacataggaccgagatcatcaggaatgtttctccacttaggttggccgatatgcatgattctggattaaaggtaagaaaagtatgttgtactgaatagtatgttatgttgcaaagcaattactattgttgagaattgtttgatattgagattaagacacggctactatggttacataatgaaaagattgcctaattaggaaatgataaaattgtcttattaggcaacgatgtatagatattctgagtaggcaatgataaaaatattgtcttattaggcaacgatttaaagattgtctgattaggcaatgtgatatacaagctcacctgattaggtggtgcaatatatggatgataggctatgacatgagcttgcttgattagacaatgtgatatatggataccgggagaggtattcgggttattcctgtgagacaaccatgataagtcaagactataaattgaagctgttattaggtttttcacttgtcggcaatcctgtttaggagacatgaacaaaagaaaatattaaacaaatagagttacaaacaacaaaataaacaaataaaatattaaaaataacacccatatttaggagacatgaacaaaaagaaaatattaatacaaagagagacatatgatgaaaataaaaaatcaagagaagatatatatatatatatatttatatatatggaagaggtttcaatggttacatcaaatatgtaactattatggttacatatatttttagccttttgatcactattgaatggttgtgattaatttaaaaattaaaaataaataaataaataaagggatattggcggctaaaccacctgaactttacgttttgtaacacttaaccacaaaaactgaatttttggcggctaaactacctaaaccctagttccgttttgctctgcacacctccgtccaaaatcacagttaagtgc

SEQ ID NO: 226428 - DNA, 2346 bp, Cannabis indica
tatttattttcaaatttgaaatgtttttttttttggtaattcaataaatataaaacttgtattattcatcggttacacatgtatgaaaaataaacaccaatgctaatatttttggtaattcaataagttttttttctgatcataggaactgcctttttttcttcaaccgaagattaaaaatctagttaaatgaagttgtaatttttcaggctatactgcagaaaagagagtccagaaagttctaagctggtaaaagccaatgcaaacagacaggtacaattacaagcaaaccatgcaaattatgtcaagcaaggaaccttaaaaattaaaattgtgatgtatcgagcgattttgattattgcataatggtattgctatatattgccaattgggatttggcaacttttctaactaaaatgtagctatgccttgaaatgaaataacttcccacagaactcattttaatatccattgccaccaatagacaatgcaacatagaattatgctgatcattactttaaattttgtcctacacctaaccaattgcatgaatgagttgaaacccaaaaacaacacttgatttgagtaatctggtgctaagacaccaacctctttttttctttttaaattagagtatgcattgctcttttcttgacaatgacataaaacaaatcaaagttgatacaatataatacaagtatagtttgttggaatatgatacaatatttgtttaatgtatatatatatattccatgtaacagtagttactgagagaaaaagaaaacaaatgatgtaaaagtaaaataatatactaagaacaacacacacttaatacagacattgttaattttttcccagagaagaaggtctattagttgtctaacacaataatgaaaataaaaactgacactttcttctgcttagcactataacattatttcaagggattattgaagaccttgtgtacatatatagagagagtgagagtcatgatgagctaaaatagaggagtctttgggttttgaaaagagagactaaattaattaagtagtgctgagtgtacacccatatgacataattaattaaatcccattttatgatacgacatgtagggtcgattgctcataattttgtgatatttttagtacaactaatcttggctcttcaagctttgtcgaccacttatgtcaacttagcattgcattctgtaatatctgctaattcatagggtatttttgtaatttttttaccgctgagagtatttttttgtcattttacatatttatgggtttaaatatgtatgagattttcgtgatgatataatagttgattttcttgacatgtgcataatgcctaatatatatatatctggatattaaatgactatgtgatttatttaattttggtacatattattattggtgtggaaataataataataatgacatgtgttcacttataatatagtataataatatttgtaattattattggtaaatattattatagtggtaaatgatgtatttaacacacttattattattattattattattattattattattattattattattctgataatgtatatatatacattacgtaatgtatatatgataccaatacctataataactgatttatatagaatgagaatcgttccttttcggtttcaaggtgatagctttgctcgggtttaaacacgttagagattggttattgggttccaaaattcgtacgtcaaaagagtaaaacaaagagagtataaggttatacgatatattgagttttttttttgttgatggagtggattgcaacctggatgaaagtgtgggtttgaggtcacttatgtacgatataaggaagccttttaccgttgtataagggtcggtggttactgtttcgagtttcaccattattgaagcttcgaaggtatgacttggaacggacatgaattcgaacgtgtttaagctttttcttgggtcaagggaggttagatatgagtgtatgggaccctaaggattatttttgacgtaagaaaatgaagctttgacgtccaaaacaaaggaacacgattttgactccattaaagacggtacactgccaacgaaggagacaactccaatctaccaacttgggcctcttttcttgtgttgatctagatcgttttgaggttttgagcacagtggagagattctccaatagaaaggacgcgtcaagaacaatcggggacaaagttacactttgtcagtgatgaaatcgacgtgaacgccggagaccacgttctgggctattctaaggtatttttctcaaatatttttgtagattttgattccttatttt

SEQ ID NO: 226429 - DNA, 1031 bp, Cannabis indica
catattaatggtccaaaaatacccaactaattacttactactttttattaatatctatttattaagacaaaaaaggattatcatgttttcttcacattttcagtgttctcagactagaatcatcctatataaaatcacatggttatattagtttattcaaactcaaaagtgtgttttaaattactctcaccaaatcattttcattgatagataaataaattagaatgaatcaaagagaagttaataataaagaaatttgaaagaatggaagcttgcaccagtgtaggaaattggtcaatacaagaatcatatttgagagaggtagattttagaaattaaagtgttaggtgaagttttgtgagacagcaaaaggatttcaattcgtaaattgaaaagtgtgaaacctatttccctagacataaacctctcatttttctctccatcacacttccccttcaattccatttttattttattttttcgatgtataccaattaatgaattttcactctccttttcgagggaaaagtcataatatttgtgatcaataaatgttattttgtactgacaaaaaaaaaacgtgttgttttgaaaattgattattatttttaagtataattattgagcaatgctgcatagtagcttctaaatgtgttgttttaccatttataagcgatactctttaaaaattattatattaaattatgtgagatctgatatttaattgtacaaatagcaatattgacacgtaggagtgtattagacactattagtgccttttaacatctctcgtaatttcttttttatttttcttaaaaaaaaaatcctgaagttttggccgttgcaacagagcagaataataatttctcttcagggtatataattttttactcaaggtaattattatttacaagttaatcatctcattactctgttattatgagggataaataatagagtgaagtagcaatcattttaaattgtttggtagaaaataataaaatgatagggaatgaagagtatttgtttct

SEQ ID NO: 226430 - DNA, 1959 bp, Cannabis indica
agtgtacaaatgtacactcatcatatatatataaatcattctccaatagtgtgccaattcttgtgccaaatttggcacatgccagcttgtgttgagatgcaaaatggccataaatttggaaactatggtagtaagattccttttttaaaaaaaataataaaatggtcaaatataataaattaactaataaatattataaaaatacatttacaacatattatttttaaaaaatatatatataattaaattaagttatataatttttaataatatattgtaacaaaaacaaataaatatattagatcattaaaatatatatacaacattatttgatatatcgtataactaaaaattattataccgtagtaataaaattatacaccacaaaaaaattataacagtactaaattaatacttacaaaaatatatatcatgttaacaaaattatatataccaatattaaaatatatatatactaaaaactttatatataatccttatatataataaaataaaaactaaatatcatcttaaaatactatcattattgccttataccaaaaatttaattttatatattattgtcatttaccattaatgacttactttaattctcttttgtaattaaattattgccattatttttctaaaaatataattaatattttaattatcattaatgataattactttttatattaattttctattatgcattgaaacacaattatatagcatttattattttttttgctaaatttagtaattttttaaccccatgcattggacattgtcttatatatggtctaaattttacatttatgctccaaatacatatgagtaaaattaacatttcttttaataaaaaatgtaaaaaaatcaacaaaaatattaattttttattaaaaaatatataaaaatcctattaaatatataaataaaatataaaaaaatattataatattaaagagtgataaaatactaaataaaaaaaaaataaaatttattgtgatataaattttggctcaagttatattttttgttaaatttgttacaacttttagcgtatactcaatttagaccactttatatgccaccaattcatttttataaatatgtgctaatatatgcatatatatatatcttatattaaatgtgactatatataaacaataataacaaaaatataaggggaaattgctctgctagggttcaaacttaaccatggcgggttggggccgcccatgtaaagctgcttctccgaacaacaaggtgactggtgctaaggtgcaaggaaaaaggaagacatcgattaggaagaagggaccaaccacctatgacatcgtgctcaagactagatcagtagctgagatcttggggtggatgctttgtttgtctccaatccagatattgaggaagatgaaacattagtgaggaagaaaaagcagacaaatgaatatgtggttgaagtagtatcgttgaggtctattattcgtcaattgacaccagagcaggaggttcgtgaagatttagcaatttcctaaaagctacgaacagatcaaagacacaaattcaatatggtaagtctactatacctccaatcttatttgatcctattattcagaatttaagtgacaattttggaaaagaaaccgtagctgagaaattgaaagtcaaaatagaatctgaagatatttcagaggaagttgaatactaacaatctgctatggtatgttatgttttgggagtaaatctaccagttggagcttttgaggggtttactaagagagtttggaaggagaaaggagtggacaaagttggcttgttgaaaccaggcatttttatagtcatatttttagctaatagcactagagatgagatcatggaggctcgttttttgttttttgactggaaacctataatcatgaaacgatgggatcccataacagactttgaaaa

SEQ ID NO: 226431 - DNA, 1541 bp, Cannabis indica
ggagagtattggctaatacagccacaccctccaaaataatacaatacaaccttatacactctttttattcagtatataataatactggatagattgtattaaaatttaggaatgtaatatctagtacaatacaaggtcccatccaaacatggtagtcctacaatttaatacaatactgagcccttatactgggatccaagcaagccctaaaagtctaaaagatcagcttcgtttggcagggtgtttgatttgggaagggtttctcgggtgatgcgacgaggaagaagaatcagtgattttgaagatttatgtttttattaacaaataagatttattttaaactaattattaagtaaagaaaaaaaaaacaggaattatttgaattgtccacttgtaaataaactagcaaaagttagtgggtactcatgaaagtttaagataatgaagttttgagtattaatgtctgaattttaaaaaaataggtacttattagcaacaaaatacatggtcagttgatttttgataatatcatggtgttgtttgaaattatgcacttcttgaagtgtaaggtttttgggaaggaggcgattatgacgttaaaacttgatatgagtaaaccatatgatagggtagagttgaattatctcaagtttatgcttcaaaaacttagtttttcacaacatttggtgcaactggttttaggttattttttcacagtgaggtatcaagttgttcacgatggtcataggatggggcctatcattccttcttgagggattaggtaaggagaccctttgtctccttctctgtttttgatttgtgctgaaggcttttcgacattacttcatcaatatgagtggaatcaattaataaaggggtgtcgtgtggctaggggtgctctgtcaatttctcatatgttgtttgttgatgataactatatttttttccaagctaacacaggaggggctcaaagagtgatagagattctatataattttgagaggatgtcaggataaaagattaatttggcaaaatctactgctttctttagtaggaatgcgagtgaagctattcgagagattgtttgtgttattttaaatataaatgaagctggtaagaataatatgtacttggatctccgaaggacccaagtacaatcggtcgaaacaaatctgctatattgggctttctaaaagagaagatgaggaagtgtatacaaagttagaatggtaaactcttgtcacgtgctagtaaggaggtcttggttcgtaaaatcttctaacttgtgctatgagcgttttccttttgcttgtgggaacgtgtcatgatttggaacaactaatggctaatttttggtggaagtcgtctacgaattcccatcaaagaattttgtggatgagttgggggaggatgacacgtagtaaggagtttgggggattgaggttcctctctcttcatgatttcaatttagctatgttgggtaaacaagcttggaggttcctgaccaagtctgattcgttggtttctaaagtgtacaaagc

SEQ ID NO: 226432 - DNA, 3120 bp, Cannabis indica
ttttgtagacaacttgaaattttctaaaaacttaggagtacttatctaaataattataacgtacacgatcatgaaaaaaataactaaaaagtttttccatttgtcaaaacagataaaagatctactgaaatacttgtttaatgagtgtacttagacttaccctactttatatacattatgtatatttttgtagttctgtataatacataaaatgggacttcgggagacagagcttatcccaagctcttaagtggaaaccatggtgtgcacttaagagcttgggatatgctctgtctcccgaagtcccatggaggtcgtggatttaggaagacaagagagatgaacttggcattcctggcaaaatggggatggaacttgttgaatgggtgcaattctctttgctgtcggattctgcaagcaaaatatctgaaagggaaggatctcctgagtcataaatataagagctcggattcgtggttttggaaaagtgtgatccgagcgaatgtggtactgaggaagggtgcctgtaaactggttggtgatggtttggagggacccttggataccacatggtaaagatttttccccgaagccagttgtttcgtatggtaacgaggactctaaggtggctgatcttttactccccaatgggggctgggacattactaaacttaatgctctgtttaatcaagaaacggttactgctattttaaaagggggtcatccctctggtcaaggtagggataggtgggtttggactctggaacggaatggcaagttctcctgcaagtccgcttacctaacccaggctttggagagagcgcctccgtgtgaggttgctccttctctctggaacaaactctggaatagtaaggttcttgagagacataagatgctttggtggtgtattttgtccaaagcccttcctattcgggctgagattaataaaagattctctattgaagattctagttgtcctctatgcgggaggggggaagaaacttttgaacacttattcctctcttgtgaggtggctttccacctttggcgatcttccccctggggtatttatccagtctgtaatactggtattcaaccttgggactgggtaaaattcatttgggaccttaagcacaagggggtaaatgcggatgatgtttttctctatgcttcgatcactgttgacaccatctggaggatacgtaatgataaggttcacaataatagtccagttgatgttagcagatgtattgattctatttgtcactcttttgaagatatgcatgctaccattttccctccccccagtccctccccgttgctggactggaggcccccccccaccggagtggatcaagcttaattgtgatatcaaagtggggctggatagcatgtgttcggctgtggtggccagggatcatcttggcagggttcttcgaattacaacggccaggctagactttgttgatgcgctgtgtggcgaagcggcagcttgctgcttggcggttgaaacggctttggatcttaaggctaattttattattgtggagaatgattcgagtgtggtgatcaatgctcttattgggaaggagtctcaatgggcgcttgagaactacatctccttttgtaatagatcttctcctttattttctagttgtgtattttcttatgttagccgaacctgtaattttgcggcccataacgtggccaagtgggcgttcacccacaagacatttggtgttattccggtttcctcaataccggtcgactttttatgtaatgaccgcgaggtctaactattttcatcattaatatatatattgcttcactattcttcaaaaaaaaaaaaagtataatacataaaatggtgttatatatttttatagttcttagggtaataatagcacccaatagtaactatacctaattattctttcatttttacttggcacggtgagaccatttattaattgctatttggctcatgacctactcaatatcagagatgaagaaatttattatttttggtttctaattaaattctgagtacttatttcaggtacttaatcagtattcagtactgtgtttggaagcactgaattatacagaacttttgtttatgcacataaatagaaaaaacaaaataaaaatgtctttctcaattttattacttgttatagaatgcaaattgaccttttttttctttctaaaaaataataataaaaatagagatagttaatatattgaatacactatctatgagtggtaggttgggccaattcttatgtctcttgaaattttgagattgatttgattatagtgggtcaaatgatcaagatgaatcaaagttaggccccaaaagcatgataacattattatttacttacatatttttttaatttaattagtggaataaggtttcaatcaataatgtaaaagttaaatttcaggataaaaataatattaaatgaattatagttaacttctgttcgtagaaaatggtaactttaaagtcaatagactatagtgtagttttatataatttaaacattgtacacattaaaaatataaacttagaatggtatctttaatttggtgtgaaagattaagatatgtaaccaataaagaaaaattattataataactatcttatgcactaattattaaaatattatatttgtatccatagtaataattaatcataacatttcatagaagaatatgccatatcttatttaactttgttcattttagcttaattaattaataattaaaagaagaacattaataaatggataggaattagtagaatgaatggatgtaaaaaatttagattagatggatgaaatcatgacaattataggtaggtcatcaacttgatgttaaattaaatattaataaagttagatttgatcagacgaagaggttaaaaaacattatagttaaactaattaatcccatttcaatcataatcaacatgtcttcttcaagtttggtcgaatatatttatataaatatatatatatatatatatataggaattatctatagtagggcatacaatttttaccctatgttatattgaaggaaatttagtcaatgaataattaaaaacaatag

SEQ ID NO: 226433 - DNA, 2388 bp, Cannabis indica
ccttgctatttattacaccaagtacaaaagttgacagtgtatttcacatcctctagatgacagtcatccgcacactccttgaaggcagtagaagttttgtacctaactctactacctattctttcatccttgcttagaatatcattgaaatcaccaacaacaatccatgcttcattactagcaagatcactcaaatctccccataagaccctccttccttcctcatcattgaaaccatagacaaaagtaacaaagaaaattgtttctttatccatggttcaacaaagagatgaattagttggcttgtacattttaagatattaaatgtaaagctagaaggattccaactaacaataatcctcccaccctcatgccatgcattatttgaagtaaacaccatcctaagaacatataaggctcctaaatttgaccctcgtcttgaggagactagctagcccaattttctaatttccaatcaattgcttgactaaaatttgcttttgttggctattaatccctcagacattccaactcatgattctatccatttgttagaaagagagaactccccctctcctgtgtcatcttccttaactttctttcctttgtcaccaaaaggtaattgtatgtcttctgtagtgctagtgttcatcttttctcccaaatctgaaatggattactggtagaggcagccatacttgtattgtctttctttaatttccaaccttttgtgactggttgaaaaccatcagaatcagttacaggttgattagctttaggaacattgatcttcttttctggatttttcaacacccattgttgttgtttccttggttctttctttctacattcatctgtagagtgtcccattccagcaaaatgatcacaaataacaggtttccactcataagtaatggccactattgtgttgcaaccattctcatcctcaaactcaatgagtttagggaggtcctgtttaatggccacttcaatgagaaccctgggaaagttcagcttgtcccttcttttagttgcttcatctaccattattggtttggcaacctatccaattatcttcaataaagatttttctccccaatattttaactctaaatcatcaagatggacctaaattggaaccaccctaatatcctctttcttgaaattaattgagggatcccaagctttcatcacaatcggtctcctgttgaaaaatatgtaaccttcaagcttttatttccacttctaaatctttcccaatcatcaatttttttggaagagtgggatcaatctccatttcttacaattcttctataggtccaaggttatctgtgggatccccaaagcaatgatctatgttcgcttccccactttaggctgtacttcattaccttttgccagactcctggtcatagcacttagcaagcatcttctctctttttgggctttaggttaagccaggttgtaacagtgtcgggaagatttttggtctccccttaaaaatcctaccccatgacttgttgagaactttaagcatgggtgatagatggatgttactaccttcaggtcatatagggcatgtcgacctatcattgcattgaagactgatggcacatcgattactacgaattgcaccatcaatgttctcattgtgggatttcctttgattgtcaaaggcagtcggatgtatcccagaggtgcaatgccttggccaaaggagtcgtacattagttgagtgcatggtgctaggtctattagttggagccccatattttcataagttgatttaaaagcgatgttggaggagaatccattatccaccatgcacctagcaactgtcatgttccctatttgtttagttatgaccagagggtcattctgagggaacctgacctgggcagcatccttcctctataaaggagatggcaggctctccaagcctgagtttcttggagtctctttctttgacagctatgatgtcgcttttaggctcgtgatggagattccaagcatagtgctccctagccttgcttgtctcgccttctatttggggtttgcctattatgaccctaaaatgacccaccactactgatggtatatggtctccattttgggcagcttgtgcctgagtttggtttttttacacataacgatgcaagtggggattacttttccttgtgaggaattcaatatctctcttcaagtgttgacacttgctgatgtcatggtaaaaattattgtgaaattggtagaacttggacgtgtccctcttactattatccttcttgataggaggaggcttcttgtatgggacggtaacctaagtggccatgtaaatggtcttagattttttgggtagaagggcaaagcatgtgtacttctcctcct

SEQ ID NO: 226434 - DNA, 1565 bp, Cannabis indica
tgcgtgagtatactacttgattgcatgcacttgcgtagtaattaataattttcgtaacagtttgcgatcctagtgttgcgttgtacgctgttgggtaatctaccaccaccaaagtagagtgcttataagtacttgcattattttctcctttgagggtgataggtaagtggattttccccataggaattagggcgtccttgttgaaaccttacaactgaatggggcaaggagttaagtatgcatctataagccttattgcctggaatgcaaacttgaagaggatgtttactgagcttccgttgtccaccaagactctggaaactcatttgtttgtgaacagtgctttgattactaagggatagttgtgggggaaacacacaattctggcatcattctcgttgaaggtgataggcagattcatcatcttggggtattatgctggagactgcaccaacgcgcatacttccctctcttcaacttatcttaagtatcttttctacaagtttcttatgcttcctggaagatgcagcccacccgagatcgtggcaacatgtctgtccattggaggtggggggagtttgggaggatatgtggttccaggtcctggtgcaagtaatgctaccacaacttgcgctggtagagtagggagtgtaggcagtgatgttataggagcttgagaacgacttatcccctccagaggatttatggcattttgctatcctaaaatgatcatatgctcgtggctgaccccttgtctgagataaatcattgaaatttagacccattatcccaaatgtcccgctcaaatcaaagtctcaatctcatcttttaaataatcacattgttcgtcatggtgtggcccttttctccgtgatactttcattccttatttaggtaacgcctattccttcctccgtgcaacatccgtagaggctttttatagtggaccatattgtaggtcgctctgtaaacatttttccatgtgtcaatcaaactggtatacttagtgtatttaggatcgtactccttccttgacttcttttaagagccattacggttattgcctttaccccttcttttgttctgagtatggctcacatttgatttcggagcctctgtcttctcctgcccgagagctatacttcacccaatctgtgctaccatgtacccaaaaaaatgtgtaggtgcgagaccggatgtaatgggtttgtaaatagttggagaaaactaagtcccaggaagagttaaagttggagccagaacttgaggtgtaaagctaggtgtagctacgaaagggtctagagccagagggacttcggaggcttgtatgtaagcgtcctcaaggttgataatgcctgaattcgtttttcctctctttctttgcaattctccccatagcaaagaaccaacatctagtctggattgaagggccatcaacttcatgttatcactgactttagctttagcagtagcctccatcatcctttggataaaagcctacaggctttcgtcgtgttactactttacattggtgacagtgctgactcccatgtccttatcacgca

SEQ ID NO: 226435 - DNA, 1253 bp, Cannabis indica
taaaacatatatatatacaaattgatcgaagggaatgaattgaatgaatgatattagaggtgattggaactcaatgctcaaagctgaagaggaattacctttgatattgttcttcaccgaatcgcctggttctggttttggttgtgagcttcttcttctccgatattttccctccatttttgggtttatgaattttccaaccaaagctttgtttggaaatggttggtgtttcagtgatacgacgtcgttttgagactcttcccgccccttttaagtcgttttgacacgtggcctgaccatttacttaaaaattaatgttaaatagaaaaaatcatacacaaaattaaagttctgattttaatcaaacttgtagaaggagaaagaaaaacatatttcatatcatttccactttaattattttgttgctaaaatttgttcaaattataaaattgtgaaatatttacagcataaatattttatataattcactttattacattaaaatccttatatagtttactttattgcatttaaattcttctatagattttttggtgcaatatcctttttagttatcttcttgaaaccatttgtttatgtggtcatgtgtcacaagtataagtatagttgtagtataaaaacttaacattttattaaactacccaaaatataatttattagaatttttttttttttttatttaaacatttatatattacaatcatgttttacttaggattcgaacccaagacctccaaaacacacacccacttatgaccacttgagctaacctcaagtataatttattagaattaaacatagaaacattgctttaataagtgcatgcacatattcctaatttattaatagtattgtcatgttaatattacatcaacaaattaaataaaaaaatgaacataatataactaaaaggaaatatttggaataatttatatattttaggggaaatttttgcaataaaaaattttatagggcacaaaactctacaaagtttataattcatgggcaaatcctatttatatcatcaaatagattaaggtttttttttttttacaagatgtaagaaaaaaaaaatctaattagtattttttttattcgaactttgacatgtattacttgaccaactcgtactttctgaattttcattcatgttagacaattaataaaattaaatagaagtctttaaattcaacaatctaattgtcaaccatcgataatataattcggtacat

SEQ ID NO: 226436 - DNA, 1511 bp, Cannabis indica
cattactcgtacctaataatataataatgtatccatttttcattttccattgtattttttttttgttttcataataataattataaaaataattaaaagcattgtatattaattaatactgtgttatatgcacatattcgaaaaattttgagtctcaattgatatcatttagaatcggaacacaagttactgtaattttccatgtcaaaacttattggataatattttgtggatccaagttgtgtatatatgtacaatacaactaaaacaaatacaaagtacgtagtacatacctgaggtcattaaggcggatttaatggcagcaggagaccatgttgggttaaaagacttgacgtaggcagcagctgctgttgcatgtgggcaagacatggatgtacctgagattatattgtatgaaaccactctcttgtcatttgcttgcctagttggacttgtagcttctgaccatgcagccaatatatctactcctggagctgttagatccggctgccataaaatataaatgcaccaaaataattatcatgcatgaacatatgaaataatactataagcatatagtcagtaagtacattacaatactataatatacaaaattttattattattttcaatatcgttatgtctgtaattgtttgtatatgatgagtcctacggtcaatatatatttaaactaattttgcaggaccacataatagtgctcaatttataatttgattttaataatatatatagtaaattaattagtttgatcaagcaattattgccttgagaatgtcactcgtaatggggttgggaccccttgatgagaatgaaaccacaaatggggccgattcatctttcacctcaaaactcttccgtatagttgcactcggttttctgtaaaaggcatagaaaaaaaaaagttgtattaataatttacggcataagtacttaaatttaactcttaattgcaaataagatttaattttttacggtaataatatttaagctatacttctagaacttttggagttagctggctgctaaataaattgcttcgtgacaatctttaattgatccaagtcataaaatttatatatttttttaaaaaattaatttaaatatatccataacaatggataataacttaacatttaacggtaaattacctaccatgttctaaaaatataagttaataattgaaaataaaatttagatattcatgcctcaaattactctaatactaattacttacttcaattattaagtatctacattctatctcacttattactttttaatatgaaacatagatacgacgtatgtgcatatgtatatctcaacttttggaaattaataatttaggtgtatataggtaggtacctagtggagtttacgtatagggaaatctcatctccctgtttagggttgaaagtagaagctggaataggaaaaagtctggcgaaatccttgacttcttcatcttgcatgataattcctgatgagccccc

SEQ ID NO: 226437 - DNA, 1930 bp, Cannabis indica
aaaaataaaattattgaaaaattgagttgagtgtcctatttttaccattttggataatataaggtctattttttcatttaacaaaataaagggtccaattagtagtttttacaaaacacaaagtccaaaataatatttatcttttttatttttattttatgacgaaacattgtatattgttgtttgttagactgtcatattatatagtttttagtaacttgtggaataaatatttaagtttaattctcagttgcagataaatacctaaatttaattttggacggtaataatatttaagttatattttcagagcatttataggtatttaagtgtcaagtcaataaccacgtggtatttctatattggttgagatcattaaatttttattttttatttaaaaattagtttaaatataccaataaaaaaaataacacgtggataatgacttcacatttagtagtcaggtgcgtacggaaattttaaaaatataacttaggtattattatcgtaaaaaattaaatttaaatatttatctacaacgaagaattaaacttaaaaacttttttttttcaaaatgactaactcaatataaatcaatcgataatgagaggagtaatgcatgtatcatcttatgtatggtatttaatttccacaaattattaatgtgagactctctaacatcccctcaagataatagctatttttgctcaccaatcttgcacgactggatcgatcacaagtgactattttagttcacagggactgtttttggctcactatccacggatcacaccgacacttttggcttttctttttgaaccgatttttagatttggattggatactcgttagagtttaatttatctctaattaaattaaattaatttgagattctatgttaaaatttgagataaggtgcataagattttatctcaaaattaattagcaatgagaggctattttcttatatgagactcgatacttaattttaccataacgattcgatccaactgaatggatctttttatgcctaatatcaaatattatatgtctgagtaacaattggccttccaactcattttggttttgttaataaaaaggtaaataagatataaatactcaaatttttaagtttgtaagtggcataaattttatgtttattcttagcggtataagtatacccattgtttgtaaaactgtaatttttctctgttatattattttaaacatgacacatataaagcttagattttatattattaggtctaaacagaaatatataatatcaattacttcaaaatgtttattaaatataaatttaaaatagagtcggtactgacgaaactaaaaaaaattacaattttacaaacatttgatacttatgcaacttataaaaataaatattgaatttatacctcttacaaacttaaaattttatatacttatacttttacttacccttaataaaattatgaattgggtatgtgaatcttttaactctaataatgttcatcaaaactgattctcacctcacacgagtattaataaaagagaaatactaaagggcaccaggggtgcctagcaccctcttatgtgtcaatatcactattggtccaaagtatcaggtctcatataatttaacataataacttttagggagtatcgctagccaattgcaatgcaacatgtcgcaaaaatactaggcaccactagtacctaatagcaatgctttaataaaactatcctactccatcaacaacagttattattataatattattcttattatatgtatatattagcaattaatgaaagtcttaaataaattaccttataccgttatacacttacacgagcaatggtcaaacatgtatttttatttatgttatttttgaatgtcttaccagagaaagtttaattaggtaaacaa

SEQ ID NO: 226438 - DNA, 1409 bp, Cannabis indica
tcaaaagagtaaaggaatggaacaaagcagctatgattaagtatgtttgggccattacaaagaaagaggagaatttatgggtacaatggtttcatagtgtctatctcaagaataaagattggtggagctacactagcccaaccaatgggagctggtattagaggcaactggtgttgttaaaggatttagtttgctcttcattggatatgcagcaattcagaggagctccttatcacatatcagtagggtatcaaataatgtgtccaattcgagagaggaaacaatggagcaagttgtagattaaacaccccaaaacacaactttatattgtggcttcctatccatgagagattaaagacaaaagcaaggttgtataggttgaatatcattgaagatccatattgtttaaactgcagcaactaggaaactgtcgaacaccttttcttttgctgtcaaagatcaactgaatgtttttagggtgttacaaagtggttacattggagactagctgttgtaaacttgctaagagtgatcaaatggctgctgaaattttaaggtagcaagttcagaaagatggcaatggtttatgctttggcaagcttggtataccacatttggaggcatcaaaatgagcacatgtggaatggaaaacaacacccggttgaacaattattgaggaggatcaaagaaactgtatagtttagagttagattgatttggcctaagaaagttagtgataaagatgtacattggtttagtgatttgtaatttgtagctgtatataataccggtcttgtgaccattgtgcttgtacaaatttggttttgagcaataaaatcattcgattcataaaacaaatgttaatatatattatgttttaagaaacataaatagaagaacgaagaacgaaatcctcctctctcttcgtgcgacgaaattctctccttccttaatccattttcttcaatttccaacccaaaacttagtatttcaagctctggtagtagcgagatagcaattccttgaagagagaaaacttaaggtatgatttaatttcgttttaagctaaaaacgattagttttatatagtggctttgtgatttagagtggttatggagattctaactttgtagaattgttctttggtagctatgggtctagtttcgatgtttacttgttgaatttgaggggattttgagttagaaatcaagtttggaactttttgaagcttagtccaaacgttaatggcgttttccatttaaggactataattttggttacgtaaggatggtagtatttttgatatatatatatgtgccctgtgaagtttggagtgatttggataggtttcggtagtgttttggtgagtgggaattttgaaattgatgtgttctaccatttttgaaaat

SEQ ID NO: 226439 - DNA, 2047 bp, Cannabis indica
ggaatgaaagctggttcaagtatgccacagggatcacaaatctcttcattatgctctcatcgcgaacataaaccgccaaaaagcctttagggatatcttttgtgcttgagaaaggcctttggatgagttgcttggcatgaactaaggtagcaaagcgaaacccatgattgatagagtgctaaggagaatgaagaaaaaaataaagtgagcagagatatatgagaggatttgcaagaaggaaacttgttactttgaaatttgaggagttgggatggtatttataatcaataatacacttgatatgatataaatggtgaagacactatagagtaattaggtggattggatggggtctagtgaggcatactccttgtgcaatcacatggtattgtcttctacttatctttatagattcaaatacaataataccaattcataaaaaaattgaaatgagatgtcttaagcatgtctcatatccactgagacacattttcatatcaaaactataaagaaaccagtaatgtgatttctttatctgatcctacaaatgacttttatacacaaataacatgaagactagcctggaattgaaggaagataaaggctgcaattattatgatacaatattagaaatcttctttgactaggccaacattatttgtggccccttgcaataggagacatgcatgccttggacattaaatgtgttcagaagtagatgaaagatctatgatatttcccatcataccaaaggtcttcaaaatgtgtatatatatacacatgagattgggttcattatcacatctacttttcacattctctcaagtattcaactgtacttccttgcaaaccctttgagatctcctttctttcttcttccttacagagacatatatacaagaatgggattcagatttccaagcatagttcaggctaagcaactaattcagagacctttctcaagttcaaaagaagttccaaaagggtatttggctgtttatgttggggaaaacagaatgaagagatttgttatccctttatcaattttgaaccagcaatcattccaagaattgctaagtcaagctgaagaagaattcggattcgaccatccaatgggagctcttaccattccatgcccagaagatgcattcattgatctcatttcaagattaaatgcctaatgattggcattacacactgattatattgctgactatttctaacaaaaattattgttacaattttgcaagtatgggcaaactatgccaataccatgtaaatatttttccttggggatcaacaaaaatgttgcccctaagattgagataaacgaatgaatacaatttcaacactactattaccttgagctattaactatttctcttttacgtttatattttatgtaattagatttactaataagacaaattcttgtctgatccatatccttataatgaaagcaatcttattaaataaacaaaaagtattacgtaattagagacagtaaggtgtgataaactgttttgatcctaataaagatgcgtactaaaaaacaaagttttacacattatgtaaatatatagtaaagctagacttgcaagtgaaatctaatgttgagtagtgttgacatcccatgcatttgataggctcccacataattttcataataaagctcctacatttgttagtccatttagcattaattcatcatatcaaaaataaattagaaaaataatttattattaataatggaatataaacaaaattttaatcagtaagaaggaaataaaggcatgttccatatgtcaagtggcactacaagaattttacctttcaattacataaaaacataacatttttaaaaaaaggttattaataatctctatactaatagtctaatattgtctcttaatttatgggcctgtatgttattcaaaattggaaagatctagacccaaaaatataataaatagggcattttacaaaaatactggatttggggtaatacttttcaattttactgccacacggcagaattaacatttat

SEQ ID NO: 226440 - DNA, 1497 bp, Cannabis indica
tcccaatgtctaactatatacctcgtatactaaaaatactatgatgtgattttaatagccaaacaccgtgttccaatgttgtcgggcacaaaacatgcaaaattataaaatttctatgtataacataaaaatgcattctgaattcaaataaatcgtcataaataaatgattcaatacttataaataattttcataattaagccctaattatctgctaatttccaaattaaagctaagcggtctttacattggcctaccatgaagaaggattgcactaaatatgtctgcaaatgtgaacaatgccaatgctattcaaaatttccaagggccacaccaacatagataatcctcatgaacagtccttggcccttcatagtctggggaatagacttagtaggatcacttccaatcggcaagggaggagtcaaattcgctattgtcgttgttgactacttgggtggaagctgaacccatgtatataataacttccaagaaggccctggacttcgtaattaaaaacatagtgtgcagatacggacttccacataaaatagtgtctaacaatggaaaattatttgatagtgatcaattcaccaatttttgtgccaagcacaagataattaagagcttttctgctgtggccagacctcaagcaaatggacaagtggaagccatcaataaatttttgaagacgactgtaaacaagaagcttcaggcttgtaaaacacactaagcgggagaacttccaagagttttttaggcctacagaaccactaaaagaacttctacaggccgtactccgtactccatgacttatagatgcgaagtcgtaatcccaattgaatccaccgtgcctacacataggagggatacctacgacccaactcagaaccatgatcaactttacgaatctttggatttaattaaggagcttcaagaacaatcacacatcgaactccagatgtatcaaaacaaaattgccaggaatttcaactccaaagtcaagagcaaaaaaattgaaattggtgatgttattgttccctgcctctcaggggcccaaaatgggggtcttaggaccaaactaggaaggcatgtatgaagttatagacaaaattagtgatggaacttatcgtttgaaaagactagatgaaaccagaattccaagagcatggaatgctaaccacatgcattgttaccatcagtaaattggaggtggtcaggttcctttttgtttttctttacttttttataattttcatgtacgtcttagggtaggagttatttgaataaaagaagaagttgtcctttcatatttggtctttaaaagttctatcatgtaacaacaaaagtcccaactattaatcacttgggggtagcacatatgatattgtcatatataattttacctcttttgctaaaaaatagataagttacattctcaaatataagagtaggaagtattgcctgaaaacagaacttcagggacctggaagtaag

SEQ ID NO: 226441 - DNA, 1548 bp, Cannabis indica
atttgtattttactacactcccactcaagttggatggaagatatcaatcaatcccaatttgctaacacaagattcaaagattgttttgaacaatccctttgtaaaaatgtataccgcttgtaaagatgttggtacaaaaggcaaacaaacaaaatttccccgagctttatgaggatcaatctcaagatgctttctttagttatgttggactagattattagtgatattgatggcaaccttattatcacaatatagtctcattggaagctccaaagatagctttaattcctccataatttgttgtagccaaattagctcacatagtccatttattactctaaattcatccttagcattactcctagcaacaacattttatttcttgcttcgttgttgaagtactcgactatcaactaattcaaattttctctcttcaatttcttgttctataggcctcagtaacaagatcaatctcgctactaacgcaaactcgatccgactgaatctgcatctcttctttgcaaaataaaagtgtacctcgtctggcttctcatatatgatcttgtggatgaataactgatggattaatgtcccaaaaaagattagtagtttcctctcgaagaatttatttaaaaggtgattccttcaccttatcccatactttggaattcatcaaattttgccttaatttttggatagtaataacttccgtcacaccaagtgacacggcctgtgtaatgctctgagattagaattataagtcgtggcggtcttgaattctggaaaaaagacacaagaaaatcaaataagaaatcctgctgcacaatatcagaccaatatcgggccttatcggaccagtattagacaaaatacaaaaaaaaaatgcattaactatcgggccaacaatcaggccacaatcgggcgtgtatcagacctacatgcatattttgatcacaaaagaagctatcgagccttatcgtcctctatcggacctacatgcatattataccaaaatgtaaaaaattaaaaaagcatcgggcccataatcatcctatatcatgcccactatcggaccaaatatttggaggcatattgggccaacatcgggcctatatcgggcaaaaattgaccatttctcttcaacctctagacttttatttgacacagaccatcgtacatccatcgggcatccatcaggcatgcatcgggcccgacctgaaatccagatttcactcaataaatccaaaaaatcctaaatctaaccctaactagcgaatttcacagaacattgcaacaaatcaatcgatttctaccataaatcaataaattcataaatctaaacaccaaaaattgtatgaaaatattgaaaaaaaaaaaacaccttagacattcccgccgatgatggattgttcatcgatcctcaattgttcgtcgtatatggaatagcagccgagaagtcagtgatgatggttttgagagagagagagagagagagagagagagagagagagagagagagagagagagagagagagagagagagagtag

SEQ ID NO: 226442 - DNA, 894 bp, Cannabis indica
aaaattaatagagagaataccttgaaattggtgttataaaactcttttgtagagtatataattagatgagtagttggatgaacaaaacatcaagactgaaaaagttgcctaacattgtttggtgaaataatgtgagtgtcaccatccaaaagagacttagctatgatttcattggcagcttgagaaggattatatggatcccaaaacacatgcttgtttctctccaaacacacttttgatttaggaccacatgggattagaccaccaaaccttccaacaacatagcaacatgaagagtctgaattttcaaaacctgttcattaattaattaattaattaataatcaactaattataattttattaagcaaatattgtatttcattaataattaataccatattttgagtaattctcaataatatcttccataacattgtaaacatcagcataaacaagctttgagccttcaagactgtttgtgagatctgtaataaggcttctcaattggatgttgaatatttgagcaagtctatttgggaatatagcacaattattattgtctaatgataatatatttgcatctctctgacttggcgtacacccaattggtcccacatttaacacaacaattttccttgcacccaagttgtaaagtctctgcatatacatgaaataacataacaccacaaatattttatgaggaaaaaattaaattaattgaaagatagagctagttaggaggacttgtattttttctaaagttagtaggacttgtaacttttactgcccataatgtgattaagtgggcgctgttgtccttttatgtaatgaccgtgatgtgtaactggtttttattaattctaagcacgcttttttttttttgaaaaaaaaa

SEQ ID NO: 226443 - DNA, 1939 bp, Cannabis indica
aaaatattaatattatttgaagggtgcttctaagcacctcctttattttatttttttataacttttgttcaaaccaaaaaaaaacaaaaacctcctttttcttttgttttctctctatgtgtttcgaacgtttaatttttaaataaatacatcactttccatttgcttaccttaaaaaagaaaaaaaaataacaaaacacatttataattttaataaaaaaaaattaagtattttagtactctcaaattaaaaaacaattttaattatttaaaacttaaaacgtaaaattaaaataagtatacacatgctaattattttttaaattttttaatacctcattagaacaaaatttatatttgagtacttagcaaggaattccaatattcgagtgtatatagatcactatcgaacaattttttttttgttttggttattaaattcaaaatggtcatcaagcactattgatcgatacatatttgcatcaagttttatctagaaaaattattttagtttcataaaaaaaaataattgtatggctcatgatcgagatggattatgcactatcaagtaaaatcaaatttatacagatttaaatttcacactgaaaaaaaacaatagcaaaaataaaataagagcatgcccatacatgttggaaatatataatttttttgagatgaaattgtaacgtcattaaattaacattttgaatacaaaataatctgaaaatcaagggggatagaaggctctagaatgctacgaccagttagtgatcgtgcatgcctaacaacaaagtgggtcgtgggtgttaagtttaaatcatcaaaattatatcaaggtattttatttgtgttttagtggaagttgaaaaagatgagaaatacaaatggaaaacaaggtggagggtgcgggtggcgacgttgggtcgggttgggtcgagtcgggtaagattagagttcaaaaattgaatatagagaaaaatagaaagactgatgaatggggtattcaaaaaataatgtatatatttataagtaatgatacaataagaggcattaaggatgtgctgggtattggctctcagaaaggtgtcattaaatatctgggtctacctctttttagatctagacagaaggatgcggatttcaactttatccttgatagactaacatctaaattatagggatggaaagcaaaaacgctttccaaggcagggcgtgcgaccctgattaaatatgttggtctatcgctaccaatgtatgcaatgcacaccaccaaactttctgatcgtatggttaaaagaatagatggtcttgtcagagatttttggtggggttttgagaaaggaaaccatggcatgcatctaagagcttgggataagctttgtctcccaaagtctcttggaggcgttggttttaggaaaacaaaagaaatgaacctgactttcctggctaaatggggttggatgatgctaaatggttgtcaatctttatgctgcagagtcgtagaggccaaataccttagaggtaaagattttctaaactgcaattataaagattctgactcgtggttctagaagaatgtgatcaaagccaaggcaatcttaaaaaaaggggcttgtaagttagtgggtcatggtagaaacacttgcatttggagggatccttggattcctcacctaaaaggtttcattccgaaaccaataagagaaattctgcctggattgaactgtgtggctgatcttctcacaactcatggaacttgggacatttctaaactaaataatatgtttgacaaagaaattgtctctgctattttgaaaggaggcaatccttcggggcaggaagaggataaatggggatggacactggagtctaatggtagattcacttgtaaatccgcttatctaactcaagcgcaagatagagctagccattgtgtggt

SEQ ID NO: 226444 - DNA, 1164 bp, Cannabis indica
ttttacataaaaatattgtaataaaatacaaatttcatataatacaatacaatatgatttaatacaacattccaaacgagccataaaagtttaacataatgcgttcattgcattattatgcatgttcttatgacaggattgtatgctattttttttaacaaactcatatatttatatattaaaaataatcatttaatgtaaattcttagtttaatagtatttttttatatttctcgttaaataaaaattatatatattcgataaaaactatttttagtgtaagatcttttactattaaagacgtctattttacaaataaaataaattccagtaataacattaaatatgaaacaaaaaatcataaaaaaaggtgtttgacaaaatatatttttttaattttttttataatattatttccgacaacctttaatattacgtccattttttatttttattttttatttttaattttgaaattatggattttataaattattgttatatattatttggtgattactcaacaaacttattaataaaatgcaaattacgcataaatgttgaaaaaacataatttgatataacggcttttacctctattaaagagattagccaaatgtttgaaaaaaaaaatagtataaagtaataaaatcaaagttaattcactgggatcaaactgagttaaggcccctttgacacaattttttaaaaaattaaaagctgtttttttttatataaaaaaaaaattgtgataaaaaaacattagtaaatataaaaaaataacttattaaagaatttataaggaagttataactgaaagttaaagttggtatactttaccttttttaaaaaatattttaattaaaagattatattaaatttatttgtactaaaaatatatataattatttattatatatattaaaaaataaaagtattaatttttattattattatattttaaaaaaaatttaaatttcatatcttctattttttacactaacaaacccttaatctataggttcttatatatttgagtttctatttttttatttacatatgattaaaatataatttaaaaatactatattatctttattaaatgatataaaaaatatatacattgagaaaaataattaaaaatttatataaaaaataatatat

SEQ ID NO: 226445 - DNA, 1911 bp, Cannabis indica
ttgttgttttcgtgttatttttatgaaaaactgtaaaaatatgtatataaaaaaaatctttcaacgtaaaattgtaattttttacaaaaaaaaaagtaatattttatgtaattattccgaaatttaatgaatggttattttagtagatttttttagaactaaaattattattatgagagaaagaaaagtttaagagtccaacctttagtggagttatcttcctgagatctcatcggcgggtacagaataacttcctgctcaaattcacaacatatattattcattaggattatcaccataattaatatgtaaatatataaattttagtgtttaaatatatttaaaaaaaaaaatcaataatttgacattcatctcttttaaaatattactatcattttcgccatacccatcaaaatatatttactatcctttccctttcattattatttgctcgtaaatattatgtatgatttttcttttttattttaattagttattaatattaaaggtaggtgactttatattttttcaagctatatcattgtattattaggaaaatttaaatttttatatttaattttactatctaattaaagaaaatatttcatttttttagggaagaaatctttcatttttatattatatgattgaggttgttttaccgagttaataaagagataaaaaaaaattagtttgagtgagagaaaagaatagaaataatgttaaatataaacatacttttgatataatgtaaaaatagataaaaaattttttaattaaatagtaaaattaagcacaaaaaccctaattttattatcagtcacatgaattaaaacttcatttttaaaaagactgtttagaatttttattccccaaactataacctatgtattattgaaactattcattgttccttttgttttctacatgtgttagaatttaggataagatgaatgaggtttcatctcaaaactaattgacaatgagagcagtaactcattcatcttatatatgtcaatttatttccacatattagcaatgtgaaactaactctaatacaccctcctcacgcttgggcttggaaagtgtgagtataacgaacgaccttttaagagactgcaggactgaacgtgccatttgaaggaatcccacaaggccaaatatcgataaagttgtgtgtgtatacgtcaaaaaatttgtagattttaaaacaagtcaaagatcccaacactggaaattgacacacattgaccgaaaggtcccaaatggaggttaaaagggacagtagaagtatctttttggaccggcagtacttttgctcaaaacggatcacaaacggctttaagcccagtggcactttgggctcacaacgaacacaagtggctttcataccatgttagaatttgggataagttgaataagattccatcttaaaactaattggcaatgaaaggggtagtccattcatcttatatatgtcaatttatttccacacattagcaatgtaggactaactcaaataacgtgtgacaaagtttgacagaatgagcaatttacaatactgtaaataattcgtgaaccattttcaacgtgttaaaaaatttaagagcacaataatacataggtcataatttgaggggtaaaaattctaaataactttttaaaaattaatatttttaaaattgacatttaattatatagttattttttttttaaaaaaatatcaatgggtaatattaatacccattgaaaaataatcaatacatattagggatgtacatcggtcggtttagtcggtttatattatatattttccaacccaacataaagatcgggttataaaattctgcatgcaaactgcccattttaaaaaaaaaaaattctgcacccgaccgacgggttgggcgggtt

SEQ ID NO: 226446 - DNA, 1871 bp, Cannabis indica
tagaagggacgacaaagacttctaaggttaaggccaaggaagaaatggagatcgcacctacaatcactctaaggtgcacccaagttagggaaagtatcacccccatattgcatatattaattcgggagttaatcacattctcaattcactataaacattcaacaactgccacaacacatcatagacagtctccaagaagatctcctatgttgtaaagctgagaaagatgatgaagacctcatccgctgtaaatttgatgagcaatgaagacctcataagttgtaaatctaaggagatgatgaatgcctcctccactgcaaaaccaaggagatgttgaaggcctcatctgctattaaactgaggagatgaacaagaccaccttcgctgaaacacagccgagagaatgcaaaagagtttcaaggctacaacctaagagaagacaaagactacatctatattcacataaacacacattgtgacaagagagtcaatgctaagacaacaactaaagatcagagtaaatgttgacattccaatatcagcatgatttcacagtatcttaaattaaagggaatcactcaatgagtcatctaaactcttctcttttttaacttaaaattttgaatttcactattcaatagggaatgggaatttgaaatcctattctcagtgggaatagttgaagaatagaaacaattgtctaagattgtcaaaattgatgtccaccttgtagttttgagagaaatgggcttagttcacgccattaagtcaacctcacacaagtgtaaagttgacttaaggggaaaatgtttacaccaaaagtagcctggatgatgcggacatctatttttgacacgtggaaagagagatgacatgcatatcagagttgagtagtctcgagtcataacaagtctacctaggaggggtccctagccctgtgcctagattgactttgggaaccctggaacggaagttcaaaatttaataacttgaatccaacccactatcttttagtattttgtactatgaagacatggagcaatcaaattcaggtgttaggagttgaaattacacgaacctacaccccagaagccaacatgggcacctaaggtttcacccagcacccaagttgacattcccaactaagattttagtttctaggaccgtcttagtgcaaatgggtcaaactctactttggcacatcaactagacataccacagacatatttgaggcattagaatcagattcggagtaagtttatttttgagcacccagtgcccgggcacacaaagcctaggctgacaatttatcaatctagacaccttccaagtattatattgatgatattacttttgcatcttctttgtcttcatcaaaaatagcaaaataggtattttttgggaagaaacaacacatcttgggtgccaaaagcaacgcacaacgcccaggttgaaattttatcaatctgggccgattctgatgatgttttttaagaattctttcgagcgtcttctccattttcattaaagattaagattcaactacttctggagaccaaacaaaacttttgaagggccaaaactgggacccagtgcccaggttgacatattgtcaacctaggctatttctaatcaagttcttgaaaaagtgttccaggcattttttctctcattagatataattaagattcaaacaaatttggggagaaaactacaaacccaagacctaggaaatagggcccaacgctcaggttgacttggtgttgggcccaacgcccaagttgaaaatcaacttggtgcactggtttcgatatctcaaatgctaaatctaattcaactattgaattgggaatggtcaaaatagggtagga

SEQ ID NO: 226447 - DNA, 2462 bp, Cannabis indica
cacagtcacgcaaaaaatgagcccattgttactcggacagtttgaaggcttacttggcttagaaagttaaggtgccgcttgggtgttttgctgcctaatgacactaagaaattcaactttgtcaacgtccttctaatgatatgatattcagataacaaacgatattttaaatgtcactcaatccaatcagtccctaagacacgtgtagaactatataatggtcgtatacctagtctatgctattatagaatttgggggtgccttgttcatgtcttaagaaagaaaaaaggcaaactggaagcgcaaattgaggtttgcttgtttgttgggaatttgaaggagcctagaggtggacaattttatagtctcaaggataataaagtgtttgtttgtacaaatgcaacattccttgaagatgattatattaaaaacttcaagccgcaaagaaaagtagtattagaggaaatgattttagatataactccaactaatgttccatcatcttctactcaaatagaggatgatctgtctccctcggttgaaccaaagtaagttgatacaaccaagaaactactattaatgttcctgttcaaaagatcacggctcctcgtcgtagtgggagggtttccacaaaactaactcgttatggcttggaatgtgaaatcaatatggtcattggtgacggtattgatgatgatccatttagctaaaaatgggaaatggaaagtccgaaacagaaacaatggtcagccagcatggattcagaaatgattccatgaaaagaaagaatttttgggaatatgtaaatgaacttgatgatcatcatccaattagatgtaaatgggtcttcaagaagaaagtgtggactgtgaggatacttttagtcccatcgccatgctcaaatccatcagaatacttctctccatagctgccactttcgattataaaatttggcaaatggatgtcaatacaactttccttaatggaattcttgacgagataatctatatggagcaactggaaggttacaaacttccaatacaagaagataaagtttacaagcgaaataggtccatttgtggacttaagcaggcttctccctcttggaacaaaacgtttgatgaaataatcaaaacctacaactttcaacaaaatgaagatgaaccttgtgtttaccaactcaaggataatcaagtggtagtattcctggtcctttatgttgatgatatattgatcattggtaaacatatcaagaaaatgactgacattaaggaatggcttaacactcaatttgaaatgaaagatatgggtaaagctagttatgttcttggtattcaaatcattagataccgaaagaattgatcacttgctctctcacaagcagtttacattgataaagtgatagagaaattcttcatgaactagaccaaaggggcagtcatgccttctagacctggtgtctgtctatctaaggaacagtgccccactgatcgccaagagatagaagatatgagaagggttccttatgcttcaatagttggaaatgtaatgtatgagatgctatgcactagaccagacatttgctatgcagtaggaattgtaaggaagtataagacaaacccaagagaggagccttggactgcagtttagtatatttttaaatatttaaagagtacaaggcattatgtgttagtctacaagggtggtactttaaatcttgtaggctataccgactcagatttccaggcttgtcttgatgacatgaagtctacatctgggatggtatttactcttgggggtggagcagttgtttgaagaagtgtcaagaaatccacaatatctaactctaccatggagatcgaatacatagctgtcgttgaggcttctaaggaaatggtttggctaagaaagttcttcacagaacttggtgttgttcatggaatagacaaacaacttgttttactttgtgacagcattggtgctatcgccaacaagtaaagagcctcgaagccagaagaggagtaaacacattgagaggaaataccacatcattagagaatatgtcgcaagagggtacgtactagtggaaaaggttgatactaaagacaacctaactgttccatttaccaagattttgacagtgactgcatttgaaaagtacaaagacactctaggattaattaaaatgtactgattgtttcatgttagtgcaagtgggagtttgttgtgttttgtgccctaactaaaactctatttcaatgtaatcttgaatattcatttatcaataaagaaatagatttatttgattacttgattaatgtattatttggttcacatgtttattttatgattatttatttgatttataaattcatctaaatccttgtcacattgatattcttaattattgtgtagtcaacacaatggaaagtaatcaagattatgtgattaaataaattcct

SEQ ID NO: 226448 - DNA, 2207 bp, Cannabis indica
aggagcatgatttggtagatatcgaaatctgaggagcatttagtacataaacaatcatcgaattggtaaaattgaatgaaatttgacaaaagtctttaaatccaataatttcaatagtttagggagaatttttaacggctaaaaaagttcacagggcgtgatttagtatatgtcaaagtttagggggcaaacatcttaattagtctaatttttaccattgtatcttctgagtggttgatgaaactgattataactatttcttatgattaactgtgatgttgcactctttttaatttgattttaattttttttttggtcaaatgatctaggaatgaggagggtgattatttagttcgtttttcttaatcctggtcatgtttccaacaagagaaatgtctcgactgaattgcaatttattattttaactcgttgatattaataaaattacatgatttatttaaaaaataatgtgaatacaattaattatgtatattatttatatattattcataaatttaattttaatatacaataatatatgctactaaatattttttttaataaattatgtaattttattaataataatcagttaaaattgatctaattatacttaaataatggtatacttaattttctcctaaaacaattatgatatatttcttttacaaattattgctattaatgaaatcatctaattataaattgcagtctttgtgtataattttttctaataattcaatgaagttaactcattcaccaaaaaaaaaagtaattatcaaattgcagtcaatctctttaatttttagtctcttttaaaatattcaaaaatagataagggtcaaacatatttctatattttaaattgttaaaaaagttcattatgacaaatgataaccaaaaaaaaaaaatcaaaaaataatttatagaaaataaaaatttctcacaatatttatatagtaaatcctagactactacttagcactaaaaataaaataaaaataataaacctagcttcatgatgaccatattgatcatgatgccataataataaatattactgtaattaacaaagatttattaattgaataaaatgaccccatcaagttaaaaatagaaatataattatttatgatgtatatatgtaataaatataagtaaataaataatatattgtaaagctagtgtctatgtctgtcattaatatttacatgtagataaatttgactggacaccaacttaataataatcaccattatatcaaccctaagaatatatatatggtaggtaattagttaaatgtaccaatctgataaatgctttaattaattaatttgtacttatagcttctatactatagttgtactacttttttcattaattatcaaatttatttaattttcttcattttaatgccgatatatataaataaatttactatatatataatcatatgtattattagagtaattttaaacttttatgtttcattttgttatttaattaaaagaaatatttttgtattatataactgaagttgttctattaaactaagaaagagataaaaaaaaaatattgaatttgagttagaaagagataaataaaagtaatgttaaatataaatatatttttaatatagtgtaaaaataaatattttttttaattaaatagtaaaattaagtacaaaaagtttttttttttttattatcggttattggattaacctttaaattattaaaaattaatatttaattatacttagtttttaaaagttctcaagataatacacattaaaaaataatataaatatattcatcataaactaaactaagttctcaatttgagattataaacaatatagcaaatggaagaagaaaatatggatgtgggtggaaattgtgactctgttaattattttaattatcataaaatcttatgtatatatttttattttattattaatattaatattttattttaatatctcatatatttgaatctctataaaataataataataataatacgagaatttccaatttttaaatttatagttagtgaaaaattattttttgctctagccaggtctgcaggctcttctctaggtgtaggtgcagcttgggattgtgttttgctattgtaatttgatttttgttgcttctattagtcttgtctatgtgacatagttttgagtattttagtcttgt

SEQ ID NO: 226449 - DNA, 1854 bp, Cannabis indica
gttgggctagtgggccttgtacggattcagaaacatactccaactatttgttcagctgggcccagcagctatttgttataagtttgaatctcttcatccccattcatcacaacaaactccaccttagactcttcgtcgtttgctgtctggggaagcgtgcagactattcatgaagaagtgtctgagtctccattaacaagtcgttttacctctctgtccttccactatgtcaggtttgtcttcgaaccccaaacgtttcactcgttcgtctctgtcttctccgtctatctcaccagctccacctgtgtcgactgacccatatcgtcctctgagtccccacctgttcttaagaacctaggtccatcgtcgagtaaaaggaaatctgttcaaggggctaagtctgagtccaaaaaatgtaagggtgttgtctctaagtctgtcccctctcctaatttgcccttctactcccatgacaaacttcttcgctttcaagaaaatatctgttctcatcctttgtggccaaagtatagggttaagttgaggcattttgatagggttcgtgagattgtacagtctagaaaatgggaacgtacagtcactcaccttcaaccgcccaacgtgaaccttgtccgtgagttttatgctaatctagatgaaagtattgtcaatgaaaaaagtcaacataaatatcaggcgtacattcgtgggtcttggtttaggtgtgctccgtctactattagccttatactgaaaatacctaggctagctcaccctacttacactgatgagtataaacccttgtttaaggatgttggtgctgaacttactggtaaacctgattttgtgtggaatggaaatgagttccctgttactattctctctgagttttatcgggttcttcgtaaaattgctttgtcaaattggtgggccaattcacatacatctaccatcaactataacactgctcgttttctatatgcccttggtactggtgtctctattaatttaccatcactgatctacacccgaatgttggattctgctaaggctaaaggggttaagcacactcttccgtatcctagtctgattcagaggttggtcttaagaggtaatccagctgtccttgagcaagatgttacagtgatgtgccctccattggcaagacttttcaaccagtatttggcaagcccattcctccatctgtgattacattttccacatctgaccctgctgctcctgctgcatcagagattcctcaagtgagcacatcaccctcatctcgcttgccctctgctcattggcaagtcaaactaatgtcagaggttcgaaacttggctcatgcttatgcattagatcaacagcgtcagaaaaggtttgagcaaggagttgttacggtgctcacggccatgtccgcagtactaagatcaatggactcaggtccaatctctgaagctactccagttcagtcaagctcctctgatgatcctactgcaccactccagggggagattggctctgacccaatgccagcagctacagatgcaccaatccagggggagacacgatctggtggtgatgcttctctgaaccctactggctaatcatgctcaccgagggggagttgttttgcgtaaatgttttttactttccttatttagttattttgggttttgcagccgtttgacacaatcttataagtgtaatttttttgtgtgtaagttgtatccttttgtgctgtcttgtagctgtggtttgataaaatcttgggatttttattaaaggtggtgtgtttctgtttgtctaaattgtgtgtgcattcgttgagcataatttgccaaggggaagattgtaagt

SEQ ID NO: 226450 - DNA, 2137 bp, Cannabis indica
caagctaatctcacagtcaattttctacagtacacactactcagtaaaacggctataaatttctcaattttcatcaaaatcacacgattaaagtggaaaattaaagctcattccaaggtgcatctaagtgtgtctcacacgtcggtcgcaattctaaagttttgggcctcaaaattagctcgcgagctagtgtaggatttcccaacaaaatttgtgcgaatttttatattattttattttaatttaattagacctcctttcctataaaaggagagctcccctagctcatttttcacactttacctcctctttacaaggttagagtttctctctgtcttcacactttctctctctagaaattgtgaagttaagctagagttagtcatttttttttcgagttctcttgtaaggtaattaagtttttatgataataaaagttctaagtagacgtagcttcattaccttcatagcaagcagagtcaactactataactaaggtgttctcttttcacttatgttcatacattcgttggccgctccgcttatcagatggtacagagttgattgcttttcagcgtcaacattttggtgctttcattgagagaaccactcgagacccttggttgcctttgagtttttagagtttgattaggtgcttcattctgcaaggaaattataagtacaagagcctaaggacttccaaaaatatggtgacaactagggccaccagtgttggttgtgatgctttagttgaccggacctcgggcggcaggataagagtcactgacttgagatcaccaaacaagacgaaaataggaactggaaacaacactgatggtttggtgccaccatgtgagccacatgtggaccttgaagaggatcttgtggaacatcaagaggagcatgtgcccaaccctaaggttgggcatctgaaggagtcatttgctaactttcaaaggaatttgcaagagtcaccggataagcaacgagaagagttacaatgctagttccaagaggaatggactagtgttgaggcttagcaagatgcccagagaaagaggaaagccaatttggctcaatcgatacgtgaagcgtataaagttgataacaggatggtgctaaggagagtgtcgtccactagaggaagggtacctcatcagccaactagcctcgtaggcaccaatgttcagggtgaaactgtaacatattatcccataggaatgccacatgtgtatttttaaattagtttatgataataaactaaaattttataagaaaatgtgatttaattaaaattttgttcattaattataaaataagattttaaaatataatacaacttttgggttcggggatccccttaattacaaaatagttccataattgttttacgtcaaaatatataactcaaaagtgacattaaactactcatgacaactttgacaaagctagacggaagagctaataggtacacttgttggagaagacttcaaactcacaattgtccaattttgcgtttctccttacctgcaccatataacactcgtgagtcacaaagacccaacaagaaaatcaatatcaagtaatcacatattttaaacattccataataaaaattattttcctaataagacaaactatgttgttacttaataaagtaaccattattctccgttatttaattaaaaaaccttcggttcgttgtgtaatgaggcaaccattaatctatttcccaagaagacaacctttataccctatagtgggttttagagagtgcaactcttccatattgaaaaccctacaatgggttttaaagagtaataacccttccatacacattaccctacaacaagtttttaggagtaataactcttccatatgcatatggcaataatcgtatcacattcaacatgctaaattgtatagttatacttttcttacctcaagtctaaattcaagtgtactggccaactcgagtgggaaatgcagggcgatccgggccatgtcgtacaacgataaactgctaaataactcactcaaacccactttaggacttaacataaaagctggctacaacccatctagaaaatcccatccagaagttctacataaaagtccttataaaaaaaaaaaaaaa

SEQ ID NO: 226451 - DNA, 2032 bp, Cannabis indica
ttctctcatcgtttattttaaaaaaaaaaaatagttgtccaagtcgcgttttgaagggtaaatcatgcaatttcgggtttcccgttctaaaactctggaaaccagagttttaaatttgatataaacattcttctccacataaaagaaaatatcttaggtattcagaaattttgaagataattcagagaaggagattactaaaactctaactaccttatcaattcagggcaaaaatcatacaagaacataccaaaaatcaataaaaataacgaaaagaaaaataggagtaaaaattgaagacttatcgaattatgggttttatgaagacgttgatgatttcttaccgaaaatctcctacaccaagggtctggaatataatgagaacgacgttggaaaaaaaatggtgttgagacgctaagaaagtatgtaaataaaattgggcatgcaaaaattttgaagtaaaaatagattttttctttggtttggtatttcaaatgaagtaatgagaaaaatgatggtaaaaaatcatttatatcaaaaaggtaaggaatcgttgatctagttcaacggttagtgatctgtctagggaatacgaaaacacgggtgaaaagctcgtcagatgaaaggatatttaattaatgatcaaataacctttctcgagaaaaataaaactgtcaaagaaaagaccaaagtgacctaccaagaattacttaaaaaaaaacccttcaattctagaaagagctttttagggggcaattattatgcctatattttgagccatatatatagaaatgacacgtgggtattagtctcaaaaatagggaacttacaaatacaaaggttatcttatctcgggatgtgctacaatcaataaggtattttctctcgttgtattatattatggctatcaattaaaagagataaaattatacatatagttactagcaagaataacagtatcatgagttaatctcggaacttaatcgaggtaaatgagacttgcataaaacactaaaggatgagttaaagagaaaggtagataacgagctctttaaaagcttgcaactcattgatccacatactcatgagtatgttgaaagactaaaggccatgatctagatagaacctacctcgacattctccatcacatgcgagaaaaccaatcaagagaaactcgctttagaccgcttcttaatgatatgacggtggaagcataaagttgtcttgcaatgttacaaaagggtgctagacaactctgaacacaccacttcagcaaagacccgttacttttagataagattaaaaaacttttattagcagttattttatttatcccacatgttgtaaatatgaaacgaggggattgttcacacttcataagcagatactcaggtaagatcaagagggaataactgccatttggaagaaacctataaataaggacaaaaacctacgaagtaaggaatccagtttttcggaagaaaaactctgagagattaagaaaatatctagagatattcccttgtattcagaaacattataaaaatattatcaaaaataatattgactcgtggagtatgtagatttaactacaaaaccacgtaaaattcttttttattttatctatattcaatcataattagtattttagttttatttaaaaagacttcattattgttaacaaaaaaatttgttaacaataatcttttcatatgtaatttaaaagggaaatttgatattatatgcttaaaattaatttatccactaaaaatatgctagcatattttgcatcatgcaaaatatactcacactatttttctatccaattttacccttaaacaaataaaaatcaaacattcatgtctctctctctttcttcggcgttaaccccgacctagaacccctaccgtcgaacacacagacccagaacttcagtcgcaaggcctcgccgtcatcttctctcacggcctctctcgttttctgcatttttttcttctggtttaccagttttttgcgatattttgcgatattt

SEQ ID NO: 226452 - DNA, 1838 bp, Cannabis indica
ggtagtgcattttggactttccaagcaaatattttcacctttgggggaatttgtagtgcccaaaagtatttccaccacgtcttgtaatcatccgaggacgattcttggtccttctcagagatagagcttgctaggtgaaagcctaatttaacactgtagataccatttgtgttatgatgccagataagcctatcatttgactggtaaaagctcaaagggatagtaagaatccggtcaatatcaatttgagcaaaatcctcatgtaggcgaggcacattccattccatagtatctaggatgtaagacgatacaggcgtagatggttctctagagtagcaaattggcttgaattcatcatgccctgggatccaaggatcaatgccacatcttacatgaaaaccattaccaatcttgtaacgaagtcccttaagaagtagttcgcggccccagtgaattcattgccacgttaaagatggagagtgacccttgtgagcttccaaaaaataatttctgggaaagtatctatgcttcaaaagtcgagctaaaagtgaggttggattttcaaataatctccaagcttgtttggctagcatagcttgattaaaatcaacgaaagatcggaaacccattccaccttcaaacttggatttacagagtaatttccaccttttccaatgtatcttagacccatctttgttagtaccccaccaaaaattttccatcatagattcaatttgattgcagaaacccaatggcaagcgaaaacagctcattgcgtatgtaggaattgattgcaccacaactttcaatagtacttctttccccccaatagagaacaatttgtcattccaagcatgtaggagtttccagattttgtccttgacattactaaataactccttgttatgacttgagtatgcaggaagacctagataagtttcatgacattcacagatcggcattcccaaagtttggctgaaaaaattatttgcatcatttgaagtgttgggtgagaaagacatgattgacttgttggtattaaggaactgtcctgaagctcgatggtaaacctccaatatctttttgattgctaaagctgaactatgatttgcatggcagaatagaagactatcatcagcagataacaagtgagataatgacggagcttgccttgtgagttttaatcccaataaattccccacctgctcttcatggtgtagcagccttgagagcccttccgaacaaattaaaaaaggtaaagtgatagtgggtcaccttgccgaagtcctcttgtcggccaaacattgcccacaatttctccattcaactgaaatgagaagctattggacgataaacctcgcataatgagagagatccattggtgagcaaaccccattttttccatgactgcagacagataatcccattcaactctatcgaaatctttgctcatatcaagcttgagcgccgaaaaacctttgttaccttgagtcttatgtttgagatgatgaaccaattcaaaagcaacaagaacgttatcagtgatcagacggtttgggagaaaagcactctgattttcagatatcacctaaggtagaacatctttgaaccgaagcactaacactttagagtcaacttgtagatcacattacaaagactaattggtctataatctcccatggctgtcggcttcttaacttttgggattagtgtaatgatagatttatttaatctactcatatcatggccttcattcaatacaccaaggactacagcagtaacatcagagcctatatgatcccaataattttgataaaactgttgaaaattattttacc

SEQ ID NO: 226453 - DNA, 1716 bp, Cannabis indica
aacattgtgagtgttgtgttatatgctatatatagtttactatttacatcactttagcttctctcaaaatgagttttacattattttctatctatatctgtatcttatatataaaataaaattataaagagttgatttgccatcagttttttcatagtttatatttactctaattttttaaattatctaattctatatattatataataatttgattcattgtaagtttattttaattctatgcatgcataaagaaatgcatttgagttaaaattttgattaataattaatgaattattttttaatatataattttaaaaaattattaaaatcgcttcgagaaacgacgagcacgactgaagtggctataaatacaaatctatttacagatctatatgtttcgattggaactcaaaattccagaacaggcggctggtataccaccataataaaactgccttttattttttttattcggatgggatttatgttggctgcgtcgggaggctcacgtagtttgttacgtcagctctatggtttattccttaatatatatatacaggttatactagattattgttacgtgcattgcacgtatacttagttatatttttagcttttatttttattatgtgtattattttataaattaaaggaaaccactaattaatttttattttttaaaaaataatatttaatgtttaatttttttaaaaaaataaatataaagtttaaaaatattaaaattaaacatactcttaatattaaaaatagcaataaaaaataaatataaagtttactcttctccgcctgcaacctaagaagttggctttggcaacacaacaatagggttgttccctttattctatgctgacccagcccggggttgtttggaattgttgtaaaagattgcaaagtttgattgtcctctttaattaatgttactatttgtcatgttaagtgatctgctaacaaggccgcccactgtttggctctggctcgtggctcttgttattggtctgattgtagtttctcggagagtactcttcttagtgctctcaaatcttttgtataactgcggatttgaattaataatattatcaattaccattcaaaaaaaaaaaatcctaatattaaaaaatataaataaaaaaataaatataaagtttaaatatattaaaattaaatatactcataatattaaaaataacaataacaaataataatgttataaataatatattaatatttatatatatttaaattaatttaaaataaataatatttatatttatatttataaaagtaatttgattaagactgttaaatttaaaagaatatttttatagttttaaaatattatattaaatcaaaataaaaattccacctcactagagaactcattgcactctgtcccatgatttgcttcgatctttttatctttgaaactcaagtagtgaattaggtttttttttttcgaaatggataagtaatatagtacaaataaaggagagataaactccatctatggaaaactcattttttaaccaaacaacatgcaaaaatgatgggaaaaaaatacatgacatgatagacagactcgaaattgaaaagccaaaataaacacctgtatcacaaaccaaaatctaaaataaattataggtaactttttgacatatattatatatactagcaaaaattacgtgcgagacacgt

SEQ ID NO: 226454 - DNA, 2099 bp, Cannabis indica
ttaataatttgataagaatgctaagcctcctatacgattcacctatactagaaggaatgttggacaaatgggtcaagggtgattgagtctttggctgggtgagtttgttagagggtagtttgggaattgaggtgattgttgttggccttttagtgccataggaagctatttttttctgttatgcaagtactgagaagtttctctgcatcatgagaactcttctttctattgtatgagactatagtctcttttttttccttacaattcaataaagcttccaggaattcttcttcatctctgttgttgcattttattttactgctataattgttattcaattacccaggtgcttatcaattggtatcagagccactcgaacttggtgaatgccggtagcaactcgaatggagtctcgtgttgatggagttgaatcatctattatgggcatccaaaaccagttggatgatcatggtgttattttgaagactcatggggtcgaacttcagaccatgagggaagtgttggattggctggtagctggacaagatcggctggtgattgctcaaagtcgagttgcagatgaattggcatttctccgtgaacggtcgacgggagtcagccatacagctcggcaaccgcaaggggaaggttccacggccacggggggagctgggttcaatggcagaaacggggacgggggagaccgtcgaatcgagtttcatgctcgaaaaatcgaacttccagtctacacaggagatgacctcgacgaatggacttatcgggctgaaagatacttcgggttgcagcggttgtcaccagctaagcagttagaagctgcagttctgtgtttcgaagggccagcgctgagttggttccgatgggaaaatcaacggcaaacaattcaaacttgggatgaattgagtcgtttctactgaggagatttcgtcccaagagcgagggaactgtctttgactgtttctttgttctccaccaacaatccaccgtccaagactactggcgacgatttgaatcgctcgctgcatcagttttttggtggtgcacgaccgattgctgtacaatggcaggttggtgttgtcctctacttcatcaatgattcctcacttcttacaggagtatcactgctcttcggttgggggtcattcgggtgagctacggacataccagcagcttaaaggagatgttgggttggaatgaaggccaaagtgttggcatttgcgagcttgcgacacttgccaacagaataagtatttagccatgtctcccagagttttgctacagcccttgtctctaccagcccaagtgtgggaagatctcaccatggatttcatcgagggcttgccaaaattcgagggagtggatactattttggtcgtggtggatcgcttaagcaaatacagccactttattggcctcaagcatcccttcacggccaaaactgtggcagaaacattcatcaatcacgtggtcaagttacatggggtgccatcctccattgtctccgatcgagatcaaatttttcttagccatttttggtcggaattgttcaaactccaagggactatgctccgtcacagcacctcgtaccacccccaaactgatggtcactccgaagttgttaatcgttgccttgaaacttatctccgttgtttcgcttccaattgtccgaaaggttgggccaaatggttagattgggcggagtattggtacaacaccacttatcattctttcttaggttgtaccccattcaaagttttgtatggccgtgatccgccttctttagttcgctattcgaccgggtccactccggtgttggccgtggatcaatggctcgaggagagggactcattcttggatgatctaaaaatgcacctcttgcgcgcttaacagaatatgaaggttgtggcagatggctcacgaagccaggtggaattcaacatcggggatagagtctttgtcaaattaagaccctatcgccagaaatcactcgccgtccgtaagaatgagaagttgacagcaaggtactatggtccattctcagtcttgaagcgcattggaaaggttgcatatcaattggattt

SEQ ID NO: 226455 - DNA, 1161 bp, Cannabis indica
aacttagaaattaagagataattacacacaaaatcccatttctctttctcttctctcgacagtacctaagaaccagcagaattaaggagtaaatttcatcactaatttaagaatctctagtagaatcaaccaaggttagggattgttcaagctttgaggtaactcttcactaatttttttttttatttctaaggattctaggttaggttttgttagattttatatgtatttcggggttataggtttagatatgttctgagtatggtttctaagtttgaattaagtttgtgtatgttttgaatgactacttggctgtttaggcttgaattgggagaactgagtttaagaactcaattttcactctttaatggtgatttggttattttgatgtgcttatgggtttttaatgtttaagtatgttgattttatgttgtaagattgttctgggaagtttgagcagcttcggtgaagctttggtttggtttcgaggcaaaaaaccaaaattttcccatgcttccagaactagtcgaccgagtctacaggccactagtgaatcggtcaatcgattggccagcaggggaaatttaggtttttcttgaacctggtttttgggtcaaggtgttttcctgaacctagtttagggtatttaagtgatgcatagcctatttttgagccactagggagttagggtttgcccgattatgaattaggtttttattctgaaattcgattaaattgtgttaccaagttttgttgtcgtgacataggatccaaaattgttgagtgtagttccactcaggtcggtctgcacacctgatattggattgaggtatgaaagccaattgcactgctaagcatgttaagtgagaaatgattattatcgtttgtaactcgattatgattaaggtaaagatacggtcattaccgttattgtgaatgagtaattactcgcttgaaactacagataggtttcttacttattgattgtattatcgagcaacgatagtgacatatgtagctcgtggatgacgagtgataaggatgcttttatgaggcatcaagaatagttcgtcttattagacaaatagttgtcatgtaatgctcgattatgtattccataaatatttattgtgaatgatgaaattgtatgctatgcatgtt

SEQ ID NO: 226456 - DNA, 2458 bp, Cannabis indica
aacaaccctccccatacccgtacccctccttcctttcttcactccaccatccacattaatcttcaatgcaccacccccaggaggacaccaatgcgcctctgcccgctgcctttgactcccttcagcccgaccttgcccctgaaaatcacacagaaacttcgcacgccactcgactacatcagctggtcgcgacaccttaccaccatgcttcgttatattccttgtgaaccactgctgccaacataaaatcagaaacaattcacagtcctccttggaccaaaccttggccagccgcatgagaaatgtcataacatcctcctttccatcacgacgaagctgattgttaaatccacttaatttccaaacccccttattagcccgacaaccccatatcgcatggaaaacccgattcccgaatctgagtattacaccgttgacagccatgatcaatatccatacctcgagaagcaagggcagcatttgtggtaaccagagtgagccaatttccatacgaagtgcttcactttcggagggatcttcaatttccatagcaacttccaccactccctaatgtgactatcatccagcctgccctacctctttctgcagatctaacgccattccatacccactacgaaccaaatattcactattgttactatagtgccacagaatcttatcccagacctcacaacaggcatttgtagaatcaattttgcatcttcctcattaaaaatggccctaatgaaaagactcttttgaagttcgcccaaacctccatataactagaaatgactctggaaatgtgactataattcaaattgagaaaaatattttaaaatataaaactaaaaatttgaatccatgggaagatctatatattttgtaagttaaaacccatgtataaaattagagagaaatcaaaatcaaatttatgaataacagagtttaatatatatattttgaaaaaaatttaaagtacaattttagtccaattatttttttataattgtgtaccttaaaattattttatcaaatagtttacagactaaaattaaagttcgcgtataagaaatgtattagactaaattttcactcttgaaatatagaattaacctatataatttattaaaccaaagattttatcgtaaacttaagctaaatattcaaaatccaaaacaacctccaccaatggattcctatataataataacgtttttgtcaaagttaaatggaatattttaatcaattttaatatgttgaaaattagcaatattctcgttaacttgtaattaaagatggtgtaatataaagtccaattctaatcacgtatgataattaaagcaactcatgtcatgcacatagtattatgagcattgttattagataccagtagtgctcaataccagtgcctcatgattagaccatctccattgcaagatgtaaatattgtattaaatttgacacaaaaaatgataaatatcattttagactttgtattttgaaaaagttacaaattggaccctttatttcattatatgacaaaatagaccctatattttttaaaatggtaaaaataggactttgaaatcaaatttaaataattttattttctaatataatcaactttaacataatttctaacacgaacaaatacagaaaatgtaatcaattttgtcatgacatctctagattgaattattattaaattttattttgacaaaaatcagttcagaatcctattacagggtctatttgtcatttaaaaaaacaaaaagtctaattggtaacttttataaaatacagggtccaaaatgatatttatcccactaaaaaatgaacaaattttatatttagcacaatatttgctatgttgctccaaggcacaataacattttaagaaataaattggtctaaaaagtaaaatatcattaatgacaaacaataaattaaatatttaaaaaattactaatgacaatattctaaataaaatgtatgtattaaagtattttattaatgattaatgacaaaagtgtaatgtaaaaagtagtatttattgtgtgtcaaattttacataatattatatcttgtgctaaatttggtctaatttttagtatgtgctaaatttggcacaactatcattagagtaaatttttattgaaaaatactaaaaaataacaatacatcactaacttagcactttattaaaaatgctcttaattattaatatttttttaataattacactaataacttctagagactaatagtaaattttaacaattctcataacatatgcatgctctcacttttcacttgtcccattacaaaattttagctattaaatagagttatacgttgaaaagtaaacaaacacaagagacttttcaaaaaaaaaaaaaacacaagagatacaaaccagtaagaaaaaaaagcaacttcatgaaaacatgaacat

SEQ ID NO: 226457 - DNA, 2969 bp, Cannabis indica
ttcttagtttattcatccctttttagttcctcataagttattctgttttttttttttttgtcttgatttgtttataactaacaaaattaatttttttatcaatgtcaaagttgaaacatatttttcaaaaaataatttatttttcacaagtttgtctgacagaacaatatctccaaatcaagaggtaatatgattagaactttgccaactgaaaggagcccaaagttgtgatgattaagttttgtaaataaggagaatggtcatctaccactctctcctagctaagtgacttccatatcttttctttcttttcttcctctttcttctcaatgttagtggttgtgtaagtttcttttggggtagtttggctgtgttgttgttttcccttcttggtagagtgtggtttgggtctattttctgctttggtcttaggtttctctgcccttgctctttggttttctcgtttctttgttcctttagttccttttgttgtctcggttgtggggttctcctggtttgtggggtaggggctggttgaagggttgagggagttcggtgaggttggtttgtttgtttgatagcttgtcatttatttgtttgctttcaatggctttagttaatgccaccaactcctctactaatggaaagtgttattctcatgaggaagcttcagtcaagatcagtcagtgtgcctcttctcagcaggcattatccactttttgtcttcttgggaaagttgtggccccaatggtagttaatgaggccactattattgactttgtggaaaaagtttggaagtttaatgtgactgtggtagctttgaatgatggtgctaacaaccataactgttttgagttgggatttttaagcactgaaaaccgcacttgggctcttgaacatggtccttggtgtgtacgtggttacacttttatcttgaaagcatgggcgccaaggaaggaacattttgacatgtttgaacatgtgagaatctggatacacatttataatctcccaagagactatttctcattgttaatggcaaaatcttgggggcaaaagttggcacagtgcttactgttgatttggacgaaggcaatccggccctatggaataagtctctcaaagttttgattagcctcaatgttaaccttccactgttttcaggttgttattttgctctggaatcgggtatccaaaggtgggtacaattcaaatatgagaaattggggatcttttgttaaaactgtggcaaattgggtcatcaaagaagaggttgttccctttcttctccagtcacggtatcaagtgagaatggggttcctttccctttgtttgggccatggctgtctatggattcatcatacctggatgtcttctcgggtgccaattccttcactccgacttcgtcgtctgcggctcaggcaggcactggttcggttcgtgtggggagtcgaccgttggccatggtttctggtgtgaagggatcagttcgacgtagccctgcgtctcggttactgagtcgcacagtgatggcgacggggcgtagctcgctgggaggaggtcaggctcgcaacagggagtgggttcccaaagctctccctgcctcgcgcatgccacaacctaccgttatgggtaataaggctcttggtcgtactctggttgatagaaagtcgactgaaggcttgcctttttttttaagcaaactcggctgacctaagaagaacgagtgggaaagagaaaggcttttttgaaagggttgttgggccggttcatcttctaatgggccggtttcaaaaatggatatttttaaagatggagcttcttctggtgggccttttaataggtgtaatgtatccaatttatctcttcatgggaccgagcccactttggagaaccaaaatacagttttgcctttgcttaaggttaaggggccgtgtgataatattgggccgggtgggcttcctgggtttaaagataataatattgctagttgtgaaaggccaaccaagaccatttccattgagagttctacttgtggccaagaagtgaattttcataatgatgaaactcttgccttatccaatttttttcaagcacaagaaactcttttacatgagctcaagaagtttggaaacctggacttatatgagattaaagccataggtggtgacattggggtcccaactgcttcggaggttaatgaaagaaccactcctttcaaaaagagaaagtttgacggggcctcggcgtctctttgttctcggccgtggaagcttcctcgccaccatccaggggttgtcagggactttccctgggactcagatgccaaggttattgctaccaatgatgtggaggaggagccaactgaggatgcctccttatccaacagtgacttcttgggatcggatgagtggtgctcaaaaggaaaaaatgtgatctcagcaaggccgatggtcggtacatttgtggttgatgattctggatcgtttgggtctgcccattctcatacccctgtggaggaggctactactcctccacaggagccatgagaggaatcgcttggaactgtagagggttagggcagacctctacagttcgggagttgaagtccctgattcggttgcgctccccggatttcatctttctgaccgaactcaaagtagatgctacttctttgatcaccaagcttacttactcccttgccccaagttgtgctcgtcgaatgtttggcgtcctccccctcaggattggttgaagctgaactgtgacatcagagtagggttggatagcatgtgtgcagctgtggttgcaagagatcatgttggcaaggtgatcggggttactacttctaaactggagtttgctgatgctctctgcggggtagcagcggcgtgctgcttagctttagaggcggctaggactctaggttttcattatattattgttgagagtgattcgagggtagtgat

SEQ ID NO: 226458 - DNA, 1691 bp, Cannabis indica
cataaaagagtgattttttttttttatgtaattttaccaattccatggattcccaataattcgatataaagttatatatttttaggaaaatttacaaaaatactgaaatttaggttaatttttacaataatatatcacacgatttttttttcaaaaatactgtgtttttataaaacaacagtggagcacaaaagagaacaactaaaaataacagtagaacaactaaaaaataactgtataacaacaatgaaaacttaacacagtagacagtataaaacttgcacaatattttttaaaaaaattccgtgccacggtaaaaaaaataaaaataatgtggtgtaaataatcatatttttttttatataattatatattcaaaaatttccgaaaatatgtcaagtgaaatctaaatagataacaacatgtatagaagaaatgctcactctttttttttcaagaaaaaaaaacaccataaaggtatggtacaaattagaaggccccgtttgagactttgggctgggcctttgacagtccaaattgaacgcaactcagatttcgggccttcacttgagcccactaagcccacatattctaaaatttggatcaacatgatatctttctcgttttctttttttataatttgtaatataaatatttaaatttaataaagacataattttataataatatttcaatataataaatatattttatttattaaaagttcataaataaattaaaacacttatattttttttaataaatacttatgtttataagttattcagtatctaaaaaattaaacaaaattgtaattaaatgtgacatttatgtataagcattatatttatattattattgataatatttataacttattaatctaatatatttattataataatatttttgataatgttgttgatataatgtgttcattaaaatttaatatataattttctaaataaattatgtatgtttattatttgtttttttataagtttgagactttgagtatgtttgttatttatttatataagacttggggaaaatttactaccttatataaattgtacataaagttagaattatgtttatgtatctaataaaatgtgtataattaaatgtaaataagttattttatattatacaatagggttgtacataaatttttataaatctcgcaacccacaaactgttcaaatcaaaccgagataacctaacgaaaaatgcaaactgaaaaacatgacgaaaatataacccgcccaatttttatattgggcgggttgaaaataataatcaacccgaactaacccgaccaacccgattaagagtattttttatataatatataatataatttattaaaaaaaaaaagtttaaactattatatttcttttatggtggttgatttgaactttgaattcaatttatatatttctttcattattacaattaactaaaatataaaaattaaatgcgaaaaaaacccgaccaaactgaccaatttttattgggtgggttgaaattttttttcttaattgggcaagttgcatttagatttttgtaacccaatctttacgttgggttatataaattataacacaaaccgactaaacggactgaatgtaaacctctattatacagggttataaaattatataatgaataaaactatttccaaatagcat

SEQ ID NO: 226459 - DNA, 3340 bp, Cannabis indica
tgcacaaaggaatttcaaattgaatgtttggataaagattgtaaatggtcactaagagcttcaaggaatggggaaacatagaattttataataaggaaatacaataaaaaccacacttgctcactaagcatcaaatttggagatcaaaggcaaacttcagcaaaaataataggggactatgttaattacaagtttttgaacataaaaacaacaactacaccagcagatattagatttgagatgaaggcatggaggagtaggaaacatggtctaaacatagttggaggaaaagtaaaggagtgttattagttgctgcctagttatttctatatgctccaaaaaacaaacccagaatctgtagtgcacattgaaactacagaaaacaacaacttcttgttttgcttcatggcactaaatgcagacctataacagtagtagacggaacatttcttaaagcttcatatgagggaacactactaacagctagtgcacaagatgcaacaagtaaaatattcccattagctttttgtttggcagattcataaaatgatacatcatggaaatggttctttgaaaaattaagagccaaatttggtattagacaagaacagtgtgttatatctaatagacatgaaagtataataaaagtagctcaacaagtcttccctaaaatacaacatggatattgtgtgtatcacctactcaacaacctggagacaacattcaagaaaaatacaaggttctttgaaaagctattttctcgtgtagcaaaggcatacactgctaaaaaattcgaatatcacatgaaagagctcgatgccttagacaaacgggttcgaccttatctacaaaatattggatatgagaaatggtcaatgttgtattctaaaaacaaaagatacagtacaatgacatccaatgttgttgaatcattaaatgcagcaaacctgacagctagagaactaccaataaaacactaatagaagctttgaggactttaatccaagaatggacatgcaaaaataggaaaatggcaaaaggaacattcacataattgattccagttgcagagatgaagatgaaggacaactacaaagctgctttgaaattaaaggtacaaaatttttctaaaacataatttcataatgttgaattaatgttttttttttctgttataaaaacaaaataaatacacaacatatttgttctccggttagagcatcaaatgaatacatatttgaattgtacaaagtaaaaagatcatgggtggtgaatctagaacaaagaacatgcacatacaacaggtttcaaatagatgaaatgccatgtgcgcatgccttagtagtgatgaaagagatgtatctcgacccatagaaagggctgaacatcgggcgagtttaccgggttttgggttcgcaggttttgggttcacgggtttcaggttcaaaaaaataaaaccgaattcggacccgaatagggcacaggttggcgggtcacgggttgatgggtttcagttggccgggttgaccgggttggcgggttgactcggtcaactctgtcaactctttagagcaattgggactttccataagaaatcaaagatattgaaatattgccaccacttgaaagggtgaaagcgggaagaccaaaaaagaaaacaacaagacctatttgggagacaaagacacaaaacaaatgcaccaaatgtagaagaaaaagacacagcaggaggacatgcaagaacccaaatatagattgaaaaaatagcaactacaaaacaatataacaacaaaaaaaacaacataagttgaacatttttacagatacaaagaggaaataacaaggaattttaaatagtgattgctattgaattgattaactgtgaattttattgctattgaatagattaactctgaaatgcattttaaatgaattgatttgataatgaattgtttagttttgaattccataaaatggcctaattaatgttgcaaaaacattaaaatttaaagttaatgttgtttaaaaaaaatgaagaacaaactcttaaaacaactagaaattggtttctatataaaattacgttagaaaacagatatagatgttgatttttttgtttaaaaattgtataaaaaatattaataatcatttaaaatacaaataaaaaacataataataaaattatgatcataactacatataatatcaacattatatagaatagaaagattcaggaataaaccaacattgttgtgtagttcaggctaacaacaaaaaaaaaacataaaaatagccataagcaagacaccaacatttgttttaagttttggctaaacaacataaatataaaaaataaaaaataaaaaagcctacagcaaattatcaacatattatatcatatcctggctaaacaacaaaagataaacataaagtattgttcttgaattcaaatcacttcgctttagctttcgctttccctctagctttcgccttcgtcttctttggaggtttaggtggactttctagctcactttcaacattctcaacctgtttcataagtccaaacttgtatagcaacacagaaagccttagacgatactcctcaacatcaaagtcaacaagaatattcttcccctcaatgaaatactcagcaaaagcagcaacaaacgccccacaatcactagaaacaacaaaaacaaaacaacaatatatgagatgttaaaataacaacaaaactagaaaattaaaacataacagaaacaattaaaattcatacttatccacttgttcaagaagtacttcactattgacaataggaaaaggtgcagtaggattcacagatgctggtaaggtataaggaagctcatcataaacacccaacagagagaaaaacaatggaaacatgacagaataaggttccaaagcaagcaaagaagcagtctcatactttggggtccttagagaattatacaaatatataattctaaatttcatgtcaagcctacccataacccaatgactaacaatctttatgtgcaccaataacagcacatggtcagcctgactccaatgtgtaccacatcgaagacgtttaccctttatgaaatgagcaatttggtgctttggatgaacaagagacatttgttcattcatacttacatactttccatgcagtgacctgatgctactattgaaatagcaatctgtagttgtaatcttgatgtttgttgtagtagaatgcttagctttctttctcaaataataaaaaatcacatccatatgctgaaaaaattgaaaagatgaataaacaaaaacttaactaacaaaacaacaaaaaact

SEQ ID NO: 226460 - DNA, 1296 bp, Cannabis indica
tattaataacataaaaataataatttatatgtatttagtacacaaattttatgtgactaaaagatattttgtactgaaaattttgtcaaacttaattaacattatatcatgtttgttagtgttgccattatttcagcgcgcaatggaagaagacgagagagaaaaaaagatagtcactagtggtgtattcttattctactaatactatactgtaaacaaaataatatgggttgtaaataattagtaattcttataataatttaaaattatattaatacttacacatagtaatattacgcttattttagtttttttttaatatatttaaataatattaaaaactaaatacattaaatctctttgaaactaaatgataggggtgagtatttgataaaatctactaaaaatacatttaagatcaatattaataatgctgctatttttgaggagcaaaataaatataattttagttaggtagctagaaactgtgaaggtaaaatactttggacaaaattttgtagcaaaaatggcaaagtttgctctgagtttattgaaacaatgagagttaaggaaattttaaattggataaaagatcatagcctttctattgtgatattcaatatattagaagcctagagtctgtttagctgtatttttagttttcaatttttagaattgtgtcttaaagtaagaagagatcacagttttttgttattttaaaattttaatggtatttgatataagttttttaaaactatttttagaattttttttactataaaaaattaatatgttaacaccatatcatgacatcaactaattggggttcaggttcgggtttggttttggatctaagatctgaatataagagcaaaaatataaaatataatacgttcgataaaaaaaaaattaaatttgaaaataacattttgatgtaatctattttctaagttttttaaaaaaaaaattaaaaattactgcaaaatgacctctattaattttaaaactgtttctatttttaaagttgtaaaatagttttaagttatcaagtcaaacaatctcttgacttctcttaattatgtttttgaatttttgtgttgcttgattgtcaacattactttcaaatttacatgatattttgttagtattatataaaacaaatctgcaaatcgtattactcactattatttagttaaaaacttctgtttcaataactaattgtactcacagaatctactttgccccttttaagtttgattgtatgtactcttgatttttgagttgatatctaataaa

SEQ ID NO: 226461 - DNA, 1645 bp, Cannabis indica
ctcggaaattgtgccaaccgattagagggattaaggaataacttgagtccttggagcataagataaatgcttttgaaatctccattgcaaaataggagaacgtcatcaacaaaactcaaataatttagcttcaagtccccacacctctcatggaaaatctttaaaactactagatactttttataacctcaaataaatcaatcaattaaaaaaatgcatgggaatgaaaatacatcttagccgaactatattcaagttataaaatattttttgtcaatctaaatatgctgaaattgcaattaacacagttcattttttgtctatcaggacaaaatcttctggtgtgaccctctttttgacagtgataacactttatttttgggacatttcctccaccatttccattactaattcttgattttgacctcttcatgttattcaaatttttcatcttttagtttctgcctctaaatattagcccttcaccatttatattgggcttagattccttccactcattcaattctcttaaattcagagtagtttgaacttcttcaagggtcaaggaatccatttcatacaataatgtctctttgaattgaccataagatctgggtaaaaaacataataacaacagagcttaatcttcaacacttatagtaacatctatattctcgaagactcgatatgattgcagtatgagccttatcaagaatcatcttcatgtccctttcttccagcataatgcagagacctttatcttattttagagcatctttaagatcctgctaaaccaaaagagccttcatcttcaatcgccacaatctaagatcgttttgtctaatgaatttctccacttcatactttatcgatcccataatttcgagtacacactcaccgcactaatttgttaggaatcgaatgagaattcaccacaaatacccaaaccagatcacaattcacaatgtggtctaaataattgattgaatcaataatcaaaacaaataagaaattaataacactgaacatagacgaatcttacatacacataaattgatttattgaaagagtcaatttattgcattcataaagttcctcttcagtgtaacaattctttctcacttcttctctttagagcttaaagaattaagtcttcaattttagagaaaattacatgaaaaataaggttcaaattagctcaatataggtatttaactactagctaccccaaatagaataggaaacctttctaacaactttgttgacttagaccaataatgctattcaaactagctgactagaccaacgaacaaacatatatatatatatatatatatcatatatgcccttgcattgatccattgagataaatattacaatttaaaaattattttggtgcattaattaagacaaatgtgtattagatatcatggtcaatcaatacacactacaaaaaattaactttgagtgacaacataattttttaacttttagttcataacaaaagttatatatgtcaataaaacataggtgtttgtatacaattagttactactttagttttaattacacaacaaatattagtgactaaaaatacatttagtaattataatttatattttttagttgtactaatacttttagt

SEQ ID NO: 226462 - DNA, 1598 bp, Cannabis indica
tttaacctcatcggtagaaaaaagagcatccagaaacttattatgctgatcactaatcttcttgtctacaactgagagaataaaattaacaacctcaaaattattaccctgagaactgaaaagattagaaaagtaattacaaacttcattccataaatcagagaaagaagacatctctctaccatcatttaaattaaaaaacctgatatgattggttttttttcctggaagaagctttattatgaaaatatttagtatttttttctttagtatttaaccaatgaattttgaatctttatttccaaaatacttcatgcttatgaagaagactataagttgagattgaagattttgagcttctttaaagcctcattcgagataggataactaaagtaaatagcgttaatatcctcttcaattttattaatcctagctttgagacaagtgaaaaaactacaacttttaataacattaacacaattatgctactaagaaggaaattattaagatagttaatactattattataagtatcattattccaagaattttgaacattatcaaaaaatgaaggtacaataagccaatagttctcgaacataaacttttttttattgtaactaaccatgaagtcatcattcaaaacaagtttaaaactctatggtctgagccatagaagttaagatggtgaagagttgcattaggataattattaaaccaattttattagcaacgtcccaatccaaacactcataggtagaaccatactttcaagtaaacttattaccaataaaatgaagaggttgtaacgaaaatttattaaagaaattttgaaaattaaagatagcataaggaggcagactaaatttactatgcctatcattaatagaaagataatcattaaaaccactaataattagctaaggtaaaagggatgcttatcaaaaagtctatataataatttccaagtatgaactttgtcatttgaataggaaccataaaaacataaaacatgatcactaccaatattatcattgaaagttacaaaacagacaatatgattggaggataaatttaaaatattaacattaaccacttgtttccaaaacagtcagagacctccctcaagacccttcctatgaacttcaaaaccttgatcaaaagaaaatctagctctaagactatcacaactaccagacaagagcttagattccataataaaaagaaacttcggattatttctatttacaacaagggaaaggttatggaatgctcggggactccctaactcacaagcattccaacttaaaagattcatttttctgggcagagttgctcaaccacacccgcctgtacaaaagagttgttatcagtagatgaagaaccaacaacattagaactagcacggctcttttcaggatattcctaattgaatcaccaaccaaaatagagtgaaaagtgaaagcagtcctcttagctcctgagactgccttatccttggacttagaaaaggccttagcagcttgagccttcttagggccagtttggcacagctgtactgtgaaaaaaaacagatgtagttgtgctgtaagaaaaaa

SEQ ID NO: 226463 - DNA, 1396 bp, Cannabis indica
aaaaacaacaaaacgaattggcgtaaattaactcgaactaaggaaaaacaatgaccaaatttttgaattgacagaaaaatttttggatcgtagcaatggagatgtagctctagatttttatcatcgttataaggtaaatttattactatagctaattttttatagtggttttttcttactcaaaaacagtgaaactcaaaaattatttgtaatcgaacaggaagacatcaaattgatgaagaaagttggcttggattccttcagattctctatctcttggtcaagaatattaccaagtaagtcgatcatttaatgaattttttgtatcaaatttaaaagaggcacatatatttttcatagtcacactcacatatttataattttatatattttgtagatttgttctatagttatcactaaattactctatggcttggtttcagaaaaaaaaatacttttgtctaattatatagtaattaaatatatattgcatgtgggaattaaatgtattatatcactatctattgttttttattatgatcagagggtaaactcagcggaggcgttaatccacttggcgttaaatactacaatgacctcatcaacgagcttcttgccaatggtactattttgacatttgtgacatatgtatataatgaaaatacattataaatcgtaattaataatatagaagaaaaaaaaatattaaaagagctgtctaatgaatatatgaatgtcattaaattttacattaacatattcaagtatatttgttggaattcttattattgttgttaaaaagctgatttttttttatatatatatattttaggttattttttttttattttatttttttagctctgtttaattagttagaagttatatataacatctcaaatgtctcagattatttttacatttatttacggtacatactttttcagcaatagttataattatcataataataataatcattatttatttctttgaagatttaacttgttcaaagaaataatatattataatgatagatagtatatacgtgataactaataattattaattactttatactgtcgatattgctttaactatttagttattattttcattaaagaacacctcgactatttacacattttacttaattactatagcttttaagaactgatcatcagatatacaaaagtaagaagtgtaaatttatgagtttataactttagatgtttaatgtttattgaaaaaaccattaatttttaataataatgtatctttatagagacacgattttatcctgtgatgtatttttacggaatgtattttgtggtatattatatgggtgtgagggtacatgagatgagtgtcagggtacgttactattttttaaccc

SEQ ID NO: 226464 - DNA, 1304 bp, Cannabis indica
aaaaataattttaaaatttaaaatctcttcttttcttctcttcttcatttgatataccttaattacttatcctaatcacaactatatcactgtcaccacaacttctattaacaccaccacccttacactacaatcacaactattatcactctcaccattaccttcacaccacaatcactaccattaccaccacaggcccggccctggcttgtctttatcaatttatttgtgagggtaatatacatatttttatttttccattttttttacagtggcaactgccttctctcgcctgtggatccgcccatgattagtgtctacattttttgtggaactagtctttaattacttaagagactcttattataattctctctaatatataataaattgttacatgtatttattgttttttttttgaagagattgattgaaatcacagtagccaagaattgatggcatgtttagtttggtgtaataggaatggtaatagaatcaaattatccattacaatgtttgctttgcttttaaaagtgatgtaatgagattacattgtaatcataattacattaaataagagaatctccattacattaaaaaaaactatgtaatgagaattacattacaaaagcctaaataaagtaaagctaaaatttctactaaaaaaaaaaaaaaagactaaaatgactttaatattcttttttatataaatataaaaattaaagtagcaaataattttatcaatttatcatttatttccatattcattccaataataaatcaaacatcttaatcaattcctattactattcttattccattacattactattaccattatctttacctttacctttaaattccaccaaactaaagaaatcacaatgttgctgctatcaaccaatcggagtatgaattaattaatttgattaaaaatatgaagaggagtgtgagtgatgtggataatatacttgctgaaatttctgatcagagttgtaattttgagcttgtgagctttagttttgagtgtaatgatgctaatcttctcgttcattatttagcaaagatgactttaaatgttaaagcgtctctgagattgacttgcctatatattcttctttgtaatcatttgtttaatggatttcccatagaaaaactaatcgaagcaaaagaagagaacaaatttgtgttttcattactatatcacataaatcaacaaacttgtaaaatagtgtgacacaaaaggtgatagtaatttaatttgatctaaactaattattggtttcattattatttccattttg

SEQ ID NO: 226465 - DNA, 2441 bp, Cannabis indica
ataaaaatttcaaaagtttgcccgttatggatagtgggccgtgtgttactgggccaaatggaaactctattgtaaaggctggcattattaaggctattggaaatgggcctactaataagaaacttggtaatgggcttcctatgataacttctagtgctcaaatgggtgggcctatggttgattctaattttaaaagaggttcggtgggcccgtgtcttttgggtagttgttctaatccgattgggccggagtctttagccaaggaaaaaagtgaactcgtgggggttaacacttcattgcctaacatttctcatggggcaccggtgcttgttaatgaagaacaagctttagctcaattctttaatgctcaagaagaattgttacacgacctcaagcattttgggaagctcgatttgtatgagattcgtaatataggaggggatattggggtcccggcttcctctgaagttaatgagagaacgacacctttcaagaaacggaaattcgaagcgtctgcctctctttgctctagaccccacaaagttccttgcaagtatccagatattgttcgtgacttcccctgggatactaagaataaagtaaatgacctgaaattggagattgatgatccttcggaggacagctctagctccccgagctgctctggtattttgaagaacccgctggtttgttcctttgtgattgatgaatatgtttcgagtgggtctgcttactcccacaaccatgtggaggagaatgtcgaatctcctccacaggatccatgagaggtattgcatggaactgtagagggttagggcagacctctacagttcgggaactaaagtccctgattcagtctcgctctccggattttgtttttctatccgagctcaaagtggatgctaatcctctggtacgtccctaaagtctttacacttttactttaatatttgtgttccttctattaataatgcgggaggaatcattctggcttggaagtcggggtttagttttgaatgtatctcttgctcgcgtaatcatatctcgggtttagtgtactctaaccctccctcttccctgtggcttctttcgtgtgtctatggccctccctacatgaatgctaagaaaaaattctggtctgagttcttgaaaataggagatagatttggtgggccctggctaattttaggagatactaattttgtcctaagtggatctgaaagagaaggctcctctggtcgggatcccttcattccgattatttctaatcttattgagggcagaggtcttatcaatatgcccatccaaggggactttctgacgtgggataaccatcggtctgggcggcaccatgtgaaatctgctctggataaaggtcttggggcctggattaagttatttcctaaggctatactctacactgtccaaactagcaattcggaccaccgccccctgtgtcttctatctgagggcatggagcccaaattcaagagatgcttcaaatttgaagaaggttggactcgcgacgctagaagtaatctggtagttgcccatgcttggaattcagtcaaacataattgggcccctgctcgcgtttataagaaggtgggtgccactcgggtggccctcctgaattggaatcgttcccagtttgggaagttggatgtgaccattaaagatcttgaacaaaagctcaacactctccaaagtctccctgctggttcccgggactggaatcaggagagggatattcgtcgagagttgaatgaatctctggagaggaaagcgatctactggaagcaacgagccagagtgacttggctcaaggaaggtgacaagtgttcgaagtttttcttcctctcggctgctattaagggaagaagaaatgccattgagagtattttgaacaaggataatgtttggatctctggccgaaggactattgggagtgaattcattgagtattttaaaggcatttttgccggggatgacaatggtgcggagtacaactgtgctcaattatttcaagagagaatctcgcccgaagactcggtggccctggttagttgtcctagtcctgattaaatcaaaagagttctctttgccatgagtaaccataaggctccgggtcctgatgggatgtctgttctattctacaagcactattgggagtcagttggagctgacttttgcgatgcggtttcagatttctttatcactggtaagatgcataggggaattaatgccacaaatgttgtactcattcctaaggtccaaaatccgatccgaaccacccaatttagacctatctctctgtataatgtggtctataaagttatttccaaaattttagcgaacagaataaaacctctgcttccctctctcatttgtccgactcaagcagcctttgtcctgggaaggaactgttgggttttatgccc

SEQ ID NO: 226466 - DNA, 1597 bp, Cannabis indica
atagcaccaataaattgagatttgctaagcaatagcttcagccattattaggtccaagactcgttattaatttcctaagaccagctacaacacttccttttgcatcactaacaatcgctccaaaacttattttacctttttttttttttttttttttttttttgcatctcgagaggcatctacattcagcttcaagcttccattaggaggtggtttccaaacagccaccttactagcaatttgatttgtagctttttgtgcattttttatgcctttgagcttccttatatttttgcaactatgacgatacccagctaaagatattcgcaaacatatgattaggtattatttttgtgattctagattgcccagaggagaccaaaaagcaattcacaatcatatctatttttctattcaaagcaagatgaaaatccgtttttaatattagtaagtgacattaacaaataatttaattaatgtggaactgttataaaattatttgaacggaattgaaatctgctctatcaaaaactgaacctaatagatcagaaatatactgtagaaagtaaaattgcaaaaattaaaattacacacaatattttatacgtggtatcaacaattcttgcagattgctactagtccactgggccacacccaaagataagatcattagtcagatttcaacaagtacaaagtaattgacttaaacaaaacctagactccctctaatgattttgctgcaagcttgatgtactcctttttgttgaacgaatcttcttaagacacaaaggtttgaactcccttcaaattacttgatgaatgcttgcttcctcccgaagcaagacttgtagaaatcttctcctgaagatagcggtgcttgcttcctcctgaagcaagtcttgtagaaatcttctcccgaagatagcagtacttccttcctcccgaagcaagacttggatgaaccgtctcccgaaggttgttctttatattcttcactttggaatttacttcacataaaagtaattcccaaatacacacaaactcaccaaggaatagcagaacaactatcctttacaaaagaaacactctcttttaaaaatataagaaattaagaagtggaagagttcaaccttttgctactggtttatgtcatatttatagtgataaatgaggttcctgaggtcaccctcacgcggtctcgccttttcacttttgtacctctcgtacttggcatccaatcaacgtcagaggtctacagtagacctgttatcctcaaaagttccatcaattgtccttctgtcctagttgacagaatcactaaggtggttcctccaccccttggacctaggtactttcgtactttgtccttttggcatgatttttcctttaggatcaaaagggcatcaaggctagaaagcattggtagccttctgcgtccttaagggctggctagcgggattcatgtctcttcgagaaggtttaagagtagacttctgtgatggctcatctaccttgcctttaccattatccttgtgaggatttgaggtttcgacctcgatttgacgaggaccacattcttcagccattactacaatcg

SEQ ID NO: 226467 - DNA, 1789 bp, Cannabis indica
gttatattattatacagaaaaattgtcgtgtttagaatggtacaaacagtcttggttggacagtgaaagtcttctttctaaactctatgttgtagtgtatgttttttttttctctctattttcttttatatttaaataataataattaggttaatttctttgtatgtcttattttattttataaggctctttagtttttatttaagagaaatgttaaagagctgagtatctctaatattaatatgttgtattactattaactacttaaagctagctcaattggtcataggtgggtgtgtgttttggaggttctgagttcaagtctcaaataaacaaggatcgtaatatataaacgcttaaataaaaaaatatatattattgtattattattagtataattaaaaatgagattacatataatttaatataataaattacagaatatcatttttaaatggtgtactacgaattactttgtgctctttatttattaatgtatggatttggtgaaggcacgtgtattttactaattacacttgtggatccctatgtatgtgtatgtacaagtgagaaagagatattttattattttgcggtattggagattggaccatttttctctttagaccgtaatatttaatatcaataagcactaaaacgatagtaagaaggagatactttgaagaatctaatttatttattttaaaaattatgataatttaagattgaatttagtaagtcttattgtcttctttataattggtgtaagttttattcatttcactcccagctcaatatgcatagagaaatgttagagggtattagtagtgtttagcatttttttatatgtcaatatcgttattagtctaactaattattgggtctcatataatttaatataataatttttaggaagtattactagccaattgcaatgcgacatatcgagaaggtagtacgcaccacttatacttaataacaatactcatatgcataacgttgtggttaaacatttgtcattttgctaaaatcaattcattattgcatttttctttcatagtaattattgatgtaagactaccacacgcataaacatgaaatgtaaattataaataatcacaatacaaacatatatggatggatctaactagtgttgtgttggtttggcttatatttatttgtgctttttaaaaaataaatcgtttcgttccatgccagagaaaaatattactcgtactgtgtcatgctaatattcttaaagagtatatctgacacgaactgatatttcgtgccgtgtcggtctatttttcttaaatatttatttataaatattcaaatttttattaaaaaaattattataataatttaaatatttttttataaatactcaaatttttatatcacaccttataaataaattaatatataatcttaattttttttatattttaataattataattataaaattataatattcctttaaattttattattattttaatttatttattattgatagattcatattttcttattattattattaaattataaagtttttaatatgtcgtgttgtgcttcttgcgtttgtagcttgtagtgttttttaggcctagttaattcgtacttattgtgtctttcgtgtttctcatatcgtgtcatgtttaagcacatacttatcgtgtcatttcgtactaatttgtagtatcatatggtgccgtactcaaatctgcatttttcgtgtctaatcgtattggtgccaattttgtactgtgttaaaataccc

SEQ ID NO: 226468 - DNA, 1171 bp, Cannabis indica
atacttcagataagttgttacgattgaatatagtctagtctaggtgtttgagatttgtatcattggttttagtctaagctcaagtaggatattgatctgatattttctagcgtgtatttcatagtggtattatactatgccatatatacttaatatagtttaaaatctattttacgggaaagagcattaattactttcagtatgggttttggtcttctttttttcattagggagtgggataactggtcctcacttccaaacttgcttcatacataacacatagttatatataaatatatgttattgtatatttaaaagatttaaagatatttttataatggacttttaaggtagtttggttacctaaaaaaatctttatttatagaatacttctcatttgtggattgctttccacttttaacaataattttcttctaatgaatgcttgttttctttttgcttgatgcaattacttttaggttttggattgaagtattagaaaggataattacttagagaagtaattttcttgaatataataaattgcaagaggaggtatgtacaatattcttttattcattattttagtattattataaaactgttagaagagtttgaatatgttagatattcatccgtagtgaaataggttctgagattaaatttgtgttttgcggtgataacagaaggttgattacttgtatagtatcagagaaatttatctgcggtagaaatataagaaagaaacttattgtctattgtatttaattattttttttctcttttacagattgttatatgttactattacagaggaaatgctatctaattttttttaagaatcatgaattactttttatttacttaaattgtgttatgtgcttatttgatataagttgagttattaatatagaggaaatgctctgtagcttttttagtagcatttattttgtaatatcaataatcttgatgtatgatcttaactcgatatatgcttattttttatgtttttcattttcatatgcagaacacaagttatggatagaaaatggatgctcgcggataggatatctcaggaatataggaacggggtggattgtttcttagcattttgttcaaaaaatgtgaatgacccaaattttacttgttgcccatgtattaagtgtggaaa

SEQ ID NO: 226469 - DNA, 2368 bp, Cannabis indica
gcatcatctcaaccacctatcacctttttattttagtcctctaccaaaccaccaactccaacattatttactctcagaatatccacactgcttcttgcttttcttttttatttaaacccctgacattccaacttccaatattgcaactatccatcaacactaaaaaagggcccctcttcacctatttcctctctctgattttccccaagcaattcaaaagaattccttagaactcgttgcttttcaacttctgctcttttaatagaacccgatcccttgtgtttaggggcctgccaagcaacattaggagcctttatagctctttttttccttccctcttcagcattactcgctgctaaaacagcagttccagccacaacagtctcggctgcaagtgcagcagatttttcaccatttcctgctgctatagcagcagctttatctacaccagtagctgcgatttcttctgcaatagtagcagaaatctccacaccagcagcatgttcttggttcccttcttcctggccctcagtctttttattcccagttgttataactgcagccttctgtcctgtttccttatccaatggcttatcttttttcctgcaatcagttattaaatgaccataccccttgcaatgattacacttaaccgacaaccattcatattcaatttcttgctcaactaactgcccatattcattaacaaaccagcaaatacggtccgggttatcggatatgtctatttcaacaagaacgcgagcaaattggacttgtgttcgatccttggtatgtttgtccaccattatcggcttccccaaagtactaacaatagcactcaaagattttttcccccaatattggagaccaaggttaggcaacctaatccaaagcggaaccgatttcaccaacctaatcaaattcaaattcgcggaccaaggtcgaataataacaggtttcttatcaaattgaatcattccattctcaagaacctcatctcttgttgcttcatcattgaacttaaccatagtgagccccttagtcattctagcaacttgaacaatgcctaagtgcccccaaattctacgcacaaagccttcaaagaccacagccgggatattagctcctaaaaccatacaaattactgctgatttccaactttcctcttctaatttcaactcttctaagtctatgtgagctattttcctaccctccttaatcaatggctcagtaaaagacaatttagcatctgagtttagaactttacctcctgaaaattgttgccaatggctctgtgaagctgattggaagtgatcaacctcatcagcccagcttttcctagctgattgcagggattcctcttcttcccgaactgagatctgttctagctgcaaatcttgaagctcctggctatcgagagaaccagctacactctcctcctgttcccgacgaagctccggcgaaatggcatcactcaccaccttcaatcccgaccgacgaccaggcttcttcttcctcgccatgaggaacgagagaacctaggtcagaagcgtttttcaaacaattctacgttattctttctagaagagaaatgttttaaattttaattggtagatgaccgacttaataatgtttccaatgagaataatctttttcttcatttatagcttttttttttccaaataaaacacttacaatattattgttaaattcttgccttgcttacttattaattcaacatattgttattattatatgacgatctactttcttgttctttgcttgcgtgttacacacacagcacaaaaaccctacttcatattatttagtctaaattaattagttagtgtataacgaaatgaaattattattatccctaaatgttttagtatctataaaaaaatttaagtctaatttcttttcgtatacgttatagttattcaaaacatatcctgtaaaattttaaaaaattcggaataatttacaatatagaaatcattgtttaaaccgtctatttcacatacgtataaaataaaaaagtcacgcgtgcaacaaactcttttaacactatttttgacgtgttaaatttttctggatttcttaaaattttgccagatatcttaaataaaatatatacgatcatagaaaaattgaaactaagtattttttttatataccgaaataaataaaagtgcatcaatacacttattttaagggggtgtattgtaaaattttccaatacccatttgtttatgtaatttaaaattatatatatatgatacaagtgttgaccgaggttttcggcaactaataaaatattataaagttagtgagctgtaagaaattgagagaaggatttttacgtggt

SEQ ID NO: 226470 - DNA, 1232 bp, Cannabis indica
caattttcactcccacaagcaaaaaatatctacgatcaattctcacctcccacaagcaaacgatatctatagtcaattctcactcccacatgcaaaaaaatatttactgtcaattctcactcccacaagcaaaaagtatctacaatcaactttacaagtaaggtatagctagcatttagttttatagtgataacatcaataaaatataacatacaattaatttctactagcacttaactcactagaatacaaagccaccaatttaccaaaatcatttatattcaaatactaggcccacaaataggcccatgtggtcatcacaaaatcaaattggatcataaagcaaaactttattttcaagcttaaagaacaaactcaaaatttaatttgggacaaatatcaacacagtgattcaaacaataaagatgaatctctcaaatgtcaaactttcaaaaaaatatgtgcaactaagtttgtgtttatcaataattttttcaaagaaacaatactcactacatttgacacattgttcgctattttttctacaatctttttataagttgagctgctacttttttcatcttcttttattcaaataattactaaaagttatttgattgatacctatgccatgagtcataagttgactccacctatttatcaatctccttgagcggaacatcaagagataaataatgactcctatgagtcctacatattgactgtggcaatttgtattttatctattttacaaatgaagacttatttcgttgaatgactgctactttctctataacataactataatttgagtgctatctctttctacatttttttgtacacattgagtgctatctatttttaagtttcctagtaaattgagtgctattcactcttatatttttaagtgaattgagtgttgtatacaatttcatgaattgactgctatttatttaattacttttggtaaattgattgatactccaataatgatatttttataactttaatgtcatttcttttatagattttattaatactgaaaaattaagtttttgtaaatgccaataattaatacagaaatatactgtatataaaactgtatacgtctgcagcagcagaaagtaattctgatactgcagaaatcaattttgcagagacaaaacgaaactggcagaatataaaaataattgtagaaaattaaatcacttgacacaagagatttgtacgtg

SEQ ID NO: 226471 - DNA, 2156 bp, Cannabis indica
aaaaaataaaagaaaataaaaaacttataaaatcaaaaaatgatcaacaaaactccattagcataccatgtcatcacccttaacaaaaggattatatatattaggcaataaaatcgcgtgttgcacggttgtacatttttttagtaaaagtaaagataatttttattaatataataattttaataacaaaaaagtaataatttttttttaattattttattatcatattattattagtattattacagttgttaatttaagaaaaaatataacaaaatgtggcgtgtgatcgtgtcatttatgttaacatgaactttgtacattttgtttatatatgtattttaattttttgtatgtttttatatatacacattttaaattattgtttttataattattcgctcaattatatatttaaataaaatttatataaaattatgaataggacaaagaaataaagtcaatgaatttaattatattttatacatttattatttatgtatataaatatatataaagaaaggtttatgtatattgattttcagtgtattaatattgtattatatcatatgataaaataattaatggtgtaaattatgagtactaatagagaatgagcctcttatatatattgtgttagatagagacttttgcaatgattgaaacggtaaaaattaagctttattataattatttttcaaattatgttttatatttactcgttcaattatatatttaaataaaatttatataaaattatgaataggataaataaataacgtcaatgaatttaattatattttatacatttattatttatgtatataaatgtatagaaagaaaggtttatgtatattgattttcagtgtattaatattgcattaaatcatatgataaaataattaatggtatgaattatgagtactaatagagaatgagcctcttatatatattgggttagatagggatttttgcaatgattgaaacggtaaaaattaagcttcattataattaattttgattattattataattatttttaaaattgacagccgttgttattcattaaatcaattataataaattttatgaaaatgaaaagttgattataataatcaaagtgcctttcttagcgaccgaattatctttgataatgtccttattgctaatgaggtcattactgccattaataatcgaaaaggtggcaaagttggctgggctgctctgaaacttgacatggaaaaagctttcgatcgagtggagtggggtttcatccaagtgattcttactcaatttggttttccctcttcctttgtttctctaatccttaagtgtctttcttctgtctctttcaagatctccattaataatactctacttccttctttcattcccactaatccccttacctttttctcctagtcgttgagggtctttcggcagctattcgtgtctactctagacatactaattttaaaggtatctctatctgtaggtctgctccttccatttctcacctcctttttgctgatgatagccttctgttcaccaatacttctcataataattgtaggattattaaagatattctttctctctatcataaggctattggtcaatcagttaacttctctaaatattccattcttttttcaccaaataccgctgtttctgacagagacctcttccatagcacccttggcattgataataagccttttgttactaaatacttgggagtcccacagtgctttggttgatccaaaaattcttccttccattacattctccactgggctagtgctaaacttcaggtttggaatcataaatttttctcaaaagctgggaaggagactcttattaaagcggttatccaagcaattccttcatatgtcatgtcatgttttcgactccctctttccatttgtaagacccttgataaacttattgctcaattttggtgggggtctactggtaataaggctaagacacactagaaaagttggacttccctttgtgtttccaagtttcatggaggtttaggctttcgtaactttgttcttcataatcaagcctttcttggaaaacaagcttggcgtatttttaagaatcctaattccctggtttctagacttctcaaagccaagtattttaaa

SEQ ID NO: 226472 - DNA, 2312 bp, Cannabis indica
caattgtctccattatcattgacaattcaaggtttttactaagtcagagaaaaataaaagggaagtatcacactaaaagttgaaatagacaaattaaattttgaagccttagttcatgtaattgattcaaacacatcctacaatatgttgttaggcggccttatcttcattaatatggggtcattccttcaacacttcaccaatgctttaaatttttcaaggaatgtaaagttaaaagtgtcaatgcagacccaaatcccttttacagggaatgggtgaattatactgatgaaaatttttacgtcagttaatgtcatcattttgaaggggaaatatgaggaggtaaattgtaatgaccgcatgttagattatgattagtaaaagtaattaccattaattattgatattttataattatatatgattttatattttttgtgggccccatttttagaaataggcattagagttataatttctcatttctgagattttattaagcattaagagtattatttatgctaaatatggattatgtaattttttatggtttttttgctcggggacgatggaaaatacgatggatggtcattagagtcacatgggtaagtttagaacctaattcttagtgggacaaatatttgagatattgtgaatgtttggtttaggcggggttatagttttggactattttacccctaagcctaaaggttacataaaatggaagaaaggtgcattttgggagttttatttattggtttaggtggatgattgtagaattgacaactggtccttatcttcattttcagcttaagttgatattgattaattaatttaatatattaggaaagataaaataactataaactccattctctctttcgaaccaaggaagaacctagaggtttgctgctaaatctgcaaaattcagcaagaattctagttaaattttaagtggaacttcagaggtagcttgaggtaagccctagaattctaattttcaagttgtttaagctttaaatttggtcttagcatgcatttttgagaattagtggctatttaggtttaactttgttctagtgtgatttttgaggttattttggataggattaggttgcttgttgctggttattttggtttaagaagagaatgagcaagtttgactttgaaaaactcaaacttgattgattaatgacacttttagtttatgtatatttttcttacttttattgcttggaaactattgttggatgttagtataggtaatttggaaattttgagagaatatggggatgaattggttgagtttcaaacttgtttgtgatttctagtatgaaccgtttaaccgtttcattggcaggatcatagaaaaatctaatttttgttttgaaccatttcagagtcttagttgtagtgtttcctcgataattagggtattgttagattagttaccaatagagaaacttgtagttgtgagtttaggttctcggatcaagttttagcaagttgtatatccatttgtgtgaatatgacatagggcatccatctagcgcgtgattttctgtttaggttgtccaacacacttgaattcaaaaatgagataagactagcaaaaaatatatttatatatgaatctatgtatgtgtaatatatgcatgttatttgtgatttctatactaccaacactagtacggtagcggtacaaagtgtatttctatagtctatgatgttcaacaagtataatacagtgttaccaacactagtacggttgagtacagagtgtatgtggtacaacacttaatggtactcgatgtatggtgcaaaccctactaacactagtatatagaggtacgcagtgcatgtggtatattgatcgcaccttagtaaataacgttcctactcatttaataagccttgtggataggtgtatgggcgcctagatacaagtcggtaaaatattgtatgttatgtgcttttcttaccgagtctattgactcacatatattactttcatgtgtaggtaaaggaaatgccaaaaatgaatagcaatgagtttcgagctcatgggatgattatacatgctgtgacggtacgacccggagtgttcggtctcggggcgatttggacttcattttgtagtcgtggtgctacatgtttgtaaatgttattttgaatgtaaagtttaaaataggttcccgattatatgtaaatggataaatattattttggacactatactttgcgaaagttactaattggaccctctgttttgttaaatgacaaaaagagccatatattttctaaaatggtaa

SEQ ID NO: 226473 - DNA, 2436 bp, Cannabis indica
agaaaataaaatttttaaatcaaagcaatcccccccaaaactaagattcacattgtccccaatgtgctattatactcaaggcgagaaggacttacctgaacccccatcagaaggggtttggcggtggtggctgatcatacggatgaaagtgaggaggatatgccaagtaatttgggtcctcgacccaaggccgccacgaatcaattaaatgattgaattgcctcacttgattttcatcaaattcactcatttgcaccatgtaactctggatatgattgttttgctggataatgtagttgagttgagcatggatatactgcatccccgcatcaagaggagtgggactggggaccatttgaggcatttcttcatttggattgtcctcttcctcggggacatgaacttcttgctgttgattacgacgaggaggtggtggttggccatatggatgtggtggcttcaggttgcgcaccattgtccaatcaatattacgttgtggctggacttgattatcataaggatattgtggcacaccattagcaacacacaattcagttataactctcgctaggccaattcctgcatgtgcagttccttttaccatgttatcgaagctctgtagaagtatacctccaactggcacattaatccctttcattattgcataaataaccctgagtctatccaaaggacaatccgataaatgtttactaggcataagcctagcactcacaaaaaacatccaagcacgagccacttggttcagttcatagcgataaagcatttggggttcttcatccacctcatgcaatctcaatcccggaaaaccagccgttttcgccaagtccgcaaggtcaaaatgtttgcccataaatattctatactattcttccataaaaatttcctcctctagtggtatgccaaacatttgatggatgattccaatgtttacacacacatttgatatgcggacccttaccctgtcgttttgtgcctcaggccaattggctaaaaattcaagagccagagtttgattgattctttctggaacatgcacaaatttctcccaatggcgattctgaatttgttgcctcatggtctcgaataatgggttattcgggattgggttttcatcatattcgatacctcgatccataatgaaatctctcttttgcatgctgtagaaaactattgaaactatcggaaaactcgcttaattaatcaaagttttgaaaagaaatagacttactaagcgagaatgccgtccatccacctcgattattgcaaaaccaaaaaaaaactcaaggttgaagatgatgaatagtagcaaattcggatgttggtgaaaaagggtaatttgtggtgtgatttttgaaggaaaaggaagatttatgagaaaaagaattgggtttttggtgatatagatggaagatttgaagagaaattgaagaaatttgatgatttatggtagaagagggttgtggtggctgagaaaaggcaagggatcgggttgggttttgatttttaggttaaatggggttttatgtgaattggggaatttacagggctgcaagggggtcctgtcgcgacgggcaaggtgccccgtcgcgacgggaatcggcagaataattccagatttttttctgtctttcctagtcgcgacggccaaggtccccgtcgcgactactgtgccttttctcttcttttttttttgaagtgcaaacctaacatgaatgcaatgaaacaaattaaaatgctaaaaaacacttgtaattgtcttctaaaaattctaacgaaaaataaagtaaaatcaaataaaagattgggttgcctcccaacagcgttgtgtttatcgttgctcagctagacgttgaccgagtttttcatagtagcgccagaattatggcggacttggcttggtcaaattgacctcccaagtagagctttaaccgctgcccgttgactttgaaagtctcggggctttcacctttcagttccaccgctccataaggaaaaactttgaccactgtaaatggccctgaccaccttgacttaagcttaccatgaaacaatttcaacctcgaattgaaaagtaaaacttgctgcccaggttgtaactccttcctgactaagcttcagtcatgccactttttagttctctccttgtagatcttggcattctcgtaagcttcattccgaaactcctccaattcatccaattgcagtaatcttttctctcctacaggattcaaatccatgttgagagtcttcatagcccaataggccttgtgttctaattccaccagtagatgacaagcttttccaaagaccaaccgatatggtgacatcccaatcggtgtcttgaatgctgttctatttgcccacagtgcatcatctaactttcttgaccagtctttccttgatctctgcactgtt

SEQ ID NO: 226474 - DNA, 2037 bp, Cannabis indica
tctatttcttctttctttttctatggtttatttttgttagttttttttttttattttgattctcctataaatacatttgacgaactcactaacaaaatattttgaggtgtctggttcttttatgtatttttaaggggttatttctactttcatttttttttttacatttcttttgtgttggtttagttttgtattagtatttttttattctgatttttcaggattgagcatgtaaatatagtcgctattgcatatggtgttaagcctgtgcagaaactggttagtttgtttttaatttttttttgttttatagttattttaccatgattatttatttgacgttgacttcactgttttgttcaatctcgccgaagttaatggttattttctgggtgtgttcgtgttgttttgatagtttgtgcgtgggtatagaagatggaggcattgttcttgatatacggtgtctacagtataaaagaaaaaaaaaagcccaggacaaagtaaaagaaatttttgttgtgtgatagtataattgtaaacattgtttaaaatctaatatttttgtaagtttcccttttattgtacttattgatcttagaagcccttcttgttccttgaagccatggccatgttcttcatgccaccttgagtagaagttactaatatggccatttaatacaggcttgtttgaaaaaaaataaaaaactaatacaagcatattattgttaggtccatatatatatattttgaaaggaaacgttcaataactaagaaattatacttcctgatcattacaaaataagtatgttggcaaataaaaaacagacaaatagccaacctgattgtgggtaaaagctcacttagccacattataggctgtaaaattactagttatgggaatacaagtaaaaatacaacaaataaaacatatacagagatccaagcaagaagaagaataattctcaatctcataacacgcacgtggttgagagaattgatcaccaccctagagtcactcgtcacgatgatgaacttgtgaccattgagctttgccgtatccaaggctaagcaagacgcatccacctcgccacagaaagcatctgcaaagtctaacctagtcgtagaaacccagatcacctgaccaaaatggtctctagcgaccaccgcaatacacgaactgtccaaactaattatgacatcacaattttgtttgagccaatcctagggaggagggctctagccttccctctggaccaggatcgcagcgggtaaaatatcgactttcaaatctacaaaggaataatgtatagtgtcaatataatttttcacattatgaaagcaattattgtggaccttctcattcttgacccaccaaataatatttaccacaactaaagcatagataaaaacttcatcaacatttatgctctttgtgttgagaccccaaattaacttaacccaattccaaacatggattcctgatctagaaacaggatagatatgccatggggagaatctccaaaggtggaatgttaagtttcacgaaaggaacatatgctccatagattcatccattccatacatagggcatttcacatcatcaacacgaaatctcttcttaagaatgaccataagaggaaatgcatctgaagaatgctccaccaaaggactttgtgtctctccatgattttactactccaaaacttgttcgaaagtgaaggggccacctcacaatgaggagctctctgtaaggcttgaataagataggctgtttttcacgaaacatgccattacgctgtttggcccaaacccacttatcagtgccttgaccaatggatcaccccctttaaaatagcagtattatttatttatcaaatatgctagtccacttctaaatgttccactttccattatcagtcaacatgtcaacaccttatataaccacacgcaggacgcccattagatttgggaaacgaaagaatttctatgacggcacccaccgaatctcccaaaattctcgtgtcactgccattacga

SEQ ID NO: 226475 - DNA, 3312 bp, Cannabis indica
tgagattgtacatgtcaagcggcgcaacctggagtgttccggtcttgggacatctgggagttgtattttgaaagttcccaaaaattttaaaaaattatattataataccaagtttagtatttaaatcaaaagttttaatttgacacgttttttgagaaatttgtttgattagcaaaaattgcacaatatttgaaaaagtactgtagcatgccttagcattagggcgttacacttgagtttatgggtgtgggtgagtttcaaataatagcttttatcaataataactcttgttatttatgggtgggggtgagttccaagacctagggtgaggactggcgtagagtagattggtgaatactaataggcaggctgagagttttgtttgaaattgaatttatatgattaaaaaaatttcagtttcactattaatattattatttactacagaagaatacgaataggcacgtagagaccactacagaatacgaataggcatgatattaaattagtaattaattatttaaagtataaattttttaataaaaaaatatcattttaatatttcgggttacgggtcataacccgaccagaaaaaaaaaccaattaagcttacccgaacccaaaacccgtttagagtctttttcgggttgaacccgacccgactacagggattttaggcaatcaatttttttggcagcgggtcggggcgggtggtcggatttttcgggtttgcgggtctaaatgtgcagccctagttccagctttggagccaaccatttggtgtaaaacttgattgaatatgatgaagatataaattgtctatgtaaaatggaaaacggacagaataaagattgtataactaaaaaatttaaactactgatataacaaaaagaatgactgtaagagtgaactaaaatttttaaaatactacgataataaaatataaaaatatagtaaatcaaaactatactcagagtatatatacaagaggaacttacgaggagttggttaccaacttgaccagctggactaattgaaataacaacctgaaagaactaacctataactaactctaacatgtccaatgaatatgacagactcctgatactcccagttaagttttagagaaaatgcagcaatggatttctcagctcaatttgagactgaggcagaacttttcattaaaaaggaatttccaatacaatgggaatcaatacaatagtgacaaatgtcatacacagaaaacaatgcataaccgaaaagggaaagaatattccctcaacaatgattgcataataacaacctgtcaactgcagggaattaaactatgctgcagtaaagtgcagaggaaacagagtgcaccctcacatactcactcatggtttctaacacaacccctcaaacgaaggggtgattcttttatcccgaatttttcaatgagaaaccagaacagagtatgtgtgaggcttttagtcaagtagtctgcaatttggtgtgaggaaggtatgtagcgtatgtcaagttctttcttgattactttgtctcgaacaaagtggatgtctatttcaatgtgcttggttcttgagtgatagacgggattggaggcaagtgcactagcactttgattgtcacaccaggcaaccggttggtaacttgaatttcagctcagcaagaagagattaaacccaagttatttcagccgagacatgtgccaatgctctatattcagattccgtacttgatcttgagacaactgattgctttttggatgaccacgcaatcaatgtatccctaaagtacacacaatagccagcaacaaaccttctatcatcgggacaacaaacccaatctgcatcagaaaaaccttcaagtttcaatctctcactgtatccaatgtgtaacccgtgatgcacaattcccttcaattatctcaacacacgttttgctccactcgagtgacttgtggtaggagtttgaagaaactggctcaatttgttcacagcaaaggcaaatcaggccttctataggcagtgggattggtcagctgattcccatcatttttcgacaatggcttgcctgcaaccatgggtgtaggacatggttttagatttaccatgtcatcttcttcaacaaatcactaatgtatttgccttgacttaagtatatccccgtttcatcacaatacacctctattccaagaaagaaatgaagttgcccttgatcctttcaggcaaaaattttgttcaatttcggaatgaaattgttcacttcaacagtgttgttgccaatcacaatgatgtcgtccgcatagattagaacaagtaggattacttgctctgttgagtagatgaacagagagttgtcagccttggagtttctgaacttccagttgttgggagtgagtttcaatctgtcgaaccaggcacgaggtgcttgttttaattcatacaaggatttgttcagcttgcatacatactcgggtttatctttgtcttcaaggcctagtggttgcaccatgtagacatcttcttccaatcttccattaaggaaagcattgttgacatcgagttgtgtaacttcccaatttctggacacagcaagagttaatacaactcgaattatagatgacttaactaccggactgaaggtctcactaaattcaattccaggcctctgatggaacccctttgcaaccagcttggccttaagtctttcaaaggctccatgtgcattccatttttccttgtatacccatttgtttccaaccaaattgtaccctggcagtcgaggcaccatcacccatgtcttgtttcttttgagagcaacaatttctttattcatggcatcattccattctttagatttgagtgcctcctcaatgcagctaggtacaccaaggctcacgttccatttggtctaaccaaggtagactttaggtttaaagatcccagccttagcacaggtcaccatggggtgagatgaaactggttgttgcactactggttcagcaggttcttgttcctgcatttctagttcaacagttggtgcagataaactttcagaataattagtgtgtgtgctaccaatatcaatgtgttcattacctttagttgtgttgctggttgatgctgcttctagggaactttaagagtgagaggttgcgccagcaggagtcaaatcagcagggctgaagtgttttcaacaccaaaaaagtgtaaattaggtagctcagaccattgaggatagtgaacaacagtttgctgttcagcagcataagtgtttaggaagccattcctaaaagggaattctttt

SEQ ID NO: 226476 - DNA, 1649 bp, Cannabis indica
ttacgacgagggctaccagatctccaccgtggtctgtacgatttcaacctccattgtttactttcacaaatcgtctgcttcgggattttgctcagctatagttcttacgtctcgctgctttttgtgtagttgtgaagaaagacctattggctgaaatttattgatattgataatatttacgttttactaaaatcaaaagcccgtctagctcagttggtagagcgcaaggctcttaaccttgtggtcgtgggttcgagccccacggtgggcgaaatgattttttggagccagtttggttatagtgatctttcccatgagttatttttccagtggaatctagggaatatttctttttcttattcattacttaaaaatatctgggttgtctaatatattttcaccatccagtctacataatttatgaatatgaaaataaaggtataaattaaaacaagtaaagtagatatacaatctcatctagtttttacacttttatcgtggttaacacgatttaataatttatttaacattacacattatattaatataatttcttactgtaacgcagataatggtgatttttttttctccccgagattttgtgaatccatgcctaggtggactccacctcctagagattagatcaaagtgaactgtgatgtcaaagtggatcaccgggacctgtgtgctacgattgtgtctaaagaccatttgggtacactctcatctgtggctaccaagcggtttcaattttcctactaagcccgtaattataaggtccaaaacaataatctatttaacattactcattacatatatataaattttttttactgctatgcatattatggtgctttttttcttccttgagatttcgtgaatcctatgtcttggtggactccacttcctagggattggatcaaagtaaattgtgatgtcaaagtgggtcactgaggccagtgtactacaactgtgtctagagaccatttgggtacgctctcatgggtggctaccaagcagtttcaattttctgaccctcttaaaggtaaagctacaacttgtcttttggcgttggaaacgactctcaatcaagaaaatctttttgttattgtggaaagtaactccgaactatgatcaaagctcttaatggagtcctttctagatgggagattgagaactactgtactcattattgtaggatttctatttttctttcgagctatatttcttctagtattaagagaactaataactttgttgcccataatgtaactaagtgagtgtatgctcacaatcgatttggtttgtttgatctatctagcatacaatgaaatattttatgtaatgactgtgatgcctaatttttacattttgaaattataaacagtttctttgaaaattatatttatattaattttttttatttatttaatatagaacttttattaatttgtcaaatcagccgaaagaaaaaattgtacctccacaggaacatcacccatattgaacactcgatctggaaaagaataagatgttctagcataactatgagcaactatgttagcaaaatatttaataaaaaacaaagattcattgtttaaaaatgcaagaagtgaaaagatatttcatttatcttttctaatttttat

SEQ ID NO: 226477 - DNA, 2219 bp, Cannabis indica
attataggcttgtatctcataatttctagtgtggctctatatgaatattacaatagttagccagatctcgaatgagtgagatgagaaatagacttagggtcttgtggatgtaggtggcgtgtaagagagagagaactagggttttgagatgagagcttagaactcaatacttagaacttaggttttaagtctagtctaatgctttttatataggtgagagcttataaaatatctagttaaaaataggctaataccccttaaaatgaggagatattacttcttttttccataattaattatacaaaaataaccccttaattgctcctaaagaatagatagatatttagagttgaactcctatttttatgggttgttggagtggttttgcagttgagaatgagccatggtccgtccaaggtgagggctgcagaaacaccacttattcgagcttcattctggctatccctgcagaggctggctgacctaccccttgtctagggctggccggcacatactcctccttggccggccagaggtggaccgaccagaccctcatagttggccattttattatatctttgtttcgcttgagcattctatcctttcgtcaattggtaagatatgcatgataacctggctcacctattgataggttgtactcctcgtggcattaacttgcctatctgggtatgccatgtcatgtgggcaaaaagtgagataacagagattaacaagactatcttcgcggtaagcacaggctagagaatgctaaagacctccaaggatgcgacgtaggatggaacaaagactacatctatatcacctaaacaagcaatgtgataagagaaccaatgttaagaaaatagccaaagatcaaagctagtgctaacattttcgtgttaacatgatctcaaatcaaagggaaccacccaagaagacaattgctaagattgtcaaaattgatgcccacctagtagtttcgtatgaaacaggtgtagttcacattatgaagtcaaccacacacaagtgtaaggttgacttgggggaaaatttttacacaaaaagtagccctgatgacatggaaatcaatgtttgtcacgtgacaagaaggaaaacattcccaaagtgaaggaactcgagtcatagtagtcaacttgggaaagggtccctagccctgcgcctagattgagtttgaggcactataatgggtatttggatctcgccaagttgttttcgaggcaccatcctttagtattcagagtaatgaagtcaagaaaaattcaagtctgaaacctggaaacttaaagactaacaaaggcaccttggatttcacgagtgcccaagttgacaacaggctagggctttagtttttgggactgtcttagtgcaaatgacccaaatttttcactagacttgaattagacctattacgaacatatttgaggcatcaaagcaacttccaaattgggcacttaagtgcacaaggtgcctagagcaccaggtgcgcccaacgcccaggttgatattttgtcaacctggggtgcctccaatcaccaaactaaaagattttttctaataattttctccatcttcatccaaaacgaggaaataggtgcttccgggtagcaaacagatcaacctagaaggcaaaatagggacccaatgcccaagttgacataggtgttgggcccctacgcccaagttgacattttgtcaacctgggcaacttccatctgcaattttgacaaagtctttcaaaaaaattctccattttcatcaataactaagatataagtgctcacatgagtcaaacagagccatttggaggaaaaaacaatgacctaacacctaagttgacctatgttgggcccctgcgcccaggttgacattttgtcaacctgggtcatttccaaggagtttttacaaaaagtcttttaggaatttttttatcatcagaactaatgagggtacaataagctcagggagaaaacgagaatcttaaaaggccgaaaactgagcccaacacccaggttgacaatcaacctagtgcgttggtttttctcactcaaatgcaaattttgctccaagcatttcccccagaatggtcaaaaatagggtaagaggcatcatcctcaattttgaagaccttggaagcattaaaacaacatctcggaagctctgaaaagcgcacgtatgacctggtgtgctgggttttgctt

SEQ ID NO: 226478 - DNA, 1588 bp, Cannabis indica
caattcagcccccctcttggaaacatatcttgggctaacacattccacctttcgaggagtcagtctcagaggttcaccaggctactgcttcttcaagcaaggctcctgagtcattgcccatcgaggttggggcactggttcacaatactgggtgcagtttgcttcatcttgttggtgccatttttcgatcctttcagcctagtgactgggattcggtcaacaatggcaacccaaccgcgatgctcgagaagagtcttaccttcagtctctcggttagtttccttcttcttttctttgttttttaacatttctttcaagaacccacaagaattcatatgcatttcttttttgtaggccaccttcttgtcccacatcgcccaaagtcgggtactccacaaagtgaagcaactggaagccgagcttcgcaaaaccattgagcaacgcgaggctgttgctaaagagtggaacgaagcttagaaggagttttctcgtctgaacaaggaggctgaggagagaagcaagactcacaagactgaactcgaggcagctcagaaggaggccaaggacaaatgcgaggcatgccaaaaactctaggaggaacttaacgcagccaacgagaagctcgagggcgctgatgccaatgctaaagaatgatgcatgttgttgccaagcgttccatttatcgagcctgaatggagaatcttgagatgcatttaagtttcttgggggagggtgtcgaggaagtcttagcttactgcgagaaggctaagaaagaagaagaagaagctgttgagaccaaggaagaagaaggtctatccaagtctcctacgatgtaggcttggtttttaactttttatttttattttttaagaaactggccttttggccgagacaatggtttgccccttgtggtaatttttcgtaaagacaaatttgcattgttggatggccaactttacttttatcttttcatttattgcctcgcatctttatatttgaacttaatctgtttgcttatttgcatatttattcacaacttaaacaattatattttgatcaaacttaagatactttaagtaagcatttctattgatctcgttcttcttttgagattgctttagtagttattaatctactatgtatgtatgcaagtagttatattctgctatactttttctttgcgagcagttcttgtcaattctacttcgcacgagcaattataatctgccacttataacttagtaagcaaacttaaacatactttgaataattcattttatgaattactttgtacattttttgattgcctatatgaatagttaggccttctattcatatttcaggttaaatattatcttttcaaggcatctaggtgcctcgtttataatacatgcctacataatgcgagtcgttagatattcaacctagcatgtagcttaatgttatttttatgagttaaatctcatttacaactgctacttcaattttcttttatgacgagaaaggttcaatttttgactttacattgcccatagacaactttaatcaattatttagaaaaaaaattaaagtggagcgggtttgcaat

SEQ ID NO: 226479 - DNA, 895 bp, Cannabis indica
aggtacttaccgaggttaaaaaaatataacttatgtagtaaactaaactccaaaaagtagttttggcaccaatatttttttatttaattaattaatacgtggtgaaccatactccaagaagtggtgcttattaatgttgttattttcttatttgaaaatacattgtatataatatatcaaatcaataattcttgtgaaacatatatatatatataaactatatataattatttcttagactcttagtaattcatgtataatttacttccaagcaagtccttaatgttcttttgtcttattatgattaaataattaatgttcaccaataaaagaggggaaaatgttaaaaaaaaagagaccaaagcctaaaatagggtcccataaaagattgtatttatggtgatcttacttatataaacattttctcgtggcctttgattgaggcttccggatgttttgaaaattaaatataaatagtataggatgtttttacaatgaattctctaaaaataatatattgatactctttatcaattttaatatttagaaaaaaaaatagtttaattttttttatatttgtgtatgttatagatatttaagatattatacaaaattttaaaaaaatttgaaataatttccaatatagaaagtagtgtttaaacaatctatattattacacgcgtataaaataaaatagtcacatgtgcaacacactatttgaaccatattttcgacatgttaaaattttttgaatttcttaaaatttgtaagatatcttaaataactatagcgtacataatcataaaaaaaaatttgactaaaattatttcggatatcaaaacaaataggagtacattagtctatccattttaaaagaatgcattatagaattttt

SEQ ID NO: 226480 - DNA, 1370 bp, Cannabis indica
aaaaaagctaaactaaataattcctcaaaaataccaaaacaatattactattttaatgaagtgcatcctaaaatcactcaagtatgtgagagaaaatctttcctagttatatggatatgtatgactaggcattagaaaactgaaatggaagttattttagaaatcttaatgtttaaatgagccagctggctcttctttattggatggccacaaattgaaacgcataaaacgcggaacacctgattccactccccctctaacccacacaaattctgttttccccatttttatatgatttttccgttttttttttggttaaaaatggcgaacaacaacgaaagattgttaggaacggtgaaatggttcgattctcagaagggttacggctttataatcccttccaatggcggccaagacttgttccttcaccgctccggaatccgatcccgccgccccgacggtcgtggtggtggttttcgaaccctcgctcatggtgagactgtagagtttctgattcgtccacataaaaaaaatcgtaccaaggccgtagatgttaccggacctaaccagggacctcttcagggacgaccttctcgtggcggcggtgatagaggaggacgacgatctcgcggccgttatggccaaggcggtagaggaagaggaggaggatatcgaggcggttatggcgaaggaagtagtggcggttgtattcattgcggtgatgttgattgtatggccttagattggtttcagagatgctatggtggtagaggaggaggaggaggtggaggaggatatcgcggcggttatgtaagtggtcgcatggctagagattggttcgagagaagtagcggttatggcggaggaaggtacggtggccgcggaaactgcttcaacaatggaggtgattatctcggattgtttttttttggtattttcttgtcaatttttcgtatggaaactgataaattatgttactctttcgttaatttctctgaacctaggtcgtagcaaacgaagtaatcgtcgggaaatggcggcttcttcgtcatcgactaagccaactccgcctggagaaatacggaactggctggacttgccgcgagatgtgacggcgtcgattctctctcgtcttggagcgattgagataatgacgagtgctcagatggtttgtaagatgtggcttgatatctgtaaggatcctctcatgtggcgaaccattgatatgaggaacctcggcgatcctggctatgggttggactttataaagatgtgcagtaatgtcatcgccgaagctgcggccaactcgttgatctcaacattgagtactttggaactgatggactgcttctccatgccgttactaggta

SEQ ID NO: 226481 - DNA, 3378 bp, Cannabis indica
taataatgattggatagtcgactctgactgctcaaatcatatgacaggagatgatgagaagctgcaaaacatgacagaatacagatgtggtcgcgtagtgatgacaaccaacaactcaaaattaccaatcactcacaatggtaaaacaacaatcataccaagattcagcccaaaaaaagtttcactttaggatgtctactatgtacctggcatgaagaaaaacttactattagtggtgcaacttacgacgacaggccaccatgtcatatttgaccctcaagatgtcaagatctaccaagatcttgaaatctctggaacactgatgatgaaaggacgatgcttagagtctatctatgaaatgtaactagagtccacttatgtagacaagactcggaagaacaaaacaacagatttgtggcgcgcaaggctaggacatgtcagttattataaactcaaggtgataatgaagaagtctatgttgaagggtctttctcaacttgaggtcagaacaaagactgtatgtgtcggttgtcaatacggtaaggtgcatcaattaccgtatgaagattcaaagttcaaagccaaagcaccatcggaacttgtccattctgacgtgtttgggcgagtcaaacaaccatcaatcagcggcatgcggtacatggttacattcattgacaaattctcaaggtacgtacagattttctttatgaaagaaaaatcttgaaattatttcaaaattcaaagaaatagtagaaggagaagttggcaagaaaatccaatgcctccaaacagacaactattgcgaatatacctcagatgaattttcagagtatcctcgagaatgccgcatacgccatcaattcatatatgccaatatgccacaatagaatggagtagttgagaggaagaatcaccatcttgcagaaacatgtcgaagcacgctgcatgcgaagaatgttccagggagattttgggcagaaggaatgaagacaacagctcatgtgttcaatagacttcctcaagaaaagttagggttcatttcactctttgagaaattgtggggctataaacctgcagtaagccacttctgagtatttggttgtctgtgctacttattcgtgccaagccatctatgtagtaaatttgacaaaaaggcaatatgatgtatctttgtgggatacgacaaccaacagaaagggtggagatgctgcggccctacaactagaaagtgttatacatcatggaatgtggtctttgatgaggcatcatcatggtggtcatcgcaaaaagaagcattaccagattctaaagaaatggaagacaatttttagcaagaaatgagggagaaagttattgagttacctccaactcaagatacagatggagaagtaaacactgaggatgaggcaccttagaatccatggcaaataggggtgcaccaaagagtaagacatgatgatagccaaccagaactttaaagatcaacaagagcgcaaaagacaaatccaaaatatgctaatgttgctctagctgaagaagaaaatgttggaaaatattttatcaggatctagatttactaacatgtatgtttctttatagcactataatctaacatcctaaatatgaattctctaaaacaatgaaataaaaatataaaagtttatagaaaaccttacattggttgcagcagaattatatgactccttctattcagatctttatcctttctgtggcagagtatgatcaagatttgaacctagattctccttcagttgatagaattctacacaatcttccacttccacaccatcttaagtattgccttgaattgtgtgggcaactcctcaatcactataagctttgaaaatttcagaggaagaagaagaggaattcaaatataataagagctctctttattttttacttgtttgacagaaggagtctgataatattatgaaaataggaattataatattctatgtatagcgtagctattagggttaggtttagaattaaaatggaattaaaaaagataaaaatggcttcctttaatccttaatggccgaaccctagtgggccctataagatttcaattttgctattttattgaaacttatctttcttttcacaaatatcatattttaattctaactctataaatgttaaatctatctatttaataattataattaattaacaaataaaattgtcatttaacttatttattaattagaccttacaaaatctcttaattaataaataaattctaaaacctattttccttctcaaatgagcccttcttagtaaaaaaatcacaaacaagacatagtcttattcaaaattctaattttttaattaaaaccaattaattgatcctacaaaacaatattatctcaattagtgtggggatcgtgggcctatataaccaagctcttaataagtaattctagaatttacctagtaaattccttatcttattaattcctcctgactccactatagatttgaaattacacttctgattacataaaatgctctattcaccaagaatagatacactataaattatctattgttttaatcaaaataatcaaagatcctttatagatgatttacatcaagtagggacagatttaccattatacccttcaatgtattttatctttaaaacacttagcttctcaaaataatattttagtaaactaatataattattgaaataagagctcttccatttagtttgttaagccaagctctaagaaaatcatcatttcacttctaaatagttacagaagctataaattctatatctatgattaacgctcccactcaattgcagtaccatgttcccaatatgtaagtattgggccgatccatttggtcagctttaatgaacaagtcaaagaactcaaataatacagttaagctagaacctaaccatttcaagattaagatcttttgatctaagatcaactaagtgatagacttataaaagatataatggtaagtttatgatatattttccactgccaatatcagtccactccgatgtatatccaatacatccgatactagtatactttgctagtgctttggaaaggacattcaacatagctttaagtaaactatatcattgattatcatgtcagtgtaaatctggtgcactgataaatcatgagactaagtactttgaagcatataatcacaattgtttttcactgtgatgacatcacaataatcatgaataactatatgttcagaatttaatagaatttatagattaaacataatcatgaaagtaatcatgtgaaccatgcaacataaaatgatttttgatcttttattaattagtaaatttgattatattaaaatgagttt

SEQ ID NO: 226482 - DNA, 2339 bp, Cannabis indica
agtacctcatattttcacatttgaacttaatatatttgcttacttgcgtttcactcacaatttaaacaattatactttgatcaaatttaaagtactttaagcatttccactgatcttgttttcctttcgtattgcataagtagttaatgatctactatgtacgcgggaagttgttatctgctatgctttctatttgcgaacaattgatcagttcttttacacgtaaagagttatcatctgatttaagcaaacttaaacatacttttaataattcatcttatgaattacttcatatatttttgattacctctatatgaatagttaagccttctattcacaccttaggttaagtattttttcaagggatcttggtgcctcattttaatacattcctataaaatgcgagtcgttggatgttcagcttcgcatgtagcttggtgttgtttttatgagttaaatctcatttacaactactacttcttactttgcatcgtccatagacgagttcaaatcaactactttgaaaaattttacaatggagtgagtttgcaatatattatgtatttctagataaattccagttcctcatacaaatacatatgacccttaagtaatttttaaagaataacgtttttgttattacttggaaaatacttacaacttttattaataattgaattttaaaaattacatcagaaagagagattacatcattagtttactggtagtagggtcgtaaatgatccacgttccagtggttctttattagcgagccgttaagccaagctaatttataaattccggttctaactatggcttcgatcacataagggccttcctagtttggattgaatattcctgcaaatgcatctctcgtgtttgcaaatactcatcttagtaccaagccaccgacgttaaagagccttttcttcgccttcttattgaaagatcttataactctatgttggtatgttgcgttagtaatttgagactcaatacgtttttctttaattagatccaaggacaatttcaaaagttcttagttttgttcttgattatagaaatctcgtctgtgggtctcaatattcacttcccctggtaccattgccttcgatccaaatgctagcaagaacggagtatgccatgtagttgttttcttagtcgttctatgagcccaaagcacttgtggtaattcatctacccatctacctttttgcagtgtccaacttctttttgatagtatccttcaaggttttattaacaacttctacttaaggccttgatactgacgagaactttcttgcaggttatggaaaccagaggttcaacctctatctactttgtaaagatgtttatagccaccactgcgtactttgctcctcctcacgctgtggggagtgccccaatcaaattaattccccatattacaaatgggtatagcgaggtcatcattcttagttctgttggtggtacgcaaggtatatgtgaaaaccatttacatttatcacacttttttgacaaattcatgtgtgtctttatttatagttggccaataatatcactgtcaaactattttctttgacaagctttgcatacctgcatggtctccacaaaagccttcgtggatttctttgacaatctcatttgcttttgtggggagaacacaccgtaggagaggcattgaatagccccttcgatacaattttccttcaactattgtgtagcgaggcactgaatacaagagtttttgtgcctcatttttgtcagctggaagttgcccattgataaggtagttgactatgggtgtcatctaagtaggcgagctatcaatcatctcaacttcttcctgttcacatatactcggttcgtctaacacttccaccggtactaaattcaattcatcaagttcgttctgggagcccagttttgccaaggcatcggcattagagttttgttctcttggaatttgtttgattttaaaataatcaaacttttccaagttcttccgaaccttctctaggttttttgccatttttaagccctttgcctggtattttcctagaacttgattcacaatttactgcgaatcattgtaacacacgaaattcttgacttttaacacttcagctattctcaaaccagctatcaaggcttcatactcagcctcgttctttgaagtgtcgaattgaaatcttaaggattaatgaaacttaaagccctctagcgagagtaatatcacccctgcacccgagccatgttcattagatgtgttggataattattttactaggatcttagatctactcacaagtatgttttttaaacatcctaaatatgaa

SEQ ID NO: 226483 - DNA, 2349 bp, Cannabis indica
tttattacctctaaccaaacaccaccttagttttgtaattgggtaaatagcgacataagtacctaaagttttaattttgtaagcgacttaaacctaatatttatttttagcggcttaggtactcaatgtttgtaaaattgtaattttcttccaatttcgtcagtacagactttgttatgaatttattaaaataatatttagaagtaattgttattacatgtttctatctagacccaatgatctagaatttagaccttatatgtgtcatgtttaaaatagtaataaagtctgtactgacgaaattagaaaaaaattatagttttacaaacattaggtacttatattatatcgctaaaaataaatattgaatttatgctacttacaaacttaagactttggatacttatgccgttatttaccctttataactctttgagttgagcaatacaatagacttatttaccccaaaaaacaatatcatattaaaagtaccaaatttatactttgtaaaatcacataataccaaataacaatttcctttatatactttaataaaaataaataaaatcttttcaaaataaataaataaaataaaagtagttttatttggtcaaacttctaagtatacaaccctatttcacaatttcataaatatgagaatatttttataactttttttattattttttgttatctttttttttttatgataaaagagaatatttttgaaactttttttaatatgataaaagagaatattttgaaacatgtaaagcttattgctcaaattttatattatgaatatccactttgtctccaacaaaatatatcaatatatattttttaacaaaatttaagttataaaatataaagaagaataagtgtcccctaagttgactttgtttgggggagcatcacacaaatccactcaatactcattatgctaaattaaaagcaacaacaaagtcttctggttcaagggttttaaaattaaatgggggagttttatataattacaacaaagaatatataattagatataggacaagattatgataggacctagcaaaagttttctaagtgttttactgtacagatatttcttacattacattataggtaatctaataccactattttgtttatagtgtgtccgatccgcactaagtagattttatattttgaatctaatctaatctataatagtatagattagattaaatcgattattttaaattaattacttttaatgttaaattatttaatattaattaaaaatatattttttttttcacatcaccaaaaaacaaaatcattaaaagataaaacataagatatttgttttaaaagtcttcaacaacaaaagaaaataagttgttattttatgtttctaacaataaattaaaataataaacaaaatataataaaaacaaaaaaaaaaaattagtatgtaaaaaaaaatagttacagttttagattattttctttttttataaatatatttgatatattaaattttaaaaaaaaatatgaactatacattagttgtatttagttactttaaaatattaatactatatttaaattttttaaaataaatataaataagtatgaattggattgtatctgttatttttgtatttgaaacaacatttaatccatacacgtgtggattttagagtttttaactcaatctattctgtacaaatataaataaaaatatttgcactttataaattatattggatcgagtattttatcaacactcttattataaacatgcatacagtaatgatacacacaaaaaatacatcaaaatattacacttaataatataatagtgatatctaaaactatttgtcttaataaaacaaattaaatgtgatcatctaaaaactagtcctcttaaatatcacacttaatgaaatagtgttttagtgcatattttgtgtcacaatatgtatagcatataaccaaataggattgtcctcttttctttcttcattaaaaaaattaatattgcattccattccaagttttgttttatgtattttgtttaaggtaatatatactctaagcttggtttaatttactttgacttttacttaatggcggacttaagatttaaagtgaaaggatgtgtaattttttttcccgtaaaatatgggcaaaataatttaaaagaaaaaaatactttcatgagatttgaaccctgacctctatcatatatgtaatctaatttaactattacaccaaaattaatattatgtttataaatatcatattttattacaatatatgtcgtaactaattaaaaagcatatatatttttttcttcgatttttttaa

SEQ ID NO: 226484 - DNA, 1634 bp, Cannabis indica
aatcacgtaatacgcctatgttagttagggtgttacagcttgtgtaccaatctcatgcttaataaaagagaaaagtcgctccccacagataaagaataagaatggcaagagtgaatcaccttgtcgaagtccactggtaggtacaatattacaaacaatatcaccattaacattgacaaagtaagtgacagtgatggcataatgcataattcgactaatccaaccaagataaaatcctatctactccattcaacgcaaaaaagcctaatcaacacagtaatatgctttagccatattctcccttttccccgtcttatgtcatttgatggaatttaaacattcaacctcaatcatgacattatcagagatgatgcgtctaggtataaaagtattctgctatttgaaaatcacatcattcaaaacctcccttaacctgttagttatcattataacaatgatcttataaaggacattacataaactaagtcaaaacccactaattaaagcctagctcttgacctttggaataagagtaataattatttcattgatagaagtagtcgaacctttactcgcaataaaccaaggcacgcgaagcacacaattgagccgacgacatcacaaaaatgctgataaaacccagcctaaaccacgtaaaaaagttctcttctttaacttccattaactactacaaatagttgtaattaatagttttcgaaaatctcagtcaacaagtataatagttaataggtttgaagttaagacgtctgtgttaaaaagttcgacattgctaatgtgcagaaagagtataacgtgtataagattcataggctacttctctcatagccaattagttttgagatatggaactcaatgcatcttacaattttaacatggtatcagagcaaaaaacaaacaaaaaacctctgacgataatccaatccaaaaaaataaaaagttgatcaaagtagagccaaaaaaagatccactaaatcctaaacttgatccaaaaagtagagccgaagtcaaaagcgccacctctgatttgggaatagtgagcaaaaaagagctactaaaaattcaaaaactgatccaaaaagtagagccaaaagagtcagttgtgattcgaggatagcgagccaagtgaatcactaaaaatttaaaaaaacagatccaaaatgtagagtaaaagagtcacttgtgatttggggatagtgagctagaaaaagaacctcttgtgatcgaattgtctaagacagtgaacaaaaaatagctaccatcttaaggggatattaaagagtcctacattactaatgtgtagaaagataatagaatatataaattacatcaactactattctcattattattattaaatagttttgatatgaaattttatgcatcttacaattcgagcagtctaccaataataatttaagaataaaataaaggggttggttttagattgttgaggtgtaaattttgttatagaagatttataagtaaaatagtaattaatttacagtaatagacaacccagagacaacatggtagcactgtaagactcatgtcgtcaaatgtttcaaacaaaaatacatgtcttatatttgacaatgaaactcccttaaatatca

SEQ ID NO: 226485 - DNA, 1637 bp, Cannabis indica
agtaatcccgtttaggggattaggatttcataagtatcttgggtagcgtgcctaattatttagggcgttacaattctcttccctccacatacactagaagggacctaacccacctaccgaagataaccaattctctagtaggtagtaaggtaccaaaagcactcggtaaaacatcactaggcttattcaaattcccaatcactctactcaacacataggaatgcgtagcaccagaatcaattaaagcagttaacaataatccatcaatagaaatctaacctgtcatggtagaagaatcagcattggcctttgcctgggtcaaagcaaacacttgagcaggaactagagtgccatctttcttctgttctgttctctacaattgtgggcaatttctttttagatggcccactaccccacactggacgcaggctcgagcttgacattcaccctaatggcgtttcttgcacctcaggcactctggataggttctctaatttttattttcacctcgttgaaaaccttgattacctttgaatttcttgttaagaccatagctggtgggtcgttaggtcttttcttacgatcattagggtcagcacccttaccaaaaccaacattagatgcttgcttccatgaatctcttctcatattgtttctcttttgaatttggtcttctgcaccctcagcagcaagggctagctcaacaacatgagcataagttcgaacaactcctagttacttagcggctacaattacatctcgagtgatatgatcttccagcccccgaatgaacttggcctttctagtagcctcagtggccatttcatcagaggaaaactttatcaaccgatcaaatttggtggcatactttgtcactgtcatactgccttgggttagtcgtgtaaactcttttgcctttgcaacatggatagattcattataatactttttgtagaatgaggtctggaaggcaacccaggttatgttattcaaatcatgaccaagaaatacgatttcccaccaaatacgtgcatcttcacgcaacataaagatagcacaaccaacctgatcattaccctcaacacgcatgaaatcaaagatggatgttatcatgctcatccattgctccgcctttagtagatcagcaccacctttaaacattggcggcttctgcttactcaactgttcatacaacgactccaaatgatttcccacattcggtggcactaataaaggtgctagagggttagtgttgggattcaaagcaggccaagcttcctgcttcctcagctctctgatctgatcaccttcctgttggatggtctcttgcattgcagcgtacatttgttcccaattttatggtagtggaggattcgtaccctcaccgccagccccgagtacagagagctcatagttaaccctaccagatcgcctcaggtgcataacacacatgcaaccataaatttccatcatttagaatcttccaacacaaaactaatgctaataagcatttctatacatacacatacataacaactattatttataacctatcatgctagtctaatagcttgcacgttcaaataaatagataattcaaacaattagcaaataatctaataatcaactaacaatta

SEQ ID NO: 226486 - DNA, 827 bp, Cannabis indica
gggaaattgggctatctatgctcacattagggggaaattaatcccttaaacatttaatacccaatatttatagaataggccaacaaatatattatttctaaataaccctccccatttacatcaccctctttctgtctcaccaaacaaacaaaaaagctatctcctttcttctcttcatccgagcatttaaaaatccaaaaaaaaaaacactacactcccatctcttcactcattctcttcacttcttttcactgcactacaagctacactacattctttcactcattttttcgacgaagcatcatacacgacttcaatgggtaatttttttgtttaatcttgttggtagttattacatttaatttagaatgttattttcatagttgatatgtggtttgttactgttattttgctattttgtgtgatcaaatggttgttgtctgtgaatactgtatttttcctaggttttgtaattttttttgtttagtccgatggggtctgatgtggccctgatggtagtctgatactttacttggtatcagaacagggatgatagcccaatatggccccaatggtggtccgattagggctgtacagaaattttcgtaaactgcctaacccgaataacccgcccaaactaaaccaacaaaaccgataaaaaatacaaaccgacataactcgacaaaattctaaaccgcccaatcagtaaattgggcgggttgaaaattgacccaaattgtccaattaaactgcccaaaccgatttaactcgatttttaattttttttattttatatattatataatatataatatattaaaaaaaaa

SEQ ID NO: 226487 - DNA, 2269 bp, Cannabis indica
ttttattttatattttattatattattttttttcattgttttaggtgtcttatgtttgtttactatttttagttgattgcaataggtaacttagtttctatatttaattgtttattttcgttattttagataactagttcttaaattttagtttaattaacataattttttttttttgtgtgtcatatattttaaatagtttatatataaacataactggtttctttgtgtcagattacaacgtctaactttagtgacaatttcgatgtctaactcctgtgacaactctaatgtctaatgctagtgacttttcagtaatgacaacaactccgacaaattttttaataatttttccgataacaataataatttcgatgtatattcttattctatattctatttttttccgactaatattttgttttagtatatatgctcaatttaggaatatatatacccaatgtttgtgttagaccatttggttgcaggtcaggatgagttggtaagagctcaactattatttagtacatatttatcgtcatcattatattattgcatagtcaatattttcatttgaccaaactaacttgtacatgtgtggctaataatctatatatttatgctattatgttatttttcattgatttattaaaatggataataataataattaaagattgcttaaactaattaaaactacttatacataatgagaaatataacaaaattggtattacagatcaaaccaaaaataaatataagtacactatatttttttttgataaaatgtgtacgtatatttaaaataaattccaacatacacctggcctaataaacaacatggcgatgagagaatctttttcaagattgatcgagtacttgccaaccaaacttggattgacaattatgatcgagctgaggctgtttttctaaatgaagggctctttgaccatactccagtgattttatctcttcatcctgaagtagtgagcgaaagaaaaccattcaaatactttaagatgtggaaatcacatcctacatatgagagtggtttaaaagagatttgggagagacctattgatggcacgaaaatgtttcaagtggtatccaagatgaaacaactcaaacacaagctgaaagagattaacaaggagggctttcatgagttgcaggttgctgtaactagaaacaagatggatctagatactttgcaacaacaaattcaccaaaatccttctgatttccacctgcattctcgagagaaagatgccagagaaaagttaagtaagtctcaaagggattatgcatccttcctacaatagaaagctaaagctgcttggttacagagtggagattgtaatacagccttgtttcatgcctatataaaacaaagacagcggcaaaatagaattttatccattgaaaagctggatgggagcagggttagtgaaccttctaaggtttcagatgcttttctggaatactataagagcttacttggtactagaatggaaaagaggaggaaaactgagaaaagcatattggctaggggacccatactcactgatgatcaaggaagactgcttactcaacaattcacaagtgatgatgtgaagaaagctattttcagtatacttgtgaacaagtcacctggacctgatggatactcaagcagcttctttcaagacaattgggagtatactggtgaggatatcagtgcggatgtgctatcttttttggagtcgggtaatattctcaaagaaatcaactcaactataattaccttggttcctaaatgtaaatgtcctaactctgttaaagattttagaccaattgcttgctgcaatgttatctataagattgtaactaagcttttgagctctagaatcagtaacattcttcctaatataatatctcactcccaaggaggttttataaaaggaagatttataggacataacattatgatttgccaaaatctggtaagacattatggaagaaacgcaaacaaacccagttgcatgattaagcttgatctccaaaaagcatatgacactattgaatgggaatttattgaggaaatgttaacaggcttgaatttcccccagagcttcatcagattagttatgaactgcatttctacacctaagttctcccttatgttcaatggagccttacacggtttctttgagtctaagagagggcttaggcaaggggatcccatgtccccattgctttttgtccttggtatggagtacctgtctcgatt

SEQ ID NO: 226488 - DNA, 1515 bp, Cannabis indica
agacaagacaaccttatctttgaaagactagatagagcttgcggtaattccgaatggtttgatttgtttcctgctacgaaagtggtgcatcttgagcgactaaattcagaccactgcccgttattactcacttgtgatacacagcaactggatgccattaagggggttcgatggcactctcgcttccattttgaacacgcttgggctgaggaagaaatgtgccatgagttaatcaagaaaacatggggggtgggcactatcagcaccacggctaggcagctcaaagaacaattagataaatgtggtgttgttcttaataaatggaataaggcccgaaagaaggaaatgaacaagagaatcaaggaatatgaagataaaattgccactttatccactcaaacagatcacaaaagctggaatcatttaaaagaggtagagcgatcatacaatgtgtatttggacaaagaggagaaattttggaaacaaaggagtcgtgctttatggctaaaggaaggggaccgtaataccaaatttttccacagaaaagcgaactcaagaaagaagaagaactcaattacggggctgcttgatcataatgctcgatgggtgtatggaaataaattggtgggaagggtagcttgtaactcttccaacaattgtttactgctcagccggctactgtagaggagttaaaagagttccaacgcatcgtgccacacaaaattacccgagaaatcaatgagtatcttgtctctccttttacgaaggatgatgtattacaagccatgcgagatatcaatccacacaaagccccgggcaatgatggaatgccaggcctgttttataggaagttttggccgattattggagacgaagttactacagtttgcttgggaattctcaatgagggaaagagtgttgaagctattaatgagaccctaatttgcctcatcccgaaacttccaagaccagtccaaatgtcagaatttcgtcccattagcttgtgcaatgtggtatacaagatcgtagcaaagtgtttagcggggcgtatgaaacatagtcttcatcaagtcatttccgaggttcaaagtgcgtttataggaggaaggctgatccaagacaatgctatcatcgggtatgaaagcctccatagtatgaagttgaaaagatttggtaatggaaagaaaatggccttaaagttagacatgtccaaagcatatgatcgggttgagtggagcttccttatgactatgatgcgtgggttgggatatgatgagatgtggattgagaaaattatgaggtgcgttactagtgtttccttttcggttttaataaatggagaaagaattggaaaattccatccttcccggggtcttcgccaaggtgattctctatccccatacctctttcttatttgttcggagggtctatcttgcttaattcaggaagccgagagggctggaatagtaacaggggttagatttggaaggaatgatgttaccgtttcgcatcttt

SEQ ID NO: 226489 - DNA, 1648 bp, Cannabis indica
tttaaatttagtgttatttctcattaaaattaatctagccaaacactaaagttattctatatataggattctctacaatattctattattattagtggaacactatggactacactaaaattgcttttttatttttttcaatttttaatatttaaataatggttaaataattaaattttcttaatatatacatgtgtattatttataattatatattaaaataataataaatatatatttttgtataatttatagtgtcgtagttataactgaaaaaaatagtactaaaatagtattttttttttttatattgatttaacactaaatttaagttttacgattagagttaccctaaagtatagataatttaaccttaagaatttaataaaagggattcagcgtactaattactaaattttaaagtttaaatagttttaccagtaattactttttaaaatttacttattttattttttacacgtcaatagtaagcaccctcggccagcggctaacaactttgggttttggaaagagttgtggcagctgaaaatacctccaaaggttaaaaatatattgtggcgtgccgtgacaaactgcctccccacatgcctaaaccttgtcatcaaacatgtgaatgtctctattctttgtcccatgtgtgatggtcaacccgaaaacacttctcatgctttgattgagtgcccactggctgctgcatgatggcagcatattggagttcaactaccgacatctgttggtactttcacatcatggcttgaacttacattttcttctaacacaaccgaaaatatgtgtagtattgctatgatatgttgggctctgtagaaagcaagaaataaaaaagtatggaagcaccaaacatcctctttgaatgaagttatggtatctgcaactacttctcttgatcattcgagaaaagctcacgacattacttctctatcatccatatttctcaacaacatgggtgatagaaatgagctttgggtcaaaccggtgttggaaacaatcaagattaatgttgatgccgcttcttttgagcaggaaaattcctatggattcgggttggtggttcgtgatcaccttggttcccctcttcacattcaagtagaatatcatggaaggtacttcccctctgaagtgacagaagctatgggaatcaaggaagctcttagttggatcaaggcaaatcatcggtgcagagttttgattgagagtgacagcatgcttgccgtccaagccattcattctacccagttaatgacttccgtgttcggtttagttgttaatgattgtagaaatattttatcctctctttctgatgtttctttacgttttgttagacgatcagggaatcgtgcagcccactttgttactaggcatgcacgatcgttaactggtcgtagcattttgggatcttctataccccctgatctacagactattttgtactcagaatgctaattaaatgaagttgcaatttcatgtcaaaaaaaaaattactaaaaataatagtagtgatggaggttaactgaaaagtagctacattgtgttgatacaaatttgcatttttttttttttaaggaaattagattccataccctttttatattgttttcttttattttta

SEQ ID NO: 226490 - DNA, 2366 bp, Cannabis indica
aaattccatatatttttttattactactaagtctgagctcctatcttttgtgatttggtttttaataattttaggttttttaattaagtgaaggatttttaattattttaataatctttatgatttaagcatagttagaagtgggtttgcattcactttagtccaattttcaacaataaattttgttagaataaattaatggctaattaatcatgttatacttctgtatgagcattgttttttaagaaaaaattatttgagtaacttaaatgtttggcttagataattgttacttttcttcaattttgttccttatgtgatgaaagtatagaatctgtttaggaagccaacctatttttcggttttgtatttggtaaacctttaatttggctgtactttccatttgaaacaagcgttttctttttgtgaaaactaaatttgactttgctggagtccagttaatattttatttatggatgtgttcgcagtggtaattatatttattgctgttgcttttaatctctgttatctgttttaagtcacattgtgaatggtagaaattagcccaaaaaaaataaataatcatatcgatacttggttttgaatcattaatttgtttgttaccttaggttcaatgactttggtactgatggtggaccagcggccaatctttgactccaaaattccatgctttctccagtcacttgtcaacgcacactgcggtcaaagctccagaagttgaggtgagcaatacattcaatttttgatcaattttcattttccaccacatatatgtatgttttagttagttaaatttgcaaatgatgttagaattattgttgacagatcaagcacttggtggctgcggcaattgcactcaaaaattaattacagctatgatagtaattagaatcggcattttatctgaaggagaagaagaagaaatattaatgtgtgcagaaaaactatgagatgtgtgcacgccacactaatccaggtgatcaaattgatttgtatttgaatttcaattcttaaattaattcaattttttgattaggtttgtgtgacattgtgggatggcacttccgctacagctccaattttatgatcaacaacaaccacagacacagactataaaatgagcagagttagttaattaatctcttctaattccaaaacttttattcattcttatcatcattatatcatctaatctcatttctcttaatctatactatagattgctaagaatctcaacaactacattggtcatgcattgatttacaaagtaagtaataatttctttgcatttttttaatttactactccttgctgctcctgattttgtttattttatttttaggatccaactaaccagtaatgtatcgataggattttccaaaatgtcatggtacttactataaaatccaaccaattaattaaccaatttattaatattttcttaagtgttaaattaaggagttgtgttgtactgtccttttcagtcattacctttaaatatggaattggcaatccctgttgctgtctgcaaattagatgctcgaatcaacggcatccctctctacaaggtatatatatatatatatacatatacatatatgtgatgatgatgatgatctctctgttgtttacatgtattatatcatagcagattgcaaagcttgctggccacaaaaagatgaaaatgcctggtcttgctttccccttggtgaaatgtgccacaactccacaaaagtatcaggcatgtgtatgattaatattcataacttccatttgtaataatgctttaattacttttttccagataatgatactttctagtaattattattttgttttctgtgttcgtgtttttttttgtaagttcaggatttaatggttgtcagtccaaggggtcatgctgttttcaaatccatctttcgatattcctccacaaatttctttttcctacagcatttaacggtttgcttttattcactcggaacttgttcgtatcttttttttagaggagattcattcaccctactaagtacaacccttatatggctagtgtagacttgtagcaaaatgaggatgaaaattatgatacttttgatctccaatctattcatgataaaatacttgaggtcgttagcatatcaggaacttggcaccttgaaaagcttcaggtacataaattcggtgttctaacattggagaagataaagcattattcattctttaattacttgtataacccctgctctgcttgatttttgccttactatttgtactataaatagccatctaatgatgtacattaattttttttcaatccaagtgatagtgattgaattttctctttc

SEQ ID NO: 226491 - DNA, 2757 bp, Cannabis indica
attccgagactgaagaggttatacagttcagacactcggcagaggacatgcggtggcactactctaagagacctaaagaggatgacgtgattagacaccctgcagatgcagaagagtggaagcagtttgacagacgtcatccatcattcgcacttgagcctagaaatgtgagattgggattggccaccgacgggttcaatccctttggtaacatgagtaacgcttacagtgtgtggcctgttattttagtcccgtacaacttacccctgtggaagtgcatgaaacctgagtcgttgatgttgtctcttttggtgccaggacgcactgcccctggaaaagacatgaatgtttttatgagaccattgattgatggattgagagagttgtgggattcaggtgtccaagctcgagatgcttacaatgggaccgtgttcacactaagagctgccattttgtggaccattaatgacttctcggcgtatgcaatgatgtctggatggagcaccaaagggtacaaggcgtgccccacctataaggagcacactccttccattggattgcacatcaagattggttatgttggccacagaaggtttcttgaaatggatgatgcaaggcgtagaagtaaaaaatacgatgggaaaattgagaaaagaccacctcctccacaattgttgggggacgatattttagctcagcttgagcagttccaatttcgtttgcctggaaaacacaagcaatttggtggagtcaaaggtaaacgttctgtagctgagttaaattggtcaaagaagagtatatttttttagctagagtattggaagggcgtgtctctcctacataatcttgacgtaatgcatatcgagaaaaatgtgtgtgaaagtatacttggaacttcgttaagtatcgaggggaagtctaaggacacagaccaggcaagactggatttggaggaccttaaaatacgtcgtgatttgtggttatttgaagaacgtaatgggaatttaaggaaaccgcatgctagttacacacttactcttcctgaacgacgtgaattttgcggatttattatgtctgtgcagttcccagacggattcacttcaaatttagagaaaaatgtcaatgagactgaagataaaattttcggtctgaagtctcacgattttcatgtgttgctacaatgcttgatgcctggtggcattagaaagttcttcaagaaagaagttagggataccataactgagttctgtgtatttttccagaaatggtgctgtaaaacattgaatgttacagacttgcagatcatgcaaaaaagtattctagacattctttgcaaattggaaaccattttcccaccagcattttttgacataatggttcacttggtgatgcatttacctaaagaagcgatggttgggggaccaatgcacttcaggtggatgtatccaatcgaacgagccatgtctgtgtacaaacaatatgtcaaaaatcgttctcgaccggaaggatctatttctgaagcttatgcagttaacgaagccttaaccttctgttcaatgtacttccgggtaatagaaactcgatttaatcgtcaagatcgaaatagtgatgtcctcccaaataagcctgaaagggaattctctatatttaagcatgttgggcgaccaattggtcagaggaccattgttgctttaccaatgcaagataaattgaaggcagagtggtacattctgaacaattgtaatgaagtggagaagtacatcacgtaagattacttttttcatattcaatttagttctctttagtgacgacattatctaacattttccccatttttcatgtagtgagcaaaggaacaagctacaacttaggggtcaatgagacaattcaagagaatgagtttcctagttggttcaagtctcgagtgagtattgctttctacttattttgttattgaaatactgtgaattaatctagcatcaatgattaaattatttttcttaatgatagatcaatcaactccgagcagataatcctgcagaagtatcagatgagttgtacgccatcgcaaatccctctaacccaacatgttattgttatcctggatgtattgttaacggtgttaaattcttagtcgaggatcgggatgaaaatcgtaagacccaaaacagtggtattttggtgcctggagaggatggtaacaatttttatggcgtactcaaacaagtgtacgagttcacttacttgaaggattgtagtgttattatttttaggtgcaagtggtgggacacaaacggtaacaggacagaaaatgatggttttttcactagtgtttgcgttgcccgtgaatggtaccaaaatgaaccattcatacttgcatcccaagcaaaattaatatattacattcctgacttgaagaatggagttgattggaaccttgtcaatttttacacccctcgcaatgtctgggactttttggatgaggatgatgatgagaccacaactatacaagaaagaaactcttcaggaatttctttagtcgttcaacttccacaattggatgatgtataatatgttcgtgatgatgttgacccaattcaagtgcccggtaacatgggtcgtcatgagcagtctaaccgtgaagatttagatggcttcattgtttataatgatgatgaagacactagtgatagtgataatgaaaataatgtagatgtcaatgatgatgatgatgatgattatgatgacttgtagact

SEQ ID NO: 226492 - DNA, 1847 bp, Cannabis indica
ataaagtcagttggaaaaataaacgtgtccaccttgacaaggacatcttaagttaccccatgttgcttgtgtagagcctttgaggatgagggatcttgacctgatgctcaatgctaattggaggagatagaccttcagtagtcttcttttcctcttctactgatgcttgtgcatattgatcttaaccctgtttttcaactgacttctattgactcgacccagcatagttcttcccactcttaaatgtaattgccttgcatttttcttttggattcgcttatgcagtactaggaaaattaccttgagttcagctagccaattgtctcacttgattctccaaggttttaatggaggatctagtctccatcatgaattggaacaatatatctgcttgaacgtttgactctccactagtacttggttgctgagcaggctattgaggatttctttgttgtggtggcctatttctctgctgaaagaaaccttgttgaggctagccagatggctgcacttgaatataacaaagaactccatcaatagaaggatagtcaccaaccttttggtatctaatatcttgagatttctccattggaaaactattcacatcaactggacaactattataagagtgaggcccaccatataactcaaagattacctgggcctgttttacttctgttgtcatcatcttagttagggcttctacttgggatgttagctttgcaatggcatcaacttcgtgtaaaccatctactttatttgattggcttctctcacttggccattgttagttattcatggccatctcatctaatggcttataagcctcattagcacttttgttcttaaaggctccactagaagcggcatgaatgagtgtactattagtactagtcaactcattgtagaaagtgtgaacttgcatccacttctcaatctcgtgatgaggacactttcggatcaggtctttgaatctcttccaggcttcataaagggactcattatcttgctggatgaagtaattgatctccgatctcaatctaccaaatttggctggaggaaaaaacttggagagaaatttcagggccaattcctcccaagtacgtgttgatggatttaggtggcaaagacacaaactaactctttgctcgatccctcagcgagaatgtgaacaacctcaaacgaattgcatcatcgctaaccccattcatcttgaatgtttagcatagctcctcgaagttagaaagatgcatgttaggatcttctaatggcggtcccccaaactatactgcgaatggaaccatttgcagtatggttagcttgatctcaaagtagttagcttcaatggcaggtggtcttatacaagattgagcccccattaaatttaggacaaaaagtccctcaggctacagtcaggtggattacaaccattagcctagtcttctatggcacctccattattgtcgttattagccatatccacttcttgttcaacccctacaacctttctttctaccctcttgtttcttctacaagtcttttcaatctcaggatcaagaagaactcttgctcttggtcattgacgccacataaaccagaagtacctgaaataagatgagaaaaatttaagaaaaataggtcagcaagaagtataaaaagaaaccaaagtacaatttaatctaattaatgcaatatcaatttttttttcaatcaattccccagtaacgttgccaaaaacttattgtgtattttcttctctatgcaagtgtatgtatcaattgtaagtatatactcacgcaggtgaggtcgaaccacaagaaattgaaaaattgagtaccacgaaatta

SEQ ID NO: 226493 - DNA, 1737 bp, Cannabis indica
gcatgctcttacttgaggaacttgaggttgttgcttaaatctcttttccttgtttgaatttctagatttaagaggttattaaaggtgttctttgtatttttgaatatcatgagtgcatgttgttgtaattggaggaaattgtggtgtttatggtatgggtttgttgttagatccatgctagaattactttttatgtttggggagctttttagttttgtttttgatatgtaaattctgggttttatcttgaaatttttaagtttatgtttgaatgttttagtttcaagcatgaagattaggtattgcatggtttcttgattttatgcctgattggtgattttgggtgtttttaaggcttcttgcgaagctcaatatcataccaatgcttaattggattagaattgtttaaaagtttattttttgtataattttggatgaaatttgatatgaatttggtaaatttttgtgagcatgaaaaattgggaattttttttccaaggtttttgttttcttattttgactagaacatttgactctgaactttgttttggatgttctttgtaccgttggaaatatcatttcaagctctacatgttaatctataaatagaatgcaaattatgtgtttatgtgaaagtgaatttgggattagccctatttgtgaaatcccaagaacgtgtcactaggattactgacacatgctcaggaactcccaaggatttggaatctccacatactttgattacaaggtaagacagtaaaccagcacgtagagtttagcgtagttacgctcatgtatgttatttaaataattatgcagaaaatcaagaatagggttattaccttaagttagccattaagtagtctagagttattactctataatatatgtgattattaatgcaatattgtattatatatgatgagataaagagttatgtagttaaggccttattataaatagacgtatgagtataaaacgtgggtctatgtcatatagacataaataacttgtaacattttgcaaaagtttttacaggattctgaaacaaaggtaatctcttggaatgtttataaaactaaaaaattacaagttatgtttttactctgtaattgatttaaagtttaaatattttccgctgtagctttattaatcccggtttagcgggatcagcttatgtttagccactatttgtggcatccctattattatggtgttacgattttgtatcagggcgccacagttttttaacttcctgtagacccgctaaacacgtttactccttgtcagagacaagtttgactcgtggagcagtaagtattaagagtaaatgcttaactgcttttgtgattagttatttactgctttctattgtaggacgcatatgagcatctagaaaatgaaattttatatgaaaagcattattagtgtttaaattgaaaaatgtatattctaaaaagagagaagtacaatgtatgagttagggttaaggcaataagtccgtaagtatgggtttagtgcctgactcgtcgaggttgttgattttagggctatttgaaagagagttgaccctccacaatcatctaaaccacaaggcgagcacgtagaaccttgtaatcaccaaacaaatcaaccggaactgcttgcgtctccatagaatctgggggaataatgtagggggttaataatgctaatccacataccgacctgacactacatgttccttgaaatttgaag

SEQ ID NO: 226494 - DNA, 1732 bp, Cannabis indica
tttaaagaatcttctccactcttcaagcaaaaagggaaaaagaggactgctgcctcagaaacttcttcagatgttaatgtggaacccctcaagagatcaaggaaaaccactgcaaataagaagcgtgcctcgcagactatagacctcgagactcttgaagtcaaaattcaggttcacactcagccattccacatgtcaaggagtcagtcccagaactcaccaggccaccacttcttcaagtaaggcacttgagactttgcccatcaaggctgggggcactagttcagagtattgcgcgcaatttgctacgtcctactggcgccatttttgatctttccaatctagtgactgggatttggtcaacaatggagcctaacagagatgcttgagaggaggttgaggagatgagagactcacaagactaaacttgagacagcccaaaaggaagccaaggacaaatctgaggcatgttagaaactccaagaggaacttaatgcagccattgcgaagctcgagggtgctgaggccaatgctaaggaatggtgcaacgctgttgccacgtgttccatttaccgaaattggatggaaaatcttgagatggactgaagtttcttgggggagggcaccaaggaagtcttatcttattgcgagaaagccaagaaagaagaagaagaagaagaagaaaatggcctttggcctagacaatggtttgccccttatggaaatttttgtaaagacaaatttgctttgttggatggccaactttgcgttttatttatttattttcacttattgcctcgtatctttatatttgaacttaatatgtttgttcatttgtgttttaatcacaacctaaacaattatattttgatcaaacttaagatactttaagtaagcatttctattgatctcgtttttcctttgagattgctttattagttattagtctactatgtgtgtacacaagtagttatattctgctatgctttctattcgtgagcagttcttatcagttctacttcgcgcgtgcagttataatctaccatttataatttggtaagtaaacttcaacatactttgaataatttattttataaattactttgtatattttttgattgcttatatgaatagttaacctttctattcatatgtttaggttaagtattatttttcaagttatcttcgtacctcgttcataatacatgcctgaataatacaagccgttagatattcaacctcgcatgtagcttaatgttgtttttattagttactctcatttataaatgctacttcaatttcctttctggagggaaatgttcgatttttgactttatattgtccatagacaactttaatcaattatttggaaaaattttaaaactttaaaatggagtgggtttgcaatatatcatgtatttctagataaattctagttgatcttacacatatatatatatgcccctcaagtaattttaaagaataaatttttttaattgattgaataatacttcaactttattaataatgaaaatttacatcacaaagaaaaaatacagtatttacattataagtaaactggtaataaggtcgcaaatattcaacattccagtgtgttgacctcgcttttagccaacgataatgagtcaaatagtaagcgatagaaaatataattaaagtaaagtatgaactaataagtaataaaaaatacaggattttaaagaggttcggc

SEQ ID NO: 226495 - DNA, 1750 bp, Cannabis indica
taataaataattaattaattagtaagtcttgccagctggcatggtcaaagttttctctcaaaaaattttcgtcgaaggtttcctgcttccgcgcctgggtattgcgtctggttgtttttctggtccgattgttgcgtcttcatcggtggagcacggcgtcgagcctgcaggtttcctcatcgattctcagaggagtcaagaaggtttgggttgttcagcgtatgcgactaagttattgcacctggatttttttgttccgtttaggactggtatatacggtcaatcggcttcttgaaggtttttctgcgattggtataggctcaggcgactgggtatctcgtgtccattctgctgcgtatttttttgcgttttgttacaggtttcagtcgactgggtttttgcgtttcattggtggagcagggtgtagagggtgaagttttattgtcgtttcttcctcgtttccagaagtttcaggggtacgttttgggcttgatctctctcggtttctgggcttatttttctggttttaatggcttcgactagcacggccatggaggacatggaagatcagtatggtcatatcgaattggaggatgaggaagagtgtgggttcgagattgaggatgacgttgaagagacaattctggtggatgatcgttggtgtttggtggggaggtttttgaacgcgagatcgttggattttgaagccatgaagcacacgttggctggattgtggaaaccgggcaaaggattgtttgtcaaggagctggggtcgaatcttttcctatttcagttttaccatgagatcgatatcaagcgtgttattaatggcagtccttggacattcaatcggctaccattgatatttggtcgagttccacgaggtggagacccgaaggctgtaaagcttaatcaacttgatatgtgggtgcagattcatggtctttctacggggtttatgacggagaagattgtctctacagctgctaactacattggatcatttgttgaatcggatcctaagaactataatggtctttggcgggattatctccgcgtcagagtgacggtgaacattgatgtcccattaaaacgcgaatgaagcttaagaaaacgggtggtgagtggttttatgccaattttaaatatgaatttgctccgacgttttgctttatatgtggtttgataggtcattcggaaaacttttgtccaaagctatttgatacacctgaggatgagattgttaaaccctatgggagtttcatgcgtgcgcaaccacggaggaaaaactatttattaagctctcagtatctgcgtacgggtacggaggctgatgagcaaattaaccatacatccctgatgcgtaatgtggaggaggacgatcgaacggccatgcaatctgggaagttaccttgtttggaacttgaaaatcatccgcagtcaaagatggttaatgatatccctgagttggtggatgatgggaatatttctcttaatgagaatgtgcatattaatggcactaggaataatgtttccaagtctagtgccaatgaaagaggaaagtcagtggtgtttggaaatcatgtgccaagtgggagaggtcagccttctctcttcctaggtggaattatcggcgaggacaaggaggccgtgggcttcctgctgagtctaaaagaaggagccaacatgacggagttggtgggcctgaatatgttgatatggatgcagaggatagtgctgatatggatgt

SEQ ID NO: 226496 - DNA, 1773 bp, Cannabis indica
catatcatcgacgtagactttcatattgttcccaattttgttattgaacatacgtttgactagtctctgataagttgcacctgcattcttgagtctgaagggcattacattgtaacagtaaagcttgatgtcaattcagaaactcgtgtgttcttcgtctggtgcgtgcatattgatctatttgaaactagaatatgcatccatgaatgtgaggagttcaagttggctatcgggtccaccaattgatcaattcttgatagtggaaaataatctttagggcatactttattgaggtcaatgaagtcaatgcgagtcctccactttccattaggtttaggcacctgttatccgcatttttgtaattacaacacgtggattttaatcaagagaggttaagaagtcattagccgatcaacttcctcaactgacgccccgggatggtaaaggccctgactcacggaaagggctttcgtgaatcgatgcggagagtatccatgactcgaagtcttcctcagtcttgagaaccgaagcaatctactcccgcaaagagtatgggttttcccaaaagaacaaaggccttttgaaatatgtctaactaggctacactcctattctgtggaggctttgctagtacgtgtcagactacggacctaatgaccaggctttttcaggtaccacgtaaaaggttgtctcccacaataagctattgtacagaacatgtttatctcgttgtacctaaccgaatgatccaacgactagggataagggaaattcaaaaaggaatgaccctggggcgacacacgtatgacgcacagcctgtacaatctgacacccttaaataccatatggagaaaatgccacctacaaatccaacagagggattttgcccaaggatgatcaatccaagccagcacatgaagagaagttggcctataaataccactgtaaagcacaagaggggggagagagacatttgtttgagagaagactcattcttccaacttttggcaaacatgcttgtaataagctaaataatagcatactgagaaactccagaatatccatactaagcttcctcttcttcaagagaaaccctacggaaaccgagtttcagtccattgtatctttacttgtacaaacagttactggccaatgagcctaataaaatagactcgtggactaaggatagttaacgcttgaaccacgtaaaaatctcatatttgttatttattatgttattcctttcttaagctctaaaaatacttagttaaaaacttggtaaacattttggtatttcattgagagctaaagaaataaagaaccatgcccggtggtcactggcacaagcctgtaaacagaagggctcatgcgaggaaagaagaaggaagaccgcctaatcatctgctaaggtttggctagaggtcagaagggtgctggtcagaggtgttgtcaagaatgaaggcctacaccctcgaccacccgaagaaggtactgcactcacgctgtccctaaaagctcagatctagccagccaactctctggggagatgaccggctgatggcttccttaagctcgtgtcccccgtcattcactaaggcataactacgcagacacagcgaggtacaagaggtgttggggccaagcaaagaagctaagacctgatgcaattacgatgaataacttacgaagggtcatcagatataacgactttatccagctcataactccagcacttgtgctgatgcaaggaccaaatccattgccaacgactac

SEQ ID NO: 226497 - DNA, 1723 bp, Cannabis indica
catgatatagctcctccaaacaacaactagacatagccagaagtgaatttcttagttttttggcaacccgcaacatcagagtcaaaatacctaatgatctctaaattttcaaacttttgacaagtgagcatataatcatttgttctttataagtacctcatgaatcgtttggcttccttccaatgatctatacctaggtcacttaagtatctacccaacataatcactatgtacgccaaaactagatgtgtgcatacctgagtatacataagacttccaataaccgaagcataaggattcactttactctttaaattttgctattggggaaatatttgagactaaacttgtctccttttactaaactgtgacatacacatccatcaacaacgttgactttaaatccgcgtatgagacaacgattagataaaatgtgataccattgatggaaagctttcttgataccatagatattggatcttgagtttacaactatagactttggattacttgacaccaaattttttggttgcatcatatatatagtttcctcaatgtcgtcaatgagaaaactgtcttaatgtacatccatctggtgtgtagctctaagtcaagataagctaaaagtgagatattctaaaagaatctttcgatgacgctggagagaaagtttctttataatcaatgtcttccttttgtataaaatccttggtgacttaacaagatcctaattgtcattgtccttcgtgaatttcatctcatcattcatggcatcaattcatttttgataattaacactttatttgacttgttgaaaattgaatggatcatcttccattgtccttatgtcaaactcatgctttttaagaaacacaataaaataattttaaattgcacttcttctctctctagtggatcacctaagtggcacttcctcttgaggttgttgagtttgctcttctagaacaacctcttgatattgagtagggagttccataggtgaatcctcattgttgtctttaaatatttcttagcaatatgtcaataggttgatcattgtcaaaaaataacatttggtagaagaatttatttctcttaaaaaaaatattccttactttatctcccccctaaaacacaacattctcaagaagtcttacatttcccatctcaaaaaaggacttggttgaaggatcttaaaacattaaaccctctaattttttggatacccaacaaaaaaatagttaatggttcttgagtccattttgttttcatgtggcctaaaaaggccttacctcagctggacaatcccaaatatgtaagtgtttactactagacttttttcttgtccatagttcatatgggatttattagctaccaattttctagatattctatttagaatgtagattgtagtcttaagtgttttttcccacagtgatttaggtaaaaaagaatgattaaccatgcttcttaccatgtccttaagcatttcatttcatctctcaacaacaccattcatgtgagatttccctggtattatgtattgcccaggtcatgggtatggagtagagtttttaaagggtctctagaatgagattggggaggatgtgtctagagctatttcgggattcttccaaaaagaattctccctaagcaccttaatgagaccatatctcgcatccctataacggaacacccctagaatgctattgactatagacca

SEQ ID NO: 226498 - DNA, 1445 bp, Cannabis indica
aaactgatcagagtaaatcaagtagtaactgacaaaatccatagtgaacaatatcgagtgaagcagcaaaagcacaggctaaatacccctttcgctaatatcttacaactatataaaatggaaagaatcaatttatgattttgtgtaagtattggttggagtaaatataaatgtgtacgtaaacatgtattgctccatttagcacgtgaagccactgcttcttccaattcacccagtcgtggaagtgatctgtcaggggagagaagtggttattttgctagtgatgtctccatatcctccgtagactaagcacaaaattctaacctcatacaatcacaccaattctaaattgaaataaccatttatctgtttaccaagaaatccatacaaatggatggatcgtttagattaagaattcatcctggttcatacagcaacccacacagtcaggtggaagttcaccccaaaacattattgcaggccaaaaaacatcatgttctctttttatgagaaaaaaccatacttaagggtttgagatatggaatatttggccataataaatatgcacctggggttagcttaaattttgatcactcagcgtttagaaacctgagattaccatgatgggttaacaacttagaaaccaaataaaggactaattcaagttcatggaataatcaccaagcaggcagcatataataataccatatccatatataaacatatccataaatattgggaaaaaaaatctacaagcaatcacaacatagatcaaaacccatcaaatcaaacaaatcaatgctccatctaactgcacaaatcaaaagagcccaattccgttcaaacaattaaaagagaaaaaaataacatgcgacgatcgaggatccaaaccaataaagatcgaaaaattcagcattattagcagcagcagaataggacaaaagggaaatgaaaaaaaaaaaaaaaaaaaaaagaacctttctgtgcctggcgttaagctccttggtgacgttggccttctcgttcatggtgaccgaaccagtaagattaggagagagagagagaggggaactcgatggggaagaagccctctctcaaacgaagaaggtcaatttagtcttttcaaaccagttcctttctcctatttcctccctcctctctctctctgattaatatgtaaccaattaagaaattgcagaccgacttgttcatgacctttattaatttatttaaagttaaatttctattatttttttcaacgaagtaaattagttttgttaaaataataaggctaattaagaatatttttgccaaaattaaaattttttaaaaattctctttaaattattgagattattatatttaaaattttttgtttaatttcattcaataaatcatactcgactttaatatctatcaaatctaaatcatcccttaaactttca

SEQ ID NO: 226499 - DNA, 1675 bp, Cannabis indica
ctctctctctctctcacatgccccaagcattgtagaagatactaagtctccctgatcttgcttacttgagatttgcctcttgattctcattattgtaatcttaagagagccacttaaaaatccacaacacttgtcatatgagtgttaatatctatagtatcaattcaaccaaaaggggagtacatcattacctgcttattaaggggggaaacctctataaaaatactatgtctctttactttcttgttcttattgtgtacacgtggtgatatcagtcataaataagactccactatcgtattctaaatctatggttaacaattttgtgctttcattgaaagcattgtcgattggtctgatctatcaccattgatgtaataaggaaaactccagctacaactgctgcctcatcgggtcttcctcaagacaccatgattgttaatcccgatgttcatgttccaaccaccattagaatatccacaaatccgatggatgtggccaaccctgccaactcgacaggcacaacaaacttgaccaataaaccttggcaggttgacattgccaacatggttggtcccaatgaccagactctactagaccgtcgtaatgagaaactagtgacctgataaggcggatcagtgaaagaactatagggagaggtcaatatcttattagagatcctctccaagggacactagttgacagatcgggtagggtttatagacaaacagtttaaccaggtttgtaaagcactaggacggacctccccctgcccgaaagtctacaagtcctgccacacagatctggtggcgagagcagtcagactctagcaactagcggcttggcgagtcaaccacggatttttggcacaacaacacccccacttggccagcctctggctagccaaccccttagtggtgcacctctagtcggcaatagggtgagcttcctccctggaacatttgggagcaagtcgtccaaaggccaacctttaatcggctaggtccgagaatgggtggaaacacccaaaacaataactcgagaagtgaatacaattactttagatagttagatccacctaactctaggaattggtgtgatctacccctgtcagcacacaggctacaccagccaatcgggggagaacgggcagccagacattgcccaacatagagctggccggccatgaatagctgcctagggtagggctggtcggccatggccagttaccttacccaaggctggccgaccaaagccagatgtcaggtctagggctagcaaaccttgaacataccctctctcagggtatggttagccaggtcctggccaatccaaggctgtaacccaatctagaagggtcgattgacaaggttcttgcagcatcagatccttctatgcaagcacagttggatcaaataagagacatgataaagggcttggacggcccaaaaccatcaaaccttgaactggataggtcaaggggctcaccattcccagcatacataaatgcacttctccttccaaagttcaagatgccaacttgaagatgtacacggggaataaagatcccctagcacacctaaaataactttgagactcaaaacaaaatctccaaacaagtatttggagatgtgcgtatgccgaaatctttccagaaaccctggctgaaatgcct

SEQ ID NO: 226500 - DNA, 3265 bp, Cannabis indica
aaaagttagtagaatagatcaatagatagcttaggtgcttgaactaaaaaccaacaaagaaaaaagaaaaaagaaataaagaaagaacttacaaaaatggtggcgtcactggatgaaggaaacggagtgtcgtgggggcccgcgatgctaacggggcggagtgtcgtgggggcgtcgctgctgtgctgccattgatgtgtgcttcttatttgtctgctagggtttggaaattgaaagaggagggaggctgggagggtagtaatattaatggggatagaaagaatagggtttgatttgagagagactttgagtaacttgggttgggcttgggaaagaaatgggttggctgattgtgttaagtgttaaaaacaaattaatatttttttttactcattgggcctgaccggcccgggttgggttctttgggttgtaaataatccagtccgtaaatcaacccataagtcacgggttacaacatgttcaacccaacaaaaattcggcccatacaaagagaccgtgcatcggcccattgcaggttgggttggccggtttggtcggcccgctgggccgtatgctcagccctacagagaagtgcatctcacggagtgagcctcccggaggagagcataagacacgcctttactctccaggaggttagaactgtaacaaggcatctccaaggggaaagagattgttcgaacagttacttcgtatttaatgctacatggggggaaacgtttcagaacctccataagaggatttgacaaatggtgtaagccccgctttacgacaattacacgacaattgacgagtctagtgacagctacattatgaggactcacatcaatcaaaggaggataaaagattatatccaactaatccctaagatacctacggtataagtcatgtatttcctattttgtatatgctaggaatttatgcccctaagaggctaacacaacaagacaagtgatccctttctagggattctcctgaaaaaaaaaactataaataccccacaaatagaatgaaaaaggggtcgatcgattaattaaggaatcgaagggagtaaagaagaaagagagattcaccaagaacattctctataaaatactctcataaataacaaagactcgtggactaaggctcattaatgcctgaaccacgtaaaaatcacctgcattaaaccttttacagctcttctcattctattatttaattggttgccaaaaaccacagtcaacattttggtgctttcattgagagctgaaggaagcttcgtaaaaaagacaacagttagacaaaaaattcagagtaacgatggtagaaactcgtaacaatacacgtcagccccatgaggcgaagaagtggcctcaagagtaaatgtggactctgaggagcgagatgaggcaaacgatgaagaatacgaggaaaacttcgaagggtacaacacctatgacgaaggtagctatacggaattactggtcttaaggcaaaaggcggctgatcatgaagccgaacttgcagttcaaaaggaacagaatagaaggatgcaagaggtgatggttgccatgcaaaaagccatggagactgcaggaatacatatacatcccaaggccatcccagcaggacccgaggaaataccggaagaatcctcaccaagtactcaaaaacccaagaccagggaaccgagccctatacggtacccttctgaggaaaaccctgggaaaaatccaacttcgatccccggggaaagaaaaaggtgcatgatccgcaaaaagtccgctcagatttcccgaaagggaaaggtctgcagaggggcaagctcccttgagcgagtcttggccctcaggactgggaggaccgaaagagcgtatccgtgcaccaagaacccggggagagaggaaggaaaaactggaggtaccctccagctgacctaagacaaaaaatcaacaaaaagcatggtaacttacgagaccatccagacaaaaagaagcacgccctgccggcttttgcgtgcacgctaaatgaaggaatcctgactgagttagcaatactatgcaaagacattgctatggtctcccgaagacaaaaaggggatgactcagattctgattgcgaggaccgggaaccatgcacccgacacatactggatgcagagctccccaagaactttaaaatgcccgagatggcagcatacaccggagattcagaccccagtgaccatttgtcccgtttcaaccgggtgatgcttgtcatgagggtcagcaatgatgcaaagtgttcatactttccactaacgctgagcggttccgctgaagaatggtttaaaaagttggaacccggatcagtagactgcacctgtataatatgatgttaggattcacctcccaaattgttataaaaattaataagtttatagaaaatttatcatataatttcaaaacttttctcttcaccgtatctcacttgtagtcaacattatattcaagggtgttattgtcataattcatgtgtataacatgatgctaggcttgacctcaatatatttgctgtatatataaaacaaaccaaataatgagttaactactcacttttataaataagtgaatctgcacaattttcttatataaaagaaatatgtcaaataaaacctaattctcacacaaaataaaaatctataaaaaaaataattgataaactaaaaaatatttaataataacaacgtatatctagtgggttttttaataataataatattatgtgatagtatgagtgactattcaatggttacatttttattgtaaccatcatggttacatttttctttgacctgtaatagcatactaataggtaaacattccttttttagaattaattaattataattaactattttcttaaaataattaattataattaactattttcttaaaataattaattaaatctttaacaaaacctcttttagcaattaatatttataaataattttttttatttatatttaaatccttactctaattattttaacaattaagtcatttaattataatatttacaataaattttattttttttataaaaattaaacttctttctacacaaattaaaattctctttttataataaatttttaaataattaattatttttaaatgatatttaattattttgttacaattagatgaactaagtatgaggcctcaagctagtcaatcgataacaagtgtagcaatttttttttttctaaaaaattcttcaa

SEQ ID NO: 226501 - DNA, 2101 bp, Cannabis indica
taaatgaatttaagcaacttgtaaatcttccgacattccttaggtagcacatatacccttctggttgttccatataaatggtatcattaagattgccatttaaaaaagcagtcttgacgtccattttctatatctcataatcataagtgttagctatggaaagaagaatgtgaataaatttaagaattgccacaggagagaaaatttcatcataatcgacaccttctcgctgtgtgtagcctttggctacgaggctagctttaaaggtctctaccttcccttcaacatttctcctcttcttgaaaatccatttacaccctatgggtgtaacatcctcaggtgggatttcatattcccaggctttcttggtgcacatgggatccatttcttgatccatggcattgttccacttgtatgattcagggtcttctgttgcttccttgtaagtcaatggatcatccttgtctatatcagagacaagccatgtgcctcatgttcatagctgacaggctgtctcaaaacctacccactacaatggtgtactggagtttccttttcatgaatagtggtgaccattgttggtcgttcaactaatggtactgaagttgatggttcaaaaatttgcttatttctgatttcctcgataaccacttgactgtgtggtttgtgacctttcatataatcatgtttaaggaaatcaacatttgttgagacgaatactttattgtctcatgactatagaaataggcacctcggcttttctctgaatatcccacaaacatacacacttctatccttggagcaagtttccaagtcttgggtttaagaacatagacaaccccaaatacgaaaatgtttcaaactagattttgtcccattccataattctattgaattcttgtttatgctcttagagagtaatacattaaaaatgtaggtagccacttgaagcgcgtatccccagaagctgaatggaagtgtcgagtaacacatcattgatctgaccatgtccaacaaggtacgatttcttcttcgtgcaacaccattttgtttaggtgttccaggtgctgttagttgggataagatccatttatccagcaagtagtctttgaattcaaaatccaaatactcgccaccatgatatgattaaagtgtcttcaatgatttacataattgcttttcagccatggccttgaagtctttgaacttttcaaaagttctagatttcttagccattaggtaagtatgatcgtatttagaataatcatcaataaaagtaacaaaatattcataacctccttgagtttgaatattaattggtctgcacacattagtgtggattagctcaacttgttctttgactctattgcctttagcagaaaaatgtcttttaatcatcttggcttctagacaagattcacatagcaaaagaattctaacttttagtcctctcaaaggaccatcatttgttaattagttaattctgtccaggtcgatgttgcctaaacgtagataccatatcatcatcattagaaacctcttgcttcttattttgttgagacaatgttactctctaaacaattcattatttaaaattaatttctcgcttggtttgagcacataaagtctatttctatgctttgcaaaataaattggcgttctaaacttagaaataataatatcattcttaaaaaattcaatgttaaacgcaaaagcgataaagaaataagattcatgatacaatcaagaatgaaatacacattgttcaacaataaatatttatttttaaagttcaaatggacttgatcaacacacttagtcgataatgtaaaagggaaatttacacttgatattattttttctaattttattttaattttactgtcactcacacgttttttttacttttttactgtccaatttattacactgtatgccaattttaaataaaaagttttattaatttattttaagaaccgtgacagcacatgtatattataatgcatttttttttttaccatttttaaagttttgtaaaaagtgtaatttgattgctctttcttgtcttgtcacttttgtgacttagttttttttttttttt

SEQ ID NO: 226502 - DNA, 1362 bp, Cannabis indica
gaattgtcaagatagcggtccacatcaaagtagggaaaaccattgattaagaagtgacacatcccattgtctatcttcagttataaggtttgaaaccacaccatccattggacccgagtagagaattggctgaaaagtggagtgtctagggatccaaggatcaataccacacttaaatcgacaaccctcaccaattttccatattaaacccgaagacagcaactctttaccccaatggatgccttgccacgttaaggaaggagagtgcccaagattagcctcgaggaaggagcgatgggaaaaatatggacattttagaaacatggcaagaagagaatcaggttgagtaagaattctcggagcttattttgcgagtagcgcccgattaaagtgttcaaaagagcgaaaccccatacctttgctatcctttctcttgcacataagattctatgaacgccattgtatttttgttccattctcattgaggccccaacaaaagttagacatcattgactcaagttgattacaaaacggcaagcaaaagcaacttatggcatagatgagaattgattagacaaccgctttgagtagcagtacttcacgtccaccagccgagaaatttttttcactccaagtgtgcataagtcgccatattttctctttaatatcgctgaaaagtttctttttatccctcccaaagtatgaaggtaaatcgagatatttctcaagacacacacatatgggtattgacaatgtctgtgaaagaaaacttgagcggctagtgtggtgttaggcaaaaatgacatgacggacttgtcaaaaattgaggacttgatttgaagctctgtggtagatattgttaggttatagtattaattttcgattaagtttagtatattttaatttagttttactcgtgtttagagcatttttatgcttgttatcttttatttttgcagatttaaaatagatgaagatttgaaaaatatcaacagaaaaagataaaatatctcataaaaatatcaatgtggaaaaaaatcagaatcctgcccagaaaaagatattttggacccagcaaagtgggcgccgcaactcgcccatttaaagaccaccaccaccatcaatgttactcacgcggacttgagtgtggattcccaattcaatgctgaatagaattttcagcatgtgcatttttctatctttttagtccttcaaagcctatataaggagtgaatatcagttgattttgggaagcaattcggagggagataaacagcggaatatagagcacgaatttcagagaccaaagtcaatactggaggcaatcgtcagagagtttttaacattattttcttctctttt

SEQ ID NO: 226503 - DNA, 2475 bp, Cannabis indica
ttcggtatctataagaattttttagtctaaattttttatagtcgtgtacgttatagttatttaagacatgctgtaaaattttgaaaaattcagaataatttacaatatcgaaatcattatttaaaccgtctatttcacacgcatataaaataaaattaaaagtcacgcgtggaataaactctttgaacactattttcgacgtgttaaatttttccaaattttgtcagatgtcttaaataactataatgtatacgaccataaaaaaattagaccaagtagttttttagatactgaaatagataagggtgcatcaatacaactattttaaggaggtgtattctacaatacatcctatcaaaatgggtgtattgctgcaatccctgctgtttcggtatctataagaattttttagtctaaattttttttatagtagtgtacgttatagttatttaagacatcctgcaaaattttaaaaaatttgtcataatttacaatatcgaaatcattgtttaaatagtctatttcacaagcgtataaaataaaaaagtcacgcatgcaataaactttttgaacactattttcgacgtgttaaatgtttccgaatttctcaaaattttatcagatgtcttaaataactataatgtataccccctaaaaaaattagaccaagtaattttctaaataccaaaataaataagggtgcatcaatgcacctattttaaggatatttattgtagaatttttcctaaatatatatagggtattcttttgataagaacaccaattttgtactcacaaataaaggtatttttataacctgcggtagtaattcatttaattacggtacagaattaataacttattttttacaaaaatataggaaaaaaatataagttttgatatagataacataaaaacttaattatactaaatatgacattcttctaaaaaaaactttaaaatatggtaaaaaataaagaggaataccatacaaaaactttaaattgtgtttctcttttttttttttaattctttttttttctttctaaaaaataaaaataaaataaaacactataataaagaaaaaaattatctcacttgaggttttttttaatagaaattcaaataatattaaagtaattttattaagacattaaattaataaactaattaattctatataattaataaattaatttttgaacgaaaaaaactagttacaaataccaaaagtcatatataaattttacatgtttcttagaagctctaagacttgaccaccaacccactaccaaaactaaaaccaatacaagaccaaatttaaaaccagttacaatttttcgagatactccaagactcgaccatcaacccactacacaaaacagtcactgtctactaaaacaaaatatttgccacaataaaagtagaaaataaaatgagaacattcgacaaaattgctatcatcgtcagaaaagtcatcgctaccaaaaagtcattgtagttagacatcgaagttgtcaccaatgttggacgtttgagttgtcatcggagttggacctttgaatttgacaatgaaaaattagtaatatttatcagctaattaaaaatatgacactgagaaactagttatgtagattaaccaaattaaaaacgaaatcttagaaatagttatgtattataacaaaaataataattcaatacataaaccaatttcatattacaattaactaaaaagtgaacaaacatatgaaacctaaagtaataaaaagatatatcaattacaaccagttacttaaaaaagaaaaaaaatacataccataaaataatttttaacgataacttataaattaaataacaaaaacctgttacaataaacaacttagcaaaaatctgatatagagaaactagttacgtaaaataattaaattaaaaattaattcacataaaccaattacctaaatacctaaaatcaaaattaaatatagaaaccagttacttaataaaattaactaatcattaaaacaaaaatataagaaatctaaaacaataaaatgatatattgaagaagaaaaactagataattagaaagaaaaaaaaaagcacaccaccataagagaattcttaagatataagtaaccttaaattatttaaatgacttgcattaactaaccaaataaaatttttgacacagagaagctagttacattaaacaaccacttttttacacattataccaccaattgaatatcgactaaaaaaaaaaccagttacattgaacaaataattaaaaatctaacacaaaaaaatcagttacactaaacaaccaattaaaaaattaaacagagaaaccaattacgtaaaaaattaaacagataaaataactaagcaataaaaaaaaaaattaaaacacaaaaatgagttagtcaaaaaaaaaaaaatataacacattatttgtttaacaaatagcttaaaaaa

SEQ ID NO: 226504 - DNA, 1756 bp, Cannabis indica
gttaaatttcacaaagcttcgaacgagcaaggtgaaaatcgaacatggtgagattaaagtcaaaatgtcgttaatcacaaagtcgtacaaactattatagagaaaactacaaagtttcgagtctagattttttatgtatcttctacaacaagtcaagaacagttgtattttctacaatggaaacccaacaattaaagatacaaagttaaaagagaagaagattaaaaacttactatttgaagtctagacgtcgtccaaacgaagctgctcagatgcctctactagaaatcccccaacagacttgaagaaaattcctttttgctccgagtttggttcatggagaaaaatggtaaaagtaatttctgaaagttttcagcactatttataggcttattggtgaaaataagtaatcatttaaaaattcccagacacttcgatttccccttgttgcccttaatttcgcccaaaatacgtggaccaatatgacaacgacacgtggatctgagaagcacgactattagatgaatcgactaaatcttttggcatcaggagtaccaacaagaatatgccccccaaaggagaagtaaaggctccacatactcccggagaccaagggaacgctcaggtatctccgggaggtactgggccttatctgaacggtcacctctcatttaatgccgcatgggagaaaacgtattggaactgccataagcaatatgtctggcggcgtaactcctcttttgcagctattacgctatgattaataaagctacagacgaatactttatgagggatcacatcaatcaagaagggatagaggattatatccacctaacccctaatatacatacagtataggccatgtatttcctattttgcatcaactaggaatatgtggccctatcgaacctgcacagaaagacaagtgatttagttctagggatcactccagaaaaacactacaaataccccccaaatacactgagatgggggtcgagaattctgggttcactagaattaaagagagcaactaagagaaatatctaccaagaacattctctgtaataaatactctcataaataaaaaagactcgtggactaaggctcattaatgccctaaccacataaaaatctcatgcattaaacttcctacaggtttcttacatatattattaaattggttcccgaaaacctcagtcaacattttggtgctttcattgagagctgaaggaagcgtctgcaagtagacaacaaccttgtaagctaaacatcaatggtggaaactcgcaacacacgtcagcctcatcctcctcaagacattcaaaaccctgaagatgaggaagtggcctcaagagtcaacgtggattctgaggagcgagaggaggccaacgatggcgaatacgaggaaaactttgatgagtacgacacctacgacgaaggcagttacacagaattacagctcttaaggcaaaaggatgctgatcatgaagctgagatcaccgcccataaagaacaacacaaaaagatgcaagaggtgatggtcgccatgcaaaaagccatggagacagcagggatccacatacaccctaaagccttccctgcgggactcgaggaaacaccgaaagagtcctcaccaagcactcagaagcataagtccagggagcctagtcccatacaatatccctctgaaggaaacaaacagaaaaatcctacttccatcccggggaaaaagaaaaaggtgcaggatccgcgaaag

SEQ ID NO: 226505 - DNA, 2287 bp, Cannabis indica
agagagagagagaggtcggctagaggagggttcaaaccagaaaaatgcatttcaactttaccgaaattccattttgttgaaaatgaaataaataaccaaaagaccaaaatacccccaatagccaaaaagaaccacatgcatgtaaacaaggacaaaatagtcatcctaaacacacatatgcaatacaatattttagatttttttcaaaattaacatattaatgctaaattaaatctcgaaaatatatttcgggccccgaacccgattcagcccaaaatacctgattgtgactatacggcatcgacttgtcaaaagagaatacacatactatataataatataacccataagcacaatatatcattaaattacaatctttacccttctcgggttaaaattacaaaaatgcccctagtacaacaacgggatcttaaaacacaatttatcagtatcatttcacatattaaattatataataatataattccatattaatacataattaaactagttagggtggctaatctagtttcttaaccttagggtattacaaaatactagcagtttaaataaaatataatttaatataaactttaccaattaatgtaaatcataaaataatggcatagcccctttttacgattggaaatctcctaattaaaatattacaagacatgctattaaaatattattataaaatatatttaaaagttcagaacatctgaaatacagttcctgacaactcagcatcacttgctggataagttgatatgtacatttgctggaaaagattcctgactcatggtcgtccaattttctctacctattacctgcaccacatagtacccatgagtcacaagaactcagcaaaaaaagaaatatcaggaatcatattatttattattcaaataacattatttatactcaaataatcagaatcaaacaatcacacattactcataaaataaaatccaactcactactgacatttaccacaaataaacatcagtatatagatattcaacaatacaaaatcattatactaataatataagtcatattcattgaataatataaattatatcggttaccttataaagtaactatctttattacatcacattgcctaattaggaaagtcgatgctttaatctgataaccatatattacattgcctaatcaagcaagtcgatgatttaatttgataaccatacattttattacctaatcaggcaagcctgtgccatggcctggcaccaatatatcgtatcactacatcacttaattaggtgagcctgtgccaaaatctagcacccatgtattgcatcgcttaatcagattagcccgtgccctatcctgacaccaatatatcgcatcgctgcatcacctaataaggtgagcccgtgccaaaacctggcacccatgtattgcatcacctaatcagatgagctcgtgccctatcctagcaccaatatatcgcattatcgcatcacctaatcagatgagcctatgccaaaacctggtacacatgtatcgcatcgcctaattaaatgatctcgtggctcaacttggcactaatttattgtatcgcctaattagacgagcccgtgccacaacctggcactcacatgtcattgtcgcccgtgcctaaacaagcattgttgacaggaagaaacctaacactgatttctatttaaagtcatgacttatcacagttgtctcacacgaacaacccgaatacctctcccggtatccatttatcacattgcttaatcaggcaaacgcatgccatagcctgacatccatatattgtattacctaatgaggtgagtctatatatcacattgcctaatcaggtaaattttacatcgttacctaataagataacctttttatcattacctaatcagacaatctttacatcgctgtctaataagacaacctttttaacattacctaatcaagcaatctgtacattgttgtctaattagacaatctttttatcattgcctaatcaggcaatctttatatcgttgtctaataagacaacctttttgccattgcctaatcagaaaaacttttcaatacataacaataataactgtgttttaatcttaatatcaatcaattctcaacaatatagttgcattgcaacataacatgctatgcagtacaatatacttttcttacatgtgatctagattcatgcatgtcagccaacccaagtagagaaacatccccaatgagctcaacaatatatcacgacaatgataaaccaataattgtt

SEQ ID NO: 226506 - DNA, 2335 bp, Cannabis indica
agagcttgattttcatgctttaaacttattgttattgttgcctataggttgtgagctatgaaattgaatatatgcatgttttgttgggaactggtgtgtatttgaggtcatttttgtgttggttgaagttgcaatttttgggttttcaaccaaggagccgcatcatgggttttatccgccgcgacccgcctgtagtttctgggtttgttacctagatgtcgcggcatggcttctgcatgcagcggcccgctaggggttttcttggcagattgtgtgttaactcattttgtttataactcttgaatccaaactccgtttgggacgttccatatattaataaaaagctcgttccgagctctaaatgcctaagtgtaattggaatgcaattatattaagatatgaacgtgaatttcgggattaagcatatctgtgaaatctcgagaattgtaactagtattactgacacttgttcagaagcactcggggatttcgaatctccacatacttgggacaccaggtaagacagtagttagcacgtagacttaagcactgtggcgctcatgtatgatattatgcttgtgattaaatgaggaatcgagattagggttattaccctaaagtgagcagtgatatagtctagggttattaccataatgataaatagttttgaatataatttcatgctttatatgttgaaataaaaaattatgtgttcaaggcataattaggttagacttggtaatcagaaccgagataaaccattctaaggccttattgtaaatagacgtgtgagcgtaacacgtaagcctatgctacatagacataaatatgcatgtgagtgtaacatgcaggtctatgtcatagacaataagtgcaatgaaatcaataattatgtgacttttgtttattgatatttatactgttttgttgggcttgactcatgggtgctctattgtggagggaagggaaatctgtttgtaattagccatgagttcgagggcttagcggtggattgtacatgttcgggccatatgagaccaagcgggttgggtctacagtggatgtattttgtattctcagattttgctgtctaggtcggcatgtaaaagtaacttgtaatattttgttaaattttttatgggatcccaaaacacgtataatattttggaatggtttgtaaagtttaaaatattacaagttatgtttttattccgtaagtaaatcaatgtttaaattttcccactcttattttctagtattcctagtttagcgggattatgttatattattggttgtcgtagcgtgcctatttgttaggacgttacaagtctactccatgaatgactttcttgatagaggagattgctttatcaagctggaaaaagttatcacctaagccaagggctcaaaaggtagcaagaagaagtcattggactccccatcccttgacactgaagcacagagtattgagaagaaaggaggtttgaatggagggaaaagagccaataacagtggaaaataaggcaactcccctagtggaaaaaaggcctaaactgggagctgacacatacgagagtatgagccttgtttcatcacctacttcattctcttggctctaagagagaagatctatatgaccacacaattaataatgtcataccgtaaatatctcctattcaaagagttagggaagagagacatgaattaattatattgctatcacaacaattacagtcaggatacaaatgagtgtaatcaattgcaagacgagatagaattcctcatcagataggaaaatgctaatcattaatgctatgtatgacctaatgctccagctaggggaaatgcacctctttagcctacaccagttgtagccaggctcaaggttatgattggaggctctcaccttgcttggaattcaaggaaggcattagagagatgtgcaaggtcttcgcaacatgaacctagatatccaacaaattttgaatgctacgagtgtgatctcatcacatttggagactccgcctcctatcatgttagctacccttaaaatgatcctttggttgttgaggtgaaaatagcaaacatgatggtggcaagggtgatgatcgatgttggagcatccttaaacatcttattcaagcaaacactaatccagatgggtttgtcacttgaagacctagaaccatgcaagcaactaatgtatggttttagcggagctagcataactccatgtggtaagatcaaactaccactcatagtcggcactaccccaaggaagatcacaaacatggcaactgtaacaccctaactaacataggcgtattacgtgatt

SEQ ID NO: 226507 - DNA, 1310 bp, Cannabis indica
ctgccagaatgaacaccagtagcgaaagaggctgcagtgttcgaattcgcaactcgccattgatcaaaaacctttctagccgactgaactactctcgaagcattgctggtttttttctgccagaaaacttcgttgcgtgtcttccaaatactccaagaaatcatagccgcatccaccaccacctcagcacgattgctatccaaaaggccgaagaaccaactgctgaaatcatccacaccagcagcaatggtagccgccgaaaggttccagcaggcttgggcaaaccgacacccaagcaacacatgaaaaatcgtctcataatagatattgcataaaggacaaaaaagatcgacattcacatgtttagtactaagttgcacctttgttggaagcgaaccagagcaagctcgccacaagaaatggagaactttagatggaacattaatcttccaaagttttttccagtagctttcatcatccaaatgtagccaattacctgttgaagcttggagatgtttgtaagcacttttattttttaattttaaaacgtaataaataggtaataaagaagctaaataagtagaataaattaccatctaaaaataagggataaattgataagtttgtttactcaaattaagcacaataaacaaagagaaatgctcttctaaaaaagaaaaaaaaacaaatattaatacaattaagtatgggatcttatatattattttaatttaataaaaattttaattatctatttaatttggtgtcacaatttagtatatagtcaattaataaataatacatgtctactaattactaaaaaatatggataactttttatatagcattgttcgcagtggcggacccataatttaattgagggtgggcgtaaaaaattttcatatataaaaatattccaaaaaataagtaaatataaagaaaaacacaattcaatatttcaattcccaactaaaaatatattaaatatcaagcatttaaaatcttctaatagataaaaaaaaaataatctaaaacgatgttcaaaatatataacatactcaatattctaaaattttagcaaatatatcaattttcgagctcatatctttagagttgtcatcgacgagttttcatgttctgaaaacgatgaataataaacttgttgtcaatagcattaaatacattctttttgagatatattatcaaactattattcaactattgatctcctattttgttgcgcatttgttgtgggtaattaaattaattaaaagattttgttttttgagaagtaaaagaaatattttttt

SEQ ID NO: 226508 - DNA, 1344 bp, Cannabis indica
acagtatactagcaagtatagaaacttaaataaaaaacaacaaagtaaaaaagtaaaaactaccgacctgactagttatttttagtaaaaattagacaaaagtttagtattaccattagtaaatttctttacgtttttttttttttttttgaattgaatgaactcatttgtgctttctaatttgaaggcccaaaaccaaattttcgctcgtgtcctttcaataatttcctatgtaattaatttagagaacttaaaaataactaatgcagaaactgaattttatgtaaaattatatatttttacgaataaaaaaaaaacctcaaacttatattatttgaaatatgaagggtaattagtgatatgcaatattttgtacattgattttttttttatcaataaaaaaataattttattaatcaaccaatctatacacccaacaatccaaactgctacaataccaaattcaaacatatttgtcactgtatcaaaattttgaaatcaatatgggagaacttcctatactatacattttgtaatctatacaaaagaatcatattcctcttttactgtaacagaataagacaaattattataaacaaactcatttctaattctccacaagtaatagagagtagttgctcagaggacttaaagacaatatcagctagacatgtcttcttattctctatccacactagccaattcgaaaacttcattggccaagcatcaaaatccaaccaactaaaaaaatgtcgaactaccctttttgataaaggacagtaaaagaataggtgttggtgactttcgttatgcccaccacacacatttgggagtcaatctttaaattgcacctaataagattgtctctagtaagaagatgcgaataagttgcttgctacaagataaatttatgtttggacaaactaagacgaccccaaattgtatttgtgaaggccacattttcatgtggaattctactattgtacagctttgtggtgtgaagtttccccttgtaaccaatggttggttacaatatcccacctgttgaaactctttcgaatattatagagcttgcaccagtaccaactcaaatcagccttggtactctcaaaaatcctgctattttaagtacaagttatggacccactttacccaaagaagatcttgtttttctgaaatggctcagatgaattttgccaaaatggctctattccacttaggtggcgtttggttggaggtaatgaaatggaatggaatggaaagaaaacaattttcattccattcttttatttggttgcattttaaagtattggaatggctattccattttttttaaaaaaaaaa

SEQ ID NO: 226509 - DNA, 1336 bp, Cannabis indica
gagggttacattttgaagagatttagtcaattttgaagagattcagccggttgtcgaagagacaacaactattgatgaagaaaatcaaagtgatcattacaacaaaatgtttaaggagattgaagctgagttgtaccccggttgtgattggatgtcgtcactcaattttctagcaaaattgatgcatttaaaagtgcaaggaaaaattccgaacaatatatttgacgaatgattaaaactgttgaagttttcctttccaaaagagaacaacattcctacatcacattatgaggccaagaaaaagctaagtagattaggcttggggtatcaatcaattcatgtgtgtgttcatgattgttgcttattttataataagaatgcatccaaagaattatgatcagtgtgtgggagtagtagatggattaatgaagcaacaaagggaaagaaaatacaaggtgatgcgttacttttcgttgactccatgtttgagaagaatgtatagttcaagacatactacaaaaagatggtatggcatcatactgggagagttagagaagatgatgtcatgcgtcatcatgtagatgcgaaagcgtggcaaaactttgacaacttgcatcctgattttgccaaagatcctagaaatgttcgcttagggttaattagatgctgatggatttaatccatttggaaacatgagtcaagcgtacagcatgtggcccgtagtgttggcaatctacaatcttccatcgtggttgtgtatgaaggacaacaatttcatgttgactacccttattcctggtgcgagatcactgggaaaggacatggatgaatttctcaggctgttgttacactcgaaagagatgaaaaaaactcaaaataatggtttgtctgttaaagggacataaggttttgactattacagtgaacttttagaaatttttcatctgtcttttagtggtgcttattcagttgtattatttaagtgtaaatggttcaacacagatcccagaaggaagaaaataattaccgaaaataacatcactagcatatataaatgtgagtagtgtatggtacaaagatgagccatacattttggctagtcaagcgaagcaagttttctttgttgatgatttggttagaggtcgaaattggaacgttgtccaagatgtgaatcatcgccaactttgggacaaggttgcagatgccaccgatgacatcaatgatgttgacattgatattgtacatgacgcagactcatcaaaattttcactatttgtggatttgggagtgttgaatgtccaacaaacaaatcaccccaacaattattgatgtccct

SEQ ID NO: 226510 - DNA, 3419 bp, Cannabis indica
aaacaatgataatcttgcaaataagtaggtcttttaatgtttctcataggtctggtatgaacagcgggtgttggaatgtcaagcacgtcagaattgtgaataggatctggtgtgaaaggagtgtaagaactctaatcagtttcggatgtgtgaaaatctggtgctggtgtatcattttctggtgtgtcatgagcattttgatggtaagaattaggggcacaagctgatggaacacagggatgggaatttgaggcatcaatatgctttcgagaagcatcaacagcaaaaaaattagagactgatgacaaactgctgttatttgagaagggaaaaatgtgctcatgaaatatgacatctctagagcaaaaaattttatttgtgctatggtcaagcaatttgtatgccttcattccaggtggatatcccaagaaaacacaggcagtagcccttggggagaacttagatctcccagctcctaaagttgaggcataggctaaacacccaaaagtttttaaatgttcataactaggagctttagaatttagaatctcaaaaggggatttgtgtttgagattagaagtgggagttctatttataagataggcagcagtgattatacaatctcccccaataagctagagggatctgagattggaaaagaatagctctagcaacattcaataagtgctgatgctttctttccacaacagaattctgttgaggtcattgaacacaagagtgatagtgtataatgcctaatgaggagaataaggctggaaattgtaactctttggcattattagacctaacacccttgacttgcacattgtattgggttttaatcagctgtatgaaggcagatatagcaaattgggcatcagatttgttcttaataagatgaatccaagtaaatctagaacaatcatcaactatggttataaaatacctaagaccttcaacagtgggaatattgtatgatccccaaatatcaatgtgaatgaggtcaaaacagtgtttagacagattatggttgctaatgaaaggcaattttctttgcttagcaagaggacatatagaacaatggaaatcatgacagtaggaatattgaaattgtaaatttttattcaagggatgtttctttacacaagaagcatgaccaagtctataatgccatagattgtcatcattgattctagaatatgaaacagaacaaacagtaggatctttatgctcataaatgtaataaagatttccaactctttcacccatcccaatcacttgactcttggtgatatcctgaataatgcatttttgaggaagaaatagaaaagagtagttagatgagttggacaaagcacaaacagatatgagattgtgatgaaaatcatgaacacataacacatcagtaagcatgatattgaataatttgacatttccaacaaatgatactctggtgctagaaccatttggcaaaccaacagatctaatcctgctattagatttaaccgaatgaaatagagagggattagaacacacatgatgtgttgcaccagtatctaagatccagctgagattaggaatagagatgaaattacctgaaatgtttgaaacagcaggttgatcagtttgtgcagctggtgtgcttttttcctgcaacttctgagtcaacaaactcataagcttctggcattgagcagcaaggtccatctctccactgatattctctttgttgtcattggcagctgtgaaatttgcattcgattttccctgctgattgctagactgattgggcgtttccttagggaacctgccatatagacgatggccaggtggatagccatgaattctatagcattttgctatagtatgtccaggcactccacagtgtgagcagataggtcgattatcagatctgctatcagatctattgttgcttcgatttccttgagtgcttccagcaaactgattagaattctcatttgtggattgactgctttcagattgaggaatgatgattcctctttgtttctcttcttggattatacaagcaaaagccttattgacatttggaagaggatcttgaagaaggatttgggatctagcattcaaatatgattcattcaggccaatcaaaaactcaagcaccttgtcttcatcctgatattcctgaatgatcttcaaagctccacatgtacagaccggttgtggtctgtattcctgaagtaaatcccaaagtcctttgagtcgtgtatagtaggctgtaacatcattagagccttgtgtcaatgtctgcatacttcttttaacttcaaagattctaggtgcattcttttgatggaacctctcttgtaattcaaaccagatctgagaggcatcttccatgtacataatactgtcagcaatgaagggagatacagagttgagaatccatgatataacaaggctattgcacctgatccaagactcgtagtcttcatcttcttcatcaggttctggtaatttaccattgatgaacttgattttgtttctcgccattaaagccaccatcatggatctacgccaagaactataattctctgcaccagtgagaatcttaggaacaagtgaagaagaagcattatcgcatagacaagaaataagggcttcgtggatcattagtaggaagcttactaccatcatccaaagctgaaaatcggttggaaccagcagcagctccattgttaacattgcttcgagtttgagttccacctcctcgagccatggaaaggtggcaacaagagaggagaagaagaggagaagagatgcggaagaagagccaaacgatcaaaatggctctgatactattttagttgcagaagagaaacaattacagagaaacaaaaagaatgaaaatctcatttcattacattcaaaacagaggaatgaacagtatttatatacaagcttcagctctaactgcctaattgcaattctaactaaccaattccacaatataacagaaagatgcaactaactcaacaccttataacaaatcactctaataatataagactatggatatgattccataagtcacttacgattaaaatcaaatctcatttgaccattgtgtgatgaatgatgaacttttatattttaatagagattattgaaaattttaatcttttatcatgtccctagttagtcctatacaatcttgtatagtatacgacacccctatcacattatgtcaactacagttaattacattgataattctatcaaagatagtaaataggctcgactcataatttcaattaatgtcaaagctcccactttttaatattaacaattgtgaacatttgtttatgttattttcttgagttaaatcatcttgtgtgtacaatctcatgtatatacttttttttttatttaagtcg

SEQ ID NO: 226511 - DNA, 2818 bp, Cannabis indica
attaaacacaagattaatggatgcaaggtcggttgcttattcaaaagtaaaaggccctaaggccatacacgaacattgttcaaaagtaagggctctgaggccataaaagaacaaaaatatcatctattcaaaagtaaagggcctaaaggccataaatatcaaaagatgaagtatgcaaaatgaaagcataagaataaacaataaagtcctcaaatgttttcagaataataactggagtcgacgggttcaaagttgtgttaaaaggactagttgtctagactaagtaagtcttcatcaatctaattgtcacctccccaaaattcgtgcaggttcatccctacagaaagataaagggatatgaatagctggggaacatgaaaagacttagagaaaagacaggttaactggccaaaacctaagggtattaaccaaacagccttgaaatatatagccataattggcaaggtataaaatcaagaatcatgaaccggatagcctatgaaaggccattgaccggttaaggaagattgaacttgagacataccagatagagctcctaaaagagggctaagtactaaatgggggcatacaatggatctaagtcatggatagagttcctatacaggatctaactcatggacagagttcctatataggatctaagtcatggacagagttcctatacaggatttcagtattgaatagagttcctaaacaagatctatgagtcagacaaggtctttaacaagatgtcagtcgatgccagtccaagactcgatcttattcattaaaaagtcaaacattatgcatcccaaagctatcaagtagattataatgtgaaaagacaactttaaaacgtgagaattaaaaattttctaaaagctttaaaaagcttgaaactcatcaatggtagattcaaagaaagaaagaaatattgaagaagagaagatgaggtatatataaagagagagaagaacaaaggtttaaaaatcacatcatttgaaaagcccaatacttggccagacaaggttgtttggtgaagcacatcattgtgttcagctcgggtttgtctacttgacctactatgtccacgggattgcgattgtcctgtgcttgagcttacttcatctcgtgttggtcttcttcttcggaagatattggacacacaccctctgcttaaatacgtgtgcacattttctctatccgcgcgagaaggacgttgaggatgtctcagtagaagaccactttaccttggttagtttccagggttttttttcattatcacgaggctaccttacctcttcattcatacaagatgattctggcatgctagttggttcattcccttggttagcaaatccatgggaagtttgtggaacatctcgtcgatgttcttaattccttgtattattaggatttgattgattttctctatccattgggacatcccttgtattcccaagttgctcctcttgagtatttggaggattcccttggtttacttcttgtctgctagtcttggagcctcgaggtctccttacaataggatcaggttggttttgaggatctgttctctatgtagccttggctgctgcagcttttctctccaactcagcatttcatcagtttaattcagccaatcattgttgaagtttcctattctcttattctactaatggtacgtatctggtaggatcataggcatactcactggatttgatcaccatcaacattgaaattaccatcgttcctccctaaacatggtgtttcagatgtgttgggtttttaagatcccatagtttctttgctaggacgacctgttgtttcctcaagacgattatcgttacgttgattgttatcaaccatttaatataggtagaatgtgtttatgaggatggatttttttttaattttatcatcaaggctctcgatgaaagaaccaaactgttatagcagatttttcgttaactaaataaatagccttttttgcaaaaaaatactctatagaaataaatgaaatatatgacaccagatattttatgtggttttgtagttaaaatctacatactccacaagtccttattatttgggatattttttggatacaaaatgcaatccaatatttaaaatgatcagattttctctctgaaatttgtcgtcccttttcccatagattttgcccctatttataggaatgtaggttgacaatttttctttttgggattgatttatttacaactattaataaaacgttgacattccccatgtttcatttattcacacatgggataatatctaataactacccaactgttccttatttttatcctttagacggttctgctgactaggaaggttgtatctcgtcaaacatgagctctccttcttttccatcttaataggaaaaaacactaagtgttggaaatattcatctcgctatatcccttcatttgtattatggatgcgagatgatcatcatgctatgagtaacgtgaggcgattgagcgtcacaagttcttctcttctaaggagagggttcatgactcatgaggtccttgactgtctcgtcttgtacattttatttctctatttgtctcggggtaaacatgtgtctcgttaatcttagtttaatagttattattcttgtctcacataagactaagcagtcaacgagtttgaacactttctatcaaacttgtacttaattgtaacgagttattttaaagagcatttaatgatgctatgtcattattattatttttttttgagttcgttcaaattctttctgttgaatacgtgccaacttctagtacatagc

SEQ ID NO: 226512 - DNA, 1760 bp, Cannabis indica
aagatgttttcccgagtttcatttagctcggtgtaaacagtgtaaatttgcacatgtttgtcgtgctttttcagtttcttcttattcgtagatgattctctctagtcatattttcttttggtattcgaacaacttgggttatcagtctttatcgagatggtacttgttgtggcattgcttatgcttggtttatttcctgagccagtcttcagcaacttcatctgatttcttgcttcctcttttcgcacaaacacttgcgctcttttgttaaattcataaatatttctcagtggatgaccttataagtcatccaaaaaactttcccccaatcgttgaaacatcggtcatgattcttgcttgaagagtagtaaattgaatactgtcattcaagttcatgtggcgactctcttggttgttgctttatgttagttagggatgatgcttctggtcgcctggttgatgctttatgttagttagggatgatgcttctggcagcttgaaattgtttcttaaaatccttggacagctattccaaagaagttatcgaatggtgagttaatttaccaaaccagctactcactgctccagttaatgaggtcgggaataaaatgcattgtagattatttgagacgttgctgaatcgcattatggtattaaagttattcagattagcaactgggttggaagtcccatcatactacgagatgtgtgggtttctaaatccttggacaaattaaaaattcataatattaggatggaaaggctcaacttcctcattcgagtcatagccaggtaatttcccttattccccatcttagtatttcctaaacttatcctccaactcaatgattcgcaatttgatgggatccacttgttgttgattagcattaagttgatggcgtaagttaggtgcattttgatttaatcgctcatgaagatcgggttgtcttcgattcaaatgctcacgaagattaggctgtctttgttcataattggtcacaaatttcgtatctgagtgactcttgctcatgctttcttgattagcataacgctgaggtctgcttccttcttgcgtttgccttcttgaacgactttgccctcgacacctcgagtgtcttgagctagaacttgcctcatcttgcataggccttctccttcggaaaaggttaaacacacaccttctatttaggtatgtgtatgcccttccttctccgattgagaaggacgttgggggtgtctgagtggtaacccaattgttctaggttgagtcccaggatttctctcgttattacaagggtttgcctgttccctactttggggttgcctcatgttcttattcctacgagaagcctctgacacttcattacgctcattcccctaatttgtaaatccttaggatccttgaggtacttttcaatgatgttcttggttattctgttgttaatccattggaagatccctagttcccccaggttgctcctccatggtgttttggggattttctttatttgtttcttgcctcctggtccttcaacctcgaggtctgccttgtggccttcttactcaaagattaggttgattctatgtattagttccttgagtcacccttgccgctgcagcctctctttccaactcaacgttttgttggttagatttggctaagcattgccagagttgtcaattttccaattccactattggtacgtacctagtgggatcataagcatcctcacttttgggtacatatcctgtagtagtat

SEQ ID NO: 226513 - DNA, 2237 bp, Cannabis indica
acagtatttttataaaaaaataccaaaaattagtataccatgtaaattttcctcttgcaattggatcagtcgacctcggccttatcattaataattggggtttttacctgctatattatatttttacattttattacttttataggcccacacggcataatttccaaaaatatggagcagttctatactgtcttttttgcatacccttttttattttttttactaattaattttttaaaaattttgtggtgtgatgttcatggtcaattcatggccgttcaccttttttaaaaaaaataacaaataaaattttaaaaaaaaaactgaatatattattatttgttttgtaatcacatgttaccctcatttggcatttcatcatttcatattttttttcatcatcacctttattcttaagctatacatctctctcccatgttcatcttcttcttcatgttcttctttatttttatttatttttttgataaaccttctttatttttttttatttttttttttgtgtttacaaatccataaagtggtttggactttagccctcaagatattcttgacgaaacgctgagttggaaagagaggctgaagcggttagggcgactcaaggaactaatactcagaatcaacctgatcctggggtgaggagaccacgaggaagacctcgaggttcaagaaccaggagacaagaagcaaatcgaaaaatccccaaaacacctaagaggaacaacttgcgggggtactagggatgttctaatgaatgaacaacaaaataatcaagagcgacatcgaagcgcgcctcaaagatcccaaggatttatgaaccaatggaatgaacatactgatgtaccataggcttctcgcaggaatgaggacacgagacagccccaacctagggaacaggaaatcccttgtgataacgagagaaatcttgggactcaaccttggacaagtgggctaccaccgagacaccctcaacgtccttctcgatcagagagggaaggtgcatacacgtacataagtagaggacgtgtatctaacctcttttgaaggagaagaccagtataagacaaagcaagttctggctcggacactcgaggtctcgaggacacagtcgatcaggaaggcaaacgcgagaaggaagcagacctcaacattatgctgatcaagaaagcatgagcaatacacaaagctatcaatgtgagagttactcagagacaacatctgtgagtaattatgagcaaagacaacctgatcttcgtgaacatttgaatcaaagacaacccgatctttgtgagcgactaaatcagaatgcacctggcttatgccatcaacttaatgccaaccatgagcaagtggaccccatccagtggcaaatcattgagttggaggataagtttagaaaatatcaggatggagaacatgagaaattacctggctatgactcagatgaggaaaccgagccattccatcctgatattcagaattctgaattccttcatggattcaaaaatccacatgtctcacagtatgatgggactacgaacccaatcactcatctgaataactttaataccataatgcgagccagcaacatctcgaataatctgcggtgcattttattaccgacatctttacttggggcagcgagtagctggttcgataagtttactcaccattcgataacgtcttgggaacacctgtccaaagactttaagaaataatttcaagctgccagagataaacgacttgaagcatcatccctaactaacataaagcagcaaccaggcgagtcagtaaaagcttacctaagtcacttcagcacagccactgcgaaggttagaaatttgaatgacagtattcagcttattgctcttcaagcagggatcacaaccaacctttcaacagctggggcgagttgtgggatgacttacagggtcgtctagtaagaaacatcaatgaattcaaagaaaaagcgcaagtatatgtgcgtaaagaggaagcataaaacgagatgaagttgctaaagaccggctcaggaaacaaacctagcacaagtactaccacaacaagtaccgtctacgacaaaagtagataatccaagtagttcgaactctaaaagaaaggatgactcaagagaattatctaaaaataagaagaaacagaaaaaacaacgacaaatatgttccgatttacacaatatacaccgagttgaatgaaactcg

SEQ ID NO: 226514 - DNA, 1080 bp, Cannabis indica
aacaacaacaacaacaaaaattgattggactagaggctggcatgagcaattcaagttcgacaacgaacatgtagggacaagttaaaaagttttatgatactgatgatgaacttataaaagtacggattattataagaaggccccttattttatttgtactaatattttatgatgtaaaaatgaactgaatattatttcttaaaaatcaatacaagtaaacaagttgtttttaataaaagtagacattaaattaaattaagatgattcttcaaattagattggaaatttgaatccactattgataaggtgcggtggttctggtgaatttatggcacagcatgtatgggccgtgagagtaagaatggcactgacgtaactgtaagtatcaccataaaacttagttatggtcccctaattgtcaaaatacaagtcatgctaaaagactgaaagctgtccacacacatgcattgacgagcgcctgacatgcttccatacaaagtctcgtgtggttgggggtttggatttttgggaatgtaaatgtaaaatcaagtttagtattattttattagtggaaaatttatgtttgtggctgtgggtcttattgtatcttcaatttttctcaatctcaatccatttcaataccactaagtaaaactctcatacaaaatactatattaaagcatctccaataagtagtgaaaagttaaaatatagctcatttaacaaaagatgtactctaatactgtgccaaaaagtgatataaatttagcacatagcaaattgtgtgctaaatttaacacaacatttactatgatgtaaaatttatactacaataattgcactacttttttatttacatttaagtcatttctattattttattagtatatttaactatcacattaaattataaaacatttatattattttttattgtcttacatattaaaataataataaaattaattattaagttattagattttatttttttaataaaatattaattagatattaatttttacatcaaaattttgcaataatatattggagcacgaaactaaaatttagtataaattt

SEQ ID NO: 226515 - DNA, 1592 bp, Cannabis indica
gcataaaacccaacaaaaatttggtattagaatccccactttgaagccaatcaactcttacacgttgatgccaataaagctcttctttctctaactcatctaaaattctgtctgcattctccaccattttgatatgatctaatgaattgtttttgttgttatgcaattgtgcagaaattttatgggcatcagctatatcacgactcattctaccatatttcgatgagtgccattctcggagtgcggttgaacatgctacaatattcgacattaaccatccataaaagcaacaaaccaccttttaaacccaacctagggacttcaagtccattactgaatttaagtgaagaacgaacacgatctacagaattacatttcaacttagtctccataataaaaggcaagtcaggacgctgctctttgattagcagcttcaagtgcctgaatgctgaagggtttaccaagccctggcattccagcttattattttcatggttgtgagcagggctgcttatgtgcaacttccgctgaacaagatgaattcacatcattcgaatctttagacagaccagaaacatgatgaatagaaggatcatctacaatcggactctctttcttattgctgcgacatcttttgagaacacttcaaaaattatcagggtccacttgccttttaaacgatttaccaatgtcactattgtcttcacttgcctaaaaaaaaaccacggctttgcctttattttttgtagcagtattaggaacatcaaaacctttagtaataggatcaggaggggaaggattgatgagaggagcgataggttcttgaagatgagattttgaagaagcattagtcacctcatgagggaaattggtgggacagtaagagggaaaaggcaaaggtaattcagggtatttttctttttggccagtgacagtttttcctggtgtggaagattcaaccaaagttaacgagtttggatgtggtgaagttccaatagccaaattttgatgagtgtaaagggtagggatgcatgaggcaatggttttcctggttaaatgggttaagaacgggtaagcattggccttggaaaagtcattacgatatcgatcataacctgaatttgggagtttatcactaatcatttgtgggccatacgggcgttcagggtccactccattgtccaccagttccataaaagcgttacatttttcaaaagggtgtcctagaatgccacaatgaaaacagaacacatgaagattctcatagagaaactcaagccaatgctcatctctaactaggagagtgaccatttttccacacattagaggttgagtgacatcaattcgaactctagtacgcataaatggaccacagccctcgtggagtgaatcttcgtggacttctataaattcacccacccattcaccaaccttctttgccaaagctcttgatttccttaagaaaggaagacaatgagtttgaacccagaattgagcatgataggtcctcctcggtgacattctgcagagttgatggagagtgaaggagtataagttgattacagaaatgccatggtgttgggttttatgcc

SEQ ID NO: 226516 - DNA, 1539 bp, Cannabis indica
aaaccaaaaattggactcggacttggacctcgaactccgaatccggacttggacctagactgacctcgacccagactcacaccttgacctgtaccccggaccccagacctcgaaactgggtccgggttccggtctaagtctaagtctaggttcgagccagtgtccgcattcgactctgggtctggagtccagcccggagttggatggattcatgtcatggtatagtgtagaatattgatttgttttagttaaaaaaatctaaaaataattttaaaaaacttgagccaaagaccaataaatttttaaaataataaaaaactgttttctgttctcacttttaaaaacacaattctaaaaatgaaaaactgaaaacacagtcaaataacctcttaatcttctatacaatttcattaatgggagattgatttgcataaatatttttttatatctaacattttggctgccatcgttagtattatatataacaatattttaatgcttagatagagtggctaactaggattgatattgaggaggctataactttatttttgtaaatgagggtggcacatttttttttttcaacatagtataacatattaaaaattaatataaatatatatttttataatattaaatataatttaaaatgaacaaaataacaacaaaattattggcttcaataattaagatagtaaatataagtcatattggtaaaagttaaaaaccaaaacttaaaatactaaaacataaatattattttgttagaatttgaaccaatatacttctgttatggatatcaatggtgtttaacactttctaaaagagatactctataattagttcacgaaattttttaaaagctattttgttcagtaatatgctatttgattattaattataccaacaacaatgtaacatcaaaaaatgtactaagtatcagtagtattttttagcaattctcctctattatgcgtattaaatagcttatttattatatattatgtttatttattatatcactcttaataattaaaaatatatatttgattataaaaagagtttacatttttttcttttattttttaagaatattcgaaattttttataaattaaaaatatatgtacgaacaatcaaattgatggcagacttcctttagtcattgccagtgtttggagttaaggttgacgttatcactttcaaaatttttttatatagattttttttcttaattaatattttggattctgaccctaatttggactttgagatccgtactctaaccccggcccagtcctgaactcagactatgaccctagttcttagacttggacctaaacccaacttaaataaaatcaaaaattaaaataaaaataaaaattatagaacacactcttatttttaatttttaaaattaaaaaataaaagtaattataacacatttgtattttttcaaaataaaattttactttatttttgtaattgaaaaattttaaaataaaattattacctaacaaaagtataacatactattttta

SEQ ID NO: 226517 - DNA, 1533 bp, Cannabis indica
cataaagaacatcatatgtcgatgtgaattgcctcacaaaatagtctcagacaatggaaagcaatttgattgtgacaaattcacgagcttctgtgactaacacggagttatcaaaagtttctctgtggtcgcgaggccacaaaaaatggacaggcagaagttgtcaataaaatactaaaggtcaccctaaagaaaaaactcttggcctgaagaactaccacgcgtgttatggggctaccggactactacaagaaccacaaccggacactccccattctcaatggtgtacggatgcgaagccatggttctggtagaggctaatcctatcccacagaagagccacttacgatccagcaaagaaccacgccttactgtaggaaacggtggatttagtagatgagctccgggaggaatctcaaatacgcatgcaagtttaccaaaagaaagtgccaaaatactttaattccaaagtcaaagacaaaaagttttccactggtgatctggtccaaagaagggtcttcccggcctccaagagccaagagtgggggtactcgggctaaattgggaaggcgcgtacaaaattgaagatgaaataggctctgggcctataagctaaagagaacggatggatctatagtacctagagcctggaatgctgaccatctccgcaaatactatcaatagctaagagtccaatatttaaattcatctttactctataagttaacatgtggcggacaaaatatatgcattatcccacataaatttaagctaagtgaggcataaaatacgcgcatagacaggctagacataagaaaaacaaaatagatataaacttatataagttgtctaaaatgtaaacagcaaaaggcctgaagtcgagccataatagtcccccctaatagaaaatatagataataaatacaaaaaataaaattgtcttaaagggggaagtaagaaaaatatatataaaaaaaagggaagggtttaattaatcaactcgtggaggtagacgaggacccctgcgctaggccaggacaacttccagtttcttgttcttttcccaaaactgagctaaaacagccataggatcaggaaagaaagggagacgaggcttgaacttgttggatttgcagcacatgaacaccccatcttcgaagcacttctcacattacttgcaattaactggagccagtaaagcctccctcgcagccttagcagcctcctttcgagtttggtcctggaattcacgaagctccgagctcaacagtcagattggctattgtctctaagtcagttcagtgtagctcttttagatacatgagcttcacagtgaattcctagttttcctctttggagtcttgaagatccttcctgactgaggtgatgaatcgtctttggccttcagcgccgcttgatgatatcgctccatgagagccttctcctctcgagctttgttatgaagagcttccatttggtccttcgactccctgagcctcctcattactctgtccatgccaccaaactctgaca

SEQ ID NO: 226518 - DNA, 1406 bp, Cannabis indica
accatatgttgtaacttaataaaaacatataacaacactaattataaaagtgttgccatatatctatttatttttaaaattataattttatttcaaaatattataattatttttaaaataaataatgttttaactgtattacatcaaattttacaatcgatttttttatcataataaaaaaattccatgttatttaaatttaatttaataataacacaatcagattaagttaaatgtttaaatttatttttatacgatcaaaatacattatgttagtgtgctacaacatttgataagagcttttataataaatttgaaaatttattacaagtgtaatttaacttttcaaaagaaaagagggtatacaaaatgtgcctaatatgatctccaaaaactttattctttctaaatactcgaagtttctgaagctccaaagattaattaattttcttcattccattttgtgtgttgttaaagaaacaatctaacctgcaatgaactaaaaaagaacagtaaatgcatgcattattatcaagtcacgttatcaataatgtgaatttatacataatagacaagcttggcaattggctcaatggtgaatatatattatcaaaagattggttcaattcactacataattagtgtgcaaataaggaaaaatgaaaattaatgtagcactgtataagtaaataatcataaagagaagatgaaaaggagaagaaaaaggtctgataaaaaaatgaagaaattatattaataaaaaaattacctatgatgtaaatttaaggtgagcacacccacttcaaattgatgaataatgttgatgcatacaaattaaataatgctcgattcgacttgaattgtaaaatgtaaataccaaaatcttagtaatgaatagccagtatataagagatcctgcatggagtttgaagactttgtaaaatttttgaaaaatttattgatatcaatggtggtttggagagaaaaataatgggtggtttttattttttacttggtacctcatctttatcttcaaaactaaaagaagttacactccactgaaattaatatagaaaatattattcttttaattttctccattattaataaaaacgtactttattttagaagtgttgccattggttttaaatttaattttaaaatattaatgtttaaaatatataagctctttagtaacactttatatttaagtgtgtgcaataaaaaaaataataaactagcaacacttttcatcaagtgtattaaataagtgttgctacatattaatgttttaaacttataaatttttttagcaacacttcatatttaagtgtgtctaataacaaaaattaatgaattagcaacagtcatttaccaagtgtattgaataagtgttgctaaacatc

SEQ ID NO: 226519 - DNA, 2414 bp, Cannabis indica
tttatattatttatgctatcttagctcattccagattcaagcgtgctggtcgacttgaatggaaaatccctcgagctgaacgaaggtcctaagtcacattacacagttgaataaattactcgaataactattccgaaaccctagctcaaaaccaagggtaatcttaatgacacattcaatgtattattacccctaaatgctaagggaaaccaaactatgctcgaaaaataatatagattcagaaaagttgcaatttcggggtcctagcatgtaaaccggtaaattggttttatagacccaataaaaccgattgatcggtttgcaccagtaaaccctaaaaattgcacagctcgtccaaatcttctccaaatgcaaccatactttccagagcacctgaaaatacattctagaacaatttccacacaatagtaataagaaaaacacaacagaactcaacatgccattgttgagtcaagtttgagttccatgaactcaaacttgcccaacctcacaaatcaccaccaaaagcagtacaagcaatattgaaacatcatttgagacctacaaaagctaaccctaaacgaaacttaccaacacatactcaaattcatcaaaatcaaccctaaacctaacaaaaccttccaataacatcataaattcacaatagagcaagcttagggtttttccctcagatcaagccctcaaattccacttaataatccctaaaattgaaagaaaattcccccttgactgatggtccttgctggccgaacaaagatatatactaatattatcatacatgtttatgtaatagctatattagacttattttaaaacattatatattacttaatggttacatttttattgtaaccatgatggttacatttgttttaacctataatagcaagttatcaataagtaaaattttatttttttagaattaaattaattataattaattattttcttaaaataattaatttttaatttaaatattaaacaaaatctaatttaggaattaatatttataaatagttttatttttatatttaaatccctattataatttttttacaatcaaaatatttaattataatatttacaataaaactttattttttataaatattagacttccacctcttataaaataaatttttgaataattaattagtttttaaaaaagatatttaattattttttgtcagaaccgcttgacccatcttttccttttttttttttaaaaaaaaaaatacctaatttcaaaattagagtttcagtctatctcaacctagtattatgtgatttttctacttcgatgtaatctcctacatctctgccacaaacatgttccttcaatccaccaactatatcacgttctttccctttctctctgattctcagtcgacctgtcacacatcgatacccagtcaagggcggagacacttaaagggtgggatggccctggccccccctgaaattttgaagaaaatgaatttatagtatatatatgcatatagttattttttaattaactattataaacatatataaatatttagatatataataaaatgagattatatatacacacacgtatatttagcaacttaattactacctttgaatgtgatgaaagtatatttatggaaatatagttaagataaatactagtgtttctttatttaaatataattacaaaataagtttttttttataattatggacattgtacatatttaaaaccactcgtaaatttttaaaaaaatcttaaatattctacaatactaaaaataaagtttaaacaactcatgattaccacgcatataagagaaaaaaatatgagtacaacaaaatattttaatctttttttatctaaattattttcatgattacgtaggttgtatttatctagaatcatctataaattcttacaacaatatttgaattgtttacagtgctaaaaataaggttaaaaaaatttgttgcacacatgattattttttttaatttgtttggtaagtaattgtttgaattttatttttcggcactataaattatttagaattttctaaaaaattacaagtagtacgagaaaactacaaaatacgcgatcatgaaaaaaaatggactaaaaaactttcttagatgtcaaaacgaattttttagctaggggtgcactataaattttttcaaatagaaattaatagttggcccccctagtaattgggtcctggctccgcccctcgtacccacgtgatgttgcacatcgttcataattaattgacaataacaacaaaacgttaggttttctttgtctactttctttaaattgttttctacatatttttttttttcttattcacatgatgttgtttttgtttggatattattttacctaggatcttaga

SEQ ID NO: 226520 - DNA, 1369 bp, Cannabis indica
tcttgtctcgaaatataacaatatgttttattaatgtgtaaatgattaacgtttttatccacttttcgtaaaatcaaagattatatatataaatttatgcttaattattacataattaatagaaactaaaaactaaatatgttaaacaattagtgaaaggggaaaaagagcatgtatgggttagcttgggttccatatagctgccaaatcaagattcttaatgtcgtagtgatgagaattaaatatatatatatatatatatatatattgtttactttaaaagtgagaattaaatataatgattaagcttttgcctaaaatcaatgaacacaaatctaattaggatttaatgcagatatatatacatattaggtatccaacagaatcaattatctgcaaaatcaacatatatactgtatttattatatgtttgaaaataatgtaacattttatatgttcttactaataaatagcagtttgttgtcttagaaaaacaaaacgaaattaatacgattggacaaaaaatgtctttgatgaagaaacataaaataattcgacaatatcaaaacgatatttaatgtcatgattatcattaattatccaaaatgttatgggcccaataaaatttataatttgcatagcatgtgcttataagatttaccatgttcttaggcatgtgccttataggccctcattacctcagggctataagatcaattatatgtcagatgatcaaacggattagtttgttttaataagtgatcatcagtcattaattaattaattgatatatacattatataaaacataatgtatactggtgaaaaaacaatcttagaattaaaaacaaattgaattaatagtgatattatacatggcataataataagtctcttgtcgatcagttaacattattattattaagcaagatagcaataagagcaaccaaaaacaaggggtgaaaaaacattgccattatagtgaacatgcaatggtttcccaaaacaaaaagtcaaaaattcagttttgtttgtatataagtttcatgtgtatgtatgtacaaaatctttcagaatatatataaatttatttttcgaaagtaagataaaattaaaatttaataatactgttttacttataatttagtttaaacaaatagtttagaataattactgaatttgtccttcacctttttggtatggcaaaataaatgagtattgttttagccggatatttgcggcaaaaatccttatcatttttaatggttacacatatagctctaataaaaaaaattaaattgtaaaaaatacattaatgttttgttgtaaacatactcttttgactgtaaataccaagtcagcctattaaa

SEQ ID NO: 226521 - DNA, 1768 bp, Cannabis indica
ggtaccagctgtcaaacttatgaacaatttgttctatgagaagggaatcccaaatagaaaaattaaggcaggtgtcttggaaggtgactaaggtgttacattcagccctaagtactgtgggggaccaaccacattgattacctcaggatgctccttcaccggcttcccgaggggtagtgttttaaagatattgtgctcgagccacgtgatcccaagcgttatcctcatctggaatgataacctgctgccacgatgaatacttgggaaacttataatcacaagtatactccttgtcagcaagaaggcccatcgatctcagattggcctcgttcaaacggaagtcgcatgacttaaggccataaggaagagtcatcaggcacctgtgccgactaaacatctcgggggtagggatgggcctcgtcaagagacctgtaaaaagacaaacaaaatattggtcagaaagctaaaagacaaggactaatgtaactaagcaagaggaaaacaatcacttacgaagtctgcgaaaggtggttgtgtcgatggggtaaagactagatgtctagaataagttgtctttgaaagaattttgtttggcaagtccacaatgattttaagcttgctagaatgagtaccgaggtaatagaaaccccctgcggcattcttcctcgctggaacaaccttgatcaaatagagatactcgatttctactcgtgtggggcattcccagttcagaatttcatacaaaaccttcaaactagcgagaatactataagagataggattcaactagaatggggcaacccctaggtgatttatgtaatccttgaagtagtctcgaagagggagtatggcccctacactaatatgctctaagcttcaggcgcccatgcctatcgagccactggtactagtctcaccacttgtcccttggtgcccatgccctctcacactgacctaacttggcatgattgcccaagtttaattccacaagtctttagtatattacctgtgtagcctgagatagatcacacctttgattctatcaactcagctttgaaggtgactctgggatcctggggagtctttgatgtacgtggcttaggaggcattatttcaaaatccaagtcacctggttcaaaagcaatcgtgactttgggtaaaaacaaaggctttgccaaaggaataaaggacacctagggaggttctggctacatctcgcaagaatcgaaattttccttcggagatttcttgcaagaaacacctatagcaactaacattatcttcttggtgggttctcactacgtgttccctaaccctagcatcgttcaaatctaatttggaggtgggtttcaaagggttgggtttatacgggatggttaattctgtaggaaactcaaattctaaatcttttggacgataaattcttgaataagagtgggacattgctgcaagcagaaagcagtcctaatccttagagagaattttatcaaacccgaaggtggtgagttagagattctgacaagacctacatattacttgaaccctagtatggacctaaatacagtttaaccctaaaaaactaccaaaaccaaatgagatggcaacaatacaaataaattaagcagcaattaaagacaatgtaacaagcatgtaaaggatgaaagtaacttactgttaaaacggcgccaaaaacttgttgctgaaaattataaacgctacgcaagtatacgcaatcaagtagtaaatctcacacaggtgaggtcgatcc

SEQ ID NO: 226522 - DNA, 1686 bp, Cannabis indica
tctctctctctcctctctctctctctctctctttgatatgtactaactctttcttcttctccctttctgtgtatgaatctccttttggattggatctccgagccctaatcctagggctctaaagcttagctctgtgagtctcctcctctccaattttttgttctgttcttcctttttcaattgagtttgcatgtatatatagccttaggatagatgagagagctggaagttagttgtaacagttttaacaaactttgcaactaaatttatgttctatcagaataggttgttagaggccgaaggccacttgtaggttttaattcttgtaactggatcttgctgatctagacagtgcatgtggaaatttattttaacaatttccacctgaatcctcatatgtattgtttgatgtttgtcttagttgattatgagggtcttagctcaaatccactagagtttttaccaacctgtttctatccctaataagcttaagcaaagcttaaatttatatagggaaaccatctttgtacccatatctgtcggattcacttcagtaggcactttatctatttcaatatgtccttgagtaaccttgtccctaataaagtgatattttatttctatgtgtttggtcctgtcttggaaaacatgatttttgcataggtagatactgctctggctgtctgagtagattatatcacctaatcaagtgagcccgtgccacaacttggcaccaatgtatcacatcatctaatcagacgagctcgtatatcacaaccacattgccattgcataatcagacaatcagcaatcaagaaatctgtcatgccatgtggtacatcatacttttcttaccttaagtctctgttcaggtatgttggctgacctgtatggagaatgatcaacaatcctgagccctatgtcacaacaacggtacattgataagtgtatattctaaatcactgcctaatactcgcataaaataatctagggttttctaccaaactttgtggtaaaaacaccctaaaataaaatacaattctatctctaaaacatagaccatattgaaaagctcgttgcaagctttgaattggtagatagattgtctaaaacagacacctgagtaaaaggttatggccaaaatacaaaatttgacttttcctaaaaattgaccaaacggaattccagttggtaccatccagaattctggttctaaatagtctaaaacacgattttcctcaactttaaaccctctaaaatagctctaaacctaactaaatcattccaaacttcataagacacatatatatatatcatatatacaatagtccaatgtaataaaaattaaaaacaagcccttaaatagaaaattccattaaagctcgggctttcagctttaaaagctcaaactcgatttctaagtccaaactacctcaaattcaacaagtaaacatcgaaactagtcccttagctaaccaaaaataggttcatgaaattacaatccccataactactctaaatcacaaagtcaacatataaaacaaatatttttcaacttaaaacaaaactaaccactacaacaattttgatcatttgtggtgggctatctttgccgctaagaatggcagtattagctgcggactccaaatttcgccgctaatagtctatttttattttattttttaa

SEQ ID NO: 226523 - DNA, 2048 bp, Cannabis indica
gataactaatcagattgtaaagagttttatttagggcataaaacccaacaattagtgcatcactaagctaattttttttttattattttaatgaagtagttcactatctcttggtgattgagctctgtgtgcaccaagtgttgaactggctcatgtatgtcagcttgggcgcatgtgacaaatcgaaatgagattttgactttcaagacccctacatcttattcttgaggaaaataagatggaagtttagagtagaatcgtttattgacgaatgagaacatgtgttctagcctctaggttgattttgttgggctccattcttccaccttgtcgggctgctacctcaccttgactctcacatttgtatgatattgtccgctttgggcctaagccttcacggtttttatttttaggcaccttgtcaaaaggcctcatactaatggagaaagtggaacacttatatccaagacaactcttgcatattattcaaatgtgggacttggattgataccccaataattctcccctcaaactaaggaccacatactcgtggcctcctctccagcaaaactaccttataccgccgctatcactaacagaactcgtcacctaaccatcacctttgtcaagaggactttcgacacaggtcctaacaacgctctctatcttctattgccataatcatcaacgggacataccacctgactatttaatatcaagagactttcgatacaaggcattatgtagatcttcaatcacgaggtcatcacattgagggcttctcccccacatcgtaaatgcagcccactatcccagtgcgcttaaacttttggctctaataccacttgttggtctcgtttttccaccttgtcgagctgctacctcaccttaactctcatattagtacaatattattcgctttgggcctaagtcttcacggtttttatttttgggcacctttccaaaaggcctcatactaatggaaaaagtgaaatacttatatccaagataattcttacatattcttctaatatgggacttgggttaatatcccaacagactacagtgtccatggccaaactactacttggatgatgaattcctctcactacaagttccgcatccaggttttaaaattaccatttgcatataaagattacttcattccaaacaatccggtagaattttcaccatagccattttaacactattatgcaatgtcatattggctattctagatgagaatttatgttacttttatttcgtatacatatttcttttttataaatgttgtcctccacattgtaaaggtggaaacaaatttagattgctaggttctctgatttgtttgtgatatcttttaaattgtcataagcacatgtattaattttaattggaactaattgaattttcataataaaaataagaccttaaaaagaaagtagtttatataatatgagtattaatatatcataacaacccacgaccacgtgcaataataaaaatgtttgtgtatcatgatagtggggtgggtgggtctataccattgactaagtggacggggtgttaaaaaatgaggtataaataataaaatatagttacaaaaaaaaaaaaaaacatacatttttaacacaagaaaaaaaaaaaaaacaagattattttaatctatatttcatatctcttactattattactatttcaaattatgtatcattgatttatttatataaacttaatggcgatactaaaattagaatgaaaactttcttttaaaacaaaaaattagaatacatatctttggaaaattctaaaataataggcttattcacattcgagagaatttttagtctctattttttttttttttatatttgtatatgttgtaattatttaagatattctgtaaaattttaaaaaattagaaaaaatttaacacactcaacaacaaaatttaatcaattcattagacatgtcattttgttatgaatattattttataagattgtattattttataagattgtatgaatattattttataagatgtg

SEQ ID NO: 226524 - DNA, 1519 bp, Cannabis indica
tttgttgatatttttaaataattgcaaaattatattttaataaatttataaattaaattcagatattaatttaaaaatatttttttaacaaaaaagataattaattgattgatttaacagtgttaattttaaccgctaactttaacaaaaaaaaaaactaaatcgttaaatcaaattttttattagattgctacatttaatgtaagagatatatattattctttaaaaacgaaaaaaaaaacgctaggaataaacgatattgttcagtcgtgtataaaataaaatagtcacgagtgcaacacattatttgaacttatttttagcgtgttaaatttttttgaatttcttaaaattttgcaggatgtcttaaataactataacgtacatgctcatgagaaagaattatttcaaataccaaatcagataaaagtgcatcggtgcatctattttaagcgggtgcattgtaaaattttcttatattatatatatatatcactaataatccgactaaataaataatatataataaaaggcgcttttacaatgtagcccactaaaataagtgcaatgaggcaactcctaactgtttcggcatctataagaattttttagtctaaattttttcatagtcgtatacgctataattatttaagataccttgcaaaattttgagaaattcgaaataattttcaatataaaaattaatgttcaaaccgtctatttcacacacgtataaaataaaaaaaaaaatcacgagtgaaacacactctttgaaccctattttcgacgtgttaaattttttaaaattttgatagttatcttaaataattacaatgtatataaacataaaaagaaaaaaaattgactaaatatcttttcagatactaaaacagataagggtgtattaatacacctattttaaggggtgtattgtaaaattttttaataataaatttaattaaaaaagagaagaaactatatatataaatatatatacatatatattaaatattctagaacatttaagttaagcaaaaaaatctagaacacttagaaccattcctttaatttgtaataagtttataataattcattgctaatggatttgtgttattttggtcaaactatatattatattaaatttgacttattttcttcacaagtttctatttgactttcaaaatgcacaagtcatcataattgactatatatatagataaattaaaatctatctcaattaatcgaagcttcattatatgcatgttataataatcactaattaacttcactgtgattaattattaattctttaataatcactattattatatattatgtaaaacatatattaatttatcgttaaattattcaatatgtaatatcgtacgtagttctttcatttcttgtttaacaagattaatattggctttgactaagaattaatatattaaattaacttatatttcaattaaatcattactccatgtattttaaaatatttatctgatgctttatattt

SEQ ID NO: 226525 - DNA, 1293 bp, Cannabis indica
ttgagcaatggatgcctttatggtactcaactctgactggtgggggcaagtagtcgccctactgtgtgccttgacaaagctaacacttaaggggcttcttccccgttgtagcatcactcttggaggaggagctagattctggagtcctcttgtcccctctcccactttgactcggcctttgctttcctgacttcttactcgtagaatttttgatgttggtctggggattcgtcttcttcggctgtgaattctcaaaggtgtaatcagtcacccgctcggctgtagctctagcagtggcgaggtctaacacccgctacctttgcagctcttgtttagcccacaggttgagtccttcgaggaagtagaaaagtctgtcaacttcattcatgtctttaatgtcgagcatcaatccggaagacttcttcacataatcttgaactgtcccaacttgctttaactctctcagctgttgtcgagccaagtaggcgacattttctagcaggaattgggcattcaattttttcttgaggtctttccatgtctcaatggtgcattttccactttgaatgtcctcgtactttgtcctccaccacaacttggaatccccggacaaatacatggtagttgttgctacctttgcttgttcagagttcgtccgcaagaccctaaagtattgctccatgtcaaatagaaagttttggagctctttcgcatcccttgctcctccataggatttaggctcaagtgctcttggtcgaccatactccatactccatacccccgtgccccccggtatttgcacgctctgttgctatcatggtaagatttagcttagtttacattccagctaactcttcccggatggctgtgatagatgcatgacaatcctctatcgtatcattaagggagtcttataatgcagcctgcccattttatagcacattgataacaacctgcatttatgttgttgcttgttctattgccctgatgcaatcctccatctaaggcgcacttaatgtttcggcagcaacgtctctcctcttgaacgcagctaccctggccaacaagttagcatagtcttgagccaacgtggtaacttgtcattgtgtcgttgttagccctgagttctgagtgctagaggttagatccctgaccctctcgtctaggccatccagttcccttatgcgcttctcaagctcttgaatcctttgagtattactcaccattatgaacgtgttaccaagcttccctttctcttggctctgatacgaaatgtcacgggccgactattta

SEQ ID NO: 226526 - DNA, 1728 bp, Cannabis indica
tacgtacggtcggactagtcgtctctctctctctctctctctctctctctctctccttttccttcaaacatcggtgccctaccctcctccgacgactggtggttctcgacagtttgtgatcgacggaggctagagatctgggcaatggatgactgcgaaagagctccactttcaagtatctctttttctaattttttatttgtcctttttcttttaagtgtaacagagaaccaaggtttggtggtagtgctccaattagatctaattggttccctctcttagttattctcatttgtgtatacacatatttgatttttcctttttttttttgggtcaaaatggtggtggtgctttgagtcaaaaaaaattatatttaagtttttatcagagatttggttcgtgggtgtagcaaacagggttttgttttgttttttggttgtcttcgactcgatgctaaatggtgaccgtgactgggaatgggggtgggtgagggtcgtggctggggatggcggtggggtgagggtcatggatggaaatcgtgtgaagaagacgaagaggaaaaagaaaagaaaaaaaagttatttaatgcttttaaaataaaattttagtttttttatattattttaatttttttaattaaattattatttgaatcaataaaaaattgaaacatgacatgttatttaggtttgatggatcaattagaaggagcgaataatagacttacataaatcgtgaccttgggaattattaccactaaattgagactgttgaacgagaaaaaaacactacaacatttaactccattagcggcggaccactccgccactaataccccacaaattggccgctatagggtattagcggcggatctcccccgctattggtccgctgctaatgagtggccgctattaataacattagcggccgaattggggtccgccgctaataataccattagcgccggagcattagcggagggaccccgccgctaatgctctttgtcagtttcgtgtttcaagacagcagagagcattagcggcagggtcccgccgctaatgctaattaaaaattgaaaaaaaataattttgtaaataacgttatttaaatatataaataaataattaatataaatacataataaatccaattacaattaatataatttaaatccaataaaatttattactaatttaaaattgtctcaaaataaattactttaacattaattctattacaatattgtctcaaaattaaactaaattattaaaaaatataaacaaattattccataacatcttcattaaggtctcgaattataaagtcttgatccagattattatcgttacgagttcccgaagcccgtggcggagaagacacatatgcttgatctgatgataaatccagtgttagatttcccagctcaacttggttaaaaataggagttgaataaagcacatatgcacatatggtatatatttataagtatactcaaggattgatatattcttttcaaccatttattattaactattattataaaattttatgaatattttatgaattagacacatattatttcatcttaaacaataatattaacaatttattttttaataatttaaataaaaaatttattcatttatttacaataaattatttaaaaaataacatattactaaacatattttctaaacttaaataaatataaattaataatttttttaa

SEQ ID NO: 226527 - DNA, 1309 bp, Cannabis indica
atttgaattatttatgatttttagaaaatttaaaacaaatgatagggggatcactcccctgcgcgcgcgcacacccgagtgacactccgtttcacgtgcattcggaatatggagtgtctaagatttcttggacaagcttcttctctaaagccactcctcagtgcagcatggtccgccgagatttctcggtgttgagctcccatctgcgcacgcgaacagtatgtaatgcataccatccgcaccaaatacaattttttcatacttttttatggaattagtttcgaattttttgtgtaaatttctatgtatatttttattttttaaatttcaaatttaattatcagtttgaaattaattattttttataaattaattttagatattagtagattttgaacttaaaaaaaaaaaaaccaaaatttttttttttgcttaattggttatttttttaaaaaaaagttgaattattttatcttatttttaaattttagatcagatattttatgttttcattatttaaataatcaatttaaaatttaaaaatatgatatattgtaataaaataatctagataatttttttaaagaaatagctagatatttcgtctactttcaaaattatgttattttatttatatttaaattataaaattggataaatgattttaatttatgattttattttattagatatttaattttattttcttttaaaaataacataaattttgaaaaattagttaataatttttgaaaagatgtttaggtttgttataaacctaattttttcaaatttataggtgtatttttaaattaatatttgattttatttatttattttagaaattaaatatttaattatttaagaatttcaaaatttaattaattaattatttaatttaaattaaataaatcctataaccaactggccaatgttgttacttgtatatatgttatttattgttttgtaaaacctattattgtttgatctaaatttctatggttaacatgttgacagatccaatgatttgattttaaccatagtccgattgtcaataggtcaaataaataatttgtaatatgtaaattttgtaatcttctttcatgtatgcataaacctagtaacatgataggatccatcgaaatcattatatgcatatgcctatatgtttgctttgagcctaaatgcatatagcgagcctatttaattttgataattaaaatggactaggttgttaaaataaaaatatcacttttatagtttttatttaggtccaattaccattgggcttattcaatgaataacaatt

SEQ ID NO: 226528 - DNA, 1222 bp, Cannabis indica
catgccatgttgaagaagcggaatgaagaaaacaagatagtttcgtttattaccgagcaaggtaatttaaatgatcactttcctaatgtcatgcaacattttcttggccattttaaagccataatggggaaagctaagcccacctccatggagatacactctgattgcatagccatgggccccaaactcaacctcgatcagcaggttcatcccttaaaaccttttactctcaaagaagtcagagctacgatgtttagtatccctaatactaaatctcctagccttgattgatttggtccggggtttttttaagtcagtttggcctgaggtggggaaggatatccacattgcgattactcactgttttgacactaatgagttcccggaagagcttcaaagtacaactctctctcttatcccaaagattgatggaccttctaaagctattgactaccggcccattgcctgctgcacaacgttatgcaaatgcgtttctaagtatatttgttcccggcttgctaatgctcttccttctttagtaagtcagaagcagggagcttttgtcaagggccgatccattgcttacaatattcttatactttacgatgtattaaagaacaatcgaaggaagaattgttcccccatatgcactatcaaaatcgatataagtatatcttatgatacggttaattgggattttcttgaaaagcttctggtggcctattgcttccttgctaagtttgtcaagtggatcatgaattgtgtgagaaacacgccttgttctttactgctaaatggtagagttcaggggacttttaaaggtgagtaggggctaagaaaaggggatcccatctcgtccctcctctttgttctagtcatggagtatctgtcccgaagaatccaaaaagcagccagagaaaaggatttcaagtaccatcccttatgcaaaaaaatgaaactcaaaaatctttgttttgcagatgatttagtgatcttttgtaaatgggaatgaggctctttaaatgctatcaaggtcatgcttgatgagtttagcaggacctcgggtctctccatcaatttcgctaaatctgaagtgtactttggtggaattgctcaacagattcctctcgctcaaaagataaatctttctatcggtgagttccctcttaagtatcttgggatccctctcaaaccaactaagtggagacttgatgattgtggt

SEQ ID NO: 226529 - DNA, 2468 bp, Cannabis indica
attttgaaattgaagaatatgatttgcaatctcttaaaattagaggcatttactcttattctttctaaattataaattatcctttttaccattatttaattattttttaaatatcttaatatattttttaataaagtttatatatattaaatgactatattgttaatatttaaacatatatgtattatttactaaattaagaatttatatatttaatatagtttatctgaaaattgattctggtgacgtggacattaatgtttgacatgaggtaagaatgaaaacatcctggacttaagtagtcctgagtcatagcaattgacctgggaggggtccctagctctacccctaggttaactccaggaacttcaaaatagatgtttggatctcgtcaagttgttttcaactcataatatttcaatattttgaatcaagaagacaagaagactctaaattcaatgcctaaaaattgagaagagacaaaatagcaccctaaaagtcaacccaggcgcctagagttttcacctagcgcctaggttttataactagagtttcaattttcgggtttgtcttaatgaaaatgccccaaatattttactttgacatgaataagacttgtcacgaacgtttttaaggcactagaatcaaaatcggaacactttccattttaagcacctgagacatcaggcgccccaggcactagtgcacccaacgcccaagttgacatattgtcaacctaggcagcttccaatcaccatattgaagaagtatctcgagcattttattcgtctccatgaaaaaataagaatcaagtactttcaagaaagaaacgaatcgacctagaggccaaaattgggacccagcacccaagttaacactttttcaacatgggggatttccaacaaaaattctaaagaagtcttctgggcatattctttgtttcacaaattattgagattcaaatgtttctggaaataaagcgggaccattcggtggcaaaagctacacccacccgacaggttgactctagtgctaggccaagcgctcgggctgacattttgtcaacctagtctatttccagtcatttttctcaaaaggtgtttcgggcatcattttcaaaagtaacgatgatacaagtgatcttgaggaacaaatagtggatttaaatttaaatttaaaaagaaaaataaagagagaaaaatctgctatcttttctctcttttctcttttttctcttttctcttccttcatttttatctttaaatttcgaattcattagttcaaaagggaatagaattcgaaattccttgccccactaggaattattgaagaacaaaaaataatttctgagattatcaaaatcgatgcccacttggtagttttgagagaaacgagcttagttcgtgtcataaagtaaacctcacacaagtgtaaagttgactcagtgggcgaatgtttacttggaaactgaccctagtgatgtgggcattaatgattgacacgtggaaagaaagaatatatcccaaagttgagtagtcctgagtcatagcagtcgacctaagaggggtccctagccctgtaccgagttaattctgggaactctagaatgggtgtttggatcccgcaaagttgtttccaactcaccatctttcattatttttaattaagaagacacgaagaatccaaatccaaggcctaaaaactgaaaagagatgaaccaacaccttgaaagtcaacccgggtgcctaggatttttagccagcgcccaggttgatattccaactagggtttcagtttttatgtccgtcttagtgcaaatgaatcaaaaaatttactttgacatgaataaaacctatcacaaacatatttgaggcaccaaaatcaaaatcgaaaaactttccactttgagcacctacgacactaggtgccccaaacacgtagtgcacccagcgcccaagtcgacatattgtcaacctggggcgcttccaatcaccatattgaagatgtatcctgagaattttattgtctccatccaaaattaagaatcaagtactttcaagaaagaaacggatccacttggaagcccaaactgggacccagcacccaggttaatactttgtcatcctcggtcgtttctaacaaaaattcagaagaagtcttcggggcatattctctgttttcatcaatgattaagattttggtgctttcaaaaaataaatggagtcatcgtggagccagaactgggacctagcgcccaggttaacattttgttaacctagaccatttctagtcggtttttccaagaagtcttccaagtgtattctctgtgttcataaataggggtgttcacggtgcaggtggtgtagtttttgactattttttcaaaccaactcgcacatgcggtttttccaatttcccgaaccgcacccacaccgcgaaactaaaaaaccactgaaaccgcaccgcaa

SEQ ID NO: 226530 - DNA, 1906 bp, Cannabis indica
tttaataataatctaatctaaatgtgttatgacaaaactgtttacattttctgtatctgttcgtgttaagaattttgtttaagttggttatatgaaaaaaagttgtcgaaaattaagctcagggtcctattttggaaattacagggtccgttttgtcatttaacaaaataaaggatccaatctgtaacttttgcaaaacatagggtctaaaatagtatttagcctttactatttgataattagatctaaaaaatacaatttaaaagtcatacataaatatatatcatttttttatttgtatcataatggtcattttataaaacaaaaattattttaaaagactaaaggacattttgatcaaaataataaaaatttcatttcattccatactataccaaatatcacaattcttattcagttattgtgactataaatatatctagtcatactaaattgtaatttttgtaactaatatctttagtttcaaatttttaagtcattaattaagaatgatgatttataattactcacaaagtttttatttttaattataatttttattgtgattaaaaataaaaaattcataaaatttatttttcttatttactattaagatttttttatagtactatagtgccactattgtaaagaaaaatttacaaggagacacaacattaaaaaacaaaagaaagtagcaaaagtctttatagtagaccctacaaaattattatccactattatatatgcgtggactaattcatatcactcatttataactcttatcataactaaccaactacatatatttatataattatttcaacgtgcaagacgacttgactatataagtctctcttctctctttaatgtgtaaatttgacgactttgatttattggacattttataaaataaaatttattattgaacatcaatagtattttacgattaattagtaatattaattttttagaagatattttttaaaattatatgaaagatgctacttattcacaataataaagaaagtattagatattaatagtgtattttaacatttctcttaagctaattcattggtgattatcttctatttctattccattaattagctattttcacccttgaacattggcaatattgatacatatggaattaagtgacgtagagtaagtaatagtctaccatattcatcgcaagtgtcgtatgactaaattatctatctatcttgtttttttttttttaataaaaaatcataaaatctattaattaataaattcgttcaaaacaataaaacacacttcagaggaacaattctccaactgaagcatagacctgtagagaaacaagaatctcttgccaaacaatattgatatgaagcaaattaccatttttagttacaattttttttgaaataaaaagtaaattttcattaaagtgaaaattcatccattaatagcaaatgtttcaggagataaattctgtttctaaaaatacgatttgaagaaaaacaagagttgcgcgccaaataatgagcgattttgtttgtaaatcgttcaacaaattgaatagcattaactaagaggccataaggcatatataaattactttggatagcttgaacacaaaccaaattgtcactctccaagatcacattattagaccatgaatgcatctgaactcagagcctccttgataccaattatttctgtaatttttggtagaacaacacccatcttgctcacagtataggcctccagtacccttccctcattagttcttgccaaacaacctaatccgacatgaccaacatcgttaaataatgctccatcagcatatacctttatctgattagaatgctggtgtactccattacacattatgtttcatgcatccagcagaaacaat

SEQ ID NO: 226531 - DNA, 1075 bp, Cannabis indica
tctctctctctcctctctctctctctctctctctcgcctgggacgtttcttgcgaccaacgaagtctcgccgtcaaaaatggaggaaaccacgagaatctccgtcgttctggagtcaaggcctctgtggcctttgtcgagtttcaaaccacgagctctgagtttcttgaagctccctttatcgttcagtcactgttaagagttgtcggtgtagaaacttttaggtccgatcaaatcatgttggagattcgctgagaataatgacttttaaaaacttgatctacttgcaaatatctttcagatctcgttgataatttctgcaagcttcgtcgttgacggtagacggccactgtgcgcggtggaactccggtgatctcgaggacagaggtatgaaaaggaatgggggtgtaggtgtgggtgcgagtgcgggtcggggtgtggctggaggaagaagatgaagtggggtgatatggttggaggaagaagatgaagtaggggtggaggtggtgtggctggaggtagaagatgaagtgggtgtgggtgaggtgtaggtgaaggtaaaaatcaatggagagaaaaaagaaaaaaaaatgaaaaaaaaaaaatgattttaaaatatatattttgaattttaaattattttaaattaaattattatttggactaataatattttaacacgtggaaattttaaataagttaacggatcagttaagtttaggattaacggacttacacaaaagtagagcttgggaattattgccgctatttttggaggttggggactaatctgcatcaacacgaattttttggggacttttgccgaaaatttccctaaatttaacaatatcaatagttcggagcggccaaaaaagttcaggggcacaatttagtacatgtcaaaattcagggagaaaaattactaattagctttattttttctaccacatatttttgtaaactcttatgttttttctagcaagaaagcccttaaaattcatacaactctatttatttgggaaacttacaaaaatactgaaatttgggttaatttttacaaaaatactgtcacacgg

SEQ ID NO: 226532 - DNA, 1349 bp, Cannabis indica
tccatttaaatattatttattttctgggatattacatcctagctttacacagtgaaagtaggcagtaggatccttaggcctcctagattgagacctgcctctgccttgttatccacctctgttaggacctctattgtgacttctccctctgttgttctatggcttcttttgatgaggccttcctctactcaagtttagttctccattagaattacctagcttgtcattctttaattctagatccatatatagattttagggaagagatgacttcatctagtgttatagaagtccttccatactttatggctgtttacctccatgtaggattctagtaggtaatttaagatgatgatttcctggttctcatcaattaaagactcattctctcttaaattagccaactctacatgaattcttagaaactcatccagattctattcaagattcttggaagtattcatcttgaaactaaagttatttgagaaaattattattggttaaagacttctactggaattgttcttccaactttctccatattcctgctggagtctcttctttatccaccagtctaatgataacatcacttagattgaagatgataattctagttgtagtttccaggtattcttcttgctgacttctggttgtattctctggccattcaataggttcttctagcacctttagcaacttttgttgtgccaataaagatatgatctttcttctccaaatcctatagtcgcttgagccattaaatttatcaatgtcagtcttaacactactcatattaattttgttagaatataaatcagagatagggttaggaatctcaggttggccattcagtggcacatccaccaaatatccaatgccattgtcatctacttatggattcaatctctcctgatcttgaggatcaatttcctctagtgcttaataattgatttcttccaatcttgcttgtaaactatattaatttgtatcttgtttcttgcaaaaaaatagctctgataccactattagaatatgcaacttctaactcatcaaaatacaaattagaacacaataagcataatatggtgtttttgcaaactttacatgcattcgtgaaaagtagaaaaactaaaaacaagagtccacaactaaactcgatccaacccaatgagcaaaacacaacaccctaatacctgagttaagcaactcagatactcgagattcaatctcgatgcttcgtctccctcaaagacagaaaccctcgggttccacacacttacgatctcacaaatcgatcacacacacaaaataaaaatcaaacacacagagtatcaagaacacaatcacac

SEQ ID NO: 226533 - DNA, 1240 bp, Cannabis indica
tcctagctgattactaggtgttatacttagtaattttagttaagttatttttgatgataaacattaggaaattaagaaaaaaaaataaggtttattcctctctctctctctctccacctcttcggcctcaagcaagaaccagaggaaatccagcaaaccttatcacttttttgggaaattcaacaaggatttatggtggttcaagtggagggaagccttagaaaaccttatcctttgtattgttgaggttttgttaggtttaggcttgaaaatttgggaattaagatttgttttttagggtttcgtttggggatgctttctatagcttggtaatgatgtttgaagcttaattgagttatttttgttggttgattcttgagttgagcaagtttgagataaagaaataaaatttggctcaataatgttaaaatttgcatgttgaggttatttttggttttattacatgaaaatggtttattatgatgtgaataggtattctcgggcttggttttgagattggggctattttaagcatgttttgagactttttatgttactgcagtgaaaaacaacataccgtttctacagaaatggtctaccatttttactggtgcagaaccagaaaagcggctaactgtttttacataaacagcctacccctttttcaagcagttttcttgtataatcgtttttctcgtgtttcctcaatatttaaggtatttccatgctatctatcgataggaaaacttctaatttgagtttagatccctaaaaaaggtcttagaaagttgtttacccattttacgtgaatgtgatatagggcctccattcagcgcgtaattttccattcaggttgaccgacacgcttgaattcaaaaatggggtaagattaggatagaatatatattttatatgtatatgcgtatgtgtattatatgcatggtgattatgtaattcatatgctatcaacactagtacgatagcggtactgagtgcattggtacatcatatgatgtttaagggtacaatctggtgttaccaacactagtacagttaagtatatagttcatgtggtacaacactaaataatactcggggtacagttcagccctaccaacaatagtgtagtagcagtacttagtgcatgtggtacagaggttgtacttctattataaacgttcttaatcatttgtaggggtaccctaccttctcggatccattcgacacgtgcaatttcttt

SEQ ID NO: 226534 - DNA, 1025 bp, Cannabis indica
tctccgtgaaagggagtctccctgaatactggccatagtcacccgtgggctaatgcctcgctttgctgtggaagacaaaaccttttgctcctgcgaagggaatggatcttttcaagacaagacgcctcagttcggggtatgcctttgatccgagaaagctcagcccacgcgtgtcaggctacgaattgctagtataatgtcagagattgtctcccacaccacgctaccatgtagagaatgtgcatccttatgtactgcgtagactgatacaacagctaggtgcgggggtaattcaaacaagaatgaccctaaaacgacacgcatccaaagtactgccggtacaaccagtgcattacgacatcagtaaaagaccacatgaaaaatatgccacctaccaatccaacggtgggggttcaaccttatgaagatccatcaacgacggtccttacgagggaatcgacctataaatacccctaaagacacacaaggcaggggatccgaacttcgacttcctctcccttaactcaccttttgactcttcaccttaagattaaaggggaatcctttgtaaacacattactgtaacctgttattaactccagaatattgctcgtaagcttcctcttcttcgagaggaacacggtaggtcagagtaaagtccatcttttctgtatttatatcaacattcaccggtcaaagagcccaataaaagaaatcgtggactaaggataattaacgcctaaactacgtaaaaattagttgtctatattcctgccatttgcgtttttattactttcataaactcaatagttatttggttcccgaaaaactcagtaaacatattaaaataaaggtcttcaaattgtttggaccgacctacttacaacttattagctcatacgattctcatataatcataaccttccaaacatatttatcaaacattgttaaaataaataaaaaaaatcatatttatctcaaacacttttatttgaagaaaatttgtatagacctcactttagatc

SEQ ID NO: 226535 - DNA, 1235 bp, Cannabis indica
gcccttgtttccatctattgaaagagttgaactcatgttggaagttagcttaaaggcattagaagatacgtttcaaatgataaggagaaggaacattcatggtattgcagcacacaacactcaaccaaacatttcattgctcaagtccatcaggattagtagcattctcaatttgacatcactacttgaagggattggtaaccttccttcccttgagtctatccttataaaagactgctccgatttgacatcactactcgaagggattgataaccttccttcccttgagtctatccttataaaaaactgctccaatttgacatcactactgcaaggggttgataaccttccttcccttcagtttgtcaacctctccaactgccccaatttgacattgattccagacaggttcagcaaagtgaacaaatttgttattgaagtttctccattatagatgtgagttaatctccctctctatgcgtgtgcttttttaattagattaatgtgtttatgaagcatgcattctgaaattgtttcttgtagtatcatttccttttaaatgaaacaaattaatattgataattggtaatatgtgttttgatatctttggagaaagagcacttagaaaatacaagtacctgcatggagtataaaataaaaccaccttaacattgttttcatttgtggtttttctttccactttaacttgtgaattttatttattttattacatgggatttcttgcttacatacatggaaattagtaatccttgtgtagatataatagagcttgtaataatctcatttaatttttcagtttgtgatgaattgatcaacatttgatattgcaactctgtgatggaagatttgtccgcaatggtcagacaccgttgtgatcaacaagcataagtgtcgaaaaaggagtggtgttcaacaagaaacaagatactgcacaagacaatgttactgaagcattggtggcgaggtagaacaagatttcttatctaatacctttcttcttgtatgttctctgttgcagaagctaccactgcttcttttatgagaatcattggttttgtttaagaatctctttggaagattcttgtgagaggcaagttagatgtgaaggcaagttcttcaatttgttgcttacaattatttctgtgagcttttagtgtaccttccatgaatattgaggtgtttctaaagaatttgtatgagttggaacatttgag

SEQ ID NO: 226536 - DNA, 1114 bp, Cannabis indica
ttccttttattgtaagaaataaaagacttaagcctaggaaaacagaaccgacaactctatgagttataatggtctgttgaggctttataaagaggtctaagttattttccttgtaactttatttatgggacaatagtatgggaatttatccaacattaactgaagccttgtaaataaaaactgactgttatagttaataagtatatatgaaacactgagaactttatgtggttttgtaaataaaatttatatactccacgaatcattgttatttctgagtatttcctaataatatgtttagattgtaagagaattattataaatattcactcaatcttaccgaatttttctttcccaaaataatacatccctttcctcataggttctgttcttatttataggtttttaggaatgacagatattctctttcgatcttattgaggtaatcgttcatgaagcgaggacaatccccacgtctcatatttacgacatgtggatataaaataaaataattgttgataactactttttgatcttatcaggaaatagtcttttgctactgaggtaacatattctaactatggctcgtatttttctatcaatgttcaggaataactggtcacgttctacgagacattagttaagatgattgtcctcattgttgtcttttttggtgattactgtgctagttttttaggaactccgagagtaattgctcccgaatctttcaacatactcacgagtatgtaggtcaatgagttgcgagtttttaaggaactcattatctatcattttcaacgatacaatttcagcctgtatttttctggaacctcatagttagtttccgagaagatctcaaaatatcgtcacctcacaatactgtgtaaatcaatgttgttactgagacgcgagacaggtatctatttatgaccacttaccccgaagccagatatctattgtatttaataatcttttttaatgttcaaccttattattcacgtatcgtatccatatttatggctcaaaatatgggcatgacaattgtctcctaaaaaaaaatttctagagttggaagagtttttaaacaaccgaagctggaacaatttggtctttc

SEQ ID NO: 226537 - DNA, 1518 bp, Cannabis indica
gttcaaaaaatacaacacgtgacaattgttaacaataatttataattaaaaataactaaaaaaatagtaaaactagtgtacatatatatttatttgagtatttataggtaaataattaaaatttaataattttattaatttatatatatgatttttataaatattgttgacaattatttaaatataattggaactataaaatatatataaaaaaaaaagtaatgtagaaatttgattctaatacgaaaataggctgacttgtttaagaaaaatgggatggcacgaacaaagcatgtcacaaaaatattgggcctacggaccatgttagacctaccctttaaaaatattggcagaacttgataggaggacgatgtacactctaagtaaagtgaagacgacttagagttacaattaaattaatgttattgtattatccgagacgtaatatcaaataatgagtaaggaagaaaatgaagtagtagtattattggtcatgttttgtgagtgattgctaatatttttaaagttgttaatatgtttaggtggacaatttggtaaaaaaaattaaatgaggttggacagaagtcgatgaatcaataatctcaaatttcaatagtttgattataattattctctaaattttaggggatagttttatctcatgtgactagtgataagaattctaccgcctatgatttcgtaaaatactattcgattagatggtaaactatcttggtattacattggttcgagaaagttttgatgtcgattgtaaatatctacttaatgaattcattagtaattctaatcattataagaaaaattcgaaactcgatttgatacatattaattttttgaaaaaataaaattaatttgccctaaatataatgttttgttgcatattttgtccaaatatataaatactctattaaagttggtagctgatattctatattattattactttatgggctgattttgtcatcatcatcatcatctcaaaagcaccaaaatataattggtaagattttaatgctccatataccaaccaaactgaaatgtgaatgtagaatacatgatttttataactatctttacaattgaaaattgagctaatattcaaatataatattattttgtcaaatacccataaagcatgctcaaatcacatgttgaattatacactcttattcaggaatggagctaacttttaaatattgggactttccgttatttcaaacttaccactaattattatattttaatgatacacacaataaaagatttttaaaataataataataaatggtgtttacatgttaacaaccagtgtccttaaaataaaaatgtcatatccacattgatacaattaaatattaaatctcatataacttaaaatactgctattagacaccagtagtattctacgattaattagcgatatttttttaaaattattttcttaattatatgagacatgatatttaattagaccagtagcagtataacaccaagaaa

SEQ ID NO: 226538 - DNA, 999 bp, Cannabis indica
agatgggaaactgcctgattacgactcagatgaagagctcgaacctttccatccaatcattatggactctgaatttcaccaaggatttagaaaccctctcatcttgccatacgatgggactatggatccggtcgctcatctcaacaattttaataccataatgcgggccagcaatgccacgaataatttatgttgtattttattccccacctccctgactagggtagtgagtaactagttcaataaattcacccatcactcaaccacttcttgggaataattgtctaaggatttcagaaaacaatttttggcagcacgagacaggcaacctgaagcgtctccctttactaacgcaaagcaacaaccgggcgagtcacttaaagcctacttaagtcgattcagtgtagtcgctactagagttagaaacttgaacgacaatatacagcttacttctcttcaagcagggattaaaactgacctctcgatagctggagttcaattaaagacctcatgtgtttgtacaaaaagaggaagcaaggaaagagatgaaattgataaagactggctcgggaaataaacatagcactgtcttagcaagcaccgtcttgacaaaggctgacaatcttggaggctctaccaagagaaaagatgactctaaggaatcagccaaagataagaaaaagcaaaagaagcacgataagtacgtgccaatttacactatttacaccgagcttaataaaactcgagaaaacattttcctcacacatgagcacagggttgcattttgcaagcctgagcccctgagacacgtgaggcacaaacgggatgcaacaaaattctatagatttcacaaggacatagggtatacaacagatgaatgtcgttagttgaaagacgagatagagagccttatctcgcgtggttactttcaacagtatgtaagacgacagggtaatagacaaaactagccaaatgcgcccaataacccagacaaccaaa

SEQ ID NO: 226539 - DNA, 1943 bp, Cannabis indica
tatgattttatttattatttaacatttacactagttttttattactaaagtattaccaaccaaataaatatgaatttgtacaaagtattcattatactagttttataagatatattatacattaattttaaaaactataataatatatatttatataaaattaaatggaatcgaaaaaagaaatctagcatctcttccaattgcctaagcattacttattcctgtttcatctactgacctttctctataaaaacttccttacctttatttggtttcatattacttgcccccaatctatagttgtagctgatgtctgaattccaccaccatacatgtcgtgccatgaagtgataatatattattgaattgttatgtaaaggtatgcatcttcttaaattctctacctacaaccttactgctgcttggaagaggtaaaaggatgaatggtttgtatatcttggatagcattgatactgctgcttgaaaccttactgtgacagcaaacatttggcactctcgaatgggacatccctctcacaaacgtcttactttactttgcaataaatttgattgtagcattgataattttcataaaaacaatccttgttttgtttgtcctttagctaaacaaagaaagcttccatttcacaaacattctggttttgcaaaatctaaattagatttgattcatcgtgatacatggggtccttatcatattcattctcatgctaatcacaaatattttctaactttggtagatgataagactagattcacatggatttttttaatgaaacaaaaatcagatgtagtccaaattattcctgaatttttatcttatgttcaaactcaattccattgcattttcaagtgtttcagatccgacaatgctcttgaattaattttcaaagatctctttgctagatttggaattatacatgaattcacatgtgtggaaacccttgagcaaaatgccgttgctgagaggaaacatcgacaccttttaaatgtagcaagagctctttattttcaggctaagatccctattcagttttggagtgagtgtgtgatgactgctgcctacttaatcaatcgcactcctacaccaaatctgaataataaatgcccctatgaattgttgtttaatgaactgcccaaatatgaccaattaagaaattttggttgcttggtttttgctagtactctcactgccaacagaaacaaattcacccctgggctcgaacttgtattttcatgggatatcccaaaggcatcaaaggttacaaacttcatgggatatattttccatgaaagaatatatcattttcatcgcctgaacataactaaagttattattgatcctttttccaatattgtttttccatctcaaagcatatctgatacttatgttcagcaatttcctcctattgttcacaatgatacttgcactaaccattctcctcaggtcaataattcacccttggcaactaatgtgccatatgaaccctcggttcctgctgctactgctgatgataacagcactacagaaagttccactgatgctgcaatggataatgacactacagactcaacaaacgaaactcagcatatcctcagacgcaccagcagagtcatcaaacctcctgcctacctgtgtgacttaaatgtcattctgtcatacaagacaaacattctacacctcatactcttcacaaatttatatcttatgataaactttctgactctcataaagctttcatctctgttatcacagctctttatgaaccaacaaattataaccaagcaactcaactcaagatctggaatcaagcaatgaacaatgaattatttgctcttctaaaaaataagacttggacctatgtcaaacttcctcccaataagaaagcaatcggctgccgatgggtatacaagatcaaactcaa

SEQ ID NO: 226540 - DNA, 1593 bp, Cannabis indica
aattttaattaaataaatagattaagataagtatcaaaagaaaatacactccttaaaataatgagctttagttataaggatattcggtctccattgttggttctacacagttcttgatttagagatccactccaaggaaaacttgttgatagatcaaggaggatctattagcaaccttacaaacccggttctttaaaactatgatagactttccttgcccaaaggaggacatgccttcccgcgaaggtataatggcaagaacagccaaacaaccagcagcatggggggccgactaaggatcttaggctcaacgatatcccccatcaaccagcctttggctggccagacacctataggagtccccctagctagctagaggagtgcactcccttcccgaggtgagcaagcgactcaaaagccaatccttaactgactaggactgggaatgagtggaaagacccaaagtgacaattggagaagtgaaattgatcacttcaggtacttagatccaccaaactccagtaattggccatgcatagctgactagtgaacgcctagccggccagggccaacatccttacctaggagtggccggccaaggtctctaatacaatagccaacctccaccatacactctctcatagtatggctggctagaccctatcacgtcagggtctataacccctctaaggagggccagtcagtcaaatccttacaacaacatatccttctgtgtaagcacagttggaccaactaagggacatgattcaaggcatagttggtccgaaacctttagatcttgaactagacaggtcaaggagatcaccattctcgacatacataaatttcttgcccttgcccaaattcaagatgccggtatggaagatgtttatcaaacataaagacctattggcacacatcaaatacttcgagatgcaacttgatctcgagaggttactggtgatgtgttatagccacttcgctagaaacagctcaacaatggtacttcaaactggcctcaggaggattcaactcttgggccgagttctctcaagaattttacacataattcttttcctcgaggcttgcaccattgcagctagaagatcttatcaaagtcaaacaacgacaaggagaacctttaaaggactacatccagaggttcatggccgaggccacgaaggtcaaaggccttacaaaggagggccgatatacaaccatactggggggcattctctcattgagtgacttctggaaagacatccgaaggatctcaaccaacaacatgaaagagttcctcgatagagctgatggctttatcaaacttgaagaagctatacagcaggcgcagacagagcatgtcaacaataggcagccacaagacatcatccagtctcatgacttgccaggcgctcaagtaggtaccagcaactctacccaaatttctagtggcaagaacactagaaacaagcctaacactaacaactctgggagaaacagtggcaaaaaggggaatttcaacacttctcccatgccacaaaatcagatggacaaggaggagaagtatacctgcttcaccctcctaacagagaa

SEQ ID NO: 226541 - DNA, 2194 bp, Cannabis indica
atacttttatttattgttttgaacagtttttcacaaaaaaaaaatgatccccccaacctcgactaaagttttggcaaagtttctctctttttatagtaaaaatggagtgtatacacgtacccaataataagaatgaattactatttactcaatttataaactataatcattatgtaggagagatggtcgagtagttcaaggcgtagcattggaaccgctatgtaggcttttgtttaccgagggatcgaatccctctctttccgtatccttcacccaattcaccgatgttatttaccgtaatatatcgaatcaaataccaatggatgccaatattccaacaccaatagttagacctttcgttgatgtggattctcaagtcctaactcaaatttttgtgatatgaaaaatactgaaaagtaatggacaaggaatgaaatcccccaagttagtttaattaggtttaagtctgacgagaataatattcgacaactagcaattcatttattttcaaaccaacccatttactatctattatttgattgaccaatccttgatattggaatgggttaaaagtcaaatgttttggcaattcctaatactagctactagttggaggagctttgttggaccaccattcttcattgtctatgtacacattatgaacccactgttgagttttgtgccctaaataaatctcgtttcaatataatcatatttactaattaataaaagatcaaaaatcattttatgttgcatggttcacatgatttatttcatgattatatgtttcatgtataaattctattaaatccagagcatatagttattcatgattatagtgttgtcaacacaatagaatataatcatgattatatgctttaaagtttatgtcctttgatttttcagtacctaacatgataatcagcgataaagtatacttacacattggataagtgttataaccttttgggtattggcaaagtatgctaggatgggatgtatagagtatacatcagattggaccaatattaaacttagataagatatcataaacttaccgttatatctatctaagtcaatatcagttagttgatcttaagtcaatagatcttaatcctgttaatcctgatatggttagattttatctcattgttctttctactagcaaagattacgagataactctatacacaacttcaacaagacccattacttttagataaggataaaagacgattattaacaattattctatttttgacatgttgtaaatatgaaacatggggattgtctacattttatgaataggtatctagataagattaaaagagaataattgtccttcctaaaaattctataaacgtagaatagggacaaaaaatcttttgggaggaaaactttgagagattaagtataggaaatatccaaaaatactatcatgtatcctaaaacactataaatgaacaatcaaatactcatggaatatgtagattttaactacaaaactacgtaaaaatttcttttgtcttatttatatttggttataattaatattttaatttcatttataatgcttcattattgtaaccaatttttgttttcacaactctcctcatatttttttttctctcttacatgattaataaaagtagtattttgttatgtttcgtagtttattaaaagttgacctacaaatgatttgcatattgcaacgagatcgatgtcttgtcatttttctgttattttgtagtgatctttttgttgttttcatgttgttgttaggtgttctatagttgtttccatattgttgttaggtgttctatagttgttttatagttatttttctgtaatttttatatattttttttattgtaatacaattattgtttactttatgttcataatttgttatggtgtatatttttagtttattctagaaaaaaattttgtcatatatgtgtatatgttttgttatttttatattgtattttagttgtttttaagtggtttataaaaaaactttgttctatatttttttttagttttatttttatttatgtgcattttttatggtgtatatttatagtttattcttgagattttttttatatgtacgttgttttgtaaatgtagatacatatatatatactaggtaggagttacgtgccgaggcacgtaaagattagttttaggt

SEQ ID NO: 226542 - DNA, 1373 bp, Cannabis indica
tttcatttattttcttataaaaatacatgtattttttgttccactatttctaatatttttcaagaaatcgctatctttctccatattttaaaaataacaaattatgtttctaatttcaaaatattatattttagattatatcacttaataagtacaatatatatatgtctgaaaagattataaaatttgggcaacaccgcgcaaagcgcgacttagttccctagttatttaaataaatgaatagaataaaaccacaagggggtttttgtaacgatttttatagttgatgtgagatttttgtaacagaaaaaaattcaagagacaaaactctacaaaagtcatagtttggaggtataaatcttatttattctattaagaaatatgacaatgtacaagccgaaagcaaatattgctcctacttatttgtattccaatgttatgttaagaattaaggtgtgtttgaaaatatttgtgtaattactactctaataattacactatttaataattatattctattttaaaattcaagatgtattaagatatgaaataataataacttataaatttctaatattttatttaataaaatgttgactaattaatatataaaaaaattaatacttacacatgacaataatatttttttaataattaatatttaaaattaaaagtttttcgagtgtgttttgaaaaaactgtgtaattacaaaacaaaaaagtaaaattttataattacaattaattacaccaaattctaattccctcttgtctttctaaatatgcccagcccaaatctcaatagggtataagaattggagagattgcctcttaattaaagggaaaattacacacaccattgactttttcctttttcttacttttatactgttaggcggtataatttacatttatactgtatagttttataacttttatacagttgggcttcaagatgtattttcttgtcactttaaaatatgttttttttttttttttaaattataaaagttgatgggaaaattagttgtcacgtcaatcagtgacatatatatatatttttttaaaaaaaattaattataaaagttttattgtattgaaaaagttttatgtgatgtgttgtcacttttgtgaaatatttttttaaaaaatataatcatgaaaaacttaattttcaaacgttattttttttggtaatgtataatagttttcattatttactttcttcttcatttattttctttcttttttcattgtatttgggctctctctccactattcatcttgttcttcgtttttttcttttttttcccaagtctacaacattatccaaataaaagctaaccctctcgttttgtagtaggtaacaaaaa

SEQ ID NO: 226543 - DNA, 1832 bp, Cannabis indica
aattacgtgtaatttaaatacacatgagttaaacttaattcaaatcaaaaaattatcatgttatttgcgagtttaactagatttcaacttatactattatttttcgtgtgaaatccgtatcatgacactacaacaaattcgatcattatcgacggattttttagcgctggatcaaattcgcagctaataatagtggtattaggagccgaccacaatgtacgccgctaatggggcggtttagttttcgtgttaaatccgtatggtgacttaaattactacactaccaatactaataagtaatatatatgtggaaagtttatttcctcataaataatgaagaaatataaataaaaacaattagtgaccacaatagcataatttgtctccaaaaattgaggcagcctcaaatattgatgtgattcaatcaaaaatgatttgtgaaacaaagtgacctctccaccaataatcacatatagttcactttctaccattagaggtgtgaattaatttttctcaaaccaacaattttaagttcatgtgtttctttgtctttatccgttattagaacactccatcaatttgtttacttttattttttaaaaatattttactacaactatatatacttttttcgattttatttcaattactttttttaatataataatcaatttcattactgaaaattaaataatacattgattattaaataaggaggaaatttcttccaacctaaaacctcgttttctatttatagtgcataatctcaccatgttttgcggtattaccatttcacattacatgttgaagacatacacccggaaagatagataacaaggacctaatagaactaaaaaataacttcacccgaacacaacatgaagaaaagaaaggctaaaatataattatatattattttaaatatcatcatacatcaatttttattttattttatttatatcatcgaaatattatatattatttattttatatattttatctaacaattactaatattcctaaatcttttaatatttacactatctatttatatataatgtcaaaatataattatattttattttaaaatattctgaatttgtaaaataaattaaaatataaattaattaaaaagataaaatataagtttcaaaatatattataagaatattggtaaatataaatagctaaaaaatattccaaataagagaaataaagacactgtttggctttacagtttaaaaactgttttctattttttaaaattgaaaacagtttttaaaaactattaggagtcgttttgacaaaaatttttaaaaactgttttttaaaaattgagttttaaaaaactagaaaacagaaaacatcaaaatgcttttttttcaattttcaaaaatatttttttttgtctaacatattatattttatattttgctcacatattcggatcttagacccgaaaccatacccgaacctagatccaaatgggttaatgtcatagtatggtgctaaaatattaattttttttcctaagaaaaaatctaaaaacagtttttaaaaagttgtgccaaacaccattaaatttttaaaatgactaaaaactactttctattctcacttttaaaagcacaattttaaaaactgaaaactgaaaacacagccaaacaagctcaaatatattgtaggttttttttttttttgagatttaactatactatcatattttgtatataatacatcatttgatatcctagggcaatacttttacaccttctcttctctctataaatgtacatatttactatttaggtatttcagctctaatgaggatg

SEQ ID NO: 226544 - DNA, 2099 bp, Cannabis indica
gctacaaactgctttttaaacatcgcttgcagatctctcaaattgtggactgatctcggagataatctcttctaccagacctccgtagacttatttagtgttagtgaaagcataaacaatttgctcgtcactagccttggaaacttgcataatgcgattgtatttggatagggggtccctggggtccttcattccttcatacagttccatctgtggcattctaaagcgtttcgacagtagtgcttctatgattcttttcacacaaggctccgtatcttcttcctcagagtttgatacaatgtggctttgcttcctagagatcttttttgtgattttcatcaactcctcaactttgcattccagtcgttgagtcttgtcgcatgaagattctcttatgcgaacacgatctttgatatggtttctcagatcgtttccacggggtctggctttttctgctttggctctttcttttttctcgttcaataatcttctttaaagatcaaccatggagagacttccactattgcaaactaatactggatatacctcattgtcatcatcatcatgattattagaatcactgagatgatgcttctccttgcaggaccctgaagcatggtttcctttcttcttctattgaggttggtcgacagttttagacttttgatgttgcttggtggaaggagtcttctatagattttcaacagctatccatttccctttgtctttacgaagacttgaagttttaggatcttttgtatctaccctctcaagagcatcaattgttggagaagcttgtacatcgggagtccctttggttagggtggtaatcacgacctccattctagtcatctttgtgagtagtaactcgttgaattgatcccgacgagttaattgtctttctgccaattgatgttttgtagccataataacaatggggtctgaatcatcaagttgattcttttctccaacattatcagcatcagatttgttctgaggatcatcttcaagcatatctttgggtgtaccctgagaattttcctcaacgtcgtcagaactactttctccagattttgcatcttcgattattggatcgtctcgattctgattttcatcatggtgacctttctggcgaatgttcgccttgtgtggtcatcactgttccatgctttggtgctaggaccaataaaataaagatcagactttgttcgggtgagtaccatgattacttgagtgcaatctccagatggtatcactgcttccttcagctctcaataaaagtaccataatatttatcgaaatttttagaaaactaattataaataattagaattgaagaaataaaaaaatttaaaagagaaaaaacaaaaaagacacaaacaatttttatgtggttgggatgttaactagccttagtccacgggtcgatgttattatgtaactctttagcttgaaaaggctttgggaaatacaatgaatgtaagttctcaagtttgtctgagcatgtattgccagagaattcaacacttagtccatacgattcacaggatatttatagtattttgagaaatacacttagtttctcttttccctctattgtggagtttataattaattacacatttgggctgcctcttgatttccagcccaccaaggataagatatgctgactaggcagatggaattcggttggatttagtcaaaaccgtgtactatgatcgtgggtaattaactgtgaattaatttcctgatatctattgtaggaagttttcccttttggcttgatgtgatcttctgtccagatttggcaaacgaatatttccttatttgtgtgcagaaataaaaagggaaatcggatcagtcttctaggaacacactgtcttaccctttcgatctcatggtattggacctgcttccagacacgagctatcaataacagaaggttatccaatcacggaactgaagtatattcctggaaggtcttgacccactttatttttttgggggacccactggtgggccttggaggttgacctagattctatgtgtctactaccgaaaaacgcgaataataattacttaactacttattcattctc

SEQ ID NO: 226545 - DNA, 2943 bp, Cannabis indica
aataatagaacatcatctgcaaatgccaggtatttcaacctaagttgagagcacctatcatggaaatgaaagtcctccttctcaccaatcttcttcatgagtctagaaaggtattccatacccaagacatacaatagagggtacatggggtccccctacctaaggcctctactagcttcaaataaaccatgcaaggatccattgaacataagagagaacttaggagaggtgatacaattcattgtaaggtgaatgaccttcctagggaagtttaaaccttctcgcatttcttccaagaactcccattcaatggtgtcatatgctttttgaagatcaaacttgatcatacaactcagtttgttagctttcctgttatagtgtcttactaagtcctgacatatcatgatgttatgccctataaatctccccttaataaatcctccttgagaatgagaattatttcaggaagaatgtctctatagaactcaaaagcttagttgtaatcttatagataacattgcaacaagcaattggtctaaaatctttgacagtattagggcatttattttttggaaccaaggtaataattgttgaattaagtattttacctgaatccaaaaaggaaatcacaacttgacatatgtcatccccaatagtctcccaattgtcttgaaaaaaactaatagagaattcatcatgacctggagatttgtttccaggaatgctaaaggctgtcttcttcgcctcctctctagaaaactcttgtaccagcattttattgttatgcaataacataggtcctctggtaagtattctgttatgcactttccttcgattcaccattttggaaccaagcatgtccttgtagaaggccaagaatgcatcagtattgagtgcagggtcatgaactcgattcccatcttgagtttcaattgataaaatgtgattctgccttactctatgcttaatgcaagcatggaacaaagctaaattgcaatctccattttcaatccaagcaattttggccttttgttgtaggaaagaagaatagtctttttgaactttgatcaacacttttctagcctccttctccttcctgtgtaactcactgttcaatggttgttgctgcagttgattctgccaattgtccaagtctactttagccttactaacaacactttgtaagtctgagaacctctccttattaatctccttaagtttggctttaaagtgcttcatcttggttaccacttgaaacatctttgaccctcttattgacatactccaaacctcctttaaggaagcttcaaacttaggatgtgacttccacattcgaaagtatttgaaaggctttttgccactcaccaaaaccaggatgaagtgttaagataccaggagagtggtaaaaaaggccttcattaagaaacacaacttcagcatactcaaatctattaatccaggattgattggctaaaatcctatcaatcttagaatagattatatcctctccaggctgtttattagtccatgtataaaagttaccactaaacttgacatcctccaaattacaagtgttgacacactgcaggaaatcagaatcaggataagatttaactctttgaccaatcctctcctccttagcaagtatatcattaaaatcacctatgagtaaccaattgtctacagtagctagctcacacaagtccttccagaaaagcttcctgtcaatccgattattagaagcataaaccacagttaagaaactgttaaagccatccactgttgacatttttaaatgcattaattgactagtacatttaataatatcaacagtaaatctcaaaggattccaagaaattacaatttccccctgcatgccatgctatgttagaagagaaactccaacccataaaaacattcgagtacaaggtcccaagttttggagcctttactctagtctcgagaagaccaacaaagtcaacattttgaacatgaataaattgctttatttgatgttgtttatgttgattgttggctcctcgaacattccaacataacaacttatcatttgaaagagagggttctcccctcttattatcttgacctctatttttgacaagttctcaactacttcagtggtttcttcaagtgtctgaaaagaattccttatagcagtcatatttttagcaccagaatgtgcctcagtttgctctttccctgctggtattttattccttgtcaccttcacaaacccctcctcatcagtcggaacctgcttcctattgtcctgtttcacaacccattgtggtttccgatttgaatgtttcctacagttagcagcagtatgccctaaacaagagcaatgggaacatgctactggtttccattcatatttcacccccactgtggtatttgaaccaaattcattatcgaattccaacatgtctggaaaatcctgatccatcaacacctcaaccaagaccctagggtagttcaacctttctctttccctagtcacagagtctaacataaccggcttccctatctcacccacaatcttaaacagagtcctctggccccagtatttcaattcaagctcctccaattgaacccaaattggcacacacttcacatcttcttttttaaaatttacattaggatcccaaggcttcattataaccggtcgtctattaaagaaaatgtaccctccattcaatatctgatctctgtgttcaagagagctaaatcgaatgataaagactccatacggcaactatttcactttatctatcttatctttccatattctatttacaaatccttcaagaatatgctgttgcgaaatttatgaacactacgcaagtatacgcagtcaagtaatagctcacacaagtgaggtcgaaccacagggaatttgattaattactactaaactatacttat

SEQ ID NO: 226546 - DNA, 1279 bp, Cannabis indica
gtaagccataatttattaatctagtaaaaaaaaagcaaaaagtttgaaacatagaaatactaaattcataacagatcctcttctcttctctgccccaagtgtgagctgaaaagtggaaacaaaatcttataaacaatcaaagcaaattcttatgaatttctcatattatttctccattagatctttaactaaaaagttgaagaaaccactatgttttgtaacttgtctatttttgctagccaaggaatatttttatcatcaaaaggtccactacataagatgaatgtagaaacaaagaataggcacatacatagggcctacacaaaaatttgtcttgctctaggatcctttatcgacaactttttttaaaatctttatcactgcaagtttaccttagccatggcttgcaacagatgaattctacgaaactctgtcaaccagaatggtgagcttgccattggagagaaccatggaattaaaatagagagtctaaaaaataactatgaatacaaacctctcatcagataaaagcatggggtttaaagtaattaataatagacaaacatctagcttgaaataattcgttgaaacacatgtcaaaaagaaaacaaaattgtaggtccaaaaaagccctcgaaatttgattgaaaggaataacccatttttgtaaacacataaatgctattttggaatgctaacgacaaacataaggattgtttgtattttactttgcttttgggtggtgtgagaagtgctttataatgttgtgtatttcttaaatacaaatatggcttgagaagatatgacttttctatttaatgaaagttttttgtcaattttgtgaagtgttgttgttcttttttacttcccccaattttgtgtatcaaactaatattaggcagaataataaaatattattaagaaaactaagactattggcaaatgcctatagaggatgcctcaagtcctactatgaaagttttgaagccttcttatcagctaaaaaagaaaagaaacatcttctaactgtttctgatctgattccttctgatctaaagacaaagggctccaaataaacttggttatgtattaaaatagaatcatatcttcaataattataaccaaacactacaaatacaaacatggagtgtaacaactcaatgtgtatactctaaattcttatacacaatacatcaaacaaaacaatataaaaaaaaaaatatcataatacacatatacatatatgtacctctttggactattaaaaaaccacaaacag

SEQ ID NO: 226547 - DNA, 1304 bp, Cannabis indica
cgccacacaaagcttggattgtttcctaaagaagccgagaggtatgtttcattggaaaaatatcttgccttaaaaattcgagccactaaggactcgggtctttttaaaaaacgccaaccttgttttcccaaaagagccaaattaaagtcatggagatttcgaaaggcaagacctccattgttcttgctattgcacatacgatcccaagacatccaaggaatccctttgttttccttcgaagagctcttccaccaaaatctcgccatggaactctctatatctctgctaatctccaacggaagtaagaacacattcatagcgtagctaggaagagcttgcgctaccgacttgattaacacttccttaccagcacgagaaagaaccttcgaatcccaaccttgaagttttttcctgactctatctttcaggaaacccaaaacagctgacttgtttcttcccatcgtactggggaggcccagatacatactcctttcatctgcttgtggcatttgtaacagagtattgatatcctcccgaacatgagttgttgtattggtgctatagaagattgaagatttccccaagtttactttctgacctgaagcacattcaaattggcgaagaagatctttgattcgattggcttcctgaagggtggctttgcagtacagataactatcgtcagcgaaaagcatatgggacactttaggagccccattcgccactttacatccatgaataaaacccattgcctcatatcttctaatcaaagctgatagtccttccgcacacaaaataaagatataaggtgataaaggatcaccttggcggataccacgggatggtagaatcggccccattgttcttcctccatgaatcacgttgtaccttgccgaacccacacacttcatcaccaaagaaatccaatgatccgaaaagccaatctttctaagaactgactctaaaaagctccattcaatacgatcataggctttgctgagatccagttttagagccataaaaccatccttgccttttcttttcctcttcaagtagtggagcacctcaaaagaaaccatgatattatcagttataagtctccccgggatgaacgcactttgagattctgaaacaatttgatccatgtacggcttcatcctattagccattactttagtaatgatcttatatagaacattacataaagcaataggtctaagatcaaccatactttcaggaaatttctttttcggaatcaacacaacattagcatccccacaagctgaatcaagctctcctgtagt

SEQ ID NO: 226548 - DNA, 2005 bp, Cannabis indica
aaagagttttatttagggcataaaacccaacacagccatttgctcttgaacagaaatatcacgacattcatcaactaaaatagaaacattgaatccccaattcctttaataacgacatctagaatttcaaatgctacagcccgtgtaatatctttctgaatatcaggtgatgttaattttaaatgctctggagcattgctcaatgaaactgctttgatgtcatcatcatgatcgaaaagaaattttagaatcacaagaaagttaccttgattattcgagtcttcagatccatcatcaccacgaaaagcaaacccttgtcataatagcaaacaaatgcaatcaaccactgcttccaaacgagttcaatactcactacgagcatgctctgattgttttacaaaaaatgtttgaatatgttgtttttcactcattaatgattcacacattttcctagctgtattgtgagcactaaaaggttttccaacatgagtaagaagccttgattttgcaagtttgaaatttctgaatcctttactaacaaatgcatcatcacctgattgctctccaacatcttctttaaacagatagcaatataaacaaaaagttgcatcctttgatacattataatcaagcaaatcctgatagtctgcataccaagcaccattgaaggcccttgattgaggtccaaccttaattttctgatagaaatggcttgagatgaggttgacaagggcctttttgcacatatgctcgtcaaactttatcatgaacttttgaaggatggtctaaaattggtattctcaacctggggtcactttcaagttcttcaagatatgtgttaacatccacacgacttggtttacagttccatcactctttcccatagaagttgaagactcttgtatacttttgaaatacctcttcatatatgtttgtagcaaatatgtgaaagattaatattatgatttataattataattatgaattaaaaaatcctacttggattatgaaatataaaataatgatagcaaacaaataaaaaaagaatcaaccaaatataaaacacacaagatatactcaatagacaataaatattattaaaagttgttatttcttgtttctatattttcaatgaaaaattatataattttttaaacaaaaaaaataaaaaatactatatcatatccatataaatctagattcaagaaataataatcttcataaacataaaaaatggcaatgacttattaaaataacataaaaaaaaattaaccactcaaactcaaaaagcattaaaaaaaaatttgtcttcttcttgttactttgtcttatacgtactaatatcatagaaaaaaaattatctcttaatttatttgattaaaaaattgaaagaaaaataaaaatgacttactattataattagccatttagttgtgcaatgctcttttaaaagtggaaattagatggtataccctttttaatttggtgtctgtcatttttacctttggtccaaatttctttaatttataccttctttttcattctttcttccaattatatcccactattttcacacttttctaaattcacattaacttttcccaatctgatgctttcaacaaaaaaacaactctagacttcatagtcatctccttccttggatttgtactttttaattctctctcaaagcttcgcagccatcaataacaatcgcagccgtcttgaggttcaaaccacaccgtagccataaactcccttacgcagctacaacggcaagtagtgctactgtcgttgtctctcttcttcgccgactcttccttactttcaagaatttgtatggtggagacctactgccggtgtttatagcagaggcggtgatgatgatgactttgagaaagaaggaaaggagttgtgttgcaagggtagtttaggaaagttaattaaaaaacaggtacaaattaactaaaatacttttgagggtaattttggttaattaacccaaaaa

SEQ ID NO: 226549 - DNA, 2921 bp, Cannabis indica
tatatttattctttctaaaattaggggattttaatggtgtactttctagaattagctatttatatttattaggtcaaattttaagttatatatatatatgcattccttctctttgagataataaaacacagaaaaatattcaaaattcacatcccgtaatttattttgtcaagaatcaatgaatataaaatattcatttatcttaaaataaattacattattttattccataaataaaatgtattataatattctcccactaggttagtatttaaactaaaatattcaaacctaacattcatcattatataataaacgtatgaatcatactgatacatcctcattatatgtcgagtattattgtaacaccctaactaataaaggcgtgctagggtgatttttaacgtattgtgtagctcattactaataaacgaggttattaaaaattgtgattaatgaaaatttgcttatttaattagaaacttaaagtattacatatagaaaatcctaggatctcgcttacaaaatacatttataaaattttgctattcatgtacaaaagttttgtcgccaagcgactatacagcaaaacccttgatgtcccaaagatcgtacgctccaagcctaaccgccctgacatgtacaatcctcacctactcgttctcacagctcctcaacttaagccttgcccttacctacacatggaaatagcacagtgagtcgacagactcagtaagaaaagcataacaaataacatactaatatcccgggttataacctggcgctcatacacccgatcataaacttatccacgtgtcccacaagatactgagtctagaacattcatacgacgatactgtcgaccataatgctagcctatactcaatatgctagtcatactctagccatattgatgtgacagcatcgatcagtatttaagccaacatacatttatcagtaatcagtaagtaatcagtacaactctatgtatactattactgctatcaatggaatctaacaggcataaacaacatgtacgctaaacgtgtaataacatatgcatgacattatactaatcttaactcaatgtcgaattcaagtgtgtcggtcaacttgagtggagcaactgctcggtgaattacaggctcctaaatcacatcgataacaacatgcataagtgacatcctaaatcaaaaccaggacttaggttttaaaccgaaaacctatccacaacaacttaatatggcaataccctaaactagcatggaactaacaaaccagaaacttgaaactaacgcgacgacaacctacatttttcgggaaccctgctgcaaaaaccggttagccgattttagaggtacctgtaataccggttagccagttttccccagaaaaaccaaacaattacaacccctaaccaaatcgtttccataccttaccaaaccttccagacctgcataatatatcccaatagacgtaaagcaagcaataaaactaatacccaagctcataaatgaatttaccattaaagctccaagtttgagttctaaaactcaaaacatgattaaacttactaacaaccattgaaccaagcttaaatcaatatttctaaacataatttaacttttgaaatcaataataaacactaacagcaactacagcagctataaacttaaaaacatgcataatccatttcaaaaaatttaaggaacttaagaaaatgaagacaagagtttacctagagcttaagaacactcaaatcctgctcaaactagcttgaatggaggaaaaatatagcaaaccctagctgcttctatgtggattcgaaagagagagagatagttgagagagaaaatgctttctttttttcaaattttttattttttgtaaaattgataaaaggttgctttataaccaaataaaatcagcttataactcataaaaattaaaattatcaattaaaattaagtccactaaaggaaaaaacacagatgggaaaaaagaccaaattgtccttgcccacactaaaccatcataaaatcacttaggggtatttttggtaaattctaaaatcttgactattcccgacattcccaatgtctcactatactgtcccgctatactaaaaatattaggatgtgattctaatagccaaacaccgcgttccaatgttgtctggcacaaaacatgcaaaattataaaatttctatagatgacatataaaatgcattctgaattcaaataaatcatcataaattaataattcaaaatcaataaataattttcataattaaattctaattatatgctaatttctatgttagagcttagcgataaagagctctcatgtctgattctaactcccaggtggcttcctccaccttgctatttctctagagtactttaaccaaagctatggtcttgttccgaagaaccttatcctttctgtcaaggatctgaactggctgttcctcatatgacatatgcggttgcagctcaagatttacatagctaagtacatgagcagggtctgaaacgtacttccttagcatagagacatggaatactttgtgaactgctgaaagagcttgtggcaaagctaatcgatatgccacttgtccaaccttctcgagaatctcgaaaggtcctgtaaatatagggcataacttgcctcttttcccgaaacgcttgatccctttcattggagacacccgtaggaacacatgatcccctactttaaactctacatttctacatttcgaatctgcataactcttttgcctgctctgagaagcaagcattctggccttaatcttctcagttgcttcattagtccattgcactaattctgaacctaggtatttcttctccccagtctcatcccagtgaatgggagatctacactttctgccgtataataa

SEQ ID NO: 226550 - DNA, 1344 bp, Cannabis indica
tagaattaagtacacatgtcatgggatctttttggccgtgcataccatgcgccttgaaaaaaatgcatgaagcttagggatgcgagatgacagcaggttcatgtcaatggagttttcaaggagaatatcatcattagacgacctcgatcccgcacacggccttaaatgcaacccttttgtattcccagaccgttagattctttttgtgttttataagatttaatgtaggctatcagattaaaagcacgtggatcgccatcttgggtataaatagagcaagcattgactagttaccattatctccacttcgaatttttgagttcaaaatttctagagagaaaaaatcgcctaagagaggaaaaaaccctatatcaattttgacatgtgtcaaatttagaccacattatacattaccattggagttcaattttatgaacgtgagctaaaaaatacatatacacaacatttatagcactctatttgaaatgctctaagtttaagtggacatataactacgagaaatgctaaaaggtactagtgatgcctactgcctagtacctttcaaagtgtaatattattattggtgcaattaattagtgagttcaatataatttactataataacttttataaagtattgttaactaatcacaaggcactatcagtgcctaatagcaatgctcatatagctaccgttggataacaaaaataaacttccttcctaaatccaacggctaaaatagttacagttacattactttcctatcgaggaatccatctaccctttcagtggacatataactacgagaagtgctaaaagctaccagtggtactacacctttcaagttacaatatcactattggtaaaattaagtattgagtcttatctaatttaatataataactagtactgtaagttcgtgcgtgtcgtgctagttcgacccatatttatccgtgctttttaaaaaacgggtcgtgtcgtgccgtgccacaaaaaaatataaagtcgtgccatgtcgtgctaatatttttaaagggtaggcccaacacgatctgtaggcttggtatttttgtgtcgtgctttgttcttaccggctcgtatttcttaaataggtcagcctcttttcatatatgagtttaaattcgtgctttactttttcatattttttaggagaattaccacatataccaattttaaacttttttgtttaaaaaaaaattacagtatgtgttgctcaggtagtttctatgtgaattgctatgtaaatttagtaacaatttaagttgctctgttggttgctatgtggatttccgtaaaaaaacaaaaaaaaaaaatccgctttg

SEQ ID NO: 226551 - DNA, 1115 bp, Cannabis indica
gtacgtcgagatctacttcccatctcgcattttgctactcgactactatgtccacgtcctctacttaagtaagtgtgcatattttctctatccgcgcaagaaggcgttgcggatggctcggaggagaccattagacctaggttgattcctaggattcctttcattatcacgaggaaatccctgatttcccggttgaggtttccttgcttcttcattcatgcgagatgattctggcatgttagtttgttcattccctttgttcgtaaattcatgggaagtccatggaacatcacatcgatgttcttgattccttgtattattttggttaggttgattatccattgagacttcccttgtattcccaggttgttcctcctgagtatttgggggattccctagcttattttcctgcctcctggtcctagagcctcgaggtcttcctcgtggtctccttacagttggatcaggttggttctgaggaactgttccttgtgcagccctggtagccgcagcttctcgctctaattcagcatttcgtcggtttgattaagccaggcattgtcgaagttgcctattttccaattctaccagcagtacgtatctggtaggatcataggcgtcttcactcattctttctaggatttgatctccaacatcattaaaattaccattgttcctccctgaacgtggtgtttcagatgtgttggttttttgagatcccataggttctttgctaggacgatcggttatttcctcaggacgattatcgtcgtgttgattgttataagccaattaatatgagttcgtatttgtgtttataaggagggatttttctgagtttttatcaccaaggctttcaatgaaagcaccaaactattaacatagatttttgttaactaaataaatagttttttgcaataaatgcattacagaatttaatgataataaagaacactaaatattttacatggttttgtagttaaaatcttcatactccacgagtccttattattaagaatattttcaggaatacagaatacaaatctcgatatttgaaaataatagaatttctctctaatttcttgtcgtcccccatggattctgtccctatttat

SEQ ID NO: 226552 - DNA, 1711 bp, Cannabis indica
ttatttgggttattgggttggttaggctttcatttccttgatttctcacatactgcctaaagtatcctcacaagattaaactttcaatctcatctttcagttaacggcattcgtcgatggtatgcccaatatccttgcggaaacgacaatattttgttgaatctcactcgttcctcgcgtgtctcatcgactctggtctgtggaatgtgaccctgttttcattggcgaggtagatgttctcacgagtttcattaaattcagtatatatcgaatatatgggtacctatttctcatgcttttttgtgtttctttttgtccttggatgattcttttgactcatcctttcttttggtatttgatccactaaggtattttacctttgtggtcacgatgcttgttgttgcaatacttgtgttgggtttgtctcctaatagcttcatttcattatgtgcttcctctttacgcacaaagatttgtgctctttcattaaattcattaatattcctcatagggcgaccttggaggtcatcacataattcacccttgctgtagacaagtcagttgtgattccagccagaagggttgttaacagaatactgtcgtttaggtttttgacttttacagtagttgtactaaagcaccttaagtacgctttaagatattctcttggttgttattttattttggtcaaagatgacgcctttgttcaacggtctcttgcaacctgaaactgctttttgaaatccttcgacaactgttcccaggaggttatggaatgattggtgaatttatgttcatagttacttacggacctagtcttgagtagttctcagactagtaactttgtgagttatttatgctctcctggtcagcaaaataacatcgagatctactttcatctcgtgtttgtctactcgagctactatgcccacgggatcatagttctcttgagcttgagcttgcttcatctcgcgctggtcttcttctttagaagagattagacacgtgtcccctactcaagaaaatgtgcatattttctctatccgcgcgagaaggccattttggatgtctcgggggaaggccactagacctaggttggtttctaagatttttttcattatcatgatgaaatccttggtttcttggtcaattttgcgtcgcctcttcattcatgcgagatgattttggcataatagttcgttctttcccttggttcgtaaatccatgggaagttcgtggaccatcacatcaatgttcatggttccttgtattacttgggttaggttgattatccattgggacatcccttgtattcccaaattgttcctcctggatatttagggattcccttggttatcctcctgcctcttggtcctggaaccccgaggtctccttgtagttggatcaggttggttttgagggactgttccctgtgtagccatggtcgccgcagcttctcgctctaactcagcgtttcctcagtttaattcagtcaggcgttgttaaaattgcctatttttcaattctactagtggtatgtatttggtaggatcataggcatcctcactctttctttttgggatttgatcaccatcagcattgaaattaacatcgttcctccgtgaatgcggtatttcaaaagtgttggttctatgagatcccataggttctttgtcaggacaatgagtttttttcctcaggatgatcaccg

SEQ ID NO: 226553 - DNA, 1774 bp, Cannabis indica
gagctccccttttataagtaaaggatgcccacaaaaatagaagaaaatacaaataagatgtttttgactattgatgatgatctaatggtgaaaattagctcttagtggtgatgaccattttttggagcctgacgagtcccgctgcgggtaactcggagcttattttcgtaactctcttggggtgaaattcaacgacgatagcttcaaaattattattggagtgtgggacgtgacttgatagagcattgaattagctttaaaaatgcaagttgaattgcgtcaatcagatcaaaattgagtgagatatgattgttttactaaagacagttcatgactcagtgctcaggttgacatgcgcccaggttgacatatgacgtcaacttaggcactaggtaagtgtaaaaacatccaagggatatactttaagatgcctaagtgatattttgacatcacttagtcagtttctgtgttctagcaaagctggtcactagctctcgaagatgttgatgttccacagaaatgagagactcgaaactcttcatttctgaatgatttggaaatgagaaatgcaaagttgtgaatttgatttctctgacttcatggatatttgctattgtaaaaaactagacagacggtcgaaatggcatcataattggataagtataacccagtgcactgagccatttgtcaacctgggcactgggtgcttactaccgagctcctgggatctcgttttttatactttcaaggcttctaagcttgaggacgagatctgtttttgactattatggattcaatagttgcatcaaatttgacatttgagtaataaaaggcaaggtcctaggttgattgtcaacttgggcgatgggccccttttctaggagcttgagtttgtggttttctccccgagctagttttcttaatttttcattatttatgatgatggaaaaaattcctgaaacactttttattgaacttgattagaaatagcccaagttgacaatatatcaacctgggcgctgggcccagccctgggagtcaacctaagcgcaaggcccagtcctagatgtcaactagggtgttgggtcctagttttgccccttcaaaaattttgtttagtccccataaaaaaataaaaattttgtttatacatcatactttatgtaactttcctaatctaaaattaatggaagaacaaaacaagttctaattttgtcaaataatattgaccaaaattgaaaaataaaataagttcaagaaccaaatatatttatatataatatatatggcaatgatgtttttattttagaggtaaacagattaaccaagagaaattgagaatggtttatcttccaaaacataacgatacatacatatataatttggcaagctataactctcggactcttgctgcatctagttttgttgggaagaaatatggatattcttgacaaagttttgagtacaaggagtttgagtagagttgtatataaacttagacactcctataaatgtataaaaacagagaaagagagagattaagtagtaattttttaattgtaggccaaatatggtggtaacaaggcaattttcacatattttattttagttaactgttttttgtttagtaaaacaaagtaatataggtgacacttttgtaatgtaataatataaatcgaaaattgcattttgggaacatgggaatttggattaaaattttgtcggcaacaggcaacaccagtagaaaattaagatgaacagtaaatcaaatggt

SEQ ID NO: 226554 - DNA, 2352 bp, Cannabis indica
ggtgttgtggttgtttcctggtcacgtgaacttgttggcaactgtgtggatttatcaagtataaccatcgagtaatctcttgagtgttttcttcgtgagtggcagctcgtagtactgtactaactattgcctttaaaatagtcttccatagagtggcacgtgtggagggaattgagctgattgctcaagttcaatacttgtccatgcacccacgagaagtattcgtactattggcaattaggacctcgagcaaagttattagggtttatgctttgaaaaatctgtaaagacatttttgattactaataagagttgaacattttgataaatatatatgaatgttaaattattaatatttattattgaataaattatataaatatcagaaaatttcttattcatatatgaggttgtgacttgtagttgtaaaaagaactaacataatttagctatgaataaaacagtcagtagcgtattaaagttatgaaatccttaatcaatggttgctagtacggttcactgatgcccggttattggtgcaagtaatctcggttcagattactgatgtaggatgaaatctaagtgaatgtgatatatataatagcgattatgtatgataagggctgatatgaataaagctatctttatcaaacttaccgtttactataaggacctaattcatatcgtaatgatgatcaatagtagattggcctaaatccttagtaatcatgaactcatgttcatattattagtttcttttatgcactcgttaaagtttctcagagaagatgattcatacaacttctgttttgggaatctaataatatggatagctaggaacatgatctaaaattatggaatcctaacttccctaacaaatcaaatattgattccctttatatatttattatggaacttgtgtgcaaatttaaatgggatgaattatacttcaactagtgaattaatggtactaaaggataaaaaagtaattagaaggataaaacaataatttgatcaaaactaattacgtattgacaaaaagaggtctaattactcgaattgattatatgaatggaaactatagtaaaactcaataaatatacttctataattactaagacttcaattccatatttatagtagagtaatcatggaattaataaacaagattatttggttgataagactcaataaataatctggtttattggagcttaaaattataggtctatggacctcaaattgccactttgaaatactgccaagactagggataaagaattatataatgttatttggaaaaatctattttgagttagcaaaatagtaatttttaatttctgtaataaataaataagttttcaaattaatgaaatcagaaaaaagacaaaaaattgttaagacaaaattcttcaagacaataatcgttaaggaaaaagttatcaggatgaaagatatcatccttgtcttaattgagacaaagtaggcgcctaccctatagtagggtgatcctattggttttgtctttttaggttaatttattatgtaattagttcaattagataaatatttgaatttgaaaagccgtagatatttcaagttggttgagatattctctcaaagttagttgagagattccttcaataattgaattcagttataaatatgtatttaaataattaaatatgatttaatgaatggagaattatactactataaatagaagtgtgatttgagaaatctaaagatgatttttttcactactattttcaaaatactgagaaaagaaaaataatttttctctcactaatagttcttcctgatcatgtgttgagaatttatcaagaagaaattgtacactttatcgtaatagtctacactattccttgagtgtggtacatagatttggaagactacggtgtgagtttctaatcaacttgaaaggatataacttacgagaagtttcgaggataccctgatagtcaacaagaggtatacatatatttcattcatgtgatttatattttgatttaatgtttatacatctggagatcctttgggctattgtacaatgataattagatatacagatcttctgttgcgtacctaatttagtaccataaaaccaacaattagtatcaacactactacaaaaactagattttgcgttagtatgtcagaaaaatttaaaaccgacgctatatagatctcgtgaatttcacttcagttatgcactaatgcaagattagctttagatgtaagattatttgcttcagttttgcaccgacgctaaccttgcgtcggttcacaaccgatgcaaaaaacttctacgtaaaaaaaagaattaaatac

SEQ ID NO: 226555 - DNA, 1513 bp, Cannabis indica
ttttaaaatttgctaattccaatttaaacttatcttgttatatttcgaaactcataggtcgaaatcatgagtttaaaaaaacggctgaaaatacatattatatgcatatatagttacatattattttttttacaaacaatagacgacaacaaaatgtaattcaaaatgtagtatgaccgagatcctccaggttgcactgtcgcgatatgtacaatctttgtcgagctccaactcattgctcctccagcttagccttacccttacctacacaaggtagcaaactaatgagtcgacagactcagtaagatatgcataacatttatataagcattatgataccagcttaatgcctaagccgtcttgagcccaattaccaagctcaccaaatggttaagaacgttctcaacgaaagtacaaccactgtaccatatgcactagagtaccaactccgtactcgtgttggtagggcctttattgtacttctggaagttactgagtgttgtaccacatgcactccatatcccttggtactcatattggtaacactgtaactatcctaatgccctacactgtactaacacccttaaaagtaactcatttgggcgttagtattgtaataaataataagaaacactcaattacatataaatactttatgctatcttacctcattccagattcaagcatgccggtcgacttgaatggaaaatcttcaagttgaacgaaggtcctaagtcacattacacaattgggtaataactcgaataaaccgtttcgaaaccctagctcataactaaggataatcttaatgacacatacaatatacagctaccccaaataccaaggaaaaccaaaatatgcttggaaaatagcacggatttggaaagttgcaattttgggtggtcctgcttgtaaactgtttaaccaattttacagaccctgtaaaaccggtctgtcggtttgcaccaacaaactccaaaaattgcataactcagccaaatcttccccaaatgcaatcaaactctccagaacacctgtacacatattctagaacaattcccacacaacagtagcaagaaaaactcaataaaattcaacatgccatttttgagtcaagtttgagttccatgagctcaaacttgctcaacctcaaaatagacaattacagtagcacaaacagccctaaatcatcaagtaaaacctattataactactcttaatcaaaactcaaacaacagaaccaaaactccaaaatttaacacttaaccaaccaaaaccttaagaatatctagagtagggtttcaagggtcataccttcaatcaaaggcttcaaacctaaactgaatcttcaggataaattacacaattttcagagctccacctctagttcgaagatggaagaagaagaataggaaatctagattttttatccatttctctaatttcttattttctttcttttcttcttgaattattggataaaaggttaattatgtaaccttacttttattaa

SEQ ID NO: 226556 - DNA, 1647 bp, Cannabis indica
ggcttcctaaaaataacaatggatgtgatccattccttttattttaactaagaaaggataatgttatttctttaacaatcttccacttgaaaactggttttaaattgtcttcacactccacattatgtagcaaagctttctggttttgttattcttgtaggccaactaaagttgagcataacttcagtttctcaatcgtcaccgtctttgtcaatatatctgttggattcttacatccttggatcttctccagtattaacactttatcttccaatagagatctaatgaaatgataacgaagttcaatatgcttggttcttgaatgaaatgcttggttctgcatctacaaagctttgtacttttaattcacattttccaaagtacaaacacttacctgtggtgcctcgtagatacctcaaaatccacttcactgcttcccagtgaggttttcctagatttgacataaacctgctaacaactcccactgcatgtccaatatctggtcttgtacaaaccatcacgttcatcaaactcacaatagttgaggcataaggaatcttagccatgaaatattgaccttcctctgtctcaggggactgacccttagataggcgaaaaatgacttgccaagggtgtactacctggcttggcatcacccttattaaatctctacaaaacacatttgatgtactctaactgagataactataaaattcttctattcttatctcttataatttgcattccaagaatcttctttgttggacccttcatgtcaaactcttttgacaattgttgcttcaatcttttgatatcatccatatctggacctgctactaacatatcatcaacataaagtgatatagttggacctatatcttttgaaatagcaacagtggtcagcattgcacttatagaagccttctttgaacataaaactgtcaaactttttgtaccattgccttggggcttgttttaagccatacaaaattttcttaagtttacataccatattcttcttcccattctttgagaaaccttccggttgatgcatgtatatctcctcatccaattctccatgaagaaatgaggtcttcacgtctaactgttcaagatgaagattttcaatggcaacaatactcaacacagatctaatagtattgagcttcacaacaagagcaaaaatctcaatatagtcaactccttccttctgctaaaattctttgactactaatcgagctttatatctcttagaagccatcatgctctttctttaccccgatacacccatttgttgtgaagtgacttcttacgcatgggtaactcaactagttcccatgtttggtcggaaatcaaagactgcatctcgtctttcatggtcagctcacacttgcttgcatcacttgtctaacatgcttcatcatagcattcaggctctccttcatcagtcaacaacaaatagttcatgtatctcctgttaggcacatgaggtcgagaagaccttctcaatacaggagctagggtaggaggtaatgttgcgtcagattgttgcatgctgctttgtccaacaagttcctctttgttgaggacttgtctcaatcgactttgtcatagaactattcgagtcataatctccatctataaata

SEQ ID NO: 226557 - DNA, 2084 bp, Cannabis indica
tttgcattgttggatggccaactttttctttttatttatttatattttcatttattgcctcgcacctttatatttgaacttaatatgtttgcttatttgcatttttattcacaacttaaaacaattatattttgatcatacttaaacgttcacgaagatctggctttcttcattcatggttgctcatagacctcgtatctgagtaactctcaaattgactactcctcgtattactcatactttctcgatcatcactacatcgaggtatatcccttcctcgcatatgtctttctgatcgactgtgatctcaggatcttgaacatcccgagctagaactttcctcgtcctccacggtccttctcctttgggaaaggttagatgtaggccccctactgaggtatgtgtatgcctcttccttattagtgcgataaggacgcttgggatgcctcggtggtaacacacttgtcctaggttgtgtcccaggatttttctcgttattacaagggatctattattccctagttctgggtttccttatttctcgttcctatgagaagattctggaatgtcgttgttttcattcccctgatttgtgaatccctggggtctccgaggtacctctcggggaggtgcttggttgttcggttgtttaccttctagaacatccccagtttccctaggttgctcctccaaggtgttttggggattttcttgagttgtctcctgcctcctggttcttgaaccctaaggtctacctggtggcctcctcactccaggatcaggttagttttgtgtagcgtttccttgagtcaccctggctgcgactacctctctttccaacttagcgtttcattggttagactcggccagacgttgccatagttggtgatttttcgagtcaactaacagtacatgcctagtgggatcatatgcatcctcacccctaagtacataatcacaagtattagtattggtttccgcattcccagtttctaggttttgatcatgaccacattggctttttcttgaacgtgttgttcttgaagtgggtggtctttgtgaacccattggttcttccctaggacgactatcattgttttgattatcatcagccatggataaacttctggttggttaggagggacttttctgagctattatcacgtaggctctcaatgaaagcaccaaactgtcaatgtagatttttgttaactaagatttttgttaactaattaataaaccttttttgtaatgaattaagcacagaaattataagagaagaatagtaataataatgatggcaccaggttttttctgtagttttgcaattcactctacatagtccacgagtctatcttattgaagatatttttggatatagaattatggttttacaatcaatgttttctctcaaaggttttccgtccctttttctatataatccacccctatttataggaatataggttggcagttatttacatttgaatttgaaatacataactgttttcacgaattgtgggctttgaccacgttccatcttaacacgtatagagctaaaaatttgcataaccgtttgttattcctatctttaagatagtggatgctgacgtgagacaggatcgtcccgctagaggcatgttgctttatacatagatgaatgacttggtttattcatatgccttccaacaatagcatgagcaccagtgtactgagcaaacttaagaactactctttgaccataaggcctagcagattagacaatcatgtcgtccatgtttcccagttgttacacttagttattataacgtaaattatacgctaagagtttcaacagttgattcgcctcgtcaataccttcttacatgtagcaaggtagatgtctcgctacgcactgtccgtagctccctcgggattatgccttctgaggtaagatggtttcttgtcaatacacgaattgatagtttgcgtatccttgtctcgcctaagactatatagtcaacgagtgatgaatatactttattaattctatatttaatgagttattccattttgcatttaatgatatacttatcattatatct

SEQ ID NO: 226558 - DNA, 1500 bp, Cannabis indica
ggtaaaatatttccaacaagataatacaaaataactactcaaccatgtcttatttttatcctttagacgatcattgctacttggaaggttgtatctcgcttgatatggattatcctccttgtccatcttcaaaaggaaaagagcaaagtgttggtaagtcgttcacctcaccgcatttctttatttgattcaatattgcgaggtgattatcttgtcaagtgtaacccgaggctattgtatatgtacatttattctacttgagtggatgaatatccacttttttatctatgtattccgagacagatatatgtctcgccaatatcagttcaatagttattattcttatcttggttgagacttatagagccaacgagttttgaatattatctatcattcctttattttataataatgagttattttaatctacatttaatgatataactttattatatcattaaagttgattcatattcttcttgtaggacacgtgtcagcttttgaattgtagctaaattttgggtataacaatagatattagaaattttttaattagtgattagtaaaagtaattattagtaattatttaaagaagaaaagtataaataaaattagataaatcttaaaaaattcacccgcaaaatagaaaaatgacaatattaaaatgatagaataccatgtcacttaccttcacaacaggagcaaacgtatacaagaaatatcacttttgccagcacaaaaatgttctggcaaaagtttggtattgtgctggtaaaatggaatttacttttgatgtgttggcaaaaggggttggtaaatcaatgttggtattagaacttttgccaacacaaaatgaaaagcgctggcaaaaatgacttttttcagcgagtaaatgcgttggtaaaagttagattttagccactataaatgtacgctggtaaaactttgaccttttcaccaactgagtttgcgaaatacgctggtaaaagtaacatttcttgttgtatgtacactttaatatactaggaccatggcccctcccacaatatattatatgtgcttaagtttatagaataacagagtttttttttttgataatttgtatatggtgatcttgtttgacaaaatcaaacacaaacgatgaatatgatatgttttataaggaaatacttttatttatttacttctataaaaatctatttgtttccttttataatttgtagtatgatatgttttaagacatttattttattttttaataatattaatttactttgcaagttaggcttaattgtctataaagtgtaatataaataccacaaataattactaaaatcactacaacaaattaaaattttaggggcgacaaatttagaggcgacaaaaattcacctctaataatagggttattagcggagacaacattgtgtcgctccttaaggaatatgagtttttttttttttactctttttcttcttctttcttttaactttttttttt

SEQ ID NO: 226559 - DNA, 1598 bp, Cannabis indica
taggctgcattgaggaaattaatcttttaaatttagagtataaatttagacattcaattgtcctaaaacaacacttcataatgtactctatataactatatggtcctaaagttctttttgagagatagtacagcaaaactaggtaacgtatgtaaccccttcaatatgcataatcatcagcttatgtctttatgatactgtaaaatttaatttctgaaactaatttttgtgaaattggcaaaacatacagagtaccaagtgagtaggaacaaaggacatttgttttacttaccgcatatctttcatgtaagggaatttttatcttgatatcaattccattcttgtcacttaagatacctggattaacatgcatgtgaacctccacagaagaacgattggaaaggaatgaaggtgattccaagttcgtatctccaaaaacagcaatgtcattaaagactacattaaacagtataacctaatatattatcaagaaaacaataatatacccgtaattatcacattcattaattaaacaagatgaaagcataattaacaccgcgctgaaggagatgttgaaactcgaatggatctgcaaaaaccccattaggcagcctctcaataaaaataagtccacaactatcgtaagagatattagctagtacgaacacagcaggtagtttgctaattctcatagattaggagagatgatggtgggaaccttctccaatcaatttgcgctctatacttaaaagattgggtacaagatttggatcatctgattgtatgtcacacaagccaaatgggagcacttgttctataaaatctttataatgcgaattatgaagctgttcatatctttcatggtaagatttcataatatactttgcagtacaaaaagaactactatatgagttcttggaatcaagatttgaatcactttttcccacctgaaaattagaaaagaaaaacgagagagaatctccatatcacatgaaaaaagtcatcaatgaagaaacaagaatgagaataaaaatcattgttgtaaatttacgataaagtaaaaaaataatattaaggttccatcaacaagatcttacaaaattggctaatataatgaataacaagatggttgtacagatgaggcataggaaaaaggtgtacagaataactgtataataacttgcgagcatttctgatatcaacaaatcaagtggtttagtttggcggtgaggtgaacaaattacattattttttcaatccaatcccgacaaactaatgactatttttaacaagactatttagtacagactctagagcctacaggtagtggtaacaggcaggaatggatcacatcttttggctcaatcaaagaaaggctcagttgctatcgacctaaattctagatggaggtatcaaacataaattaaagcataaaaacttttaagctattataagaagatgaagaagaaacaattgtcatatatgatcaagccatttagaatacattaagggttcatttggaacattgtattaggtcgtatattattgtattgtattatattgatttgaattatatatcatatttttatataatacta

SEQ ID NO: 226560 - DNA, 2410 bp, Cannabis indica
aaacgactttaaaacaaagacaaacaattgattcagtcgacaatatgacgataacaactaaacatcatagcacgtaaaaactcttattcctatcgagaacctatcgtgatactttcgataaatagttgacaataaccaaatggacaacccacaaaggctaaatattatcgagaactcattgataatctgtcgataataactaaacattatagcaagaaaagactaattaatactatcaagaacctatcgagatactttcgataatcagtcgagaatagggaaatttgacggcaacccacacaacatactatcgagaactcatcgacaatctgccgataataacaaaacatgacataaagagccaaataatgtaccttaacacctctacagtactcgaggacattatctccccatttgaagtcggcccctagtcccttgtgtgttttctaagcgccattgaaaatcccagccacataggtggaaagaatgatagctctctgcggaaatgtttttggaaagaagtgtcgtcgcctcctaagcatatggacacatgcatctacatgctgcatagaatgatacaaatgagtagttacagtagtaaattaaataaacgaaaaatatattgtaataataaaataataaatttttacttatagaatcttcattccaatcctgtcgtgtcaacatcttcgtaagccatacaggaccgtaatcaccagtcttaacgtcccaaagactatggttggggatactcccatacaaccacctacgaaaactttccaacagcctatcatctggtaggatgagaggatcaaaatgtgtagacgacttgagttttttcttcatttcagtgtagtctttaaaccatgtaggaggggtcttcctcctcttccaaactgaataccttctggtggtctctctaagggcagaatctcaccctgtgactggctctcaactatggaaatattggtggcatccgctggagtagaagtattctcatcaacataaggatcatagttgtcaggaattacgtcaacatcttccatgggaggtgattgaggacgtgcatctgctcccgacctattatgtattatactcaaaatgaccctgagctgctccataataaggttctgaatagccttcagttataggtggctagcctggtatgcctccttcagctgggcctgacaagtggaaagacacttatgctcaacctctatcctgtttaacctctgttccaaatcttggaactccagacaatcgaggcctgaagagatgcaacagtagcaaatttaatatgttgcgcgaatttttctgcatggctttgaaaaacagcagggtcttgggcatcattttcaggaagggtctcattgacacccatctcaaacactatttcaacatcattgtaagtgattgttctagcatacgcttcttcatcagggcgaggaagtaatgctctcaaaacattcagttgctgttgaaaaaaaaaatatgttaatcatttcacaaacctatataaaaaaaataaacagaatacaacatagaaaaaatacaacttatcaatgatatcaataaaagataaataatacaataatgataggaaaaaaatcatacccttttagaaaatattggagcaagtattttctttggaatgtcataacttccatcaatctccttactgccccagctaagcattttgggtacttgtatcccatgactaacagcgaacttctttccaacttctaaaattgcctcgtaggcccaatattataatgctggtgcgtagccataaattgtgtaccccgccgacttagtgacttctttcttatctaacttagccttcatttccaccatgtctttctaaacagaatacataagccgactaaaagaagaaaacccctaaggaatctgaaaaaagaagtcaatatcctcaacaaatcttagtataccacttgtaatccccgtattcctctcacgacccattaggactccctccatgaacaagcacaaccttagcttgtaaacgtcctcgacaatctcacagtttaagaattgcgcagtaagatgttccatattcacaatcctagatttgttgaaataaagattcaacagttggtcgtttcccaagtgaacatttttctcctcaatggatggcccttgcatgaaattcaacccggctatgagagcaaactcaaccaccccaaatcttgccctgtttcttccaatgtaaaaccatacttcgttcgccttctcgacttgaaccttcattttgtgcagcattaattggtgcaccaaaactgaagagaaagcaaaagtttcagccttccaaaattggccaaaaggggttcccttcatcctttcaattaatccttcatgtttttaaacttttgaacaattgaagtgaatattc

SEQ ID NO: 226561 - DNA, 1256 bp, Cannabis indica
gccacaatattttccaccaaaactggctttttattccataccagatcgtttcgagccccccacatggcccaacacaccattatcaaactacattttttctcttcattcactcccttgaaaacggttgtacaccattccaaaaagctttgacccgtggcatacaaagtgcctatacccactctattccaacattccttaaccacctgacatgtaattaacgtatggacaattgtttcttggtcacaaaggcagattggacatatagtgcttacctccactcttttagttctcaacatcacggtagttggtagacaatccattgctgccctctacactgtattttttgctttaggtgggacttttagtttccaaaaacacttccagaaagatgaagtttcagtgttgtgccattgcccttgactctcttgtactaggttgtatgcactccgaacagtgtagccacccgtgacatccttgtgccaaatgagatgatcttcagtttgagcaagatttgttggtatggccaatatgagcttcctgtcacgctcaaggaaaagatcttgtaacaattcgacatcccacccttcaccctccatattcataaggttagccactttggcattcataagagcggggtgatccgaaatgactctcggattcaaattgtcttgcaaccatggttcacccaacacagagatattttctcccgttcctacacaccaccgaacgcccataaacaccaattcttgagcttcaagaacacttctccaaacaaagcttggattattgcctaattccgccgacaggtacgagccatttgggaagtatctagccttgaaaactcttgataccaacgagttagggcgagtgagtagtctccacccttgtttccccagtaaagcaaggttaaaatttctgaaatttcgaaagcccatacctcccaagtctttgtgcttgctcaaccgatcccatgagagccaatgaatccccttacttgatttatttgaagattgccaccagaaccttgttatcatcttcacaatgtctcttgtgatttcaataggtaagaggaaaacactcatagcataactaggaagagcctgagccactgatttgaccaacacctctttcccggcctttgacaacaatttcccttcccatccttgaagcctctttctcaccttctcaagaagaaatcccatggctgcagttttgttccttcccaacgtgcttggaagtcccagatacatactaga

SEQ ID NO: 226562 - DNA, 2947 bp, Cannabis indica
gagcctttgtacgagaggttcagaaagaaagcacctccaacattcttaggaggtcttaatgttttaaaagcagagcaatggttgactgtaatcgaaaggatactaaatttcatgggagttatcgaaaatgatagggtagcatgtgccacgtttcagtcccaagaagacgctctagtgtggtgggagatggcgtctctcacaaaggatgtcactagaatgacctaggaagaattatgggacttgtttaaagctaaatattacaacaaggcagtccacagtgctaagtggaaagagtttgttgaactggtacagggtgtcagtgactaagtacacgaccaagtttaatcgcttggccaagctggcctccagaatggtacccatagatttcaacaaaaaggaaaagtacttggcggggttgaatgccaatatcaagcatgatctagttattaccaccaatgacgttacaacctatgttgaaatggttgcaaggctcttcgagctgaaggagcagtaaaatttttgcaaaaaactcgagaggctcttggtctggtgggaccactactctccctatccctggtcctggtaaggagagtggtgattccaatattgaacagaagaagagaacttctccacctgtagggagttcagggcaaagtaagaagtttcgcgaaaatcagggtaaaggaggacatcagacctattcctatattggatgtctgcactacaagaaacatcaccctgggacatgtaatcgaagggcttgttttcagtgtggatcagttgggcacctcaagaaagattgtcctcaactgaagaagggggaacctaagctagaagctaaacctgcaccagcacatgtttttgctatcactcaggaagatgctgccaccagtctttcactagtcacatgtcagcttcttatcaacagctttacttatactgtattatttgactcgggagctacacgctcatatgtagtaacgagaatacttaatcagcctagtagacctagtgatgtttttgtgatgggatttggaacccagttgcctaatgggaaattaattatttcaagaaagtgggttagatttgtgttaatcgaaattgaggttagagaattgagtgcatttctagtggagttacctttggccgagtttgatattatactcagaatggacttcttgtctaaatattctgccagtattgattgtaaacgaaaaatggtaacttttcaactagagaacaaggaaccatttgtttttgttggattggttcaaggttctcgtgtcccaagaatttcagcattgaaggctagggatttactacgcagtggatgtgtagggtttctatcaattgttattgattttggtaaacctgtgttacttgggcccgaggaggtcaaagtggttaaggaattcctggatgtgtttcctgaggaattacgaggaataccaccttagcgggagatagatttcattattgacctgatacctgcggaagaacctgtttcaaaggtaccctaccatatggctcctgcagaattaaaagagctaaagatacaacttcaagggatgctggatctagagttcacccgacctagtgtgttgccctggggagctctagttttgtttgtaaagaagaaggatgggactcttcgaatgtgtattgactatcgagagctaaacaagttaacaattaaaaagaagtaccctttgcctagagttgatgatctatttgatcaacttcagggtaagacagtgctttccaagattgatttaagatctggttatcatcaactcataatttgggaagaagacataccgaagacaacttttcgtactaggtatggtcattatgaattcctagttatgtcgtttgggttgacaaatgctctagaaacctttatggatctcatgaatagggtattcaaggattttcttgataactttataattgtgtttatcgatgatattcttgtgtattctcgatcgaaagcagaacatgagtagcatctttgtatggttctgcaacggcttaaagatcataaaatctatgcaaaattaaagaagtttgagttttggctatcacaggtgtcttttttggtacatattttcggtaaagatgggattatggtagacccagggaagattgaaacaatgaagaacttgcctagatcgaaaacagttattgcagtatgaagtttcctcggtttagcaggctactactggcattttgtagaagaattctccaagatttctatgccattgtttgagttaacgagaaaagatcaacagtttgtgtggtcagataaatgtgagaaaagcttctaagaattgaaacaacgattgagtacaactccagttttagccttgccgtctgatcaagagaggtttgtggtgttgtgatgcatccggacaaggtttgggttgtgtgttaatgcaagcaaacaaggttatagcttatgcctcacgacaacaaaaagattacgagtagcgttgtccaactcatgatttggaacttgcagtagtggtgttcgctttgaatatttggcgacactacttatatggtgaacggtgtgagatttatactgaccacaaaagtctcaagtacttcttcactcaaaaagatctaaacaggaggcaaaggcagtggctggagttagttaaagactatgactgtgaaattttgtatcactccggaaaagcaaatattgttgtaggtgccctgagtcaaaaagggcctgatcaaactttcattgcgataatgatttctcctcagttagccttgaatatgtctagggcaaacattgaatttataattggagaattgcataacctgacacttcagtcagacttgttggaaaggatcagaatagcacaactataagaccctaaattggttaaggctcaagaagatgtcttagtaggaaaagctaaggacttctcaattt

SEQ ID NO: 226563 - DNA, 1065 bp, Cannabis indica
ttattatgagtataatatataatatgatggagagttacatatacatgtaatattatataatgtgattgggagttacatacatgtaatatttatataagttgtaacataagaggtggagttactcatattttgtaacttccacatgatcactaattaagtgtgcaaagagtggttacacaacttaattttttaaaattcaaagctataattcaaatatagctgttggggatttaattttgtcatttctaatgtgtataagtgatataaaataaaatgagaatagtttgaagagttatttgtacaagctgaaaaaagttactattttttcagctttaatattataacattttttactatggggatgctttttaacaactctcataacattcaaatcacccatttaatcctatttacaccaattaagagatggtaacagccattgagtgtaagatgtttgaatttcaaaaaatttgtaatcctaaacactataaatagagacattgattcatccttcgagatacactcttctcttctatctttcaaacaaaaagctagacatttctaaggcttgataatttccagaagtatttccacaaaagtgtagaaaccttgttcaagcttttgatgattcccatctctactttgggtgtttgttcttcttttcttattttattctattctctagttttatcttgttctctttttctcctctaaacactcttatctatatattctatcatatatattatatctatactatatagtattatatatattatatatacatactttatacactctttgtatctctactatatattatctattttatatattccatatcatatatatatatgcttttatatagtttacatttatttgtatctttgttttgagttgtaactcttttcttttatttgtattttgtattttaggattgtaacattttatttaatatattgtctttgtaaattttgcttagagtgtaataaagagacttccaaagcaaatgcaacttctaaagtttctaataagtacaagagtaagaccaaaaagagtaatacc

SEQ ID NO: 226564 - DNA, 1641 bp, Cannabis indica
tatttattggaaaattaatacttgttatacctaaaatttggctgacacttcagaggatgacacatgtcaaccttagagaatacgaatcaacgaatataatgacaattatattaaagaatattgaaatagaataactcattgaatgcggagttgatagagtatatttataactcattgattgtatagtcttaagcgagacaaggacgtacgaactattgattcacgtattgacgagaaaccatttcgtgtcagaagacacaatcataaggataacattaataatgcatagcgaggcatcaacctcgctacgtataaaaagctagaagaacctaagtgacggatagcaaggcatccgtctcactataggaaggcatactaccttcactaatcaactccagatatctttcaatgagatccactgctccgtcgagtcagctttctcagatagaagctgacattcaaatgatgttaactactgaagttcaccttgtcaccaagaactgcgattgtcaaatggagcgttatgtcttcattcgccgaaatgaagggatttacattatcaacctcagaaagtcatgggaaaagctccagctcgctgccaggattattgttgcaattcaagttcccagcgagatgccccagcgagatacccttagcagcatatctaaatccacatcagcattgacccagtaagagcagataaatcacagatgtatgattttcaaataataaacttcatttatttacgtggtatgtaattaaggcccacgattttaggaaaatgttattgtgggatttaaatctgattgtaattagtgaccaccctatgttactataaatatgggcagagtgtactgaaaaagggacggaaaaatgcttgagagaaaagaaccctagtttgtatcagaataatctaaataagattgactcgtggactatgcaaaattttaactacaaaactacgtaaaaagctttgtgttatattttcttcttttactttcgattatttctgtgcaaaacttatcacaaaattaggcttattatcgataacgaaaatctacgttaacagtttggtgctttcattgagagcctacgtgaaaaaagctcagaaaaaaccctcctaaccaaaggaaaaatatttccccatggctaataatggtgaaaatgatgatagtcatcctgaataaactactcaccgtcctagaaaagagccaatgggcttacggaggcctcctaattcacgaacaacaagatctacatggtccacacgttcaagaaggacccaatgtgaaggtggccaaaaccaagaaacagggaatgaagcgcgcaacacaggtgttgctggtgctcaacccatggatgatggtgcctatgatcccacgagatacgtaccgattgtcgagttggaaaatcttcatctcaggtgccacctggaggaggcaaaccgactaaacgctaagttggagtgggaggcagccgcaaccagggcgacacaggaaaacaatgcgcaaaaccatcatgttcttggaatgaggagaccataaggcagatcttgcagctcatcaactagcaggcaggagacggctgaggaggaccctcagaacgcttaggaagaacaacctggggaaattgagggtcccc

SEQ ID NO: 226565 - DNA, 3047 bp, Cannabis indica
tagcttagctcaactgcttttcgacctattgcccagtgaatatgcatcactatttatatggctagtaagcttggagaggaagagtttcccctctcgttacaatgcgtacaaataaaaagatcgtgggatcaatgctgaatacaaggatcgtgggattgaggatgaatacactggtagtgggatgtgtgtatgccatatccacgtaaattgctccctaagttatagaaattgtgttgatgactcagatgcgaaagctgaattcgctaagtgttggtcactctacgtggattgctgaatactttactctgggcatgctagcgagatatcttgctcgaactatgcttcctgagcagatgttccaagtggattccacgtgtcaccattcatgtgatgccacgtcagagtgcaaaaattgggataacaaaatgcaaaatacaatttcacttatgccaaatttttagcataagagtttattaattttaagttccacctatccatgattataagaataatctctttgattacaatccttttgtttaaaagaaacaccctttgactccaattacgataatattaaactttgaggtaaattttgggagaattggaatgaatttagaattgtagctgaacttagtcaaattaattaactgagctgcctacataccttctttgtgaaagatcaagctacttgtagtttagaatacattgtttttaaatttgaatataagaattctggtagatgactctccacagtgatgtattaaataatatcccaaaaatcacactaatttcacaagattctccaaaaatcaaaattatatattaacaattgcatagataactataagaaattgtttacctcaatgagaatctccttcactctacctccattgaagaaaaccttgaagttcttgaggtagatgatgatgaatagtgagatttttgaatttgggtgaagtttagggatttggatatggtttttgagaggaaaagagtgtttgatgagagaaaaagtgttttagagagattggggatgaataattatgaaaagattggaagaaaaagggttttgatgagatgagattgaagaaattcggttatggtgaatgagttttcggaggaggtgttttagggttgtgaaaggggttatgatttttgaaaaatcgtattgccccttttaaaagcgttagggcattctgtccgcagccacaagtggtctcgctgcggcgagatgaggtgagaaaaacatgctctctgtagtcgacttatggccgcgactgaggttgtgctcgctgcggcaagatagccttcaaaaaaataggctttctgtaatcgacttatggccacggccaaggttgtgctcgccgcagccactgggcaatgcccagaaaaattatttttttcctttttttttaacagtacaaaaataaaaaaaaaccaatattcagtttacaagtttaataaacgtaaaccaacaagaagaaacaagaaaagtaattaaaactaaaaaaaaataagagagttcaactaaaacaccatgaaaacttgggttgcctcccaatagcgctgtctttttcgtcatatagtcggacgttgactgagttcttcaaagaggcgccaaaatcatggcagacttggcttggtgaaaatgacctcccaagtaaagctttaaccgctacgcattgaccttaaaagtctcagggctttcgccttttagttctacagctccatagggaaacgccttgaccactgtaaatggtcccgaccaccttgactttaacttaacaggaaacaatttcaaccttgaattgaaaactaaaacttgctacccaggttgaaactcctttttgactaagcttcggtcatgccacttcttcgttctttccttgtagatcttcgcattctcataagcctcatttctcaactgctccagctcattcaaatgcagcaatcttttctttcctacagcttccaagtccatgttgagggtcttcatagcccaataggccttatgctctaattccaccagcagatggcaagcttttccaaatatcaacctatacggtgacatcccgataggtgttttaaacgttgttctataagcccacagtgcatcatctagctttcgtgaccattctttccttgatctttgcagtgttttctccaatatcatctttatttctcggttagaaatttaagcttggccgttgctttgtggatggtagggtagagcagttctgtggcgaacgccatatctagataggagtgcttcaaactgtttattgcagaagtgactcccttcatcgcctatgattgctcggggagtaccgaactgagtaaatatattcttttgaaggaaggtaagaactgttttatagtcattggctggagtagccgcagcttcaacccattttaaaacataatccacagctaataagatgtacaaattgctaaaagaagaaggaaaaggacccatgaaatctatcccacaaacatcaaacaattccatttccaggattcctgttaaaggcatttcatttctcctacagatattttctgttcgctgacaacgatcacatgcctttacaaagccattagcatccttgaaaagagtaggccaaaagaattcgctttgcagtacctttgcagcagttcttgtgccactaaaatttcccccacatggtaaagcatggcaatggtttagaatagaatatatctcctcttcaggcacacatctcctaattatctgatcggcatagtgtttgtagagaattggctcttcccaatagtaatgctttacctcagaaaagaatttctttaattgttgacgagacaactcagtagaagttatattggcagccaagaagttgacatagtcagcataccaaggtaccatcaggttttccttcaaactaaagaattgttcatcaggaaattcttcatttatttccacctcttttgcattttgggtttcttctaattctagtcttgacagatgatctgatactagattttcagtccccatcttatcctttatctctatgtca

SEQ ID NO: 226566 - DNA, 3002 bp, Cannabis indica
tataagaaaaggaacctttctccttgttcttaagtcaatacaaataacaaggattaggctattaccgaactgctacgagctgaacctctataaaattcatgtgtcgttatattgcgttattatattccaatcgttataaactacttgccacttacaaaattagactcactgtcgttggactaaaagcgaggccaactattttggtgctttcattgagaaaaaaaatcaaggatcgatcttcattctaaatttaatcacaattacgatggtggtatagactcgtagggtcgtggttgatccggaaaatccacaggcggtgaatcctgcactgcagaacccgggaaacacaagggttctgccaaccgtaaatctcgaacagccatcaaatgcgggtcacgatgtgacgactcctgtggatgaaatcgcacctggtatggtagagacttgaaataccagttcagcagccgactaggacagtcgttccacctgttaccaatgttcaaacaatcattggagatgacactggtccaaaacctccgtgccgctcttggactcatacagggtcataccaacaccctacatcatgatcaggaggaacttcgcactgcggtaaatctcgcgttcgaagagcaatggcgcatgtttgccgaatggagggacaaagagatggaagcgttaagagctcatcatgccgagattgacaatcgtagtcggcaagccactgtgctgatacgaaaagcctatcaatctgtcaggcagcaacccctaaatgtcatccccctgggtgaaacagacgaagatccagcgatgaatacctctcagactataaatggtcagctgccaaatctctggtcataggttctgcctgtgggccatgtcgtaggtgggtagaccttgtctagtaattcatcgggagaagtcatacccgacaattggaaccaagttaatggtgccggtcagcacatcaaccaaaccaaccgatcactgagacaactaggcgcttccgattcgataggtggggacgactcatgacctcagaaacaatttgagtaggaggagaggagtagatgatcaacttgacacgatgatcgtgcagcctagaacccgcgctcaaattccagctcaaaaagatactgacgtgactcagatcagccaaaatgccgaacaggttagtccagctgtgcaggcacagctggacgaattaaagtatatgttccaaggcatggccggtcagaggaacaatgatctcgagttggaccgagcatgtggaacccctttctcccccgagatcctctttcccacctcaagtatttcgagatgcaaatggatcgcagggggtacgaggagacgtatgttgtagaatttttcctgccaccctctcggaagctgcctagcaatggtacttcaagctggcacctggaaagttcatctcatggaaacctttctcctcggaattccatgcaaaattctcctcctctcaccaacttctgttgcgcctaggagacctggtcgaagtcaaacaaagaccaggtgagcctctccgagcatacattagcagattcatgacggaagcgactaaggtttcacaggtaactaaacacggaaagttatccgcgatactggggggcattgaagtccttggtaagctttggaaggacataaggaagaatggtccggtagactcaatgagcgattttctcgaccgtgctgatggcttcatcaaacttgaagaggctactcagcgagcagaaggtgagcaaaaacctagtaagttaaaggctccttccactggaacgtccccccaactcccctattacccaagtaattcaagctcaaatggtaaacgttccagcaacaacaatagacaagggaatgggaagaagggaaagttcaccgacaaaaccgaacaagctccccaggagaattaggccaagtacactgcatttaccatcttcactgaggatatagaaagtgtttacatggccactcagtcgatagccccgtacaagaagcccgcacccatgaaaaaagatgtcagcaagagagacatggccaagttttgtcgatttcatggagagtacggcaacgacaccaatgaatgcaataatctgaagcgggaaattgaattcctgataaggaaaaatagcccgcatgtatagaagtatgtcaaggccgatcagaatcagaggggcgataataaccaagacttgctacctccaccggtagatgggcatctgcaagtcatcattggaggcccacacatagctggagatttgggcaaagctcaggagaggtatgcccgaacagcacaacacgaacaagaagaagtgatcctggccgtagaaaaaaggaagcctaaaatcccacgtgcaggatagcccaccataacattcaacgacgaagatgctgtcaagatcaggtttctgcacaacaacccgctggtcgtggaggtccagatagccaacaagatggtggccagaaccatgatagataatggagcctcttccaacatcttattcaagactgcatatgaaaagatggggctccagctcaaagatctaacctcttgtctcatgcctgtgtatggtttctccggtcaaggagtcgcacctctagggaaaattcgcctacccctcactgttgggcaagctccgacgagcataactataatggcacaatttcttgtgttggacgttccattagccttcaatgtcatgctaggccggccagccctgtatgacttaaaggctgttacgtcgatatttcatgcctgaagtttccaacaaataatggggtggggtgtctgagaggaaaccagcagattgctagggaatgttataaccttgcagtggccaaggctaagaaggaagtatcctccagccagagcacggccaagggaaaaacatttccaagtcgggaacttcccaaggtggggatgaagatgtggatccttgacttggggacccaaccaggaatgttggacctgtggaagaattagaaga

SEQ ID NO: 226567 - DNA, 2608 bp, Cannabis indica
attatcccaacctacacggactccattatcattcttcaaagtaacaattttgttgtgtctcttcctagttgtggcagccttatgaaaatagctactattatgatcaccttccttcaaccatagctgtttagaacgctgcttccaaaaagattctctctgatcaagaacatgaaacaactcctcctttacttctttgtgtcgctgaatagaggcagtgtcccttttattggccaatctttgaatctctttcttacaccgagagatacgaaccttgaaatttccagtcacctccttcccccaaatactcaacttatctgcacactgagtcaacttatttggcaaactatcatcacccccactctcccaacaatcccgtacaatttcaaagcacattggctccttgagccaagcgttttcaaacttgaaattatgatttggagtgtaacaatgactgagttcaagtccaaaaaagataggacaatgatcagaagatgagatttcaagattaagaagagaagcaccttggaaaagttgagaccaagcattgttgacaagggcacggtccaagcgcacctctatccaatttcgagagcccctgcttttctcccaagtgaacggatgacccataagttccatatcagttaaattgcaatcactcaaagcttgttggaacccgtcgatcagactttggggatatggtcttccccccccccccgtttgtcttcatgcctcaaaatgttgttcaagtctcctattacacaccaaggaagagaagaatcagtagccaaagttcgaagtaaagtccacgaacggtgcctgttaactctctctgtttcaccatagaaaccggttagcctccacacacctctctcagacgactccaccaagaactctgtgtgattgttcgaataacccatcacccgcccatcatcttggtttttccaaaacaaagctaacccacccgaactcccttgggcctcaaccccaaaagcaccatcaaactttaacatccggcccatactttctattttctttttattgcattttgtttcacataaaaaaatgaaattgggattcttttgagatacaatctctttaaggaactgaatagcccgttggttcccaagcccacgacaattccagctcaaaacattcataatcctcggtgggcctgtgaaacagaacccgccccaaacaagttttttgtggtattttcagaatatcagtatccatgtcctctctttgagtttgcacaggcccaatatcatcaaaattaccagtattgacttcatcacacttctccatattgatcctctcttggacctcttcctctgtgttatttttcaaagtattttctggcttaggcccattagcatcaataagctcagtccgtcttatcttagtgtccaacaccaaaatacttgtttccttatttatattatttggctctataaccgtatctctactattcagatttctcattattgcttggtcaactacagccgcactttccttcatttgaggcaaagcattagccatcaaattaggactcttatccctcccagtaattggctgatgtgatgacgatcccacattagcaggaggatatcggttttgccgtgattgcctcccaagattattgttgatctgattatcattaacggccgtagatccctctccagatgtggggtgctccgagaataccattccaccgactttagatacagcttcgggccttaaccacctctctccgattgcatagtttttccttcgtggaacagctttcaattccaaagtgtaaggcttctgaatctgatcaaatggcgtatgaaaaagttgttcgcaaaaacgctccgaatgcccaaggatgccacaaataaagcagaaagtggatagactctcatacttaaaattcgcatagcaatatactcctccttgcttctcaacctttttcttcggttttagtggaaaatcgatattaatctttacacgaactcgaagataatctcgccacactccaatgaaattattcggatcggctttgatgaaagtccccacaaaattgcccaagtcgcgtacaacacgttccaacataaagccagtggacaaattatgtatttgcacccagaaatccaacctattcaacgtgactgttcttggattctcgctttgtctcaatcgttcaaaaatcagggggacacgatcgaatgtccatgggctcccttcgattactcgttcaatatctacttcatggtagaattgaaatagaaatagattattagcaagttccttaacatacatacctctacctggttgccatagcgtcgccatcttgttttgcattgcttgaaaatccactcctctattagtcaagaatcgacccactaagcaccatctatcgtcaatctctgtcaaatcatcgttttccccaacataaaccagactatcttcttcctcatcttctattcgaaaatttgcatactgctcctcaatgttaggctcggactgattaccagactccatgaaaaaactcaagagtttactcgaacataaacagacaaaaaaagactttttagagagaatatcttaccatgtcaaaagacaagac

SEQ ID NO: 226568 - DNA, 1848 bp, Cannabis indica
gaacatctctttatgttatgccaaagtatttgagatttcagttggaatagctcgtggtattgagtatcttcatcaaggttgtgacatgcatattcttcattttgatattaaacctcacaacattcttttagatgaaaattttattccaaaagtttctgatttcgggctagcaagatcatgttctttggaaaacaatttagcctctttaactgctgcaagaggaaccttgggatatatagctccagaattattctataaaaatattggaagagtatctgccaaatccgatgtgtatagttttggaatgctattaatggaaatggcaaatcaacgaaaaaatgtgaatgcagctactgaaaactcaagccgcatcttttttcccttatggatacacaagcaattcaacgaaggaaaagatatacaaatagatgaatatgcaacaaaagaagatttgaagacaataaagaagatggttatagttgcgttgtggtgtatacaactaaaaccttgtgatcgtcctacaatgagtgaagtcatagaaatgcttgaaggtaaccttgaaagcttacaagtacctccaaaccttcacctatatcctcaaaatcaagagaacaataataatgagacatctttctcatcaacaatttctatggatgagtattctgcagatgtcaacgagtagaatatcactacttatgtatgtgacaattatcaaatttgtgagcttgtaaaataaatttttgttaaatggtgactatcattttgaagataataatttttttttctttatctaatcttgatagagtcaaattttgagttattgtgtattaagaaaaatacatgaactattctattcattcatcaatgatacacaatgagtactctttctcatggcttatatttgaaaatttaggagcaaagcattgatgatctcatcatatatatacatacatatatatatgggaaagaagtgataatagaatatattttttgtcatcttaaaaatttaattgtgtttaactcatgttttttaaaattatttttcgatttttttactaaaaaaaatgaatattctacaccataccaagacatgaatcaatcccacctcaaacctaaccccagatttggaccctgacccgaacctggacccaaaccccagactcggaccccagatcctagctcgaacccagacgaactttgggtccagttcggggtccgagtccaaattttattcaaagtcgtaagagcaccagacaaaggaatttaaggctgattctattcaaaagcaatttgaactcgaccgatgcagaaaaaaaattacaagtaaaatctccaaatgttaatccaaattaaatagtaagctatattcgcataaagttggcttgacaactcctaaaaagactaaatagtgcacatttatgccccatacaccacatgcaaacaatcactcctactcaaaatatgaagatgcattttaaaactagagaaatcaacagttcaaaagaaggagagtacttacctgaaggagaagggtatgcccaagctagtatttcgttgatccctgcttgaacgttcaatagcttcaatgaacttgaacaagttgtagacagatttggcggtgatgcttctggattctccctcactcgaatccaaagaagaagatttaagatatcgtcgaagggattggacattcaccgaggacgaactggaggtttatgctttctctcgatttaaactcaaggtacaaagtgaacaaaaatagtgaagtgtgtttcttcctcctatttataagtgaaggaaggcgatatgagagcttaagcgatcaacgactcatatatcatctaagaa

SEQ ID NO: 226569 - DNA, 1814 bp, Cannabis indica
gtttggtctcgcaactccacattaggagaaaaatacaaggaagatttttggaagttaactttttgcccagtggccctttcataaacttcgaggacctctttgatggcgttgcaagagttgatagaagcctgacagaaaaggaaactgtcatccgcaaaaagcaggtgagaaatggccggggccctcctggcgactttaatgccagggagggagttatctctttctttctggcgcagaagagaggagaaaccttctgcacagaggagaaagagataaggagagagaggatcgccctgacgaatacctctggacggggaaacactacctaaaatcctaccattaagattgaatttgaaagaagccgtggagatgcaggagagcaccaaatgggcaaagtgggcagggaattggaattttcgaaggatagcatcaataaaggtccattccactctgtcaaaagctttggccatatcaagtttgaccgccatccaaccttttttgcccctagtcttgagttttatagaatgcgctacctcctgagcaataataatgttgtccgaaatgagtctatcagggaggaaagcactttggttgggagagatcaagttgttgagaacgagcttcagccgatttgcaatagtctttgatataactttgtagatggtattgcagaggctaatgggacgatactcagaaagtgtggttggttgttttactttgggaatgagagtgatgagggttgtgttgagaggggtaatgtccccgttctcattgagaaagtctgccgccgctttgagaacatcattcttgaccgaggaccaattagctttgtaaaaattagaattaaaaccatcaggtccgggggctttatcagggggaagctggaaaaaggctttttcaatttcctccaaagagaaatcctcagccagaaaggatttatctatctcggaaagggaaatttcaattccttccaaagccttagccacagcttccgccgagggattcgatgatgtaaagagatggtgaaaatgggattccatctcacggattatgctctcttcatcagagacgactccgccgttggccaagtgaagctgatggattttgttagttttctttctgtgagaggcatagcggtggaagaatttggtgttcttgtccccctgagctaaccattgggtccgcgcacgctgcttccaataggtttcttctttgtagagaagtgagtctaacctagattggagctctttaatgttccggatagtgttgtcgtcccaaatgtgagcagagcgggctatttcgaggtgcttctcaagctcgctgatgtgctttttaaaattaaagtcctttttgtggttccagttattgaggtgttgtgcacaagcgttttgggtagcaaccaaattgtgaatgggttcattctggtttgggagtctagtccaagactggtctaaaacatgattccaatttgggtcctgcagccaaacgttctcgaagtgaaaccgcttatttttaattttgggacgggcacctgaggggttggaggtgacaagttcaagagctcgatggtcagagccgtagaaacccaaatgagcaagggtagcatcaggaaaattgtcagtccaagggttattaacgataccccagtccagacgctcttgaatgttccttggggaggcgacattattgttccacgtgagcaaggggccagacgggtcaagaggagagaggttaaaagagtcaaggagctgtctgaagtcagaggaagggcccctatcaggatttcccccttgcttatcctgggaaaaaaggaa

SEQ ID NO: 226570 - DNA, 1451 bp, Cannabis indica
atattcatccgtagtgaagtaggttctacgaatacatgtactgtggtcggatggttggataattttttcattgctaatgttattttattatttttgtattattttatgtgttttgtttattgtttttttcatctttaaaattttcgggaacctccgattatagccgtgttgacctcaaaaagtgatcaactgacagcaggggtcgtatagatctgatgcttgccacgtgttacacaaataaaatgaaaaagtaataaacatagatttgttataaaagttcggcccccttagttagcaggtaatgacctactctctttttcgttgtattgatacctagagataatactattgacatcgttataagtaggatctaagatagctctctataaggatacaaaacatgaatcagtaggcagatctctaatgatagagtcatattgccttaaggcatgtgagagagatgaagagaagaagccctcttgggcgtgtagcagagagagaaagaatgactagggtatttgacttagagttactgacttagattttcgaggttgatttaaggcattacatatatagcaagtcgaaaaccctaatttatacccttagatatatacatattaaattgatttaatacaaaatactaaactaacccttgaaagtacatattttccatcagttgttgggttataaaagggcccaattcccaggttgcttgctgtccacgtttttgatgaagttgtgcatagagtccttctaggttaatcttggctgcccatagacctacaaaggaggtctggccgcccaaggcctacaggatgaggtctggctggctaagccctacaagatgaggtctggccagccatggtcctgccaagaccttgcgggtcatgtgtttgccaggatcctacaggtcactattgccctaccaagagcaggttagcctttggatgtggaggcgagcctttcacaagttgaggacatctttatataccgtttcctcgtagaggttggtcaaacgaaagatacattactctggaagtaactttttggctggccagcttatgcatagatcctgaccggcctataggctcaccctagctggcctataggcttctattggcgtgtcagggatttaagtacaaccctttgagagctcacttcactccttttggttactgcttgagagttttgttgtaccttgtatagagaccctagcttgctactgtaaggttatattccacctgtactctatctttggcttatgtggacatgccatgctaggttgaacaaaatgtgggatagcatttgcaccctaagtccctattcaaacatctggttagatagggactttctagctcttatattgtctgtagtagtctctattgagcaacctggtctagccaagtattggcattttgcatggcatgcttttggacctttgatcttctttc

SEQ ID NO: 226571 - DNA, 1215 bp, Cannabis indica
aactctagattatattcaaaactccaaaaaaaaatctctaaacacttaggggtggaagaagttattgatatatgtagttcaaacatttttaactttgaactctagactatatactcaatacaccacagtatcttgatggcacatgtattttgattagacatggatataatataataaataaactagcaaactaatagaacttattcttgatcctgtaagtgttccaattaacatgttactgtagtaataaaaaaatgataccaatgaagttcttggatatagtatcacagtaccttatcttagtgtgagaattttaaaattccaacccattattatttggaagacaccagtggtaacctactataatatgttcaagatagaaactttaaaataaacaaagaaaagttaatctaaccattcatatggatagtaatagcttatcaccattatgaggataagataggaaattttgcaatatttatttgaaagacttaagcacaattcttgttccttataaaatgttttatggtatctaaagtgattacttaatcttaagcaagtattttacatcaatgttaatactagaatgctatgttcatgacttagtctagaaggaacttatagtttctagactagataaaatgtcataataagaggactctaagcatctatagtaagaggttaaatgcacagttgtgtacgaatttaatcagattcctattgttgagtgggagccattaaagatgtaatcaaacaaggaacatttgggagacaatcaagaaagaatctctataagtgacatatatgttagatgataggtgtgtatattaaaatcctcatatctacaccgactcagtttttaatatcagagatggtagttactctgggggtggaggaattattcttgaaggatataaaaatccatttataataatttagttccaccaatgaagctaaacaacttagttgttttgaaaatcacttaaaagttattcaaactgaagaaaattcttaactgtgtttgtctctattccattttggatagaattagatatgtgtcttttgtatgttcagatgcacttcataagtagtaaagaattcagtatccctagaggagtaatacatatataattatgggtgagaaaaaagtccaagaaaccgaccaaaccgagtaaaccgatcgtccgaacaccaaaaaaaccgacaccgaaaaaa

SEQ ID NO: 226572 - DNA, 2138 bp, Cannabis indica
aatcacgtaatacgcctatgctagttagggtgttacagaacccgtaccagaactcaaactagactcgacatgtggttggtgtctggattcgggacaaagactcggaccttaaccaaaacacaacttagacccaaaccaggactaggaccaagacccacacccgaaccttaaatcttaacctatgacccaaaatgtgaactggaactagatgcagacccttataccctaaaccctaaaccttaaaccctaaatcctaaactctgtacacttacccctaaaccctaagccctaaaccctaaacattaaatccctaaacactaaacccaaaaccctaacctggtcatgggcctagacccataccaataccgagatcggaacccaggacccagacagaaacctgaatatagacccgaacctagacccagactcatgacctgaacccaaatccaaacacaaaccagaacctggttcgagacctagaccttgactgggacctggatcgggaccccgacccggaccaaaatagggacgtggactcagaccgcgacccagacccaaactcaaacctaaacccgtactgggacctagactatgacctaaactcggaatccaaacccgaacctgaacttgaacctacaccgagacctaggacccgaacctagatccagacctggaccaaggagatttggacccgcaactgggcctttgaacagggactaagacccaaaactcgaccctagactcgagacacaatacccgaccctggacccggagcccaaggcctgactacggggacacaaccccaaacacagacccaaaaccaaacttaggacctggcgctagccctagggccgaattggaacaagactgatatccaaaactgagattcgaatctgaacctgaggcttcaacctaacccgtagtcagtgtttgaatccatgacccatacccggatccatacccagacctagacccagatccaaactgtgatccagacccgatcccggacccaaaattggaatcgaaccaagcctgggactagaacccagacctgggatagtatcaggacccaaacctaaacccaaacttagaccagaacccataccgagacttggacctagaccgagacctgtgacttaggacgtaaaccaagaccgagaccttgacccagaccgagacccgaacctaaacctacacccaaacccaaaaactggggccagacacaggacctaagaaccagactcagactagggacccgaacctcagactcgcactaggactgggacccaaactgggaccataacccaaactggcacctagactcagatcgggactcgagacccgaacctgaaccgaaacacgaacatggacccggaccaagacctaggacttgaacatagattggggacccagacctgggaattgggcccacaaactaggaccagaactgtggcctcagaactttgatcgagatacatgacctgaccccaaaccgagacccacactcaggaaccaaaatcaaaacttgaactggagccggactgggatcttggaataggaccgggacctggaatcggacctaaacccgccaccggacccaaccacaaaccttaactgagaccgaaacccagatctgaacctcgccctagacaaaaatcacgacctgaacccagactcgaaccaaaactcaaccttaacccataccctgtgactagaaactagaaccaaatccaaaagcggattaggacttaggaacaggaccaggacctggacccacaccttaaactataaacggacgaggacccacactcagacacaaacccatcctaggattgggtcccaaacccgaattgggatgcaggaccagaaccaagacctaaacttagacccgaacatggaacaggactcgggacctaaaattgggattgagactaagaattgcatgcaagtctcggtctcggacctagactgagacccagatcgagacctgggacatgaaccgaaactagactgtgacccgtgattgggattcagatcttgtcctgggatccaggaaccagagcttgcacaagacccatagtcggtgtcttgatttgggagtcagagaaggacccaaagctggaccaggacatggaccc

SEQ ID NO: 226573 - DNA, 1580 bp, Cannabis indica
agggttggataactattcccctacataaacaatatttctgttctcatttattacattttgaataataataaaactttttcctattatggtatgagacactctctcataaggaaaccagatcctcttttttcggctcagatccccttttttcggatcttgccggttcttcaacgactccatcgtttttcttcaacgatctcatcgatttccatagcaagaactcgatgtttccctgctgtgaactctaatcttccctctaccgctgcttccatcgtcggcgatgtcctcgctggttccaccaccgttcccatggtgtcctttgttgaagctctgatcgataacactgctacaacttccgaccatggcgtcgactccactaccgttcccgtgatgtctcctctcgctgcaagctccggcgttcctttgatctcacctcccacggctactcccatcgccagtcacatcgtggaagactccaccactgttcccgtggtgactacctttgtccaagatccgatcgccgccccacctcagatcggagccacatctgcggctgttccacctttttcttcacgatccaccgctgttctacaagatccgtcccttccgtgatgaatggtaacgctccttccactcattttgtcattcaaaatgttgactctgtttctttgcagccttctcaagatctgggttcccaagtcaaagggccggctgccaatcatgtttccgcttctcactccattttggacgaacttgcttcactgcaagaaatgatttcacaactcacccaacagattaaccatgctcaatagtctcaatcaactgttgatgtcaacactccattgtcatctaacctaatttgtaaatctatatcattctccaacaatctctggattattgatagtggggctacctaccatttttgctttgataaatattgttttaactcttttgataatattcctagtgcctcgcatattactttacctaatggcataaaaatccctgttactaaatcttgtattgttcacattaatgctaatttttgtttaaataatgtgctttttgtacctgattttgagcttaatcttttatcggtcacctgtattgttcaagatccaaaatattctgtttttttctttcttcaacaagaaaataacgctatttgtaattctatttcttgtaatgatgtaaagaaatggcatttacgcctaggacatccctccttacagattactaaatccttgaataaaattcttcattttgatgatcctgactcatctttatctccttgtcatgtatgtcatttagctaagcattaaaggctaccttttaattcatctaataacatggctcctactgcttttgacctaattcatttggatatttggtgttcttttcacaaaaccagcatagaaggttatcaatattttcttactattgttgatgatcatactagatttacttgagtttatatgcttaaaaataaataatctgatgtcaacattattatacctcaattttatgctcatatactcaatcaatttttcatttctattaaaggcatacgatgtgataat

SEQ ID NO: 226574 - DNA, 2380 bp, Cannabis indica
aacattaaatgttatttctgatctatattaataagtaactctgattatattgaaattagttttatttagggcataaaacctaacaattggactgttacattcccgcacacaataatcgagccacaaaccctgaaagggggatgtgtgccaggtcgagtgctcatgcccagcaaggggaattgttgcctttgcacccgtactttaagaatgtggcagacttcttctgcctctgtccgacccagttcactcccaagggccttaagtatctgtcttccctcttcgttctctatgcctcccagaagtgggatatgccttctccccacgaggttagctggttttttgatttgaagtcaacccctaagcaaggcaggttagggtacttctatttctctcaaccagacttcaagtggttgacggacaccggggattcggccatcagcaatattgggtgttttgttgatgagtacttcatggtggatggcatgggcaccacccacactcagtttcaacagatgcctacatatcaccaccctaccctcactcttactcttagggatagagctcaaaagcttgctcagctgccgggggatgaccggaatatcatccagttgacctctgaggacaatattgtgaagtacaggctctatccgaaggatttcattcttaagccaatgaaggggaggaagaggaaatcaggtgttggccgggctgagggagctgataaggagaatgagctgatttaactgaagcgcgaggctaagttgaagggaggtgcaagggccaagaaatatgctcaggagcccttgaatcctgaagatgaagctgaggaagagcaggtgacagaggaggaagaaacttccggcccagcccaggcctattaaacatgcaattcgcattagggagcccagttcacctgctcggtcgccttctcccgtgctaggaaaaggaaaagctgttatggctgagataagaggcttgtcaggtgatgatggactttcgagtcttgctcgggcaatcgtctagcatactactccgtcttgtttttaagcttcttgactattatgctttatgcttttgatgtctgttttctctaaccatgttatttttgttccgtgcagacatgtcttagagttggaggaagctcaagtgcatctcctccagccaagaaatccaggggtggcgaggggaccccttccaaggaaaaggcgcctgccggggaggtcatcgacctttccgaggagctaactgttgcgaacccatctactccaaaagttgttaagtccaaggattctcgaggaggaagctcggacaggcctgagcaatcaaaagctggatctgagctggccaaaagtggtcccgagcagatgcgagcccctactccacctttgctagtgcttccagaggccagcaaaggcaaggagaggctcgtccacttcatgaaccggtttgttcctgaggttagtgagcaactggccggtgctgacaacgactcttctttggagctgctgatgggaggagtcttgaaggaattcacaagggtaagtctttcttgactgtttcctttaatcctctttatttggctcggattctaaagtttttttctctgcgtaggctggtttgaagttggcttacacttactctcgagctaagtctgctgcttccaagaactcggctctgtccaacaccatggggctgaggtggacttggttaagaaggacgttgatgacgccaaggtggaacttggaactattcggatggagctgggtgaagtcaacaagaagctttttactgctcagaagaaaataactgagttgactaaggatctcgagggttctgaccgacttgaagagaccatcgagaccttatctgcagaagtgaatagccttcaagatgaaaggacgtctcttcaagctgtccttcgtgggctggaagaggagaagaagtccaaggaggaggagcttacagctaaggtggagaggctgggagaaaaagtccatgccttagagatagccggtcttgagctcttttatgacttttggaaggctaatcctcaggtaaactttgattacttgggtgaagccaaagacatgtatctcgagttctgcgcttcccaagtggcttatggtgagcccgatgcgactgcttcttcctccggccaaaatgctgatgtacctcccgttcaaacaacagatcctcttgctcctaccggcccaaaagatctgaaccgagagcctgggactctagctgtttggctacttttcttttatctttatttttatgtatcttatttggtcataaggccttttttcaagacatcacgaccagccaagcgttctttaaacttggaattattttttattttacagacaataggctgacc

SEQ ID NO: 226575 - DNA, 2210 bp, Cannabis indica
accaaaactaattatgaaccaacacaaggagcgctaattattgaaatttgattatatcaatggacactgcagtaaaactcagtaaatataattctataattactaagaattcaattccatatttatagtgaagtaatcatggaattaataaacaaaattatttggttgatgagactcaataaataatctagtttattggagcttagaattataggcctatggttcccaaatggccaccttgaaacactatatatcaagggtagagataaagagttgtaaatattatttggaaaaatctattgtgaattggtaaaatggtgtaataaataaattatttttcaagttaattaaataggtaaaagataaaggttgttgagataaaatttgtcaagacaagatttgttgatataaaagttatcatgacaaaagatatcatcattgtcttaattcaaacaagataggtgcctaccctatagtagggtgtccttattggttttatctttatgggttaattaattcaattagatatatatttcaatttgaaaagtggttaaacatatttcaagttggttgagatattccctcacctgaaatatcagtaaccaaatttggttatagatatttatttgaataattaaatatgatttaattgaagggaaattaactactataaataggaacctattttgagaaatcagtagatgatttttcactgctatttttaaaatacagagaagaaaagaaaaattgtttttctctctcaattaattcttgctcatttgttgagaattaatcaagaataaattatacactttatcctaatagcccatactattccttgtgtgtggtagatcgatttggaagaatatggtgtaaatttttgatcaaccaaaagaataaaacttacgagaagtttcgaggataccttgatagtcatcaagagatatatattctttccttgtaatttatgttttgatttaatgtatacatatctcaagatttattgtggctattttgcaatgataatcagatatacaaaatctttcgttgcgtacctgatttagtatcataaaactaacatcatcacgatcaacaacttctggtgtagctacataggctgttggatctttctttcttgacctcctccattgtttagtgtggttcccatgaaagctatcagcatacctattgtagcaataagctactgaatggccatatttaccacagacctggcatgttggccttgcatttttaccaccattcctgacccgaccacgattgttgtttctgttagggtttttgtcctaaaaagcctgaaaaaatatttttatttataaagaaaagttgaacattttcatatttgcttgaatgttaaattattaatatttattattgaataatttttatataaatatcaaaaacacattattcatatatgagattgtgacttgtattgtgcggagaattatgatcacttagccatgaataaaacagtcactaccatattaaagttatggaatctttaatcaacggttgctagtacagtttactgatgctcgtcattcggtgcaaggaatctcgattcaaattgctgatatagtatgacatctaagtgaaggtgttgtatataatagatattatatatgacatagaccgacatgtaataaaggatgatcaatagtagatcgctcttaatcctgagtaatcatgaacttctgttcatattattagtttctttggatggctaggaacatgatctacaattatggaatcttgactttcctaacggattgaatgtttccctttaagtgttaattctggaactgaaaagttttgcacaaatttaaattggatctaaattatactttcaaaatagtaattgtttattttcaaatttattatttaaataaataggagaaaagacaaagtgttgttaggacaaagacaccaccactgtctgggtaagacaatggtggcgccacattcattgtcttaagacacagtgataggcacctattagataaggtgaaccccactgaatttatttttagattaattaattaattcaaaagaaaaatatctatatgaatttgaaaagtagttacaaatatttatgttggttgaaatattccatcaaagtagttgagagattctctctaagtggttgagatattctctcaagtggttaagagattttctcaatcgattat

SEQ ID NO: 226576 - DNA, 1860 bp, Cannabis indica
gggttgcacttaaattttagcaacccgaactttagattgggttagaaaatatataggataaaccgtccaaaccgaccgatgtacagccctagttgtcacccttgcccaactagctagaggtctagccagggtcttgccaatgcttgtgtatctttgtctttgttagagattctgatatcaagatgaacttgctttaaaaccttgaagaagtggatcttgtaagtctccataatcttctagtttgagtccatcttgcaaccctgagatcttgagggatagggggctgcacgacactagcctggccagttaatgaagacctgtttctcatgtgccttccacttttggccacgtggatgtgccacatcatgtgggaaaaaattgggataacaatagctaagtctagaagctataatttctaaagagagatactcttaccttatgggtaccttttttaacttaaaaaatgagctactagagctctccttttatagggaaggagatcttattaaaataataataataaaagattctaaaaattatggagaaatacatttaggctattttaaaccgttgatgatgatctaacggtgaaattgactttggaggtcggccatcaatttctagaacttgagttgtgtctgcgggacccactttgggtaagttgtagcttaaatttgtaactctctcaagattaaaatttagagttgataactttagaattatgattctagtgtgagacaagacttgatatagattgaaataactacgaatcgcaagttaaatttagtcaatcagatcaatattgagtaagttatggttgttttactgaaggctgttctactcccaacactcaggttgacatatgatctcaagtggtgactgctttacaggaaaggggagctatggaatacactattgtggtagctgaaatggtggattttcgagccacattacaatacctcgctccttacacaagaggatttcttactaaactttttatgtaccgtgaacaacacacttaaattatttatgatgacccttccaaacaagtgcaggacgttgggccaagggaaaatagtgtctgggatgtacttttgaaggctaagtgatattttgacatcacttagctaatttttgtgttctagtggagctggtcaccagttctcagagatgttgctattttgtagaaagggaagactcgaaactacctaatttttgaataagtcaatttgccagaaaagtgaaaatatgaagttatgaatatgactcttctgacttcatagctctcagtcattatgaaaaaatagatgaatggtcaagacgaaatcaaaatcggataagtagaacctaacgcaccaggccatatgtcaacctggcattgggtgctcttttcggagcttccaggttgtcgtttcgatacttccaaggttcttgaaattgagggtcaagtctcttaccctattttgaccatttcaaagagaatgctcgaacccaaatttgcaatagagtgattgaaacatgctcaccaagttgattgtcaaccttgctcaagtaggccatcattatttatcctcgagtagatgattcacctaggacatggttgtcaaccagttgagaatcactatatatgtccaggtaatttgcccgcacttcatgtgctagctttagtccaataatgagagcttcatatttagcctcattattgaaggctttgaaaccaaacttgattgctccctgcagttgttggccccaggtgtaatgagggcaattcctgcaccaaaaaggcagtccatacaacttccttcaatgtgcaacttccaagttgaattttcttgctcttacttctgttgggttttatgc

SEQ ID NO: 226577 - DNA, 1411 bp, Cannabis indica
caagagtcataagtatgctcggttacttggggggcacctatacctgtacaaagaattaggtaaagataaaacagtcacaattgcacgatgattataaacagataatgaaattcattaaagttaacaaaagcacgtaataacgtgattaaaagctacccggtcagcccgttgtccgtaaaatgaaaaataattccaagtttaaagactgcttggccggtcatgatgtcttagaagagtccttaaggccgaataagatactataaaaataaaaggataaaagaagaagtatttaaacagctggagtcccaggctcttggtttgagtcttcttggccggcaagagctggaggatttgttgtttgaacgggaggtacatcagcattctagccggaggtagaagaagctgcctcagtttcaccataagccacttgggaagcgtagaactcaaggtacatgtcctttgcttcacccaagtagtcgaagtttgcttagggattagccttgcagcagtcctttcatcttgaaggctgttcatttcttctcgtccacccgacgaaggaccgctcgaagagatgtcctttcatcttgaaggttgttcgtttaaacagataaagtctcgatggtctcctcaagtcggtcagaagcctcgagatgcttagtcagctcaactattttcttatgggcagtaaaaagtttctgttggcttcacccaactccatcccaacagctttaagttttgccctggcgtcctcagcacccttcttggccaagtccacctccgccctcatggtgttggacaaagctgcgttcttggaagtagcaaacttagcccgggagtatgtgtaagccaacttcagaccggcctgcaaagaggaaaaaactatagtatttgagccaagtaaagaggattaaaggaaatcgtcaaaaagacttaccccttgtgaattccttcaagactactcccatcagcagctccagagaagagtcattgtcagcaccggccaactgctcactaacctcaggaacaaactggttcatatagtgggcgagcatctccttgcctttcttgggctctagaagcactcgcaaaggtggagtagggttccgcatcagctcagaacctctcggtgggtcagacatgtccgaactccctcctcaagactccttagacttggcgacttttggagtagaggggtttgcaaccgttagctcctcagaaagatcaatgacctcctcgacatgcatcttttccttagaagaggtctcttcaccgcctctagacttcttggccggaggagatgtgctagagcttccaccaatccacttcttcagagcattaagcatcttctgcgacatgtctgcacggaacaaaaacaacatggttagaggaaacagacatcagaaacataaag

SEQ ID NO: 226578 - DNA, 2685 bp, Cannabis indica
atagatgggggcagacccaggaattgggcccccaaactgtgacaagaacttggatcgagatttgggatcggacccagacccaaacctgaacctaagacccacctcaagacttgggatccgggactagatgcttggactcgacccgtaccccatgagttgaaactggaactgaaaccagaagcggatcgggactttagaacaaggccaagacaaggacttggacccagacccaaaactatatagggactcggacccgaactaaaacactgacccacactcggattttgtgtcttggttacggatctattttgggtctgggtcggggtatgagttttggtccgagtctaggtctgggtttgggtctaggtctggatcccagtctggatctaggttcgggtcaaggttcgagtttgggtctcaggtgcgggtccgagtttgggccccaggtgcgggtctaggtttgggtttgggtcaagatctcagaccagatcttggtcccaagtttcaatctcggtttgggtttgggtccaagttcaggttcttatccagatccctatctaggtctgagtctatgtttgggatcgaatcccaaatttaggtccaactcctggtatcggtcccggtttagctacacgaccgtctccgagcccgagttccagtctcggtttgggtctagggctaggtctgagttttgttctaggtctgggtctgggtcttcgtcacgctcgaagtcttgttccagggtcctggttcggcggttcttgtttaggttccagttttgggtctcgggtctaggtctgggtcagggtttggatcctggtgtgggttcacgtcctagtttgagtcccagatccaaacaccgactacgggtctattccaagccccatttctaggatcttaagttaagatttggatccctgtcacgggtcccagtctggttttggttctggttcaggtcttaggtcccaggtccgagtttgggttcaggattgagactggggtgcggttctaggtcccggcccctgttttgtgtcccgagtcatgttccatgtttgggtaggagtttggttgcaggtttaggtcctgagtttaggtttggattgggatccaggtctgtgtcccagttcgtgtttaggtttgagttggaatctggttcctggtctggctacggttttgagtctaggtctaggtccggttacggttccaggtccatgtcctagtttcggtcccattctcgggtcgcggtctacttccagtttcggttctaattttggctcacaaggtacgagttcgggtctaggtttgggtctggactgggttcaggtctgggtctgggttcgtgtcctggtctgggttcaggtcttgggttggtcaccagatgtagacaacggctatgggttcggtccaagcactgggtctagatccgaatcacgatcttgggtcccagtttggttgcatttcgggtgccgagtcacgagctgggtcctaggttcaagtctgagttgggggtcgggtacttggtcccggtccttgttccggttcctaggtccatatcccaattctatgtcacagtcccagatctggtttgggtttttgtcctagtctaggttcgggtttgagtcctagtcttggttcaagtttgggtctcggtctgggtttttatctgggttcacgttcgggtttagctcttggtcttggtccgagtcctagtccgattctagttctagttgtgattcggagtttgagtttggattcgagttcgggtgggggttcaatccctggtctgagtttgggttcgggtccagattttggtctaggtctagatcaggctccgggtgtgggttggggtccttggtgtgggtccaggtctaggttcaactcccaagttttgaactcgatctgtgtttgggttcaattctaggtgtaggtcctgggttccgatctcagtctgtgttcgagttcaggtttaggtccaggtctatgtttgggtcttattctaggtctgggcctgagttcgggtcctaagttcaagtccgattttgggttcaattctgggtttaggttttgtcctggtttttgttcggggtaggttttggctccgggtctgggttcaactttggattcgtgggtccaggtcaggtcctggttcggaattgggtccctggtttaggtcccccatctaagtctgattcctaagtcctggtctgggtctaggttttggtttgggtcccgagtcttagtttgaggctaggtcccgatccgggcttgggtccaagtctcggtcacagtcttggtctaggttcgaattctggtccctatcagggtctagaacctggtctaggtcccggtgagtgtataggaccaggtcaggtccaggttgcggtacaagtttaggtcccaggtctcaggtcccagtcctagtcaaggtctcggtctaggtctcgtctgggtttgggttatggtttgggttcggttctggtctcaggtccgggtcctagtcatagtttcagttctaattcttgcaccgggtttggtttcgagtcagggtctaggtctaggttggggtcgtggtccgagtcttaatctgagtttaggtacgggtttttcggatcccgggctgggtctaagtttgagtttgggtcccaagttcgggtttgggtctacatttgggttctagtccaggtc

SEQ ID NO: 226579 - DNA, 2220 bp, Cannabis indica
tgaataaaagcccaattagccaccttatgggccgcaaaattacaaattctactagcatacacgaaattacaacaattaaaagagggagatgacttagaacaaaaggagacatagttctcaagcgcccaatgtgactctgtcccattaagagcattgataactattctcgagtcactctccaccaaaatatacttataacttagctcaagagccaacgaaacagctaaacaacaggccgctgcttctccacataatacatcctagaagtccaaccgagccgtatgaatccaaaccactctactcagatggttccttgctaccaccgctatgcacatgctttctaatcccaccttggcatcacaattcatttctatccaatcctgagatggtggcctccaggtccccctcaaagatggtgtcgggcaaggcaagaaaacatcatgaagctctgcataagaagtacaaatctggttaatacatttcaaaagatctggataagtgttattatgaataaactcgtttcgcatcctccagatagtttcaacaacaatcgaagcatacaaaaagacttcttttactcggatccccctattattgagattccatataaatttgactcagtcccaaactcaaatcccgaaattacagataggatagatgccccatggtgaagatctccataaatgcaacgccacatcacagaacaagaaaagatgttccatggattcctcccctaatccacagaaaggacaacaggtgtcctcaatgtggaatcttcttccaatcacagatctaacagggagcgcgttagagaggatgcaccaccagagaatcttatgcctctccaaaatattactattccataacttgttccagagcaccggagcaacctcacattgatgagctctttcaaacgcttgagacaggtaagccgatttgcacgtgaattgcccatttttctctaaagtccacacccatctatcttctccttaacctgagggtttaacacctttaacgattgcagacaccgtttccttgtcaaagatgccattgagctttaggatgtcccaatctccattatcaagcaggagttcagccacacagttttcattgggtaaaacaccgccatttggtttcgggataaaacctttataatgaggaatccagggatccctccaaatactggtcgcccttccattcgacactactttacaagcccctttcctaagaattgctttggttttcacaacatttttccagaaccaggactcggagtctttatagctacagctgagaaaatccttccctttaagatagttggcttccaaaattttacagcataaagactgagaacaattcaacgaattccacccccacttggctaggaaagccagattcatttcttttgttttcctaaagcctaacccacccaaagacttgggaaggcacagcttatcccatgctttgagatgaagaccttggttcccttttcaaagccccaccaaaaatccttgactaaaccatctatccttgagaccatccgactagagagtttcgtggtttgcatggcatagataggcatcgacagacccacagactttataagagtagctcggcctgccttggacaaagtcttagccttctaaccctacaatttagaggtgagatttccaaaatgaagttaaaatcagcatcattctgtcttgatctgaatagaggcaaacccaagtaatttataacaccttccggtgaatcaatacccatcgcttccttaatacctctcctcataccatcaggggtatttttacagaaaaagattgacgttttgagtttattcactttctgaccagactaagaacaaaacctctctaaacaattccaaaaactattagcttcatttaaattggccctaccaaccaggataaggtcatctgcaaagaaaagatgggtaagggtcggtagggctgcacacgggttgggtttttggatttttgggtttgggttttcagggttcgggtcttggaaatgcacaaccgaactttttttgggtgttcggatgtgtcgggtatcgagtcgggctcttcgggtttggcatagtcgggttcgggtcctattgggctgaacccgaatgtttaatttctgggttaaaatgacattttatttttaaaattaccatttttttttatttttaacattattttgacctttcttttataatta

SEQ ID NO: 226580 - DNA, 2381 bp, Cannabis indica
agaaaatacagttaaaacggtttagcacactatcctaactatcataaccaacttatccaagttggttagaatctgttgaatcttgctgatgtgttggttcaatatcccccctcgagtgacacgggtggacaccaagtgtcaacttgtttcttagaaataggaatggtgacacagacaggggctttgtaaatatgtctgcagtttggttgagggagtccacatatctgattttgagttgctgagcaaggacacgatctctgacgaagtgaaggtcgatctcgatatgtttagtgcgagcgtgaaatacaggattggaagctagagacccagctcctaagttgtcgcaccaaagtataggacaatttgaaattgggactgatatttcattcataagggactgtatccacattatttcagaggtagctaaagctagagccctatattctgattcagtgctgcttcttgccactacttgttgctttttcgaacaccaactgatgagattgttgccaaggaagatgccatagccagaggttgatttgcggtcatccgggcaccctgcccagtctgaatcagtgtaacctgtaatgctaagagtaggggcaggagtgaagactagaccgaggtgaatggtgcctgcgaggtacctaagaacacgtttgcaggcccccccagtgttctgtagtaggtgtttgaatgtattgactcaaacggtttactgcaaatgagatatcaggctatgtgttgcatagatattttcgagccccgatgatgctcctgtactcagtgggatttggcagaggagtgcctgagtgaatagacaatttggagcttgtgcacatcgttatcgactgtggcttggcatcaagcatcttggttctaattaataagtctcgtgtgtacttttgttgagtgagaaaaatggtgtcattgtccctgatgacttcgaatcccagaaaatagtttacagagccaaattgcttgagggcaaactgattttgtaaggcaatgatgatggcatgaatgtgtgtaaggttatcacctgttaaaatatcgtctacatagactaataagagcagcagagatgtgtgttgttgtataaaaaacaagcttgtgtctgattttgaattctaaaagccccattgcagtaaggtggttttgagtgtgtcaaaccaagctcgaggagcttgtttgagcccgtatatagccttgttgagtttacacacatgtgtgggatgttgaggatcgataaacccgggaggttgtgccatgtaaactgtttctagaagatcaccatgcaagaatgcattattaatatcgatttgttgaatgtcccacttgttggtagctgccaaggtgaacatgatccgtattgtgcatggtttaacaaccggactatatgtctcaaaataatcaattccaggagtttgttgaaaaccttttgcgactaaacgagacttgtgtctttcaaccgagccatctgacatgtacttgattcaatgaatccatttacaactcactattggcgtgtcttctggtttaggaaccaagatccaagttctgtttttgaccaaggctgtcatttcttggttcatagcagagttccatatggggttggctaaggcttcctttatgttagttggttcggatcctgttgttgaagtggtgaggtaaatcttgggtttgaagatgcccatcttggacctggtggacatgggatgtatgttatgtgttactgggggagcttcggatgaagttgcataacttgtctgctggtgtgaggactggtttgatgcatgttcatggggggcagtggactcagatgtggttggggaggaggtgttactcgaatggttggttgactggggctgtgtaggtgtaagaatagtgttgtgatgagtgtgtgggacacgaaaatcattggggtctaggagagtagtttgagtgtgagttgtaggtgtggatggggaaaatagacttttgtatggaaactcggtttcattgaatgttacacttcgtttaacatagatgcgaccactagagtggagacatctatatccctttgaggagtgacaatacccaagaaaaagacattcggaagagcggaaggatactttgtgattttcataaggccttagtaagggaaagcatgtgcagccaaaaacctttaaaagattgtaatctggggcatggtggaataacatctcatatgggacttggtagttgaggttggggacaggaagcctattaattaaataggcagctgatgtgaatgcctcccaccaaaaggttaatgacatttcagcttgggcaagaagggtaagaccaatatccacaacatgtcaatgtttacgttcaactcgaccttgttgttgatgtgt

SEQ ID NO: 226581 - DNA, 2110 bp, Cannabis indica
cacaaaacccaacacataatactctagggagttcggccaatttcctttagcatctttaagtcatttctttagagtatctttgagtgtcttgttgactgcttcgacttgaccatttgcttggagatctgccactacgaaaaaactttttatgatcccatggttcacacagaaattagtgaaggactgactgtcaaattgtttgccattttccgagactatcttgtatggtagtccaaccgaaagattatgtttttcacaatgaagtcttgcaccttcatggatgtcatggttgccaatggcttgtcttccatcaatttagtgaagtaatcaattgaaaccactgcatactgtaccccacctctacctttgggcaattgtccgatcaggtccattccctaaatggtgaaaggccaaggactttgcatttgacttagtttgttgggcggagcatgaggtatctttgaaaatcgttggcatttatcgcatttcttaacgtaggccttggaatcttcaatcatggttggccagaaataactttgccttagaattttcttagataaactctgcccagcttcgtggttgtcgcagaatctgtcatgtacctcggatagaagtcgtgcaacttcttcttgtgtaacacacctgagtagtggcatggagaatccccttctatacatgactccatctgcgatgatgtactgtacagcctttcttctcatctttgaagcttcattcctgttatctaggagttccccagtgttgaggtaggctgctattggagtcatccagtttggagatgtgtcaatcattcaagctcctccatgctagtgatactaggtttttcaaggaattggatgggggattagactagctttatcatttatgttgctgctcgcgagtcgtgctagtgtatcagcagttgtgttttcttctcttggaatttgcttaactttttaattgtgcgagcagatcatgtattttgcttagataagctatcattctttccccccgagcctcgtactcccaagatacatgatttaccactaattgtgagtcaccacagatctcaatgtgttcggcgtgcaattcccaagcaagttttaggccaacaataagggcttcatactcagcttcattgttggatgctttaaacccgaacttggctgctccatgcagatgttgccccccaggtgtgacaagggctatccctatgccggatagttgacccatggccgacccatctacatgcaatttgtaggtcagttcgtctttgctattgcttagctgaggttcttgtactggctctgggttattgctctcttctttactggtacactcaactacaaaatctgctaaagcgtgccccttaattgtggttctaggctgaaatatgatttcatactggcccaactccaccgcccatttaagcaaccgtccagaggcgtaaggtttttccaatacttggcgtaatggttggtcagtatacactggaacaggatgagcctgaaggtaagggcttagctttcttgttgctaagattagggaataagtgagcttttctatcaacaggtactggccttcagcttgaatgagtcttttgctgatgtagtagactggatgttggatattgttctcttctctgatcagttaggcacttactgcatgttccgtgatagctaggtatattcctaattcttctccttcaagaggttttaaaagtgcatgaggttttacgagttgcatttttagctcttgaaaggctttctcgcattccttcgtccattcaaattgtttgtttcctcgcaggatgttgaagaatggaacacacttgcccgttgactttgaaacaaatctattgagtgcgataatcccaccagttaaactttgaacttccttgggttttgtaggttatttcatatccagtagggcttgaattttctatagattggcttcaattcctcgggcattaacgataaagcccagaaacttacccgagctgactccaaaggagcactttaggggattgagtttcatattgtatttcttgaggactttgaagcattcatccaggtcatctatatgccccccaaccttcttggatttgatgagc

SEQ ID NO: 226582 - DNA, 1286 bp, Cannabis indica
tatgcaattcaacccaaaataatttgcaaattaaatcaccaaatcaatatgctaggttatggcacccaccactctgtccaacactacaacagactccaattcaccaccatctcactaattatcaacatcatgaacccacggcatagacagttaggcattcaaaaccacaccagaaaataccaaataccctcctctatgcagaaagctatgcacaatcacagtttgtctcaaattcacaatttttttcctcagccaaatattgttcaacaattccaccaactgttcattccagccatccaagccaacattatcacactactgctaccacatttaaatcatagtgacaaactcaaacaccattgactataacactagcagttcaaccacagccactaattaagcactttaatccaaaataaatttcaatggaaatcaccacatcagaacttagcttggattggctgaaaaatttggcttgacagagaatgctcggttgctgtgttgtgagtctgctgggttgttgaacttggtggtgcaggttagaggttgatgcgcctggttgtgagtggcgtcaggttgcaaatggtgagcagaggcaaagatgggttcgaatcctgggagtttgctcgtggtcgattgaacagaatgtggtgatggtggttgttgtaggggtggttgggttcacgggttgtgaatgggtggtgaacaatggtgatttctggtgagttggtgggtcgaggctgggttagctgggctcgaaggtgatggcgtggtggtagcgtggaggtggaatcgatggttgggcacgctgggttgttgaatatgatgcagagggaatcgtggtggggtggaaactcaggttcaatggagcgggtggagtggctgcgtggttcgaaggtggagtgaggtgtgaagctttgtcgagctgctggtcaaatggaggaagcggctgagtttgaattggaaatgaaattgatgatgatgaagagtgtggtagggctaggaaagtattgggctggtcaaacaagctggggcccagttgaccaaggaaataagcccaaactgagttaaataatgtgaaatggggtccttgtatcaactaaaaatgacttgggctcacttaattcaacactaaagtacaattccaaataattggtctaaacaaaaatagacctatccaatgattgaatcatgaacaataggacaatcccatgtttttttttctgacagcccattcactttatttttgcaaaccccagttcttttgatctgcctaaaacccaaaa

SEQ ID NO: 226583 - DNA, 1894 bp, Cannabis indica
cgatttatgatatataatatgatatgttgttaagttagaagtgagattcaatttatgcaagattaattaatttgcgcttttattatatacatcttccagttgtaattaatggtgtagaattgcaactgtgttttgaattaatatcggtattaaaataagatttgcataactacatttctaccttaccaaactctttatctgatcaactttctcatctcatcattttattatttctacttcattcacatttctatcattttctatttatattaatctttagtggtaatttacctccctgtggatacgacatatagcccgtttactaccgcgaccgcagtgtaactaattgggcgacatcaggtgatgatgaactttcgagtcttgcttggacaaacacttctcatgaagcgcaggatgctccgtcttatttttaaacttcatgattatcatgcttttatacttctgatgccttttttcttctaaccacgttggttttatcccgtgcagacatgtctcaaaagatgctcgatgctctaaagaagagagtttggggaagctcaagctcatctcctccggccaagaaatttaggggcagtgaggcgaccccacgagggaaaaggcaccagccgaggaggttattgatctttctaaggaactaattgtcgtggacccttctgctccgaaagctactaagtccaaggattctcgaggaggaagctcggacaggcctgaacagtcgaagggcagatctgagctcgccaagagcggatttgagcagatgcgggctagtttctgaggtgagtgagcagctggccgacggtaacaacaaatcttccctggagctgctgatgggaggagtcttgaaggaatttacaaaggtgagtctttcttgaaagtttcctttgatccttctttacttggctcagactctaatgttttttctctgtgtaggctggtctgaagagggcttacacatattcccgagctaactctgctacctccaagaacgctgccatgtacaacaccatgagggcggaagtggacttggccaggaaggatgctgatgacgccagggttgaactcagagctattcgaatggagctaggtgaagtaacaagaagatttttactgccgagaggaaagtgatcgagttgactaaggacctcgaggcttccgaccaacttgaagctaccatcatcaccttgtcagtagaagtgaatagtcttcaagaggaaaggggagttcttcggactgtcttccgtcgtctggaagcaaagaagaagtctaaggaggaggagcttacagctgaggttgagaagtacaaatcggaggctgaatagcagagagcggatgtgacgaggctggaagagaaagtacatgccttagagacagcgggtcacgagattttttatgacttctggaaagctaatcccaagggaaattttgattacttgggtgattccaaagacatgtttctcgagtactgcgcttcttaggtggcttatggtgaacccgaggcgaccacttctacttctggccagaacgttggcgtgccccccactcagacaatagatcctccaactcataccggtccagaagattcgaacaaagagcctgggactctagctgtctaaatactttctttttatatatctatccggccataaggcctttcccaattttttcattttttttcatggtttttcatggaattaatttcgtattttttgtgtagttttgtattttgatttgtatctttcaaatttcaaatctaattatcagaattaaattattatttttcttaaaattaatttaagatattagtgaaatttgaatttcaaaataggtaaaaatctatcttttttacttaatttgttatcttatttttaaaatt

SEQ ID NO: 226584 - DNA, 3557 bp, Cannabis indica
ttaatactcacccctacacccgagccatgctcattggatgcaccatccacgtataatttccaagtattcgcatctcgctaaacaagccgatttttctctagagttattccttctatcagaaaatctgccatggtttggcccttgatggatgttcgtgggtgataagttatgtcaaactgccccagttcaattgaccattttatcaatcttctataagcatctggttttgataaaacttgtctcaagggttgatcagttacaccttaatcggatgttcttggaagtaaggccatcacttgcgagatgtgtggattaggcataggcaagtttttcaagagggggatacctcgatgctacccctagtaacctcttactaacatagtaaacaggttgttgttgctttccctcttctcgcactcttccgtccattcaaattttttgttgtctcgaaattcgttgaaaaatggtaagcacttatcagttaacttcgaaatgaatctgttaagtgtaaccattcttcctgtcaaggcctaaaattcctttggtttggttggtgatggcatatctatcaaagccttgatcttctcagggtttgtgtcaatgcccctcgcgttgactatgaatccgagaaagtttcctgaggaaactccaaaggaacacttttttgggttaagcttcatattgtacttctttaatatttcaaagcactccgcgaggtctgtagtatgatcttcactctttattgatttaaccaacatatcatcgacgtaaactgccatgtttcttccaatttttgtcgcaaacattttgttcacaagtcgttcatatgttgccccagcgtttttcaaaacaaatggcatgactttatagcaataaagtcccatgttgattacgaagcttgtatgttcctgatcaaggacattcatttttatcttgttatatctagagtatgcatccatgaacgacataagctcgtctccagcagttccatccaccaactggtcaatcctttgcagtggaaagcaatcctttggacacgccttattcaaatcagaaaagtcaatacaagttctccaagttccatttggttttgggacaagaacagtattggatatccacgagggataaaatgcgtcgcgtatacagtcgttaaccaagaacttaccacttcctgcttgagtgccccttgtctctcaaaatccatgggtagcctcttctgtctcttggttgggtaattcagatcgacatttaatagtggcagataatcttaggggcgatccctatcatatctccatggctctagggaaaccgatcctggttcgccctcaaaaagcttattagctgctatttcaattgttcatccaagttcttcccaatgtatacacactttgtgggattttctagatctagaacaacctcttccaactcctcaattggtttaatttctttcatcttgaatccgaggatcaagatcttcatccttcttattgccttcttcagtcaagattgccattagtgggtgaccggcctttctgttttgcagctctatacaatagcattcgtgagctagcatttggtcacctcgcactactcccacacccattggtgtctgaaactttagagataagtgcttagttgaactaactgcccctagtccaattaatgctggtcgtcccagcaatatgttgtaagttgatggtaggtcgacaaccaaaaagtcttgcattatcgtggtggataaaggtgcttagcccaatgttaatggaaactcgattattccttgactggggacattgtcgcctgtaaatctacacagatttaccatgcaaggttttagtttggctttttcaagtcccattttcttcagtgtatccttataaaggatgttcactgaatttccattgtccacaagcaccctttttatccttttgttggcaaaatggatggtaattaccagtgggtcaacgtgaggatatctcacatctttttcatcttccttcgagaatacaatcagaggttcttcagtcttagctttcttagaaggtttcggagaaaaggcagactgctcgttcttcacttcctttacatatctcttttgggcattattgctttcctctacaatatgtggccctcccaagataactaggatatcctctccttcaagtagaggaggttgtaatccctagttgcttgggttattaggcggatttggatggttttatccattaccttgtcttttcacatattgccaaaaatgacctcgcgcgatgagactctctatctcatcttttagctgacgacagtcctttgtcgtatgcccaatgtccttgtgatacttacaaaattttgttgcatctctcttatgtctcgtatgcctcatgggctcaagtttacgaaatgcaaccctatgctcatgtgcgagatagatgttttcccgagttttattaagctcgatataaatggtgtagattggcacttacttgtcgtgcttcttttgttttttcttatctttggctgattccttagagttatctttcctcttttaactagaggctccaggattgtcagctttggtcgagacagtgcttgttgagacattgctgggtttgcttcccgagccaatctttaacaacttcatctcttttcttacttcctcttttcgaacaaatacttgagctctttcattgaactcagtgatgttttttactggacgaccttgtaggtcatcccatagctcacttccagcagtggagagatcagtagtgatccctacctgaagaggagtaagctgggtagtatcgtccaggtttctcacccttgcagcagctatgctaaaacgacttaagtagaccttaagcgtctcgcccggctgttgctttatgttagggagtgaggacgcttcgggtcacctatcccttgcgacctggaactgttttttgaagttcttagacaatgtctcccatgaggtgattgaatgatgagtaaatttgttgaacaagctactcactgctccaactagagaagtggggaacaaaatatagcgtagattgttcgtaacattactggctcacatgatagtattgaaattatttaaatgcgacaccgggtctgtggtcccatcgtatgacgagacgtgagggttcttaaatccctgggggaatgcagtattcatgatgtctagatggaaaggctcgagctcctcatccgagtcatatctagactgctttccctattccccaacttgatacctcctgaatttgtcctccaactcatcaattcgcaattggataggatcctgttggcaaagatcaggtttttttggttcaagtgattacgaagatcctgttgttgctggttatagttgctaacggacctcgtcctactcatggacatcgtcctactcatggacctcgtcctgcacatggacctcgtccttgagtaactttctgttacttgtgcctgtactctctcaatcagtattgcgatgagttctttcccctcctcgcattgatcgagtatgggttctcgtgcgtcccaagctaacacttgcctcatca

SEQ ID NO: 226585 - DNA, 1784 bp, Cannabis indica
cttttttacatttctgacagttttaaactgtcgggaagtctacattagcgacagtttttaactgtcgcctattttgtctattttttcggcagtcgtataggcgacggttatagaaaccgaaaaaaatactttaaacgactatttaaaaacgtcgagaaaaattatttttgtagtagtgatatgttaatattttttaattacatattaatttcgttattattttatgttgaatgttttattgtttaatcttaaaattttagggattttattccttgttaaattctctttttgtagatatattacatgctaaaaataattgagtaagttgtaagaattttatgattaaactcttaaggtttatgtgttttaattatgaaatctaatttaggttttttcattatagtgattattaactaaaattaattataaatatctcattaacaatttgactatagtacatcctccattcatctgcataatctgcataattcatagcttcccccattttcgcctaataaaagcttcaaacactgttaatggataatataaaaaaatatgaatgtgtatataatatgtgaaataaacgaatatatatacaatataacttaaggatcgaagtacctccaaccattgaatctttgagctttagtcccacacaagttttgatttgcaaaagaaaccgattgatgtgtgtaattaggcttacaagttctctctactctcttttgatggatttactgtgtttcacagaatgagtagtgagttcggggaccgagaccctatatttatataggtgagaccttccaatcaaggtctcttccacaattaattgtctaaatattttgacaattaattctataaattaaattgggtaacttaaatattaagtaattaaatatgactataattagaatatttcaattaattatatttttataaatcaaatcaaatatttattaccatatgttaacgtagattttcgttaaccaagtatcccccctttttcagtctgacttgcccctatttataattacataggagggcagttaattacagtattgactgatattttacaacaagtatccgctgaaatcatgggatttgatcacattccacgtaaaatatgtgcggttgatatctaaaatcacacagctgtgattggtctgcttttactgggtcaatataaacgtgtattaaatacgttacaaatcgtatcgttttgggacatctcgctgcgaatatagcaataaaaatcctagtagcaagctagagcttttcccacaccttttcgaggttgataatgtgagcctcgtgatttatgatattgaagtcataacgctccatcttacaactacagtttttggcgacaaggtaaacttcagcagccaacatcatttggatgtcagcttctatctgagagaactgacttgacgaagctatgaatctcactaaaagatgtctggagctgattagtgaagataccatgagcgtgccttcctatagcgagatggacgcctcgctattagttgtatgggtttattcgattattatacttagtttgtataccgtgcattgtacgctaagtgtcttatcgaccattgtatctcgtcttctaatgcgtagtgaggtggacgcctcgccttatacatctgaagttgtatggtttctcactaatgcacgaggcaacagtttgcatatatttatctcgcctaagactttatagtcagcaagttgtgaatatactctgtcacttccatatttaatgagttattccattttcaaat

SEQ ID NO: 226586 - DNA, 1811 bp, Cannabis indica
gttccgggaaggagactgggtcccactccctcggtcttgttcccgggtcccggtacgcttacatttctgcatccagtttcgggtcacggggtacgggttcaggtcggagtccgtgcctgggttcaggtttaggtctgagtctgggtctgggtccaggtttaggtccaagtctgggtctaggtcttagtccgggtatgggtcccagatccatacatcgactatgggttagatttaagccccgggtcctaggtcttggtcctagtccgggtttaggatctgggtccagggtcaggtcctaagtctcggtgctagtttctaaagcccgggtctcggatccagatccccatcctggtccggttcctaggtcccagtccgagtctaggaccctgttggggttcaagtcgtaatccgagttcgggttcgagtttctgatcccggtatgggtctagatctaggttcgagtcctgggtttgagtcttgattcagatccaggtttgtgttctgaggcccgggtaaaggtcccccatccaagtctgggtcctaggtcctagtccgggtccatgtttgggttaatttcctagtccaagttctgatttcgattccgtgttcgggttcgggtttggttctgggtctccgtcgaggtcggggtttgagtcctagttcgagtccagggttgggtcttggtccaagtccagatcccggtctggatcagggtttgggtccaggtctgagtccaagtcttgggtaccggtccaggtttaggtcttggtctcggtctgaatctaattcccaagtttcaatcccagtgggtatgggtctaggtctgggttcaagtctatgtttgtatccaggtccatgtctaagtccgagtttcggcctgggatcgggtcgcaggttcaaggctgacatgatcccggacccgaaattggaatcagactaggactgggactagaacctagatattggaccgaaacaggcccaaaacctaaacccaaactcagaccagaacccataccgggacttggacccagaccgcgacctgtgacctgggacctaaaccaagaccggggcctagatacagaccaaaaccatgacccaaaaacatgggccgaacccaggacccaagaacttgactcagacctaggacccgaaacccggagtagactgggactgggactcaaacttggacccgaacctaaacaaagatttggactcggactggacccgtacccaaacccgaaaacgaacttggacccggacagggacctaggaaccgaacatagatgggggacccagacctgctaattgggccaccaaactaggaccagaacttgggcctcagaacttcgatagggatctgcgacccgaccccagaccaaaacctgaacctagggccaacctcgagacctgggattcggaactcgatgcttggacctgaccagtagtcggagtctagatctaggacttagaccagaacctgaacccaaactcgaactcaaaccacgacccagacacatacaagacccagacccacactcgggaaccaaaacaaaatcttgaactagaactagaccgggaacttggaatgggaccgggacctggacctagacctgaacccggaactggacccaccttcggatcctaaccgagatcgaaactcgaacatcaaccatgccctagacccaaatcaggacgcaaacccagactcggaccaaaactcaaccccaacccgtaccctgtgacttgaaattggaattaaaactagaatcgaatggggacccaagaactggaccaggactaagacctggacc

SEQ ID NO: 226587 - DNA, 990 bp, Cannabis indica
ttatcatttcttagccactaaaaaatctatatttttatggcgttaagtcaaattccacattctcttaattatctcaatacatatactatcaacttatcatcccgatcgagtctccaaggtcaccaaaccagaaaatatttttattacagtggtaactcatattacattcacatataccgtataaatatccgtaatttttaaattatgcttatttatccactttagcaaatttaaaatttatgttgaactagattagtaggatcataatcccacttattatctcattaacccattatataattataaaccctatttatttaccattaggcttatcggatattacccaaggtgaagtttgttaatggaaagcttccacaactagatgaggatcatgaggattatgatagctagtgcatatgcaacaacacagttatttcatagatacttcatgcaatttcaggagagattgttgatggcataatgtatcatgataatgctgctgagatttgggaggaattgcatgcaagatttaatgagaaaaatgctccaaggatcttcaaagcaaagaagacgatgcagagtcttactcaaggatcgaacactatgacaacctattttactcgactcaaatcactgtgggatcaaatcagggaatatagaccacaacctgtttgtagttgtggtgctatgaagattatccaagagtatcaagatgatgaccgattgttagagtttcttgttggtctaaatgaatcttacaacatggtcagatcaaagatctttatgcgtgatcctttgcctagtgttaataaagcctatgctactgttgttgaagaagaaagacaaagaggcttaactaatggtagtagttccagtgctgaaccagaaaagagtatttcgaacagtgagggtcagtttgctggaaatgtccaaccattttgacctaagtatcctgcactaactgtggaatgtctggtcatactatagaca

SEQ ID NO: 226588 - DNA, 1867 bp, Cannabis indica
aaatgggggaaagggttcggatgaagtatttataataccattagcgacggactaatagtattaaatttccagttttaatttttttctaaaaaaaattactattagcggcggggcccgctgctaatgcccccgctaatagtattcaaactgtatgagcgggaaaaatcatgcccgtttattagcggcggacagcccgccgctaataatattttcttaaaaaaaaataaacggccactattagtggcggacattgtggttcgctgctaatacccctgttattagcggcggagagggtcggccgctaaaaaatctgtcgctaatgaccaaaaatgttgtagtgtatataccccctagactgatttgactccggtaggtgtgtggtgatcgttcattccacttacgaaggcattagtcaatcttagatattaatttcacctataccatcaaatagctagctaataattataatcattgcattctacattcaaaatcgagtccaaggacatataatatgactatattaaagtttggagttccaaaaccttacctaagtggtgcacatcaactattggtggtggtaaaaattggtttaccggaaacatcgctaaaaataggggtagtatatatcaaaatgactatctcgacaagtagatcacacccatgcagaccgtttttcaaaacagtacacgatttggccaaaaagtcaccgaaaaggggtagagctacaaaaatatcaccggaaaaagtagcgatctgggaaaatggtttagtgtaagttgttttcttcgatgagctgagtctagtggtgaagacgactcgctaaacggacaccagaggtggtcgaaaaatccgttcaaactttgaacctccaaactttgaattgcgattacgagctaacgacggtaaaaggggtgacactgcgcgggggttgaggtcgtcggcacctgggggtttggtctgacgcgtggtgtcagatggtttagtgtaggttgttctcctcaacgagctgagtctagtggtgaagacgactcgccaaacggacactagaggtgactaaaaattccattcaaactttaaacctccaaactttgaattgcgattacgggctaacgtcggcgaaaagggcgacacttcttgggggttgaggtcgtcggcaccagggggttcggtccggcgcgtggagtcaggtggtggccagagagtggtcgccagaaagtggtagtgatggtggttatggcttctttgaagctttgaagataaagaaagaaaaagagaaagaggaagaaagaaagagagagagtgctgatggaaaaaaaagttatttatattataaatatttatttattttattttatttaattatattacattatttttttcctttttgactcggtcaaaaccgagttcttacaattattatcatcatatttaaattaataattagataataacaattctaatacaattttaagcaaatatacattatatgttacaaatactaatttagtatatacatttatatatatgcatgatcacttatatgatgttatattttaatctttatgcttatatcatcattttgcaggtaaggcagctggtccatgattgacctaaggtaatcaaaagttaatggcttgaaaaaattggaagcttctttgtctatgaactccaattgtgacttaaataagtgcatatacaccacccaatctccattgccaattggactcaatgccgggtatacgtaggaacctttggtaaggtttcgcattcccattggaaaatgaaatgtccccaaaatgggtctaccccacccaaaatcaacaactccagttgaaaatcgtagcccggatgagaccataatagatgg

SEQ ID NO: 226589 - DNA, 2376 bp, Cannabis indica
atggagatattggacataccacggaagaatgtcgtaagttgaaagatgagatagaaggtctcatagcgcgaggacactttcaacaacatgtaaaggggcaggacaatgcccatgatcagtccgatccacccaataactcaagcgaccgggggtcataaccttcctctgtaggaggaaggaatagctcggttctcttgagagggaacatattgcaagaagacaaggggcagttaatccgataaagcaatcacgtaaaagtattgtgaagaaagtaaataccgactcactatggctgccgtatcgagctgctacaagggaaagctggtcgtcaaccattagcagttgaagacaaataactaaaactaggattagttcacctagaaccccgagatatgacagggatcgaccctagatgttgaaacaattatgggaatatgttagggattgaccctgaacatcagaatccgttttatcaaaaccagatgcttctggaagattgataaaataaacagttgaactagggaagttcttacgagattaatgattctaaatcgcatcgctgatgtaatattttgaactttagttgtgaataaagtaattgtttctttcaacaagtaattataaagcataaccttttaaaattacttgaggggcatatatgtatgatcaaccggaatttatctggaaatacataatacaatgcaaacccatcacttcaaaaataaaaaaaaaaatgaaaactttttaaaggtccttgaccaaaccttttttacgaaagaggggtcgaactgttataactccctgaccaaacctttttgacgagagaggggtcaaatcgttataacttcctgatcaaacctttctgacgtgaaagggatcaaacaactataatttttgatttaaaacctatctgaagagaaaggaaaatcaaaagttataaatgagatataactcataactcgtgcataaagctgaatactaactgctcgcgctaaaggaaagtattaaacgagacatcaaagtgtcttgaaaaaagaacttaaacctaacacgtgggtagaagatctaattactcatgcaagcaataaaaatatatacatagtgactaggtcaattaaaaatatatttaagtttgcttagaaataagatcactactgatgatcgcgatgcggaatcaatgactgctcccaaatcgagtgtagggcaaatgacaagttgctcgtgcgtaaagtaggttattaactacttaacgttagagagaaatacgagcaatggaaacccctaagaaactttatgcatatgattgtttaaaattgtgaatgagatgcaagcaaacaactacatattgaagttcaaacttagaagtatgaggcaattaaaaagcaaaagtaggccaaccaaactcccaaaattgccttacaaaaagtgctacaaggggcaaaccattgtctcggccaaaaggccattttcaagaaaagaaaagaaaaggagattaataaaaaccaagcctacatggtgggagacttggatagatcttcttcttcttcctctgcctcggccttttcctcctccttcctggcattctcgcagtaagccaaagttttctcttcctcttcttccatgaagcttgtgtccatattggattcgccatccaggctcggtatacggtacagaggctaaccttattacatcgttctgtggtttcagcttccttccctgtgagtttggcctccttctcatcgagcttcttctcaaattcatcagcctgggtcttgtcggtcttctcggcttctttgagatctttcttcaacttctcagcctcctatttgagacaggtgatttcctgctgggcgtcgtcccgttgcttaatcacaaccctacattgggctagtaatttttggacctcgccttccaagtatctaagccgctccaagagtcgtcgattgtaggtaaaagaaaggaaagtagcctggagaattacgagcaaatgaataagaggaacaaaaaaaaaataataataataataacaatacaaccaacttaccataagggtagtccaggttcctcgcaagcgtctcttcgagactcccaagattgattagatcccaattttggggaaggagagccttgagtttgccccagcaggcaatcctaaatgcctgggcaaattcagaaccagcttctcccactgcggccgacaaagtttcaatggcctggctcgaggaagcagaggcatgagctgtctcaagaggaggtgcattggtgttgggagtgatcgaaggaggaatctgttcatgggtctcggtttcagaggcctcgaggtcaatgggctcggacaacatcttcttcttacgggtagtggtttttttttttttt

SEQ ID NO: 226590 - DNA, 1561 bp, Cannabis indica
cttaactctacgtgctcactactatcttacctggtattctaagtatgtagagattccaaatctccgagtattcctgagtaagcatcggtaatccttgtcacatgtttttgggattcacaattaggatataaaaccctaactacttttaggcatgttcacgtgatttttaacttactgtgaagctcgttgctaatgaacgaggttatcaaaaaatcgtgattgttaacgcagattttcgttaacaaaatttgagcctaatagtaatgatctcacatagaaaaaataaaagctgtaaagtaaaaagtatgaacacagagaattttatacatggttttgcaattaaaactctgcatagtccacgagtcaatcttattcaaatttttgatagttttctcggggcctttcttttgtatcattttttccgtcccctttttcatcttacctgccactatttataatcacatagtaggcagttaattacaagattgactgtaatctttttacaataattatcccctgaaatcatgggatctgattacatattacgccgagtaaacgcgttttttatttaaatttcacatcccagtgaatatgatgcttttactgggccagaatgaatgagtattaaagatatatggtaagccttatcatactgtaatgccttgctgggaaggaagttgagttaaccttgatgacgagcgggagctcgtcatatgtcttcccgaggttgacaatgcttttactttaattctgacaactgcagtttctggtgacgagatgatctttttcacgtgcatgccctcttatggcgaggtggacgcctcgctatctctcactttattcacccatatgtttatacttagtttgtatatcgtacattacacgctaagtatctctgttgtcattatatctcctccatgtaacgaggttagtgcctcgtcttgtatagttgaagttacatggtttctcatcgaggcacagggcaacaattagcacatttttatctggcataagactgttcagtcaaccgagttgtaaacatactctgctaattgtacttttaacgagttattcaatttcaagtgtaattatgattacgtgtttgagttctttattcttcccagatcgacacgtgtcttcttgtgatgtgctcgccgaattttgggtataacaattgccccttaaaaagttattttctaataaaaagagctttttaatgattacaaaggatattttcaacatgatcccttttgaaaagacgcgtgtccactgattttggcggttgtgcgatttcgaggtacatcaacattaatgatcatcttttccacttcctctttgaattatatccttaggatcaaacacttctctgatctgacgaagttgatatcataagtataaagtaagaaaaaaggaaccacctcagcattatttcctccattttagaaagtctgagaaactcttaagcttttttattttgctaagaatcactatcgagttttcttgaggacttgcatgccatcccttgttggaaattattttaccaggatcttatatctactca

SEQ ID NO: 226591 - DNA, 2396 bp, Cannabis indica
gaagagcgatgtggtggttacccctgccgcggattcttccaagaggccagctaagggcatacaagagaaagggaagaaggtcgtcattgacccgactgtccgagctcgcaacatactggctctccaagagaagttcgtaagcgatgaattctaattgaagatcgacaagactcctattgaggagctgttgcctcgctctgcggagttagcctcgcagttcattgccatgttctcgaaggcatttgttcccggatccaaggaggtcgagctcgcgaagagacagaaccttcagcttcaggaggacattaagaagttgaaacaagatgcgacttccaaggataaagagctcgaggaactgcgcaaggcgaaggagaaggtcgagctcgaggctaagagggctcagatgaaaattgaggagatgtctcacgatttggaggtcgagaaggagaatggaaagaagcagtatgaccaggcggtctcggactacatatacaccactctctccaaagttccagacttcgacttttcaatcctcggagcagaagccactgaaatggctgaggcttttcgcgccatgtcacacacacaaactcaaggcggtggtgggaatcttcccgaggaggctgaggttgcggatgctgaagaagtcgagaatgaagccctcagcaaagtcgcggatggatctgctcctactgctcttaatgcttaacttttccttctcttttatatttacttgtgttagactctatcttttttttttgtttatgttgtacaagggtactcgcacgttgtacttagacaaatttatatttacgtttcttttgaacaactttatatcctctcggggattttttatctacaatattctcccagtacacgggtactagccttctttgctatttatgatattttgatcacgactttaattacaacttggtgtaataagtagaaaatttcagaaacttgaaaaatttcaaacttgaaaaagttcctttatataatcaattgtacatcatggtatgtaccccctatacttaggattttttttttataaaaaatggctaagtataaatacaagccgagtgcaaactagaaaatgcgagtactattgataatagaattttaggctctcgccgttccaagcccgttgaatcgcagtaccatcaagtgctgcgagttggtaagtggtgtcaccaatcttttctgcgatgagatatggtccctcccaattatccccgaagaccccgtgtgttggcttcttggtattcgacattactcttcgaaggaccaagtctcctactcacatgacttttgccttgaccttggaattgaaatatcttgcggttcgtcgctggtaagtcgcgttttttaggtgagcctgatcgcgcttttcttccagaaggtcgaggtagagggactgtttttcttcgttttgtgaaacggtgaaaacgtctcttcgtaaggagcctgccccaatttcgactggtaccatggcctcgcatccataggagagcgagaaaggagtctcgccagtcgtggatcgaggagttgtgttgtatgaccatagaacttgcggaagctcgtctggccatacccccttacgctcttcgagttttcctttgatggtgtgttttattattttattgactgcttcagtttgtccattgctttgcgggtatgcaactgcagagaatgcttttttgattcccaagtcgtcgcataattgtcgcatctccttacaatcgaactgctttccattatctgaaatgagcttgtaagggacgccaaaccgacagattatggaattgtagacaaactcgcgcaacttagtcgctgtaatggttgcgagtgctttggcttcagcccattttgtaaaatagtctactgcgactactgcatacttgactctgccttttcctttaggtagttcgccaattaagtcgatcccccacactgcgaagggccaaggacttgtgatggaatgcattttcttgctgacatttgtcgcattttcttgcaaaagtgaaagcatcttatcgcaaggtaggccagtaatacccttgttgcatgatttttagagtaagggaattacctcctgtatgactgccacaaatacccccatgtacctcacgtagtatatagtcgcagtcttctccgtcgatacatttgagtaacggctgactaaaacttctgcgatataaccttccatcatacatgacatatcgagcagctcgctgttgcaactttcttgcttccatcttgtcatcaggtaagatatccctttctagatatgagactattggagtcatccaggtgacttcttgggaggtatctatttccatgatcgcttcttgatttattgttggttgagctaatacatccaccgaaattacatc

SEQ ID NO: 226592 - DNA, 5525 bp, Cannabis indica
agttatcagagttaagacaatattattctcgagaagccaaaatgacatgcagctactcgctatcaaagtgatcttggctcccttcgtggtgaggcatccctgtgagataaggcttaccgtatatctttaattacacgttcatcttggcccactaaaagtgggatattcacagttgtgtaagaacctcatttatttagcttgatttgtaattagattttacaattttagagataatggttgtaaatgtatttcggtcaactttgtaattaatgccactatgcaattataaatggtggcagataagatcaaagagggagaacaaaaaaaaactcttatacaagaggccctgaaaatatactcaaaaatctgaataagattgactcgtggactatgcaaaattttaactgcaaaaccacgtagaaaacccggtgttcttattttatttttctatagcttttatattttctgtgttgaatcataattgtgagactcgaatttggttaacgaaaatctgcgttaacagttttgtgcttccattgagaatctctgtgaaaaagctcagaaaaaagccttctgacataaaagtcatggatgacaccaaagataataacccttaagaaggaatcaatcatcgtcacgaaaagaaccattgagtccttaaggatctatcgagtcattgcatgaacagattgcaagtcccaagaagacccaatattggggccccttgcttgacgggccttggatgagcagcaatcggccacttgccaaccaggttgatgaggatggcgcttacgacccaaccagatacatacaaatcatagaactggaaaatcgccatcttaggcatcgattgaaggatgtaaatcggggaaatgccaagttggagcgtgaaatagctaccataaaggcagcactaggacatgaccaaaattaacctgaccttgggaaaaaagatttacgaggcaaacctcgtggctcccaagtcaaggggaaggagatgacccaaagatatactcagaactctagggagatgcaacctgaagaaagtgagggaagtctgggggtacagcctgggattcgtggaacattgaaaaaaaattgccaacccactattcaggctcatgagaatgaaactcgtgcaagcccttgtaggaagaaaaaagtgagtcaaaccttgagacgaaggccaaggttcgaccacaatcatgacaagggcgatctatgaaaacatctgaacctgaaaaagcctgacctccgtgaacgactcggttcaagacagaaggattcattccatttgcgaatgagcgagttggagaataagtccagagtgcatcaaatcacgaaacccaggagacaactagggcacgatactgctggaaaacttgatccagaggcctcaggatcaaagaaaaaagatgattccaaaaggctccctaatgacaagaaacccaacaagtacatccctctttatactgaatacaccgagctcaatgaaattcaggaaaagatctacttcgcacatgtacaagaagccatttttggtgagccaagacctatgaaacacgtgaggcacaagagggatccaagtaagcagtgtgaataccatggttatattggtcataccatagaagagtgtcgttagttgaaagatgagatagaaagtctcatatcgcaaggacaccttcaacgatatacaaaggggcaggaagatgcctatgatcagtttgatctttccagtaactcgagcgactaaagattataaccctcttccgcgagtagaagggacactttggttatctcgtgagggagcgagtcgctagaatacaagggggagttactccggtaaaacaaatttgtaaaacaattgcgacctaagtagatattgtctcgctatggttgccataactggaagtcaacattggctgtcgaagatagaactaaaaccaggattactctacctgaaaccccagtatatgtcaggaatcgaccctgaatattgaaacaattgtgggagaatgttggggatttaccctggacatcaaaacctattttattaaaaccagatgcgcatggaagattgataaaatgagcaattgaactggggaagttcttttgagattaatgattgtaaatcacattatcgatgaaatattttgcattctagttgtgaataaaataataatttctttcaaacaagtaattacaaagcgtatattctttataattacttgaggggcatatatgtatgataaactggaattgatctggaaatacatagtaacatgcaaacccatagtttcaaaaaaaaaaaaattgaaaagcttttcaaagggcctcgacaaaacctttttgacggaagaggggtcaaactgttataactccctcaccaaaccttttcgacgaaagaagggtcgaatcgttataacgccttgatcaaacctttttgacgagaaagggatcaaatagctgtaattttttatttataacctatctgacgagagagaaaaatcaaacgttacgactagcgcataaagttgagtactaacagctcgcgctaagggaaagtattaaacgagacatccaaatatcttgaaaaagtacttaaacccaacacgtgggtagaaattttaactactcatgtaagcaatgaaaatatatataaaatgacaagttcattaaaaatatatttgaatatgattaaaataagatcatttctgatgatcgcgagatgtaattgatgatggctcgcagattgcggaacgagcagataagctgctcccacgtaaagtaggaaatgaactacttaacgtcggaagaaaggacaaccagtggaaaaccctaatgaactttatgcatgtgatagtttatattgtgaataaaacgcaagcaaacgtccgcataataaagtttacacttaaaagtacaaggcattaaaaagcaaagatggtcgtcaaaccttgcaaatttgtcattacaaaaaaaagtgccactagggaaaaaaccattgtctcggccaaagggccatttcctaaaaaaaatataaaaagggagataaataaactaagtctacaagctcagagacttggacagatcttcttcttcctcctcgacctcgctgtcttcttcttccctcttggtgttctcgcaaagagctaaagtttcctattccttctcctccaagaagctggcatccatgttaaggttccagagccaagcccgatatgcagcgtaaaaaccaactttatcgcatcattctacggtctcgatctctttctcagcaagtttttcagcaagcttctcctcaaactcatcagcttggactttgagggtcttctcggcctcttctttttccttctcgacttccttctttgctttctctgcttcatccttcgctttctcagcttcttgcttgaggcaggtaatctcctgttgggcgttgtctcttatctcacacacaaccttgcattgggacattaatttatgagcctcgctctccagatactcgagccgcacagagagtaatcgattagaagcaaaagaaggaaaagaagcatggagaattgcaaacgaatgagtataaaagaggtataaaaagataatataattatattaactaagctgatataccatgaagtgacagtccaaggtccttgaaagcatctcctttgggctcctaagattgagaaaatctgaatctgggggaaggagagtttgaagtttgtgccaacaaccgaccccatatgcctgggcaaatttagacccagcttccccagctgcgaccaaaaggatctcgatggcctgactcaaagaagcagcagcgggggtcacctcgagatgaggaacattggcgtcaagaacagttggaggaggaacttgttcttggatctcgttaaaacctcgagattgataagctcaaccggtgatttcttcttatgagcagtggttttcctttgcctcttaggaggaaccacttcggcactagcaaggacttcagcgttgggtatccttttcttccccttgcggtccagaatgtcttcgtaactcatgtctgcaaaacaagacgaggcgttacaatcattataaaaaaaattgattaaaaaggggaggaatataattttccacctaagggatttaccaaattcactagaaggtacgctatcactagatgaaggggtagaatgaccataataatcgctaaaatccctacagcctgtaattttgaatatatcaaaaggctcgatcggttctaaatcccagctcgcatcaatgtgacctgccttatctttcatagtaccgtattgcccggctataccataaaatgactcgtgacagttgatcttgacatggattctagggtaccaactgccaaacttatgagcaatgcagtccacgagaaaggaattccaagtataaaaattaagacgggagtcttggacggtaactaatgtattatgctcagccctaagtactgtaggtgaccagccacattgattacctcgggatgctccttcaccggatgctgaggggtagtgctttgaggtattgtgcttgggccaagcggtcccaggcctagaagtatacttgggaatcttgtaattgcaagtgtattctttgtcagcgagaaggcccgtcaagcgcaagtttactttgttcaaaaggaatttacatgatcgaagaccgtaagggagagtcatcaggcgcctgtgcctactaaccatctcgggggtaggaataggactcgtcagaagagctatcagaacaaacaaaacattagtcaagtacttgaaaaaggaagactgatgtaaatagataagaagagaacaatcgcttacagagtttgcgaaatgtggttgtgccaatgggggagagactagacatccagaagaagttgtccttgacagacaccttatttggaaagtctacaataacttttggctcactagcgtcagtaccaagatagaaaaagcctattgcggagttcttcctcgatggaacagccttgactgagtaaagatactcaatctctacaggtgtgggacaaccccaattcataaatttgtacaagacttacaacctagcgagaatcctgtaagagatgggagtcaactggaatggggcaacgctaatgggatttatatagtctttgaagtagtctcgaaaagggaggatggcccctgcacaaatatgctcgaggctccaggcgccaatactagttgtaccactactgctagtctcaccactggaaactgggttaagggggtagcaactaaattcacgctctcttactgacctaacctggcatgattgcccaagtgcaattccacaggtcttcaacatgtcgcccgtatagcctgagatagatcgcaccttcgattctattaactcagcctcgaaggtgatgctgggatcctgaggagttttagactggcttgggaggcataatttcgaaatccaagtcacccggttcaaaagtgataactctaagatttagagttattttcatatctttaagcttgaatttaatg

SEQ ID NO: 226593 - DNA, 1281 bp, Cannabis indica
aatggccttttgccacttcttgtgtcaggatggatagtcaggattccaggagtatgatcaaatagctcttcatttaaaaacaaaacctcagcccctgtgtacttatcaatccagtttgggtttgcaaggatcctatctattttggaatagatcctagcttcaccatgttgcttgttgttccaagtgtagtaattaccactatatttgacatcctcaagcttgcaattcgccacacaatgtagaaattcaggcgccaaatctcctctaactttatgccctatcctctcttctcttgtcaaaatgtcattgaaatccccaagtactaaccacggatcctgtgtttcaatctcttgtaaatgtctccacaattccttccttccttccctatcattataagcatatacaacggtagcataaaaggagatattcccatcagttgttgtaatatgacaatgcacaagctgactagtacatcttagaatgttaatgttgaaactatgaggattccaaccaattactatgcgacctcctggatgccaaggcaagttcgacgtgaaacaccaaccattaaaaacatttgtgtacaagactcccaatttagaagccttgactctcgtctcaaggagacaaacaaaaccagctttttgtcgagcaataaactgcttgattacgccttgtttctgctgattatttgctcctcggacgttccaacaaattattttatccattagaaagaggaggtcctccccctcctcctgtattgtcattttccccatcaataccctttccgtttagcttgactggtgcttgtatttctctggctgctgcactatcttccctctcatttcgatcatgctcctcacttgtagatgcctcaactaaagcttggaaagtgttcccaaccctcaattgttgaacaggctctttctctttgattttccaagcttttgctactggttggaacccatcagaatcaattacagtggctttttcctctgcaactttcctttcagcaccttgctgccctattggtttgaccacccattgctgcttttttgccaccttcttgcgacactcctccgtgctatgtcccaaaccagaacagtgcccacaaacatttggtttccactcatatttcacctgaacagagacattagaaccgaattcattctcaaaccaaatcagatcaggcagaggctgattaagtaatacttcaattaagactcgtggaaacgccaacttatctctttgtttagtaattgcatccaccataattggctt

SEQ ID NO: 226594 - DNA, 1681 bp, Cannabis indica
taaaaatcacgctaacacaccttaagtagttaaggtgttacaaccaggttatctcagcgatcggttggtttggccgattagttgctagaactgctagcctgtgcagagttattgggtataaccccacctaatgaattgcaagataaggtctgaccgcatatcacttggcccacaggtggaacccatgaccgaggattggacgattgacagttcagagtttgggcagtatgcttagtaggaatttctttcaagccgcccagtgggatgctagatgcaggttgctggttagcaacttggtagactcttcgtatcagtacggtggctggtcttgttcggtcattaatggctgcctattgagccttcaacgtttccatctctctgtccctccattcggcgaactggcgcctttgctcttcaaacgcaaggttcactgcagcacgaagctcttcctagtcatgatgcaaggtattagtatgaccttgtatgagcccaagagcattacggaggttctagatctcagtgtcatccccaatggttgtctgaacatttgttgctgaagggattccagtgttgggagtacccatttcgactactgaactggtgtttccaatctcttgcaccccgagtgtgatcccagctagaggagacgtcagaccttgacccacagtacgtagttgtgtgtttggttgctcagaattagtgactggtgggatcattgcattccctggggtctgcagtgtaggattcgccactagtggatctacttgattgaccacgcctctgcgagtttgcaccaccatcttatgtgtctgattaaacttaaagaaaaaaccaaacttaggttatctctcaatgaaatcaccaaaatgttgacctcgcttttagccagcgataatgagtcaaatagcaagcgatagaaaatataattaaagtaaagtatgaactaataagcaataaggaacacaagattttaaagacgttcgaccccattagtttggtaatagcctactccccttggattgtattaactcaagaacaaagaatatagtgtttcctctcttgaagctctcacaatgaaatctctaagtatgttgtcttagatttctctcaagtaattctctcgacccccatatcagtgagaatggatcactatttatagggctaaatgcttaagggaaggtttctcttttgcttacaatgtctatagttggtaagaacacatgttacgtatttagaatacatagattgtgggattgggacagctttccatatctctgtgatacgatcccagacttatagggattgcttttgtgcttcatgatgcaagtcttaaaattactaagtgttgatacgctgttcagattgtctaatgctcggttgggaagacattatccgtgcaggtgtatgttgagctttgttcggaacatccctttagccagatgtagggaataaggtccacgtgtcaccagcatgtgttgccacgtcatagtgcaaaaattggataacactgatgcatcaggaagattaattaaatggtcgattgagttaggaaaattcgaagtaacttaccactcgaggacttcaatcaaaggacagacttttgctgaatttttgtttcttttttatttattttgtagatgagattgcgtgacattttaatacttgaaagcttttgtatgtg

SEQ ID NO: 226595 - DNA, 1754 bp, Cannabis indica
taaaaataaattattatttttttcacaaagaagagagctccataaaaattccctcatcttaaaacaccaccattagtgatcataggaatataatttagtgattttacacttctcattacaaagagtaggtctcaaatttgaatattcctcccccaatatatatatatatatatatataaaaaaaaaaccactattagcataatacctcgagtctaaacttaaactaaataggattgtagctaaaaaaaccaagtatctaaaagggaagaagttcctcaattgtagctacagggattctgattcctggttctggaaaaatatcgtcaaagccaaagccattttaaggaagggggcttgtaaagttgtaacaaatggaaggacgactagcatttggagggacccctggattcctcatttgctaggttttattccgaaacctaaggaatgggtcttaaccaatgacctatgtgttgatgacctattacttgagaatggagattggaacttcccaaagctaaatggcttatttgataaagaaatagtgtctgcaattgctaaagggggaaaaccctccggacgaggggatgatagatgggtttggacattggataaaagtggccaatttacaagtaaatctgcttatttgtctcaagctctggatagagctcatcgttgtgaggtagccccggctctttggaacaagttgtggaacagtataatattggaaaggcataagatcctttggtggtgcatcctttccaatgcgctcccaattagatctgtgattagtaagcggttccacattgaggacacatgttgccccttttgcggcttgggggaagaatccatggaacaccttttcttgtcctgcgaagtggcgatgcgcttatggcgcacttcaccttggggcatctatcctatttgcaatactgggattcgaatgtgggattgggtcaaatttatctggaatctaaactctagggggatccggggggaagaagttttcctgtatgcttcaattattgtcgaaactatctggaaagtgcgaaatgatttaatacataacaactctaatctggatgttttgaaatgcattgaccaggtttgtaattcttatgcagaacttcatgatactctcttaccttgcccttctccatctttgaggggctcctggaagccgccacctcaagagtggattaaattgaattgtgatgtaagggtgggatcagaaagtatgtgcttagcggtggtagctagaaaccatctcggtaaggtggttcggatacacacggatcggttggacttctcagatgctttgtgtggagaagcagcggcgttgtgcagcggtttctttggctctggaggaaggttttaagtttgttttgattgagagtgactcgagattagttatcaatgctatcaatgggacggagtctcattgggcaattgacaattatatctcattttgtgctaagtcatctcctgcttttatttgttgtaattttgagtttgttagtagaacttgtaattttgcagcccataatgtggcgaattgggcttttattaacaagttgtatgggattattccggtttcttcagttccggagaaccttttatgtaatgaccgcgagatctaacgttaattattaatgttacgattacgcttaattttcaaaaaaaactaaataggatactcattattgctcaccaatgtgtctgtaactactgacataaaggacacatatataaatttt

SEQ ID NO: 226596 - DNA, 1185 bp, Cannabis indica
gtcaatgatcaggtcttggtcgtgtcttggtctgggtcctagtcctgatctcgaaactagtccaagtctcgggttccaatccgagttcgtgtacgagtctgggtttgggtctgggtctgggtctgagtcccggtttcagtctgttttagggtccgggtcttggtctggatctaggtctgggtttgggttctggtcaaggtctcaggtcatcggtcatgggttctgggttcttgatcgcaggtcctaacgcaagtatgggtctagctatcgatcccagttagggtttgggtctgtgttcggtgctgcgtctagatccgtttttgggtcaatgtccgattcctgttccaaggtcttcattccagttcttgttccaattttcgggtctcgagtccaagtctgggtttgggtcctagtctagaaattgcaacatgtttgggtcttggtacgattctaagatctagacaccgactacgggtttggtccaggccccggtcgtgagtcatgatctatatcccaatcttgggtcccggtgtcattttgattcggatcctaggtcctggtctgtgttcgtgtccgggtctgggtctaggactgagaccggggttaggtcttggattccagtcccagttgggtcccgattctggttctaattttgagtttgggcccccaatctttgtcgggctcctgggtccaggtcttagtcaccaatcttggtctgggtcttgggtttgggattgggtccaagtccgtgtctgagttcgggtttgtgtcccgagacgttatctgacttttgattttggtccgcatcccggtccagatctgggtctgggtcctagtcagattccggttccttgactcaaacctagacttgaactcggacccaggtcttggttcgagttcgggtttgggtttgagtttgggtatgggtcccagatccaaacgctgactacgggttaggtccaagccccgggtctagatttgggtcacggtctcgggtccctatgtagttccactttaggtcccaggtctcggtctgggtactaggtcagggtccaggtctgcggtccggtcatgggtctcaatcctagttctcatgctgtgtcccgggtccaagtccgagtcctaggtctcgatctgagtccaggacctagtcgggattcaagtcttagtccgagttcaggttcg

SEQ ID NO: 226597 - DNA, 2645 bp, Cannabis indica
caagattgaagatggaatactcaaaattttcagaagttcaaaggttatgatcaaagggcttttgaacaatggactctattaccttgatggtaaaacagttgttggaaatgcatcaccagctgtgagtcacaattctgaggtgagtacaaagttgtggcacttaaattaggacatgttagtcaaaggggcatggatgaactcaacagacaaggtatattcaagggtggcttgaagagcaaacttgaattttgtgaagaatgtattcttggtaagagttgcagggttaagtttggaaagggggaatatcacacaactgagaaactggcctatgttcactcagatttatggggtccttctaaggtggaaacaattggtggggctagttacttcataagcattatagatgactatagtagaaaagtgtgggtctatctactcaaaagcaaagatcaagcatttgcaacctttgtcaattggatgacattgcttgagaatcaaactggcaagaaattgaaggtgctaagaacaaataatggcctggagtattgctcaaatctgttcaaagatttctgtgccagagaaggtataatgagacacaagtcagtgatcaaaaccccacaaaaaaatggtttggctgagagaatgaataggacactacttgaaagagtgagatgtctactacttggtgctggtttagagagaaaattttggggtgaagccctcaaaactatttgttatcttgttaacagatgtccatctgttgcaaacaagtttaaaactccacaagaaatgtggacatggcatgttcccaaacttgatcatctcagagtgtttgggtgcactgcctatgcacacataaaacaagataagttacagccaagagcactgaaatgcatgtttcttggttaccctgatggagttaaaggctataaactttggtgtatggaacctggtttcaagaagtgcatcataaatagagatgttgtcttcaaagaggatgaaatggcaatgaaaaacaaaattcccaatgatatacagcctgctatgccagttcaaggtctgcaacttgaggtcgaccaacctgatactcaaattgcagaagagaattctgaaatcagtgcagaaactgacataaatgaaggtgctactgatttaagcacctatcaacttcctagagacagggtgagaagagaaaccagaccaccaagcaagtttggatatcctgatttcataggataagcattgctcactgcagaagagttagaatcttcagaacctactacctatcttgaagctactacaggcagaaacaggttgaaatggttgaaagccattgatgaagagatgacttcatttaagaagaataagacatggatagtggttaagaaacctgaaggaaagaaattggtaggctgcaaatggatttttaaggagaaagaaggtattcctggtgttgaaccagtcaagttcaaagcaagactagttgcaaaagggttcactcatcaagaaggagtgtattttaatgaaattttttctccagttgttaagcaaacctcaataagggtcatgatggcaaaggctggtagagaagaattgcacattgagaaaatggatgtaagaaccgccttcttacatgggagtcttgatgaagaaatatacatgcagcttccagaagggtatgaaagcaaggatcctaatcaggtttgtttacttaagaaatctctctatggtttaaaacaagcacctaggcaatggaatttaagatttgatgaatatatgaagaaaatagggtatgtgaaaaactatgatccatgcatctatcacaataatcagatttacctattgttgtatgttgatgatatttagatatttggtaaagaaaaatcaaagataaacaagcttaagatgcaactcagtcaagagtttgaaatgaaagatctaggtaatgctaagaaaatacttggaattgacattcaacaccctcatcaaatgttataattttgtctcaaaagagttatctacagaaagtgttaaataagtttggaatggacagctccaaaatagtttcacctcctctagctcagcattttaagccgtctaactcatagtcaccagttacagatgcagagaaagagagaatgattaaaattccctatgctagttgtgtatggagtttgatgtactcaatggtgtgtacaaggcctgatttagctcatgcaatgagcatgacaagcaggtttgttgctaatctagaaaatgcttattggattgctttgaagtgggtaatgaggtatataaaaggaacactgaacacagggttaacctatgatggcactagcaaattcaaggaattggtaactggctatgttgactcgaattatgcagggtgtttagacactagaaagtcattaacagggtttgttttcactgtccatgggggttgtgtcatttggaaatccaacctacaagaggttgttgcactatcttctacagaagcagaatatatggctgaaacagaggctattaaagaggcaatttggctcaagggattgacaagtgaacttaacattaattcagaggatgtaacagtgcactgtgataatcaaagtgcattgcatctcatgaaaaatcccatgtttcatgag

SEQ ID NO: 226598 - DNA, 1698 bp, Cannabis indica
agctacacagtacgtttaaaaatcacgtaacacgcctcggctagttagggtattacattacctcaaagatctgggtaagcttgcaaaaggccatgggtatgagtttgaagttcagcacgacctttcatcctcatacggacaggcagtctgagggaactatccaagtacttgaagacctactacgagcttgtgttatggattttggaggatcgtggagtaaatatttgcctctgattgagttctcctataataatagctaccagagtaccataggaatggctccttatgagctgctctatggtagaaaatgtcgatccccggttcattgggatgaaacaggagaatggaaatatctaggccctgagttagtccaaaggacaaatgaggcaatagataagatcaaaacacgaatgcttgcttcgcagagcaggcagaagagttatgcagatcacaagcgtcgggatattacatttcagccaggtgatcatgttttcctgcgtgtttcaccaatgaaagagatcaggcactttggaaagaaaggcaaactaagtcctagatttataggaccttttgaaatacttgagaaggttggacaagttgctcaccagttagctttacctccatcattgtcagctgtacataatgtatttcacgtttcgatgctgaggaagtacgtgtctgatccaatgcatattctgagttttgaggcattggagttacaactgggcctgtcttatgacgaatggccagtgcaaattctggataggaaggaaaaggtccttcgaagcaaaatcatagcattgtttaaagtgctctggaggaatcataaagtggaagaagccacttgggaattggagtctgacatgagaactcaatatccaaagttattcaggttagatttcgaggacgaaatcctttttacggggggataattgtaaagaccgcctaagattaacactttggattattaaataattagggtttatgcatgagatttaattattatttataaaatgcatattgtgaaaatttatttaagttagtatatgtttattatgctatatgtaaattccttgtattatgtgattgtgttcgaaagcgttggaaagcaaggttgagcctctagagagtctcattttgtatgttttagaatatttttgcggggtgtcatagttaggcttcagaaatgtcggaatatagaaattaccaagttacccttttctttgtgggtaagttgttgtctttgttgagggcaacttagtcattaccctagaaacacctaccttgtcttatatgatttaatttatcatattttactatctgtattaagtttattatagaaaaggggttagtgttggatgggtgatataggaggataacttagaaaattcacttagttcactctctctttctcttgttcgaagcatcaagaacccaacctagggttggatttttacttgctgaattctggggtttctagcagtgttggaagagctttgattcaaggtagtatttcctagcttcaaaccttttgattctttgaagcttaagttaaataagtgcatgaaatttgtaatttagggtgttgtggtggagattattgtttgaattagagttctgaagtttatttgtaattacttgtgttgttttgagttgtctttgaggattatattggggttttggcaaggtttgagtttg

SEQ ID NO: 226599 - DNA, 2012 bp, Cannabis indica
cagctccttgtagtttgactgtgttaaaccactgcaaaataaagataacaaaaaatataaagaacgcaagaaacaaaaatcaagttgaacacacaagtaccatagagaaaaagggttgttgctattagaaactattatagtggtccctctttagaggttccaaatataagcaaacagtatgtacttaattcgctctaacatagaacatggagctccaagagggtgacatgtccaaggctttagttgccttgaatccagaagctgcctccatccctatacctaaactgaggaatgtcagtagactccgaacagaccaagtgtaattacattcttacgtagcatatgaagtcagttttcagcacgctaaagcttaaaccagtaataatctctattcctgaattagtattcatagccactgcccaattaatattcttgaaagctgtgttaagaaaactatactagcaacacaatggagttacatttagagagtaattcttaagagatgtgctacattttatcttctcaacaaactgatttgatgcaggtatgaactaccagattcacatcctttattggaacaggttagttaatttctatctatagacttattaactgaaccatatcaatcattctactcatttcattaaagctgagcatttacattgaatttaaacagcttgagaaacgagaaccttaggtagatcatcatgagaaatcaaatccaatacctactgtgagtgaaccgtgagcttaatttaaaccaaattcaagcattacctgatcaaaattacatggatttcatttttaatattccttataaattacatggagttcattttttatcttcagtccaatggttctttaaattaacagagattaaagttgtattgtatcactgttaatctgataacatagccattcaaaaaagaaaaaagtttgaaaactaataattcatccacactgttaagctaatttaatcttagagtaaagatcattttggcaaaagttgctgtaaaagtctttcaaattgcaacagaactctattcctttaaaaatttgtgttacttgtttaagcatatcttaaagacaaaatcgtccagaggcacaaatgttcttgaatgtttctctattttaattttcaaaaaattgttcacataaatatttttacttaagaaacgataacaacacaaagcaatatatattgatgcaaaagagcatgtttggtaccattttgaagcaacattgacgataagaacgacctttccattacattcactacagactcacatcatttccaggaatatcctgaaatcaaatccaattacaaaattagaataactaaaacaaatataataattaaaaaaaatccaagaagagcacaaaacaaccccaaaaaatagaatttttacatatgaagaaaacatacaatgacaaattactatgttaagaattcagcttcgagccctcgactcgcattcggttggggcccaaattgacaaaccctagaaaaatgcagagaaattgaatcagttgaaagtgatggtccccagtgatagggaagggagaattgcgaagttgggcttgacgagaagagagagtcaccaatgaattttgggggccgaatgctctaagctttggtttttggagaaccatatcgtagtatctcaattcaatctaatattttcaaccagattttttcaatttttaaaaataaatatatatatatatatatacctcactatatagggttattttgtgcgagcttggcctgagcggaaacaacaatgttaggggctgagcttggcccgaacggagaagacaacaagagcaggaggagagctgggattggggtggtgtgttgcgtcgatgaccaaaacttagagaagagggatcggggcgagcagcagggtttggggcgagctttgatcgccattcatggagtttggggttagggcggagagagagagagagagagagagagagagagagagagagagagagagagagagaga

SEQ ID NO: 226600 - DNA, 3432 bp, Cannabis indica
tgtatccagatctgggtttgattatcggtccaggcttgggtctgagtctcgagttccgatctgggtctaggtttcgaggcccaagtttaggtcccaaatgtaggtccagatcctaggtcctgatctgggtccattcaggtgtttgtccttctcccagattcaattttgattcggtgtctaggttcgggtttcggtctaggtctgggttggggtatgaatcctggtcagagtctaggtctgggtttgggtccagttctagatcccggtctgggtctgggttcaggttaggtccaagttcaagtcctgggtgcgggtccaagttttggtctgggtcagggtctcggtccgaatcaaggtctcgagtttcaatctcggtctagggcttgtttgggtttgagtccacgttcgtgtccagatccctatctaggtccgagtctgggtttgggatcgggtccaaggtttaggtcctggtctgggttctggtccaggtctcgttaccgttctggtacacgaatgtgtttggacccgagttttggtctcggtttgggtctagggctaggtctgagtttggttctaggtttgggtccgggtcctggtcttgcagttctttttcagtttctagtttcgggtcccgaatttttgtcagggtctgggtttgggtcctgcttctggtttcggttcagtttcaagtcacagggtacgagttcgggttaagtttgggtcagagtctgggttcgagtcttgatttgggttcggggggaggtggaggttcgtatttcggtctcggttagggtatgaggttgggtacggttttcggttctgatctgggtcgaaggcccggtcgctttcaaagatcccagtccggttccagttcaagtttcagttttggttcctgagtgtgggtctgggtctgggtatatgtccgtgtcttagtttgagttcgagtttgggttaggattctgttctaattcccagatccaaacactgactacgggtcaggtccaagcatcgaagtcccggatcccaagtcccgaggtggatcctaggtcatgatttgggccagggtcaggtccttgatcctgatccaagttctgaggcccaagttttggtcctagtttggggtcccaatttcggggtttgggtcccccatctatgtccaggtcctaggtcccgatccgggtccatgtttgtgtttcggttcaggttatggtcttgagtccctgtctgagttcaggtcccagtttgcgtttgggtcccactactagtgtgggttcgagtttcagatcccaggtccgagtctggttcttatgtcctgcgtccagccccagtttttgggtctgggtctgagtttcgctctgggtcccggtctttgtttaggtccaaagtgacaggtcgcgatccaagtcctagtctcggtatgggttctagtctgagtttggtttaggtttgggtcctgctacttcccaggtctgggttctagtcctagacctggtctgattcctattctgagtccgagattgtgtttggatcccattctgggtccaggtccgtgtctgggtacagatccgggtccgggtcttggattcaaacacttactaagggtttggccgaaacctcaggtctagattcggatctcggtcttattccagtttaggtctaaggacttgggccgcgtcatatgaatgtatttaggtcaaggtttggggttgtgtcccggtacttaggtcttgcgtttcaggtccaaggttgtgtcccgtgtctcgagtctggggtcgagttttggatctcggtcccagttttggggcacagtttcgggtcaaagtcccccatctaggtccggatccttagtccaagttttgttctaggatcgagtttggggcctaggtcccccttctaggttctgatcctaggtcccagtctaggtccaagtttaggttcgggtttggatcccgagtttgggtccaagtctaggtcacagtatgtgttcaggttgtagtctggttccaggtcctggtctgagtcctagtcccttttcgagttcgagtctggatcgttatctgagttctaatcgaattctaggtcccagacgaggttctggtgtgggttccggtccgagtttaggtcctgagtctaggtctaggtttgggtctgtatccgggtctgggtttgcggcctgggatccaatctcgttatgggcatttgtttgtacccgtgtcaaggttagggtttaggatttagggttttgggaaggttagggtttaggatttagggttttgggtttagtgtttagggatttaggggtatgtgtaaaaattttaggatttatggtttaaggtttagggttcagggtttaagggaccgcttcaagtctcggcttcaatttcgggtcacatggtatgatttaaggtttgggtgttggtctggtccgagtccttgtctgggtctaggtccgtgtttgggttcaggtccgagtcttggtcacaaatccaaactccaacctcatgtttagtctagttcgacttcttgtatggattcgggttctggtccgggtctgggtcttggtccaggtccgattccctgatttagacaccgattatgggttgggtctaagcctcagttcttgggtcctgggtcccaggtccaaatccagatccttgtctagttctagctcatgtcttgggtcatggttcgggtgtcaggtggatgtttgcgtctaggtttgggtcttgggtcctgagtcatgggtccaggtcccagatttagggcaggatcctaggtcccggtctgtgttcggtactggtccttgtcttgggtcttggcttggtctaggtttgggtcatggttcagttctaaggtcctaggttcgagtatcgggtcccgggtcgcagtcccggtcccatgtcccggtcccggtctcggtctcggtcccaggtctcgatcttggtcccaggtcccgagtctcgatcccattcccaatccgggttctagtcctagtcctggttcaggtcttggtcctagttcgggtctaggtcccatacctgatatcggtctaggtccccatcccgggttcgagtacgagttcttgtacgagtccgagtctgggtctgggtccaactttcagtctgtgtctgggtccgggtctcagtctgggtctaggtttgggtttgcgtttgggttctggtacaggtctcgattctggaccaaatcctgggtcacgggtcttaggttacgggatttgcgtcgcaggtcctggtgcaagtctaggtttgggttcggggctgggtctgggtattgatcccagcatgggtccggctcattgttcggttctgcgtctgattcagtttaggtccaggtctaattccgattccacgatccttattccagttcttattcttatttcgattctcggatccaagtttggatttgggtcgt

SEQ ID NO: 226601 - DNA, 1291 bp, Cannabis indica
atttagtaccataaaaactaatagataaaccttcaacatagcatagataagcgtcaagcaaagcttctaaatgagtagttaatgaacatctggatatccaactccgtgtcacagtaatttattattaaatctcgcaatataaggattttatttccaagatcatgtttgagaattatatcttccgaatatagaaataaagcaattatcaatcaagtatttatgtgtctttattatccacaatagtaggacacattttgaccacaatatcaacatgatgtggcatctatatcagtagaatatcaatacctcatgggtcgggcttcactagatggacccaaagttaatatgtaatttgtatttatcccatcagtgggcaatgttgatgtattagaaccctagctctataaatatatgaaaattcattcatgcgaagggtgagaatctcattccttgaatgcttaggaaaattctagggttcatatacttggtaaaatacttgtataaattaaaaaggcttttctaaccatataataatactgactcgtggactatgggtcattaatccttgaaccacataaaaattcttgtctcattcttagtttttgatatatttctttagttttattatattttaaattagtttctaaaaatattgataaatatgttgtattgtactgtaaagtattatttaatacaataatatgtatgatattaacttgtattaataggtcttctaaaattatattatctttatcataaactagacctccaccacacccttctctggacccgacgtcagactccgattctagacacaaaccttgacctcagatcctaccttagccttggaccctggacccaaatgacagccttatccctatccctggaccctaaccttgctctggccctggacctggatcccgaactccgaccccggttccaaactccaaccttggaccccaactcagacacaaaccctgaccccgaacctaactgcagactttaattcccgatcccagactatttctaaatattataataaaagctaatacaaactatttttatgtataaataatataattcgtattgtacaaaattctatctaaacatagtattcttattattcataaatgcgaccctttatatggccgactaaaaagatcttaaataaaattaattaaaaattaatatgcttgatacatatatatagattttagtgtccgaaaattacttttattttgttggtcatgttgaatggacctcatgtctcatacaaagtgtggtggtaaga

SEQ ID NO: 226602 - DNA, 2395 bp, Cannabis indica
acatgataccctcatctcattcagacaaactttttgtttaaccggactattcaactaaaccttgatgagagagttccttccttagtgttttctcacctccttcattgttcttcttacttcagcctatagtgagtgagtgtcatgcccacacatagcaagtcaagtactcaatcatagtgagtaagacggtggtaaccaaacctgaaggagagaaagagatccaagttcagatcttgataatgctctgctacagaaaggaatcaagggctagagatcttgaacggaaggactcatattattccgctgcacccaatgtaaggttttcttaaactgttgtgtgtttatttcattgttttagagtattcataattagaatgttaaccaacatacttgttagtaaacatagatcctggtaaaatattcccaacacttaaaacaacctacatatttcctgaatcctagtatgaacagttttaaccctaaaaaaactaccaaaaccagataagatgataacgatacaaacaaatcaagtaactgatctacaccatgtaacaaacatgagaaagaagaaagcaacttaccgtttgaagttagggcttggggcaatgcctggtaattccgtctgcaaaccttcgaacgaagcaaggatcgctttgagaagatgaagtcggaggaaactcgcaggaaaaaggttaaggacagtgatggcatacaagtcctcggacgaatttaatggcgatccttgacgaagaagtttaagattttttctcaaactttctgaaatggagaaaatggtgcaaaagtggttccttttttcttattttatacccatgatagtgggtttgtcagatcagagaaagatttgatcctatggacatgattcaaagcggaagtggaaaagatggtcatttaattctgatgtacctcgaaactgcacaaccgccaaaatcagaggatatgcatcttttcaaaaaagaggaacatgatggaaatacactttaaaaagctctttttaattaaaaagaactgattaagaggcaattgttagacccaaaattcgataagcacatcagaggaagacacatgtcgagctgagaagaacgaaaaactcaaacacgcaaacgaaaagtacacttagcatggaacaactcgttggaaacataattcgtagggtatgtgtataactcggctggctgaatagccatctgcgagacagaaacgtacgaactgctaacttatgtattgacgagaaactatttgggtgcacgtgtgcatgacaaggcctcaacctcgttgcgtggaagagaaacaataacactaaaaaatacttagcatatattatacgatatataaactgagtgtagatagtgtggcgagtcaagataacagacaaagaggcgtttatctcgctagaggatggcatgcatgcaaggaagatcatctcgacaccagaaaatatagttataagagttaaaacaatattagtctcgagaagtcagatgacaagcaactgctcgctatcaaagttaacttggctccattctcagtgagacatccctatgggataaggtttaccgtatatctttaattacgcgctcatctcggcccaataaaaatgggatactcacaactgtgtgaataataaaagcctcatttatcttgttcgatttgtaaacaaatcccatgatttgaggaaatagttgttgtaatgattattgtcaaacatttgtaaattaccgcccactatgtaattataaatagtggcagacaagatcaaaaaagtagacggaaaaactcatatgaaagaggccctgaaaaaatactcagaaatctgaataagattgactcatggactatgcagaattttaactgcaaaatcacgtaaaaaaccctgtgttcatatattatttttctatagcttttattttttctgtgtagaattattaccgtgaggctaaaatttggttaacgaaaattttcgttaacaagtatattagacaatccactcacaaaagtcggtacttttttaatgaaatataatatgagagtatttttaattaatgaatacaaaacagaggtattcctcaacttatctctaaaatatcagtgtttttccaaaagtactagcttttgggtaaaattttataattttactgccacaagactgaaatcacatttatattgtcttccctcctccccccttcccctccccctcccctcccctcccctcccccctttttttttcttttatactttgaacacaccacaaaaaaagaggcctctatcttccatactcacaaagagaaccaacacaacaacaccaaaatagccagaaaataaccattaagtccggtgagattgagcaaaaataataaaattgacatcaaataaataa

SEQ ID NO: 226603 - DNA, 2437 bp, Cannabis indica
tggtgacacgtggaaatgattcctcatatctacccaaaggagatgttccgagccgagcaccgtgtatacctgtacggacgaggtcctctcagctgagcagtagataatccaaatagcataccaacacttagcaatttcagcatttgcatcgtgaagcacaagagcaattcctataaatctgggatcgtatcacagagatatggcaagctgtccaaatcccataatttgtgtattctatatatgtaatatgtactactaccaattatagacattgtaagaaaaagggaaaccttccgtcaagcatatagccctataaatagtgatccattctcactgaaaaggaggtcgaaagaattacttaagagagatctaagagagcattctcaaagatttcattgtaagagctttaaaagaggaatcactatattccttgttcttaagtcaacacaaatcaaggggagtaggctattaccgaactgctcagggccgaacctctttaaaaactgtgtgttctttatttatcttttcatattatctaaattatttcacttatcgcttacgcgaggtcaacattttagtgctttcattgagatgaaggatcataaattttctcttaacttcaaattttatcataaacacaatggtggtacaaactcgtagaggcgtggttgatcaagcagatccactggaagtggatcccacactgcagagtccagggaatgcaatggtcccatcagccacgaatcctgaacaaccaatcacgcaaccaccaaccgtgagtcatggtgtgacgtctcctttgaatggaattgcacccggtgtgcaagagaccggaaatatcagttcagcagccaatcggggtattcccagtactggggttccgccagcaacaaatgtccgaacgaccgttgcagacgatactgagatccagaacctccgtgatgctcttggactcatgcaaggccatactaatactttgcatcatgatcaggaagagctctgtgctgcagtgaaccttgcgtttgaagagaaaaggcacctgttcaccgaatggagggataaagaggtagaaacgttgagggctcagcaagcagccatcgacaaccaaacaagacaggctaccatactgatacgaagagcctaccaagttactaaccagcaacccgcgttcagcatctcgctgggtggcttagacgaagatctagttggaaacacttcccaaactctgaacggtcagccgtccaatccccggtcacaggctccacctgtgggccaagcggtaggtggccagaccttattaagaaattcttcaggaggggttatacctaataaatccacccaaactagcagttctggccaagtgctcgaccaaaacaactagtcactgggacaacttggtgcatctgtatttaatagactgggaacaactcatgatctcagagatgatttgaacagaaggagagggttagacgaatagtatgttttgccagccactcagcccgggacccgtgctcaaaatccagctcaaagagatcctgacatgaccttggtcagctaagaggccgaacaagttcatccatccgtgcaagcatagttggatgaactgaaaaacatgttccaaggtctggctggtcagaagaacaatgatctcgagtttgatcgagcacgtggatccccttttactccagagatcaatgttctagagttgcctcacaaattcaagatgcatcgaccaaaccaagaacatacaagtttccaaacaaaaatgggtctgtactattataaagtcatgccatttggtctcaagaatgctggagctacataccaaagataggtaaataaaatgttcaaagaccaaatcagacgaaatatggaagtgtacgtggatgacatgctcgtcaaatccaggaaggctggagggcatatagatgacctagacgaatgcttcaaagtcctaaggaaatgcaacatgaaactcaatcccttaaactgctcttttggagtcagctcatgtaagtttctgggatttatcgtcaatgctcgaggaattaaatccaatccagagaaaattttatccctcctggatatgaaatcgccaacaaaaaccaaggaagttaaaagtctaactggtcagattgccacactcagtagatttatttcaaagtcaatagacaagtgtgttccgttctttaacatcctgcgaggaattaaggacaggtgcttgatcgagttgactgcccctagtccgattagtgctagaagacccaacaatatattgtaagttgagggaaggtcgacgaccaagaagtcttgcatatagtagcagttaaaggtgccttgcctacggttaatgcgagctcgattatgccaaggctggcgaagatatcttcggtaaatccgcaaagattcaccatacaaggccttaacttggcctttt

SEQ ID NO: 226604 - DNA, 1745 bp, Cannabis indica
aaacactagattagattttttttaagtgaaaatttacatgaaacgaaaatagagcccagagtttttgagcttgagacgtcaagaattgttgacctttaattctccatggaaacgagatggcgtcaaatttaatgtaaaagtaaagaagagagatcaaatacataataaattagtattttgttatgagtttagctttttattgttagtaactcctcttataatgctcttttgggataaactcaacaagtatcaactaaacactccttgcacttgtggtgccatgtaaaaagttcaagattactatactacagaacagatccttcagttcttgattggtcttaatgaatcttactagagaatacaagctcagatcatcctcgttgatcctcttctaccactatccaaggttttctccatggttgttcagcaagagcgccaacgttgtcttggcaacaccagtattgttgttgctgcccctgccaaaccgaaaccaaatcagccttctcggaacaaaaagcctcgccctacatgttctaattgtattaaactaggtcacttggttgagaagtgctatttcctccatagttttccactagatatagtgacaaaaagaaaaatacatctactgctcgagcaaatcaagtttttgcgagtcttgaggccctcgttcctagctcctctcaactacaactcaaccagcaattgatttcattactcagtcagcaaatccaaagcgctccatccaccagtggaaatcttcctatggtctccaacgtctttggtaatgataaaatttttttccttttttatggattgtagatagtggagccactcatcatatatgtcattatcttcattgctttacatctctaaatactaagcctcttgctaatattgttactttacctaatggccatcagatacacattaacaaatcggcaccgtaaaaatatctgataaactaatactaactcatgtgttatatattctagaatttaagttcaatttattttctgttaatgcttatcttgaacattgtcataataaacttacattcacttctaatcaatgtttgattcagtatccctccctgacttctacgattgggacaactaagaataatcggccaactatttttctttgaacaagagcggcattttctcacatccaatatttttatttttgcaaacacttcttgtactttgaaggacccctagcacatcagccttggtcatccttctatgaacattactagtatactaaataaaaatttacaattctatgaaaaacctctagattatatgtgctctatatgtcattttgctaaacaaaagtggcatccgtttatttctaacaataattttgccactgctccttttgatttaatacaccttgatatataaggacctttttatattattagcattgaaggttatcgatatttttttaactattattgatgatttttttcgctatacttgggtttacatgctaaaatctaaatctgatgtctcttttattattccacaatttttttcgcttattgcaacataatttttagtttccatcaaagaagtgcattgtgacaatgctaaataactgaatttggcgagtttctacagtagcaaaggaactacaaagtacaagtcttgcgttagtcgccctcaacaaaattctgttgttgagcgcaagcatcaacacatcttaaatgtcggtagagctttactgtttcaatctcatttatc

SEQ ID NO: 226605 - DNA, 4009 bp, Cannabis indica
aggaagttttttgccgacgagacaatgccatctgctcccacacttttaccttgccacaccttgtcattccgtgcgttccacaaagcccaacatacggccacaacagtttcttttccagccttatcaacctgctggaacgcctccatgcaccaaaccagaaaattaaaattctggtgcaaaaccgtgcctatacccgttctctcccagcaaattgcagcagtcgggcactccaccaaggcatgaaaaatggtctcctctgcactggaacagacaggacacaacgagggaacctccacatgcttagatcgcaactgaaccatcgtgggaaggcagtccatacaagctctccaaaccagatttttcatcttaggtggaacttttaaacaccagaaaagtttccagaacttgctcaccaaggtctcttcaagctcagccactccattgaggatttgaagttgattataggcactcctcactgtatacaaacctgaattttccaaagaccaagtcaagcaatccattgttgaagacggctgaagagggatttttaaaataagctctcgatctctcaattcaaatagatcatttagaatctcaatatcccactccctaccatcaatcgacaataagttctccaccttagcattcgacagacttggatgtgtagatatgaccaatggatttacattatcgggcaaccacggctctcctaaaacccgaatatttcttccattgccaacagtccatctaactccacttacaaccagtttttgggcttccaaaatgctgcgccaaacatagctcgggttagagccgagagatgcagtaaggaaagagccattaggataatatctagctttgaagatccgcgcaactaacgaattcgtgttaacacataaccgccagccttgtttccctaaaagagccatattaaaatcccttaagttccgaaatcccattcctcccttggttttgtgatggcaaagacgtttccaagacatccaatgaatacccgaattagatgaagcagatgacttccaccaatagcgagccattaaactctccatttcagttgttatttttgtattaatcatgaagacgttcatagcataacttggcaaagattgagctactgctttaattagcacttctttccccgctctagatatgaatttggcactccaaccttgcaacttctttctaatcctttccttcaaatagcccaaagcagcagtcttgtttcgactcattgaactaggaaggcctaagtaaaggcttcccgctggtgcaattcccatagccaagctcgtgcaaagaacatttcgtaagttatcctctacattggaactgaaaaatatagaggattttgcaaagtttaccttctgacccgaagctagttcaaacttatgaaggatttcctttatacggcgagcttcaacttcattagctttgcaatacaaataactgtcatcggcaaacaacatatgagaaatccttggtgcaccattagctactttgcacccatgaatcaaacccctttgttcatatttacgaagtaaagctgtgaggccctccgcacaaagaataaagagatatggtgagaggggatctccttgacggatccctcttgatggtacaatcggccccacttcaaagttgccatgcataaacttgtaacttgcagacttgacacaccgcataagaagctggacccaattctccataaagcccattttgcgcagcatagcttcgagaaacccccactccacacgatcataagccttgctcatatctaacttcaaagccatatacccctccttgcctctatgttttcttttcaaataatgaagaatttcaaaagaaaccaagacattatcagaaattaagcgccccaggataaaagcactttgattttcagagaccacgacatccataaaaggcttcattctattaaccataactttagtaatgatcttgtacaacacattacataaagcaataggacgcaaatcagccataaactcaagattcttctttttcggaatcagaacaacattcgcgcattaccacaaccattatcaaaaataccttgttcgaagaacttacggacacagtggatcacatcatgcttcacgataggccaacatttttgataaaaagccggagtcatgccatcaggtcccgggcttttgtctggatgcatttggaatactggtttcttcacttcttcttcaacaatcggctgcgccaactctaaattcatccaatccgggacaacattcgggacatagtcaattatctcttgacaacttgtatttgatgaagtgaacaaaacattaaagtagtttgcaacaacctgaggaagaccattttcccaagaaacccagttaccatgctcatctcgcagcgtacttatcatattgttgctcttccttgtactcgctgccttatgaaaataattactattttgatcaccttccttgagccagaattgctttgcacgctgcttccaataacattccctctggtcaagagccttgaaaagattttcctttgcttccttataattttggatcgaagcttcgtccctaccatgattaagtctcttcaaatccgctttgagtctctttattcggtgattaagagttccagtgatctctttgccccaactactcaacttttcagcacacaacagaagcttctcactaaagcttcggtcatgtccctcttcccaacagtccctcactatctctacacaaagtggttcctttaaccatgaattctcgaaacgaaaccgacgaataggtgtaacattagtctgcggtttgggctcaagaaagatgggcgtatgatctgaggttgagtaatccaaattggtgagagaagcagttggaaaaatctggtgccacgtcgaagaagcaagcgctctgtctagtcggacttcaacccaattattcgatcccctccctttttcccaggtaaaaggatgctcctgaatttcgatgtccaccaaatcacattgttgcagagcagtattgaaccccgtaatgagtccttgagggtacggcctaccccctcttttatcctcttgtcttaccacattgttgacgtctccaataacacaccacggtagatcggattgtcttgctaaagtacgcaacaaagcccacgtttcatgccttctactttgaattggttctccataaacccccgtaagtcgccaattaccaaactgagttgagtgaatagccaagtcaatatgatttttgttataacccaacaacatgccatcatctttattcttccataagaaagcaactccacccgacaacccaatagagtcaacagtaaagactccttcaaaacccaaaagattagctaaactaaccactttagatttttgacattttatttcacaaagaaaaataaaatgaggtctcttttgagaaacaatttctcttaggaattgaacagtccgttggttcccaagcccccggaaattccaacttaaaacattcataatgattggcgggcttggaaaccaaggcccgccccaacgaagttttttggactacccgaagagcccactgccacttttccactatcacacacaacatccatttcagcataaatgatgtcttcatgggctttattagttatctctaactcctcttcattcaccggcccactaccatcaaccaagcccattctcctccttttattatccacaaaggtcagcccttcatttgaaatgttttcccctggcgccaactcaccttcttccccattcaattcccttatttcaagggatttttctttccctaaatgtcgtgcactccttaactccccatatagattcttatcaaaattaacagaattattgggtaataaagagtcacccggattttttgcgattgggatttgatgatgatcggctcctcttgtcccctgagacgaactaccgcctgatctgttgctggtaaagacccttgccgccgggataccagtt

SEQ ID NO: 226606 - DNA, 4118 bp, Cannabis indica
actagacatttcctagctaacatgttagcacactcattattagttctttttacatgaatgatttttacagtctgaaaattggccagcacattgtgaatttgatgcagcaggttgctttcagccgagtgatgttgatccatattgttgatttcttccaccagcaccctgcaatcagattggacttcaatcgtgttagttgcctcagctggaggattcttcaaagcttccaaaatcgcccaagcctcagccatcttagctaagcaaatgccattcctgtaaatctgcccagcagcaaggatttgaccatcagtcttgcgccagatataaccgagacccataccagcaactttatcaactacagctgcatcacagttgacacagatgcattcagtagcagggggattccactgcttcatgttaattgtgatatcggcctcttgctgaattccatcacttccagctttaagaacatttgggtaggcagagaagacccaatatatcaattgttgatcattcatacttggtaattgctgccatttcctatttcgttttcccatatagcccacatcactttgatagtgtcttcaaactcgtacttggtattagtctgttttatggccattaaaacatcaaacatagatccttcccctaaacaagagcagtttttgtaccaagaacagagtttccaaacgtttctaactctttcaaagctccataaagcatgtgtaagggtttcctcgtacctgccacacatatcacagcaagtattaatatccatacctctgtgtttcaggttagttttggcaggcagccagttgtggcaaactctccagctaaacagcttcatccgagggggaagttgtaggctccatatcattttccaccacttctgaatctcagccatgttggaacaccttgtgggatgaagatttaattctctgcttacctgatacccacttttaacattataatgaccattaggggtgaaaggccaaaatagattgtcttccatgtataaatctattggaattccttgaatccaaggaatgtcattctcatgaaagtgtttagctatctcgtccatattccactctccatcccaagttataaacttatgaagcttggtttgaggtggaatgtcgggaaatttagagagagtagattcatgaggtctaaggagccatttgtcttcccacacctttatcgttcttccattaccaactctccacctagccccttctttgataatttcccttccccaacaaatccccttccaaacacaagaagcaccattaggacaacccgcttccataaaagatgtattaggatagtagctattcttcaaaatccgggtaagaagagcgtgaggattatgaagaagtctccacccttgcttggccaaaagggcttggttgaactcggttagactacggaagccaaggcctccctcctccttaggtctacataatttatcccacgaactccaatggagtttcttatgatcttttgtatccccccaccagaaatttgcagccaaggagtgaagatttttaatgagcttctttgggagacggaagcaactcgtggtataactcgggatagcttgcacaacagctttgattagtatttccttccccgcttgagagaacattgaggctttccaccctttaagcttgttccaaactttctctttaacaacttcaaagacctcttgtttcctttcccacaaaactcggaagccccaagtatttggcatggtgagagactagtcgaacccccaatcgttgagctaaagcctgtccctggctagttgatatcctcttacccatgctaacttcagatttcttgaggtttatttgctgacccgagagcctagagtattggtgaaggatcctcttcatagtatcacattcattttcctttgcattaagaaaaacaaagctatcatcggcaaagaacaaatgcgaaactttaattctttctctcccaaattgaattccattaatgcttccagccctttcggcttcatgaataaggcaagaaagaccttccgagcaaagaagaaagaggtatggggatagtgagtcactttggcgaaggccccgagtagggtggaatttaccgattttctccccattgatgaagaccgagaaagagacactctccacacacttcatgatcttgtggatccattgttcttcatatctcaatcctctcatcattgttcttaaaaagttccattccactctatcgtaagccttggacatatccaatttcaaagccatttttcttccgtttccaaaccttttagtcttcatgcaatgaaggctttcaaacccgattattgcattatcttgtatgagcctaccccccacaaaggctctttgctcctcagaaattacttgatgcagactattcttcattcggccagcaaggcatttcgccacgattttatagatcacattacatagacttattggtctaaaatctgacattcgggttggctttggcatcttaggaataaggcaaataagagtgtcattaatttcatccacttgcattccttcattaaggattcccaagcacactttggaaacttcaagtccaatcaatgcccaatattttctgtaaaaaagcccaggtaatccgtcgctgccaggagcttttaagggatgaatattacgcattgccttgaacacctcctcttcggtgaatggttccagcaaatagtcatttgttgctcgagatatacggtgcgggataatactttgaaactcttgcaactcattcatattagctggagtggaagtgaataattgtttgaagtagttacacgccacccgacccatatttcggtttcccgtgatccattgaagctggtcatctatcaacccttggatggtattctttgcttttctattgctcgccttcctatggaaaaactttgtgttcttgtccccatcttttaacgaaagcgctctactccgttgcttccaaaacttctcctctttgtcaagccaaacattttgtttccgttccaattcctgcatttgttgccaatcctgtatagttgtgcttcgggtaagtaaggaaattttatcttcatattcctttaaatgccttgacatctctttctttttggttttgttccattgttgaagagcctgcccacattttctcagccgaatctgtagctctctagtgttcgaaactttcttatcttgttgccaagctgactgcacaatatgagaacactcattgtcttcagcccaagcactctcgaaatggaatctcgtgcgccatctagtcttattatgattctgtacatgaggatcatattccataaggagtaaaggacaatggtccgagtttatacgatccaaatgacgaactttcattgaacaaaacatatcaaaccattctaaattaccgcaaacccgatcgagtctttccaaagatgagatcatttttcctcccattgcaccaagtgtaatcacttccctcatacccaacatctcgcaaatgacagttatgcaaggccttccgaaaattgttgatgaggtaccttggcttggggaggcctcccattttttcgctttggctcacaatttcattgaaatcccctccaactgcccaaggccctgaatacattcggcttactcttctcaacagcttccaagaatgacatcgttgactaggatccggatcgccataaaaccccgtaaaccgccaccattgaccattctcaattctaaccaaagaatcgatatggaagggggagaaggagagcacttgggtttccacatccatggaccacaaaagaaggagccccccacttttccctcgagcttcaaccacaaaacacccaacaaaacccaacttaactcgcaacgactccgcacgcactttaccaatcttagattcagcaatgaagatcatttaagggctgaatttattcactagggaagataaagaacgctccgtccaagggttccccaacccttgggcgttccaaattagaatattcatggctgtaggcgaccctgattatcagggttcgcctcttctgtaatctgagtgacaatcaaatcccccataggagaaatgttagccccttt

SEQ ID NO: 226607 - DNA, 2157 bp, Cannabis indica
gagtaccccaaaatactctagtatttctgaaatcagctgatcctaataattccatcaatattttactaaaaccgttgtgatatttttttccatctaattagctctccagggttgccgaacctgaaatacttttatttcacaaataactcatattacatttacacatgctatataaattaccgtaatttataaattacgcttatttactcacttatagcaaaatttaaattttatgctgaaatagattagtaggatcataatcccacttattacatgattaatccataatataaagataccctaattatttaccattaggcttatcgagatattacagtaactaataagtattttgaaggcaaacgatgatcagttttcctggagccattcagatatgattgggatcgaccctaaaattatttgccaccacttgaatatcgaccttaattacccagctaagagacaaaaaaggtgagtcttggattctgaaagacaaggggcactcaaagaagaagtggacaagttactgactaatgactttgtacgcgagacatcctacccctcatggatatctaatcatgttcttgtcccaaaaccaaatggaacttggagaacttgtatcgactttttagacttaaacaaagcatgtccaaatgattgttttctactaccaaggatcgactagttggtggatgcaactgctggacatgaggtaatgacattcatggacgcacattctagatataaccagatgaaaatgcgtctccctgatcaggagcatacaagtttcataaccaacatgggactttattgttataaagtattgccatttggtttgaagaatgttggggcaacgtatcagcgcctagtaaatgtgatgtttgaaaagcaaatagggaggaacatggaagtttacgtcgatgatatattggtaaagtcggtaaagagtgaatatcatacaaaagacctcacggagtgctttgagatatttagagtgtacaacatgaaactcaacccacagaagtgttcctttggagttttcttagggcagtttctgggattcatagttaacgtgaggggcattgaagcaaatgctaaaaaaattaaggctttgatagaaattccatcgcccacaaagccgaatgaagtccaggccatgacaggaagaatggcagctctaaacagattcatcttaaaatcaactgacaagtgcttatcattcctcaatgtgttgtgaggcaacaaaaagttcgaatggatagacgagggaaaggaggccttcaaaacacaaagaaacatctatcaacacctctacttttggctaaaccaacaacttgagagactttactcctctacttggctatctcggagaatgcgattagtgcagctttagtgcatgaagagggaaagcaccagaaacatgtttactatgtaagtaaaatgttactaggggtagattcgagatatcctcctcttgaaaaactttccttttgcctaatccatgcatctcgccaactaagaccttacttccaaggaaatcccataaaggtgttaactgatcaaccactaagacaagttttgtcgaaactagatgtttttggaaggttgataaaatggtctatgggcagttccacataacttatcacccaagaacaagcattaaaggctatgcttttgcatatttcctaatagaaagaatagttcaagatgaaaatccacttgtcgagcgagatgcaaaaacttggaagttgtatgtggatggagcatctaatgaaaatcgctcaggtgcaagggtgatattgatctcgccagataactttaagtttcactatgccctaagattccaatttgacacctcaaataatgagggagagtatgaagccttgatagcaggtttgaaaatagttaaagttttaaaagccaagaatcttatgtgaaatagtgactcacaattaattgtgaatcaagtcctaggagaatactaggcaaagggttttgtaatgtccccgcttcaagcctccattaggcccttacacccacgaaatgatggctcatatacacgagaacgtcactatggctgcttcatggacggacgacagacactacagaccaacacgagtttttccagcgtgctttgtcctcactcgcacacttcct

SEQ ID NO: 226608 - DNA, 1650 bp, Cannabis indica
catgccgtgaaacattttttcagtttgtctagctgagcctgtacagctgggctgacctgctcggtattctggtaaatttggattacgtcagcatctttctgagcggggatttgagtacgggctccgggctgcacaattgttgtaacattctgattcattccttaggtcatgggttgtccctaacctttcgaacacagaagcgcctagctgccttagcggttgattcacttggttgacgagtagaatggcaccattgatctggttggaaccatcaagtatgactcctcctgatgaattaccagacaaggtctcctcgcctaccgctgggcccacgagtggaactcgtgaccggggattgggcggctgaccatttgtagtctgggaagtattcattgttggatcctcgtccgtctctcccaggggaatgacattcgacgattgctgacctacagtttggtaggctcttcgtatcagcacgatagcatgccgactaaaatcttcgatctatgtatggtgagcccttaatgcctccatctctctatctctccattcggcgaacatacgcctttgttcgtcgaacgcgagatttactgcagagcgtagttcgttttgatcatgatgtaggtattattatgaccctgcatgagtccaagcatgtcacggagattttgtaattcagtggcatctccgatagtcgtctgggcattggttccaggcgaaatagttgtgttatatagttgggtgcggaactgttattcccagtctcttgcacacaaggtgcaacttcatctatagggactgtttcagcattccccacgttcgccggctgtccaggattaatagcaggcagaaccttcgtgtttcctaggttctgcgatgcaggatccagcgtctgtgaattttctggattagtcaggcctctacgagtttgcgccatcgtattggcgattggatgttgaataaagagcgatttgtgatccttctctcaatgaaagcaccaaaatattgacctcgcttttagccaacaacaacgagtctattttataagcgataaatgatttataataagaaatatatgataaagcaataaaaagacacgggaattttatagaagttcagccctgagcagttcggtaatagcctaatcctcgttacttgtattgacttaagatcaaggagaaagattcattttcttatagctcttacaacagtctctctcaatatataattcttggataatatatttagggtatagtcttagctcaactacttttcgattgatcttttgccaagtgaatatgcatcactatttatagggctagtaagcttggggaggaagagtttcccctctcgttacaatgagtataaacagaaagatcatgggatcaatgttgaatgcaaggatcgtgggattgaggctgaatacactgatagcgggatcgtgtgtatgccatatccacataaattgatccctaagttatagggattgtgatgatgactcaggatgcgtaagttgaattcactaagtgttggtcgctctgtgcggatcgctgaatactttgccttgggcatgccagcgaggcatcctggtcagattatgcttcccgaacagatgttccaagtagactccacgtgtcaccattcatgtga

SEQ ID NO: 226609 - DNA, 1569 bp, Cannabis indica
gcaatcctcttagatccgttcacaaaaagcagcatcaacagtttggtactttaattgagagcgatgaacacaagtgctaatcaccacttaccgtcatggtaagtacgagacaaacgaattatgaggaggaagaccatggtgatcccatgaatgaagaaaattccatggaacaccatgaagagtatcaaccgcagatgacgaaggtcaagtccgagatgctggaagttcgtcatcactatcccatggtgtacgacaaacaccaatctccatgaggtgttcatggaaaatgaggtactgcgccaacgcctagatgaaactctcagactcaatagagagcagcaagagatatggtacccaagaggctacaagaccacaatgacaaggaacctgcgagcgtctggggataagaaggggacgaccccgtgggattcgttcaacacgttaccatgtcgaaggccaagagaggtttaggtcacaaacaactcaaagtcgtgatactaaccgtaatgtcataccacaacggccttcttgtgagaacgacactcatggtgggaggagtgagcgtgcctcatcacagcaatgataacgggtcacaaaattaatactataagggaactaatattcgatcttcttagaaagcttgaattccaatattgtataacatgttcctagccactcattttattaaggtccaaaaatagatgttgtaataatcatcttttatgagaagctttaacgagtgaatcaaagaacttaacgaacacaagaagaagttcatgtatactccggattcagactgatatactaatgatcattattatgatatgaataactctttcattgtaaatgacatgttaatgaaagatgtttattcatatcggtccaaccatgtataatcaaattatacacaaaatcttcactacatgtctatccacatatgtgatcgtaatcaaaatcacacacactagagtatagtgtatagtaaaacttggtaattctatattaaagatctctaacttaaatacaccatcgatttgttttaattatattgtataatcttaattctcttgtacaaccttacaagattatacaatttccatatgaataagaaatttttagatatttattaattatacttctataattaaagtattcatttatcctataattgtatttcatatattctataatatattaactattaaatacttacttttaggcataaattcttacaatagttctcaaccaagtatctaagactataaaaaaaatttgcaacattaactattttagccttaaaaaaagaaattaataattaagtgcttaaaatttaagtatttttgtagcaaatagatataaatgtgtgtatatatgtatagagaaaaatacgatcataattcccaatattttcattttgttagcaattaatctttaaaactcaaattttgatgcatggcgaaacccccaaaactttctgttagcatttagttatttctatctatttttgacagttagttgtcatattggactatccacgaggacacaatttacacatgatacaatttaatt

SEQ ID NO: 226610 - DNA, 1437 bp, Cannabis indica
cggagacccaaaacttgaccctaaactcgaggaacaagacccgactttggacctgaaacccaggaactgactaccgggacccaactctgaacccaaacccaaaccaaaacttaggactcggccttggactcagggctcgaattggaaccagaccgagatccgaatctggacctaaggctttatcttgactcgtagtcagtgtttgaatccaggacccgaactcagatccgtaccaagacccggaatgagaatcggacccggactgggatgagaacccacaactgggactgtaacaggacccaaacctaaaaccatacttagaccaaaacccatatcgggacttggacccggaccgagacctgtgacttgggacctaaaccaagactgggacttggacccagaccaggacccagaccccgacccagagctaagaatcaaggccagacataggacccaagaactaaactcagactagggacccgaaatccagaccctgactaggattcggaccaaaacgcggacccaaacccacacttggacctgaaacccaaacccaaactaaaacacgaacttagacccagatcgggacctaagacccaaacatagatgggggacccagaccaaagaattgggccccaaactaggactagaacttgggcctcagaacttggatcaggatctgagacctgaccccagacccaaacttggacataagacccacctcgggacttgggatcaaggactcgattcttggactccacctgtaccgtgtgacttgaaattggaaccgaaactagaagcagatcgggacccagtaataggacaaggagcatgaccaggacctagactcgaaattgtaactggactaagacccggactcaaacacagacccatactcagattctgtgtctgggttcgagttcggctccggttttgggtctgggttggggtctcagtccttgtccaagtttgggttcgggtccaggtccaagttagtgtccctagtgcgggtccaggtttgggtctgggtcaggatctcagtccaggtcttgggtttgggtctagttctaggtttgcgtctgcgtctgggttcgtgtccaggtcccatgttttgaactcggtctgggtctgggtcggtatttggttcctggtctaagttcatgtccatgtccaggtccgaatcctagtctcggtgaacggcttagtgtgggtttgggattgagtcccgagttcgggttcgggtttgggtttgagtctcagtcctagtctgggtccgagactgggttttggactacgtttggctgccggtccaagtctaggtcgaggtattggtcacggtctcggtctgttccagggtcctgttcacgttcttgttcaatttcagtttcgggtcccatgtttaggtttgggtccaggtcctagtccagcttcgggtcc

SEQ ID NO: 226611 - DNA, 1400 bp, Cannabis indica
gagaagatgcccgccaagagctcaaaagaagagtccagtaaagggcaatgaagtccagcccaaagtggggacacagacatagatccttgctttggggatcttccaggcagcttttcacctgtagaagagttggaggaaggggaggttgatcccacttctcaaactagaagactaaagatcgagaagggtttagcgccagaaataaaaacattattgataatatttctaaaggcaaacctggacctcttttcatggtcacatcgagacccatgatgacccatgatcacaacattaatccaaacatttgtcttgtacaacagatgaggaggtttttggataaagaacgcgtttaagcactcaaagatgaagtcgagaggctgtgagcccatgacttcataacagaagcattctatccactttgggtatctaaccctgtgttggtacccaaacccaacaaaaattggagagtgtgcattgacttcaccaacctaaacagatcatgtccaaaggactgctttctgcttccaagaattgaccaacttgtagatgtcacagctggccatcaaatcttgagtttcatgaacgcatatttaggttacaactagataaagaagcatctgccagatcaggagcatacaagcttcatgacagacttaggcctgtagtgctaaaaagtcatgccctttaggataaaaaatgcaggggccacatatcagaggcttatgaaaaaaatgttcaaagatcttatcgactacaacatggacgtgtatgtggacaacatgcttgtcaagtccaaaagggttaggggcatgtggaggacctagaccaatgcttcaaaatcctccgcaactacaagatgaagctcaacacccttaaatgttcttccagagtagtctcgggaaagattcttggcttcatagtgaatgccaggggaacagaagcagacccaaacaagatccaagcccttttggacatgaagtcacccacaaccatcaaagaagtacaatgcctaacaggatgcattgttgcactaagcagatttgtgtctatgtctacagacaagtgtgtaccctttttcaacattctcagaggcaacaaaaaatttgagtggatagaggaatgtgaaaaagcattccaagagttgaaaaaacaattggctcaatcacctgtgttgtctaaacccttagacaataaagagctaggcgtgtacctagcagtcacagaacatgttgtgagtgatgtcctaacaacaaaagaaaatggtgtacaacaccctatatactacatcagtaaaagattaattagcgctgaaagtcggtacccactcatggagaagcaaacctacagctttctttttgcttctagaaagctaaggcaatacttccaggcacacccgataa

SEQ ID NO: 226612 - DNA, 1365 bp, Cannabis indica
gttgattcttcttcactttcctggttgaggtctatttgagaatgaggaaatagataagcatttaattggttgcttctggttgagcaacgcctctgaccttcttgacggctcctttgatcttgatgaaatagttagctctgtctagaaactcttgaatggtgtatactgatttaagtttcaagtctttccagaatggactcgttattattagttcaactatcattgccatgaccttggcatcttcaccgagtatcttcttctaagtggtggcctctaagaattgttgtaggtaatcctttagaggttcgtcttcttgttacttgatatagactaaatcgttaggctcgattggtctgtgccttgatgggaagaattggtcatagaatgcttgcttgattatttcctaagaattgatagatcctggagaaggtttgagataccactattgtgttgcttctgatagcgtggccgaaaagtttcaacaacgagaatcgtctcaaatttcttgcaggttagtatgtaatttaaatttgtttatgtgagggagagtcttctttgccagtgtatggatgtcacactagatttccaaactttgaggggatctccaaaaccttggttcgatctgagagaggagaaaaccgctctcgatctaactcgtactctattgtcttcagagtagtgataaccttaaccaacgcagcaagggtgtcaaatttggccctacacacatcatgtgtggtgatttgtgcatcaactggccacttcctattaatgttgttacgtaggttcttttgtcttcaaagtcaataaaaggcattgatcgacctaggccttgtggttgctgtctggtcgtgtggccttgctaacaattgtggggatctatctcatataatgatagagtcatctttcaagcgtttgcttcgtcagcaatttctcgcattactataccgactatttccttcaaaatagtcttccttagaatgacaagtacggtacataaattaaagctaaaatatatattttattctaggtttttttcactacatagttcagtagaaaaaatcctagattttatatataggtattagagtattttagaatagacacttaccagtttactggtaatgtgacttaaggccttcgatcgtcaagaagattttccacttaagttgactgacacacttgaatttagatttaagctaagactagtatttaaatttacctatatgcacatattttagatataaatattttatggtattgtttgcctagtatactagagatagtagtatggatgtacatatatttgtatttaaattattaatatctagtaatactagtgggtatcgtatagtatatatatat

SEQ ID NO: 226613 - DNA, 2516 bp, Cannabis indica
cacataacataatcgggtaaatattacgccaataccctaatctgagaaaccgaaacctccaacttaatgttctgctattgattactaaagctacaataccctaagcaacagagaatcacccaaccaaggatttgaaatggacacaagtcgtggaaatggattgttcgggaaacctaccctagaaccggttaactggttttacaggacctcgcaaactggttaacccgtttacaccaggtttctccaaacaatccataacctgctcaaaacgtgaccaaatctcaccaaactttccagaactcctataataacatcaactaacataatccaagcaatagcacccataaattcacacaaaacaaaaagtgccatggatgaaccaagcttgagttttcaaacttaaacttgtgcatccatcacaccaaactaccaaaccagtagaaagacctctatcccaaccaaaattaaacttaaaaattgaattagagttcactcaaaccctaatagccactaaatcaccaatttgcatactcaaacgaaaatcaaagcttcaaataacacaagggttagagttctacagttacctttgcttaaaaccacttgaattcagctaacaattctccaatttactccagaaaaatcccaagtcttgctggtccttgtggtggtcgagcaacgaagagaaagaaaggggacaatcttgattttcttaattttctttatttttcctaagataaataaaacttaattaactaatccaatgctgaaataaacaatgtggccagctgccactctcccatgcagccacctaatctccctttttaaattaccaaaatattcttctagcttataacttaagtaatttaaagtctagcggtaaaattttcaaaaaccataaccccgctcaaacccggtattctatttatctctaatatttatcccactaagaaaaggttctagacttacccatgtgactcaaatggccatccatcatattttttgtcgtcgacaagtaaaaattataaaaatagcataattcatatataactcaaattatacctctagattttaataaaatctccagaattgagaaattataactttagcgcccacttttaataatgggaccctcaattaaataaatacatgcataattctaaaaatatcaataattaatactaattgcctttgttaatccatattttaaaatgctgtcattacagccctttggcgatggcctctcatcactctttagtgatggcctttacccattaagccatgcagaggtagccaaatataaaagagttagtacctattgctttttagcatggcatcctatcacccttcaacgatggcctttgcttgacatcttaggcagggtaaccaaaatttgatttcaaaagcagacattaagttataagcttttgttacataaacaacatgctaacaagattaatttcttaaaattattctcttttagttccacatgcaaacacacagtagcacccccaaaaaaatttcgtaccaaggtctatgaaacttggtgaattgtaagtaaccaagagactgtaagtctgtgtggtcacttgaggggcacccataccgtacaatgcatcaaattagcatagagaacttatgcagagtgtttttaacgcttagtataagctactaaacttgcctctaagtcaattgtagacatacttcaacttgacataaagaaaagtaaatatgaatacttacatgtcaaggcaataagaagatagcctgaatagtcatatgttcataagtaaaaggctttaacgctaatcaatagtagtgttcgaaaatagagttcctaaagggcaaaagcaaccacatgaaagcctcaacgccaaatatgaataaaaaaatcagttcaaaagaaaaaggttgaggccccacgagaaccatacaaccagagaagaaccagacaaatttcctatataagaaccacgtatcaagataaatctctaaggcaagacagagttcctggcaggttccaagccaaatggtagagttccttgcaggttccaagccaaagataaaactctacgcaaccgtacctaagggtactttccagataatatcattgtacaaggctgggtatcacgaggtatagtctcatgtgtaacaacttggacaaatattgggtcttaagttgagcattcagctataatagacaaaccattaagtttcatatagagtttttaaggaaaccacgtatgagactaaggttgtatatgccttcaaggccatgacaggattcttgctgaggtcaaaagaggatagaaaattggccatctacttggaaccaaggcctaggccggccaggtttcccaaggtttaagatggtcggccagggtgccatgaccaaaccaagaaccgaccaaggtcaccaagcacaggcatgaacccacttggaactagcgaactcccatgattaaatcctaggactggccaagtctcagataagacccctagggcgagctaggttagta

SEQ ID NO: 226614 - DNA, 1412 bp, Cannabis indica
taattcttagagatgtcccgcttgaaaaaaaaaatacaaatttacatatggaaaatctgaattttgggtttaaaattgttaggtatcaatccgtctcacatcggaagaataagcaagagttgccttgaatataagtatttcaccaactctattaatatgaggcattttagaaaagtgcccacaaataaaactgttaagacttaaacccaaatcgaaaatatcatactaatgtaagagctaaggtgatgttgcaacccaacaagatggaagaacagtggtatcagagccaaaggtttaagagcgctgagatagtgggttgcatttacgatgtgtcggagaagcccttaataagatgatctcgcgatcggagatctattagggatgcacatttctctcatgggaatggagcttcgcggggacctgcctttaatagggcggggatttcccatctaaatggggaacgggacagggacggggattactttttttccccaaatgttaaatggggccaggacagagatcaaatttcccgtcccgacagggacctatttagtattttattttatatttctagtaatattttatattttataatttatgttttcatttgtttagtatattagtattctttttattaattttaagttgtattttagataataattagtttattaaataataattaatgtgtaatattttaatttttatgtagcttaataattttatatatctaaatttttattataaattttttattttttaattaggggattccccgccctgtctttgcctccattaggggattttaatttccaccccattctcaatgggaaataagcgaggataagaattaaaatccttaacgaggatggagacagggggaacactccttgctaattcctcatcctgtgtgcatcgatctctaagatctatatggtgccttgtatcgaaagtctatatgatattgtggtggtcagacaacgtgtcccattgatgattacgacgatacaagatggagattggtgtttagggtatttttcgaaagtattcttgacaaagttgatggtcagacaacaaattccgttagtgataagttcataacggtgacacaaagtggtttttctggaggggaggccacgagtacacggtcctatgttcgagggagagattgtttgggcatcaacccaaatcccacatcggacgaataggcaagagtttccttaaatataagtgttccatcaactccattagtacgaggccttttaggaaagtgcccaaaagtaaaccgttagggcttaggcccaaatcggataatatcatacaaatgtgagagttaaaatgaggttgcatcccaaaaaggtgaaagaatgaggctcaacaagtagtatcagagccaaaggtttaagagcact

SEQ ID NO: 226615 - DNA, 1364 bp, Cannabis indica
aagaatcacgaagaaacaccgaacaacgtcatccgagcaactcgaaagcttcgaacaatgagtaagttcttcatctttttcctcttttatgcttgaatatttgattttttgggtttccactgtaaaaaaattgattattcttgaacttgttctaggaagaccatagacaatttaggtttaggaatgtgaaatattgactatgcttaaccatgctgcttgattataactgcgttttgatttcgattccatgatattcactttcacttgcccatttggggcttactgaaaatcaacccttaattcgtaattttgaaattctgggttgtaaacctcaatgccatgcaaaatttctatttttgatccttcgatcggacctggtcggtataaccaatctatttgtgtttgttatcctagccaaatactcatcttgtgtcctaccctttgtagatgaaccctggtgagttttggggaagcgaacatcgaatcgaccaggatcttttccaacttttgtacgaggattatcctcgtcttcgagctagtccctcctcatatagtgacagtctttctaattcaagcttcgaaaattgggagttaagtagcgaacacacaccttctctagaacccgaagtggaacaccacttttaccccggctaaatcaaaggtgaaggctacagacgtttcatctgggagctcaagaaggggtgaggcgatatttaccgtccaactggacatatattgtccgacttgatgtagttgacactttacccgtaggccgtccaaatcttactgttgtaggtacgcccattactacattcgctgtaactatttcagacatacagatcaggcttcgtccatgaataggatgatggctcgcactaaacaaacagtgcgaaagtctccgctaactgacccacacatagctcgacttgccacaatgccgagtgcggagcaggcctggcctgctgctgaggaagaggatgttgaggcggacgctgaagtccaagagatggagaatcaaggcgagatctgtcctgatactccttctgaagctgaggaggaaggtgctactaggaggttgccctttggtggcttcaatgaagatggacaacctgtgtctgagactagcgaaattctggtgggcggtgaggactatgtcactgaggaatacactgaggttgttccttagagaagataaagtgcagtaggagctcggtgggtttctcctccatcaataatgacccaggcaaaaatgaagaattttcagaagcacaattacttgggggatgtcaaatgcttccttccctctccaaaccactgggcgactagtccacggaaggggtgctgtgcttggtcgggtgcccata

SEQ ID NO: 226616 - DNA, 2109 bp, Cannabis indica
ttttattttggaatcttctcgtagactgaattgctcataggtttgacagctggtaccctagattctacgttcagattaactgtaacaagtcgtattatggtatagccgagcaatatggcaccatgacagatagggcaagtcatatagatgcgagttgggatttagaacaaaccgagccatttgatatatttaagattacaggctatagggattttagcggatattacggtccttctacctcctcatctagtgatagctcgcgctctagtggttttggtaaatttcttaggtggaaaattacactccacgcttccctttcatttgtctttaaataattttaacactttattttgcctcgcagacatgtgttttgaggatgttatggaccagaaaggaaagaaacggggaaccaactcaggggttcctacagataccgaggtggagccttctaaaaggcaaaagaaaaccactgcccataaaaagaagaaagtgtatgagcctatcgacctcgaggtctttgaaaccgagacccacgaacagactcctcctctgattgatcccaacactaaagcacctcctcctgatacaactcatgcctctgcttcctcgagccaggccattgaaacattgtatgccgctttggggaaggctggttcggaatttgccaggtgtttgggattgcctgctggtgccaactcaaggctcttctcccccacgattgggatctaatcaatattgggaatccagaaaagacgctttcgaggaacttgcattatgccctcatggtaagtttgctgtgttaatctatattattttttctttcttttttctccctgtttctttgctcgtaattctccaaacttctttcctctctttttcctcccatcggcgaatcctggagcagctcaaatacctggagagcgaggtccaaaagtcgctacccaacgcaaggccgtgattaaacaatggaacaatgctcagcaggaaatcacccgtctcaaataggaagccgagaggttgaagaaaagccttgaagaagctcgagaaggccacaaagaccaagactgatgaatgcaatgagcttaagaaggtgctcgcagggaaagaggccgaactcgaagggaaagaggccgaactcgaagggaaagaggccgaaaccacaaagcgatgcaaaaaggtcgaccttcataccgtttatagagccttgatggaaattcccaacatggacacaagcttcttggaggaggatgaggaggagattttggcttattgtgaaaaggacaggaatgaggaggaagaggccgaggcagtggaagaggaagacccatccaagtctcctacaatgtaggcttgattgttatttatcttttttttttgtaaggaaatgaccttagagccgagacactggtttgccccttgtggcacttttgtaaagaaaaatttgcgaagttggatggccacatctgccattggcaagagtagtccttaatcaatgaaaaaatgctcaacaaaggagattggggtatttatttgttccttcagattcaaataagggcttggagcattgggtggaaccgattatgggaacgattaaggtaaatgtcgatggcgcaatctttgctaatgacaaaaaaatatggccgacttgttgaaggctttactgttttgttggtggggcgagtggactcagctatggtagaggtagtgggagtcaaagaggctttgagttggataaagcgtaaacaatgggattcagttcatgttgagactgattctttggttgttgttcaggcaatccaattgtaagagttcatttcaaagatatcattaaagccacacattttgactgtgtcatgaaaaacgacatataatcataaaaacaaacaaacaagaacattattaatcagaaatgcttaagggtactaggtgcttagcactcttttatgtgtcagtatcgctattggtccaattaagtatcaggtcccacatagtttaatataatagtttttaggaagtatcgctagccaatcgcaacgtgacatgtcgagaaggtacttggcacaactagtacctaatagcaatcctcttaaactaatacataatttttat

SEQ ID NO: 226617 - DNA, 1230 bp, Cannabis indica
agctggtacaactcaatttttagaaaaaattgttttgattaaaagactctataataaattattttcttattgaaaatttatttaattatttattatatattacaaaaaataaaatatttttttcaatgaaaaatatttaaaatcaataatatttaaatttctaatttttattttattttaaaaaatattttatatttatatttttattattaacaaacaatatcaacctaagtttcttataaattataattttttcttttacaagtgataaaaatataatgccttgccctttagaactcgatgttttccacaaaaaattagtcataaccttctcaatttcttgacaagtctccaaaaggataaagaaaacactcatcggataagttggtagagattgaacaacagctttaagaagaatttctttaccagcacgagagagaaacctaccattccaactttaaatgcggttgataactttattcttgagaaatacgaggataggtgttttctttctaccattatgtttggtaagcccagataaagagagtcgtcagtagcttcaggcataccaagagatgtacagatttgatgccgctgggttgcttcggtattgggactgaaaaagatagaagactttgtagcattcaccttctgcccaaaggaaatttcaaaagagtggaccatttgttttacactgacagtcgtatttgtagtagcttggcaaaagagatagctatcatcagcaagagcatgtgtgcaatagaaggagccccaatagacacacgacaaccacgaataatatggtcatctttaaactttctgatcagggaagagaagccttcagcacaaatgataaacatataagttgataatggattcccttaacgaatacctcgggaaggagtaatcggtcccattatatgaccattgtgtataatggaacctcgtacaaaagtgacacatttcataattaaattgatccacttaccagcgaaccccatacaatgcataaatgcacgtaaataatcccactccacacggtcgtaagccttactcatgtcgaactttatagccatgaaccccttctttcctttagtcttccgtttgaggtagtgcatgatttcaaaggccaccataatgttatcagagatgagcctaccaggaataaaagcactttgtgttggtgagataacatgatcaatcaatcctctcattctattagcaagaacc

SEQ ID NO: 226618 - DNA, 2097 bp, Cannabis indica
attgatcaaatgaactcaaccgtggcttcagatttgaatgccccctctgctaactttgctgctagaggcaagaggcccttcatcccatctaactcaggaagaggctctagttttcgtggccgtggtcgcggacgaggtcgtggaaatcaaaaccgtgtggtgtgtcaactctgcaacaaacctgggcattctgttgtcaaatgttactatcgctttgatgttagcttcactccagctgctggttcccagaatatttctcaaaacagcagtccaaaccagcagcataacaacaacaatactaatcagcaggcgtttgtagccaactcatctcatcaccctcgtcccgatgacacaaactggtatgtggatagtggtgccactaaccacatcacggacaacgccaacaacatccaaactcctgccgaatacaatggtaagagtcgattaattgttggtaatggacagtcccttgctatttctcacattggcagttcagtcattaaatctcctggtatttccaaacctgttaagttaaatacagtgttatgtgtgcctaaaatttccaaaaatcttttgagtgtttctcaactaactaaagacaataatgcttatgccaagtttatgctaatgattgtgttttgaaggacatggattcgaagagggttcttcttcaagggaagcttagcaatgggctctatcaacttaccacaccagcaacatgttctgctagttactcaccaatctgcttgtctactcaaaagtctagtgtcaacagtcctaatattagtcctaatttagagtctatcgagtcttgttttcaagtttccactagtgaatcaagtttgtggcatcataggctaggccatccttcccttaatgtactcaacatgtttaatcaatgaaagaagtcttaccttctaatttacaattttgctctagctgtcaacttggtaaatctcatcataaaccttatccaacaactctaaaggaatcaaagcagcctcttgaactggtgcattcggacatatggggtcctgcacccactatgtctaggcatggctatcgttattacatccattttttggatgactttagtcgctacacctggattttctcacttaaaaccaaagatgaggctctatctaccttcaaagcctttcgaatgcaggttgaaaagcaactaaacaccaccataaaaactgtccaaaccgattggggaggagagtatagaaaatttgaaccttatcttcaatctataggtgtaaagtttaggcatccttgccctcacactcatcaacaaaatggaaaagctgaacgaaaacaccgtcatatagttgaaaccggtcttaccctccttgctcactcaagtatgcctcaaagattttggtgggaggcttttcaaacagccacctttctcatcaaccaccttgccacaccagtcctaagttataaatgtccaattcaaaaattatttggtcttgttccaaattataagttcctaaaggtctttgggtgcgcgtgttacccatatcttaggccttacaacacaaacaaattgcaatttcggtcagccaaatgtgttttcattggctatagtccaagacacaaaggatatatgtgtcttcatacttcgggtcgagtctacattgctagtagtgtaacttttgatgaatccgactttccttttgccaatggcttcacatatcccactgcacacaccgattcctctctctcacctagtcaatatccccaatggttgccatatttgtccacagtgacttcagcacatgctcctggtgtagttgttgttgataatactcattcgcaggcttctcaacaagatgaacactcctcgggttcacctgttactcatccacgcaactctattagctcttcatcaactccatcacaacaaaccagccccctctctgtcaaatcatatccaaccattcctcttcatattgacctgccactttcacctatttctcacaccagacagccacttcagcattccccaattcagcaccaaaccagtccaattacttgccctccacctcgtccaatccagccctcccaccccatgatcactagagccaa

SEQ ID NO: 226619 - DNA, 1204 bp, Cannabis indica
gtttttcttatcataagatgtcgcaggttgataagcttagacatgttggtaggtaattgtgtgagtttataacatctattcaacaacagtgtttccaaattgtacaacacacaaactgaagctggcaattctttgacttttgtggcacataaatccaagtatctgagatgttttaaatttccaattgaattaggcaactcttcgatatcagattctgacaaagaaagttctcttaagcatcctccatcacttaccaaaatttcacctatgaatcttgtttgacatattctatatgatgttgagagtggcaaagccaacagggtacgcaaatacttcactctagctatgttgtcaaattctattgtatcttttaagtccttcatgtatgatagatgtcgagtcttgctactaggcttgtgcaagtccttacaactatcataaatataacaacactgtcccgatacatacatagctagatcatgcataagatcgtgcataaaaagagaaagattccttgtgtttctttgaaaaaatgatcttgttatcaaagcattcaagtaatcttttccaacatcttcaattctttttcctttttgaggttgtataagaccttctgccatccatattaagattagtttttctctatcaacttcaccaaatttgtagtctttgggaaatatcgaaagataggagaaacatggttttaaataaggaggcagaaatcggtagctcaaccacaaagctggaataatttcgatgttgtgagaattgggcaactcccacatatcactctgatgcacatgtctccactggtcaggagttgacatagatcgtaacagtccagccatcgattttacagctaaaggaagccctttgcacttcttaacaatgtgcttccaatctcttgcaactcagacaatactacctcattagagcctacattatcaaaagcgtgctctctaaacaacttccaacattcatcatcagacatgtttttaagcttataagtttgaacatctctcgtcttcatcttcaatgcgacatcttcattacgtgtggtgacaataatcttgcttccttggacgccagattgaaaagagctcttcaaaagatcccacaactcgtaattctcattccacacatcatcatgaacaaaaagaaatttcttcccggccaaagcatccttcaagtctttttgaatttg

SEQ ID NO: 226620 - DNA, 2144 bp, Cannabis indica
cattctaatatagttaatgtgattattaacacatagtgaactattttagattgttattccatattcataatttcttgcaaggtttacaaataaatctaaggaagtcagtaactgtgagcagttttgtccacagacaacactaattcttacatgtagaaatttaaggaacaaacagttgagtagtgattttgttttaaaattatcaaaaacttttatgatccaagtttctttagaaacttgatttagacacacattaatttataaaatgatgtcactcataaagatatacatgttcaattcagcaataagagatgtgttattaataagaatttctctacattatggcactgaagattatggaacatatctccacaaattaaataaatgttagtaaatagtagggatactcgttgcacttaatttttcacaaactttatttagagcttgtgtggatgcattaaggaaaagtatatcaagaagctaaaatgatgcacattagaattgtatcatattagaaatcatacaacaattaacacttctaaatatggactcatatttcacaaaaatttcatctcatttattaatatttactcacataaattatatctctacaaaagtaaaagtttatgtgtttcaaagacatataaatgttaagaaaataaataatacaatttgcatattaagagagtgagatcagatatagatggagaatactacactaaaattcataagaatggataaactactagtctatttacaaagtttcttaaaaaaaaatgggttcattgcccaatacatatgcctggtacacccaaataatggtgtgtgataggtttaagaaaccaatcattattggggtggagcctacatagcaaactccatactttctaatctttgtcggttgatgcttttcaacggtagtgtgcaagtcaaactgtgatctaaccaaagttgcttcccaaacatattttgagttgtgataaggttggaaattgattttaggacaagtacacataaaaatacccgtatacagttagagtaaattgtcagagaaaagatttgggcccaaataccataaatgatcatttcatcaaaaaaaaaagctataaggtgtaagagttatatattttattatccatctcacaatgctagaattgtgaaattgaaaattaacttgatccgtgggagatattaatccatgaacatagtttttgagaaagatcattcatatttttttaaagtttcacctcaagtattagattgattgtgattcacaatatcccttaagtttaatggttattgagattttacaattaatcattaaagatccacaagtcattgataaaattctaaccaattagattattagtaattgcttgcaaattgttaaacaacatacatgttgaataattcgctctttaagagagtttgttggtttatccttaagatgacttattagaataaagagatcattggtttctagtgattacattgtgtataataagagctcgactataatattaatttgagacacaaattaaactgtggaatggacaacattgaaattatgatacaatatgccatgaatgaagaaatgaatatcctaatgagcaatgtatagtctatctttagtaaatttgcctaatggggtggagaacattaatcgtagggttttcatcaaaaaatactcattaggaaacatggtgaatcataaagatataaaacaagattcattactaagaagtttattttgaactaagaatcaataacaaagaagatttacattatcacttgtctttataaaaaattatattatagtaatattggcattgttgctcatttcaattcattaatcaattccaaacagtgaactaaaggagaatatatacaaacaactataaaaattttcgtttaatagtggtaaacatatgcaagcttaagaagtctacctataaattaaaacaaacatctcacaaataatatttttattatgttatctttttctttaggtttaaaaaagcattatgaaattaattatgtaccagaaagtcagtggaagtaatatttgttttatatatagataatatgttacttgcaagtgatgataaaaatttcctatataaggtaaaataattcatatctca

SEQ ID NO: 226621 - DNA, 1126 bp, Cannabis indica
catctctctcaaagatccgatcctaatcctagtcacatctcttctttttcgtttgcttaattagttttctgagatagtgggatggacgaggaagaaggtggagatgaaggaatgttactggtcgacactcgacagtaagcctcccccaccgagaacgagaagggtaggtggcaaatcgtagaagtttgtaagaaaactttattttttttatatataaagttttttaatctttaataaaaaaaaatgaaaaataggttattaaaatttttaatatttttttattgtttaaataaattttttatgacgtggactaataaaattttaacacgtgaacattttaagaagtataaataaagttgttaaattgtgtatctatggactaacgggaatcttgagcttggagacttttactataattttttgagattaaagacttatctaaattaaagtgaactttttggaggtttatgtcgcaatttaatatcaacacgtgatatttttggagcaactatcgaatctgttaaaatgaggaccaatagacttataagattttcgagcttgaggagtgaggactattaccgctattttttaaattaagaatttatctacataaaataaaatttttggggacttttactataatttttcctaattgattttgaactatgtaaaattatattaatgatgttcaaaataataaatttaattttttgaagataaattgttgatattaataaatttttaaaattattttaatattattagattaaatttctagatacatataggtagaataaaaaatatgtccaattgccaaaaggtatttattgattagaagaagaacatgagtttacaaaatatagtacaatagcataaaagagaatgggtcaccaatttctattgttacattgcccttaccttttggttaaggtcacatatcttagcaatagtttattttttggaatccaatggctaagatgtattgtggtatgcaattcctcaaaaaagtataggtattacataatttgccataataataaagacaaattgagtggtatacacgctggaatccaatttgtactctgtgaactgataccatatcccatcattaactgcgtagagacca

SEQ ID NO: 226622 - DNA, 2547 bp, Cannabis indica
aatagtcttttcttgactcttttgtggaagtatcttgtaactcggtgctgatacgctacattagtgacttgtgactcagttcattattcatcaagcagatccaagcataactttagaagttcttagttttcttcttcattataaaactctcgtctctaagtcgatatgttcacttcaataggtagcattgcttctgagtcgaatgctagcgagaagggagtgtgtcccgttgtcgtcttctcggtagttctgtgagcccaaagtacttgtagtagctcgtaaacccacctgccttcggaagcatctaacttcttcttgatagtatcctttaaggttttattaacagcttccacttgtccatacgccgaaggcctggatactgacgagaagctcttaattattttgttcctctcgcagaactcagtgaacaattcgccatcaaatttggttccgttattagatactatcttcatgggaattccaaacctgcaaacaatgttcttgacaacaaggtcaagaactttcttgcaagttatggaaacaagaggctcgacctcagtgcatttagtgaagaagtcaactgctaccactttgtacttggctcctcctcgcccggtgggtaatgccccaattaggtcaatctcccatatagcaaatgggtaaggtgaggtcatcatccttagttctgttggcagtacgcgaggtatatgtgaaaacctctgatacttatcacactttttgacaaactcataggtgtccttattaatcgttggccagtaatatccttgtctaatgatctttttcgataggctctaccaacctacatgatccccacaaaagccttcatcaatttctctgatgatctcgtttgcttctgtagggaggacacaccgaagtagaggcatcgaataacctcttctatatagtttgccttcaattattgtgtatcgaggcactgagtacaagagtttttgcgtctcaattttgtcagttggaagttacccgtcgagcagatagttgacgataggggtcatccatgtaggtgaactgtctatcatctcgacgtcttccctttcacatatacttgactcgcttagcatctccaccggaaccaagttcaattcatcgaagtcgttttgcgaggccggttttgccaaagcataagcgttagagttttgttctcttggaatttgctcaattttaaagtaatcgaatatttccaagttcttccgaaccttctctaaatacttagccattttcaggcacttggcttggtattccccgagaacctggtttacaatcaactgtgaataactctggtagatgagatttttgacttttaacgccttggtatctttaagccagcgatcaaggcttcatattcggcctcgttgtttgatgcgtcaaatttaaatctcaaagcataatgaaacttaaatcttctggtgaaattaatattacccctgcaccagagccttgctcgttggatgcaccatccacatataacttccaattgtccacgtctcgatggacaagtggaatttcttctggagttataccttctattaggaagtctgccaaggctcggcccttgatggatgttcaagggtggtatgttatgtcgaactgccccagttcgattgaccattttatcaatctttcagaagcatctggttttgataaaacttgtctcaagggctgaactgttaacacttttatagggtgtgtctggaagtaaggtcgtagcttgcgagatgtgtggactaggcacaaagcaagtttctcgagagggggatatctatattctacccctaataaccttttacttacatagtaaatgggttgctggtgcttaccctcttctcgcactatagtcgcactaatcgcatcttctgagatagccagatagaggagtaacatttctccagttattggtttcaccaaaaatggaggcatcgctagattaatttaaatgttctgaaaggcctcttcacactcttctgtccactcgaatttcttgttgcctcataatacattaaagaatggcaaacacttatcaaatgacttcgaaataaatctgttgagttcagctatccttatccttcctgttagggcttgtacttccttaggctttgttggtgatggcatgtctatcaatgccttgattttttttagggtttgctttgatacccctcgcgttgactatgaatcccaaaaattttcctgaggatactcaaaagaacatttttttgggtttgacttcatattatacttctttaatattttgaagaattccacaaggtctgtggtatggttcccactttttactgactttactaacatatcatcaacgtaaacctccatgttctttctgatctaatttgcaaacatctcgttcaccaatcgctgatatgttgccctagcgttctttagcccaaacagcatgaccttgtagcaatagagtctcatgttggttacgaagctcgtatgttcctgatctgggacatgcatttttatctgggttatatccagaatatgcatccataa

SEQ ID NO: 226623 - DNA, 1554 bp, Cannabis indica
ttttcgttgcaatagaagcacttttccttttcttttgcctttggattagcagccattttcttattagctatgttaagagctttaagaggcttcttgctattcttccatttcttctttttttgggtttcaaagcagatgcaatatttgcctcaagtttggccgtaccattatcaacattactagaactaggagttttgtttcctcctttatgcggacctccaatcaaattctgaaatgtctgaaggttgttgattaactcgtggaagtcaaaagtcaacttgttcatgacataatttgaggtgaagggtagaaaagctagagtcaaactatttaagatcaaactcacttgagtttcttgatctattatagctttataattcttagcttcctagaagtaacttgccatctggagcaggtgatcacgcacgttctgatgaggcttcatccgtgcatttataaaattcttggtcgtctcaaaacgagcttggtctgacatcatcccgaacagttcagttaactggttcatgatatctgcaatcgtgagagtgttggcaaaccttgttttcaaggtgttaacaatgctagatagcataaagtatcgagctttgttgttagcattctaccgacacttatacttttctttaactaccttggttgcattctcacctggctactcaggagcttcttcagttaacacaaagaaggcatattcacctatgagagcaatattaatgttctctttccatttgacaaagttagctccagagagcttgttgtcagtcaacagtgacacaatggggttattcatagtcatattgggtactacaaatatcaataaataaaaatcaaataagggtcaatacaaaatcatacacactcaaaaattattaagcacttagcaagtaggaatgacaagtaaaaatacaaaaacaaacaatcctaagtaatttctaaggtttccaacaaactgatacagcgtcccgtattaggcgagagtcaaagatgtcgtctattgaatagagtagtcgactcatctaaaatgaaaccattttagcaactttttattcgatcgaaaagagaatccgacgttgtttcgttttagtcgagagtcaaggtcattcttatttcatgagcttctactatagtttcatactttgtaagtcatactcttagcactatggccgtcttaagtatttttgaggccctgttctaatcttaaaatttggtcccttaaaaaagtgcaataagaaactaataatattttcaaatattattatattacgattatataatttacaaaattaaacaccaaaaaatttaaactattttattcaaattattatttatcccattataactttaagctaacattaaccttctacttaaaattcataattaattcccctaaattttaacttttgatggaatgttgaaagttaattgcaaagagttatatgtaagataaaaaaataatatccttggaatgaatagaatatgctaattaaaaaataaatgactagaataaaaaagtttgaataaatagttataaattac

SEQ ID NO: 226624 - DNA, 1306 bp, Cannabis indica
aaaaggccttatggccgaacaaaaaaaaagagtaaaagagaagcacttaaacggcaggagtcctaggctctttgtatggatcagctggatttgaagggacctaagaaccgtcattctggtcggaaggaggctcaacactctgatcggtaggtgaggtggaaatggttgcctgaggctccccgtaagccgccagagcagcgcagtagtcgagaaacatgtatttggaattacctaagtaatcaaagttttccttaggattagctttccaaaggtcataaaatatctccagaccagctgtctctaaggcatttaccttctccccgagcctcaccacctcagatttttgcttctcaaccttagccctaagctcctcctccttagctttcttctcttcctccaacctacaaagaagggtctgtagaccctctcttttgtcttggaaactggtcacttcccgagataaggaagcaatgtctgcttcgagttgctcggtggatggcatgtcctgcagatctttgttcagttcggccactttggtctcaacagcaaggagcttcttattaacctctcctagctttatccgcacagccccaagttgaacacgggcttcctcagtgtccttcttggccaagtccacttccgtttgcattgtgttgcaaatggcaaggttcttagcagcacctgacttagctcgggaataggcataggccatcttcagaccagtctgtgcagaaagaagacattaaaatctgaactaattaaggagaagtgaaagggaaatggtagaaaagacttacccgtcaaagctctttcaaaactcctcccatgaccagctctcaggacaagtcattgtctgccccagcaagctgctcgttcacctcagggaccgaccgaatcacatagtgggtgagcatacctctaccttttttagtctcctggtgcagtacaagaggtgaggcaggggccgttaacctgttcagattttcttttgatcagctcagatccacccttcgcctattcaggtctgtccgaactacctcctcgagaatctttggacttagtcacttttgaggcaggagggttaacgacagtttgttcttcagagaggtcaatgaccacttcagcttgtgccttctctctggacgggtctcaacaccttttgacttcttcgccggaagggacaagctcgagcttccccccactctcttcttcaaagccccaatcattttctgagacatttctagacgaaataaaaataacatagtcagaaaaaaaacataagtaatatgaaggcatgataatcaag

SEQ ID NO: 226625 - DNA, 1788 bp, Cannabis indica
tgattcattggaaatttaaaatatctcaggtacttagatgtatctcacacaaaagtcaaagagttacctgattctgtgtgtctactgtataatctggaaacactcttgttggtacattgcgataaactcactttgttgcctaccaaaatatctgagctaatcaaccttcgccatcttaatatcacaagttcatcactaaaagagatgccgcggaggatttgcaacatgaaaaatcttcaaaagttaagtgattttgttttgtttgaaaatgatgggtacaggatcaaagagttgggtaagttggataatcttcagggacgcttgcgtatttcagggcttcagcatgttagagaagtgagtgacgttttggaagtcttaaagaacaaagagtatctcacagagcttacattggaatggcgtggtaaaacaaatgattctattagggacagagaaatacttagtgcactccaaccacatccaaatttgaagatcctccagatagccggttatgaaggtacgaaattgccggagtgggtagtagatccactgtactctaatttggaagtagtttctctacacaataaaaattgttgtttgtctttactatcatttcagcacctgagttcattgaaagatctatggattaaggaggcaatccatatacctaatgaatttcataataattcttcgcataattcatttccagttttagaagacataagtctcttatggataactgcattagattggtcgtctatcaatgcaaattatcaaaatggtgacattttcccctgtttgaagagatttactttacgttgctgtgatggtctaaaagtggcattacctatgggtaattttccatctttggaagagatcgagattaagtattgtgatgaattggtgactgtatttccatccactactgatattgatgttgcatatccctcccttagaagattgtatataaagaagtgttcaaggttggagtcagtttcagaaatgggattattgcccgtttctttgaaaagtctatgtatacggtgatagaaagttatgcaatggaatttgcagactctcaaagttgactgtattaacacttgagtattatggaggagtggtggattcatttcccgaggaagggctgctcccacctagtttgacacatcttaccatcaggaactttgataagcttacagctctaaacgccaatgggtttcaccacctcacctcacttcaagagttggaactttggaagttggaaaagttagagtgcttgccaacaggacttccccagactcttactactttatggatagaagattgtgctctgttaaaaccaaggtgcaagagagaaacaggagaagattggcccaacatttaacacatacctaacataattataccataaataataaggtatgttttcaaaagtggtatactcgtggtaatttcccctaagattttctctcatgttcctttgtctttttttctttaaaaaaaaaattacaaatttattttccaagacgtaggaatgaatataactgataaattttctctgtcagccctacgaattgtacttttcttttcataaattttgtatttcaatttatatcacctaacatacaaaatataatctcaaatataaaaatactttcattgaaaagatactctgcaatgaaactatagaattggtataaatgtgagacaacgtttcttttaaattttcctttctctcttgtctttatatagttcgttgaatgaggtgaggactgaggagccgttggtgtc

SEQ ID NO: 226626 - DNA, 1799 bp, Cannabis indica
actctccaactttgtctactgggatgatacaaacctggctgtttctgaacaacaggaagatcagatgggtttcatggacaatacagcggaggctggctctcagccccgctctcagccatgaaaatcgttagttggaatgtgcgggggctggggaacccgagcgccttctgtcatcttcgtttgcttgtcaaagagcaatctcctcatgtactatttcttatggaaactaaacttatttctaatgtaatttctcgttttcgtcaagctttacatttcaataatggacttgaagtcccaagggtaggtctaggagggggtttactacttctttggaaggatgatgtcaatgtaacacttttgaattttaatactactttgtttgactgttatttggcgtttggtgatggtcctactatgcatttcactgccttttatggttctcctgaacaatctaatcgctgtcattcttggacaacttgaaagaggcttcgtgatgttgctccactgttaccatggattgtcattggagattttaatgagatagtttcaaatgctaataagcaagggggtgcgttgagtaatgaggcgcaaatggaagactttagacaatttttagatttttgttctttctctgagttgcctgttaatggcgatcctttcactttgtttaaaagtccacgtaaagctgataccatcaaagagagagtcgactggtgctttgtgaatgacaaatgggcagcaacacttgaaccttttatcactactcatttggacttcttcaaatcagaccatcgggctatttctgttactatccaagcaatcgatcagcttcctcaacaagtgaggaggaaatctcgtttcaggtttgagaaaatatggcttaaagatgctgaagctgctgccattatcaagcaaaaatgggctacatcttcttcaatcgctgctgctgacctcttcttaaataacctggaatcatgctcttcacaccttcaaatatggcacaccaggaagtatgggaatatgaagcaagaaattaaatcaatgcagcaaaaagtttctgctttaaaccacagtacccacagatcgaatgaatcaatggaagagcttaaaagttcagaaactatccttgatgatttattggcacaagaggagacttattggcaacaacgatctcgagtggattggatgcaaaatggagaccaaaatacaaagtttttccatgctcatgctacctcgagacgcaacaataatgctatcaaatcgttaaaaaatcctgctggtgtaacagaatactcgaagtaaggaatgacagacatcatttcggactattttcaggaactcttcacagctcagcctcttgactcctctgcacttaatcacaccttaaacactatcccaactactgttacggctgctatgaatgacaatttgacacaacctttcacaccagcggagataactatagctttaaaattaatgagcccaaacaaaagccccggtagtgatggtatgtcggctatgttctaccaaaactattgggatatagttgggtcttcagtaactgatgtggtgttgggaattcttaatgatggcaatgaaatggatatgctgaataaatccattatcactctcattccaaaaataagtactcctactggtatgggtgattataggccaataagcttgtgtaatgtcatttacaaattgatttcaaaggtgttggttcttcggttcaaagaggtacttccatttgtcatctcagagtctcaaagtgctttcttatctaacaggctaatcac

SEQ ID NO: 226627 - DNA, 2398 bp, Cannabis indica
aagttgcttttcttgtagtgaatccaccgatattcattgattcttattttattaccatttgtcacacgccagcttgagccctttactgtaagctcacggccccaaatgattcctctcaaaatatttgagcaataattcccaaggcaagcggttaagaaaccagaattcgggtagtagagggctttcaacacttgagcgaacaaactatccgggttggtaacaagcttccacccttgcttcgcaagtaaggcttggttaaaatcctccaaatctctgaatcacatacccccagaccacttatctttgcaaagtttatcccagctgccccaatgaatttggtgtttgtctttagttgatccccaccagaatcgagcgataagactttgaatctctcagatcagcccctttgttaatctaaaacaactcattagatagatcggaatagcttgtattattgatttgattaacacctctcaacccgcttgagagaaaagacccatcttccaaccttgaagtttctcccaaaccttattccgcatctgaccaaacacttctcttttattccttccaacgaaagcaggtaggcccagatatttagtatggttctctataaatgtgactcccagtgaagtagcaagcctttgaccatctgtatgtctaattttcctacccacacataagcttgatttgttgaaattgatgcattggccagacatagctgaatagagacgaagaacctcacctagagctgccccttcttcaaagttagcatccaagaatatcaggctgtcgtcggcaaatagaagatgcgttactcttttctccatgaggccaaaccgaagcccatgtaacttatcggctcggctagcttcgttgagtaagcatgataatccttcggcacaaatgagaaacaagaagggagagagggggtctccttgtctcaagcctcgcttggggacaatatgaccccgagcctctccatttagtaagattgagaaggtaaccgttttcacacaacccataatcttcacgatccactcttcctcatatcccaagtatttcatcatcgcctctataaactcccattcgacccggtcataggctttagacatatccaacttgagagccattttcctttcgttgccaaaacgacccttcttcaaacaatgtaggctttcaaacccaaggatggcattatcttgaatctgtcttcctttgatgaaagcactttggttctccgaaatgactttgtccaggctcaatttcattctattagcaagacatttggatatcactttgtacacaacattgcacaaactcaaaggtctatagtcacctaccatggttggtttcttcacttaggggatgaggcataagagagtgtcattcaaactgctacaatccttgttcttgtttaacacttccaggcaagtagtaatcacctcatggcccacctcggtccaatgattatgataaaacaaccccgggagaccatcttttcccggagctttaagtggatgaatttgcccaatagcctctttaacctcctccgctgtaaagtcttccaaaagcatagcattatcgtgaaaagacaaacggttggggacacaccgagctagaatttctttcatgtgtggatatgggtctgaagaggagaaaagatccgagtagaagcgaactaagatttcctcaatctccttgtctttcgtacaccaccttctttgatcatcaaataaaccacttattgtgttcttctttttcctttgagaggccttatgatggaaatattttgtattgcgatctccgtgggttagccaaagtgcccgactcctttgtttccaaaggatctcctccttgacctcgacaacattcaattctctctcaattgtcctacgggttttccaatcctcttctcccgataaagtagataggtgtttcaaatcctttttaagtttcttagttctagcctttagatctgacttcttatccttgttccactccttaagggcctccccacaagaactaatacgccccctaagcccttgaggagaaccccagttagagttttcaagccacaccgattcaacaatcctaccacaatcttcctcttcggcccaagcttgttcataatggagccgagatctccaatttggcgtcttgtttgcttgatccttcacattgccgaaagtaaaaaatcatggggcgatggtctgaactccaccaaggaaggagggtaacggaagactcacaaaacttttgaaaccatttagagttagccataactctatctagtttttcgaaaaccaggttttgttgacgcccattacaccaagtgaattcccccccgctcatctttatctccttaaagttacaatatgagatggctctttggaaatcc

SEQ ID NO: 226628 - DNA, 2611 bp, Cannabis indica
tttttaatctttgctgttagactttgttccccagagctattccaagaatcttcaaccaactgtttgcacattagcttgcgaatccaggcattttcaaacttgaagcgcttagctatggcccgaatttgaataggatctggttctaacataatggggcaatgatcggaagtcgagactactaaatttggaagctttgagttggaaaatttattaagccaattaacagaaaccaatgctcgatcaagacgtacctctatacagtttgtttcttcgtgatttcgttcccatgtatactgtaacccatgagttccatatcaatcaatccgcacctatccaccactcccttgaatcctttgatgagccaattaggatatggtttcccacctttcttatcactttgaccaagcacattgttcatatccccaattaagcaccatggcacatttgaccttttagcaagatcttcaattaaatctcaagtgagttttcttttagacctgttaggctcaccatacacaccagtaagtcgataacttatgttcccaccatacacgatttcagtatctatatgattctggctaaaagacttcaacaagacttcatctttatttctccacagtaaagaaagtcccccactatgcccttgaacatccacattaaacataccctcaaatcccaaagaatttttaattatctcaactttctcttttttacataaagtttcactcagaaaacaaaattgggtttcttttggagaaccatctccttaaggaattgaacattccctggggtcccaagcccgcggcaattccagcttaatatactcataatggcgggcgggtccgaatatcggatcccgccatactcgagttttttggcccaaccacgtcatcttgctccatgttttcgtcattaccataatttgagtcataacccatttgagtgtgttgatccataacaaagtcgtagcccagcccaccaaccatccttctttttttggactctagtattgcagcctttcaatcgtaatcttgagattgagatgccacctcagcaacatgattctttcctgttttatgcgtttaactctgctgtaaaatagcttgtgctgaattgagataaatcctccccattatcatgtccacgatcgtctccatcaacattaatgccctgaatatcaggagccaaatttactcgcccctgcccacgattatcgaccctctgaccaccaccttccgttagcgggaccgccgttccctgtggccgcgaatgtatagtcaagcttccaatatccccatgtccgtcaatcccattccgcaaccattgagccccaataagtttcgtttgtctacggaacggtgctttcatccactctccatatggcttaacaatctcattttcagaagtatcaaatagacgagaacaaaatctctccgagtgtccaagaagaccacagatgaagcaaaaggttgggacattctcatatttgaatgtaaataaaattcattcagaccctgtttttcttagtttcatccgccgcttcaggggtttcgaaagatcaattattacccgaatccgcatatattctttccatataccattaaaattctttgggcaagattcaacgaaagtgccaatgtagttacccaccccttttagaatagtggatgtcatgtagccagtacgtaagtcatgcatctgaacccataagtcgagctgattcaacaacacgcaccttggattattattggccttcatccttgtaataataagtgccttcctattaaaataccatgggctcccttcacaaactctcttaatatctatttcgtgatagaattgaaacaggtataaatttgcgcccaactctttgatgtatactccccttcctggtttccacaaagcaggaagagtttgttgcattgacggaaaatcaacagcaccattaacaatgaattttcctaccagacacaattgtggatcatagacaaactctatctcttcaggtcctccattatcttcaattgaaatcccgatttcctcttcatcttctaatgtgagattatcaaaatcacgataattacttggtgaagccattgacaaaatctttacgaacaaaacgaaaacttaacacaccatgtcaaaagacaagactaacagtaataagtaagctgtttgcgcccatgcgacgtaagagtttttatcggcatagaggttgattaagaggttgtaataggagattgacggtagcactcatctttaaaaagtattacacataagatcattattattggatattaataatgcctagcatcacaccacctaaaaatggcgccttacaattggttaacgaatctaaaaattattacattattctcttgcaccgataaaatattaaatataaaaaatgtgctacacaccagtggaccagtggttacttttagcatttatcttataataacatttcagatcaaccatgaggtaacaatcttctctagaaatgtacatattgacctcaccggcatgcgtgccgagttgccaggagttgttttgcactggctgtatctgttgtgtattatgattttatgattaaatggttgtcgtatatatt

SEQ ID NO: 226629 - DNA, 1209 bp, Cannabis indica
atcatatctctccaattaagaaatgatgataattgggaatcaagtaattaacatgtcattagttcccacgatgatatgacacggacggttttaacaactggcatcgtgatgtggcatctatgtcaacatacaaggcacctcatgaattaagcttcaccagataaaggcaaagctaatatattatttgtaaatatcccattagagaaaagatggtagctagtatgacttttatgcactataaatttacaacgaaccctacaaaaaggttagaaattctttactcagttgctagggaaaacatagagtgctcataccttcttgtaatcacataggcttttctagtctaaacttaataatattgacttgtggactaaggcttgttaatgtccaaaccacgtaaaaatattgagtgtagctattcttttatttctgaattattattcattggctcttacatttaaactatttatttccaaaaaactcataaatatttgggtgctttggttgagaattgaagaaattagtgatacctctgacgattacatacggtaatcatggtactcatccaaaccaaatattgcctttactgcaaggaccctctgatggacgaagctgatcccaacactcaaacaagaacatggatcaatggagatcttactcaggcaaagcaatcgtcatgtgaatgaaaatcaacatgaaaaacgtgttcattaagatcctatcgatgaagaagatgaaactgagggtattgatcctactgatctaaaagacaaaaaactagtgaagaaggtgaacatgatgagcaaaatcatgcggtcgctgaaatggccaagaaatttgaagcaactgaactaaagttggcggctcaagaagatttctcttacgaaatgcaagaaactttggcgagattggaagcaagactcggaacaagaaatttgactcctaaagagaataatcctgatgatgttattcctcaagataacaatatgaggaaaaaatccaaaagatcttggtattcacgatcctcattaggataaggaaaaaggaaaggtaagagaaaccttgaagaaactactccactaatcaacgaaagaaaacaagttcttccagccaacctcaaaacaaagtggcaaatgcttcaggccaagtgtaaagatcgcttaacttaacttagaattagtagataattagggtttaatcatgaaactt

SEQ ID NO: 226630 - DNA, 2495 bp, Cannabis indica
gctgaggtattgtaaagcccccatagtacttcggtacaaagtgatatcttcgaaaggttctccatcagtgagactaagcttggttgtagagcttgtaggattaggacatgacttggctccttccatgtgtagtcgagtgagaatgtccgtgatatatttgctttgagtaagatacataccggtatgatctctatgtatctctacccccaaaaaataatggaccgatcccatgtctttgagggaaaactccctgttcagatcagagatgagtttggagattaaggaagaattcggtcctgtgattaatatatcatcaacgtacaccaataggtaaaccaatgagttgcccgagccatagatgaataagctattatcagaccttgaagcttgaaaaccccattgaagtagtgtggttttgagtcggccattccatgcccgaggggcttgtttcagtccatataatgccttgtgaagatggaaaacgtgagtgggatggtcaggatcctcaaaaccttgaggttatttcataaacattgttttttcaagattgccatagagaaaagcattgctgacatctagttgtttcactggccaattggaggagacaacaatgcttaagacaatgcgaactgtggttggtttgacaaccggactaaaggtatcttcataatcaattcccggagtttgaagataccctttagcaaccaaccgtgacttgtatttgtccaaagagccatcaacattcaactttattctgtgcacccacttgttatcaatggcatgcattgatggatggtatggaactaatgtccaagttccttatctcttgagagcctgaaattcagttgtcatagcagcaagccatttggggtttttaagggcttctttgatgtttcttggttcagttggtaagagtgattcgggtagggggtgtcttgtggcaagataggctttgggtttgcgaataccactcttttgatcttgttttgcattgggtggatattggtgtctgaaggtgtatggggaagcaggctgctgtgtggtgagtgagttacgggtaggagataggcggctagatggtggatttttctggttggggaaggaatggtgcagcttgcatattattatgagtaccaggaatgacaactgaataggctccagtagctacaactggtgggacatcagcagctgttggagaatttaaactggtaggaggaacaataggtgcaccagcagctggtgttgcatcagttgcagcagcatttgttgcaccagcagcaagggcaggtgttacaccagcagcaaccgtaagtggtacagcagcatcctcagcattggaaacaccaacagcaggaacagaagcaacagctgggtgagattgtgtaccaatattgggaacaaaaataggcaaatatggggaagaatgtacctgatttggttcagcaggtgatggtactgatgcaggttgtgtaccagggaagtgtgcttcattaaaaatgacattccgagctatataaattcttccctctggtgcttggcatatgtatcctttgtgatgagacgaatagcccaagaagagacattgttgtgttctaaaatccaacttatgtttgttgtatggcctcaagtgtggaaagcatgcacaaccaaatgtcttgaggatagagtaatcgggcttattgtgaaagagtgtttcaagaggagaggaccaattgagaatgcttgttggtaatcggttgatggtgaaaacagcacaactaatggcatgccaccaatagttcattcccaaaccagcctgtgccaataaagtaagactgatttcattaatgtgtctatgtttcctctcagccctcccattttgttcatgagtgtggggacatggatgttgaaaatggatcccttgatcttcaagaaatcgtttaaaaggtcgatattcatgtacagactttaatgggttagatttaaattgttttttctaaccaatgctttccattttatgaacacctcaaaggcttgggatcgtaaagttaaaggaaagatccaagtgtacctgctatagtcatcaagaaagtgaacatagtacttataaccatcaatagaaagatcatgggaggggccccaaagatcagtgtgaataagtgcaagaggttgagtggctcgactttgggaaataggaaatgggagagtgtggcttttgcctaattgacaagagttgcaaaatttgaggtctttgagagtgccagtatggggtagctgaggtaatagtttggctaaagtttgagcaccagggtgcccgagcttgcaatgccaagaattaacatctttactaagtgaggaagtaaaaacagagggattgcaaatagtcatattagtggaaaaagagtgatttttattacttgtaaagtcattacaagaactgatactattactatcagtaggaaaattacaagaggcagtagccacatcagatggcataaaagcaagattgcattgta

SEQ ID NO: 226631 - DNA, 2297 bp, Cannabis indica
aaaaatggaggtatttataggcccacaggtgggtgaaggcataccctcttaccccactagggtcccttactcagcacacaaatggggttgtgaaatactacaacaccattgtaaagatcgcttagctttaatttagaaattagcagataattagggcttaattatgaaaattatttattaatattgaattaatttatttatgatgatttatttgaattcagaatgcattttatatatcacttatacaaatttcataattttgaatgtttttgcccggcgacattggaacctgctgtttggctaatagaatcacatcttagtatttttggtatagcgggacaatagtttggacattgcaaatgtcgagaatagtcaggatgttagaatttcccaaaatacccctaagtactatttatgacttttagtgtggaaagggcaaaatggtctttttttccatttgtatttttggtcctttagtggactttatgtcaatgtaataatataatttttaaagattaattgaatgaaatagttaataaatcaagttttatctcatttatcttcaaaacagaaaaattgaaaaagaaagaatttctctcaactctctctctctctctctctttttcgacccaccctagagcagctagggtttgtttgttcttcaattatttcagggagattcagcttgtttttaggtgatattaatcaaggtaacggttttagctgctctcctcatgttttcttgagtttaagttagaggtttttgcatgattttatggttttgttgatgtagctaatgttagggtttgttatagttttcagaggttaatatatatggttttgttgatgtagctactgttagggtttgttatagttttcagaggttaatatatgtttagaaatgttgttttgagcatgaatttagggctgttagtggttgctttcaagttttgagtttttaaactcaaacttgaagctttaatggtgaaattcaattctgagctttgattgatgttttgttgcttgaaattggtttattggggtataatatgtaggtctggaaagttttgttgagtttggaaacgatttggttaagcttggttggtttttaggttttctgggtaaaaccggttacccggattttgcagcagggaaacccaaatttttagcttgtcgttttgcgtctgtttcagatttctagttggttaattccctgttagtttagggtattgccatattaagttgcagtagatagatttttgctttaaaacctaagttccggttgtgatttagcgagtcacttatgcgtgttgttatcgatgtgatttaggagcctataattcgccaagcagttgttccactcatgtaatgaccgcttaagtaattttgattagtaaaggcaattagcactaatttctgttatttttataattatttatgaaatttaattatttgtggaccccattattagaaatgagcattagagttataatttctcaattccagagatttttattaaaacttctagaggggaataacttgacatatatgtgaaatatgctatttttgaaatttttgctctacgacaacaaaaaatacgatggatggctagtttaatcacatgggtaagtttagaacattatatcttagtgagaaatatatttgagaaaataaaatatcgaggttgagcgaggttatggaatttgaccattttacccctagttttgaaaataccctaattttaagttaaaaggcattttagtaattaaccaaatgtatgatttggtggctgcctaagttgatgacacctgccctttcctttttcagcaaaggattaattaaaaaaaaaatcctttagtcagttagagaaaaatcaagaaaagactaaattgaagaaaagctctctagcttttcctctctcttcgaaccagcctagaacaggggaattggttactgaattttggtatttttagcagggaattaaaggggaaatcaagttgaggtaattcctatatctattgctcttagttttccaagctttggtgttgacttgaaattgtgattttgggttttaagggttgttagggttcggtcagtgtttgattcaatttgtgagctttgtttaggttgattttaggttttagatgttagttttgagctatggtgatagaattgagcaagcttgatctttgaaactcacgtttaggtctctagtgtaatttgatttagtgtacttttctgagaattactggttggagtatgttgaatatgcattatttaggtactctcgaaagttt

SEQ ID NO: 226632 - DNA, 1659 bp, Cannabis indica
aagataacttcttaaagttattctttgccagttccacatgcgtacaccaagtagcaccccaaaaaaaatcccaagtaaggttaatgaaacttggtgaattgcaagtgaccaagagaccgtatgtctgggcgctcacttggggggcacctacaccgtacaatgcatcgaactagcaggtagaacttatgtaaagaaaatttaaagaacttatgtaaagaaaatttaacgcttagaataagctactaaacctgcctcaaagtcaagtctaggcatacttcgacttgacataaaggaaagtaaatgcggatacttacatgtccagccaataagaagatagccagtatgatcatatgtccatgataaaaggctttaaggctaaatgatagtattattcaaaaatagagggcatataggccaaaaacaagaacatgaaaaccttgaggccgaatatgaataaaaaattaactcacatgcataaggccaaggcccaggccggctaaggttctcaagccttaaaagggtcggccagggttccatgactcaatcaagaattggccagggtcaccaaacccaagacatgaacagactagctttatagggtgaaaccctagagctggccaactcccatgattaagtcctaggactagctaggtctcaaacaagacctcccaagccagccaaggttagttttgaatctaaatttgtgttttttttttcaaaactcgaatatgtgcctcgtgttctttttgacttaatgagtcaagaatcacaatgaaggccaaaattgaatctcttccaccaagaagtaacacaatatacattccaaagctatcacgaggatcaatataccaaagatattataaactaatatgagaatcaaaaagtttctaagtgcttaaaatcttgaaccttattaatggaaggtacaaagaagagaagatgagacatatatatagacagaagatcaaagatctacaagcatgccacgcaaaaagccaacaattagctagaaaaggttgctcgatggagactactacaaacaagacaagagctagaaagtccctatccaaccagatgtttgaacaggaacttagggggaaaatgttatcctaaattttttccacctaacgtggcaggtccacataagccaagacatagtaaatgtggaatacaacctttccaataacaagacaaggtctccatacaaggtatggcaaaaccatcaagtagcaaccgaaaagggtggatcaagcaattaaggagttctgccaacatgtctgactggccaagagaagcctatagggtggccagggttagcttatatggctagtcaggatctggacacaagctagccagctaaaaggtgactttcagaccaagggaccttccgtttgatcaagggaacctgacctctacaaggaaaaggtgtacaaagttgtcctccacttgccaaaggctagcctccatatccaaaggctaacctcctcttggtaaagctgacaggaacatgacctgtagaccctggcaagaacatgacctgtcagaccctggtacgaacatgacctgccagaccctggtaggagcatggctggtcagacctcatcctataggtagatggccggcaaggagtgacctgttcggttttatgccctaaataaa

SEQ ID NO: 226633 - DNA, 1544 bp, Cannabis indica
ttataaatattagtataatatcaagtatttgaatttaattttgaaaagtatattgtattatactaatttttgtttatttttataaaaatacgttttacgggcgctttaaatgcgtccataaaagtgttatcagtcttttgtgggcacactaaaagcgcctgcaaaggttattttttttttaaaaaaaaaattattcccaataatttttctaggtgctattgttgtgcatggaaagagttttttcttttcgtacgctcccccaaatcacgcctgttcaaaaattcgtcagtaatacttttgcaagcgctaaattgtgtctgcaaaagtgctaatccttgtagtggttgttgttaagagttttttttttttttccttcattttaatgtaaatagcttggtaagatttttgatgacttttttctttactttattcgatttggctagatagttatattttctcaacaagaaaaaaatatttttttaaatgtaagatttgtgcgattctatgtttgtttctgtcttatttgtagcattttatcttgttttatgtttaaagtataaatgttgtattttttttaaatgattaaatgaattttcataattaaaaatatcatatattatatataatgaaatatttgactaaatgaaatacggagtcggagatatatataaattcgagagtgcaagttattagctgcacttctatacaatattacacaatataatctcttccaatcacaatgaaattcttttttatgtatacagtatatatatgtcctaaccctcataatttagttgatagtagaaacagataagattaaaatttatcacggtaggcatatgaaaatcactactatatggaaccttttatattgtatatatattattagctatacacgttttggtggaggagtagtataattgttgtattatatgtcatcggaccagtcagtgaggtcggtttcgtagaacaagccatcaacgatttggtcgatgagagtatcaaagaaggtgttgcaagtgaggctgaacatccggccaaccttgtttcgagcactggagaaccacgcgaaagtagctgcgaatgccacggctgccaagcaaacccctgctgcttcctctatcccaaccacatcaacctttctaaacaatgaatttcctgtcaccacttctgtccccacagttaccgcaaatattatctgcagataaccattaattattattaaatcaatcaacatatatactatattatacaattccatccaattcccttataattataatcagtcaatgaatcttttgaatttgcaagttctgctagaatcaaagagggtcctacaacaaaaagcaatataatactacccttttcttgttttaaatcttattataatttcagctaagctctaagatattcctctaagaaaaataaagtacgttacatattctatcttaagaatcaccttgaactgaaaaatattttaaattaacaacacgactcagagaccaaaagatttatacaagattcatagctagtctactatatat

SEQ ID NO: 226634 - DNA, 1217 bp, Cannabis indica
ctcgacatgtacaatcatccccagctcagaactcactcttgttcaacctttgcctctcccttacctacacacaaaagtatatctatgagtcaacaaactcagtaagaaaagcatataacatataatatatttgacttgtatctaggcacgcatacacctatccacaagatttaacaaataagtaagaacgttctttatagtaaggtacaaccactataccacatgcactacatactgctactgtacgagtgttagtaggatttgcaccgtacctcaagtactcctaaatgttgtaccacatacattgtaccaacacactcagtaccgctactatactagtgttggtaatgcacgaatcacaattagcatgcatatacactacaagaaaaatgtgtattaatgaggacaaattttgttggtaaaaactcctgttttcgtcagtattcttcattaataaggatatttcgttggtgaaaagtcattcaaaatagttcgtcggtaaaaacgattatcaacaacgacttgtaaagttgttggcaattaaaaatatcaacgacgacattgtcgttgggaataatagtctatttattttttaaaaaaatttgggtgcatcaatgatgacattgtcgtcattgaagagtgtccaaaaaaaatcaataattatattaaaattatttctaattaattattaatatataatattatattaaaattatttaattaaataattattttaaattttatatttttataattatataaaaattatttaattaattaatatataaaattatttaattaattaagatatgaaatcatttaactaaaagtaaatatttagagtcactaatattacaataaaagtgagtcataaacattacaatactgcatacttaaatataaataagtgttcataaaatattaataaacataaaaccgatagttcgtaaaattaaaataaaaattctaaaagaagtttgtagtagcatcgtcctcatcactagcatctccaggaacatccggcatctgtgggtagtatggcggcatttgcgaacttgtcatcatctgagatgtctgctgcccatgtaggtcggcatcatttgagatgtctgctgcccttgttgtgtcggcatcatctgagatgtctgctgcccttgttgtgtcggcatcatctgagaagtctgctgtcctagatgtgtcggcatcatctgagatgt

SEQ ID NO: 226635 - DNA, 2196 bp, Cannabis indica
ccattctccttctcagtctccaagtcgcgagacaactccttgacctttgactgagagagttttgcttgaagttccacctgctctttggacttctggaggttctcgagctctttgtccatagcatttgcatcctgcttcagcttcgtgttgttctcctgaagctggacgatctatttcttcaaaagatcgacctccttggggcccgcgacaaacgccctcgaaaacatagtgataaactgcgaagccaactccacagagtgaggcattaattcctcaaaaggagtcccttcaaccttcgacatgaaatcctcgcccacgaacttttcttgaagagctaggatgtcgtgagctcgaatagttggatcgatcataacctttttccccttgtcctgagaaggcttggtttgcttcttggatgagtcagtaataggaattgcgccgcgtcactcttcctcttctaaggaacaacaggagaagtcgtcggcgtttcagtttttggcttgtgattaagaactggagcttgcttcaagaaagtcatttctgcgaggacaaggaaagttaagttaaaaataaacaatttacgactatatatcgcatataaacgatgtcttacctgatgtcgatcatgagattagtttggaaagacgtttgtctatcttatctttttgtttttcaaatggctctatgccttctaccccgttgatttgagaagtggcccacttgctgaagcaatagaaaccgttatgaaggcccacattctttatgtcataaaaatagctgaagtcctccattgaaggctccctatgcgcgtactcaatgtacatcgacataaaagccaagagctatgcgctagctgtttggggttaattggaagggggatacgtcataccgtttaagaatagcaacgatgaatggatggaagggaagcgatactccacagcgaagaatgggtatagaaacaaccacattctctgtggggattattgcgggattggtgaaagaaagatgtggtctctgagtagagcggggacgcatggtgctaagtcgcagcaaattcaacctcataaaattggtgaggtctaatttggtgacttgcgagaccaactcctcacatcacaagggctcgttcagttgtgtgttatccactaaatcagttccactcccctcagcgtcctcctcctcatttgactcgcggtcaggaacctcccagtcctcgcccatctcctctacttcaatgtcaggtgcatgcctagagtgaacaagatgctcacgagcagataccatggatttgctatcacgaatctcgattgtcctcggtacagcgagctcctgaaccatcctttctatgtcctcggaggacagcggacccaaagttgctgttctggggattgaagtttcttcctcagagattgaagttggaataaattatcttcttggtctctgtcaccagcaaaaacatcacctccagagccgaggatttggctatccgataagtcgctcatctgaaagatagaatatcttttcagtgttgtgaaagtgggagaataatacaagtgacatcacccgcatgaaaatcgcacatgtgcaattagtagagttcctcaaagaaatggctgggtgtatccaagtgacccaaggggcatgcgttcttaagcatgaccatggaattactgagaaacacccaccatttcaagaaatccagctaatcacaacctgcgaacacatcacgcatatccaactagtggcgtacctcaagaaacagctgaggagtctcctgtatcccaagggacgtgcccttctcgcacatacattgggctaacagaaactcctcactgttttgagaaaacctactagttgaaatccgtggttatgcaaaaaaggggaaaactggatttatgtcgcaaatggctgggtgtatcgcagtaactcaagggacatgcaatcgcacgcgtgaacattgggctacggcgacacacccaccatttgaaagacccaaccagtattcttgcacaaaaatacacagagagtataaaaaaaaccctaagttctaaacaatgggtcggagtgaccaaatctttagaattcctaaggaaataatacatgcgagtattcaagatgctcatctcaatactcgcgagtattcaaaatagcaagtaaaaaacgcggatattcaaagtgttcttcctagaattcacg

SEQ ID NO: 226636 - DNA, 1450 bp, Cannabis indica
gtctttggaactccatgcaacctcaatatctcttgtaccgtacaagtcagcttactagctctgcgttgtcagtagacttagacttggaacaaagtgtgctgactttgtgagtctgtctataattatccaaaatgagtcgtgttgcttggttgttcgagatagtcctgtcacaaaatccatggctatatcttcccacttccattctgggattttcaagggctgcaacatccctactggtttttgatgttcagctttaacttgttgacatgtaaggcatctagctacgaattcagctacatccttcttcatccatggtcaccactacaaggtttttaagtcattgtacatttttgttgaccctagatgcattgagtagggtgtagtgtgtgcttccatcatgatttttcttttaagctctatgttgttggccacacactcttcccatatacctcagcatgccgtctgtaccttcagagaaatcctctgcctccttctctggcaagcctgctcttttcttttgtaagaactcatcaacaatctgtacatctttaagttcttgtagtagcgtcgagacaatggttaggttagccagtttttgtgtaatgatctctataccacttctttagagttcctgttgtaggggcttttccattcgtgctagtattgccaagctagcataactgcgtctacttagcgtgtctactactacattggccttccctaggtggtagtggatttcacaatcatagtgagttccttttgcataaagaagttctttaggctcttgtggttagtataaattttacatttctccacgtagagatagtgcctccatattttagcgcaaaatctactactgccaactttagatcgtatgtcgggtacctctattcatactccttaagttgtcttgaggcatacactactaccttgtcattttgcattagcacgcatcccaacccttgttttgatgcatcacagtaaaccaaaaaacttatccttgttattaggaacacataatataggggttgttattagttttttccttaagtgtttgaaagctatcctcacacttttctggccagacaaacttctgtgtctttcgagtcattggttagaggaattgcgatcttggaaaatccttcagcaaagcatctgtagtaaccagctagacccaagaagcttcttacttcacttgcagtcttaggtgttggccagctcttgaccgcttcgatgtttgtaggatccacctcgactccacctttggaaactatatggcataggaatgccaccttctctaactagaattcacatttcctgaagttggttctccttaagtcagtttagagtcatcctcaggtgttcctcatgttcctccataattttggagtagataggaatgtcattaatgaatacaaccacaaacttatctaggtactccttgaacacc

SEQ ID NO: 226637 - DNA, 1729 bp, Cannabis indica
aagtaattctgattatatacttcaaatacttagggatttatcagtgtactgaatttacattgacgtaataatcagtaataaagtttattgttattccctaaaattcggctatgtaccagaagctaacacgtgtcctacagaaagaatgtgaatcaactctaataatttaacaatgatgtatcattaaatgcaatttaaataactcgtcccaattaaatataagtttgatagataatgttcaaactcattggctgcttaattagtcttatgcgagacaagaatagtaactattagactcatattgacgagacatatatctgtctcggaataaactcatttacgtacacaagaagaggatactctcctgcacgagcagattaaatgtagcaacacacaaccgcctcgcattacacatagtgagaagatcacctcgcattattaataccaataaagggatacgatgagatgaattattttccaacacttagcgcattttcctattaagatggacatgaaggagaactcacatctgatgagatacaaccttccaaatcaacaataaccgtcaagaggataaaaataataagcggttgggtagttattagatattatcccatgtgtgattaaatgaaacgtggggattatccatgttccataaacaattatatatgaaccaatccaaaaaagaataactgttaacctctcctatgttcctataaatagggcagaatccatgggaaaaaagacaacaaatttgggagagaaaatattattattcaaatactgatattgtattctgtactcaaagaaaatatccctaataataaggattcgtggagtatgtagattttaactacaaaaccacgtaaaatatctagtgttattttatcatttattacttatttctttctgtagtgagtttattgaaaaaatgctattaatttagttaacaaaaatctgctttaacagattggtgctttcattgagagctttggtgataaaaactcaaaaaaatctctcctcataaacacaaatctatccatattcaatggctgataaaatcggtagtcgtcctgaagaaacaacccatcgtcctggcaaagagcccatgggatctcaaagacccaacacatctgaaataccacgttcgaggaggaacgatggtaatgatgatccaaactcagaaaggaggaatgaggatgtcaaaaaccctgccagatacgtgcctaggagtgaggatgcctattattagaattacaacagaatcagcctactgacatcagctactgacagattgttagttatagttttttttactgttagttcagttagttaattctgttacattagctatcttttagctgatattgtttcgtctaaagtcggttacttccctgtatatatattggtgttcttcattaattgtaaacaagcagattgtaactttttcattcagtaaataaagcttttcattttctttctgtttcgtgttatggtatcagagcgagagagtatgctttcccacatctgaccttaatcccttccgctttccctgcctcgtcgtgtcttcttctccggcaatggtggcactcatccaagactggtgatccagttctcttcttcctgacaactctcccttcatcttctcttcctcttccagaatctttctttcttcttccctctctctgctatgtctaacaatgatcaagatgttggaaatttattttac

SEQ ID NO: 226638 - DNA, 1384 bp, Cannabis indica
ttgctcaaacgtattcaagggtgggatggtcgcttgctctcgagagcaggaaaggagattctcatcaaatctgttgcacaaattattcctaattatgcaatgagtatttttttgcttccaatgaaaacttgcaaagaattggaaggtcttatgactaaattcaaattcttgtggaaaattgcctcctcatctacaagaagtattaactggatgagttggggacgtatgtgcaatcataaacatgcagggtgtctgggtttaaggagtttaagagattttataatttggctttattgcaaaaacaaggatggcgtcttcttacaaatgagtcatcattgcttgggaaagtgtttaaggctcgctattatccaaatggctcctttcttgatgctattctgagcaactcgagttatgtttggcatagtgtgcacgaggctcaatctactgtgcgggctgggggttagaaaaactgtgggtaatggatcatcaatttcaagtttacatgacccgtggttactgttataatcgaaattcggctggaggacacgtgtcaaggtgaagggaatgtgaatcggtacaattttttttatggaataactcattaattgcataagtatcatagtatatttgtaacccgctgtctgtaaggtcttaggcgaggaatcaatgtacgaactgacacttagtgtattaacgagaaaccatacgttgttgaaggagaatagcgagccaccagagaaaagtaacacataccttagcttgcaataagcaaactaagtgcaaaagtcggatcggctcgaagaacaagaatacgagatgaccacctatagtttcatccaactaacatgaacgaggctcataaccctgaaaagttagaagaatctgtatacccgcgatcgacgtaagacatatcttgtcgacctcggaaagaagaatggttccagctcgccattgggatcactacaatcaagtttccgtcgaaacatctccaaattcaacaattaaagacgtgtttaatacacgatatttttgacccagtaaaagcagaaaaatcacagctatatgattttcaaaatcatacaccgcatctacattttgtgatatgtaatcagatcccacgattttagggataatgactgtaatcatattttggtctgctttgtaattaactgccactatgaaactataaatagtggcaaacaatctcaaaaaagggaagaaaaaactcttatgaaagaggccctgaaaaaaatactcagaaatctgaataagattgactcgtggactatgcagaattttaactgcaaaaccacgtaaaaaacccggtgttcatatttttatttttctatagcttttgttcattctgtgttgaattatcatcgtg

SEQ ID NO: 226639 - DNA, 1413 bp, Cannabis indica
ttttttttttttggaacaaaaaaaaaaattaaagattatgttaaaagtaaattacactttaacatgttgcagagtaaattaattttttaaatttactccttaacatattttctagattacttttcttttacataatgatatgttaagtttaataaaaaaaattaaatgtgtatattatattttatgaatgtaacttctgtggataaattgtagaacaatatgaatataaggctaattaaggccattcggatgtctcctattcataaagataacttgtgagaaaaatgtatcaatagaataaaatatcaagacaaatattctcttgcaaattaattatcaggagtatataattgattaaaaaaagttataacacatgaaaaagtacaagcaattgaatataataagtagaagaagataataagctatgtttattttgtggtagataatgttcctaagaaaatggaagaatggaaattgctatactcaaaatttggctgtgtatcagaaggtgacacgtgtcaatctcagggaatatgaatcaacgaatatatcgataattatatcaataaaaattaaatggaataactcattaaatgcagaatccatagagtatgtatataactcgcagactacacaatttttagcgagacaaggatgtacgaactattgatttacgtattgacgataaaccatttcgcgtcaaaaggcataatctcaaggaagacctaaacaacgcatagcgaggcatctacctcgtgatatgtataagaaggtattgacgaggtgagttagttattaaaaaacttaacgtataatatacattatagcaactatgtgtaataacttgaaggacatgattgtccagtctgtaaggtcttatggtcaaagagtagttcttaagtttgctcaatacactggtactaatgtcattgctggaagacttatgaatggaccaagatgtttatgcaccaagcgagacacctcaacgagatacgttttgtagtatgtcttaattaatccacgtcagtgttgaccctttaaaagcaatttaaatcacagatgtgtattttttaaataataactgtatttatttatgtggagcataattaagcccacaattttgagaaaatatcgttgtggaattcgaatttgaatgtataaactgccaacctatgttattataaatagggtagattataccaaaaaataaaggagaaaaattcttatagaaaaaaaaaagaatacactgattgtaaagaaccttagcagaaaaatctgaataagattaactcgtggactttacagagttaactgcaaaactacgtaaaaacctggtgttatttttgcttctattatttttcttagatttctattaattctatgccaaatgtattacgaaaataggctcataat

SEQ ID NO: 226640 - DNA, 1485 bp, Cannabis indica
tgttaggaagcatgttagtagcctgatagtagaataggcgtatattttgaatttctaaataagcggcaattagtatgtttttatttgatcatggtctgaccagactagctcttggttatgcaggttgttctaaatagtatggacggcaggcgaaacaccaggagccaaggtaattcggttggatccagtggtggccagggagttcagatcccccttaatatccgtggctgaggttgaggtcctagttgcagggcacgtggccggggtgatgctaacccgccacaagctgcccaagctacctaagattgcgaaagtatgtttgcaaaaatgcaagccaagattaatgaacaagatgaagagattcgacgtttgagatagcaggatcctcctacaatttctgctgcaaaaataccaatagctcttgcccctacgatgcaggcaggacttgtagctggaaggaaccgaatggaacccctgtatgaaaggttccataagcaagcacctcctgttttccttggaggtcccgatgtcatgaaagtcgagcagtggctaacagtgattaccagaatcttaaactttatgggcgtcactggtaatgatagattgacatgtgccacattccaatttcaagaagaccctctggtatggtgagacatggtgtctgtgactcaggatgttactatgatgtcctgggaaaagtttcaggaactgtttaattcaaagtattacaatgaggaagttagaagcgcaaaagaaaagaattcacccagctgacttagaaagaatacgtgagtgttactcaatacaagactcagtttgatcgcttcgcaagattggttacaggaatcgtgctaatcgatttcagcaagaaagagaaatacctacacaagttgaatgccaagatcagacacgacttaatgattagtaccgatgacaacaccaactacgctgatatggtgggtaaggcattggaagctgagggcgcaatggagtgcaccttagactctcgagtgactctaattgttggtggggctcctactcctcctacatccggctttagtaggggaggtagtggctcggccattgatcagaatagaaaggaatctactgcatcttgtggctcaggttagagcaagaggtttcgtgggaaccagggtcgaggcaatcgttagggtagctctgaaacccaatacacttacccaaagtgccccagttgtaaaaagcatcatctgggggagtgtaaaggacaagggtgtttccagtgtggtatgcatggacattataagcataaatgccgtcaactgaagcctgaagtacaaaagactacagtgaaacccactccatcaagggtattcgcgataactcaagctgatgcagaagccatccctttaagggtaataggttagctctgggtcaacaactcttatttctctatgttgtttgactctagggccactcatttgtatgtggcagccagaattttta

SEQ ID NO: 226641 - DNA, 916 bp, Cannabis indica
taataatttaatacttttttttttcttttcaagtgtatgaaataatttttatttattatttatgatgatgcccttgggagtgaattgggtcggacaaagacagaagaagtttgccaacttcctaaagtacgggtgcaaaggcaataatgccccttgtttggaatgagcacccgaccaggcacacatccccttctttgggttggaggctcagtttttcgaggcaggaacataacattctagctcgcccagatagccgccctggtcgagatcccgtaagcgtggctcagtgaccttggatggaggactcaccaacctaacacccaaggtactttgtctcctttgaggaactacagcagtaagctcctcattgacgtagtccactccttcaaccaggacatcaccgtccgcgtcaattggctccctgaccttgttctatcccacaaaatttggaggtgcagcttcctcctcttcctccgcctcgcaacgactgccagggtgggcatcgcactgttcctctatctcctagacttgtggatcctgttcggcgctaggtagggtagcgtgctgggcaacgtgagggtaagacgcgttgactttatgcattgtctgtttagtgcgagccatcatcctgtggctaaacgggaagattgagttaagacgtccgtcgcttgaaaagggcggactagaataaagacgagggtaatcctcgtgcaagagttgaagcaaatccttgtcaattcagtgttcgcttcaccaaaactcaccagagttcatctacaaaagacaacacgcgagatgagtgtttggtcgggatatcgaaccgtaaatagccaaatatgccgaccaggagtactcaacagattaaagaatagaaatattcgacgaataagtcaaatcttagatgtttaaaattttt

SEQ ID NO: 226642 - DNA, 1445 bp, Cannabis indica
ttttctcaatcccagatgaaaaagctcttgtccctgatggttttagtagtgccatctttaaagacacttgggatataaccgggaaggatgtttcgaatgcagttatctctttctcaactctggtaagttgttaaagaaaattaacgctaccactattgctcttgttcctaagacggtgtgccctgagtcagtgattatacaccaattccttgctgtaatgtgatctataaagtggtgacaaaaatgatttgcaacagattgagagaagtgcttcttaacattatttatgaaaacaagagtggttttatcaaaggaaggaaaattgtgcaccacatcatggtgtgtcaagatatggttagaggctatgagaggaaagcggctaaatctgcttgtcatttcaaaattgatttgcgaaaggcttatgatatagtggattgagagtttctcaaggaaatgcttgaagctcttatgttcccaaagaagtttgtggagcttattatgatttgtgtcactgcccctcgcttctcttttatggtgaatggtttattactatgggtatatccagtctaagaggggtctttatcaaggggacccaatgtcgccgctcctctttgtgataggcatggagtacttattaagaatcatggctaaaattgccaagatttgtgactttgcttttcactcgagatgtaagggcttaaaacttagccatttatgttttgcaaatgacttgcttctcttttgcaagggagatttcaagtctgctctcctactacttaggggctttcaattatttttgaacacatctgggcttaaagctaatgaagggaaatctgctatttatggagtaggtttggactccctttctttggataggattattgatatgtctggtttttgaaaaaaaagctctttaccttttaaatatcttggatggcaattagctaaaaaaagaatttctaaagcagactatgaagtttagtggagaaaatgacagccagaatcaaaacttgaagttcgatgaacctttcttatgcaggaagaatggtcctcatcaactctgtcttgttgttcattaacacttattggtcccaaattgttattataccaaaagctatatttcaaaagattacacagatttgtcatgcttaactttggaagggagtggacatgagcaaaggtaatgggaatgttgcgtgggatgatctttgtaaacataagaaagatggtggcttgggcttcaaagatatagctttatggaatctttgtgttatttgtaaacatgtgtgggctattactaccaagaaggacaacctttgggtaaaatgggttaacgaggtgtatctcaaaaatcaagattggtgggactactaagtccttttggaggctagttggtattggaaaagaatagttcaaactaatgaaaggataaaacaagtcttctc

SEQ ID NO: 226643 - DNA, 1460 bp, Cannabis indica
atctcatgcttagatagatatttttttcaataaagaagtattttattgtctttatcttattaaattgttttatacggactgtcctatgtgacatctcgggaaatcggggtgttacaaaaatggtaaaatgggtggaggtggaggaggaagagaagagaaaggggcagaggatgaggggatcggggagggaaaatgaaaaataaaaaatgttttatgagtttgaatttgtgcttttatagatgaacattactggtgggacctgccgatattaattagggttccttcggtaataataaaattgtaaagaccgcttagctttaatttggaaattagcagataattagggcttaattatgaaaattatttattagtattaaattattaatttatgttgatacatttaaattcagaatgtattttatatgtcatatatagaaatttcataattctgcatgttttgtgttcgacaataatggaacacggtgtttggctattagaatcacatcctagtatttttagtatagcaggacaataaaattagacagtgagaatgtcgggaatagtcgagattttagaatttcccaagatactcctatgtggccttttatgacttatagtgtgggaagggcaaaatggtcattttgcctattaaaatttgtctttttgtgggtttatgttatgtttagaaaatctgatttaataatgtttgtagctgataattatttaatgaaacaaactttttattcattttaaggaaaattagaaaaaatatgaaaaagactctctctttccactccctctttctctatctcgaaatccctagaaccagctagggtttggtctgattttttgcacttcaagcttgttttagcaaggaataagtggtctcaagttctaggtaaatttctagtatccttttctttgatttcttgaagtgtaagaaaatagacttttgcatgaaatgtaattttagctgttgttcttgctgtggttgtttgttattgatttcagaagttaaattatgatagattatgttgatttaagcttgaattggtggctgttagtagatctaaccaagttttgagttttagaactcaaacttggagctttaatggtggttttagattttgagcttgggtaattgttttattgcttggaaatggtttattggggtataatatgcaggtctggaaggtttggtaaggttcggaaacgatttggttagggtttgagattgtttggtttttctggggaaaaccggcaaaccgattttacaggtacctataaaatcggataaccgatttttgcagcaggatttttgacaattttaggttatcgattcgtgttagtttcatatttctggttggtaaattccctgctagcttagggtattgtcctattaagttgcaatagataggtttttggtttaaaacctaagtcccagttgtgatttagtgtgt

SEQ ID NO: 226644 - DNA, 1924 bp, Cannabis indica
tacatattcatattacacattattaaaactggccaacctgaatagaaagtctcctgctggatggatgccctaatcacatattaaaactgggtaaataacaagatcgaaaccctaatttgggaaaaccccaacctataactctaggctttgttatactcactagggattacactaagtcaggaaatagggaaacactcaactaaagcactaaaatgatcgagaattgagaaaatgagttgtttggggaatcttccaaaatcggctaaccaattttacaggccctggcaaaccggttagccggtttgcaccaggtttcctccaagaattcagttcttgctcaaaactcatccaaatgccaccaaaccttccagagaacctaaataatgcatatacaacacaatccaaccattaattcacagaaaaactcatagaattgaaatatgccattagagaccaaggtttaggtttctaagctaaaacttgcacaaaaccaattccatacaccaaaaccagttgctaaaagctaaattcaactcaaataaaccctttaattcgaactacacaaaaactaaaccctaacaacccctagtttcgaaaatgataaactcaaccaaaccttaaaattcaagaactaagaaatagtgatgctagggcctaccttggcttgattctctctgaatttcttgctgaaaaacatcaagaatcagcaacaatttccccttgttctaggctggttcgaagagagagggaagggaagagagtgttttcttgattttggcttatttcttctaattttctctaaatgaaaaggatttttaattaatcctttgctgaataaataattggtaggtgtcactaacctagacagccacctaactctccacttgacaaattacaagtatgccgtcataacctataacttagacatttttaagattaagggtaaaatggtcaaaaaccataccccactcaacctcggtattttattttctccaaaatttatcctactaagaaataaggttctaacttacccatgtaatcaaactagccatccatcgtattttccgttatcgccgagcaaaaattacaaaaattgcataattcacatatgaattaaataatactcctagagtttaataaaatcttcagaattgagaaattataactctagtgcccatttctaataatggggcccacaattaattaaattcataaataattataaaaatatcaaaaattagtgctaattgcctttactaatcccaattactaaagcgattattacaagaaagcacgctggaaatactcgtgttgctttgtagggtcagttgttagtccatgaagcagccagagtgacgtactcgtgtataagagtcatcattctgtgggtgtacgggcttaatggaggcttgaagcggggacgttacataaaacaaaatggaattgaataatgagcacaagggaatataatggttcagtcagatcactgtctacttagtccactgttgcaaaggaattcgatgcaatttattcatgttggatcacttctttatatacaaagtaaatttctttttagttacacataactgatcagttatagaactattttacaattattatcaaaattaaataagaataaacgaaaaaaaaataaatgaagaatagtttaaatctatttttaataagtatggcaacgtatgtgacctatagggtgcgagttgattgttcatattcttgacaagctcgcaagctttgggtgcattctatctttttaaggagggtttatgagcctcgtgctaaggtgtctgcgttctgtctgagtcacatatatggatgtctcatatgcatcgacaacatgagacagcgagtctctatcgagttatttagtacgctttgtcgtttggactagttcattatgtaaaga

SEQ ID NO: 226645 - DNA, 2639 bp, Cannabis indica
gtaaaataattcccaacatctctgccattcaagctagtttcaacaagtgtgtagtgatttcctagcgaaggtaagctcctagcaacttcctttttagttttcttgaatttcaagttaaggattttgcatgaaattgtgattaagcttgttttggtggctgttagtaggtttgagcaagctttgagttttagaactcaagcttggctctttaatggtgaaatttgattctgaacttggatagttgttttattgcttggaatatgtctatggggatataatatgcaggtctaaaagatttagtaaggtttgaaatcgatttggttaggttttggaatttttgggttttctagtgtaaaccggctaatcagttttactaaatctgtaaaaccggttacccagatttgctcttgggttccctgaaaaatttgtgttatcgattcgtgctagtttcaaagctttggttgattaatttcttgttcgtttagggtattaccatgttaagttacggtagatagggtttgggtttaaaacctaagttcccagttgtgatttagcgtgtcagttatccgtgttgttattgatgtgatttaggagcctataattcgacgagcagttgttccactcaggttggtcgggacacctgaatttgaaatcatggtaagactagtataatgtcatgcatatgttattacatgtttagtatacatgttgtttatgcctgttagagtacattaatagcagtaatagtatacgaggatagggttatgatcgggtgtatgggcgcctggctataacccgggatattactatgttttatgttatgcctttcttactgagtctgtcgactcacagtgctatttccatgtgtaggtaagggaaaggctaaggctgagcaaccgtgaggtcgagcaggtgaagattgtacatgtcggggcgattaggcctggagcgtacgatctttgggatatcagggcttttgctgtatagtcgctaggcgacaaacttttgtatatgaacattaaacttttgtaaatgtattttgtaaacggaattttgagattttataaatgtattactttatgtttctaattaaataagcaaattttaattaatcatatttttcgttaatctcattgattagcaacgagctgcatagtacgttaaaaatcacgctaacatgcctaaattagttagggtgttacagatttatttttgggcaccttcccgaaatgcctcattcgagtggagatagtgttcatccttatatacccaagatcctttctatttatagctaatgtgggactttggttgtacacccaacaagaagtattccatatatatatatatatatcttcaaattaaaaatgtaatgtatttaaaaataatacatttttgaaattaacattaaaataaaataaaataaaataaatgtggaaaaattattctaatttatgttggtctaaaattaaaaaaaaaaaatctacataaatataacttttttatttaattaaatctcttaaaaaatatcaaatatgtaagtgtcttgaacaaaatcaacttaaatattaattttctatttaattaaatacatatagaaaaatacgaaacgtttactcaaaaaaaaaaaaaaaaccttctagatatttcgattttctaattaaaatataatatatttcagtctatttattttaactaatcattaatgaaaaattttacttgatttaagttgatctaaaatttagttataaattaattaatttcaactttaatctaattttcaaattgaaaaaaaattcaaaatatctacatttaaaatagatgtatttcgaaattacatgaaaaaatgaccattaaaattaaataaaatatattctaaaaattattctaatttaagtgggagtatactcatttagtgcctagtgtttttatgaaaaacatatttggtaccctatgttttcaataatacttaattggtacctcatatttttaaattgtacatatttagtaccttaaaataaaatttaattaatacaactttattaatttaaccaaacaattctcagttatatataatcaaataaataaattagaatttagaatttataaaatttatgactattgatagtattgattaaattttatcaaaaaaattgaatttagggtaccaaataagtataattttaaaataccgggtattaaataagcattattaaaaatacaaggtaccaaacttgtatttagataaaacacagagtaccaaatgtgtagacactcaatttaagttgatctgtaattgaaaaaatttccaacttaaatataaatttctattcaattaaatttattaaaatagaaataaataattaagtatcttgaataaaatcgacttaattattaattcttctttaatatctaacaaaaatattctaattaagttgatctaaaattaattaaaataaattaattttcaacttaaatatatgttttttaaatttaattaaatttcttaaaattaaaataaataattaagtatcttgaataaaataaacttaagtatcaattctaatttaagttataagaaaaatattctaatttaagatggtctaaaattaatcaatgtttgacttaaatataattttcta

SEQ ID NO: 226646 - DNA, 2714 bp, Cannabis indica
ggcatgctgagtcctcttcggtagagaatgttatccatcatcacatatcggtgcgcttggtactgtacccttctggacaatgccctttcttgaggcaactcgcctttggttatgtattcgatgatggggatcatccagtttggctttggctcaactgttgcgataatatttttggctctgatgcttggttccgtgaggcgttcaacgagcaccacccccagtttctcaacctcgctgtctgatgctaacttagccaaacaatccgcgtgggcattcttttctctggggattgtttccactttataatccgtgaactcatggagtagctcccggacaattgctacatatgtaaccattttttctccacgcgtttgatattctcccgacacttggtttaccaccaactgcgaatcgctgaagacttctactctcgtggctcctacggcttttgctaacttcagccctgcaattagggcttcgtattcagcttcattattggaagccagaaattcgaaacgcagagccacctggagttgaaatccgttcggagagatcatcgctatcccagccccggatccatttttgttggacgctccgtccacgaatactttccatgttgggtttgtggcactgttacgtttgtgctagcttcagcttcgttggactctgttatgaagtcagctagcgcttgtccttttatagaagtgcgtagtatgtaatgtatgtcgaactagcttaactccatagcccacttgaggagtcttctggacacttccgacttctgtaggacatgccagagcggatggtttgttaataccttgatggggtgagcttggaagtagggtcttaactttcttgaagccaccaggaggcaaaaaactagcttttcaagcaccggataccgtatttcagcccctatcatacgcttgcaaacatagtacacgtggtgtttgattttttcttcttcccgaactaaggctgcgctgaccgcattctcgaagacggccaagtatagtaacaaatcctctccgtggaccggctttgacagaatcggaggtttggccatgtgttcttttaactttttgaatgcctcctcacattctatagtccactcaaatttctgacatttcttcagaatgttgaagaagggaatgcacttgtctgttgaacgggaaataaattggctcagggcaacaacttttccggtcaagctttgaacatctttgtgcttcttgggagaaggcatgttcagtaaagcttgaattttttccgagtttgcctctattcctctttggctaacgataaatcccagaaatttccctaatttatctccgaaagtgcacttctttgggttaagtttcattccatacctccggaccacttcgaagcattccgcgaggtcgtctgcatgacttccacatgcttttgatttgaccaacatgtcgtccatgtaaacttccatgttccgtcccaaaaggcctttgaacatctggttgaccaatctctgatatattgcaccagcattttttagcccgaagggcatgaccaagtagttgtatacccccttattggtccggcagctagtgcattcttgatccgcaacatgcatcttaatctggttataggcggcgtaggcatccatgaaggatgatagcttgaacccggaggtggcgtccaccatctggtcaattcggggtaaagggaagcagtctcttgggcaggctttgtttagatcggtaaagtctatgtccacccgccaggtcgcattcggcttgggcaccagtacgggattgtctagccactccagataatacacatcccggatcaggccattagccagtagcttgtccacctctttttccagggcctctgcctttattggatcaagaggccgccgcttctgctgaactggcagcatgtccaaattaacgtttaagacatgggtaatcacatgcggacttatgctgatcatatatccttggcaccacacaaaaacatccgtagctgcccttagtgctttaacaattttatctttctcctttggttctaggctctttcccagttggaggatcttggtagggtcgaggtagcacactggcacttcctcgacgtcttccatgggttctacaattttttcgaatcccacacggggatccaactcatcctcttctgccaattcttgctcgatacttttacggaccattaacacttgtaaatgggccgcgacattataacactgcctgacctcaccttgattgcccctcacggtccccactccggcctcttgggtgggaaattttaggcacaagtgctgaatggacgtaattgcgccaaaatccaccaaggccggctacccaaggattgcgttatatgtagttgggcagtctaccaccacaaatgtgcagtacttgaaagtactctggggtgtatcctggcacaatgtgataggcaacctcagttttcccattgggataagcatagttccattgaatctcgtgagctgggaaccactcagtgatagatcccggtacgtgaggcctattactgtgaaggcttttttaatcaacaagttcacggaactcccattgtcgatcaatattctagtcacgatcttattggcaatgggagtctctatgactaggggatcatggtaaggaaacgcaccagctttgcgccttctccgtgaaagtaattggctgatccatgagtcggcg

SEQ ID NO: 226647 - DNA, 1393 bp, Cannabis indica
acctgctttgaggttagaactacctccatcacctccaccacctccaagggagcagaggaaagagcaagaaagaagaacccctcgaagtgaaaatcaccaaacaccaggcactagtagcagccggccaggtcctcctcatagtactgtactatctgattttgaagtttgtacaaaattcaaacctattgtgtggacaagggaagacatagaggaaaataatatttatacaacttctcttattggtacacattcaggggaaatacacgttggaagttgtgcacaaataagactgaattgaaaaatgtagtgggaaggtttgcattgaaaatgaattttgagttcatggtgaataagtttgggaccgttgttttttatgcgacttgcaaggattcaaattgcaaatggagagtgagggggaggaagcgggcacgttgtgacatgtttgaggtgactgtattccacaatgaacacacatgtagcctggattctagacatgctgataaccgtcaagcaggaccgttggttgttggacaccttattaagaacaagtttagatcagatggaactaagtacaaggctaaaaacataataagggatatgtttcaggacatgggataaagatgagttatgagaaggcttgtacgtgctgagagaaggcacttatgtatgtgaggggtacgccagcagaagcttatagtaaattacctggttacttttacatgctggaacagaagaatctaggtactattacagacattgtcacagaggacaacatgttcaagtactatttctggtccctagttgcttgttggaggggatttaagttttgtcgtcctgtgattagtatcgacgacacgttcttgaagataaggtttagggtcacaatgctagttgctgtagcgtacgatgcaaataaccaattatttccaattgccattacaatttttgaccgtgagaatcatgactcttggaagtatttcttgtaaaagttaagggaagcgattggggaggttgaaaacttagtgtttgtatcggatatgcatcaaagcattgaacatgctgtcgaggttattttccccgaagcatgccactatgcatgctacaaacatatttctttgaatgtcaccttcaagttcaagactgatgtatgtaacacgcaaatatggctggccacttacgcatggtcaaagagggaatgtgatagacatttgtaggtgcttcaacaaatggatcctgccattgctgcttatgttgagagtacaggattggaaaggtgggcttgtccttattgtccaggagataggtacaacatcatgaaaaacaacgctatcgaaagcctgaacaacgtgacagaataatttcgaaaatatccaataactactctagttgagtt

SEQ ID NO: 226648 - DNA, 2160 bp, Cannabis indica
ttttttgtaaaataaaattatataaacacgttgagcaaaatcttgaagttgacatcagtgatctatgatagaaatagagaaatattttttttaaggctaattatgtaatcccttatttattattgagggattgcacacctcaacatattagtgaaccattagattatggtacaacatagatttttggcatccaaaggtagtaatttattaattgaaaagtaaggacaaaaacagccctataattgggaacctgaataattttattgccattatttttaaaaaatgaaataaaaaaaaattatttgtatcttcttcttcaaacccattattccttctttgttttttgtccagtttttttttttcttttttctgttcatctgatttttttttcttcctttccatagaaatccaaatcttgtagagaaccatttattgatttttttgttgggtatttaagattacagtagacctttctaatataaaagcttccaaaaacttccaaactaaatgagttcttctgcttttagttattcaatttttctaaaccaaaggtaagtaattcatcttttctataaatttatgctctcttccaatacccaacaatttgaggaacactaatgagggtagcggagtttaatttttttttttttgtttggacattgtaaaagaatttttcttttttacaagatttgttgtaattaatgttacaataaatcatttattctctgcttataataatttgaatgtaattgtagctcacatgctggtttcccattgttgttagttttctttactaatattgtaatgttttgaaacttttgactttctttaggataaataaaatttcttaataatgaaataaaaaaagatctactgtatctatatagtctttttgctgggttgtctaacatatagtcgaaggaatacaaactccttcatagaaaatactaacgattaaaagataaatacatctacccaataaatgtaaattacacatttaaccttgtcattgtactaatttactcaaaaaaataaaagacattaaaaagttatttatcttattaaaaattgtgtaccatccggttatcaaaaccggttttaccaagttaatatcactatagctacagtataattatttttgtctcatttgaagcatgtcaaacctcaaactcgggtgaggttttatataagttccttttttttttaaatataactagaagtatttgacatcatttttagagaataatttaccgtataaatagttttagattttatacatttaaggcttgtttggtacgttgtattaagttttattgtattgtattgaattatatatcatatttttatataatactattttaaattttaatttatactaaaattaggtgtccataaaagtcagtaccgcatatagttttacataaaaatattatatgaaatacattcaatataatattatacaatacaatacgatataatatgacgtaccaaacgaacccttaaatactttatttttattttggagacaaaaatatctaatgttacaattctcttacacctgttactaccacttatgttaattttagggaattttctaggatgattgaagttttattttagggaattttctagtggggtgtggtcttattcagaccgtgtgtaagctatcaataaggtgtatattgattataaatacaccttatagcagctagatttagtatatcttttgtatctttgtatttcactcatatttttagaaaagagagtctttattttgtagagaagagcttgttcgactcttactctgtttatttgtattttgtattgtcttgagtctgtattcaagtctacaaagaagaagaacaacaatgctactttcaggagaagattttacaaagctttcgagagattgttttttcaagtcttgcatcgggaggaagcaagcactcttcaaggagatcgaagggagttcgagaccctgaagtttcaacaaggttcgattagaaggtggaatacatcaagcttgcagcatataataagagagagtctacttaataagtcaattactttgtatttttgagacctatctaatgaatcttatctctgggcgtggttccgtggactagtaacaatctaaaaggattgttgaaaccacgtaca

SEQ ID NO: 226649 - DNA, 1503 bp, Cannabis indica
ttattataatattatttttttatataaacttatcagttacgataaatttattatagatatatattatattataagtttataacagtaaacgtaaacgaaaagaaaccctcgtcctctgtcaaaactttctcctttttaaatccattttcttcgatttcaatccaaaacttagcgatctaagctccgatagtagcgagatagcaaattctcagagcgaaaaagattaaggtaagatttaattctattttaagtttaaaacaattagttttgtataggagttttgcaaattagaatagttatgaaagttctgacgttatagaattgttctcgggtagtcataggactagttctgatgttttcttgctaaaattgaggtgattttgagttagaaattgagtttagaactttttgtaacttaagtctgaacactagtggcatttgcaaattataggctcgattttagattctattacgtaagtatggtagtatgtatggaatatatgtgccctataaagtttgggggtggtttgtacaggtttcagtagggtttttgagtgcgtaaactttgaaaatcacgtttttatctctgaatatccagtcaaacggttttgaaatcggtcaacctctaggcaattggttttcactcgagtgtccgttttggacgttctatatatcgtttcgaagcttgcgatgagctctaccatatggtgtatattttagagtcaaaatataagttttattttagtgtatttgaactacaagatttggtaggaaactctaggttgtcctttgcaactattaagcagtgttttgggataaacacttattagtcaattattgtcacggcttagggcccgggatcatcgatcgtactccaagtaggtcgaccaacatacttgaaccggaacttggtaggaaaagtgtaacgtcctaaataattaggcacgctatccaagctgcttacgaaaccctaatcccctaagcaggattactaataaaatagcgcagaatttaaactttaataacaacaggaatgaaaataaacttgtaatactttaaactttataaactaaaagttacagaagttgggatcccaaaaacatttacaaaatattattacaagtcttattctttcagccggcctaagcggcaaaacagagtctcaaaaacataatattggtagaccccaacccgcttgatctgatatggcctagacatgtacattcttcgtctagctcctgcactcatggctgatcaacaatagtcttaccctttcttgcacagtagagcacccgtgagccaagcccaacaagatagtataaaccatatcaataatatgcttatcatataatataaacaacaatgccatttaaatctgtctgtgtgtcacaaacctgcatgttgggctcacatgcttgtttatgtttacgtgacgtaaacctacgtgttactctcacacatctatttatgtctacgtggcgtagacctacgtgttgctctcac

SEQ ID NO: 226650 - DNA, 2072 bp, Cannabis indica
cccctgcccgtggtatttttggcttcctctctttgacgaccataaccacttcttcttgctcgtgttgtaatgttcgggcatacctttctcgggctttgcctgaatctccacctatgtgcggacctccaataatgacttgcaaatgtccatctactggtggtgatagtaagtcttgattgttatcggcctttagattttgatcgaccttgacatatttttacacgtgcggattattctttcttatcaacaattcaatttcccgctttagattgttgcattcgttggtgtcatggccataatctccattaaaacgacaaaactttgtcgtgtctctcttacttacgtcctttttcatgggagcgggcttcttgtacggagctaatgactatgtagccatgtagatagtctctaaatcttctgtcaggacagagaaagcaataaaattggtaggattttccctacggacctgtgcggttttaccaacgaacttttgctttttcccattgccttgtctgttgttgttggacagtttaccacccaagcttgaactacttgggtactgaggtagctggacggatgttccagcagagagagcttttggctggccaagtttacgctcgacttctgctcgctgagtggcctcttcaagcttgatgaagccatctgcacgatcaaggaaatcactcatagaatctaccggtccgtctcttttgatatccttccaaagttccccgagaacttcaatgccccctagtatcgcggacaatttcccgtcttcggtcaatcgtgcaacctttgttgcctccatcatgaatctgctgatgtaagctcggagaggttctcctggtctttgcttcagttcgatcaggtcttttaagtgcaacgaaagttggcgagaagaggagaattgtgcatggaattctgaggagaaagccttccatgagttgaacctttcgagtgtcaacttgaaatactactgctgggcagcttcgaagagggtggcaggaaaaatcctacaacatacatctcctcgtactccttgtaggtccatttgcatttcaaaatacttgagatgggataggggatcttcctttccagtatacatcttcaaggtcggcatcttaaacttgtgaggcaactctaggatattgatccctagggagaaaggggatccacgtgctcggtccaactcgaggacattgttcttctgaccggccaggccttggaacatatttcttagttcatccaactgtgactgcacagctggattaacttgctcagtgtcttggctgaccagagtcacgtcagcatctctttgagcgggattttgaacatgggtgccgagctgaccgactggcgcgacatgctactcgtctagccctctccttctgttctaatcatctctgagatcatgagccattcccaatatattaaatatggatacaccaggctgtctcaatgactggttggtttgaccaatctggtggtcaaaaccattaacttgggcggagttattgggtatgacgtctcctgacgaattactagataaggtctgtccacctaccgcttggcccatagaaagaacttgtgactgggattgggcggctgaccattcagggtttgagaagcgttcactgctagatcttcgtctaactcgcccgaggggatgattgttgcaggttgtggattggtagcctgataggctcttcatatcagcacggtggcctatcttgttcagtcatcaatggctacttgctgagcccttaacatttccatctctttatccctccattcagcgaacatacgccttttctcttcaaatgtgagattccccgcagcatggagttcctcctaatcatgatgaaaggtgttggtatgaccttgcatgattccaagagcagcacagaggttctggatctcggtgtcatctctaatggttgttcgaacatttgttgcgagtagaacttcaatgttgaaaatgccctgattaactactgaacttgtatttctattctcttgcacaccaggcgcgattccactcaaaagagtcgtcacaccttgacctacagttg

SEQ ID NO: 226651 - DNA, 1725 bp, Cannabis indica
tcgaacccaaactcaaattcagaattgaaacttgagctggaatgggactaggactaggaccaagaccaagaccaggacctacacccaaacccaaaccgtgactaggacccaaaccaaaacctagaccgggacccaaacccagactagaaccgggacatggatccagaattgggatagggacctgggcatttgaacaaggaatgggacccaagacccgaccccagacccgaacttgaaactaggacccagctcgtgatctgacacccgaaatggaaccagaccaggactcgagatcggtgtcttgatttgggagccagcccacacctcgacccagactaggtccggaacccaaacccaaactcaaacccagtaccagcccaaacctagacccaaacgcgtaccctgtgacccaaaattggaactcaaactagaagtagaccaggacccaagaacgggaccagaacaagaactttgacctagacttgaaatcgtaaccagacctggacgtggactcaaacttggaccaggaccacgactctaacccagacctagactcaaacttggacccggacccacatcccaacctagacctagaatcagtgtcgaacctggactcgaactcaggcccaaacatggaaccagattcgggacacagaattagggtcgagacctagaaccgcaccccaatcttggtcccgaacccaaactcggacctgggactcgagacttgaaccagaactagaccaggacacatgacagggatctagatttgggactcagaccaggacccaaacccagactgcgacccaaactcgagacccaaaattggaacctgaataagaatcgcaagactaggcccctcgaacaagacaaggaccgtgaccaagacccgaacccaaacctagaaccgaactcggacctacccctagacccaaaccgagaccggaacttgggcccatacacggtcgtgtacctagaccgggatcgagacccagacccaaactcagactcggactcagacccaaacctggacccggatctgaacctagacctgggacgcgatcccaaacccagactcagacttagatagggatccatataggaacttggacttgaaccgagacctggacccagtctgggatcaaaacttgggacctagatccggaccgagacactgacccatacctagacctagacccgcacctgagacccgagcttggacctggacctgaatcgaaacccaaataaggatctagacctggatccagacccgaaccaaaagtcggaccaggactcacacccaaacccgaacccagacactaaatcgaaatcaatattgggactaggacccaaacccgaacatggacccagcccgagacctacgacccggacctggatgggggacctggacctgtgccttggaacccagaccaagatcagaactcagaactcagacccaaacatggacctatattggaacccagatctggaactagatagggatccagatacgatcctggactgggaccaggacccaaactaggatcgaaatgctagacttagatctcgaccgagatcctgacccagaaccaaacttggacccgcactcgggatctaaacttggacctgtacccaaacgatacgacccagatccaggggtccagacctgggacataaaccccggaacatggactcggacccaaactcaaacacccacacatagaa

SEQ ID NO: 226652 - DNA, 1852 bp, Cannabis indica
tttttttttcaagaagaattatcaaatttgttacctttgttttttttttcttgagatgataaagacacttcacataatttttccttaatcacttacttccaaaataataaccactcaaaatacttcatttccccccaaacttaattaaaagcatatggcataataaggtacattgagaatgaagtaattaaagacaacacattaggctcaattaagtggttaaaattttgaaacaggctaaatctcaactttgggtatactaaggacaaaattttacaggtaagcttgaaaggctcaatcggtccaaagatttgcctaaatcattttccaagcaacaatcatcaagaatttcgttttaagagagtaagtcacacaagttctattccatgtcaagcaaacattccacaaacccaagtagaataaaagtgatactatccaaagatcaatacttcacatctatatgaatttcttttcttttgacaaggcatccaattcaattcaaagaatttatgaatcaagcacacaatttaaatttcaatccatttcaaaaataaacaacaacagttcaatcaatattttggctcaattatcaacgcatgaaacttaaacaaaagcataaacttaaaaatttaaatcccccccccaaactaaagatgcacattgtccccaatgtgagataatattctaggtgagagagacttacctgaaccctcatcagaaggggtttggtggaggcggctggtcataaggataaaaacggggtggatttactaagtaatcaggctcctcaagaccaacattaatccttgttatcagtgaattcagctgctgcacttgattctcgtcaaagatactcctctgcgccatataagtttgtatgtgaatgttctgctgaataagataattcaactgatcatgtgtgtactgcatggctgggtcaagagggccaacacgttgtggtccttcttcaagatgctcctcttcgcgtttaggaggatttgcggctccttgctgtggtggagctggtggttgaccatgtggatgtggtgctttaaatctaaacaccgttcccatgtcaatcatgcgatgtggaacaaccttattatcataggagtattgtggcaccccatatgcctcacacaaatcagtgataatatcagcgagaccaagcccacccccacaggctccttcgaccatcaaggtaaagctatgcctaataatatgccccacattgaaataaatcccttcataatggcatagacatatcttagcctatccatctgagcatcaaaaaagtgcttgttgggtatcaacctagcactcacaaaatacaaccacgctttagccaccgggttcaactcacaacggtacaactgataaggttcctgattatactcatgaaaccttaatcctaggaaacccaaagtctcagccatatcaacataatctagcttcccttcttcatcaagcatttttgggcgtatctcttcacgggtaaaagtttgcaagtcatagatggcagctctagtggaggccggaacatcaacacccctaactttcacttagtcattcttcctttcgggccagttagcaaaaaattctagggctaaggtttggttcactctctcactaacatccaaaaatttcacccatccccggtttatcacttgttctcttattggctaaaatataggatgaatgccgattcttggatttctaaggtcgccaatgtcaatacccctattgtcaatgaatggcctattcttcaattctagatagcgctcttgtgcttcggcatttacaaacctcgacctatctacattcgatctccccgatgacctaggtgggttgg

SEQ ID NO: 226653 - DNA, 1935 bp, Cannabis indica
tattaattagattttacaaaatctcttaattaacaaataaacactaaaatctattttcttcacaattaagtcattacttagcaaaaattcataaataaaacatattctaattttaaaattataattgattaattaaaatcaattaactgagttttacaagtagtattatctcaactagtgcggggaccatgagcctatataatcaagcttctaataagtagctctagaatttaccaagtaaattctctaacttattaattcttccttgcaccactatagatttagaattgtacttttaattatatagatcggtctatatgttccatgatatagatacactatgaattatccattgttataatcctaataatcaaggatcctctatagatgatctacatcaagtagggacaaatttactgtaataccctaagattaaggaaatggattagcaacccatactagttaatgtgtgtttattatggaattatattattatatatttaattacatgtgaattaatttgataaatgacatgttaagactctattggtgagccagaggtattttcgtaattatgacccgagaaggataaaactgtgaatttaattaaattgcgtgcttatggactatattattatatagtatacttattgtgtccttttttaggtgctttctgacaggttggcgcggtatagtcacaatcgggtatttcgagccgaactgggttcggggctgaaatacactttcgggattttatattggcattttatggttatttgaatattctgaaattatttggatattgtgtgactgagtaatgacttgattgcccttaaatgtatgtatgtatgttatatggccctaggggcatttgtgtcattttgacatttgtgttatttgtaacaaaatgtaatttctagcatattagaattagaatttctggttttactcagccccaaaaccgatcctcgccctctcattatattcttcttccttcacttgataatttgtgagaaattggtttgattcaagcttggatttgtggaattttatgcttggcttttggaagagcttaaggtagtgtttctacaatttttattttgagtttcattgctgttatttatagtaaaaatatatgtgaagccatggattaggttcttaaattgtctacttgtgagattggagttaattatgatgttgtagacatagttgtgtttgaattggtagttattgctttgtgtgggttttaaattgtgaaattgaaaattcttagttgctgaaattgaagtggattctttggagtttaagcttgtgatttcaacttgttactcatatggttgagttgatgttatgtggaattctagctcaatgtttggagcttattttgaggttgttaatcataattttttgatgaatgttggttgtagattaagcatgatatatgtgttttgatgctctattttattacctattaatctttggagtatgattttgaggtttatgcatgactagggtgaagtaggtgtgtttgagtaggtattttcaaagctaagtttggggtttcctgggtttgaaacccaggggccgtggccctgctccttgggcgccgcggcccacccctattggtggcctgtgattcaaacccaagtgtcgcgaccccatgtgggagtgccgcggcccgcccttttgtttttgggaagattcatgcatatttttgaatattcataactttgtgattcggactccgtttcatgagttctatatatcattggaaagctcgttctgagctttatgtgattatatataatttgaatgccaattatatattttgtggaagtggatttaggcattaaccctctacttgtgaattcaggaaattgtgactaggattaccagcacttggtaaggagcacccggggatttagaatctccacg

SEQ ID NO: 226654 - DNA, 2818 bp, Cannabis indica
tttggtttgggacccatacctagactcggacacgaacccagacccagacctagacctagacccgtaccccagacctgggtccaagtctgagtctgggtttgagttcgggaactggaatcactctaggaccttagacccacacccggatcgagacgcggacccaaatcaaaactcacatcaggactcgagacgcgaacctgaacccagacacagacatggaccaagacccagaccaaggactcggattgagattggagactcagacctggacctaggtccagacctagattggggacccaaactcaaaattagaaccagaatcgagacccaggattgggattgggacccaagaccagaccccggtctcggtcccagaccctgacccgaacacggactgggacccaggatctgaatcgaaatgagaccgagacccaagattgggatgcggatcttgacccatgacctagggttggatccaacccatagtcggtgtctagatcttggaatcgtaccaggactctaacctagaaccaattctagaccaggacccaaacctagactcggacccgaggcttgaaatctgagcaagaaccggaataaggaccttggaacaagaattggacctggacccaaaactagctctagacaagaacccggccaaagacttgcgccaggacctgcaacccaggacccctgactcgggacctggacctggaccaggtgctagacccgtacaagaacccaaaccgaaacccaaacccaatctcaaaccaagacccgaacccaaacactaattgaaacctggacccagacccagacccggactcataccagaactctgacttgaaaccgagactcagaaccgaaccaagattaggagtgggacccagacctggacaacaaccgagacctgaacttggactaggactagaacccatactgggaccgcgattggaactgggaacaggagtaggacccgatacttggacgtgggacctaagaaccaaactgtgacccagacccagaccaggccatgactcgagagaaggagcggtaccgaacaaggaccgggacctgcactcgggtgggacgctaacccagaccgagacctagcaccctgacctgaattggggatccaaacccatgactcaggacccaagacccaaacctggacctgagacccaaaccaggacccaagacatgagctagaactagactaggatctagatttggactctggacaggacccaaggctcgaggcttggacccgacccatagtcggtgtctaaatctgggaattggaccttaacccagacccagacccggaccaaaaccagaactcaaactagactcgacatgtggttggtatttggatttgggaccaagactcggacctgaacccaaacacagacctagacccagaccaggactcagacccagacccacacccgaaccttaaatcgtacccttaaacccgaaaccctaaaccttaaactctttacacttatccctaaaccctaagccctaaaccctaaaccctaaatccctaaacactaaacccaaaatcctaaaaccctaaaaccctaaatacccataccgagatcggaacccaagacccagacccagacccaaatctagtcctgaacctagacacaaactcaggacctgaactcggacccaaacctagaccacaatgttgtctggcacctaaaccttgactaggacacagatcggaacccggacctgacccaaacagggacttggactcagaccgggacctgggcccaaactcaaacctaaacacgtactgggaactagactcgggatccaaacccgaacccgaacttggacttaggccgggacctaggattcggacctagataggggagttgggccccaaacctgaaccttgaccaagacttggaccaagaatcggaacctagatgggggactttgacaaaaaattcggccccaaaactagtaccgagatcaaaaactgaaccctagactcgagacacgggacccgaccctagtcaagactcagaaccaatactgggactttgacccggaccgggacctgtgacttgggacctaaaccaagaccaggacctggacccagaccgggtcccggaccctgaccaagacctagaccaaaaaactgggaccacacccaggaactaacaactagacttagacatgggacccaaaaatcagacccatactgggactgggacccgaattcggacccgaactcgaacccgaaccaagactgggaacgaaacttggacacgagcccgaattgggacccgaactcgaaccaagactcgggacccaaacctgaaccttgaccaagaccaagacctaggaaccggacatagatgggggacctaaccagggacctaggccccagaaccagacccaaatcggaatctgggactcgaacctgaactaggacttgacctggacccgagaatctgaaggcaaacccagaccaagacatgaaacctaccccggacccaaactatgataggaacctggacacaaaccaagatcaaacccgaacccggacccaaacccaaaatcggacccttacttaggacctgaactcagacacagaccgagaatcagacccaaacctagacccagacctgaactcgaacccagattaggatcggaacccaggacttagacccagaactgaacccaaactcagatcaagaatggaacttgggactcggacctagacccggacgtggacatgaacccacacccagagcttgattcgaacctagaccgaaatctgaacccgaacccaaac

SEQ ID NO: 226655 - DNA, 1190 bp, Cannabis indica
ttttttttcatatttgtaagttttttcaaaaaatgtcatatttagtataattaagtttttatgccatatatatcaaaacttatctttattttcctatatttttgtaaatagcccatgtagaaattcatgagtacgagagaccataaatacacaaataatttttcacataaaaataggtatttgtaaattcataagtcacatgacatgtcttaaaatcaataaataaatggtttaaaaaaaaaaaagaaaaggcattgagcaattaagtatgtgaaactcctttcatctaaagctttatggtcactctctagtacacgagccaatgagatgatgcccatatctttattataaaaattcttgttagtgacaaagtggtaaccaaataaggaaaatatacaactatctaaagtggtggccttcttgttagtgaccgggaagagaatcaacgttgacgacacttcttgccccttgtgtggggctgatgaggagaccatgaaacacttgttccttcattgcgaagtcgcgtaccatttgtggaaagcttccccttggggaatcttcccggtccaggactctggaggcaggatctgggattgggtaacttttatttggaatctgaaatcgaaaagggtggacacggacaagctatttctttacgcctcgatcgtggtggatactatatggagaataagaaatgataaagtgcatagctattatccctgtaacattaatactgctattgactctatctctcattgttttacagattatgctgcctgtttgcttccaccggtagtagatgtgtctcctcttggctggtcgacccctcctgaagactggatcaagattaattgtgatgttaaggttggcgatgactccatgtgtattgcggccttggctagagatcattcgggaaccgttttatggggtgtggccaacttactcaatttcacagatcctttgatcggcgaggcggcggcgtgtcatcttgctttggaaactgctactaccaggaagcatgattttattatggtcgagagtgattctgaagtggttataaatgctcttaaaggtatcaaggaaaactggaacattgccaattatttgtatgcttgtaatcaactctctaagaagtttttatcttgtaatttttcttttgtttccagaaactgtaactttgcggctcacaa

SEQ ID NO: 226656 - DNA, 1876 bp, Cannabis indica
cgatcttaaaattaagaaccttataactaataatgggttagagttttttaactccgaatttgacaagatgtgtcaactgatttggatcactaggcatagaaatgtagtgaagaccccgataaaaaaatggtgttactgaaaggatgaaccaaaccttgttgaacaaaattagatgtttactattcagttttgggttggaaaaaccattatggggaagctttagcaaccacaacctaccttataaagagaagcctgaatagagttatagacttaaaaacaccttatgaaatgtggtacaatagaacctccaacctagcgatttaagaacattcgtctgtacaacatatgtacaccaatccattgacaagctggaacctagatccgtgaagggaattttcttaggttatgccttaggaaccaagggttatagaatctacatttccaagaagggtaaaccaaaggttatgattgatagaaatgttatttttaatgagttggaatatccttacttgacctctaagaaaggtagtgtgtctctgtgtgatgcaggaaaaccaggaaacaaagacactaaaagtatggaaatggattatggaatgaaactctcggaagaaggtccacaagcagaagatagtgtggaaccaaaagacaatgcatagacgaaagctattgtggagctggaagacaagataacgaagaccaaacagaggtgtcaaaagggctcagacagacaggtatagaaggttatcagttggctcgtgatagaacgcgaagagagattcaacctccagcaaggttcgcgaaagcaaacataatagcatttgcactggcggtaattcaacagactgaaactgaagaaccttgaagctatgaagaggcaatttcaggtggaaaaaagtctaaatgacttcaggctatgaatgaggagatggattcactctgaacgaacaagacttgggtagttgtgccaaagccagagaacaagaagattgtggagtgcaaatggattctgaaggtgaaagagagaatcaatgaaaacgaactagtgaggtttaaagccaagttagtggttaaaggttttactcaggtggaaggtatacagtatactgaaatcttctcacctgtggtaaaatacaagacaataaggttgatgttgtctttagctgcttaaatggagttcgaggttgaacagcttgatgttaagacggcctttctgaatggattcttggatgaagaaatatacatgaagcaaccacctgggttttaggtggaaaggaaaggagttgaattgatgttcaagcttaacaagtttttatatggtttgaaacggtcgccaaggcaatagaataagagatttttatacaaatctgcatcaaatcaagttcaaacaatcctaattgcttatattttaagaatctagaggaatctacaactatattcttattgctctatgtggatgatatgctcatcacaagcaaagataaatcagtgatcaaaagtattaaagccaagctcaagagagaacttgagatgaaagagcttggacctattcaaaagatacttggtatcaaagtcttaaagaaccgaaaaataagggactattagcttaaagaagtctcggtacatcaagatgattatttagaagttcaacatggaagatgcaaagagtacatccattctgttaggggatcagtttgttcgtcaaatgtacaatgtcctaacaataggaaagagaaagaagaggtgaaggatgtaccttatgcaatagttctaggatgcataatgtacgtgatggtgagcacgcactactacaatatgggcctttagcttcccttttttaatccatttataaaagggaagctaaagggtgtgaaaa

SEQ ID NO: 226657 - DNA, 1544 bp, Cannabis indica
ccaaaaactcgccccctctcgttctctctctccctgtattttttttgcaagtttaaggaggattatgttcgtggttgacagggatgagaatggagtttgtggctctactgggatgggggacaggtttatgggtttgtggttgacggggatgagaatggggtttgtgggttcgtggtttgacagggatggggaggacttcgtggttgacggagatggggatggggatggggtttgtgggttcgtggttaactgggatggggatgggatttgtgggttcgtggtacgacgaggatggggatgagtttgtgggttcgacaggaacaatattctggttagacatggatggacgagttcatgtgttcgtaagttcgtgtgaagatcttgtaggtggattgttctggttggtcttttcggtggtagtggagttctcagatctaaattttttgtgtatataagtgtgtttgtttgttagatttaattttgttaaatttagtgtgagttttgttaaattattttttctgcgacatttggatttgaaaagtagggtgctggtggttgttgcggtgatggtgggtggtggtggtgatggtatatctgaaaatgatggtgggttgtggtggcaatggtggtgggtggtggtgttgatggtatatctgaaaatgaagaagtgaaaaaaaattgaaaaaaaaaatgaagaagaaagaaaatgaaaaaaaaagttgtttttattttttttgtgtttgaaaatacttttttatttacaatttttttattttaaatgatttttttaaattttaatatttatttatgtggaccaataatattattccatgtatacgctatgtttatgtgaacagtaccttgtatacacttagactgccaacttgacagaaaacagatgaaaatggatgaaaatagctaattgctaatgaaatgtgagttttgggggattttatcgccaaaatttgaattttaagagttaaatgcaagtaaaataaaagtattgaggagttttgccgcaatttaccctattttatatgtatattcaaatttaattatttattaaataaatatgatattaataattttaaattttttattttatgaacaatttaaagaataaatttaccctaaaattaatccaaagttaattcaaaccagagaaaatagttaattttttttttaaattaataatgcattgtattttaaatatattcaaatattttttaaaataaaatattgtttaataaatttgtcaatattatataaattttaaaaaaatataatagagtctaaatattttaatatttagagtcagagtaaagttgtagaaaagggtaacatgatatgatggtgatttcaagttagtaaacattttagaattctgttaaaacactggagttagatatatagaataatagatagagggaattggtgcttcttctatgtccatgttgagataagcgtaaaattggtataagttggtcatgaattttagaaacaaaagagataagtagctcttttacatactcactcattagtca

SEQ ID NO: 226658 - DNA, 1240 bp, Cannabis indica
atggaagatgtcaaaaaagctgtgttcagtattcctgcatcaaaagctcgggggcaagatggttataatagctccttttatcaagataactgggaattaatcaaaactgacatttttgaagcagtcacttcattcttacatacaggcaagttgctcaaagaattgaactcaacaatcattactcttatgcccaaaagtaagtgcccaaatattgtaagtgattatagacctatagcttgttgtaatgttctatataaagtagccaccaaaatgatttgtagtcgattgaagttgatcctaccagatattgtagctcagaatcaaggaggcttcataaaaggccgctacattgcccacaatattatgatttgtcaggatttaatcaggcactatgggagaaagaatgcaaaggctaactgtatgacaaaacttgatttgcagaaagcctatgacacattggaatgggattttttagaagagatgatgtatgcacttaagttccctgtgttctttattaaactaatcatgacttgtgtctcaactccaaggttctttttgcttttcaatggatccttacatggtttcttcgcagctaagagaggacttagacagggagatccaatgtcaccccttctctttgtacttggaatggagtatctaagcagaattttgaaggcaattggagataaagaagactttcatttccatgaaagatgtgggaagctgaaactcaaccacttgagttttgcagatgatgttcttcttttttgcaggggtgattaaagagtatttatctgatgctcaagggtctcaagttattctcattatcttcaggccttcacccaaatcaacagaagacagccatttactgtagtgggatggcagaaagggaaatacaaaggatcttagatgcttcagggtttcaaaggagcaatgtgccttttaaatatcttggagttccaatatgtgctaaaagaatatcctcatctgaatgttctgtgttagttgagaagatgacttcaagaattaaagtgtggagttccaggaatctgtcttttgcagggagagtagtattgataaactcagtattattgacaattcatacatactggagccaaatccttatcctttcaaagaaagttatcaaggagataggaagcatttgcaggagcttcttatggacaggaaagagcagtatgactggctcaggaagtgtagcttgggacactctttgcaaatc

SEQ ID NO: 226659 - DNA, 1174 bp, Cannabis indica
aaagagaaagatagatagatagagagagagacgattaggggtctgactattgtatatatattaatcaaatatttttttttaatacacatatatatattattatttaattattattttatatatatatatacatttgactcggtcaaaaccgagtctttacattcgtgatctagttctcagtgaagagattcgacgtagagagtcaggagaatcatcaacctcttcagtattatatacagagttaagaggaagaaattcaactagagggcctggccatggaagatcgaattattgaagtaaatctaaagataggtggtccaatctaggaatccaaatagttcccagagcttgaagaccattgagtgttggaattgtggtaagattggaaactacaaaaattagtgcaagagtgcaccaaaaggtcaagatgggaaggcagaagaaaatgttacttctacatcagaaggtgatgatgcgttgatatgctctctagagagcaaggatgagtcttgggtgttacactttagagcatcattccacactactttggaaaggtataccttggtgatgaccaaccttgtgatattgttggtaagggtgtagtgaagattaagttaaatgggtctgtttgggagctgaaggatgtcaggaaaattgccgacctaagaaagaacttgatctcagtaaaattgttggctagcgaaggctacactacaaactttccaaggtgataattggaagatttcaaaggttgcactgacagttgcgaacggtaaaagagcaacactctttacatgacagcaggtgcgagctgttcaattgcagttgcaatagggaatgaaaattccaatatttggcaccagagacttggtcacatgcgtgagaaagggatgaaacttatgcattcaaaggggaaactcccagatctacgatcaattgagatacatgtgcgaagaatgcgtacttggaaagcaaaagagggtaagcttttagacaagtagtagaaccccaaaaaaggaaagattagagcttgttcactctgatgtttggggaccaacgactacttcatccattggtgggaaacactactttgtgacttttatcgatgatcattctcggaaggtatgggtttactttctaaagcatgaatctgaagtgtttgaggctttcaaga

SEQ ID NO: 226660 - DNA, 1965 bp, Cannabis indica
taatggtatggcttgaggtgtattgtgattatatatgggagtgaaagttatggaagtatattgctgatttatagttgtgtgaggtagttgatctagcttagagaaagagagagcttggacacttttaagagttactgagattgggagtgtaaatggtaatagtggcagagataactagaggtgatgagggagagtataagctttaatagtatttataggctaagaacttaaccacaccctagttaacttaactttgctactaactctagttaagattaacctcctagccataaattcggccaatatggttcattgaagaagttcacccataaaaagctagaataagctatgtgacttagtcccatttgttgagagttttactcacacgtgtggactttgattgacaaagtttttgtttagaatttttgaattatcttctagctacatcttttatacacgtatatacaaatactttatgtatttgacccacaattactttatcttaaggttatatatttatatatatgtgctactattaatactttgctatatttagctaagcttattattcaaagcttttggccggagctatatatcacttaactactgctactactataattattactatataacatagtatagtaatacatatcacttcataattaaatggctaactaataatcatgacaataataatattgataaaacactctcctaatcaaataagtccttagcaaagtttaatttataggaatgacacaattctcatgataaatactactaggagaaataccaattttcaaaaatgattaactaacatagacaaatttcattcctttgaccacgtaaataattctcaaatatatatcatatctaactcatcaagacacttcctcttaataaagagctataattttgagctttatctaaaattattatatgcttactaaagtattataaattctcgaaaactattattaatatagtactatgtttagagaattactggataaagtaatatattttatgcaatcactatttccacatcgagatatctagactaatataatagaaaaataataactaaatattttggttattacaatctaccctccttaaaggaatttcgtcctcgaaatttacttacttgagaataactcggggtactgattctgcatgtccttctccaactcccatgtcgcttctctatcagaactatcactccacaggattttgactaagggtatagtcttatttcgtaagacctttattcctttttctatcacgcgcacagggcgtgccataaagctcatgtcctgctgcaagttcaagttctcgtacttaagcacatgtgtcagatcaggtacatacttacgtaacatggaaatgtggaaaacattatgcgtttctgctaatgttggcggtagggccaaacggtaagctacctgaccaactctgtccagtatctcaaaaggacctataaatcttgggcttaactttcccctttttccgaaacgcataatccccttcataggtgataccttcaagaacactaagtcccctacggaaaactcaacctcctgtcttttcaaatctgcataacttttcagtctactttgggcattgagcatcctttgtcgtatcttttccacagcttctgaagcttctcttactgcttctggacctatttctccaacttcatcctagtgaagcggtgacctacctttcgtccatacaacatctcatatggtgccattccgattgtggcttgataactattattgtaggagaactccattaggggtaaatacttgctccacgagccagtgcagtctagtgcacacgctcgaagcatatcctcgagtatttggatggtgcgttcagatggtgcgtgcagtctagtgcgcacgctcgaagcatatccccattgccttatgtggactctcccagaacttggaggtg

SEQ ID NO: 226661 - DNA, 1189 bp, Cannabis indica
gaaggcaacactggttaagtctctaaaatggactttggatcgtctcaggatgacccgttgtgggagtgttcattcagagtgttatagtggctacttctctcaaagtactcttcagctagatcataagtttgaagagaattgaatacatttaactcctctccatgtactcgagagaagtattcatactattggccatcgaggccacgagaaaagtagcataattcacccctctcatctcgaaagtattgagtatgaagtagttcattggtccttacccttcggatctcatatcctccagttttaagtagtgtctcctactacctcctttaatttgagtagcaggtccctttcccattatagggtatcaggcctaatgtcatgtgagtgtcgagaaggacttggtggaggagtcctgttggttctctaagtattttgaggtttttcaaaatcaggtggaggtcccattggttggcgcccatgagcttgagtcctttcaggctctttcccaaaggtgcttcccctccaagtggtttccacgcctagtgtttgcttagttcttgctcgattactaggtgtggtagttgcattctaagcgttaagtgtttcccttgaggaatagttcccacataaccagttggttgatggggagtctctctcaccaactcaaaaagacccctgtggggagtagttccgtgattagagcgataagcttctcttatccactgagataggttagctcttcgttgttcttactcaatgcgttggatctcaacgttactttaattttttcacgaactagtgctgaaacgttttgttttgattattgagagactctcgcaattattgttgcaagtcagccacagtttggctgagttaggtgacccgaggatcaatctcttcaaggtcattaatctccacgtgaggctccccgagtgggatttagtcgttggtgccagtctcaggagcatttggtggccttggaggaagagttgaggagttggttctgaggcctgctcctggcacttggggagcatgagtagtcccaattccaacttactctactggcgtgcccccaattgattggccagctattgggattcctctctcaatacttgtagaatgtgttgcaaccatcttgttagtaactttattgagttgtggatctttatgaaagcaccaaaatattgac

SEQ ID NO: 226662 - DNA, 2375 bp, Cannabis indica
tatgtcttatttatgaattttcactaagttatagcttaattgttaagaaatagaattttagggtttatttattaattaaaagattttgtggagtcgaattaataaataatataagtgataatttaatttgataattaattataattgttaaataaatagttttagcatttataggattgaaattagaaaatatgacatttgttaaataactaattacttttttattataatactaagaaaattaaaatagccgcataaagagcggctatgttacctagttattataaataatgacacgattacaatacattatgagttgataacaattttaaatgtagtgactacttttaatgagatacgattatgacaataacttaaatgtagtagagactatatataaaatataaataagaaatagtaatgacaacggctttaaatatagtaattaaattgaataaatattaattaaaaatatctatgatatataatttaaatttcataataaaatattaatttaaaatgtccaattagtttataaacacccaatataggctcgaatttaaattattgatctattctatttttgtaatacatattttagggatatatttgtacctaattttaaatattatcactaaatttgacatttgttaagaaaaatagtaaaaatataattagtgttgggctcacttcatggccgaccacttagtcccttttttgctattattttatcattttttattccatataattcaatcctaaccgtgatatttggttggaagtaattaatggaatggaaatgaaacaattttcattccattgctttgtttagttgccttttaaagtattagaatgacattctaatggaatactctttccaccattttggtagaatgcctattctattttaaaaaggaaggaaaaataattccaacgtaacaagaaaaaaaaataaatgatttttttatcaatttttttatgcattttaaattttattccattccattcctattcctattccaattttcattcctattcctatattttcattcctcccaaccaaacgccacctaagtgaattagtataaaaagaaaagaatggtcttattatccaactaatgactctaaatctaatttttatcttgtcagacaactagagagtttgagacttcttcttcttcttttatttcgaaatcatatagtcttcttcacaaacaatttcgagctttagtgattgagtgcatgcccacccatagcaagttagtcctcaatcatagtgtataagactgtgaagaatccaaatatctggaggagcatcgggctcagatcttgattatactttgcaacagaaaggaacaagggttagatatctgagcggaaggagtcattaaattatgctgcaaccaatgtaaggtctctaatactttatatgtgtataaattttatcgttttagaaattcatatttaggattttaaaaacatacttgttagtaaatctaggtcctggtaaaatataatccaacaaatacttcctctcgaatcttaattagatcagagtcttccaatttcacttttatggtcctttctaacaagtcagatcgaagtgtcaggttatgtagtttcccaacaaaaactcaattccagctttaaccatgtctgaagccaactgaggtgatatcattacgatactaaaaaacctgcctaggaccttctctgctcaaagcgtccgccactacattggcttttccaggatgatatagaatctcacagtcataatccttgactaaatctaactaccgtctttgtctcgtatttaaatatttttaggtaaagaaatacttgagtctcttgtggtctgtataaatctcacacttctcctcgtacaaataatgtcgccatatctttaaggcaaacacaacagcagaaagttctaaatcatgtgtcggataatgcttttcataatcctttaaagcataagctatgactctatcagcttgcatcagaacacatcccaaaccctgtctagatgcatcgcaataaacaacaaacttctcttggtctgattgtagagctaacactggtgatgtgatcaattgttgcttcagctcttggaagctcatttcacactttttggaccatgtaaaccgttggttctttttagtcaatttcgtcaatggcattgaaatataagagaaaccttctacgaaacatcaattataccctgccaacctaagaaaacttcaaatctcagtaactgttcttgacctctaccaattctttattaactcaatctttcccaaatcgaccataattctatctttcccgataatatgccctaggaaagatacttctgattaccagaattcacacttttt

SEQ ID NO: 226663 - DNA, 1790 bp, Cannabis indica
ttgaaatacaaatagtgatcaaactttggaccatgtaaaaccaatctccagaacatagctgtcaaatcatttttccattgcgtgatgattgcttaaggccgtgtagggacttttcaaacttacaaaccatctcttttccatcttgttccacctgaaatccaagtggttgctccatgtatatctcttcttctagataaccatttagaaatacagttttaacatcaagctgctccacttctaaaccttgctaagttgccattaatagcataagtctaatggtcttatacttcactacaattgagaacacctcggtgtaatctatcccttctacctgggtgaaacctttggcaactaatcttgccttaaatattactggctcatcctctgtcacacatcccatgtcttgttctttctaagagagcttaattcatcatccacagcccgagaacactccttcttgtactttccatttaatgcctcttctatggtcaatggtttggtatatcacatgaatgatctattgacaaagcatagacaatcaaatcaacttctgcaaacctcgctagtatatggatttctcttctggttctatctctagcaagctggtagtcagacagatcttgttgttcctcagtctcatctagagctgcgtcaatactgtcattcttctcacctagttcaaatcctttaagctcgatttcaaactctgccaaatcttccctcttgctagatgaatctgcatcaggtaacacacactgcctttcttggctttcaagtgaggaaaatcattttcattaaacataacatttctagaaataatcaccttaggtttcccattttggtgtatgcaaattctataaccttttgtgcctataggatatcctagaaacatgcctttgacagatttaacatcaagcttatcattagattactgtacatatgatgaacatccaaacactctcaagtgtttcaggtttggtatcttcccataccacatctcataaggtgtcttcaagtctatgactctattaggactcctattaacaaggtaacaagcagtagctaaaacctctccccaataaggctttccaaccctgaactaagaagtaaacatctcactttgttcaaaagggttctattcatactctcagcaactccattttgttgtgaagttttcacaactgtcctatgcctagttatcccatgctcattacaaaacctatcaaacttagtgttgatgaattctagaccattattggttctaagtgtcttaacctttaaatttgttttattttccacctgagctttccatatcttaaatttttctagacacttatctttggttttaagtaaataggtccaaacacatctactgaaatcatcaataatagatagaaagtagtattcacctgaatgtgtttggattctacttggctcccaaaggtcagcatgcacagactctaggaatccctttgtgttgtgagtttctgttgtaaacttgatcatgtattgcttgccataaacacaagtctcacagaatggtaatggacatgtctgaagcttttcaatgacccccttcttgtgcaattcccccatgccttattcactcatatgtctgagcctttaatgccatatctgcatatcactttgtaaaccttttactgtatctacctcggccacaggtacagtttcaccctcgagtacatacaacccatgtactttctttcctttcatcacaagcattgaaccttttgtgatccttaagctcccattcaaggacttatagccat

SEQ ID NO: 226664 - DNA, 1075 bp, Cannabis indica
ttccaagttcgggtctgggtccacattggggttggggtcagggtcatagtctaggtacaggttttttagatcccgttctggtccaggtctgagtctgggtccaggttcgagtcttaggtcagggtcccaagttcgggtcttggtctgcgcctgggtttgggtccaggtcccgtgtttcgatcccgacctgggcctaggtaagtattcaggttcgtgtcaatgtccatgtccaagtctgaatcccagtttggtgaggtgcttggtctgggtccgagattgagtaccgagttcatgtttgggttcaggtatgagtctcagtcttagtcttggtttgggaccgggttagaaactaggtctgagctagagtgtcggggctaggttcttctctagttcgaggtcccaatccaagtccaggtcctggtcagggtcacggtcgtggtcctattccagggtcttggtcacgttttggttcaagtttccattttgggtcccaggtctgggtcttgttccaggtcctagtccagcttcgggtccttctcttagtcccagattaagacattaactacgggtcttgtctaagcccggttcccagatcccgatacaagatctggatcccaatcatggatcctggtctggcttcggttcatgtcccatgtttcggtctaggtctgggaccgagacttagttgcagttttgggtctcgatcccaattttgtgtccccgagtcttgttccatgtttgggtctgagttcaggtttgggttcgggtctcaagtcctcgttcaggtttggattaaggtttcgaacccaatcccaaggtgggtctgtgtcctcgtctgggtcctcgtccggttaaagttttgggtctgggttcaggtcctagtcctagtccttctcctgggtctcgatttgcttctagtttcggttacagtttcaagtcccgcggtatgggttctggccgagtttgggttcgggtcctgatttgggtacaagccgaggtttatttctaggtttcagtcttcgttagggtctaaggtttggtctggttctgggttcgggtccgggtgcgcctctcg

SEQ ID NO: 226665 - DNA, 1838 bp, Cannabis indica
agtaatctttcatgcataaaaaagtacgtgcatgcgaaagtcatgttgaatttttataaggaaaacttcagcttccacgagggaaggttaaagttacgtaaaaatttaagccatgacttttcttaagaagaccaaagggtgaaatgggcgtgtgacagacttcaagcaatctttctcttctggaagggagggttgaagacgtttcatacccacagtgatctttcacgcacaaaaaactacgtgcatgcaagagtcatgttgaatttttaaaaggcaaactttggcttccacgaggaaaggctaaagttgcataaaaattcaagcgatgacttcgcttataaagagcaaagggtgaaacatcactgagattatgatagagttcaagcagtccttctctttcaagaaggagggttgaagacgtgttgtacccccagtgattcttcacgcacaaaaaagtacgttcatgcaagagtcatgtttaatttttatgaggaaaacttcgacttccacacaaaagttcttgaatccctgagggaattcagtattcataatgtctggatggaaaggctcgagtttctcgtctgagtcatatccagattgttttccatatttcccaacttgatacctcctaaatttttcctccaactcataacttcgcaattggataggattctcttgcttttgactgagttattggcgaaggtcaggtgttttctggttcaagtgattacgaagatctggttgttgctggttatagttactcacagacctcgtcctactcatggacctcgtcctgctgaaggaccccgtccttgagtaactttcagttctacttgtgcttgtactctcttaatcagtactgcgactagttttgtcctctcctcgcgttgatcgactataggttcttgtgcgtcccgagctggcactcacctcatcacgtactggccttctcccttgggtatgggttgttgcatgccccctactggggtttgtacatgccccttccctgttggttggagaaggacgttgacgatgccttggtggcaacccacttgtcctaggttgagtcccaggatttccctcgtcctcactagggatttcatgttccctagtcctgggttgccttctattctcatttctgtgataaggttccggttgatcatttggttgttcatttttagggggccctcagtttccccaggttgttcttcttgagcgttctaagggtcctcctaagccgtctcttgccttctagtttgtgagccgcgaggtctgcctcgtggtctcctcactccaagaccaggttggttttgcactagttttttcctgtgctgccctggctgcggctgcctcccattccaacttagtgttttgtcgtatttgcctcctccaggcagcacctgagatgacaattttccaactcgacaataggtacgtatctcgtgggatcataggcaccgtcatccatgggttgagcacaaccaatgcttgtgtttggtacatcattcccaatttttgggttctggctgccttcacgtttggtccttcttgaacgtgtggaccgtgtagattctgggttttggccaccttcatgttgggttccttcttgaacgcgtggacagtgtcgatcatgaattaggaggcctccgtgagcccatcggctcttttccaggacggtgagtagtctcttcaggatgagtatcaacatttttctcccttatcagcgatggagaaagattttcctttggttaggagggttttttctgagctttttttcacgtaggctctcaatgaaagcacaaactgttgacgcagatttttcgttaacaataataagc

SEQ ID NO: 226666 - DNA, 1189 bp, Cannabis indica
taaaatttaattatttaaatagtgacatgtgggaccatagtagataatttttgaagttgttaactattagagtaatttttatatgaaaagttatcaaatcttatgagtgagaaaataaaaaaatatatattttaggatgatgagtgcacttttgacaactataagtgttgcttctattagagattgtaacttccccgcttcaagcctccattgggtcttcacgtacagacacatgactcttatacacgggtacgctagtactctggtagtcctggactgacgactggccctatagaccaacacaagtattttagtgtgctttgtctttactcgcacgcttcttcggaaaactttctaggagatcacccatcttgaaattacctcaggtcaagcacgcttacctgtggagttcttttgtgatggactgatataagtaatatcaatcaatttatttaagcccttttcaactatgtaatctcatacctacacaacctcagaatcatcacacttgaccttccccaggtggtacgggattgcacagcttaattacacggtatttccccttacggatcacaagactactgactgtcacaatcacatcccttaaggggtccgacgtcctcgtcgatcacacttatggatgggtcaaggctctgataccatttgtaatgtctctacttcaagcctccattgggccttccccatgaactaatgactcttatacacgggtacgccactctggctgcttccacgattaatgactgacactacataccaacacgagtgttttcagcgtgctttgttactcgcacgcttcctaagaaaacttcccaagaggtcacccatcctgaaattattccatgtcaagcacgcttaactgtggagttcttttgtgatgggctaccaaaagacaatatgcatcttgttaatataggttgtactaatcaatcaatttaagtcatcttcaactgtgtagttccatacctacacagtctcagaatcatcacacttgaccttgcccaggcggtgtgatattgcatagcttacccgatagtttttcttatagatcacgaaacttttgactatcacggctctaatgggtaagtttatactacatcccctaaaactaatattttaattaaactttttttttctttcttatgttcaagagaattttttagttaatttt

SEQ ID NO: 226667 - DNA, 1754 bp, Cannabis indica
gtgtgtgtgtgtgtgtgtgtgtgtgttgtgtgtgtgtgtgttctttgactttttcctagttttcttttttaaaataaatgagataaaggatatatcaattagtaataagatatatatacaaattactaaacctagaataaacccacaaaaagacaatttttatttagggaaaaagaccattttgccctacacttaagctaaaaagtcagtaaaccacctagaggtaattttatcaattctaaaatctcgactaatcctgacattcccaatgtccaactataatgccccgctactaataaaatactaaaatgtaattctaatggccaaacgccgcgttccaatgttgtcgagcacgaaacatgtaaaaacataaaatttcatgtatgacataactaatgcattctgaatttaaaaaaaaatctccataaaacgataaatcataaatatcatgcaagtttcataattaaatcctaattatctgctaatttccaaattaaagttaagcggtctttatagatataaaagtttctataacctcttatttgcagtagtacaaagaagctcaagataaagttatatcatcactaaatagcactattcaagatatcaactctgatcagtgggtcacaaaatcttgtctccttctccggggaagtataaattgagtgttgatgttgcggttaagagccaggattacaggcattgatatggagccataatccaagactcacaaaacaaaataactgcatgtttcttatcctcaacaaactcaagacttcctcctatctatccagaagcagaggctcttcttagagcattgcaattgagccaagaagttcatttccctatcgaaattgtgtccacaggctgtcaagttcttttttctaaaattttgaaacgggcaaaaggatcttaatgccctttccagtctgatttggaagatcagtctctctttgtcctcctttcctaatgcaacaatcatttacactccctaatgtaataattctcttgtgcataagctaacacaaattgcattaggaactgacaatgagcatgtttagaacaattatgtttctagtcacttttagatccttgtaactggtgctttcttgttgttcttcgttggttacaggtcttgtctcaaaaaaaaaagctttatatataggataattttaataaatggccttaaatctcacactaatgaaggttaatgtccattttttttttaaaaaaatgaagtaaatcgccttttataaatgttaatacctaaaatgcccttggttgtatagatgaagctcaacgtttgcttccacaagttttttttgggataaattgaaaagtgcccgatttttttatgaacaaaccaaaaatacctccattttagattccattgaaacatacccacatttataagtccaatactgaatataccattaccttttaagtaagtctcccatatgaatcagtcattgactccccacgctactaagattttgccatcgcctcccgacgcacgaaagcattaccacgagtcagccatcgataccgtccctttgcatcttctgccaccgccgatgtccttccacctcttctgccaccaccatcaacactatacagttcaacaactccacttgcaactgccaacatctatatatttatataattgtgttgttaaggtaagtgacatggcatcttgtatgagctttgtttcatttttttcaattttctctatttttcttatttatttagagttt

SEQ ID NO: 226668 - DNA, 1206 bp, Cannabis indica
ccatactggggggcatccttccactgagtaacttttggaagaatatctggaggatctcaactaacaacatgaaggagttcctagacagagctgatgactttatcaagctagaggaagcaatctgacaagcccaaatagagcaagtcagcaataggaaatcacagggcatcctacagccccacgacttaccaggcactagcaactctgcccaaacctccaatggtaagaacactaagagcaagcgtaacaacaatgactctagaagaaataggggcaaaaaggggaagtataacacttcccccatgccacaaaactaaaaggacaaggaggagaagtttacctacttcaccctcctgacagagaaacctaaagccatcttcatggccactcggggaacaatcccatacaagaggccccctccaatcaaaaggaagttgagcaagagggacatgtcaaatttctattgattccacaacaacttcgttcatgacaccaatcagtgtcaaaatttgaagagggagattgaatttcttataaggaagaacaatccccatttgtgtcgttatgtgccaaaatgaccagactcaggcacaaggtgtccaaaatggagacccaatgccacatctagtggcaggtcacttaggggtcattatcgacataccccatattgcaggtgaggctagcaaagctagggagcgctatgctcggacactccatcacgagcccaaaaataacatcctgattgttgaagaaaggggctatacgcaaccaaagccttgagagcccatgatctctttcatagaaggagatgctggtcaagtttgtttcctatacaatgaccccctagtcattactgcataaatcaggaatatgattgtggcaagatgcatggtggacaatggagtctccttcaacattcttttcaaatcagcatttaaaaagatagggctctaacttactaatttggcaccctgcagtcaagtgatgtatggcttctttggccaaggacccatggggtatattagagtacacctcattgttccaaccaccagaactctaattgtctagtttgttgtaatcgatgttcccttagctttcaatgccatgatatgtcgaccagccctatacgacctgaaggcggtgatatcttcccaacaaggcatggggtaggatgtttgaagggagaccaacagtctgcctgtcatt

SEQ ID NO: 226669 - DNA, 1587 bp, Cannabis indica
ccctagtgtgggtggtagtgtcattaaggggaccgacagtggaaaccctgaccacaagtggaaagctgaagcttccgaaatagctggaagtaatagaaggtttagtgggaacaaggtggtcgttaaggttgcgggtcttcattcaaaacttacctggagtgtcctaaatgcaaaaatcaccatcagggtgagtgtcgagctaaaacatgtttccaatgtggtatagtgggccagtttatcagagactgtccacaatccaagaaagaagaaccaaagaagaacaacaagcagaacccagggagcttattcactatgacttaggctgacgttgatgctagtccattagtggtgacatgttagttgtctataaatggttgttcttattcagtattatttgattcgggagctactcattcttatgtatcaagtagagtaatagagagttttcataaactatttgatgtgtagctttggggtttgggaccctgttaccttttggagacctaatcgtatctactcagtggattaggtctttgtctttttggattgacgattaggaattaactgccaacctaattgagctataattatctcattctgatataatcctgggaatggatttcttgtctaagtacggggcaacaattgattgcaagcggaagatggtggtgtttgaacctaatagtgtcaatccaacaatgtttgtgggtaaggtacaaggatagcgtatacccagaataacaatcctaaaacctagagacttgatgcgtaagggttgcataggattcctagttacaacaatggataccaaccagcctatttcatctagacctaaaaatatgagattcgtgtgcaaatttttatatgtatttttagaggatttacctggattaccactttcccaagagattgaatttgtcatagagttagtttcaggagcagaaccagtatcaaaggtcccttatcgaatggctccagcagaattaaaagagttaaaggttcaacttcaggaattacttaacttgggttttactaaactgagttattctccttggggtgctccagtgttatttatgaaaaagaaagatgggtcgcttcgcatgtgtatcgatcaccggggactggataagctcacaatcaagaataaatatcctctatcctgaaatgatcacctgtctgactaattgaagggtaagatggtcttttctaagattgatcttcgctcctgttaccatcagttaagaattcgagaagaggattacgagtttctagtgatgtcttttggactcaccaatgccccaaatgcattcatggatcttatgaaccgggtattcaaggattttctggaaaagcatgtgataatgttcattaatgatattctagtttattcacaattagaagaagaacatgaattacatctcagattagtacttcagcgattatgagatcacaagctttatgttaaattcaaaaagtgtgagttctggttatcacgtgtctcattcttagggaacatagtggataaagatgaggtcatggttcattcggccaaaattgaagctgattaggattggccaacaccaaaat

SEQ ID NO: 226670 - DNA, 1423 bp, Cannabis indica
gctcggcgaattacaggcccctaaatcacatcgatcataacatggataagtgacacactaaatcacaaccggggacttaggttttaaaccaaaacctacctactgcaagttaacatggcaataccctaaactaacaggaaattagctaactagagctctgaaactaacacgaatcgataacacaaaatttttagggaacccagcatcaaatccggttaacctgtaaaaccggttaaccgatttactccagaaaactcaaacaattcgaaaacctaaccaaatcgattccaaaccttaccaaaccttccagacctgcacatcataccccaattgacatatttcaagcaataaacaactacacaagcttagaatcaaaaatcaccatcaaagagccaagcttgatttctaaaactcaaagcttgctcaacaacactacagccaatcaaaccagccgaaaataacatatctaaacataatttaacttctgaaaacaactccaaacaaccacaataactatagaacttaacacccaaattcatgcaaaatttctaacttgaaacttaagaaactagcaaggaaaggtactaaaaacttaccttggcttggatacactaagatcttgctggaaaactcaagattttttgaagaaaaatagaaccctagcttgttctataggggtcgaagaagagagagttttgggagagagagtttccttatttttctaactttgatttttttttttttgtaaaaaaatgagataaataggatatgttctatttaattacttcagccataaaatcaagttaataaacttaattaaaacccactaaagtccactaaggacaaaacataattaggcaaaatgaccattttgtcttccacttagccaaaagtcataaaaatcacttagggtatttttgccaatcgaaaatctcaactattcccgacattctcaatgtctaactatagtgccctgctatactaaaaaatactatgatgtgattctaatagccaaacaccacgttctatgttgtcaggcacaaaacatgtaaaattataaaattccatatgtgacatataaaatgcattttaaattcaaataaatcttcgtaaaataataataataataactaacaggcaagtttcataattaaaccctaattatatgctaatttctgaattaaatttaagcggtctttacaatcaaattgtccattgcaaaagactaggagtggaatgtcgtctttttcctgtgaatatgacattattataagtgtaagtcaactaatttgaaactatattgaatctgtaattgcttttgttattaatgttttccgaacatttttgatacaaatttataaaacaaaaattaaaatgatctttatgaaatagaaaagaaacttacttctattggctttcttct

SEQ ID NO: 226671 - DNA, 1566 bp, Cannabis indica
tacttgtgagtagatctaagatcttggtaaaataaatttccaacaatatatatatgtataacgatcggtttcggttttttcggtcggtttattataaaaaaaaatcgatagtttaatggcagttttaaccgttagcggttttttcgatttttggtttcgtcggtttcggtttcaacagtattcgataggtcggtttgaacagttttttcagttttttggattttatgctcacccctaatgtttatattggtacacttaatattattatttaaaaatataaaaattatttcaaaatttataatatatttttttttaaaaaaattattttatttttataattttatttaattttaaaataattttaaataataatattaggtgtaccaatataaacgtgtacaagagtacacacataagcaactcatagtgacaattaaccggatgacacattaaatttacaactagatcaatagtttagagagttttactttcaaaatttgatgttagagggttaaatacaagtaaaacgacagttgagagggtttagcggccaaaaactcttgatatatatgacataaaaatttaattgtactaaatatgatattttaaaaaaaataaaaaatatagaaaaaaatcattatatataaagaggaatgtcataaaaaaattttaaaattgtatttttttcttcttttctgttttaaaaaataaaacactgaaataaagaaaaaatgatgtcaatcgtaactacaaaagcttattttttttaatttttaattttaattttgaagcaatattaaagcaatttttctaaggcaataaattaataaactaattaattctatataattaaaaactagtttcttaaaaaaaaaaaatcaattacattacaaataccaaaactcatataaaatttttgcatgcttcttagaagctccaaaacaagaccacgaacccactattgatgcgtgtcctaagtcacaacaaatttaccaatatttattttcaatatctccaattattttagtataattgtaagtaagggtcgatcccacaaggattgtgtttatttaattattcacaaattagtgacaagaattagaaaaatgggggtttcgacgtttagaataaaatagcattaaaaaaaatgtgagactacgctatgagataactagtaaaaggttattctccaccctcaataatcattcctaattcctattcatgaaagtaatttttatttccaattaaactattaatcccgcagataaagctgaaacagttaattatctcaatcttcttattacatttaatcaagacaaagcgctcaattattaactcttttaccgaactagtaaatccacgaagcatgtaatttatttaacttagataaaattttaagattatggagatagattaatctaggcaataaatcaatgaagcatataatttatttaacataggttctattcttcatcacaattaaaaatacctttgacaatattaaaaattacaattcatcacaaacacttaaaaatcctagactattaggtgaatagtaatcctaag

SEQ ID NO: 226672 - DNA, 1817 bp, Cannabis indica
tcaagccaaccagcaatcaatacatccaattcactagcagttttcttcatagcttttttataaccattaacatcccaccaccccaaaaatggtatagcatcagccaaaacaaacacaccaaacaaataagaaaaatccctcataacttttctacatctaatactttcctcttcaccaaaaccagacttagtactattattctcaccaaaacacctcttcccaccaatcagtctcacagatatattacctgttaaatgtccaaaccatcttttcatatcaaccaaaactctgtttttttcactacccttttccaaacacaacttgttgtaaagctcacttgcccaagtgtccacttctgaagaccatatgtgtttaagcaagtctagccttttgtttgacaagagttcaacagttgctatttttctcatttctctccaataagcaccataaggagcaaaaccaaacatggcatagttatagcctagcaacttggatgctactatggttggtcttgttgagaaagccatgtcatgagtagtgaaacagtctttggcaatttcaccattattgacaactacaactttgtgtgaaccaagctttatggtgaagattggaccatctttgtctgccatggctcctagtgttttgtgagtgaggtttttgtctccaaagagatgaaggtggcctatgattggccatgccccggccgcctcaggcgccaaaattggccctgaattagtggatgatgatgattttttaaggtggtaacatatgaaaataagaagcaaaggaagaaggcaagatatgacaatttggagaaaagggtccattgagttaatagctaagaagagttttttgtgttcaaaatttcaaatagtgaattttgggttggactttgagttaatttgtcttgtagaagatgtgaaaaggtaggaggtttcattagtccaatatgtgttaataatatgttaagttataatataatacttgtcattgaaagaatagtacaaatttaaaaagtttgggcttattatagttattatttccaagttaggttagaggataagctttttaaaaatatatgagtttttagaactaagtgaattgtttgcgtgcgcgttatatatgcttactttagtacaaaataattataaacttattatttttttttaagtatctaatatttataaaattattaattttttttttcaattttgtcagtacaaactttattgttttaaacatgatatatatgaggcttaaattttagatcattgaatctagacaaaaacatgtagtatcagttacttataaatttttctttaaaaaattcaaaacggaatcgatactaatgaaactgaaagaaaattacaattttataaatatttagtatttatatcgctaaaaataaatattaaatttatattgcttactaatttaaaatttaaatatttataccgctatttatgtttaagacttcgaccattttggattttttttcgtattataaacacaacatccatactcatacattaaccactcttatcaaaactcaataattgtatgctaaacaatggtttttaattgtaaataatgttctttaaaaaacattgctttacccactatctcaatccatcccaagagacatatttgcatcataaagagttaaaagactgcattaaatattaatatgaaaaataatggcatcataaagagttaaagactcaataattgtatgctaaataatggtttttaattgtaaataatgttctttaaaaaaacattgctttaccaactatctcaatccatcccaagag

SEQ ID NO: 226673 - DNA, 1310 bp, Cannabis indica
ttgacatagatcaggttttttcttattgctcacggagatctggccgtcttcgatcatcgtaacttgtaaatgttgtgcctgaataactctcagattggctactcttagtgtaactcatactttcttgatcattactgcggtgaggcttatcccctccttatgcagatcgactgtgatctcgagatctagtacatcttgtgctagaacttgcttcgtcatgcaccaaccttctcctttagggacaggttgatacatgccccctactgggattcgtatgtgccccttccctatcagttcgagaagggcgttgacggtatcttggtggaaacccgcttgtcctacgttgagtcccaggatttcttgttccctagtcctaagttgtcttctactcgcatttccacgagaagattttggtaaatcattgttttcatttctttgggttgtaaatccccgaggtcttcaaggcacttcttgacgaggtgcctggtcatttggttgttcatctttaggaacatccccagtttccgtaggttgttcttcctgagcgttctgagggtcctactgattcgtgagcctcgaggtctacctcatgaccttctcactccagggttaggttggctctgtgtgctgttttcttgtgctgccctggctgcggcttcctcccttagcatttcgttggtttgcctcttctagacgtcaccggagttgaagatttttcaagtcgaccaacggtacgtatctggtggggtcataggcaccctcactcacacgcgtagaatcaccaacatttgtgttgggttcctcattcccagtttctgggtttaggtcaccatcacgttggcttcttcttgaacctgttgactgtgttcaacgtgttgttcgtgaatttggtggcctccgtgagcccatcggctcttttctaggacgacgagtagtctcttcaggatgagtgttatcgttttccccattatcagccatggagaagatattctttttttggttaggatggatttttctgagcgtttatcacataggctctcaatgaaagcacaaagctattaacacagaattttgttaacgattatgagcctattttcataatagaattggcacagaaattataagtgatctaagaaaaataatagaaacagaaataacaccaggtttttatgtggttttgtacttaactctgcatagtccacgagtcaatcttattaagatttctgatacaccactaggtttcttttcaatcattgtattttattttctctaaggattttctatccttttttctgtataatatgccccta

SEQ ID NO: 226674 - DNA, 2956 bp, Cannabis indica
ataagaaggaataatatgattattgagtcaaaaagaatgaagtatagtatattacttgatggatctgttgcgacatggaagtacttgttctgaaacagctcccaactctccttgtcattgaggaaatagaattccttctaagacttcacgttattacattgctgagatattgcagaacaatcaaagtgagtcctaacttgaggatgctgatagacctttctggcaagagtggtctttccaaaacctcccatcccacatatcgaaatcgccttatgtttatgagggttctctttttcagtcaaaagagttaccaactcttctcaactctttttgcttctggacatatcttgaagaagcttcagctgcattgtcaagtgatctgtttacaccaagtgcttctaattgtaaagtccaagtatcaatgttggatgagatcctctcaatctctaatccaactttgtggacatcaattccctctcttaagatgttaatagttcttttgagtacaccttcattcctcttcaaagccactttgaagacataagttgcaataacatcctccaagtcaagagaattttttctgatttggacaaccaaaaggcgaactctctcatcggtaccatttctaacccaagcatctgcatcttttaagaaagcactcatacattgaagcttgatctgtgctttccccaagtcaccaagtctccaagcctttcaatgacaaacgaaacaacagcatctgccataagatgatatgctcaaactcagtaactgaattgaattgttataatgatctaacaacaaaacagattatttaaggattcaacaatggctgctgttgtttttccctcaatattccttgctttttgaaaagcagttttctttattactttttgaaaaagaaaaaggaaaagcattagccaaggagtagaagtaacagacagttttattcttcttcttagtcaagaaaccttttaattcatttactctgccttttcaatttcattaaatgttgatgggttcatacttgatctcttaatcaatgattatataattaagagtattggtattggacattattgatgctcaacacgttctataagtgtcgcactatgattggttagcatatttcttaaaatctatattcttaagttatataggacccaataattacactaaccgaggagggtgctaggcaccaataatactttttagaatttctctataattaaatatcagcaattaaaattctccattggctataattgaaaatagatatataaggatgaataatatctttattggaatgacacctttgatgaggatttaattcacagttaaagtagtatttccaaccaaaatcgtagtcattagtgtctcatatgattttggtaaaggtgccaacaaaataatagtttgaccctcttcatcaattttgacctctacacttaacaattgatttatatacttattaaatctatttatatgatccctaacatctcctccttaaaccatttttaattcatataactgctccttcaaatataatatatttgttcatataaaacttttctaactttttccataactcatacagacatgtttcattcaatacactatactttaattcaagagccaaacttaaacgaatagtacttattgctttcgcctgtaactcatcctaattttcaatagtcatactctcaagcttctttctgtgtagtgcctttaggaacccttgttgtaccaacacatctttcaccattctctgtcataaactgaaattattcttcccattaaaaagctcgatctcaaattttttagaagacaccatctttgacatttttggtgttgatctaaacctcggctctgataccacttgttggtaaaaatgataaacttcaagcacaatgaaataacaaagaaacgaagcaaaataatttaagtttggtaaaattactgaacccacaaagaaagatatatttcacttatcacttcaaaattacatatgctctctatctcaatctctccacctaaatctcaatacaccttttgcttcttccttactctcaccacacaacaaactcacacacactcctctttccacaactcactattttcctccacacacatacctctctcacacacacaaaacaaatatttataaagttacaaaatttgggcatcaagacaacttggggaccaagacattccaaagcttccttaagaagactcatcaaaacttagccaccaaaactttctttttccacaattaataattatccaaaaaaaattacaatttaacaaatataaataaataatttgagtcaaacttgaacacctaaagatccgtggcccttggccaattggcgaaacactctctataagaaagccaagaattgcaaatttccctagagagtcacagtgctcggctattttttcatagtttcctttctttcatgcataatgaagggggaagctacgttaagggacatgtgatttgaattttttgtaatgggaagcagaggaaccacgagtaagaaggaaaatcatcattggaggatccaatcttgagtttttatcttctatttttactttttcatgcttgtaattgaattctttgtttgttggaatgaagattatgggctaatttctctttagggctttttttatgtgaatcttttagaaaccctttttattagtagggttgtacaaaaaaaatttgtaaaccgcccaaaccgaataacccgcccaaaccgaaccgaaaaaaccgataaaaattacaaaccgaaataacccgaaaaaattaaaaaccgtccaatttgttaattgggcgggttgaaaataggtccaacccacccaattaagcgatcaacctgattttacacctttaatttttttttttaactttttagtttttaattatatataatataaatgattcaatatataataa

SEQ ID NO: 226675 - DNA, 1844 bp, Cannabis indica
tccaaatttaccccaaaatttcctcaaattattttaattatttaatatcatcgtaattggaatcaaaggatatttcctttatttaaaaggattgtaattaagaggttattcttataatcttggatgggtcgaacttaaattaataaactcttatgctataaattcagcataggtgaaattgtgttttgcatttattttaatatgttaaatgtgaaaatttttgcttaacaacaaccaaatggctaattacaatagtaagtccttttcatctttctttcaattttttaatcaaataaattaagggatatttttcttttctatgatattaatataagacaaagtaacaagaagaagacaaactttttttttaatgctttttgagtttgagtggttaattttttttatgttattttaataagtcattgccatttcttatgtatatgaagattataatttcttgagtctagctttatatggatatgatatagtatttttttttttggtgtttaaaagattatatattttttccttgaaaatataaaaacaagaaatagcaacttttaataatatttattgtctgttgagtatatcttgtgtgttttatatttggttgattcttttttatttgtgtgttataattataattataaatcataatactaatctttcacatatttgttataaacagatatgaagaggtattttaaaagtatacaagagtcttcaacttctatgggaaagagtgatggaattgtaaaatcaagtcgtgtggatgttaacacatatcttgaagaacttgaaagtgaccccgggttgagaataccaattttagaccatccttcaaaagttcgtgatcaagttcgacgagcatatatgcaaaaaggcccttgtcaacctcatctcaagccatttccatcagaaaaggttggacctcaatcaagggccttcaatgttgcttggtatgcagactatcaggattggcttgaatatagtgtatcaaaggatgcagctttttgtttatattgctatctgtttaaagaagatgttggagggcaatcaggtggtgatgcatttgttagtaaaggattcagaaatttcaaacttgcaaaatcaaggcttcatactcatgttggaaaaccttttagtgctcacaatacagctagaaaaatgtgtgaagcattaatgaacgaaaaacaacatattcaaacattttttgtaaagcaatcggagcaagctcgtagtgagtatcgaactcgtttggaagcagtggttgattgcattcgtttgctattacgacaaggacttgcttttcgtggtgatgatgaatctgaagactcgagtaatcaaggtaactttcttgcaattctaaaatttctttccgatcatgatgatgacattaaagcagtttcattgagcaatgctcctgagaatttaaaattaacatcacctgatattcagaaagatattgtacgggctgcagcttttgaaacactagatgtcatcattaaaggaattggggattcaatgttttctattttagttgatgaatctcgtgatgtttctattaaagagcaaatggctgttgtattacggtatgtagataaagatggacatgttattgaacgttttgtggggattgaacatgtggccaataccacagcttgtcacttaaaggtgctattgataaattattttctagatatggattgagcatatctaaattgcggggacaaggttatgatggggcaagtaatatgcaaggagagttcaaaggtcttaaaactcttattttgaaagagaatccatcagccttttatgttcattgttttgctcaccaacttcaa

SEQ ID NO: 226676 - DNA, 2595 bp, Cannabis indica
aacattaaatgttatttctgatctgtattaataagtaaatctgattatattgaaatgagttttatttagggcataaaacccaatagttcgaaccacttggattgtcagcctttgtcgagacggtacttgctgtggcagtacttgtgttgggtttgtttcctgagctagtctttagcaacttcatcttatttcttgcttcctctttgcgcacaaacacttgtgctctttcattgaattcattattatttctcactggacgaccctgtaagtgatcccacagcttgcccccaaatgttgagaggtcaatcgtgatccctgcttgaagagcagtaagttgaatactgtcattcaagtttctaactttagcagcggcagtactgaagcgactcaagtgagccttaagtgacttgcctggttgctgctttatgttagttagggataatgcttcaggtcacctatctctagctgcctgaaattatttcttaaaatccttggacagttgttcccaagaagttatcaaatggtgagtgaatttatcgaactagctactcgctgccccagtcaacaaggttgggaataaaatgcgtcgcagattatttgagacgttcctagctcgcattatggtattgaaattattaagatgagcgactgggtttgaagtcccatcatactgcgagacgtgtgggtttttgaatccttgagggaattcagagttcataatatcaggatggaaaggctcagcctcctcgtccgagtcatagccaggtaatttcctgtactccccatcttcatatttctaaacttatcctccaactcaatgattcacaacttgatgggatccactttttgttcattcacattaagttgatggcataagtcaagtgcattctgatctaattgctcatgaagatcgggttgtcttcgattcaaatgctcacgaagatcaagttgtcttcgttcataattactcacagatctcgtatctgagtaactctcaaattgataactccttgcatttctcatactttcttgattagtataacgtcgaggtttgattccttctcacgtttgcgttcctgatcgactttgcccccaagacctcgagtggtccgagctagaacttacctcgtcttgaatagggctacttcgtcggaaaaggttagatacatgccctctgtttaggtaagtatatgcctcctccctctcagatcgagaaggatgctgggggtgtctcggtggtaacctacttgttctagcttgagtcctatgatttctatcgttattacgagggatttcctgttccctagtttggggttgccttatgttctcgtttctgcgagaagcctctagcacatcattattttcattcccctgattcgtaaatccttggggtctttgaggtacttctcgacgaggtgcttggttattttgttgttcatctacaagaacatccctagttcccccaagttgctcctcctgggtgttttagggattcccttgattttcttcctgcctcttggttcttgaaccccgaggtctacctcgtggtcttcttactccaggattaggttgattctgtgtattatttccttgagttgccctggccgctgtagcctctctttccaactcaacatttcgttggttagattcggctaagcgttggcagcgttatctattttctaattccactaatggtacatacctagtgggatcataagcaccctcacttctaggtacatagccagtattagtattggtttcctcgttccttccttctgggttttgattattaccacattggtttctttttgaacgtgttgttctagaagtgggtggtctttgagaacccattggttctttcccaggacgatgtgtagtttcctcaggatgacttccatcgttttgactatgatcagccatggatagattttgtttgttaggagggattttttctgagttttatcacgtaggctctcaatgaaagaaccaaactattaatacaaattttcgttaaccaataataagccttttcgtaataaatttaacaaagaaattataaaagattaataaagtataataaatataataataaccccaggtattttacgtggtttgcagttaaatctgcactccacgagtctatcttattcaagatatgtctgagtatttaatacaatatacaattgatagtttttctttcaaagatttttcgtccctttttctgtggatctgcccctatttataggaatatgggttggcagttatttacatttaaatttgaaatacataaccgtttcatgaaatgtgggaattgattacgtttcatttaaacacgcgtggataacaattgataaccacataagtgcttatcattcttatcatctcgctttgcctgtagatggtcaatgctgacttagacaaatatatgccttacaacaatggcatgagcaccagtgtactgagcaaacttaagaactgctctttgaccataaggtctcacagactgggcaattgtgtcctacatatttcccagttgttacagttagttattgtaatgtggaaaatacgctaagtgtttatgtaaagaccgcttag

SEQ ID NO: 226677 - DNA, 2156 bp, Cannabis indica
agtagttgcatccactaactagtcaatcctaggcagtggaaaacagtcttttgggcatgcctttattcagatcggagaagtctaatacaagttctccaagtttcgttaggtttcgggatgagaataggattggctatccacgaaggataaaatacctcgcgtataaaatcgttgattgacaacttgtcaacttcttattttagtgccacttgcctctcgaaatccaagggcctactttttgtctcttcgctgggtagtttggatcaatatttaagtgatggcaaataatcttagggtcgatccctatcatatccccatgactctaggtaaattgatcctggttcgccttcaaaaagcttattaattgctatttgagctgctcgtccaggttcttcccaatgtatacacatttggtgggatttcctgggtcgagaataacctcctccaattattcaattggttttagcaggttctttcatcttgaactcaaagatcaagatcttcatctttcttctcgttttcttctgccaagatcgtcatcagctgatgactggcctttctatgctgcaactctatgcgataacaattgcgagccaacatctgatttccacgcaccactcccataccatctggtgtttggaactttaaagataggtgcttgatggagttgactgcccctagtctgatcagtgctagacgacccaacagtatgttgtacgccaaaggcaggtcgacaaccaaaaagtcttgcataacagtagcaattaaaggtgcctcacctacagttaatgcgagctcgattatgccaaggctagtgatgctatccctagtgaatccgcaaagatttaccatacaacgccttaacttggccttttcgagccccattttctttagagtctcattataaatgatatttactgagctcccgttgtctattaacactctcttgatcatcttattggcgagttgaatggttatgaccagtagatcgacgtgagggtatctcatgttcttctcatcttcatctgtgaatgtaatggagggttcctctgttttcaccttcttggaaggttctggggcaaagaccgactactcgttctttatctccttcaggtatctcttctgagtgttattgctttcccctgcaatatgcggccctctcaaaataaccaggatgtcctctccttccacaagaataggttgtaatccctggttatttgggttatcacgctgatggggttggttgtatccctggccctgtcttctcacatactacttaaaatggcctcgagcgataagactctctatctcatttttcaattggcgacattcgtcggtcgtatgcccaatatctttatgaaatttacaatatttgttaggatctcttttgctcctcaaattcttcataggctcaggtttaccaaaggttaccttctgctcatgtgcgaggtaaataatttcttgagtttcattacactcgatatacatggtatacactgcacgtatttgtcatgcttctttggtttctttctatccttcgacgatttcctaattctgtcctttcttttcagaccaaaagcccccgagttatcaattctcgtggaagcagtccctgttgagacattgctgggtttacctcccgagctttttttcaacaagttcatttgctttcgggcttcttcctttcggacaaacacctgagctctctcgttgaactcagtaatgtttcttatcggacgtccttgtaaatcatcccacaacttgctcccagctgttaggggattagtggagatccccgcctgaagagatgtaagttgcgtactgtcatccaagtttctaaccttagcggcagccgtgctaaaatgacttaagtacgccttaagtgattcgtcaggctgttgctttatatttgttagcgaggccgcttcaggtctcctatccctagcggcttgaaattgcttcttgaaatccctagacagctgctctcaggaaattattgaatgacgagtgaacttgttaaaccagctacttgctgctttaacaagcgaggtggggaacaaaatacaacttaaattattcgtcacgttactcgatcgcattattgtgttaaagttattcaaatgtgagaccggatctgtggttccatcataggacga

SEQ ID NO: 226678 - DNA, 2176 bp, Cannabis indica
gaaactttatgctgtctagcatggttgataccttgaaaacaaggtttgcaaacactctcacgactgcaaatatcctaaatcagttaagtgaactgtttgggatggcgttagatcaagcttgttttgaggcgaccaaaaaatttatcgatgcacagatgaaacctcatcagaacgtgcgtgataacctactccaaatggctagttatatctaggaagctgaaaatcatggagccattatagatcgggaaactcaagtgagtttgatcttaaatagtttgactctagctattttgccctttacttcaaattatgtcatgaacaagttaacatttgactttcacgagttaatcaacaaccttcagacatttaaaaatttgattggaggaccgcaaaaaggaggaaacaaagctcctagttctagtaatgctacgactggtacggcaaaactagagtcaaacactgtctctacttcaaaacccacaaagaagaagaaattgaagaatagcaagaagcctcctcaagttgttaacacaactaataagggcaagaaggctgctcatccaaaggcaaagaaaaaaggaaatgcgtctattacaacaaaaaggggctttgaaaaccctagtgtcctaagttttggtcagagaaacaaggtatttctaactttacaatgaattcatgtgttttagagaattactatctctttgggttactaattctagatctactaaccatgcttattttctttttatttcagctccaactgcttaaacttagattgctatcctagcgagtggaaacagatagatgaacagaagggtagagattttccaagtttaagatgaagctgaattaattgttttagttattaaataatttactttcaattattagtatgagaattttattcccaatttcactttattgtagataatttattgtgacatttttgaaagtattaatataatatttttctctttgaaagtatttcattatgtatttttttttatgaaattgagcttcatattctttaacttgtatgccaataccaaattatatttatataatttcatgttttatgtattttgtattttattattgatacaaaatctatggtataattatctctgcaaagagataacaccacataaacacttacaatttaaatttaatgtttatgaataattgccaattcttaagcaattgttaagattttgtttaattaaaagatctttcgatctaataggaatggaggaagttattaatatatacagttcaaagatcttttatatctattaaactctagactatattcgaaactctacaaaatctctataacacttaggggtggaagaagttattgatatatgcagtacaaacaatttttttttcattcaactctagattatattcataacatcacaatatctctatgacacacataatttgattagacatggatataatataataaattaaatagcaaactagtaaaacttattcttgatcctgtaagtattcaaataaatatgttaataacgtaatagtaaatagatgccttggacatagaatcatagtaccttatcttagtgggaggattttaaaagtccagcccattattattttgatgacactagtgacagcctactatgatatgttcaagaaagcaactttaaaataaaactaagagaagttcatctaaccattcatatggatagtaataatttataagaagtataaggatggtagaaaattttacaatgtttattcaaaagactcaagcaaaattcctggtccttatgaaattttttatggtatgtgttgacctcgttgttagccaactacaacgagtctatttttataagcgataagtgatttatagcaagaaatatatgataaagcaatgtaaagacacaggaattttatagaggttcatccccgagcagttcggtaatagcctaatcctcgttatttgtattgacttaagatcaaggagaaggattccttttcttgtaggtcttacaacactatctctaaatgtataattcttagataatatatttagggtatagtcttagctcaactgcttttcgacctcttgcccagtgaacatgcatcactatttatagggctagtacgctttgagaggaagagtttcccctatcgttacaatgcgtat

SEQ ID NO: 226679 - DNA, 1552 bp, Cannabis indica
aaagcggtttgtcgtattttgccccatcaaggtctgtatgagtcctcgctctatgtgtttgggaagaacgctagtgatttctgagaggtgacctccattttcccggttgagtcccaagatcctttctcatgagggatttcttgttcatcagtttttggttgtctgccatctggctgttcgttctaatttttagggggtgtcttgttttccctgggttgttcttcctgggcgttttcctgtctcttggtttgtgagccgcgaggtctacttcatggtctcctgactctaggttcaggttgattttgagcattcgtcccatgtgttgccctggtcgaggctgcatcactctttaactcggcatttcgatgttgcgcctcttccagacagcgcctcacgcagcggtttttcgtttcatgagttccttctcccacatattgggcacctgcacgatcgagctcttcatccctcatcccgggattctgaccactcccacgttgagttctcctcgagcgtgttgtccgcgtactaggaccaacgtcgggttgggttctctgggaacgtgttgtccgtgcactgaggccaccctcaggttgagtcctctcggaacgggtggtccttctggaccgcaggttggtagaccttctggagcccgtgcgctgtttcccataatgatgattagtttcctcatgtggcgtgttaacattttctagattttcagccatgaaggaggtggtttttcttcaaaagaagggaggcttttttttgagctttttcacaaaggctctcaatgaaatcaccaaactgttaacatagatttttgttaaccaaatttgagctggtttcacgcagattaaataaaagctgtagaaataaaaatatgaacacatgattttttacgtggttttgtagttaaaattctgcacaatccacgagtcaatcttattcagatttcagattgtttttcaggacctctcttgtatgagttttttcgtccattttttgatcttctttatcactattaataattacatagtggacagttaatgattttaatatgttttcaacgagcaaccctaaaattatgggatttgattacatatcacgtaatataaatgtggtttatgatttgaaaatcatatagctgtgattttcctgcttttactgggtcaaaatgatcgtgttttaaatcacgtctttaattactgtttctggagttgtctcgacagaagcttggttccagtgatatcaatagcgagttgcggccatttttccttctgaggtcgacaatgcatgtctggtgttgattgtagttcttatttataaagaatccttcgaggctcatttaaatgttatcttctggctcgctaggattgtaagtctcgctaatgctaacgggatgaagtttcttctcataacgagatgggcacttcgctcacttgttcttgagccgatctgacttttacacttagtttttacattgtacgctaaggacttttcacgattggtacgtgtcgctttcttggtgcctcgctattcgcattcagcgacatat

SEQ ID NO: 226680 - DNA, 1760 bp, Cannabis indica
ccctttacctttaggcaattgtccgattagatcaatttcccaaatagcaaaaggccaaggacttcgcatctgagttagctctttgggcggtgcacggggtatctttgaaaatctttgcatttatcacatttcaaaacataggcctttgaatctccaatcatcattggccagaaatatccttgccttagtattttctttgacaggctttgcccggctgcgtggttgccacaaaatccattgtgtactttagacaagaactgtgtaacttcttcttgtgtaacacatctaagtagtggcatggagagtcccctcctatacatgactccttctattatgatataccgtccagcctttcttctcatctttcgagcttcatttctgtcatttggaagttctccagtattgaggtaggctgctattggtgtcatccagttcggtgttgtgtcaaatattttaatttcttccgcacaagtatgtggttcttcaaggaattgaattaggattagattagccttatctattatgttgctgcttgtaagtcgggctaaggcatcagcagttgtattttcttctcttggaatttgcatgagagcatagctcttgaattgtgcaagcagatcatgtattttgctcaaataggctatcattttctcctttcgggcctcgtattctctagacacatgattcactactaattgtgagcactactaatctcgatgtgttcaacatgtagctcccgagcaagttttagactgataatgagggcttcatactctacttcattattggaagctttaaatccaaacttgactgccccgtgcagatgttgccccccaagtgtgacaagggcaatccctgcaccaaacagttaatctgtagctgacccgtccacgtgtaatttctaggtaggtttattttcattattgttcagctaaggcccttgtactggctctgggttgccttttgaaatgctttcttctttgctcgtgcactcaactacaaagtctgctaaggcctgtcctttaaccgttatttgaggttgaaagattattttgtattaacccaattccactgcccatttgagtaactgtcccgaagcatcagatttttataatatttggcgtagtggttggtcagtgtatacccgaacaggatgagcctggaagtagggccttaacttccttgttgctaagattaggcattaactaagcttttctaccaacgggtatcatcctttagcttcaacaagtcttttgcagatataatagaccggatgctagacgttgttttcttcccttataagcacgatactcacaacatattctgtcacagctaggtacattcctaattcttctctgtccagaggttttgagagtacaggaggttttgcaagttgtcttattagttcttggaaggcattctttcattcctccgtccattcaattttcttatttcctcgaaggatgttgaagaaaggaacacacttgtttaatgattttgaaacaaatctactgagtgcagttatcctactagttaagctttggacatagtttttgttggcaatttcatatccaggagggcttgaattttcactggattggcttcgacacctcacgattaacaataaaaccaagaaacttactcgaactgactccaaaggagcaccttaagggattgaatgtcatgttgtattttttgaggactttgaagcatttgtccgggtcatctatatgccctcagccttcctggatttgatgagc

SEQ ID NO: 226681 - DNA, 2190 bp, Cannabis indica
cttgagtgtaaagagtacggtgtggtgtgagactcttcaagaatctcctatttgatattttttctgccagtacacaaatcatgctcttgtatcgtaataacccatcagatgaaagtgaaaagtcttttgctgacccagcttcaagtttctctttgtattcttgtaactcagaatcactttgttgggccgccttgattctttctagcaaatcagactatagtgtgatgttagcaagttttccgaccacaaactcaatctgtgctctagccatatcttctgccaactttgatgaaatcttcttcaattcataaacttgccttgggccttttcgacttagagcatgcgctacaacatttgcttttctagagtggtagataatctcacagtcataatctttgaccagttctaaccatcgtcgttgcctcatatttagatccttttgagtgaaaaactatttgaggcacttgtgatcggtgtagatttcgcacttctcaccatacaaataatgatgccatttcagtgcaaaaacaactactgccagttaggataccgctactcatactcttttagttgcctggatgcataagcaataactttcccaaattgcatgaaaacacaacccaacccctgtttggatgcatcgcaataaatcacaaatttttcatcactaaccaataaagttagcacatgagcggtaattaatctttgcttcaagtcctggaaactattctcacacttatcagtccaaaaaaacttacaattcttacgagtcaattctgtcaagggcgtagaaatcttagcaaaccccttaacaaatcttctgtagtatcctgctaatcccaagaaactcctaacctcaattacagacttaggtcgaggctagtcccatactgcttcaatttttactggatccaccaatatatcatctttattcaccacatgccctaagaaacttacctgggacaactagaattgcatttcttgaatttagcatataacttgtgctccctgaggcgttgcaataccatctgaagatgtctctcgtgggtctctaccgagtcggaatagattagaatatcatctataaagatgataacaaaatcatccagaaagtctttaaacactcaattcatcaagtccatgaatgtcgttagggcatttgttaatccgaaagacattaccagaatttcatagtgtccgtatcgggtacgaaaagctgtcttgggaatatccttttcccgaatcatcaactagtgataaccagatcgaagatcaatcatggagaagacggtctttccctgcaactgatcaaatagatcatctatccttggcagaagatacttgttcttcactgtcaaattttttcggtaatcaatacacatccgtaaagtttcgtccttctctcacgatcaaaaccaatgcaccccatggtgaggtactcggtctagtaaattttagatccaacatctcctataactgaactttcagctcttttagctctgcaggtgacatcctataaggaacttttgatataggctctgcccctggtattagatcaatttcaaaatcaatttcccgcttcagtggtaaccctggtagctcctctggaaagacatcaaaaaattctcaaaccactggtacatgttccggtcccggtggtggttcctttgtaatatccattacacttgctaggaaaccaatccacccttcacataataaatctcttgccttcaacactgagattaagggaatctgaaatccttgcactttacccacaaatacaaatgggttctcgccctttggttgaaaagttactatctttctcttgcaatcaatggttgcgttatattttgcaagctaattcatacccaaaataacatcaaaatcttcaagatttaactttatcagatcaactgacggctctcttccttccacgaatactggaagggatcgaacccacctgctggagatgaccaactctccagtaggcagtaaagtaccaaagcctcttgaaagcatatgttgggttttgtgccctaaataaaaccctttacaatctgattagttatcaatatacgaaatttgaaatgattaatgtttgcatgaattttacatgctaatggtttaatatgtttattacatttacacacaaaatcagttaaatccagatcatatgtttattcacaatta

SEQ ID NO: 226682 - DNA, 1489 bp, Cannabis indica
gaatttttttttctccttttttcagtatatcttgcctctatttataatcacatagtaggcagttaattactgagttgactgatatttttacaacaattatcccctaaaattgtggggtctgattacatatcacgtaaaataaatacggttattatttgagtatcacacaactgtgattaatctgcttttacagggtcaaaataaaacgtatattaaatacattgcaaaccgtatcaatttgggacgtctcgctgggaataaagcagcggtaaccttgatagcgagctaaagcttttcctatttcttttcaaggttgataatgtaaatctcgtcgcttttactctggaaacatagcaccctatccgacacttgcagtttttggtgacgaggtgatctttttcgtgtgcatgtcttcctatggcgaggtggatgcctcgctatcacttgctttggttcatccgtcaattatactaagtttgtatactgtattttatacactaagtgttttcacagtcattatatctcatccatgtaatcgaggttggtgcctcgtcttatacacatgaagttacatggtttctcgttgatgcacaaggtaacagtttgtatatctttacctcgcataagactattcagtcagccgagttataaatgtactttgtcaattatgcttttaacaagttattctatctcaaatgtaattataattacgtgccttggtacatactcttcctagcttgacacgtgttttcctctgatgtgttagccgaatttcgagtataacaataatcaaattatagacttggatccaactgttagcacacctagaataaacactctaaggaaaataatattcgatcctaaaagcttagattctattattgtataacatattctcaaccactcatgttattaagctcccaaaacagaagttgtaagaattatctactctcataaactttaaggagtgattcaaagaacttaattaatataaataggagttcatgtatactcaggattcagactgatctactaatgattatcatcgtgatatgaattattctttcatggtatataacatagtaatgaaagatattattttatatcggtccaatcatgtataatcaaattatacacaacatatttactacatgtctatccacatatgtgttgtgaattaaaatcacacacactatagtatagtgtatagtaaattgtacttagtaattctatattaaagattccttactttaatacactaccgacttattttattcatattgtataatcttaattctcttgtacgaccttacaagattataccatctccatatgaataaggaatttttagatatttactaattatacttctataattaatgtattcatttatcttataattgcatttcatgtattctatgatatatcatccattaaatactttctcttagggaatacttcccaatagttttgacatgcaattttgagt

SEQ ID NO: 226683 - DNA, 4425 bp, Cannabis indica
ggaccaagctaatggtgggcaagatgggctcactccttctatgcccttgggtgaatgtgaggatcaagttcgcatgaacgaagatctagctctgtctcagttctttaaagctcaagaggagttaatgaatgacctcaaacattttggcaaacttgatttgtatgagattcgcaagataggaggagatattggtgtcccggcttctttcgaggttaacgagaggacgactccttttaagaaaaggaagttcgaatcgtttgcttctctttgctcaaggcctcacaaaatccaccgcaagtaccccggtgttgttcgcgattttccctgggacacgaagcaagatgagaattcccctgatatggtactggatgagccttctgaggatagttctaactcaccaagccgctccggtattttgaagaatcccttgattggttcatttgtgatcgatgatgctgtttcgagtgggtctgcttactctcacacccctgtggaggagaatgtggaatctcctccacaggagccatgagaggtattgcttggaactgtagagggttagggcatacctctacagttcgggaattgaagtccctcatccggtctcgagctcctgattttctctttcttaccgagcttaaggtggatgctaatcctctggtacgtattcttaagtccatccatttttattttaatatttgtgttccgtctagaggcaatgcgggtggtattatattggcttggaaggttgggtttatttttgaatgtatttcgtgttcttgtaatcatatctcggggatagtgtattcggatcccgcttcccacccttggctcctttcgtgtgtttatggtcccccataccttcatgctaagaaaaaattttggtctgagttcttgaaaattggtgatagatttggggggccttggcttatcttgggggacacaaattttgttcttaatgcctctgaaagggaaggctcgtctggccatgacccttttatcccgatcatctataatcttatggacaccagaggtcttattaatatgccaattcaaggggacaacttgacctgggataaccatcggtctgggaggcttcatgtgaaatctgctttggataaaggtttagtcaatggagcttggctgaacttattccctagggctatcctttgctcgacccagactagtaattctgaccataggcccttatgccttctgtcagatggtccggcgaccaaggttaaaaggttctttgaatttgaggaaggatggactcgggaccctagaagcaatctgctggtggccaacgcttggaagtcggttaatcacaattgggcaccggcgagaattttcaaaaaagttggcgccaccagggtggctctcctgaattggaatcgatcccaatttggtaagctcgatgtaactattaaagagcttgaacagaagcttgattatctgcagagtctcccggctgggtctcgggactggaatcaggagtgtgaggtccgccggaatctgaatgagtcaagggaaaggaaagcgatctactggaaacaaagggccaggatttcttggctcaaagatggggataagtgttctaaattcttcttcctttcggctgcaattaagggtcggagaaacgccattgagagtataatgaataaagataatgtatggatttccggccgcgaggaagttgggaaagagtttatcgatttcttcaagggtatctttacggagagcgcttctagtatggattacaattactctcagttgattcatgagcggttcccgcaagaggagttggaatgccttgttagtactcctagtgctgatgagattaggaggactctgtttgcaatgaataaccataaagccccgggtcctgatgggatgtcggttcttttctataaacattattaggaatctgttggatctgacttctgtgatgcgattcgagacttttttgagaatggtaatatgcatagaggaattaatgccacaaacattgtgctcatcccgaagatccaaaatcctattcgtaccaaccatttcaggcctatctctctttgcaatgtggtgtacaaagtcatcgctaagatcttggctaacagaataagacctatccttccttcctttatctgtccaacgcaagctgcctttgtcccgggtaggaacatccatgataacaatgtcattgttcaagaaataattcactcgtttaacagaaagaagggtaaggagggtttctttgctataaaaattgaccttgttaaagcttatgacagattgagctggagtttcattgaccatgctctggattgcatgggcttccctctgaaaatgcgttcttggatttcccaatgtatctccactaccacccttaacatttgcttaaatgggggccaggtcggccagattttgccatcatgtggcatccgacagggtgaccctctttccccttacctgttcatctgtgctgcagagattctatcgcgactcctggaagaggatctggggaaaggtaattttcaagggataaaattaagtaggggaggtccaattattacccacctgttttttgcagacgaccttatcttggtgggcagggcaaatataaatgaagctatgagtatctggaattgtttggaaaggttttgctcttggtctggccagaaagtaaataagctcaaaacctcaattttctttagtaacaatactcctgatggaatgaggagagggattaaggaagcattgggaattaatacgccagaaggggcaatcaattacttggggctgcctctgttcagatctcgtcagaaggatgctgactttaattttatcctggataaccttacctctaaactgcagggctggaaggctaagaccttgtcaaaggcaggccgtgcgaccctcattaagtcagtcggcctggcaatgcctatttatgccatgcaaaccacaaaactttctagtcgtatggtctcgagaatagatggtttagtccggagatttttggtggggttttgaaaaaggtaatcatggtcttcatttaaaggcttgggataagctgtgtctccctaagtctttgggtggattaggttttcggaaaacaaaggagatgaatctggcttttttagctaagtggggttggaatttggttaacggctctcaatccttatgccataaaattctggaagccaagtatcttaaggggaaggatttcctacattgttcctataaggactcggactcttggttctggaagaatgttgtgaaagccatttctatcctaaagaaaggggcctgtaaagctgtgacgaatggaaggacgactaaaatttggagggatccttggattccgcatctgaaaggttttattccgaaaccaaggaatgggatttcaaccaacgacaacttcgtagctgatcttctgcttgaggatggagggtgggacatcagtaaactaaatggcctctttgatagggaaacagtgtctgcaatcctcaagggcggaactcctacggggttggggaatgatagatgggtttggaccctagaaaaatcaggtctatttacttgcaaatcggcttatttgacgcaagctttggatagagctcagcagtgtgcggtagctccggcactttggaacaaattgtggaatagcaaagtcttggaaaggcataaaatcctttggtggtgcattctttctaatgcgctccctgtcagatcgatgattggaagaagattccatgtgcaggataccagctgtcctttgtgcggaataggggaagaaacaatggaacatcttttcttgtcttgcgatgtgtcaatgcatttatggcgctcttcaccgtggggcatttaccccatatgcaatgcggggattcgtgcttgggactgggtcaaattcatttggaaccttaattctagggggattcgagtggatgaggtcttcttgtatgcttcgattgtcgttgacactatttggcgacttcgtaatgacattacccataacagtgctcatctggatgtcttgaaatgtattgatgtgatttgtatttcttatgcagaacttcatgatgctatcttgccttcttcaccccctcatttagagggtatctggaagcctcctcctcaagattggataaaactaaactgtgatgtaagagtaggcctggatagtatgtgcattgcggtggtagctagaaatcatcaaggttctgtggttcggattcacacggctcagttgaactttgtggaccctctgtgtggagaagctgctgcttgttgttcggctgtggatttggctcttctgcttggtttcaaatatgttttggttgagagtgattccagaatagttatcaacgctatcaatgggacggagtctcactgggcgattgagaactatgtctctttttgtgttaa

SEQ ID NO: 226684 - DNA, 1182 bp, Cannabis indica
acacacacatcctctttaacaactatcttcactcattccaaacgtaataattatctaaattcctctttagatcaccacctaaagaagtagtacacaaaatcttatatagacaactctatattaggggatgttgagaatcatgagatttcatcttaaaactaattgatgataagtggagtagcacatgctcttatatatgactcaatattttactatttattccatgtgggataatattcacaataaagaatacctgaattaattaactgaaataactaacttgagaattaactggacaaacatgttccatctgacagatcactagacgagactagcagtaacaatacaccaagtgctaaaatcttccacacaaaagcatttacaatataattaattttagagcattgttattaggtaccagtggtgcctagcaccttttcgacatgtcgcgttgcgattggctagcgatactcgctaaaaactattatattaaactatatgggactcgatacttagttagaccaatagcgatattgacacataggaggatgctagacatcactactattgataagtttggaatctttgttatacacttatattaagctataaactattattattcaattagttaccacgtgatataaccattaaccattaataataatactcatggatgaactcatctactcaatccaacttaccacactaaaagtacacctaactcatgttaacacacaaatatctttctttaaaaaaaaatgagctatgaaatgaaggcattttatgaaatgatgaccttgacatgaccacatcctcttctttcttcacaattattatttgtagtttgccataataatgagtatattttcgaatcccataaagtaatcacttaacaagttttttctttttaccatgttacgactacgaccctttctttcttcaacgtaccacaaataataagaagaaactctagcctttgtaccaatcaaaagaaaaaaaaaaagacttgagttttgggaagtaatggcggttgaggctgagattgatcggttgccaattgatttgttagctcatatctttgttctcataacttcttttactgatttggcccagtacgtaatttgctttgttcttatcttcataataatcagcttctaaagctctgtttttttttttttt

SEQ ID NO: 226685 - DNA, 2290 bp, Cannabis indica
agttcctggtaaaataacttccaacatatatgcataacattatactaatcttaccttgtttctgaattcaggtgtgttggccaacctgagtggaacaactactcagaagattacaggcccctaaatcacatcgttcataacacggtaagtgacacgctaaatcacaaccgaggacttaggctctaaaccaaaagttttcctactgcaagttaacatggaaattctctagactaacaaggaattaccccaccaaagctctgaaactaaacccaacacaaaaagtttaggaaatcggtttttgatccggttaaccaattttacagggcctgtaaccggttcttgaaaacctagccaattcgaatccaaaccttaccaaaccttccagacctacatattataccccaataaacataacccaagcaacagaacaacataacatgctcaaatttaaaattcaccattaaagagccaagcttgagttcttaaactgaaagcttgctcaaaccttataaccgcccttcaatctacctcaaatcaacataaatgatcataacttaactccagaaaaacaacaacaaacatcaacagcaacaatagtacccaaacttacaatttcatccaaaaattctcaacttaaagcttaagaaactaaagaaagagatgctcgaagcttaccttgacttggacaaacttaaaacttgctgaaaatcactagattttatgaagaacaatcaataccctagctggttctattgggtttgaaagagagagggtttcgagagagagaaaagtgtttttctcaagtttcttatttttaataaaatgagataaaaatttggttttatctaaataattaagagataaaatcaaattattcatttcaactaatgtccactaaaggacaaaaacaccataaagcaaaatgaccattttgcccttcacataactaaaaattataaaatcacttagggatattttggtcaattcaaaaatctcgactattcccgacattcccaatgtctaactatattgccccgctatactaaaaatactaagatgtgattctaatagccaaacatccgttccaatattgtcgggcacaaaacatgcaaaaatatgaaattccatatatgacatacaaaatgcattttgaattcaaataaatctctgtaaattgataattcataactaatatgcaagtttcatcattaaactttatttatccccccttaaaaggatttcgtccctgaaatctaacctgaacaactctaaatactaagccctcatgtcagattctaactcctaggtggcttcctccaccctgctatttctctagaataccttgaccaaagctatgatcttgttttgaagaaccttatcctttatgtctaggatctgaactggttgttcttcgtatgataagtatggttgcagctaaagattttcataactcaacacatgagtaggatctgaaacatactttcgaagcatggaaacataaaatacgttgtgaacaactgaaagagctggaggcaaagctaaacagtatgccacttgtctaaccttttcgagaatctcaaaaggtactgtaaacctagggcataatttgcctctattcctgaaacgtttgatctcttcatcggagacactcgtaggaacacatgatctcctacccgaaactctacattttctgtgtttcagatctatataactcttttgcctactctgggaggcaagcatttggccttaatcttttctattgcttcattagttcattgtactgattttggatcgagatatttcttctctctcgtttcatcccagtgaatgggagatctacactttcagccatataacagttcataaggagccatccctattggactctaataactgttattgtatgagaactctatcagtgctagatacttattccaggagccctcgaaatccattacacaagctcgtaacatatcttccagtatctaaatagtcctttcgaactgtccattagtctgaggatggaaagctgtaatgaatttcagtttggtacccataacccgcagtagactttgctagaatttagaagtaaactttggatctctatccaaaactatagactttggtgcacatgtaatctttctatctccttgacatataattttgcatattaatccactgtaaaggttgtttttactggtagaaaatgtgtagatttcgtgaatcgatccatcacaacccaaatttaatcgtacaaacccgttgttctaggtaatccaactacaaagtc

SEQ ID NO: 226686 - DNA, 2924 bp, Cannabis indica
agggtacctctgctcgtactcctttaattgtcgagaaggataagctattacctttccagtttggataagaacagaacccagacactgtcacgaggcatcacaataaacaacaaacttttccttatatgaaggaagagtttatactggagcggtaatcaagcgctgctttaactcctgaaaacttttctcacaccgatcagtccaaacaaacttcaaattcttttgggtcagttgggtgttgcaattttctagaaaccctcaatgcatcgacgataataaccagctaaacacaaaaagcttctaacttcagtagttgattttggtgttggccaatctcgaacagcttcgatcatggccggatcaaccatgatcccatttttatccactatgtgccctaggaaagagacacgtggtaacccaaaatcacacttcttgaacttaggatacaacttgtgatctcataaccattgtaatactgatatgagatatagttcatgtttctcttctgactcaaaacaaacaagaatgtcatctataaacactatcacacatttatccaggtaatccttgaatacccgattcataagatccataaatgtcgctggggcattggtgactcttaatgacatcaccagaaactcataatgaccataccgagtatgaaaggtagtctttgggatatattcttctcgaattctcagttgatggtaacctgagcgaagtttgatttttgaaaagaccgtcttacccttcagttgatcaaataattcgtcaattcgtggtagtggatacttgttcttaatagtaagcttattcaattcccaataatcgatacacattcatagtgacccatatttcatcttcacgaataacactggagcacccaaaggagaataacttggtcttatgaatcccaagttaagtaactcctagagttggatctttaattctttctattctgctggagccatttggtatggtgcctttaatactggttctgctcctgaaactaactccatcacaaattcaatttctcaggaacgtggtaatttggtaagtcttcaggaaatacatcaaggaattcgcacaccaatctcgtatcctcaggtccagataacacaggttgtctggtatccactatagtgactaggaatcccggacaacctctgcacatcaaatcttttgctcttaaaagtgttattttagttatgcgcgtcccttgaactttacccacaaacactgctagattggcactgtcgggctcaaacaccaccatcttctgcttacagtcgatcgttgccctatacttagacaggaaatccattcctaggattatgccaaaattagacatttgtaactcaattagatttgtggttaactcataaccgttaatccaaaaagacaaggaccgaatccaccgagtgaatacaataaggtctcccgaggataacatggtgccaaaccccgaagcatatacatcacattgtttatgaaaactttcaattactctactcaacacataagaaggagtagctcccgaatcaaataacacagaataagaacaaccgttaatggataattgacctatcaccactgacagactagctagtgtcagtctgagtcatagtaaatagacatctcgggttctggttggtattcttctttggctcttctttcttaccctgtggacaatctctaataaagtggcccaccatgccacactgaaagcaagtcttggcccgacactcaccctgatgatgtttctttcattttggacactctagatatgatctgaatgaggacccgtggccctgacggccatctttgtgtccccaaaactttctatcactcgtcgatgtcctagaagcttcagccttccatttgtgattagggttaccaccgtcggtccccttactgacaataccacccacaggaggattcgatgtcatggcggcatcctttgcagtttgctctttcatcacatgttgctctgcctcttcagctatcaaggctaattcgaccactttcctgtataaaatgtggtgagcaatggtaattttcaagttccgactgattgtggcattcagtcccctcacatacttttatttttgggtgaagtctgttggtaccaaatcaccagcaaacttagatagcagatcaaattccaaggtatactcacccacaatcattttacctggagtcaacttcacaaagtcttccatatgtgaagtccttacaacgatgttataaattttttcctcaaatagactcttaaactcatcccaagtcatagtactaacatctcgggtctaccccacaatgtcccaccagacgcgggcatgatcttgtaacataaatgtagtacaatttattctttctgttcccgtcacccccatattatctaggatgttgcagcttaacaaagcgttcaaatatggaatctctatgtagcagtataaatcctaggttacccaccactcgcataggagctggtggtaacacttgttctgcgggagctgccgatgtcggttgcctcgaccgacacaattcatcttcttaatgaagtatggtacttcgtatctctagaaaaatctgttgccaattagcaggcggattagcattaccaacccccgcattatcccccggatttagcggaggcgcaagcagtgtcggtggattggtttggtcaacaccaagctctacatgctcgccctgtggtctagatgtttgcggagggtccattttcacaaacaaccctgtaatcaacaaccccggtgagtcagttaccaagaccacacttacgcacttattgcctttaaccctaactcaactattctatttcttattaaataaacatttatcaattatgacagtaatcatagatttcatatcacaaatactagatgctaacatactgcctaaaa

SEQ ID NO: 226687 - DNA, 1665 bp, Cannabis indica
tgacataaaagtaatggatgacttcgaagaaaataatcctcatgatggaattattcatcgccctagaaaagagccattgagctgtcagggatctttttgagtcatcgtgtgaaccgactgcaagcctcgggaaaacccaatattggggtccttggcttgacggaccttaggcaaacattgaccagtcaattcccaaccaggttgacaaaggtggctcctacgacccaaccaggtacataccaatcttggagttagaaaattgccatcttgggcgtcgattggaggaagcaaaccggtgtaatgcgaaattagagagtgaaatagccgcagtaagggcagcgcagaagaatagttctcgaaatcaacttgaccttggaagaagagattcacaaggcaaacctcgcaactcgcaaaccaaggggcatgagaaaacccagagatatactcaaaactctcacgaggtgcaacctgaggaaacagaagaaaatctagggacacagactgggatatgtggaacatcggacgaaaatcgccaaccctctcttcaggatcataataaaggaactcacttaaacccttatagggagaataaggtgaatcaaaccttacgaggaagagcaaggtccaacagcaatcacgataggagtgacctacgagagcatctaaaatcgaagaagcctgatcttcatcaatgacttggtccaaaataaaaggattcactccatttgcgaatggacgagttggaaaataagtttagaaagcatcaagctaggaaacccagaagacaaccgaggtatgattctgttggagaatttgaattgaaagccttaggatcaaagagaaaggatgattcgaaaaggttacccaaggataagaaacacaaaaaatatatccctctatatgctaaatatactgagcttaatgaaactcaggaaaatatctaccttgcacatgtacgagaagtcatttttaccgagccaaagcccatgaaacatgcgaggcgtaaaagggactcaactagacggtgtgaatatcatgaggatattggtcataccacggaagagtgttgtcagctgaaagatgagatagaaggtctcatagcgcgaggatgctttcaaccatatgtaaaggggcaagacaatgtccatgatcagcttgatctacccaataactcaaccgactagggactataaccctcctctgtaagaggaagggacaccccagttatctcgagagggagcgagtcacaagtatacaaggggcagttgatttggtaaaacaattttgtaaaaaaattgcgatgtgagtagatattggcccactatggttgccatatcaaactaccacgtggaaagctggtcgtcaaccagtagcagtcaaagacaaacaactaaaactaggattacgtcacctggaaccccgggatatgtaagggattgaccctggatattgaaacaattgtgggagtatgttagggattcaccctgaacatcaaaacccgttttatcaaaaccagatgattttggaagattgataaaatgaacgattgaaccgggaagttcttatgagattaatgattgtaaatcacattgttgatgaaatattttaaacttcaactgtgaataaaataatcatttctttcaacaagtaattataaagcgtaaa

SEQ ID NO: 226688 - DNA, 2340 bp, Cannabis indica
atccaagaatcatggaaaacctaaatctgcaatgaaactctcaaagaaggaaggaaggaaagaagtaactaaggcggtacaggctggttcgatggaagggatagctgaaattgaagccctggagctatctggtgaggatgcgacgagagacgaaaaccttgctctgaacgatgtattacaacctctatcaccaagatcgtctctggttgcgattaagagacaagaggaggttcgtaatgactttgcagactttatccaagcaaacaaccaatgtaatagtgaaattgcagcatgtaagaattcgatcccacctattttgaggtccaattctgtagttcgaaaccttgagaattcttttaagcatgctaatcagaatgtgaacaaagtgagtattacaatggatgatattgaagatgaaattcattttcggaagccatccatagtatgctatgtgttaggagtgaatcccccactccatattttggatggatttgtgcacaggggcaggggaaagtagatcgagtgaaaatgctgtcttatggcatttttatcattcgatttcactctcttgaggacagggaccagatcttaaatggagggtacatattctttaatagaaggccggtgattatgaaaccttgggacccaaatgaaaactataagaaagaagatgttcaaaaggtacctatttgggtgcagctggaggaattggaattgaagtattggggtcagaaatcactcttcaagattgtagctcaagttgggaacccgattatggtggatagtgtaactagagaaagagagagactgagttaccctagaatcttagttgaagttcaaatggatcagaagctgccagatttgttggagtttgagaatgagtttggcttgaacacttcggtagggattaaatatgaatggaagcctatctcttgtacacattgttcaggggttgggcatgctgctacagagtgcaaaaagaacagtaatgggaaacagcagtggattgttaagagtgacaaaagatagctaccttaggtgtatgaggaaggatttactaaagtgcacagcaagaaaggtagtgctattcgagatgatgcagagaacaaaggttctggttctggttctggtaagactaatagtactgaagtgaaaaactcgttccaggtgcttgaggaagaggaaatggttgctgaaactgaagaacaagagcagactcatgatttgttcaagacaggagggggggagatccctctctgtctaatggataaactactatgctagaatgtttgcggagccaacagtcaacataagcaacaaatgataaagcaatttatcaattctcagaaagttgattttgttggtctccttgaaacaagagttaaggctccgaagctcggagccttatacttgaatgtgtttgtaaattggtatttttcatctaatatagcatggcatgcaggtggtaagattgtcattgcttggaatccagatagatttactgttgacatccttaaatccactagtcaactaatgcatttaaagttgagaacaactgaaggatttaatagtcttttgactgtgttttatgcatcaaacaatagagctgaaaggaaagtcctatggaaggatttgtgtgagctgaaaacaaatgagaattggttgttaatgggggattttaatgatattcttgccaaagaggagagaatagggcatcggattaaaactcatccggacacaaagttcttgcaatgtgtcaatacttgtcaagtggaagatgtcaaagcaagtggaaatttctttacttagtcaaacaagcaacatggggaagatagaattttttcgaagatagatagaattatggctaaccaatcatggatcaataagtatgatcttgttgaagcggtgtttctcaatgaaggtatattcgaccatacacctggaattttgactctttatcctaatgtggttagtgggaagaagccttttaaatacttcaagatgtgaaaatcacatctgaagtatgaatttgaattaagggaagtgtgggggcagcctggagaaggctcaaaaatgttccaagcagtgtctaagatgaaacagtttaaaatgaggcttaaaaagatcactaaggatggtttctcaaacctccaagcctcggttataagagctaaggctgagttagaattgctacaaaaccagattcagatgcatcccctggacagtgctttgcatttgcaggagaaggaaactcgggataaactgatcaaaatacagggtgataatacctccttcttgtagcagaattctaaagcaaattggattcagcaaggtgattgt

SEQ ID NO: 226689 - DNA, 1557 bp, Cannabis indica
tgtattttctcaaatacgctatcatcttttccctcgagcctcatactctccgaatacatgatttaccaccagttgtgaatcgctgcatatctcaatgtgctcagccttcatttcccaggctagctttataccggcgactagagcttcatattcatcctcattattggatgctttaaatctaaatttgactgcagcgtgtaggtgctaccctcaggtgtgacaagggcgatccttgctccgtatagttgatctgtagccgacccgtccacttgtagcttccaagtcgacttgtcttcactgttactaggctaaggtatttctattttccattcgagaacctagataacttagtgctattgagaccatgattcctcaattaaggcttgacctttaatcgttgtttggggttggaagataatctcatattggcccaactccactgcccatttgagcaaccgtccaaaagcatctggcttttgcaatatttggcttaacggttggtcactgtacaccctaataggatgagcttgaaagtagggcgttagctttctcgtcgctagaattaggaaataggtgagcttttctatcaatggatatcggccttcagtctcactgagtctttactgatgtaatataccgggtgttggacattattttcctctttgatctgtacggcacttacagcatgctctgtgacagctagatatatcccaagttcttctccgtccagaggttttgagagcacaggaggttttgcaagttgcttttttagctcttgaaaagccttttcacattccttcatccaaacttgtatgttcttggtctcgtggatgcatcttgatttgattgtaccctgaataggcgtccatgaagcttaatatttcgtgccctgctgttgcatccacaagctgatctattcttggaagtggaaacaatcttttgggcatgccttgttgaggtcagtgaaatcaatacatacttcccatttcttgttcggcttgggtactagtatgggattagcaacccaagccaggtagaaagcttcaattatgaaattattgtggcacagcctctcaacctcttctttcagcgctagggccagctccttgtccaacagtcttcatttttgttgaacaggccaaaaatttggatcaatgttcaggatatgtgaaattatagaaggatcgattctgaccatatcctcatgcgacaaggcaaaaatgtctaggtttgctctcaggaattttatcaacacttattttacttcgagcaacaaaccttttccaatcttaagctttcttgtcggaatatttgggtcgatttcaatttcttctagttcttccactagtccaacattgttgtttgggttcccaagtcgggaatccacttcttcacccctgccttgggcagttccctatttggtaatgttttttcccttatcaagattttggctagaggatacttccattttagctttgttagggcaaggttataacattccagaggaacttgctgatttcctctcaagcatcccaccccattcattgttggaaactt

SEQ ID NO: 226690 - DNA, 1310 bp, Cannabis indica
ttactcgaacacctccaaatatgtgtcgttaaggcctcatagcgagtgtatggtcgtgacattttagcgttattagccatctttttcactttctcaacttgttcattcgtaagctttagtgttaccattgttgttttcatcttctcaagttcttctgcagtaggttgtttcaacaaaaacggcatattacagaagtctttcgagtgatcaaagcgcagtatgactgccgattctccaactcgaaatgccttcttgtccaaaataggtatgttttgtaatggtagacctcgtgctattcgagcccactcggtcatgaagtttgcggcgcttagtccgtcagtgatgatgtgtgaggaggtaaagcttaggcataaaccaccacacctgaatttagtgagctgcaccaatagaataggtagttcgtgaattggattagtgtcgtctatgtatgggaaaaggaagcgatcaaagttttgagtgggtgtgaagtagttatctgctccaaaatcaaccaaatctgcgttcaactcggctgcaacgaaaatggcaccttgcccgttgcataggagctcgtaacgactatcgttggtggagcgcaaacgaccagccaggggatagaaatgcactagaatttgactcaatgaattgattaggatttcagtgatggtttgaaatggcgttggtgttggggttggcccgtagaaatagatagcacgagcataggtggttgaaccaatttgatcaaattctgacaaggacataatcccagtccaagttgattcagccggagtcaccatcaggtttcgtttgattatcaactccatgtttgcatggaacgtactcaatagagagaagcagacagtgaatatataagagaagtaaagttgtggttttgttgaggaaaaacaaattgagatgtgttggcgtttggggtgtgtttatatagaggacaaggagggtacgaaacctaacatggcatggatatccactggtgtaatattcgttcgtgtacgtaatagcattgtaatgcaaccagtagaaaccaacgtgccacacgtgaatcgtacgtgttctatacaaattacatatatttcgaggtaagaattaatattaactcggtcaaacaaaataaatgctctaaaacggtagtctgtgtacagtaatgctctaaaacggtaagttataactcgcctagtcatggttagctgtttcgttataatcctcttagaggaaaacaaacaaatacagaaaaaaatttatcatgttgtgacataattaatgaacgtgcacacatagataattttgtagtc

SEQ ID NO: 226691 - DNA, 2686 bp, Cannabis indica
tttcagtactgctgctgctaaagcagaaacttgaacgacagtattcaacttacgactgacctctcaacagctggaggcgagctgtgggatgatttacaaggttccccggtgagaaacatcagtgagttcaatgaaatagctcaagtgtttgtacggaaagaggaagaaaggaatgagatgaaattgttaaagactggcttgggaagtaaacccagcactatctcagcaagcactgtctcgacaaaggctgacaatcgaggtggctctaacaccaagagaaaagatgactctagggaatcagccaaagataagaagaaatagaaaaagcacgataagtatgtgccaatacacactatttataccgagcttaatgaaactcgagaaaatatctttctcgccaatgagcacagggttgcattttgcaagcctgagcttatgagacatgtgagatacaaaagggatccaatgaaattctaccgatttcataaggacatagggcgtacaaccgaagaatgtcgtcagttgaaagacaagatagagagccttatctcacgcggttatttccaacagtatgtaagacaacaaggtaatggacaaaaccaaccgaatcctcccaataacccaagaaaccaaagattacaacctcctcctgtagaaggagaggacattttggtcatctcaggagggtcgcatctcgctggagaaagcagtaatgcccaaaagagatatgtcagtgaaataaaaaacgagggatcagtttttgctctggaatcttctaagaaagtcaagactgaagaacctccaattgtatttttggaggaagacacaaagaacgtgaggtatccacacgtcgatcctctcgtcattacaattcagctcaccaataaaagagtaaaaagagtattggtggacaacagaagctctataaatatcctttacaaggatacattgaggaaaatgggattgcaaaatgcaaaattaaaatcttgtatggtaaatttgtgtagatttattggagatagtgtcacgagtcaaggcatcattgaactcccattaacagtaggcgagccaccattatccacaacattgatgcaagattttctaacagttgacctaccgtcagtttataacatactgatgggtcgccctacactgattggactaggggcagttagttcaatctaacaccagcaggtgtggatgtagtgtgaggtgaccaactattggctcgcaaatgctatcgtgtaaaattgtagaataaaagggccaaccattagtcaatggtagtcataacggaggaagacgaggagcaagaagaagatctagacccttgaattcaagacaaaaggaaccaatttaaaccaatcgaggaactagaagaagttgttttagatctaaaaaatcccaataaatgtgtgtttcttgggaaaaatttggatgaaaaactaaaatagcaactaacaaattttctgaaggtgaactaggatcaattttcctggagccattcagatatgatagggatggaccctaaagtgatttgtcaccatttgaatatcaactctaattacccagctaagagataaaaaaggcaaccattggattctgaaagacaaggggcacttaaggaagaaatggacaagttattaaccaacgactttatacacgaggcattctatccctcgtgaatattgaaccctgtccttgtcctgaagccaaatggtacttggagaacttgtatcgacttctcagatctaaataaagcatgtccaaaggattgttttccactaacaaggatcgaccagttggtggatgcgactggtggacacgagctgatggcatttatggacgtatattttgtatataaccagatcaagatgcatgtcccagatcaggagcatacaagtttcgtaaccaacatgggactttattggtacaaagtcatgccatttggtttgaagaatgctgggataacatatcagtgactagtaaatggaatgttcgaaaaacaaatagggaagaacatggaagtctacgtcgacgatatgttggtaaagttgataaagtgtgaagatcacacaaaggacctagcggagtgttttgaaatactcaaaaagtacaacatgaaacttaacctaaagaagtgttcctttggagtctctttggggaagtttttaggattcatagttaacgcgaggggaattgaagcgaatcttgaaaaattaaggctttgatagagatgccatttcctacaaagcagaaggaagtccaagccttaacagggagaatggaagcactaaacagattcatctcgaaatcaactaacaaattcctaccattattcaatgtgttaagaggcaacaaaaaatttgaatggacagacgagtgtgaggaaccctttagaggcataaagaaacatttatcaacacctctagttttggccaaaccaataactggagaaactttatacctctacttagttgtctcagaaaatgcgatcagtgtagcattggtgcgacaagagggaaagcactagcaactcgtttactatgtatcgagatatccccctcttgaaaacttgccctatgcttaaaccatccatctcgcaaattgaagccttacttccaagcacatcccatataggtgttaatcgatcaaccattaaggcaagttttgtcaaaccatatgt

SEQ ID NO: 226692 - DNA, 1884 bp, Cannabis indica
ctggcaatatcattgctatcccaacaccggatccgttcgtttgactcttcgtcaatcaataccttccatgctggggttcgcggtactggcacgcttgcactagcttctgcttcattgcactccgttatgaagtctgctagagcttgtccttttatggaaatacgtggtacgtagtgtatgtcgaactggctcaattccattgcccatttgaggagtcttcttgacgctttcggcttctgtaagacttgctgaagcgggtggtttgttagtaccctgatggggtgagcctagaactagggtcttaacttccttgaagccatcaggaggcaaaaaactaacttttcaatcaacggataccgtatctcggtccctatcatacgcttgctagcgtagtacactggatgttggaccttgtcctcttctcggactagggctgcgctgacagcattctcagagacagctaagtataacagcaaatcttctccgtgaactggcttcgatagaatcggtggtttagccatgtgctcttttagtttttttaatgcctcctcacattcttcagaccatttaaatttttgacatttctttaagatgttgaaaaagagatgcacttgtcggttcatcgggaaatgaatcagcttaaggcagcaacctttccagtcaagctttccacatctttgtgcttcttgggggaaggcatgcttagtaaagcttgaattttttcacggtttgcccctattcccctttggctgatgatgaatcccaaaaatttccctgacttaacctcgaaagtacacttctttgggttaagtttcattccatacctccggaccacttcgaagcattctgcgaggtcgtccgcatggttcatgcatgctttggacttgactagcatatcgttcacataatcttccatatttcttcctaggaggcctttgaacatccggttcaccattctctgatatgttgcaccagcattttttaatcgaaaggcataaccaggtagcagcatcctgaagctagtgcactcttgatctgcaacgtgcattttaatctggttgtagctggagctggcgtccatgaaggataatagcttgaacccaaaggtggcatccaccatttggtcaattcggggaaaagggaagcagtctttttgacaagccttgttgagatcggtaaagtctatacatacccaccatgtcccatttggctttggcaccagtaccggattggccagccattccgggtagtacacatctcggatcaggccattggttagcagcttgtctacttctttttcagggagtctgcttttactgggtcaaggggacgccgcttctgctgtactggcggcatatctggattaacgtttaggacatgggtaatcacatgcgggcttatgccggtcatgtctccttggcaccacgagaaaacatctgcgaccgcccttaatgcttcaataattttgtctctctccttcggctctaggctttttcctaggcggaggatcttggtagggtcgaggtcgcacacttgtacttcttcgacgtcctccataggttctacgattttttcggttcccacacgaggatccaactcgtcctcttctacaaatcctggctcaataccctcacggaccatcaacaccggcaaatgtgttgtaacattataccactgcctgctctttccctggtttccccttacagttcctactccggcctcctgagtggggaatttcaggcacaagtgccgaatggatgtgattgtgccaaaatcaaccaaggttggtcggccaaggattgcgttgtatgcagttgggcaatctaccaccacaaaggtgcagtacttaaaagtactctgaggagtatccgggcatagggtgac

SEQ ID NO: 226693 - DNA, 1672 bp, Cannabis indica
gtttcaacgaaaattttaaataatttttacgatattttttgtattttatttacaaaaaatacggttctttttatgttagtaattttgttaaatttgttgtttaatctgtatgttatctgtatgttgattttttgttgttattttgatgttattttgatgttacttttatgttattttcttattgattttatgttgttttcgtgttaatttttgaaaaaccgtaaaaatgtaaaaaaaaaacattctttgaacgtaaaaatgtaaatattttacaaaaaatggtgtcttatgtaattattccttaattaaattgtattaccattaccctttttaaaacaaccataagtaaaatttatatttaatacccattattccttaagtactcaacatattatatactaattatttccttttctctttgaaaaccttttacttatttttagacaaaaaaacatgtcaaaaatcttaattaattcaaattatatactattttagttatagcataaaacatagtacctataatctttatttaacttaaatttgaccaaaattgtgtttatctcctttaaaatattacaatccccacattcaacagtactcattcataagtaccacttaatcatacatttattaataatcaaaatttaattaatattagatagatagatgtcagagaaaaataatagtgtatgtcttattgctttagcagtactatatatagctattcatattagtatctctcaatactaagaaaactataaaactcatacatattaaactttaattacccatttatttcataatcttcataagaatgaaataaatcaaacttttcaattcatatttaatatcccatcttccattgattactacatccccatatttataatttatacatcaaggctaaaattattttatatatctaattttagtaaaaatcttatttatagtcaatacaaactaaattaatattaattaataaattataatccaattcaattttttgacacaataatttcttatttattatttaaatagatgggttggcaaatctcctaaatattaaagtcattcgatttattataaaaattatttaaattggtatcttcctatacaactaaaaaacaaaaaactcaatacttcattagcctgtactgcccattttatttgaatattttccaatataaaacgacaaatattcccaattcactattattgtccccatctcccattgattacaaaatctccacagttataatttatacaccaaataatattatgttatctataataaaactcatatttattgtcatttgtaatttctagaaattaaagtaaaatgaatcatctaatataatcaccctccaatttgagtattatagtttaatttgtccttattttttgattatataactactattagagcccattatgctactctatttacttaattaattttcatattatatccttagagactgattactcataatttttacaattttccctatttgcaaacagatagatctcaatacatcctaattaaagattagtccaatcacatctattatcatttaaatctttaatcctcttaaataataccgaaaatgtaacacccaaatgtttctttgccttattttacaaaatactaactttgatgcataaattgaaa

SEQ ID NO: 226694 - DNA, 1138 bp, Cannabis indica
aaacaaaaactggcagacttttcaagaatgtccaaggttcaagaggcgccaccagggcgagtgtcaggccagggccttctttcagtcaattgaagaggaatttcccacagatgctgcgaccagaacagaagaaggatgatacacttgctcctgctcgggtgtttgctctgactcaggccaaggctgatgtcggcccttccaccgtgataagtgagctctctattgttggtactttattgattgtattgattgactctggtgcaacacactcttatgtttcaagtaggataattgagagtttgaataggcctagtgatgtactttcaagaggcttcggaactttactgcccactagagagttggttatctatagtaggtgggttcgatcccttccaatatttatggaaggaagggagctgtcagttaatctgatagagttaaattggaagattttgatattattttgggtatggattttgcgtcggtcaactctttaatcaaatttgttgattgacgcaaaagttaaccctcacttttttgcttcggctgttaactgacgccaataataactaatttgcgtcagttaatactgtgacactaaagcaaaaacttacgctaaagatgacattttttaaaaaaaaaatgtgggctcgaatttgcgtcagttttgctcagacgcaacatttagcgtcagttgaagggtttttgcgtcggttatgaactgacacaaaatttgcgtcggttcacaatcgacactaaatcccttaaaaaacccagacggatcgtcgacgatggagcccaaacgacgaaggccgccgcttgcaccattggctcggacagaccacgcgtagccatcccatcacggtaatgtctctctttttccccttctgatctccctccctctctctatttatttttctcttttgatcgctctctctctttcaatctctccttttctcattttatgttggttgttgttttagggttgtggtggtgcgatggccatgggtggtggtgtggtggtcgcgtgcaatgttgatggtacggtgctggtagtgcggtggtttaaacttgtgcattttgggtttaaatagttgtttaaatctgtgtatatatggtggtgtgagatgtataatag

SEQ ID NO: 226695 - DNA, 1607 bp, Cannabis indica
aaattagtcaagacaatatttgtcctaaacaagacaatagttgtcatgacaaaagacacactccttgtcctaaacaagacatggtaggtgcctgtccctatggagtttatcgttttgggttaattaattatttaattaatttaatcagataaatattgttctgagatattctctcaagtagttgagagatttcctcataaatattagtaactgaattcagttgtagatatttatttatttaaataattaaatataatttaattaatagggattgaactattataaatagcagcctgatttgagaaatgagagaatgattttcattagtgattttcaaaattacctagggagaaaaagaaaattattttctctcttaattgttcttgctcatttattgagaactcaacaagaataacattatacactttatcctaatagcccaattattccttgtgtatggtggatcaatttggaagacgctagtgtgagttcaattgtatcatccgcatcatcaggattaaaggatacatcatacgagaagttttgaggataccttaatagtattcaagaggtatatgttcttaacattattttatgtttttatttaatatacacacatatggagatctattgggctatggtaaaatgataatcagataatatgaaactcttccgctgcttaactgatttaataccataaaactaacattatgaagcgtaacaagaagtgaaatttgggtactatttccataaatattccttaattttagccataaaattttatggaagtctatatcactttgaattgtgcatttgaatttaatttcatggcattatttgtgatagtgtgaaattttagtgtatcacaatttccttaagggatctttaaacaagaataattaatattttactcactgaactttattaagttgtgccccttatgagggtttgttaatacccatcaaaatataagtggtatatttactgttatatcgattttgttctcttgacatggcatgcttacgtggacaaaattagtgccacgtggcaatacagctcaccaataagaaggccaagtcagcacctaagcaaacggagaccctgatactcaagcggcatcaagtgataagctagcccctcacaggcggccagccttgggactacaccatggctggccagcctgccctccacaagggcctggccttccaggaggtgttgtgtagggtttcctgtgcacttttacacgtggacaacaactcatgggctgtgaattgggccctaaaagccaaatagaatggctaataatatctagattcaaggacatattagtcttttgcaattatctaacaaactatgcaaatatctaggattttaaactgtaatctagggtttaggcttcctatataaaggccttgacccctagcctagaaacctaagttgaatttaagcttaaaacctgcctccaagctctaagcctacgtctgataatctctctcttcctcacttcctctctcacatgcctatattagcatcatctcaacactagagttttgccattattgattcatactataacaccctaactagcataggcgtattacgtgatt

SEQ ID NO: 226696 - DNA, 2417 bp, Cannabis indica
ttgttcttgaatagccatttagtaccaatgacattaacaccatctggtctaggaaccatgatccaaactctgtttcttttgaactgtcccatttcatcttgcattgcattattctagaactcatctagaagagcctcagtcacattttttggttccacaatggacacataacacacaaaggaaatagcatttaggattttcctcctagtaaccatagtagcgttaggatcaccaatgacaatggtgggtggatgtgccttttgtatccaggatggagggccctttttgtataacctcgaatgagatgagctggtcggggtactacttgtaacttcagcatctgtggatatttcaggagagattccagatgtatcagatgcgtctgatggggcttcggatgctgagtgagttgagttctcagatgcactagcagggagattgactggaacaaacatggggagagagggatctagaagttcctcctcagtagggactccctctgaaacttccaaatcatcaaaacgaacattgatggattccataactgtcccacttctcttgttaaatacccgataggctcgactattggatgagtatccaaggagtatcccttcatcactccgattgtcaaattttccgaggtgatctcggtcattcaagacgtaacaggtgcatccaaatgtacgcaggtgacttagtcttggagtttttcccttccacagttcatatgccgtttgagtggttcctggcctcaggtgaacacggttgcagatgtaacaggccgtgttgactgcctctgcccaaaatcgagttgcaacattcttggcacataacataacacgagccatctcttgaagggtgcgatttttcctttccactactccattctgctgaggagttttaggagctgcaaactcatggctgatacccagtttatcacaaaattgagcaaagatagagttctcgaattccttcccatgatcactcctaattcgaaacactttcccaatgggtgagttttgctcgttttgtaatttcagacacagagacgagaatacaccaaacgtgtcagatttttctttcagaaaattgacccatgaaaaccgagaaaagtcatcaacacataccatgacgtatctctttccagctaagctttcagtttgcattggccccattaagtccacatgtaacagttctaatacccgagatgtcaaaaggccattgataggagggtgggatgatcgagtttgcttcccttgttgacatggaccacacattctgtctctgctcatagtcagttcaggaatccctcgaacagctttcagcttgacaattctttttaaatccctgaaatttaagtgacccagtctgtaatgccataagtccagtttgtccataaacgtgcgatgacatgtcacttggcttccgagtgcatagcagtgatcagctgtgcgatttccaactaaaacttcacttccagctaaggacaccaagcattgtgatttggtaaaacgtacatcatactctgcatcacagagttgcccaatgctgatcagattggccttcaagccttgaacaaacagaacacctgttagagggaatttgcctgccaacttcagatctccgtaacccatgatctttcctcgattaccatctccaaacgtcacagacccttcttgattgtctttgaagttgcttagagaatcacgcgagcctgtcatgtgccttgagcacccactatcaaagtaccagtgattttcttgcatagcagacagagacgtatgagccacaagagctgcatcttttgccttaccagttgattttctacctgttgccccattataggatttaccctttgtggactgacgctttatcaggtttctcaaataggtattcagtttgtagcacttaggtctgatatgccctcttctgttacagaaatggcatactggtacaaatttttcttgagatggggcaggtttctttccttcagttcttcgattattgtcggcctttttcacagactcactagaagagatctctttctgactagatggcacgttctcagaggtaggaacaaagttgagtttgatttccttatgagaggttgaggcatcattgatggacagatcctgccctggtttatataacattttgtatccaatggacgtgcgatccccatatggtttttgactgtgtagagcttgattcagggctgcagttcctggaggcaagcatgaaagggattgtttggttctgaacagctctgcagttagcttataaatctcactatcctttgagcacagttccatagtgagcttctttagcttctcttcgagatctgatttactggcatccaattccttgttcagatcttgaagttccttgatccttttagccatgtagctccattgagc

SEQ ID NO: 226697 - DNA, 1612 bp, Cannabis indica
ggttttgggctgatcaaaggattagggtttaaaaaaaaaaaagaaagggtacttggtctgatcaagatgaacatgtgaaaattatgttaatgatgcaatcattgggcataactttttttactcagcccaatcatttggattgatgtacccttgtacttagaaatgccaaataaagtatacatgtattattttgtggggctttatgtttttgactttggtcaactgggcccctctactaatcagagcccatttctctcagcccaatacccaaccctaccatttcatcatcttcttcccttcaccaacgtgacccagccgcatgaccactcgcaccagctcccataatctcaaccctcccagccatttcatccaagtcgacccaacctccatttcacctgaaaccgaacccaaaatatcacctaaacccgagcttccatttcctccattgaaaccgtagccaccaaatcacacctagcctccagtcactcgacccagccgagccacctccaagctcgaaacttcgaactgcaccacgacctcaccatcacatcgcaccatcagctcaccacttcgcccacttgactgagcttcaacccaaccacgaaaccgagtcaccattcgactccactcagccacttcgttcaacagcagtagcaccccccgaagtcacccaagcactcaccattcgcaccatctccgttcactcaaacagaaacccagccatctccgttcaccttgcaccagccatttccaccattcgactcaacccagtcgctcccatcgccagctcgacccagttcaacctgcaaccaacccgtaaatcacccaaccgaatcaccttgcaccaaccattcacaaccaggtgcaccaactcaaacccactgccccaccgtgcacacaagtcgacccaacaacatcacgactccaccagctcacactcaacagatccacctgacttcgaagcaacccagccgagccatttcagtcggcacttacatcaactcgagtcaagaaaccggttcaagctaagttttgattgggtaaattaatttgaaagttattttggattgtagtgcataattggtagctgtagtggactgcgaatattttgtgaattgcataattggaagttgttttgtgatttaagtgtggtagcagtgtgataattttggtttgggtggtctgaatgaaaatttggtggaattgttgaagaatattgggctgagaaaattggtgaatacattgatagtttgaaattgatgcatggaagagggtttatttggtataaaggagttaatttggatacattgatagtttgaaattggggttgtaatttggaaatttttagtgtggttttgaatgcttcactgttctctgccgtgtttgtatgatggtgattcttagtgaaatggtgttgcattggcagtggtagtgttagaaatagtgcaagtttgaactgatttgtggtgttggataaattagacattggaagagttacacaggggaagtatcatggccaagtactacatggattgtgtgtaaggtgtcaaaattttacttggtgtggtgtgggttggcaaaagtagtagtttttgaacaagagtgggttgga

SEQ ID NO: 226698 - DNA, 1294 bp, Cannabis indica
ttttttttattacattacaactaatttatgtgctaatcctatcaagaaatacgcttttttatcgttaacgaaaatctgcgttaacagtttggtgctttcattgagagcttacgtgaaaaaagctaaaaaaaaactccctcgtgacaaaagaaacttttctccatggctgacaacagggaaaatgacaatactcatcctgaagaaataactcaccgccctggaaaagagtcggtgggctcacaaaggcctcccaactcacgaaaaactcgatctacacgattgacacgttcaaagagaagccaacctgaaggtggccaaaacccaaaaactgggaatgaagttccgaacaatgacggcggtggcactcctagaggtgggggttcgtatgaccctaataggtatgttccgttagttgagttggaaaatcgccaactcaagcgacagttggaggaggcaaactgacgaaatgttgagttggaataggaggcagcgacagccagggcatctcaggagaataatgctcaaaaccaacctgatcctgaggtgaggaggccatgaggcagacatcgcgacaccaaaaccaggaggcaggagacaactcagggggaccctcaaaacgctcaggaagaacaacctagggagactgaggatgctcgtgatgatgagcaaccagatgaccacgctcatcgttaagaagagcctcgaagaccccagggacgcacaacccaggggaatggaaaccgtgatttaccgaaatcttcttgcaggattgcgagtaggaggcaacctcaagctagggaacaagaaatccctcgtgacaacgagagagatcttgagactcaacctaggacatgtgggttgccctcgagacatcgatcagcgtccttctcgcactgatagggaaagagcacatacaaaccccagcaaggggcatgtatcaatctgttctcagaagagaaggctagtacatgatgaggcaagttccagttctagacgtacaagaactcatagtcaatctacgtgaggaggagatagaactcgtcgtagtactgatcgagaaagtaagggcacaagtagaacagaaagttactcaaggacgaggtacgtgagtaactatgatccataacagtcggatctccgtaatcaattgaactagagaaaacctgacctttgtcaacaactctatcaaaagcaagaggatcatatccaattacgaatcaacgagttagaagacaagtttaggaggtaccaagatgggaatttgggaaagtgcctgtgtaaagcccgcttagtt

SEQ ID NO: 226699 - DNA, 1434 bp, Cannabis indica
gtacactaagtcgctgccttgaccttcttatttggtaatttttatatagattgttatgtgaattttggttgcgattaagttgttttgttagtggatgtaaattttaataaaaatacaaaaagaaaaactactttaaatgtaaaattagaaaaatcctaaccttttatatataaagacaccactacaaaatattatatcatttaataaataaaagtacagtagtatcggaataagaattatgccatttcagaagggaaaaaaaaagaataagaatcatgcaataatcgaaaagaccacactgattaattttttaaaataacaagagatatcatataaaagagaggaatgatatataaatatacagcatttaatattttaatttaagcattactattaattggtgctattattagtgagttggttttgagctaaaagggctatggcagctaagggatcaatagagacgagagagagattttgagcagaatattcatcatccttcacctcatattcaatagtggatttgataatggaagaagctgaagctgaagctgcactttcatcatcttttttctcaatgatctcaaatcgagttctgtaaaatgtgaaaccaaagtccaagtatcctccttcaacaacctcggcttccttcactagcttctcatcatctacattagtatacttctccttgtaactcttgaacttgaacacacctgatcatcatatatacaataagaatccatcattttcagttttcacttggttaattaattggccttaatagctacaataatgaatttcaatgaataaatagttatggaaatttctgtattagacccaagatcgttctgctggtagaactcttcctatctgtttcgacatttaggataactttatagtataatttttttttatgttcgcatatgttaatgtagctattttaagaccacttgtaaatttttaaaattttttgaatagtttacaatgttgaaaataaaatttatacacatgtgtatagtcgcgtgttcaaataaaatatgtaaattttattttagacattgtaaattattcgaaattttttaaaaatttacaggtggtcctaaaaagctacaacataagcgtttataaaaaaaaaaatagactaaaaagttctctaatatgtcaagacaaataagaaatctactgaaacacccatttatagaaggtacactattaaagttctatattggctactaattatatatacttgatccgcctgttgaaaataatgaattagttctatcttaaaattattatttagtaaaacattgaaggaaaatattgtagatatagaacaaatagtaaaatatcgagttatatataaaaatatggacttctctacttattactaattaaatttaagattgaatccaataattctcatcaacagtacct

SEQ ID NO: 226700 - DNA, 1701 bp, Cannabis indica
attattagttcttaaaaaaatagattgaggaaaaaaatataaatttagatataaaattaaaagtcttaaaaaaaaaagagttgggtcgcatctgattcgatccgtataaggcaggttggatctgatctgcataactggtctatcggggtggggcggggtagatcattacatgatttgaatcaagtcagatcatagctggatcatattcgacccactctattgacactcctaactgccacccatgaatcctcaaataaatgaaaagtgctcacacgtgtaacatcactcaagagtcgtgatcaagaaggcacagttggatttggtatggcaagtacccaatgtaggcacttctttgatcacttgggggcatacatgttatgttatggtgtacgagagccatatgttatacaagcattcaatttttttggacatctatgtagacgttactcccaataaccgagtttcttaagacatgttatgtgcaagtgttagtcaagcggtaacagttaaagtagaaaaaaagtaaatatgtattggaattgaagttttattaagttggaaaaattctaatcacattctactaaggcttatccacatagaaaggtcgcccagaaaacgacgaactaacacactaaagttaaaagctaaaacaaaaaagaagaatgaattcaaagaaggtcctggagacctgtcacattaacaagagtctcctccatgcctttagtctccccaggaggtgcctcaccaacacaaggagggatgtcgggacgcttagggtagtatccttcaactcctgaagtttctccaacaactggttcgctaacatttacggtgaagtcaatttcttcaaaggattctacagcaaagcacttccaacaccgcttaatgaatcctggaacttctttcccggggaaaccagtccagttgaacaactgacacttactattggcaaccctagctgtgtaaatggcattgaagcataaatcattgtagaatgtgacatcaagcatagcctatttttcaagactgagtggagacaattggagatgtgaccttgaattattaaaaaaaacttttcaaatcacctttcaaatgattaatttttttttaaaattttattttatttataaatatttatttatatgggtcaattaaattgtgatacgtgtacatttttttgtccacatacagtctaacatggaatttcgccgcaattcacactttcataattttacatacaaagttgtaagcttgaacttttctggccgttaaaaattctctctgaactatcaagattgttagatttaaagacttttgtcaaatttcattcaattttactaattcaatgattatttatgtactaaatcatgctccccagattttcatatctaccaaatcatgcccctcgaactttaacatgtatcaaatcattgataactctatgaaaatagagttatttatatctttttgggcattaaagtagctttgttctcaagtatttttagcttattttagtgaattttaattagttttgtttagttttaaataaatattaattttaataccttttagattagttttggttaaattttataatattttatcaatttagtttagtttccctttttataagtgtaattcttaatgttgtgtatttttgtaaaaagattaaatgtatattttgaacttattgtcaaaatt

SEQ ID NO: 226701 - DNA, 1258 bp, Cannabis indica
tttgtgaatttaattaattgtgggtcacattattagaaatggacattagagttataatttatcaattaatgagattttattaaactctaggagtattatttgtattatatatgaattattttattttcacaatttttgctcggcgacaacggaaaattcaatggatgactagtttaatcacaagggtaagtctagaaccttttttattagtgggatgtatattggaggaaatagaataccgagcttaagcggggttatggtttttgaccattttacccctaagcttaagttagcctaagtttaagtaaaaagggcattttggtcattttgtcaaggggcttaggtgtttgtttgggagaatggaagttggccattatgtgagttttcagccaagtaatgtttaattaattaatttgttatttgaagaataaagacgaaaatcattttggagccaaaaacacatttcttgaactctctctttctctctttcggctgaggcaaaactagaaagaaatcatctccaaaaccttgtattttctaagtattaagcaagattcttgtgattttgaagcaaaggtaacccctagaacttttactctttgttttagaagctttgaatttggtttgagtatgcaactttgagatataggggctgttagagtttggttgtgttggaatttattttctaagcttattttgagtttaattgtgcatctagttgctggttttgggttgtgaggttgtggatgaacaagtttgagtttgaaaactcaagctcggttcatccatggcatgtttttatttggtatgtttttctgagttatgttggttggaatatattgtgtaagctcattataggtattctggaaagtttggtggcatttggacaagttttgagcaagtttggaattgtttggggaaacctggtgcaaactggttaatcggtttactagggcctataaaaccggttaaccagttttggcagattcctcgaacaactcgttttctcgattcatgtccacttcagtgccttagttgggtgtttccttgcctcctaggatattgtagtccctattagtaataacaaaaccttaagttgtaggggttcccagattaaggttttaacgtgtgatttacctggttttaatatgtgattagggcatccatcaagcacgagactttccgttcaggtcggccaactcacttgaattcggaaaagaggtaagtgttgggttttatgccctaaataaaactcttt

SEQ ID NO: 226702 - DNA, 1752 bp, Cannabis indica
agattagaagcaatactgggggtattgagcctttgggagaattatggtaagatatcaaaagatttactatgggattgatggctgagtttctcgatcgagtagatggactcattaaacttgaggaggtagtacaacgtgtggatatcgtaggagaaaagaagaatcaaaaacacaccactgcaactggtactcccgcccagaattcataatatatcggcagctcaaattcaaatggaaaaggtccaacaacagcaatagacaaggtaattgaaagaaaggcaagttcactggcaacgccgaacaatatctcagagagaatgcttctaaatttacttctttctcagtcctaacagatgacatagaaacaatttatgcaaccacccagtctatggtgccgtacaagaaaccctctcccatgaagaaggacataagcaaaagagatacaactaagttctatcatttttatgaaaattacgactatgacacaaatgaatgtaacaatttgaagcaagagattgaattcttgattataaaaaataacttgcacttacaaaagtttgtcaaggccgaccaagggcaaagggctgcccaggtagataataaccaaaaccagctattgcctccaccagtaggtggacatctgcaggtaatcattgggggcccacacctcactgaagacttaggcaaagctagagaaaagtatgctcgaccttacagcatgaacaaaatgatacaattctagttgtggaggaaagcaaacctaaaataccacgtgtaggggaaccaataataacattcattgaggcaaatgctagccatgttatcttcccacataacgaccatctagccattgaaatacagattgcaaatgagatggtggcacggactatggtggacaatggagcttcttcaaatattctattcaagacaacctatgagaagatgggactccagcttaaagacttgatcccttgcactcaacttgtatacgggttctccggccagagtgcagcaccacttggatcaattcacctactacttacttttgaacaagctccaaagagcttaactgtaatggcacaattcctggtgattgatgtctcatcaacttttaacgttatgttagggcgagaagcctatatgacttaaaaggtgtcacattggtattctatctgtgcgtcaagttcctaactaaaaaatggaataggatgtctaaagggaaatcaaaggatcgcacaagagtgctacaatcttgctctatttaaggtcaagcaggaaaatacctttggcgagttcagacaaggggaagagcactgcccaataggaatttgcccaaggcggggacgaagacatagatccccaacttgggggaaaatacaaatgttgggccaaaagaagtgcaaattgatccaaatatcctaactaggaagctcaaaattggtaaaggcttgctgctcaaaataaaattagccttaataaattttttaagagaaaacctcgacatttttgcctggtcacatgaggatatggttggtattgaccccactatcatgtctcacaccctaaacattgatcttgacttccatcccgtccaactgaagagaagactgctggacaaagaacatgcacatgcactaaggaaagaggtagaaaggctacacgcaaacaagttcatcattgaagctttctacctggcttgtgtggctaaccccatactagtacctaagctaaataaaaaatggtgagtatgta

SEQ ID NO: 226703 - DNA, 2140 bp, Cannabis indica
gaacctagccccaaaactcgggcccagacccagtcccggacccagactaggactgagacttgaaccagaacctgaacacgaactcaggagtcgagcccagacccagaccaagcccctaacctaaattggaattcagacgtagacatggacacgaactcatacacggacccaaataccgacccagacctagaccgggattgaaacacaggacctagactcagatgaagacgcagacccagacacgaactagggaccaacaaccaagacccgaacgtggaccttgactcagacctggatccacaccgagattcgaaaaacccttaaccaaactcgaactatgactcggtacactgacaccaacttggacccagattcggacccggaaccaaacccggacccagaatcagaactcgaagtgtgactaggatccaaacctaagacgataaccaaacccaaacaataactcaaacacagaccaaaacctagacggagaccttgactaggactgggacctaagatctaagacttgaacatggattaggaccaggaccgggacctgtacctgacctggtcctaaacgctcaccgaatcctgagactcgcaacacagaccaggatccagaccctgacaaggaaccgaacctaaacctagacaaagatagggatcgagacctggacctgtaccctaaccgcgacctggacgaaaaccaagactcaggaccagactaggaccgtgactaggaagttgacccaaacctagaactgaactcgggcctagccccagacccaaaccgtgacttgaagtttggccctgacacgtcgtgtacccagaccaacactgtgacctagacaaaaactcggacccgtacctagacttgggaccctatccaaaacctaaactcggacctagatagggatctagatatgaacctaaacttgaaccgaggcctgcacccagaccgggatagaaactcggaacctagattctgaacgagaccctgaccaagacccagacctggacccgcacccgagaccagaactcgaacctcgacctaaacccagacccagactcagacacagactcggacaaggaatcagacctcaacccagacctagacccaaactcgaacccagacactgaatcgaaatcaaaactgggactaggacccaaacagaaacctaggactcagacctggatggggtatctggacctgggccacggaacccagacccaaatctaaacacggtactcggacgtggatggggcacctggaccttggcccctggtcctggactcggaccgggacctaggactggaacatggatataggacctggacccaacacacgaccattagaactgggattgagaactaggatccgacctcggacctggaccctgacctagaatttggaccaggacctgggacccgaagtggaactagacttggacccaagaccgtgaactagatctggacccggagcttgaacctaactcttagttcgtgtttgatctgggacccatacccggactctccaaccaagacctttacccgacacaagtcttggtcttagaccaggaccggtcacggacacggaccaagacccaagatccgaagtggaacgtgatcgggaccaaagattgggatctggatcttgacccatgacccgaggcttggacccaacccatattcggcatctagatcttcgaatcataccaagacccaaatctagaacaatttctagacaaagcatccaaacccaaactcggacccagacccaaaatcggaagaagaatcggaataaggactatggaacaggaattgaccttgacaaaaaactggatctagacgtggaacagaacacggacccggacccggacctagaccgggatcgatacccggacccaaacctgaaccaagacgcaaactagcactaggacctacgacccagaacctagaacccaggacccgtgactcgggacctggacctagaaccacactcgtaccaaaactcagacacgaaccaaagactaggacacagaccgagattaggacagggacccagacccggactacaaccgagacctgaacatagactaagaacagaacccatactggaaccgggaccgggagtgggacc

SEQ ID NO: 226704 - DNA, 1977 bp, Cannabis indica
ggtgtcttttaatatcttgttgactacttcaacctgtcgatttgtttggaggtgtgcaactaccgagaagctttggataattccatgtgtcgcgcagaagtctgtgaacatctagctctcaaattattttccattgtctcaaacaaattttttgtggaagtctgtaccgaaatatgatgttttcaccacaatatccaaaactttcttggatgttattgttaccaacggttcggcttctgtccatttagtgaagtaatctactcctacaactacatattgtactttaccttctcctttgggaaattgtccgatcaagtctgtttcccatatggtaaagggccacgaactttgcatccacatcaactcgttgggaggtgctcaggggattttggaaaaatctttggcatttgttacattttttcacatggcctttgaatcttcaatcattgttggctagaagtaaccttgccttaatattttcttagataaactttgccccaacatgattaccacaaaagccttcatgaactttagactagagttgtgcaacttcttcatttgttacacaccttaacaagggcatggagaaacttcttctatacattacacatttcagtattatgtaccgtgcaacctttctcatcatcttttgagcttcatttctattgcttaaaagttctctagtgttaagatagactgttatgggagtcatctagtttggtgtgttgtctatcatctcaatttcctccgtgcatgtgatgttgggttcttttagaaactagattggaaccaagttgctttgtctcttactatgttgcttgccaaccatgctagtgcatcaattattgaattttcttctcttgaaatttgtttgagggtgtaccttctaaactgtgcgagcaggtcatggatcttactgagatatgccaccattttttctctttgagctgtgtattcccccaagacatcatttaccaccaagtgtaagtcactatagatctctagatattcagcacaaacttcccgagtaagttttagtctagcaatgattgcttcatactctgcttcgtaattggatacattgaacccaaatttgattgctccttgcaaaggttgcccctaggtgttatgagaagaatgtcgacttcagacaacagatcggtggatgatccgtccacatgtaacttctagataggtttatctttatagcttttcttccagcggggtgttttttttcttgctctctttttggctcgagattatcttttgaactatctatttctttacatgtgtattcatccacaaaatctaccaagtcttttcctttactattgtgcggggttggtaagttatttcatactgtaccaactcaattgcccatttgagtagccgtctagatgcaccaggctttagtagaatttggcataaaggttggtcggtgtaccctcgaacaggatgagcttggaagtagggccttaatttccttatgggaaggatcagacagtaagttaatttttcaattagggggtatcgaccttctgcctcaactagtcttttgttgatgtattaaactggatgttaaacattattttcctctcttattagcatgacacttacagtgtatttattgactggaaggtagattcctaattcttctctgtccagggaatttgagagtacggggattttccaagttgcttctttaattcttgaaaggcattctcatattcctctatccattgaaacttcttgttacctcagagaatgttaaagaaaggaacacatttttctgttgactttgaaacgtatcttctttttgcagctatctgaccagttaggctttgcacttcgttcacctttgttggtgatttcatatcaaggatagcttgattttttttctagattagcttctattcctcaagcattaacaatgaatctaagaaacttacccgacctgaccccgaaagaacactttaa

SEQ ID NO: 226705 - DNA, 1609 bp, Cannabis indica
agtctctgtaaagcttgaccaaagtggacagcttctttgacatctcgagcttgcagcaacaacagcacaagccttaggcctcttttgaaaaacaccatcaaaatactccgagggttggaatgttgttccagtgagtgaaggctcaagagcttcatgagattgggccacatttttctgagaggacaaaaccttaaagattaaatttggaaacacaagcttaaaagttggctttttacctcttcgaaatgagacaatttggctcaaaatgtgggaggccaagtcaatagattctcttgaggtgatacggtagaggaatgaggccacatcttgagacaccacagtcttgtttgagtttggaacacaattgctaagagcaattcacatgagagatgaatgagcaaatgttagatgtgtaatgcaaagactctcccccaatttcagttcagcccgtgcaccaatgagttcagtgagcatcaattggcgatccatagacattatagcatttgggacattctctagaagttgcaaggcttgagaaacgtctttttcagagaatgaaaaccaatgtcctctaacatacacttttcgaaaaagtcttgaattttcatcaagaaaatcatcagataagttagcatagaaatctttgacaatgtttgcaatgtaccctttgaaactagtgagagtgttctcccattgattgtattgaatgaacttcacagttccatacaccctatgagcatgcaaatcataattcctttcactctcaaactttcgggtagcatacaaattccaatcacgctcattatcatggtagtagaaacgaggacaataggagagagatgtaggaatgttaccaagagatgattccttcattggctgcttgcctttggcagcagcagaagccttggctgctgaagaggatcgaggaggagttgaagcagatttggtcaaaggaagctctggctcgagtttagtttcctcattgtccgaggaaactccaatgtcttctggaatctccttctccaaatggagagacacggatttgtccgaggaatcaacagagggatcctccatgggttcttcttcttcagaactcaaagaaatcgaagggggatttaccttttgtttcttggcaggaggaactggcttgtcatgacttcgagatgatcgaagttccttcttgacagaagcttgctgggcacgagtgcaagtggaaggaccagttggagtagaagcagcgacttcctttactgatgcagtaggaggagaaactgcagcatgtggaggagattcctttgaagatgaagacgatgaggtccaagtttcgtatgggcgcacagattttcgagcaactcgtttaggaattcgtttgggcttcacaggttgagatttacgctgaggaagcaatgaatctcctgtttttgtagcaacaggaggaggattcgagggggttgcatcagtttcaaccacctttttgggatgccctaggttctttgttctaaccatggtgatctgaaagaaagaatgaataacaaacaggcaagaagacaaagaaatagaatcgggtaggtggttagaataaatgacaaaaaattggtttaaataaaca

SEQ ID NO: 226706 - DNA, 1745 bp, Cannabis indica
agtagttagtgttttgtctctttgttaattaagtttgtattgtgcgaaacgcaacaatcaataatttacgattcagtttacagtactaacaaacacgcaatatgatcaagaaataatatactaagagatcttaagaattcaggataatgaattaagcagtaaaataaaaaagaacaacaccaggtttaatgagttcgagccatgtgcaatactctacatctcgattagaacagctgtagccatatttttattgatatcagtgtttacaagatttcaaaaatctttacaaacttctcagagactatgagaagaagtttctttctctagtttagactctaccttacactatcacgatttttactcaagcaaatctgatttaattctcacataggttaaaaagatttacaactatatatagatttgtattattgccaaagatatctcctaaattatcatggcacatttatactgcctttaatgatccagctcatcaacaacaataataattcacgcatcttgaaatattcgctttcagtatggacaattcagaagctaaacacaaaggccttccaggtacgtacatcgcttccttctcagatggaccttcaagattgacagtaagctctctcgaagtacctccagattagtaacaagctatccggaagagacattccatacgtgatacaagcttatctagaagtacctttcgaattcaataagaccttctccacatggcaatctgaatccacactaagcttcaagtatctactctttagattcacagcttccaattaggtatgacaaaacttgtaaccataacaaacaaatccccaccttggtttcaagttgaagtcgcttgataaatttttgtttaaaatgttgttgtcctctcagtcccttcaggctcagctgacttcaatcaactttaggcaatgctcaaacttactacttggcactaccttggttatcatatcagaaggattgtcttcagttgaaagtttggcaatcttcacaacttctttctctacaacctcacatatgaaatgaagcttgatatcaatgtgattagtgctttcatggtgcacacaattcttgattaattgaattgcactctgattatcacaatgaatagtaataatcttttgattgagcttcagctcctccatcaacccagttaaccacaatgcttccttgatcgcttttgtcaaggccgtaaattcaacttccgttgtcacagagtcacaaccttctgaaggttcactttccaactaatagttgttccaagatagtaaacatatatccgatcaaaaactttcgggtatcaatacaccctgcataatcagagtccacataatcattgataacatccaagtttttattctggttattcatgccaaataccagtcccttcttagcagttccattcaaataacgtagaatccatttcacagtttcccaatgcgcctttttgggatttcccatgaatttactcaccatgctcagtgcatatgctatgttcagtctcgtacaaaccatgacatacatcaaggagccaactgcactagcatatggaactctcgacatctctgacttcttaacttcatctttcgacttcttagcttcttatatccatgcataagatcttactagccagaccaaaatccttcatttcaaactcctttagttagctttaagtgcttgatctcttgttcactcttgctagagatcagaatatcatctacgta

SEQ ID NO: 226707 - DNA, 2587 bp, Cannabis indica
gccataaaagtaaccaatagaactgaatctaatatccaatgaatgtgaatctcaatgagagactctagtttgagttgatgttgagcaagtcaagacaaagtctaaacttgtctctagtcaagctctttgtgaaagcatcagcagggttctcatgagtgtcaatcttccttacagagactgttttcgattgaatcacatctctaataaaatgcatcttaatgtcaatgtgtttagttctctcatgaaacatgggatttttcatgagatgcaatgcactttgattatcacagtgcactgttacatcctctgaattaatgttaagttcacttgtcaatcccttgagccaaattgcctctttaatagcctctgttgcagccatatattctgcttctgtagaagatagtgcaacaacctcttgtaggttggatttccaaatgacacagcccccatggacagtgaaaacgaaccctgttaatgactttctagattttaaacaccctgcataatctgaatcaacatagccagttaccaagtccttgtatttgctagtgcaatcataggttaaatctgtgttcagtgttccttttatatacctcattacccacttcaaagcagtccagtgagcattccctggattggcaacaaacctgcttgtcatgctcattgcatgagctaaatcaggccttgtacacaccattgagtacatcaaactccatacacaactagcataaggaattttaatcattttctctttctctgcatctgtagctggtgactgtgagttagacagcttaaaatgctgagctaggggagttgaaactattttggagctgtccattccaaacttatttaacactttctgtagataactcttttgagacgaaattataacatttgatgcgggtctttgaatttcaattccaagtattttcttagcattacctagatctttcatttcaaactcttgactgagttgcatcttaagcttgtttatctctgatttttctttaccaaatatcaaaatatcatcaacatacaacagtaggtaaatctgattattgtgatagatgcaaggatcatagttgcttttcgcataccctattttcttcatatattcatcaaatcttaaattctattgcctaggtgcttgttttaaaccatagaaagatttcttaagtagacaaacctgattagaatccttgcattcatacccttctagaagctgcatgtatatttcttcatcaagatttccatgtaaaaaggcagttcttacatccatttcctcaatgtgcagttcttctctagcagcttttgccatcatgacccttataaaggttcgcttaacaactggagaaaagatttcattgaagtccactccttcttactgagtgaacccttttgcaactagtcttgctttgaacttgacttgttcaacaccaggaataccttctttctccttaaaaatccatttgcagcctaccaatttctttccctcatgtttcttaaccactatccatgccttattcttcttgagtgaagtcatctcttcatcaatagcttttagccattttaccctgtttctgcctgtagtagcttcaagataggtagtaggttctgaagattctaactcttctgcagtgagcaatgcatatgctatgaaatcagcatatccaaacttgcttggtggtctggtttctcttctcaccctatctctagcaagttgataggtgcttaaatcagtagcaccttcatttgtgtcagtttctgtagtgatttcagaattctcttctgcattttgagtgtcagattggcccacctcaagttgcagaccttgaactggcataacaggttgtatatcattgggagttttggttttcattgttatttcatcctctttgaagaaaaaatctctacttatcatgcacttcttaaaccaggttccatacactaaagtttgtaacctttgactccatcaggataaccaagaaacatgcacttcagtgctcttggttgtagcttatcctatttttatgtgtgtataggcagggcacccaaacactctaaggtgatcatgtttgggaacatgccctgtccacatttcttgtggagttttgaccttgtttgcaacagatggacatctgttaaccagatagcaaacagttttgagtgcctcaccccaaaattttctttctaaaccagcaccaagtagtagacatctcactctttcaagtagtgtcctattaattctctcagccaaacaattttgttgtggggttttgatcactgtcttgtgtctcattattccttctctggcacagaaatgtttgaacagatttgagcaatactccaagccattatctgttcatagcacctttagtttcttgccaatttgattctcaagcaatgtcctccaattgacaaaggtttcaaatgcttgatctttacttttaagtagatagacccacacctttctactataatcatccatgatgcttatgaagtaactagccccaccaattgtttccaccttagaaggcccccataaatctgagtgaacataagcaagtttctcagttgtgtgatgttc

SEQ ID NO: 226708 - DNA, 1272 bp, Cannabis indica
atgtcaaatatgcataaatttttatttttcatacattgtagaatgttctttcgaatcctatgagcatgtttggccgtgttttttaatttttagatttcataattgtattttcaaaattaataataaaaaatagttttatatcattttttctaaaaaaaaaaattgatggagttatgctaatgttttataaaatctgtttttatattgttttattaaaaaaaatattttattattccacaccatgtcattaacttaaaatccagacctagacccgaatcctaaactccaaaccaagacctgacctcaaacctcgatcacggacctagctctgggacccagactcagatcgcgaacccaggtctggccccaaaacctcgaacactggacccgaacacaattgtgaacaaaaattcgatcccagatacagtcctaaatctggattaggactcgaattccaacttagatccgaccgcagaccctgaatctagatccaaccctggccccaaatcctcgaccaggactcgcccctggacctgaacatgtaaaaaaaaatgtaagaaaaaaatatgtgagacaaaaaaaagttgttcatgaaaatgaaaaataacattttggtgttttttttgacatttaacagtttaaaaaaaaaattgtaaaccctctatcagtttttaaaaataattttctgttttaaaaaagtgaaaacagtttttttaattctcccgtactttctaattcataattaggcaatctgtagtctgtagtgctaaatgacaatgttgctatactcactcattgtattttgactaacccacaacaatttatgtttgctaatacaacacgtatatgtaaagatagagcgacacttgctttttcacaatttattctattcttcatattgtagaagagaatcataaaaatatctacagtttcccaattacgacttgatttgagaccataggaaaggccacaatcaaacaaaatgctattgttttattattaacaagctaatgagttgagagaccagctctctcacatcacattcataaaactttacaaaaagataatggtttaccctgaatgaatcatgacagttggaacacaacttacattgtcattaaactggtcaagttaattttttaggcttaaaccctgtttagattagagattaaagcttctctgacaagtgaaattgatctagtcccagaaggatatattcttggcataccctgtatgcgatgttaattaatattgttgaaatacaaaattaat

SEQ ID NO: 226709 - DNA, 1874 bp, Cannabis indica
  modified_base (84)..(84): a, c, t, g, unknown or other
agttttaccaggatctagatttactaacaagtatgttagaaataacaactacaagatgatacatttgtcgtgaaattattaacngttgcgacaaagtatacaattgcggcaaaagtcaataatcgcagcaaaagtggcaaaattttttgccaggtcccacttttaccggcaatctattttgcaggtaataggagcttttgccagaaaagtaccataaattcgctagcaaatattggcaaaccaaccgccaaaaggtgggaatagaagaagcacgtctagatatggtgacaccagaggtgtgcgcagaggttacgcaactggaaagaacccgaaaaaacaggtattaattgaaagttgtaatattttttatttctatttacttaatatttttttctcaatttgctaacaataaatatatgttaaattacaggcaggagatgaacaaaatgagaaaaatttaggtaacatgaaggttcaaggtggatggggatctaagaccatagttggtcacattgtgagcagggtatgatatattcaatatgactaaagttttgttaataagcaaatttttaataatattttactaattttcaattttgtttaaaaatgggctgatccccagatgggggaactttccagcgttgtggatacttatgcaaagttccactgcaaggacaataaatggcgcgatgagcacacacaacaactgcatgtaagtatctttatattttgaataaattagttttatattttaatttttttttcactctaacaatttcacgaatttttttgcaggccaaaatggttgagattcgtgaaactcaaccaacgccaaccaatgtcctgcgccagtccaatgtcgaccccacctaatttcctacagatatgtatgttatgacacaggtattgggtgactggtcacgccacttgagaggactaggcaagttgccaagacttaagatgggggcaaaaagagcaacttctaggccaggtccatccgggcagcccactgtcactcaagaggaatatgaggcactgaagtgaagggtggaacgagtggcaacaacagatgatgatgactcaaaagcaaagcatgagtgcgttcgaacatcaaatgatccaattggccaatgttattcaaggatttaacatgcccgagatgcctcctattccaccggttccaccatttcagcctcctggccatgctgttgggtcctcctcacagattgcccatccagatgatgacaacgatgacactgtcgattttgtagtttttttttaatttgtagtctacataatattactgtttatgaactcaaaatacttttatttagtttatgacgtttaatatagttttgtaataacagtataaatttcagttttataatatattcaatattatatatgttatcccaacttttgtactctgacatggcatcacatgaatggtgacacgtggaatccacttggagtatctgctcgggaagagtggctcgagcgggacatatcgcttgcacgctcagagcgaagtattcagcgatccgtgcagagcaaccaacacttagagaattcagttttcgcatcatgagtcatcagcacaatccttataactcagggatcaatttacgtggatatggcatgcacacgatcccactatcactgtattcagcctcaatctcacgatccttgtattcagcattgatcccacgatctttctatttatacgcattgtaacgagaggggaaactcttcctcctcaagcttcctagccctataaatagtgatacatgttcactgggcaagggatcggtcgaaaagcagttgagagaagactatattattatctaagaattatatattcagagatactattg

SEQ ID NO: 226710 - DNA, 1413 bp, Cannabis indica
ccgaagcttagaccacaggacgcaatgaagagcaaaagactaaagcatgctctagtctccgtttcctcaccacatctgtgacatagcggctgaataagaagcttacgcttaataagctgggaattagtcggaagagcccgatgatacatacgctaaagaaaatttttgaccttttgtggaaccctcaaattccacatcccattccaccaatgagcctggtccacagaagagcttccattcctttcactcaccatatcaagagcaaccgcataaccacttttcacaatgtagcaaccatttgaagtataatgccaacaccaacgatcctcacatagtccactctgcaatgggataccaaggatgacatcaatatccaacctcaaaaatactgggacaaagtatggatatcccaagacccctctgcaccaatcaattcactcaccataataccatcactaggagaaggcgagatagggcgaaacgttctaggccgaggaatccacggatcccgaaacacgtcaacactttggccgtcccctaccactttcctcatccccgattgcaacaacttcaacccccatatcaaacttgaccacaaatgagacgaaccttggcggtctttagcatccaaaattgatgtattgggaaaatatttgtgtttcaagacacgaccggccaacgaatttggcgattgcagtaatcgccaaacttgtttagcaaccatagcttgattaaagagcataagatccttgaagcctaaaccccccttcgatttcggttgacatacattctcccacttcacccaggcaattttccttttatcattctttgtaccccaccaaaattgtaatataatggaacgaagtttatcgcaagtcgccacaggaagctggaacatactcatcagatagtttggcaccgcctgcagaatggccttaattagaatctctcaaccaccaacagagaagaaactccgcttccaccctcaaacccgtttctggactttgtcacaaatactcgcaaaagtccgcttcttatttcgcccaataacagttgacatcccaagtacttatcatgagtagcaactgaccccaagcctaatatatccaatacacttgcacgatccgcaggtaaaacattcggactgaatgtgatagcagatttatcaaaattgacttgctggccagaggcatactcataacattgaagaatccgacggatagactccgcctccctcccattggctctaccaaatatcaaactgtcatcagtaaagaaaagatgagacacccgaggcccagaccgagagcaccgaaatcccatcaaatcaccactgacttcagcttgacgaagcagggaagataacgcctcagcacaaaatagaaacaaataaggcgagagtggacagccttg

SEQ ID NO: 226711 - DNA, 1685 bp, Cannabis indica
aaacaaagatttctacctccattgatccgaaaagacacaaaaacaacccaaaagcaataattcgaattatattgtgcagataatttgataacaacacaaacagaggggaattgaagcttacccaaaaataacttgaaagaatcagacaaaaaaatacaaggtactaatatttttagtgtttttcttcataattaggttgttatttagtgtttgtcaatcagatcaagcacaattcatagggcaaattagttgatttgaagaaattgatgcaattaatttacaattgaacaactactgctgcatttaaggtcatttgttgtttgttgtcaggaaaagttatttatacattgtttttatggattacaatagttgtttagaaatactaatactcataacaactataaaaatttcaagatatatatggaacatctgcaagtattagtacagagcaatggtcattgggatgacaacaaacacaatattgattatgaatcaagtggataataaatatcaagagattgcacttatgctaaattagtgtagataatgttgcaggaactagactacaaccctgaaacaactcaaatacaactgaaataccaactaaatgaggttctctaaaacaaggatgacaaaagtttgttattttatataaagttattaacaaagaaaaccgatttcaaacgatatccattgtgtgtgaacacattcaactacatagtaacaacaaaataaccatccttataatagttacccaagcaatggtgtgcaacaatatgacagtggcttgaagtgaacataactcatgacactcaactgtgtagcaacttgacaccagcaactaaacaacttttatctgctccaaggaagggatcagtttcaaaaaatgttattttggttgatactgacactttgaaaatagaatcaaccgcaaaacaataagaaaaaaactaaaagcaaacacaataagaagctgaatattaaagaatctataattatttgttcatcaattgtttttatatttttatatctttgttaaatagttgttaacaattaaaaaaacatattaacaactattgtcatttttctaaaaaaatataaatatatcaatacttgatgtagaaattaaaaatataataagagttgcttttcactgtacaagaagatataaacaaattaaaaagaaattataatgttcaatatctcatgcaagatacatgtgaaattaattagaaaaacaattacaaaaagataaaagtaacgtttcttaaaaatatgttgctctttagcgcatacggccaaaaccaaacatatttctaaatcattaatccatgcatagtagcttcaaccttcttggaaggcttttgaatattttcttttacactttcaatgtatgcaactcacttcattctaccaaaggaatagaaatgaacaagcctattctcatcagctttgaagttcatcatcactataaatcaagtcttgcagcagttaaaacaacattaaacaaactacaaaataactttctactatgatttttttcttcaaatgaatgaactacaagcggagaacgtttcaaacaagacaaataaaaaacaagttataaaccttggtaatatttttctttgaaaggttcaacttgtcaactattggattttatgccctaaataaaattccatttcaat

SEQ ID NO: 226712 - DNA, 4246 bp, Cannabis indica
atgatttggaagccagctctctgactagcgcaagcaacaacaaggagaaaaacttgaagaagtttatccaacacatgatgaatgcggctgctaaaatcaaggtcactgatgacatttaaaatggtgacccgtaacatccggacttacaacgggtttcattgttttggggagatcttcaataaaaaagggcagatacattgagtgagttcttagcaagagctcaaggatttgtaaatctaaaagatgcttatgctcaagcatatggagtactcccagctccttccactgaaataataaatgcccaaccctggtagatgacaactccatccatttatccttgccaacaagttttacgactcccacggtatatggaccaagtacttttgtgaagctagtgtccaatataacccactcgcagagtaaaaagagtttgaagggtccaaattggagtgagtcagcaaaaaagtaaaaacccaagaatcaagatacgctgagtacacaagtctcataggtacttaggaaaatgtatacaaggcaacctgtaacatggtgcactacaggaagccttcgcctatgtacaaaggtagaaaagaaagaagagatccaaacaaaaattttgaatgtcatggtgatattggtcacaccacaaatgaatgtgattattcaaaagatgaaattgagggattggtacggagcagacacttgagcaattaggtaaggatcctagtaatctacctatgattggcagttgcacacggggagcttttaatttcgagaaaacatggagctataaatcctcctcaaggagtaggtcatccataatttcccataatacaagctccaaattcacaagccctttagggggcacagaatgctttagcaacgacagtagatgcagccctcggtccttgaaattcgtaccctccaaagttgcatttccagtcttagatggtcatgtagcaactatttcaggtaaaccacatattgctaaaatcactcagaatgcacaaaaatggtacgtgaacgagttgaatcaacgcaaagcttgacacttggtaaaatcacttgcccaacgtccaaggatgatgaatttatcaatgacttttacaaaagatgattccaggcacgtgcactttcctcataatgaccctttggtaataaagggtcaaataacaaataaaagagtttccagaatcctcatagataatggaagctctgtgaaaatcatttttaaaggagtcttccatgccattggtctggtggaagccaatctgctaccatgttcgattcaactgtaaggttttaatggagatacattgattcccatgggcaaaatataacttccaatgactataaatgtggaagttcatagaagcaacacaatatcttcattcaagtacaacacgttagtgattgttaattgccctactacttataacgccatcttgggaagaccatttttaatggtttttggagtaactacatccatccgacatttctacttaaaattcccaagcgagatactaaaagcatagggacaatcagaggagattaaagaagcgcgcaaagttgctacaacatttcaacttgaactgttatcatcgttcaggaaggaagtaaatctaaatccggaacatcttctcagcaatcacaaggggttgtcttggaagatgagcttgatccacaaatttgcatagaacgtgtcatagaaccaatggaggaagtggaaaagtatgcatagatgacggagatcccaccaaggttatccgagtagggaagaacctgtctccggtagtgatggaaaagattatttccacggtcatggcaaacagtgacgtgttagcctagattaatattgatataaccgacattagtccctatgttattttccatgcactagacgtagatcctattgcggaaccaatctggtaaaaataaagacctccagatccagcaaggtcaaaagcagtaaaaatagaagtagacaagttgagaaacattgacttcttcaggaaagctttgtatcccacatggcttgccaatccgattcaagtaccaaagcctaaagggaaatagaattgtgtatagaattcgcagatcttaacaaagcttttccaaaagactattttccacttctgtgcattgatcaaatgtttgatgctaccttgggatatcaactcttaaccttcatggatgtatactttggctacaaccaaataaaaaggcatgtggctgatcaagagcacaataatttctagactaacaaacaaatctactgctacaaggtcatgccatttggattaaagaatgtcagatccacttaccagtgaatggtgaataaaatgttcaagaatgttctgggaagaatatggaggtttatgtcgatgtcatgttggtaaaatcaaaaacctctgagagctatcacaaagatctagaagaggcctttgccataatctgggagtacgaaatgaagttgaacccaaagaaatgcactttcggagtttcttcaaggaagttcttgggtttcatagtcagttctcgaggaattgaggtgaacctagagaaaatcaaagctcttctagacatgcctttgcccagattacatagagatgtttaaaagttaacgggaagaataacaacacttagcaaatttgtctccaaatccatagataagtgcataccgttcttcaacgtactacgaggaaataacaaatttgagtggatagtagaatgtgaagcaaccttccagcaactaaaagaacatctagtgaaggctccaataccgtccaaaccaattgatggagagacatatttttcttgtacctggcagtgtcagatcattccataagcgctgccttagagtgagaagaaggaaaggcacaacttctagtatattatgtaagcaaaagactactcggtgtagactctagatattctatgatcgataagctttccttttgcttattgacaaggatcaggagcagggggaaacacccaaaatgatgatttgcaaagtgaaacttgtcacttcaaacgcctagatccaccaaactctagcaattggtgcagtcaacctcttttcagcacacaaacaatgtcagtcaaccgaggagttatgggtggcaagagcctgccttctacaggtttcgccagccatggaagcattgcgcacaccagaccttaccttttgcaagtcttaccgcccatggaggaatcacgggcagacagaccctacccttcggaggtctggtcggcaatgaaggagcagtgggcggccagaccctacccaatacaggtctggctggccaaggacagtagcgaagtgtaaacctggccggccagagccaaaacctgtacttgggaatggctggcaagggtctataattcaacacaggtctagttgaccttcaccatacactctccaagggtatggccggccagcccatatctcactagaatctacaactttccaaggtgagccagttagtcaagtccccatagcaacaaatccttctatgcaagcatagttggatcaacttaaggacacgattcaaggcatagcaagtctaaagccctcatatcttgaactagattagtcaaggggatcatcattctcggcatacataaaatgccttgcccctccccaaatttaagatgtcggtatggaagatgtatactaagtgagaagacccattggctcacatcaaatacttcgagatagaagattactggtgatgtgcgatgtcgcatattccccgccactttatcagaaatagctcaacaatgaaacttcaaactcaccccaagaagattcaactcttgggctgagttttctcgagaattctacccacaattcttgtattcaagacttgtaccattgtagctaaaagaccttttcaaagtcaatcaacatcaaggagaatctttgaaggattacgtctataggttcatggcctaggctaccaaagtgaaaggtcttacagaagaaggctaatatacgaccatacttagggcatactcccattgagtaacttctaggaagacatctagaggatctttaccaacaacatgaaggagttccttgatagagctgaaggcattatcaagcttgaaaaagccatacgacaggcccaaacggggtatgtcaacaacaggaagtcacaagacattctgtagtctcatgacctaccaagtgcacaggcaggcaccaataaatctgccaggacctctagtggcaaaaacacta

SEQ ID NO: 226713 - DNA, 1977 bp, Cannabis indica
tagtgaattatttaataaaatttaaaattccaattcattgttggtaacttattcgaaatagtaaaactcaataccacatatttggttaacatagtttcgttaatttttttggttaatatacgttcataaccaaattaatttttacaatttttaataagaaaaatgacatattacattatttcgacaatttttatataatagggtctcgtattcttaagaaccggggcaatcactagtgggtagtagtaaaaaattagtacaagttgtcaaaaacaaataacaattttattttattaaagtattcttggaataaatatgtctgaacttaaagtttacatttaaaatagaatctcataatatccaaatattcaattaacaggtgataccatactgtatttatgatgtgacgtactctgtacaactattgatgtacgttattttcaaactttaacttattgaaatatggaagattcagcttgtgacgtacgctgaaatacgttcagaacaattttttggaaattgattctgtcattaatgatctgcctgtaggagattgaacattgaaagtattattccaaatcaaatttaagtttagagttagaaaaacatacctaatagaacactgacaggacataaccttttgtcaacttttgctatctatacccttggaaatgaaaaacacttcaaaagaccttatgtttccaataaagtttttaaacaatgcagctgatagtgtttgtggttttttaaaaaaaccctaaagtacgattttaaataaatgaccagtgcctgtttagtttttcataaaaataaacattttaataatattttcccattaatccatataatgtcaaattagtaggttgtactatctacttgcataacctaaaaaaatactacattaaatattaacacaacagcataaatagaaacatacccaaaaatgaattttaaattgaaaatattttctcatatgttctcgtaatacccaaacatggcctaaacagttgacacattatacaaatgtagaagtggcgtactctgtacagaccttgaagtacgtatttttaaaactttgaacttattgaaatacggtgggaaactagtaaagacttacctagaaatatgttattacaataaagaaaccttcattatttgttaattaatttctcggaaccattttttaagatgataaaggtatattttttgtctactcaagggtacaaagttaggtgttgtttgctttgaggtatttaattatgatttatttgacactgtaaatatagattgtaatgagataaagtaacttgtatgtatactataatatcgtcactgttattacaattaatatttcaaatttaaataaaaataacaagatagggaaaaatagtgatttcttaagaatgtaatcaacattacaattttttaaaaataaaagcaaccaaacaactaacatattacaaaattgcaactaggcaccattaagtataattcaactctgatgatttcctcccgcgtctcgattttgttcgagtgtctggcacacccgtggtcggtacgtcaaatataagaacgctcatcccacgatggccttgtagaccgcgagaggtggagcctcagttgggtggcagatttaactgtgttagaagtagttccatccagcctagtccacccattcgaagcccctatcaacatttgctgaatttacatatagtacataaattgttttagaaacaaatactaataatataacgctgaaataaatagatataaagagttgagttattacccgaatttgttatgacatgatttattggattgttgaaattcctttgatgcacctacaaaacatggatgtagtgcataccaatccttctttttacacatcttcacttcactgcaacaaaaatgcatattttaattttttatattttatccctatacatacatctatagatagggagtgacttctctagg

SEQ ID NO: 226714 - DNA, 2683 bp, Cannabis indica
gctttgtttcagatgcacccagacaaatccctggggcctgaaggtatgagtccgggtttctaccaaaaatactgggacatagtaagccatgatgtgattcagttggttcgagatttcttcctaagaggggacttcccaaaccacttgccagatacgaatattgtccttgtgccaaagaagaagcagcctacttcaatgactgaaatcagacccagctcgttgtgcaatgtgctatataaagttgtctctaaagtgcttgccaacagaattaaagcggctttacatcaggttatttctgaaacttaaagtgcattcattcctaatcgattgattaccgacaacattatggttgcttttgagataatgcattacatgaagagaaaaacggtaggcagaatggtgttatggcccttaaacttgatatgactaaaacatacgatagagtggaatgggattatctgcgtgctgttctcaccaaaatggggtttgataatcataccacttctctccttatgaaatgtgtcacttcagctaaatatcagattgcttatgctggtcgtctttttggctctattatccctgagagaggcttacgacaaggcgatccattgtcatcctacctattcattatttgtacagaaggattctcggctctgctaaaacattatgagcaaagtcagcaggtacgaggcattcaaattgctcgtggggctccaattgtatctcacatgttctttgcagatgacaactatattttttgcagagccaatgagagagaagctactaatgtcctatcccctgttgaatgtttttgagcaagcttcaggccaaaagataaatgatgacaagtcatctatcttttttagtaggaatactgatgtccaaactagagatgccatctgtggtgatatgggaattcatgaggctgatgaaaatggtacttatctaggccttgcaaacataataggtaggaaaaagtcaacaattctggggtttttgaaggaaaaggtgcagaagaggattcaatcttgggatgggaaactattatcaaaggctggcaaagagatcttgctgaaaactattgcccaagctcttcctaactacgcaatgagcgtctttttgttaccaattgaaacaagcagagaaatagaacgtgctatgtgcaaatactggtggagttcttcatccaaaaatgataaaaatatccattggatgagttgggatcgtatgtgcaaaccaaagatgaaaggaggtttgggcttccgcaatctctatgattttaatgtgtctcttttgggcaaacaaggatggaggctgttgatacaacctcaatctctagttagccaattgttcaaggccaaatatttcccaaacagttcctttctttcagctgaaataggtgggagccccagctttgtgtggagaagcttgatggaagcacaacagttggttaaacaaggtgctgcaatttgagtaggatctggtgcaacagtgagcatcctcaacgatccttggctacccgatgcttttgatccatatgtgcatacggttagtgattctctcattgataaaaatgtatcccaactgatgactatagagcaaaattagtgggatatggatattctgcatgacatttttcaatgagagggacattaatttaattctcagcatccccattcaagctactgaattggacatctggtattggaagcatgagaattttggtcactatactgtgaagagtgcctatgccatcattcaagaaaacaaacaacagcctccactaattgatacctctggtttttggagaaagtgttggaatttaaaaattccaccaaaagcaaagaatttcttatggcaagcctcgactgattgtcttcccaccaaatcccaactccaaacaaaacgtgtggctgttaatgctctgtgtctgttttgtaatcttgaaaatgaaacaattagccatgtgcttgtcacttgttctttctccacgacatgctggacagaattagaaccaggggtctcaactgctgtagaaggcacttttcccaactggttgaactcagtttttgaaaaatggagtggaatgcgtcgacaatagattgctatgctctgttgggctctctggaagtgtaggaatgatctggtatggaaccagaaacatgttgaagtcaaggaagttgtagtattggctgttacggctcttaatcaatggctttatgctcaagacaaaacttttgacccttctttaggattactttttcctgaagatggtaatgagcattggactttaccaaatgttgatatgattaagattaatactgatgctacaattttatcctcttctaactgttacaactactcttgtgtagctagaactcataccggttctttgttggaggccaaagccaaatgtgtaagaggagttgtatcccccgaactggctgaggctattggcatacatggagcgctgagttggattaaggataaaaaatagtgccgtgtggaagttgaatccgactgcttagttgcaattcaagctatccgaagttcttctaccatgtactcctattttggtagaatcataactaaatgcaaaaggttgttggatgagttgaaagatcgtctagtttttttaaaatttgttaaacggtctgcaaacaatggagctcattatttagcg

SEQ ID NO: 226715 - DNA, 2179 bp, Cannabis indica
atatcattggagttggagccatagttcgtggctcacatggtattgcggttacagccttttccaagccaattataggtaactttgcctctcataaaatgaaagcgaaagctcttctccatagtttgaattgggttcttcagatgggcttgctaatcacacaaatagagatggatgctttaatagtttctactgctttaaatgaccatttcaatgcaaattatacttttaaagatttaatcgttgacatttttagtcttttgtcatttctcgaaagctacaattgtacatgttaaaaattatgagacttgtttgttgaagtaaacctccacttacactgataatggactaattacaaggacaaaacagtaaatacatgcaaatccctatttcggccttcggactctaaaattcctaacagaaattagttagaatggattaggttataatccacacctaactaattcctgtaactaactattacaggtacaaatcagaaaccctagatctatatataactgcatcaaaacacaaccaggaacggttgagtgatattcttcaagatccaggggttaaaagcttgaagaagaaggagatgaagctctcacatgcacaagaaacatcagagagttagtatagtgagagagagagggattaaacacaatatatgtactaaatatagagattaccagtcaaaactatacctgtgacttggaatctccagccttgtaattctgatcatcattttatagtggaatcgagctctcaatctaaggagcagctcaaacggagacgtagccaatttattggtgaacttcgggaaaaatcgtgtgttttctagccctattcttactgtttttgtgtgtgtgtgtttgaggatagatcagatcgtgttggatctgattttgtgtttgtgtttgatctgtgatttctgggttgtttgagggattggcttcgagtttctcagagagaaactctctgctagggtttcgagcaaaacctagggctgagggaaagtgattgggaaggttctcgatcctttgggttttgtctaaggcaaaacggggtcgtattgacccttctgactttgaaaagtcaggattggtaaatgtcaaaattgaccttgtttaaactgattaattgattgttggtgtagggaaaaattggtaattggctaatttcctataatggtatcaaagcttggttaagctggaagattcaacattcaaaataatcagggaggaagaacaaagaagaaatcaagaaacacaaacaagaacttcaagaactcaacttgatctaaagaaattttaacaaaggatttctgggaacatttctcaaattaatctttatataaattgcttattattatttatctttatctgatattattaaacatgagaaatttaaaggtagacattgacaaatttgatggttctggtgattacaggatttggaggagaaagataaagtcactattggctcaacagaagctactgagagtgcttaatgaccctatagaatggccagaagggacaaccaagattcaacaagcagaatacttggaaacagcaaccggtatcatgatattcaatttatcagatgccattatcagattgattgacaaagaagaaacccctgccaaaatctggaagaaattgaagaacagtttcaacaaaaatctttaaccaacaagatattcttgaaggaaagtatctttggttttaagatgagttcatccaaagcctttgatcagaatttggatgaatacttaaggatacatattgaacttgcaaattctggggaaaatgaggctctaagtgatgaaaactaggctataattatcctaaactctttgcctgaatcctatagggaagttaagactgcaattaagtatggaaggacatcaataaccctagaggaagtgatctctgccctaaaatctaaagacttagagatgagagcagagaaaggaggaaactcaaatggtgaagtcaatttgagtaggggcagaccaggtccaagaaagccttggaacaacagaggcagaagtcagaacagaggttcaagcaaaacaggaggacaacaaagaggcagatcaaattctaatactagaaatcctgatgaaactaatggttattacaactgtggaaaacctaggcattttaaaagagattgttat

SEQ ID NO: 226716 - DNA, 1996 bp, Cannabis indica
ttctcgttcatgatggaacaccaaagattttgagggtcagtgattagtttccagccccacttgagaagaagggcagaattgaagtcttttattctccgaattcccaatcctcccttgaacttggatttgcagagggaactccatgaaatagtgtgaatagaattcctcttctcattgtctccccaccagaatttcctcaacccttgttccattttatttgcgattccagaagggatcacctccgaagcagccacatagagagggatggatgttcctaccgattggactaggcaagtacggccagcttttgacagaagacgtgatttccacccttctattctcgaaagtactctttgcaccaaatattgcatatcattcgatcttttcttggacctgaagagaggaattccgaggtatgaggcgtcatgtttcatcttgctcatgcccaatagacttgtaatgtcgttgatccggtttgtaggtaccccttttgaaaagaacacagttgattttcggagattaactgcctgtcctgaccaagcacagtacgtttggagacactccatgaaggcctgtgcttctttgatagtagcttggccgaataagaccacgtcatctgcgaacatgagatgagtaatcgagggtgctgaacgagtaactttgaacccctttattcttccattgtttgtgtagtcctggagaagccgggatagcaaatctgcagctaggatgaatagggtgggggatagcggatccccctgcctaagcccactcgtggggttgatagaaccttgtttcaccccattgatcaacacattcatactctggatttgtatacaactcttaatccatcccagcagagggttcttgaagccgtgaaagcttagagcctccattaaaaaatcccaatccatcttgtcgtaagccttctccatatcaagctttatcatcatgaaacctttcgacccttttttccgagacatagaatgaatgatttctttggcaattgcagtgttctcggtgatgcatctccctttgatgaaagccgtttgcgttggggagattatggaaggaaggatatctcgaagacgggtggtaataatctttaaaatacatttatagtgcacattgcacaaggcaataggccgaaagtcacaaaccattgatggacagtccttcttcggcactaatactatattagtatcattgatgtattggggtaattctgccgttgcaaagaagtggttgatgaatttgataaagtcctctcttatggtgtcccactgagaacgaaagaaggccactgggaaaccatccggtccgggggccttgtcgattcccatggaggcgaaagctttcaaaacttcctcctcaaaaggagtatccatcaggtcgtccctagcaatgtcgtcgatcttcaaatgagtccactcctcagcattaaacttgagccgtgatccattcttggagaaagtacttgtaaatttgtcaatgaataactgagctatgtctttcatattttcaatcgactccccctggtcattctttaaacattgaatataattacgccgtctccttgttacagtactaaccatgaagaatttcgttgagcggtcaccgtcttttagccaggccactctcgacttttgccgccaaaagatttcttctcttcttaacccctcctctagcctcgctctggcttcggagtgagcctcctcatcaaagttctgggtctcttcaataaacttaagtttagaacgagcctcgttgatttgtgttgccaacctcctaaagtgtaatttattccatttggtaagagaagcctttgtatgcttgattttgcggtataagttgaccatcgggtgctcatgacttaactcattccatgcttttttaaccacccagaacacccgagggtctctttcccacatcatttcatatttgaattgaggcttggtgcaatacttccctcttgaggaatcgaggagaatgggat

SEQ ID NO: 226717 - DNA, 1393 bp, Cannabis indica
aaatcaaataatcaaatacttactatttatatatattgtataataaattaaaaataattttcttcataataaacaaaaagtcaaaatgtatgattatatgaaaataaattattatgcacgtatattgtaataaatttatataatgtatatattagtgtaaattgcccatataaataaggaacacatttgttttaaaaaaaaaaatgaagaaggaacattgttaagaacaaactattaaattccctacaaggtgaaataatacttttccagactttctctctctcgactcttcagtatgaacaagggttcatcttcttcccctgcatgttcacactggttttctgaatgtttccacaaggtgaaacccatgcccagctccagatcgctcgatcatggtagctccgactcctcctctactgagacacaacacagctcgactcactcgagccaagcaagccgtcttcctctgtagatacccaactactctagtcgcgtcaccattaactccggccctctcccttttccttcaaatcgtaccgtgtttaatgagcctcttagaggtattgatttcctcttacatttctccctattcactgtcaaatcgtttcagaggaaatggttttttattgaacaatacagatatatgtttggtttgcctattaaattttaccctgaaatttgtactttacaaaggatttggggtaatgggaactctcccaaatctgtcgacagaaggtacttaattccctttgctatttagagtttgaatcccccatttaatgtggtctgcaaatgtgttctgtctagtgccatattccaatactttgtgcagcaaatctacccagtattaaatactttcgatttgactgatactgcttcgtatcactcctctaccgtgagtgtttgtctatttatagttaagcctaggagtagttttgctttgtgcgaatcagtcatttctctcttaccctctctgcaaagctcattgttcatcaggttttgttctaataatagtatgtgtcttctagttatcctccccacccgtggtctcttaatacaagtttggttttattttcttttcataagttgttatatcatcagagtagtatatcgggcaggttctttttctgtgtgtgtgttatttttggaagtgttacttggtttagtcttattttcttccttgaagccgtggttccccttcacaccttttcccttcccagtaatttcacttccttgaacaaccgggctgtcataacctttttcccatacaaacctttgtgtcttttaacccccattcagtcaccctctatctttcacaatctgccaggtcctttattgtttgaggtttcttactacttttagcttcctatcctatggatgatctaacaaattc

SEQ ID NO: 226718 - DNA, 2062 bp, Cannabis indica
atacatggagaagtatagattagcaaacaaagataattggggatacaacattcatagaccacttttgttcattccactgctttgcatgtaaaaggtctcaagaacctaaacaagtgtatctttcacacaatcaaatacccaaaactctcataacgcctactacatggcaacatatgctaaataacagttcaactaagttgaccaaataaacaaaatcaggtaagatgcaacactaccaacaaaatcattcactagcaccagcaggacccacaagcactccctgagcagaaccttccttccgaccactttcgtcctttgcctcgttgccatctggcttttgtatcctaattttgtatttggcctcgaggtcagagatttcccttttcttcctttccaaagcttcgttcaacctggcaataacctcctcaaggccctctttgttgcgctgcactgcaggcaaaacctctttaatggttctctccaccaggacacctccaatcatgcgatagcaccgcctagatgggtctagaggctgaattgcattcatcactagtgagtgttcacttacttccatctccagttcagtgatttttgagtagatttggttcagttcagacctcagagaagcatacatgttggctactgcttgttcatttactggttctttgtaatctccttcactggccatgatttctacagaaaatagagggcaaaaaagaaagactgaaacaagaatactgaggagtaacaattttctaatagaccaaacaaatcaaattagttaaacaaatatttactagtttaacatgcattcttggaagaattaaggagaaggcatgatatatcacaattttttatcacattactacaaagaaaaagaagtacatcaacataccaaggttgatcaattttgagattgtggattctgatagtgacttggagataggtaacaagatcaataaatttgacacaaacatcattttgggttcatgtgtactatatcttatctcaataaactagtaatacttccaatgagatgctgatatatgaaatatcatgtaaccaaactaaatgctaagtgatagcatatttgcaattataacaactgtatttgaactcaaagtctcaaaactaacttttggtttctaatgtcgatttttatatacttaaatattgattattatctcattatttagaagcaaatgatcatctgaactttttaagaaagtaagtaatagcaatacaaatttgattaattaggatttttggcccttgaactttgacatctaccaaatcatactccttgaatttttcaaaccgtaaaaaattccccctgatttataaaaattgttagatttaaagacttttgttcaatttcattcaatttttcttatgtggcgattgtctatgtattaaatcatgttccccaaactttgatatctactaaatcatgtccctaaactttaatatgtagcaaattgtacccttaaattttcatacatgtcagattttctttagtaaaattggacaaaaagctttaaatccaacaatcacaatagttcgaaggaatttttaacaacctaaaatattcgggaggcataatttggtaaatttcaatgttctgtaggtaaaattctagcctaaaaattttgtactacgttctcaacttacaaagtgggtgtgggtgtatattaaagttttggctataaacaaatcacgggtcagcaatttttggctcaataatattattcctaaaaaaataactaattaaaagaaatcttcatgctatcctgcaatgcaagttagttgatgaactccaaacattttacaagaaatttctattacaagtaaatgaatctgaaaatatagaataaaaggcaaataagtaattttctttcaaatttcaactttacccatgtacatggtatataaatcgaactgtaaacgagagagagagagagaagcaaggaaccttatcgaagttggaagtggagagaagcggcggcgatcttgagtagcggaaatcgttaaaggtaaggtcagggcagtagctatggctttt

SEQ ID NO: 226719 - DNA, 2917 bp, Cannabis indica
gactcgaacccaaaccaggacttgtcctaaacctgggaatccaaagtcagacctagacccggaccccaaacctggcccggacccaaacaaggcaggaacttggacacgaacccatacgaggaccaaacctgaacccagactcgaacccaaaatcagacccgaacccgggacccgaacttacacccatacccagaatcagacccaaacctaggcctgtgtccggacccgaactcgaacccagaccgagatcgaaacctaggacttagactcgaaactaaataaggactcagattgagatcgaaacctaggactcggacctgaacctaaacccagactcaggacccttacccacacccaaagcctgatccgaagctagaccgagatcctgacccaaacccaaactcgaacttggactcgaaccccaacccgaactcgaactcagaatcgcaattggaactggaaccggactaggactatgactaagaccaggaccaggacccagaccagaacccaaacccaaataaaaacttaaaccgagacccaaacccaaaccccgactaggacccaaacctagacaaaaactggcacctagacccagaatcaggacggggacctgggcaacggaactaggactgggacccaagacccgacccaagactaggacatgaacctaagacccaactcgtgacccgacaccataaatggaaccagaccaggacccgagatcgagatcgagatccaaatcaggacccagggcttggaccgaacccatagtcggtgtttggatctgggactgagccccagactcgaattcaaaccaggacccaaacccaaacccagtcccaaacccaaacttggacctgaatctataccctgtgatctgaaattggatccaaaactagaagtagacagggaccccagaacgggaccgaagcaaggacttgtacctggacttggaatcgtaatcggacgtggacctagactcggaactgtaaccagactaggacctagactccagcccagacctagacccaaaccgggacccaaactcggatccccacccagacctggactcgggacccaaatctggtacccgaactcagacccaaaaatggaacaagactgggcctagaatcgcaccccagtctcggtcccgaaccagtactcagacttgggacccaagaccagaaccagaaccagatcgggacacgtgacaggtatacagatttaggacttacgcaaggactcgaacccagaccaagaccttaacccagacccgggacccaaaattggaaattgtacaacaacttccaaactaggaccctcgaacaagactaggatcgtgacctggactctgacttatacctagaaccgaactcagacctagccccagacccaaactaagaccgaaactcgggctcagtcacgatcgtgtacccagaccgagaccgagacccagacttaaacctggaccaggttcttgacctgggacccaatcccaaacccagactcggacctagattgggatctcaatacgaacctggactcgaacccagacctggacccagaccgggatcaaaactcaagacctaaattcgaactgagacccaaacctaaacccaaacattgacccgcacttgggacccgaactcggacctgacccgaacctagacccagaccgagattttgacctagacccagactcgaacatagactcaaaccaggactcatacctcgacccaaaccccaacccaaacattgaatcgaagtcgatactgggactaggacccaatcccgaacatggacccagatcgggacctaggacccagatcgggacctaggacccagacctggattgaagacctagacttgggcctcgaaacacaaacccagatcgtaactcgggactcggactcgaacctggacctagactcgaacccagatctggacccaaaccaccggaacccaaaccaagactcagaccgggacatgaaccccgatcgggtcgtggacttgaaccgggaccgaggactcgaacatggatgggggatctagaccgaggacacgggcatcaaaactaggactaagacccaagccccgacccggaactaggatcctgacctaggacctggaccaggacttggggcctgaagtagaactagactgagacctgagactgtaatccagatttggacccacggcttggaactgacccgtagtaagtgtttggatctaggacccatacccaaactcaaacccaaacccggactcgggccctgacccaaacccagacctgcaccccagacttagttccgagtccgagactgggtttgagtccgggaactggaaactgactaggacccaacacagacccagaccaggacgcagacccgaatcgggacacgaacccgaacccagacacaaacttggacccaaaccccgagccaggacccagaccgggattggagactcagacctgggcccaagacccagacctagattggggacccaaactcaaaattagaacaagaatcgggacccaagacagggattgggacccaaggcgttacccaggtctctgtcccaaacctggacccaaataaggacacagaccgccacccaggatttgaatcggaatgggacttggacccaaaattgggattcaaatcttgacccacgacccagggcttggacccaacctgtagtcggtgtccagatcttggaatcataccaagacccgaaccttgaaccatttccagactatgacccaaacccaaaatcggacccgagacccgaaatcagaataagtactggaatcaggaccctggaacagtaattggacctggacccaaaactggatctagacgagtaaccgaacacggacccggtcctagaccgggatctataccctgaccca

SEQ ID NO: 226720 - DNA, 2487 bp, Cannabis indica
aaacataaagatgaggcactatctaaattcatacaatggaaaactctaatggaaaattctaactaatcaaagggttaaaaacctaagaactgacaatggcttggagttttgcagtgatgaatttaacaggtactgtggctctgttggaattcaaaggcacagaactgtgagaatcactcctcaacagaatggggtagcagaaagaatgaacaggaccttaatgaacaaggtcagatgcctattgatgcaatctggacttactaaaggtttctggggagaagctgtgttaacagcagcctacttggtgaacagatgtccatccagtgccattgaattcaagacaccagaggagatctggtcaggtaagccccctgatctttcaaatttaagagtgtttggatgtgcagcctatgcacatcagagtgttggtaaattggagcctagagctctcaaatgtgtgttcttaggctatcctgaaggcactaaaggttacaggttatgggtaagagaaaaacaagggtttaaagctataaatagtagggatgttatttttaaggaagacttatttccttgtattactaataataactctgtatctagtcctactttagacactaaccctgcaggcacatctgtggacatgcaaacaaggaacactcaacctaatactgttcaggtggaaccagaacaggtggaaaacactcaaggagatgaaaacttggaaggaaatgaccaagttcaggatgacaacattcaggtggaacctattctagaagaagagcaagaaactgaggcaatacaagattaccaattgaccagagacagaactagaagggttcctagacctacacagagatttagtttcactgcttgggaagaagtgctagcctatgcattcttttgtgctatgggagtggaaatgacagaacctaagacttatgaggaagctatgactgataaagatgccaagaaatggtccaaggcaatggatacagagatggaatctctgagaaagaacagaacctggatactagtgaagaaacctaagggaaagagcatagtttcatgcaagtggcttttcaaacacaaggaaggacttactgagacagatcctaagaagtttaaggcaagactagtggctaaagggtttacacagaaagaggggattgattttaatgagatattctcacctgtggctaagtataaaactattagaattatacttaccatagctactcaatttgacctagaagttgatcaaatggatgtaactactgcatttctacatggggaacttgaggaagagatctacatgcaacaacctaagggatatgaggaaaaaggcaaggaagacttggtttgcaaactgattaagtccttgtatggacttaaacagtcaccaaacaaaaggtttgatgagtttatgatcaagaaagggttcactagaagctactatgatacctgtctatactacaagggcactaaaattgatgaagtcatctacttacttctgtatgtagatgacatgctcattgtgagcaaggaaaggaccagaattgacctaatgaagggttggctaagggaagaatttgagatgaaggacttaggcaaggctgctaagatcctaggtattaatatctctagggacagggaacatggaacactaaggctacatcagaagaactacataaagaaagtcatagaaaatttttctatgactaatgcaaagcaaactaaacaacctatgactaatcagtactacctaagcaaagaccaatgccctaaaactatagctgagaaggaagctatgagtgaagtgccctattcaagtgcagtgggatcagtgatgtatctaatggtcagtactagaccagatttagcctatgccattagtgtactaagtaagtacatggcaaacccaggtaaacaacactgggaggctatgaaatggttgttcaggtacctattgggatctacagaagtgggattgaactacaagagaagggacaatagcagaatgatcactgggtacagtgatgcagactatgcaggtgacagagatagtagaaaatctacctctgcctatttctttacactatgggggaattgtatcagctggaaagtacaactgcagcctgttgtagcattatctacaacagaatctgagtatgtagctgttacagaggctattaaagaagctatttggcttaaaggattactagaagaacttaaactactagatgaagaacctataatctactcagacagccagagttgtatccacttgtgtaagaatcctgtctttcacgacagaaccaaacatgtggaaatcaagtaccactttatacgagataaagtgacacagaaggttgtacagatagagaaagttcccactgaagagaatccttctgatatcggtacaaaggtgctacccttaactaagttcaagcactgcttggacttattaggggttggtaatggtggatg

SEQ ID NO: 226721 - DNA, 1815 bp, Cannabis indica
tttaataaatatattggtatttgcaaaaatacaatttattaattggtattaaagcgtgacactaaactcttagtgtgaccctttaacgttttcttgtgtttttatgcaatatatcaatttttgaggaaggaagttccatttctcgtccacaacttctcaatgattctattaaaaggttagaatgagggcatttatcaagtctcaagatgagaaaatatggagaataattctttcaggaggatctcattttgttgtggtacatttcaaaagtaattcaaagttaaaacttgaacttgaatgacctactgaagatgataagttatctgcttacaatagtaaagctttacatcctatatttaatggagttggtgaaggttttattaagcttatatcttcttgtgaatctgctaaggatgcttggcaaatctttcaaactcaatttgaaggaacttctgctattaagcgttctaggtttattatgcttcttatcaaatttgatgatcttagaatgtctgaaaatgaaatcttgtctgagttttatgaaaaattgtctgatatagttaatgaatattttgctcttagtgaaaagattttatcaagatgaaagtggaggagttaatgggttccttgcgtactttttaattagcaaatcaagcagaaggaaaaacctaattccacaactgataaaggtaaaagtattactttaaaagttgctgacaaagaaagttttgatgatgaatgtgatgatgaaattattttattaactaggaactttcaaaaatataggaaaaagatgggtagtaaaaagatttcaccaaaattttcaaaaggaaatacttttttaaaaccttctgtgactaataaaaatggaattcagtacaggaaatatgaaggttttggtcatattcattttgaatgtgcaaatactctaaaaaggaataagaaaagtttcaaagtcgcatggagtgatgataaaaacgatagtgatgaagataattttgataatgttgcactaactttagtttcttctaggattgtttgtgattcacaggtaaaagaaatattggtatgtttgaataataccattagaaaaaaaaaagaatctgattcagataaatctaaaatctgtgaagaaaccctggttgagtcttacaaaattatgtatgaaaaagggatacaggttacttctgaaaatagatgaatgtctaaaataaataaacaacggtctcatcaaattgtatctcttgaattgaaaattaaaaaatatgagattgtagtttgtttaaaagatgaagaaattaattcgttaaagaaagaacttgaaaaattcaagaaaaatattcaaatgcttaacttagatcttctatttttgacaataaagatcctgcagcaagcatgtttggaccaaactaaaaggtccgcaccaagttacaagataacaataaaggtgcatacaagcctgacgagtacaaagacaacttggagttggctcttctaccaaaatactggaatagagaacatctcgataagtgctctcactagccagcttgtatagtggttcctctaacgtttcatcgtgcaggaatccataaaagagctagtacccatcgctcttcagtgatggcctcccatcactttttagtgatggcctttgcatggtaagccctgcagaggtagccaaatataaaagaactagtacccattgcttttcagcatggcctcccatcactcttcagtgatggtcgttgcgtggtaagtcgcgcaggggtagtaacaatgtgatttcaaacgcggacactaagctgtaagcttttg

SEQ ID NO: 226722 - DNA, 1302 bp, Cannabis indica
agttttagtagcttgatgataaaattttcagttagaatatattgttgttatacccaaaattctactattcaccagaaacagacacgtgtcctacaaaagaaatatgaatcaattcaaagaataaaataatgaaataatattattaaatacgatttaaataactcgttctaatagattaaagttgatagaactattcaaactcactcactacgtaagtatatgcgagataagaataataactattaacatatataattgacgagacaatatgtctatctcaagataaacaaggtatgtaatatgaacatctaagacgagacatcaaggagcttgcagctcattgacccacatacttagaaataaaagcttgcaactcattgacccacataattatacatggagaaaattacattaatccatcttgcgtctaacaccatctggcagataaccttgcgatatgaagaacactacgagaaggagatatctatacttagcattttttcttctaaagacagataagaaggataactcacactcagcgagaagcgaccttcttagtcagcataactgtttgaaggataaagataaagagcacttgggtagttattagatattatcctatgtccatataaatgaaatgtggagaatgtccacgtttcatgagaagttgtaagtgaatatatcccaataaaaataattgtcaacctatacacatataaataggtgcagaattaatgggaaaaggagagcgaaaattgagagaaaattctattaactatctttattaagaattacaccctgaattcaaataaatatccctaataatatggactcgtagagtatgtagatttaactacaaaactacgtaaaatatttagtgttcattattattaataaatgttgtagtatatttattacataaaagactatttatttagttaacaaaaatctgagttaatagtttggtgctttcattgatagcctaaaaaatctctctttataaatacaattacaaacccatatcaatggcagataacattccacatgaaggaaatcatccagaggaaactacccattatcctggaaagaaactatcagagaaccaacacgacggaaacacaacgtttttagggaggaacgatggtatcacaatcttgttggtgagaaaatcccatcccagagagaagaagtgaagatgcttatgatcccaccagatatgtcccactggtagagttagaaaataggcaacttcgacaatgccaggctgaatcaaactgacaaaactctaagttggagcgagaa

SEQ ID NO: 226723 - DNA, 1412 bp, Cannabis indica
tctaaactatttggtgagacactccaaggtaattaaacccagtgttctgataccatttttctatcacggcccgagccttaggtccaggcagatatttaatatccataacttgggtggtcaaaggtcacactttaacccttgtagaaatataacatttataaatgatctaatttatattataaaatacttatttaaaaataataaattaactcctatatcgataagaaaatattagtacgaaaatcaggaccactcattaatataaaagaacaatagtatccccaaagttatgtagtcactaaatagatagattcaataagtcagtaaaatactaaaataatatctagcatccatcattcctcatttctaactagtacataactaatttaagtgatccaaaccatccattccagctcacatacaaaatcaatttcattagaagtttaataagtagaataagactaaactaataacaacttttttcctcaaccgtaccatccttatttactagcatcaaactgagttcttggaatgagagaaaatggggggtgagcttattaagctcagtaggaaaaaaaactaatatcagagacccttagtttaataaaaattcctgcatggttagttttaaaaaaaatacaacatttcatcaccattatcaaaatatataacaaagtagagagaccacatataatcagaaaatcaagcgtcaaatgcatatcacaccgtccactagactcctagctgtcaataccaatcacagaaaacgacatccaaaactggttagtcgcacctgataacctccataatattggggctcagattcaattcacttcctatacagattctaggtctttcacctacaggtgagtgcacacctgatctacctatgatgacatatattcacaaatcatgatcaatatggctctcatcagtacaactaaaaacatgcaaaataataagaataacaaaagaacacattccctttttattttctaaaaaatccagcagcataatggctgtattttgattaaactaaaaaatcataacttacataattatttgtacaaaaatatatttggcacttagtgccccatcacagttcagaaaaatgtgcaaattaagtttttaatttttcaaacaatttgcaagtcataaaaattaagtccaataatcaagttgagtccctacctttcccaagtcgttaaactttgtccaaaagacgatcttaagctctcaagtcccgagctccaattgtttagtcatcttagatatcactgtcccttataccattaaatagctaaataattattatgattatattttactttcaaaactaaatccaatgacatataatatgactatatttaaagtttggagttttgaaatctcacctaagcgatgcacattaa

SEQ ID NO: 226724 - DNA, 861 bp, Cannabis indica
gaagaccctagagcaaaatggtattgcagaaagaatgaaccaaaccttgttgaacaaaattagatgtttactattcaactctgggttagaaaaactattttggggggaagccttaacaactgcaacttaacttgaaaagaggagcttgaatacattatgaaatgtggtacaatagaacccttaacctaacacatttaagaacattcgagtttacagcatatgtacaccaatccattgacaagctagaacctagatctgtgaagggaactttcctaggttatgccttaggaaccaaggggtatagaatctacattttcaggaagggtaaaccaaaggttgtgattgctagaaatattattttcaatgagttagaatatcctcacttgacctccgagaagggtggtatgactctgtgtgttacaggaaacacaagaagcaaagacactgtaagtgtggaagtagagtacggaacgaagctcctagaagaaggtccacaaccagaagatagtatggaaccggaagacaatgcacaaccgaaagttgttgtggagccagaagaacaagattacaaagaccaaacagagatgcccaatgggttcagacagacaggtttaacaggttatcagttggctcgtgatagaacctgaagagagattcaacctttggcaaggttcgcagaagcagacataataacatttgcactggtagtagttcaacaaactaaaattgaagagcccaaaagctatgaagaggcaacttcaagtggaaacaagtctaaatggcttcaggccatggatgaggaaatggattctctacggagaaacacaagacttgggttgttgtgccaaagccggagaacaa

SEQ ID NO: 226725 - DNA, 2668 bp, Cannabis indica
tgtacttaacagattcatttcaaagtcaactaatatgtatgtgccatttttcaacatattgcgaggcaataaaaagtttgagtggacaaaagagtgcgaagaggcctttcagaacataaaaggcatctcgcaacgcctccagttttggtaaaaccaataattggagagacgctatttctctatttagccatctcgaaagatgcgattagtgcagctatagtgcgagaagaggacaggcaccagcaacctatttactatgtaagtaaaaggttactaggggcagaatcccgatatccccctctagaaaaactcacattgtgcctagtccatgtgtctcgtaagctacagacatacttccaggctcaccccataaaagtgttaaccgatcagcccttgagacaagttttatcaaaaccagatgcttctagaagattgataaaatgatcgattaaactggggcagtttgacataacataccatcctcaaacatccatcaagggccaagcttcggctgacttctttatagaaggtataactccagaagaaattccacctgcttagcgagacgcggaaacttggaagttatatgtagatggtgcatccaacgagcaaggttcgggtgcaggggtgatattaatatcgccggaaggctttaagtttcactatgctctgagattccaatttgacgcatctaataacgaggctgagtatgaagccttgatcgccggcttaaagatagcagaggccttaaaagtcaaaaatctcatatgtcatagtgattcccagctgatcgtaaactaggtcctcggggaataccaggccaaaggcttgaaaatggcaaagtatttagagacagttcggaagaacttggaaagatttgattactttaaaataaattttgagagaacagaactctaacgtcgatgccttagcaaaactggcctcgcagaatgatctggacaaactaaaatctggtttcggtagaaatgctaagcgagccaagtatatgtgaaaatgaagaagtcgagatgatagatggctctccaacatggatgacgcctattgttaactatttactcaaagggcaacttccaaatgacaaaatgaggtgcgaaaacttttgtatatagtgcctcgctacacaatgatcgaaggtaaactatatagaagagggtattcaatacccctacttcggtgtgttcttcccgcagaaacaaaaaaaatcattagagaaattcatgaaggcttctgcggggataatgcgggttggtaaaatctatctaaaaagatcgtcagacaaggatattactagctaacaatcaataaggacacatatgagttaatcaagagatgtgataaatgtaaaagattttcacatatacctcgcgtaccaccaacagaacttagaatgatgacctcgccctacccatttgctatatggaggatcgacctgattggggcattacccactgggcgaggaagagctaagtatgcggtggtatcgatcaacttctttactaaatagacggaggtcgagccccttgtatccataacctggaagaaagtccttcacttcatcgtcaagaacattatctgtaggtttggaattcccataaagatagtatttgataatggaacccaatttgatggcgacttgttcactgaataccgcaagaggaataaaattatcaaaagcttctcgccagtatccaggcctcaggcaaatggacaagtggaagtcgttaataaaaccctaaaggatactattaagaagaagttagatgctgccaaaggcagatgggttggtgagctacctcaggtgctctaggcccacagaactaccgagaaaacagccacgggacacactcctttctcactagcatttggctcgaaagcaatgctgaatgttgaagtgaatatatcgactcacagaagagagttttataatcaagaagaaaaccatgaacttttaaaattgtccttggatctacttgaggaaaaacgaactgagtcacaaatcaccaacgctgcataccaacaccgagtcacaagatacttcaacaaaagagtcaagaaaagactgttcaatgttggagacttggtgttaagacgagtctttacaaatatgagagatgcatcagcaggagtgatcaacccgaactaggagggtccataagtcatcgaagcagtagttgtagtcagagtctataaattggctcggcctgatgctcgctaataaaaaaactactggaacgtagaacatctctgaccctactataaataaataaatgatgtaactcgcattactgatgtaaactttaaacttcagttatgaataaagataatcatttatattaagtaattacaaagtttcattctttaaaattacttaaggggcatttatgtatgatttaccgaaattcatctggaaatacattgtataatgcaaactcgccatttcagtttttttttttaaattcaaaaggttctcgactaaacctctttgacgaaagtggagtcgaaccgttataacaacctgactaaacctttttgacgggaaaggggttgagttgttataacaccttgatcaaacctttttgacgaagaagggatcaaacaactataattttttatttataacctatctaacgggagtggaaaatcaaaa

SEQ ID NO: 226726 - DNA, 1319 bp, Cannabis indica
cgacgacaaccaaattaaataccagttggacccaaacaccatactgtcatcaactagctaaggcaaaaaagagcagggaatggtgcagtagcgccctataagagaatttgctgtgaatgctcctaatagagacatcaaggcagtggttccaccccaagcattgacaatgtaaatgtataattgaaatctctccaagaaaaagaaaattgaaacatgagaataataaaacagcacagaaattaataaatctaaaatcttgacatacagaacaataatttttgctttttctttttaattcaaagtacaataataaaaattcaaaatgctttgcaaataatagtaataatataaaaatgaaaagaccaaaagagagagaaacttacagcatcatcgaaggctttcttaacgatcttcatctcatccaaacaaaacctagcaggagcgagcttctgcggcgaaagctcaaccccatcgccaccgcttatcaccgttttacggtcagaaacccacatcagcttcttcacaaactccaccacaaacacaaagctaaaccaaatcaccccaatcaatctcacagtcccatcccaataatcgtttcttttccttttcttattaacaaccatacccatgctcgccgcctcctcaggtttcccgactttccggcaaccggccaccagcatcgacatcaacgaaataccgtctccgagagcagaacatttagttgagccactagatactatatatatatatttaaaaaaatgttagatggggagctcatttttcaagaaattctttcacattctctttattttgttggtaaaataatccgcatataccaactaaagccccacatcgcttagatagtttttaggtattatctttgttggttataaataatactttagttaaatttcttttcttagtctacaatttttttatatattttaagggtgattgactaatgtcttaacccataagtattttattaatattttatttttaacaattaattttttaataattgtttttatataaatatttatgaaaataattttattttaagaattttatttacactattgagtatttttatattgttatttgttcaagtaaaaatattctcttttaatttttatttgtttaaaagttaaaattttattttttattttatttgtaaaaagtgattattaatgtcatatatgactatttgaatactcttgattatatatgcatatatattttttgttatgttttttattgtttcaattttagaatatagaacataactatttttacaaattgatttatttatttttttt

SEQ ID NO: 226727 - DNA, 2559 bp, Cannabis indica
ggtaaaataattccaacattaacacctagagcgaagccagtttctaaagcaccttatagaatggctatagaaaaacttaaagaattaaagattcaactttaggggatgcttgacttagggttttctcgacccaatgtgtcaccctggggagctccagtgttatttgttaagaagaaagacgaatccctatgcatgtgtattgattactgggaattgaacaagttaactatcaagaataagtatcatttacctaggattgcaacttgttccctcaacttcaagggaagatagtcttctctaacattgatctccgatcgggctatcatcagttaagaatctgagaggaggacattccaaagactgcttttcacactaggtatggacattgttgacctcaaaaagtgatcaactgacaacgtggtcatatagatctaatgcttgtcacatgtttgcacaaataaggatgaaaagcaatggacaatacgatttattatggaggttcggcccccttgtgattgcgggtaatgacctaccccccttttagttgtatttataccgagggaattactatccagattgctataggtgggatctgctatagtacccttaggattacaaggtatgaaagcactagggtaggcgtgtaagagagagagagagtgagggagagtgagggtttatgaaacactaagagtttaagagcaggtttctagcttagaggaaactaaagtttttagccaaaggttaaggcctttatataagaggcctaaaaccctaagtttacaattcaaatcccttagcatttgtatagtttgttagatatttactgttattcctgaaattcggctggtacttcagagaaggacacatgccaaactgggagaatatgaatcaacaaatattataatgattatattagaagatattaaaatggaataacttattaaatgtagagctaatagagtatatttataacttgctgactgtaaagtcttaagcgagataaggatgtacaaactattagttcacgtattgacgagaaaaccattttgtatacaaagatatgatcataaggacaacatcagtattacaaagtgaggcaccaacctcactacgtatgaagagatgtaagtaagacatgttgactgttagaacacttagcgtataatatacattatacaactaagcataacagtagaatgaacttgaacagcaaatagcgagacatccatctcgctataggagggcatactcatggtaccttcacttatcagcttcaaacatctttcaatgagattcactgctctgtcgagtcagctctctcagatagaagctggcatttaaatgatgttgattactgaagttcatcttgtcaccaagaactacgattgtcagatagagagttatgtctttaatcgcaaaaacgacgagacttacattatcaacctcgaaaggacatgggaaaagctttagctcactgctagggttattattactatgttcccagcgagaagtcccagtacgatacactttgcagcgtatttaatccacgtacgcattaacccggtaaaagcgggccaatacagctatgtaattttcaaataataactgcatttattttacgtggaacataatcaaatcccacaattttagggtattattgttgtaggatatcattctgatttgtaattaactgtcctcctatgtaactataaataggagtaggatacactgaaaaagggatggaaaatcctttagagaaaaggccctagttttgtatcagaaatctaataagatagactcgtggactatgcaaaataactacaaaaccacataaaaaagctttgtgttacatcttttccttttactactattatttctgcgtaactccatcacgaaataggctttaatttagttaacaaaaatctgcgttaacagtttggtgctttcattgagagccttcgtgaaaaaagctcagaataaactctcctaaaaaaaaacctttctccatggctgataacaaagagaatgttgatactcatcctgaagagaccactcaccagcttggaaaatagccaatgggctcacgggggcctcccaactcatgatctatggggaccactcgttccaggaggattcaacctgaagatggcccaagtacatggtccactcgttccaggaggactcaacctgaaggtggcccttgtacacggaccacacgttcaaggaggacttagcatgaaaatggccagaatccagaaatagggtatgaagagctcaaaatgaatgttggtggtgctcaacccaggccgtgtgatgaggatggttagtagatccataatcaacaatccaaatagatttgtcattctctaaaacacatgattcaaaaactaaagcattaccattcttcttagtgttgagaaatttgggacaatttgatttaaaatgtcccttatgttcacaattagagcattgaataatatgtatgcttaactgttggaaattattttaccaggatcttagatctactcacaactatgttgattaacaccctaaata

SEQ ID NO: 226728 - DNA, 2196 bp, Cannabis indica
ttaagtaatcgcccaaaggcatctagcttttgcaatacttgggtgcaatggttggtgggtgtacacccgaatagggtgagcttggaaatagggccttaactcttttgtttgtaagattaggcagtaagtgagcttttctttcataggatatcgaccttcagcttcaacgagtctttcgttgatatagtagagtggatgttggacgttgttttcttcccttatcagctcggtgcttacagcatatttggtgaccaaatatattcctaattcttctcctttcagaggttttgagtgtacgggagacttcgcaagttttcttttttaattcttggaaggcctttcatctgtccattcaaactttttattaccccaaaggatgttgaagaaaggaacacacttgtttgttgattttaaaacgaatctgctgagtggggctattcgaccagtcaacctttggagttcctttgtctttgttggcgatttaatatccaggagggcttgtattttctttggattagcctctattccccgagcaatgacaataaaatcaagaaacttacccgacctgaccacagaggaacactttaagggattgagtttcatgatgtattttctgaggattttgaagcattcagccttcctggatttgacgagcatatcatcaacatatacctccatatttcatcgggtctggtctataaacattttgtttacaagtctctagtaggtagctctagcatttttaagactaaacgacattaccttgtaacagtacagacccatatctatttggaaacttgtatgttctttgtctggtggatgcatttagatttgattataccccaaataggcttccatgaagctcaggatttcaagtctggctgttgcatccactagctaatcaattcttagaaacggaaaataatccttgatacacgcctagttgaggtcggtaaaatcggttcatacttgcaattttttgttcggcttaggtactagtacggggttagccacccaagtcgggtagaaagcttcaatgttgaacttgatcttgcccagtctctcaacctcttctttcagtgcttgcgctcgttctttgtctagtagtcttctcttttatccaacgagatgaaagtttgggtcaatgtttaggctatgagacatcacagtgggatcaatgccgaccatatcctcatgtgaccaggtaaaaatatcagggttttctctcaaaatttttattaaagcttattttatttcgagcaacaagcccttactgattttgagtttcctggttgggatatcttggtctatttccacttattcctattcttccactggccttgcatttatgtttgtttccccaagttggggatgcatgtcttcgtcctcgccatgggcgacttcctattgggcaatgctctttcccttgcctaaactctagccagaggtattttccttcttgaacttggttagagcgaggttgtagcattcccatgcaattccttgagttcctctaagacatcccaccccagtctttgttgggaacttgacgcataggtggaaaactgatgtaacaacttttaagtcatatagggctagtcggcctactattacattaaaagtttaaaggacatcaattatcaagaattgtgccatcacagttatgctcctcggagcttgtccaacagtgaggggtaggaaaatttatcctagaggtgcgacgcttttgctagagaaatcgtatacgagttgggtgcaagggatcaaatttttaagttggagtcccatcttctcataagtcattttaaataggatgtttgaggaagctccattgtctatcatagttcgtgccattgtcttatttgcaatttgcacttccacgaccaggggatcattgtgcaggaaatggacctgactggcatcttcttcagtgaatgttattggtggctcgcctactcatggtatttttggttttctctcttccatggccgagactgtttcattttgttcgtactgtaatggtcaggcataattttctcgagctttgcctgagtctcaagtaggatctggacccccaataatgacctgtaaatgcccatccaccggtggaggcatcaactggttttgattattgtctacttgggtggccttttgcttatggtcagccttgaattacttctgtaagtgcgggttatt

SEQ ID NO: 226729 - DNA, 1116 bp, Cannabis indica
tttctttcttcttctttcttcatttattcaaaaaccttattctttccaccaccaccatcataacacaaccactaaaaccaccacccactgaaaccacaacattctcccacaatgaagcctctacgactacctctacatcaatttttgcaatagcatgcccctctttacacaaagtctaaatataatgaagcttagtattagaaaaattaagtttacctccattgaatttagcctagactatcttcgagctttcctaaaattgggcttaacaatattaattagcatcaactgcacttgtagcaacttctttcttctcactattggactcatcttcacctactacaatctcccaaccttcattatcccctgcaattgttaaaaattattttaccaagatctagatttgctaacatgtatgttgattatataattataacttaaaatcctaaatatgaaatttctaaaaatgataaataaacacattaaggattaagaaatacttacagtgatggcagcggaataatatgactccttccattcagatttctaacccttcatttctatctatagtagagtattattaagatatgaacctagatatactcctccttccattgtgttcatcacattcctccacaaaggcctcagtatcaccttgaatggtgtgggctgatactcaaacacctttggagcaatattttgagagagaatacaatgtaatttcaaaatatacaagagagagaagagaagagagttgtctgacattggaaacttaggttaattcttattctcatcactttctttatataggcttcacttagggctaggttagatgagattggacctaaaatagagatttggcctgaagtctaactttagggctgaatttcttatgggctttagagttagatttatgctattttatttcatttaaatgaaacaatgtatcttttcctttttaccatgtatctcttctaattatttaaatagtaattttatattaataactataaataattatcaaataaaatataatttaaatgtatttattaattagacccacaaagtgtactaattaacaaataaatctttattctcttttcttctcaaaattac

SEQ ID NO: 226730 - DNA, 1624 bp, Cannabis indica
aattatttactaaattttgaaaagagaaaaaatagtgggacccagggagaaaacaaagggaaaggttctccctccattttcatagggaatacctttcccttttctatcttaatttattttaattttaattttattaattaaaaatgaaaaagacaaatatgcctttaaaaatctataaacagaaaataaaatacatgttctaataatgacaattttattaaattaaagcattccgattacattttctagttatgtaaacaaaataatatgattcgagttttcttttcggaaaatttagtaaacagcataataaattacttctgattattttctattttaaaccgatacatttttcccattaattattctaattctaattacagtttaataaaccgtcagtgttcggttagattaatttgagtgaaaaataataataaatttaagtttttaatatcctattaaagatgacctaaaatacttttcatatatgaaactacttctatttttatatgtctaataataatgagatattgtagtaatctcatatataggatagctttatgtgttcgattagattaattttagtgagaaactgcttctatttttatatgtcttagtaggaatgaaaaaaaaacagagaagaggatagtaaaggggacaaaaaaaaaaaaaaaaaaaaaaaagagatatatagtggtcaatgactcattaatgtagaaataaataataatatttatggtcatggccggtaattaattaaataggaactttttacaaataatttgttcaaatgtccttaaaaaaaactttgttagtttactatcacatactcacaaattttcatgttatttaacaattggccctcgtaataatttatgcatatgtaactgaaaattgaaaatattcaaaaaaattaagctaaccacaaaaagagcattagtttataagaaaatcatcaactgttaaagttaagagcatttatatatattacatgcattaaatactgaaggacttaattttcttgcaaaaagaaatatatatatatatataattatattagtgaccggacgttaacataaaagggggattaattagacgaaataaatatatatttttttagtaaaaaaaaaaataaagaaaagaaataattatctcatttaaaatcataatcaagagcataactagagatggaaatttataccgcggggatgggtaaccgcgggacccgccctaagtggggtgggattccccatcttagtggttaatggggcggtggtggaggacaatttcaatacccgaagcggggatggggcggggcggggataatactatccgcaccatatccgaccccgatatagatatatataatttttttgtttttttttcaaactttgacacatatttagtttttattttctattaggttatgcttttttttaagtaggtttattttttatcttctatgaattatgaatgcataataaatatttgtgagaatattagtttaacttatttttttcaattattttaaattaatttgttttttcattttaccttaatggatacccgatgggttccccataaccgatgggtattcccctaccccgaatccgttggttattag

SEQ ID NO: 226731 - DNA, 1065 bp, Cannabis indica
tctctctctctctctctctctctctctctctctctctctctctctctctcttgtctcccacgtgtacatactatttcaagtgtgcgtgagataataaatcctaattttattatagtgtctcatgagttgattacacattgtaatacttaaatctattcatcctataaaatctaatagctcactctattcctgagtgttaaggctacttggaagattaaagtgcggattcttaattaaatcaagttcttagattggatgttcaattgttatatgaaaagaatcaaggataccctgataggcatcaagaggtaattgaatttctttcagtagattagatttaatctatattattatgttgagatctttgggcttatgattcatattggataaaaattattttaccaaaattttgtttatgtttttataactctgatatggaccataaaaactaacaaccattttataatattttcttagtgtgctttttcttgtattatttgtatataaataaaaaaaaactaatatatgaatatatgaaatctgatttttaatttttaatattattttttgagttgtctttttgaattataaatctaataaaattattcatcaaacataaattttgattgatgaaatgcttaaatttattttataattaatttttaattaatatatgaatgacaaatacccaaatttctaaggctgaaaagtcatacaccaaatgtaatagctcaagatatataaaacacaaaagtaatcaaatagtcttaattgataaaaaattattttaaatatttgttacaaatgttatgaaatttaagtttatattatgaagagatttttatttattttaaatattattagtagataaattttattttaaatatttgttacaaaatgataataattataaatattacataatattaaagtacatagtaattaccaaccttcttgccaaacatgacaataagaaagcgtactctagcaacttaacgtaaggcagagtttggttttttgggggtgataatggaaaaattgacagataagtcacccttactgcca

SEQ ID NO: 226732 - DNA, 2500 bp, Cannabis indica
gatatgtttgaggctctctcatggtggcaactgcaaaaataaaggctttataaggatcagagatgttggaatatgaaataaaattagagagattgtgtggtgtggatgatttatcctgaattgaagaatagcactcgaaatctctgagataagatggaagtttagtggtgcgggttgatcttcttgtaggatttgaatttgaggcagtatcatttgtttgtgtactggaagcaggtctgttatctggtgtatcttgttcggttgctgtgttgtttgttgtatcaggtgcattagttgcatctgagtcaggtgtttcctgatctgaatgaacatgatctgaatgaatatgttgcatctgagtcaaatgtttgttgtctggggggatagtcacagacagcagtatcgttaatcacattgctaggtaagacaatattagaaaaaggatccaagttagaattgtcagtattcagcttgtgaaaaggaaaaatattttcatgaaataccacatttctggaaataaaaatttgatttgtattaagatcaaacagcttatatcctttgactccgtggggatatcccatgaagacacaagttcgagcgcgaggtgagaactttgttctgtgggcagagagtgttgaagcaaaagcaagacatcctatagtcttgagatgttcatagtttggttagcttattgaaaagacactcaaaaaggtgttttatttttaagcaaaggtgtaggaattctgttgattaaaacgtagcagccatgacacattcgctccagaatttgatgggaaacttagcttgaaaatatagtgctcgagccacattgagcaagtgctgatgctttctttcagctacagcattttgctcaggtgtctcgacacaagtgaaatcatgcatgatcccgtgttttgcaaatagttctttgaattctagctcaggtgcgttatcagacctgaaggctttaaaaatgcaatgaaactgagtttgtacataggataaaaactgaggaataatggtattgacatcagacttgtgctgcattaaataaagccaagtaaaacgtgagtggtcatcaactaaagtaagaaaatacttgtgattagtgtgtgaagttatgtgataaggtccccatacatcacaatgtataagatcgaaaatgtgatttgtcatattgtttttattctgaaagggaagtcgtttctgttttgcagcaggacagatataacaaggtttgttatgtaaagtagtagtgttacaatgtagaatttctttaagagtatctaatcttttatttgacaaatgtcccaatcgagagtgccaagtctcggcagaaacggagaaaacttgagtggaatctggtgcatcatcaagaatgtagagcccattgatattgctaccttttccaatcatcctctggttggttttgtcctggatataaaagagatcagaatcgaaaatcacagatacagcagcattctctgtcatatagctggtagatacaatattgtatttaaaattgggtgcaaaaagtacattagtgagaacaatattgttgtttaaagtaacagtaccactttgatgaacatgaaaataatcattattaggcaaaacaagtttggtagtaggtatcttacatacatattggaagagttttatgttagaacatatgtgtcttgtagctccagagtccataatccaagaaccatttaaaggagattgagaattatgggatagtatgatacctgaattgcctgatgaagaggatggttcggatatattcataccagattgttgggaggcaagcagattaagtagctgctgatattgtgtagtggtcaattgaggaaataaggcttgactttcttgctggttatttccattgttgtcagtggtttcgacttgatttgcattggcttccttgggtttatttttgttaaaaccaggaggatacccatgaattttatagcatctctcgattgtatgtcccaaaatgttacaatgagtacaaaaaggtctgttcttctttgggggttgattctttgaagtcgaattttcactcctttgtccagtattcttgtttccttgaaaagcatatgccattgcagggttcgggttgctggtgttagactgagtacccctttgatgctcttcttgtgtgacaagatgaaacacacggctcacttctggtagtggatccataagaaggatactaccacgaacttgggaatatgaatccgaaagacccattagaaaagacataatatgctccatatgataatgatcttggagtctttttactccaccacaagtgcatccgttgcaggtgcaagaaggcctgaaattggtcaattcttcccatatagttttaagcttagtaaagtacatgctaatagtttgattatccagtttaaggttcatgagatcttttctaaggttgtatatatgggggccatttctctggtggaatctagttttaagatcattccaaatggca

SEQ ID NO: 226733 - DNA, 2818 bp, Cannabis indica
ccgcctatgcctagggccggccctgttgaccatacaaaccaacacgagtatttctagtgtgctttgtcctcactctcacttttttcgaaaaaacttatacaggaggtcacccatcctgaaattaccccaggtcaagcacacataaccgtaaaattatttcatgacgggctactgaaaaacaagatgcaccttgttaatataggtagtaccaatcaatctatttaagctcttttcaactgtgtagtcccatacatacataatcatagaataatcacagtaattgaccttccccatgcgatgtgggattgcatagtttacccagtatttccccttacggatcctaagactactgactgtcacaataacccccttatgaggttcgacgtcctcgtcgaccacacttccgactaagtcaaggctctgataccatttgtaacgtccccacttcaagcctttattgccttttacacccatgaaatgatggttcttatacacgagtacgtcactttagttgcttcatagaatgacgactgaccctacaaaccaacacgagtatttctagcgtactttgtcctcactcgcacacttcttgagaaaaattcctaggaggtcacccatcttgaattaccccaggttaacacacataactgtgaaattcttttgtgatgggctaccaaaaaataagatgcaccttgttgacataggtagtatcaatcaatccatttaagtcaactcgcacacttcttgagaaaaattcctaggaggtcacccatcttgaattaccccaggttaacacacataactgtgaaattcttttgtgatgggctaccaaaaaatagatgcaccttgttgacataggtagtatcaatcaatccatttaagtcattttcaactgtgtagtcacatacctacacaatcatagaattatacttgacattttccaggcgatgtgggattgcacagcttacctgatactttttcttacggattctgggactactaactgtcacatattatatatttatatgaaaagaatttgggtagggagctaagatcaccatatagtgatcattattcaagtaaacataaaaattaatggcatgtcattgtagtagttctacaaaattgtgatttttgaggctttataacccgactagtaaataatagcttgttctgttttaatttatttatcagtatttttggaattgattcttttttttttaattataaccaattatcgagttattgtattttagttattttaatcatttagttgtagaacggttctattttaattttatgtctcaactggtttttatttaagtaattttagaaaacagttattgaattatatttatttcagaaaatgatttttgatttaattgatttcaatgaacttgtttttaatcaagttgttttgggaatcgatttttgatttagttaaaacaaggaaccaatttttaatttatttaactatatttatcgtgtaaaattttatcttagttgctttacataactagtttatttatctcggatttttaattagttgataaatataacaactttttttatcttatattttgagttattatgtgttatttatttttttacttattttattaggaaccgattcagtttagatttatgcctaagtatttttagaattgattcccacgtttttttttttaattataactgatttttgaagtattatgtatcatccatttttactaaatttgttgttgaactaatttggtttttaatttatgttttagtgttttatgaactaattttctttttatttttttaattataactgttttgagttgttccgtgttatttatttttattcattatgttatagaactgattatattttaattataactgatttgagttatttagtgctatttatttttatttattataactagtttgagttattttgtgtcatttgtttttattcattatgttatagaaccggttctatttttaattataattggtttgaattattgtgtgttaattatttgtattcattatgttatagaattgattccatttgaattataactagtttaagttattctatgttatttgtattcattatgttatagaatcatttctactttaattataatattcttttcagtttattttatgttatttatttttattcattatgttatagaactgattctattttaatttatatttgagatttctacttctagtgacttttcggtagattttttcggtgaatttttcgacgatgataacttttttgacgattttttggtgatttttctaacgactttatcttttccaacaccagtgactttcccgatgacttttctgatgccggtgattttcctgcaatacttattattataagttttatcaaatttatttatcgtatttttttgagtaaatactattttggaccttgtgttttgtaaaagttatcaattggactctctgttttgttaaataacaaaatagaccatatatttttcaaaatagtaaaaataggaccaataaactcaatttttaacaattttattttttaatataactaaatttaagacaatttctaacagatacaaaaaatgtaaccagttttgccataacatctttagatcagattattattaagttttattttgtacaaaaaatcagttcagggtcatatttgtacaattttagaaaatacaaggtctatttgtcatttactaaaacagatggtccaattggtaacttttgcaaatatatggtccaaaatgacatttaccctattttgtttagtttcccatatttt

SEQ ID NO: 226734 - DNA, 3477 bp, Cannabis indica
ataagagtccaccactactcccacacaataaacacgaaagctataagaaaaattgatatgtcttaaaacaccttcttcccaattaccacaaagcttagtctgcgacaggttgaccaagctggggaatacttgcgcacaatagtccacaatgcatttattgcactagggttcctcagactccgtacattctagcataagatactcaatgcggctggcaaatattaattaattaaaatttgtagcataatctcatttactgtcatatattagttaatgaaaatttgtggtataatctttttttagaaattatttggatttgatatgtaatacatatacgcattatatacatgtggatattttaatataatgtatttaatttttatgatttgttctcatttaagagtatatttatcaaatttttataaaaatattatttttgttatatagtaatttaaaataaagagtaacagaagaaaaaaaggatgaagagagaaattgaaagtggaatactttatttcaatgaagtgattatttatttatacaaaaatgtgagccatataataagaaactaaaaaaaataattataattacaataaaaattgattaaaatatttgaacatccatatatatatattatttataatactcacccttagatattataataactatctcattaataacatgcccagaaaacctagtaggataaaaacttggtcaagggaaaaatagtgcagtgtgtattaaacatctctcattttggcattcatggagatcttctaatcgacgaactttgatcttatgtctcgtcttctcaaatgttaatgatggtaatcattttgtgaatacatttgtaagattttcacttgaaataattcattgaacattaatcgatatcaccgcttgttagaacttattttactagaattttaatttactaattgttatcccaattttttctacctaatgtggcatgtccacatagtcaaaactgaaaccacgtggaatacattctataaataactggatagggttaccttgtccagttcaccaattatcaagattttaagtctgtcaagcaggatccaacaagaagaaaatgacaagccatggaaccctagccagaccataactggccagccaatgaaacatcacacgtcggctaggccctaagaataagggtggccaaccaacacgggcagacagcgtcaagtaggctgaacaaattgtagggtccacaacaaccttctaaaagattctcaagctgacctacatttacgggagagacccaacagcccatgaagatagggatattctctcaagatattgttcttatattttagggatttaattatacttttttgtgtattttaaataaaatataaaaagatgttaatatccatattttaaaggaatatatcttcctttttgaataaaaatatcttgtaagtcctacactatatatagggtatagatctagacccccttccacacgcctatagttctctctttctctaagttccatacgccatttatgcttcctagacactaagtcaattttttacttaagttcttcacaagatctcacaaattttggatctgtaacatattgttctcacaattgtaatacataagagagccataactagaaattacaaggttttaacctgtgatctgcgtggtattctctcaagagtgaattcaactaaaaaggggagtaggtcattactcattcatcaaggggagcctctataaattcgtttgttatttttactatttattattcttgtttacacgtggtgatcatcaccaattataagccttcattgtcagttggctaaatttcaagtcagcactaatcatatatgttgattataaatattataatctaacattcaaaatatcaaaatcctaaaataataattcaacatgtattagtttaagaaattttatattggttgtagtagaaatagtatgattccttttgttcagaagaacaattctgggtgggattggccaactttaccattgatgagggtcccattgatgggtgtggaatattgaaatggaatccacctgtctcattctggaaacgtggataacagggtcgaacctatataaaaatccttaggttcttttactttctagttctaattgtgtaacacgttgcaaacatcagattaatatgaccttgctgtcggttggccacattttaaggtcaatagttaagttctggcttaaatgtagtacatgtatttttttttcacttgttcgttaaagctgaataaatggattgcccaaaatacttatatcttgagaacatggttgtgcaattgagtgggagcgctaatcacaaatatcgaatctatagcttttataactgtttagaattgaaacaatgattttcataaagcttggcttaacagatataaatggaagacctcttatttcaatatattagtttaatgaaataatatttataagaagctaagggttttaaggataaaatacattgaagggtagaatagaaaatttgtacctaattgatgtaaataatatatagaggatctttgattatttagattgaaacaatgcataattcatagtgtctatatttggtattgagagcattgtatgtaatcatgagtgcaattccaaatctatagtggagtcagaaggaattaataagttaggaaatttacttagtaaatttcgaatctacttattaggagcttgattatataggcccatggtgtctatatattttggaacaatatcatcttgtagactcaacgaatttatttaataagtttattagaatttgaaaatagaatatgtcttatttgagaatttttaccatgtttaggcaattttgagaagaaaagaaaaataggggtttatttgttaattagtacacttagtgggtctaattaataaatatatttaaattgtattttatttgataactacttataattatgaaaataaaattggtatttaaataattagaagagataagtggtaaaatagaaaaagacacattgtttcatttaaatgaaataaagtggcataaatctaactctaaagcccatgtagaattcagccctagagttagacttcagctcaagtctatattttaagtccaatctcatataacctagccctaagtgaagcatgatgggttttatgccctaaataaaacttcatttcaatgtaatctttattattcaaatataaccaaccaaagctctgaaactaagacgaatcaacaacacaaaatttttggggaacccagcagcaaatctggttaatcgatttacaccagaaaacccaaacaattcgaaaacctaacaaattcgaatccagtccataccaaacctttcatacctgcatattataccctaatagacatatcccaagtaatagaataacatagcatgctctaaaacaaaaatcaccattgaagagccaagcttg

SEQ ID NO: 226735 - DNA, 1818 bp, Cannabis indica
tttaatcaagccatgttagcaaagcaggcttggagttttccatactcctaattctctactcagtcttactcttaaggctaggtattttccacacacttcttttcttgatgctgttgcatgtcatagtccttctttctcttggagaagtatcatgtggggtagagatcttcttaagagagggcttctttggaaggttggcaatgggcaaactattaatacacttgaagatcgctggttgcctaattttgctcttaaaagctctgatttgatagccactctcccttctccttctttgtcattttttatttctccttctggtgcttgggacttgaataaactgagatgtcattttcctgatttcgtcattgataatattttggatatacctatagctggccatatgtgtcctgatgttttaatatgggggaaggaaaattctgggattttcagtgttaaatctgcttatcatctcgctattagctctagagatatcccatcttcttcatcttttttgggtaataaacgtttttggtctaagctctggtcctcacctattcctgctaaggttaagcattgtatttggcgtattcttctcaattctatccctgttgcttctaatctttatcataggcacatcatccctgcacccttttgtcctctctgtcatgtagcaccaaaaacggtaacacatgctttccttgaatgttatagagttaaaactgcctgaaagaattcttccttttctactttttatgcagaacacaagtctttaaacatcaatgcctttatttcgaaggcctttgagatttttgataagcaaatgctatgtattttcttttgttttctttggatggaatggtcacaaagaaataattattttcaccatcatagatgtttgtctccaatgttcatatatgatcatgcagttacttatttgcaggattttgagtttgccaatcttaaagctgatgttagacgtaatgtgcagcaatcttctagcagtcctcattcatcagttgctccataccgatacaagatcaataccgatgctgcacttgatattaatctgaagaagcatagtcttggtgtggttgttcgaaatgatcaagatcaggtgactgctggcattattgctccggtgattgggaatgtgtcacctgaaattgcagaagcaaaggctattcttctggctttagaatgggctcaaagtgttaatcttcctgttagtattgtggaatctgattgtaagagtttagttgataaaattaatggctctttttgtaattattctgttattagtgatcttgtagtgcgtattcgacacttgttatcgtttagtcctgcccttatactctcttatgtacctcgtgagttcaataaaatggctcacaattgtgctagggtgggtttaggattagatagcaagtatgtttggaatggttgtttgcattcctgcttttctgagggatcttgttgttttgtactctattttctcaggttataaagctttcttttcaaaaaaaaaaaaaaaaaatacacaatcttctgattccgtaaaaattccattgtatacttttgctagtatgagttagtagtcaatctaacaaaagtgttaaaagtactaagttaattaacacgtgatgcaacttaattggtcaacttttttttttcttataaaaaagtgtttatattgattttttaaatataaaaaacgatttcactctattaaatatatatatttatagttaaatttgtttggtaatacttattaagaagtgttctattttttttttattatcatttaaatattatattttt

SEQ ID NO: 226736 - DNA, 1431 bp, Cannabis indica
aatacttcctttccctggtttcatcccagtgaatcagagagcgacacttccttccatataacattttgtagtgagccatccctatggtactatggtaactgttgttataggaaaactctatcagaggcgaatacttattccatgaacattaaaaatccatcacataggctagtaacatatcctccagcatctaaatcgttctctcagattggccatctatctatctgagggtggaaatctatactgaaatttagccttttacccatggccttctgaagactgtcccaaaacttagaagtaaactttggatctctattagaaacaatgaactttggagccccatggagacgtactatctcattcacatatgattctacatactattctactgtatatgttgtatttactggtaggaaatatgataacttagtaaataatccattatcacccgaattgagtcataaagacccatggtcctaagtaaaccaaccacatccatagtgacatcctcccacttccactcgggtagtgtcaatgactgcaacaaatctgtaggtttctaatgtacaatcttaatctgctgacaacttaagtatctggatacataatccactacatcctttttcaaattgcaccaccagaagtagggtttcaaattctagtatatcttggtggtaactggatgtaatgaataaggagtagtgttagattcatttgaaatttcttttctgagctcaccactgcccggaacacaaactcgggccttgtaaagaaacaatccacaatatgacactgtaagatctttagcccaaccagccaaaactacttcccgagacttaaccaactcaggatcttccatttgagcacttctgattcattctaaccagaccacattgttaaatttctaagtttgccaaccacaaactcaataccttaattaaccatgtctatttctaaatgagaatacatcatgttggtgctaaaaacctgctcgggtcctttcttactcaacgcatctaacaccacattggctttcctggggtgataaaaaatctcacagtcataaccttaaatagttctaaccaccatctttgcctcatgttcaaatctttttggggtaaagaaatacttttttttttgataactcagaatttcattgcacaaacaatcatttttacaagcaataagcaccaagccaagttaggcaaggcctttgatatctatacattttatttacaaagtatgaaaccattcctcatcttttttgctaacttttttttggccatgaaagaaaatccaataaattaataaaaccaataacatagataatggcaagaaatagaagaattatgagtgggattaatttttacccacttagctaaatcgaattcttagttggtaaaaacaaactaatatgagatatataccgat

SEQ ID NO: 226737 - DNA, 892 bp, Cannabis indica
atatatatatatatattggtttgttttgtatttaaatggagatagaaagacataattgtgtagatggagatggaaatagatgattttggagattaagaaacaatagtttattttttaatgtttgttaaattttaattgtgctactgttgtgtttttctttttctttctttgttttttagcattttaatggaatataaaataatttatcattaaaaaaagtaacagatataaaataatcgatcaaatccgcacaattgtggattagattgtatttgatttaaactcttatgcagattgattggatccaaattataaaatttacacttactgcaaattgaatgttgtttgaccaaaaaaatacgaattggatgttgtttgacttaaaaaaatatggattggatcgaatcaacaacaaccctcccagtttctgttttctttgaataatttaaatcgttgtaaataggtttcaatctttgagtatcattacgagtataatgttctctccgaaatatatattggtaattaatttaatgaggttacttgtcatagtattattctcatttaagcacgcttaattgtggagttcaaattataaataatagattttatgccctaaataaaaatcatcttatataaccttatttatttatttaataaagaaaatagaaaatattttatgactttgtcaattgcttggcacacgttttgtttcacgtgattatatgtttattatttaaattttattaaattcagaaaatattcacaattttgtgatgtcatcatagtgaaaaataattatgactgcacaattctaatatttacgtcttgagatttatcagtgcacttaatttattctaatgtggtaatgagcgatgtagtagtgtatttacac

SEQ ID NO: 226738 - DNA, 1054 bp, Cannabis indica
tacgctagaaagattcatattagaatgcaaaatcggtagttgttctagagatttccaaaaggaaagaatgtgttgacaaataaagatttataaggtatcaagatgagttcatattagtgggtggaaataagaaatgctctaattgaatatctatcataaacagatacttaacttgttaatgagttaagtcagtaaatcagcttagaagatctcatagaaggaatagaaagacataattacgaattatgtactatgggatcttatgattttgactgagtagtaatggttggacataccaagttaatatgttgtctattagtgtagacaatttatacaataaatgaggatacagaattcatacgaaggaataatctaatcttgtgaaattgcaaggttggtatctttagctatgatgttaagaattaaaaaaagttattgagaaccatggaggttaaagcgaaaatagtatgatgtttgattcttgaaatatgggtaacctgagaaaatcaatggaatattagaaacatgttgtgagcatatttgataaagattagattatcttagaataatctctttccctgacaaagtgtttgtctaaaagtgataattaaatgtaccactagttaggtaccttaataagtgtggtacgagaaaaatattaaatatctgttcactggagtaagtaggccaggtagcctattagctagccttaactcctgcgttgttcggagtatataatgtgtcccatgtctccatgctgagaaaatatgtatcagactcgacccatattctgagctgtgacgatattaaagtttagacaaatttattatatggaaaaaaaaaacatcttgtccaggttttggactagaaaaataaaatattatgaaatgagacaattctactagttacgaaagtgctgtagaaaaatagcaagatagaaacagcaatttaagaattagaatcataaatatgggggtaatatcctgaatagtttaaataaacttcgaggatgaattttttataaggaggggatgattgtaatatcccgataagt

SEQ ID NO: 226739 - DNA, 1163 bp, Cannabis indica
aataaaccatcaacatgttcagaaacgacaactgagaattaacactgtgatgaccagatttcagaaagagttttcataagggagggttgattataatgacggatggtatgaagacgaagaagaagacttatggtaaccgaagacttaacagaacccacctcataagtaaaaacagtattttctttagaatttagaactagagaatttgagacattagcaaagaaatcatccatattgaaagacacaaaacacaaagacaaatatttgactacagaatgaaaaagtggaggggacgatacctggaccttcccttatataggtaaaaccaaaacgccctttgagagctcctagaggatctaccagtcatatccaatatcataggccaggtaggaaaaatgatgattctgtgtttcgattcatcattgtgccatagcttcgcctccatttttccaaaatcgaagagatagacgaaagtaataatgaaatttgggggttgggaggatgagagagatagagagaaaggccagatggaaagattaaggagaaagcaaaaaagatacccatatttaatgctctgaagagagattttaggatgggatagacactcagcataagacacagaagaattaatgcaggagttaatgaactgagagaagaaagacatagaaaacttaggggaaaaggctgtaaatcgaggaagtaaaccaccacaaaaccaatttgggtggaccataactaccatttttggtggaggaaaggaggtatgcatgccactagagtgctctagaaacaggagagagaaagccattttgaaatttgataaatttagaaattggccttttttcatagaaactactacaattttatgtttttgttgatctattgatttatattattttagagattagtatagtacagtttgtactactaaattttattatttctcaattatattttctcagtgtattctaaattatatgcttatatatttagatgttttataaatttttaatataatttacttatagtgttgtaaattatatataatttaattttctgatatttcataattttttaacagtaagtgattaatatgtaaatatatgtacatgtacatttatatattaaaagtgacctatctaacggcatttctggtttaacag

SEQ ID NO: 226740 - DNA, 1490 bp, Cannabis indica
catcaattctccctttctttcgaagcatcaagaaaccagctagggttgtagattttttagctcatttcagtgaatcctagcagaatttgagtgcttcacatcaaggtataacctcttagtctctcttatcttgattttcttaagctcaagctaggttttagtgtgtgattttctaggttggggttttgtgttgagaattaatatctgaacttgtattctgaggttagattgaggttcttcgagttgaaatatgttagattgattgctctctaatggtgttttggatttcttagttatttgttgggttatattgcttgaaatgagtctaatatggtatacacaagtgttttggagattattggaaagtttggggttgatttaaggcgttgagagcatttttggtgcttcttgcactaaactggtagacgtaccagttcagtgggacctgtaggagccggtcgaccggttggtccccaagaaatcccactgaactggaattccgattaaagaactagtctatcggttgggactattttgtaaaccctagtttttcttatttttgcaatatttagggtattaccatgctattcatcgatagggaaatctctagttttgattttaagtcttcaaaaagcgcgttaacatgtttctcatcaaatttacaaatattatgatataggatcctgtaaagcgtcaagctgctgttccactcaggctgactggcatacctgaactcaaaaataaggtaagattagcataaagtatttatatgtgcgaatgaatgcatgttatcattatttacacttctaacactggaatagtggtaagaataagtgtgttagtacagtgtaagatattatgggtagttacggtgctaccaacacgagtacaaatgggtactgagtgcatgtggtacaacacctagtagctcttggaagtacaatatggccctactatcactagtacggagtaggtacttctatgcatgtggtatagaggtcatacttctgttgagaactttcttaaccatttggtgagctttgcatttaggcccaggaaggccaaggtacaagctgatattgcattgtacatacataatttatgcatatcttactgagtctttcgactcatcaatttgctaccttgtgtaggtaagggaaagaataaagtggaggagtagtgagttggggttcagcaaggattgtacctattgcgacagtgcaacctggaggctttcgatcttattgtcttttgagtcaccctgttgatattgccacgtggcttataaataaatgctacgtaaaaatataagatatatttattttcataataggtttttgaatacgtggatgacaattttggtatcagagtcactgagttattcaccgaagaccgtcaagatatgtacaatcaagaccagtgtcgagcttaactcacggttctgtaagcttttaccttttggcaaactatttaaattatattattattat

SEQ ID NO: 226741 - DNA, 1421 bp, Cannabis indica
tttttaatatcaagctgatgcaaagaccaatgatgagtaactgccatataaatgaacagtcgaacagatgtgagtttagcaacgagagaaaaagtattacgatagtccactccataagtttgagcataacccttggcaacaagatgaacttttaaacgagcaattgttctatcttaattgaatttaaccgtaaacacctatttgcaccctatgactcgtttttctaaaggtaaattaactaagtctcaagtaccatttgcaactaaagtattcatctcttttatcattgtagtaagccaaccaagatgagatattgcttcacgaacaattttaggaatagtgatagaattaagataagtaataaaagagaaagaagaagagaagagatgattataagaaataaaaaagaaataggatatgtacattggcgtttacctttacgtagtgcaatgggaagatcatcttgagttctggatctgatgacgaagatgcaagtgcaggacattggtggaggtggtggatgtgtaggtattgtgggagctatgaccgaggcatgtgaaggaacaagagagtcgtcagaacatgtatcgggcgcagaggatgtgatagaacataccaacaaatcatcatcctcccctgatgagtaggagtaggtgatgaaaagtaaggtgtattttccacaaaggtatcatcaatagaaataaaatatttgttgagatcaggttaataacacttgtaccctttttgaaaacgagaataaccaagaaagacacgctttaatgccttagggtctaatttggtgacatgtggacaaacatcgcgaagtaaaaaaaaatattgtcaaatacccaaggagcaactggaaacaataactcacaagtaaaaaagaattttaaatgtgatctcaccattaagtatagagaatgacatgtgattaataagttttggcccaaaaaagtttaggaactttcatttgaaacaagagggcacgtgcagtttcaagaagtctttttttacgttttgctatatcattttaaggtgcagtatcaacacaagaagtttcatgaagcatgccattagaggttatgtaagattgaaattgagcagatgtgtactctttgacattatcacttcgccaagtatgaacatgtacataaaattgattttcaatctcattacaaaatgcacaaaatatagaaaacaattcataacgatttttcattaaatataacctagttacacgagaataatcattcacaaaagtaacaaaatacttgaatctaggttgagacataataggaggacccgaaacatcaaaatgaattaactcaaaaggaacaccagtacgtttattgacttgaagactcaaactaacaggataatgtttggcaaactgacatgactcacaatttaatgacgac

SEQ ID NO: 226742 - DNA, 1642 bp, Cannabis indica
ggtacagaagcttaaaaaaaaaaaaagcttccctcctcctttttgcacacaacttgtgtcgcccagtagtccacttgctcagtatttaggcaaccaacactccatacgtggccgaggttcattacatccaccaatctgaggctatcacgtggcactctaattttgactattgggtaattacatttttatcctatgtaatttgtaataagttttaattgcgcattagtctttttaccttcctataaacagaagcttgggtttttagtattcaagacaattttagatagagaattcttgagaaaacactctaagcgctcagtgttagtttactgttctttcttaattaattttcttatgggtttctaagttcccttaatattaaggtggacgataaaactaggtgtatttaattaaataataatttttatgttgattctcagtataaatacttataattttcgtttcttaaaataatttctttcatctttagtaacacatatttttgatagttagaaattattaatacttgattttatattttaataaaaaataatattatttgatttgatgtatttactttaaattatttcacttttaattaaaagttataatttcaaagcgaatgaaaatctatttttgttagaaaataattagtttgattactaattaaattatgagaatcaatataattataaatatttttataataatttctctgaataccattagaaatatatgctacttatcaattgtcatatttactattaaacacttttttttattttgttaccaaaaataacattattttttgaactaggttagaattttaataagttagatttaaaaagaattttcttcgatctcatgcaattctcatagatttgacctcgttcttcacaatctctacactacaataaagattcgtgcacttgcgagttgataaatgtaaaatggaccacttttgggtccaacaatcaacaaagtaaataaattttcaaaatttacttgagtgctaattacaatctcctattgtgatttttaaaggttcatgataattttgagtgcatattatcttgaaagataatgtgtagagaacaaaataaaataaagagattttatattaaagtgatattgtattttcactttatggtaaaatgtgaaggtgagatttgagtttaatcaaatttattgagaaattattgattatatgtgattttaaatttgatattctaaattaatattgtgctatgtgcatatgtgaaattttgacatatttagtgtcaaaatttggtagtaataatttcgagaagaaaattaaatctaaaatggttatgagacaaaatggttttatatatttttaaatcaagatacaaatatcgccttgtcaataaaatgtgaaagtgtgggggtgcatctccaatatgagaggtttagacatgtttggtgtctaaaactaaaaatatgtatatttgagacatgcttggtgtcttaaataaagtgtaactttcacatatttggtatctaaagttaagtgtgtaatttagacatgtttgctgtctaaattagtgtttaattttgatatgtttggtatcaaaattattgagaatttgaattgtgtgaaaattaatcttttatgattgaa

SEQ ID NO: 226743 - DNA, 1747 bp, Cannabis indica
aagttgcgtgtagacttcatccgcgctatctttgtgtttgaataggtgacacgtgtcaggtgcgcctgtgcgcgactcgatgtgaggctgactagtttttggctaataaatgctctgacaattaatatttcaaaatctgattttctatcacaacggttgacagctacacttgataacttttgatttcccatattcgcttttaggggggaaccgaggcgtctggggttattttgaaatgatttccccttttcgttgtctgcctataaatatcagtgagcatttgtccataaactcattttcaccaaccttccttgctaagtaagttcagagcgaaaagagaggtttttggcttcaagtttgctgaagtgcttttatcaaaactgcttgtttggcttgacgtaacttgaactcagacgcttgattccttgagtaagttctcgatttcctttatttttactttgcacatttgctttctgaatgcactttcgatttcgctgtagaagatatgtaagaaaccctaagttaagaaactctgtgattttccttggttacggttcatgcgatttcatcgtccataatacttgcttgttgaactgcataatgcctgtctttcatcttgcttattctaagcttcatgaaaatcttttgccctaactagcgaaaatcctaaacttcctgagttttgacctttcgctgaatattcttattctttaatctgttgaatactcctggtcggtatatttgcccgttttaacgttcgatatcccaaccaaacactcatcttgtgtgttgtcttttgtagatgaacccaggtgagttttggggaagcgaacagcaaattgaccaggatttgcttcaactcttgcacgaggatcatcctcgtctttgttctagtccaacttcttcgagtgacaggcattcttccttaagtctttcgtttagccataggatgatggctcgtaccaaaaagacaatgcgtagcgtcgacacattagaccctcaagtggcccggcacgccaccttacccagcgccgaacaagatccagccgtctagcacacagattttttgaaataaataaaattttcaaaccatgctatcgacctactttcaaattgactcacattaagtaaattgactcaaaataataaaaactaaaaacttaaagacttaaaatttaaaaataaaggactaaaaataaaaatttaagttcaccccccaaacttaattgacacattgtccccaatgtgacattaaagagagagaaaatggaacttaccagagcgccacatcagtatggcggtggtagtggttgcaaaatttaactgggatacagtccacctcttgcatccataagggcccttataccaaatgaagagaactgtcctccaacgctacaaatttcaaagctatccctagactaagaagcaccttaacaattcccacagatcagtcttttcatacgtcatcaaaaagtttgaaatcgttctttgcgcttccttttattcttctcgattatccttttcaactaccactcgacaacagttaagaatttcaattgcggcaaagacattgaaagtctcttcttccttttgaacacacaaatttatctcccccttttgcacattaattaatgctctccccgtggctaagaatggtcttcccaaaataataggaatattctcatcttcctgttggatagattttaccaagatctagatttactaacaagtatgtttcattaacatc

SEQ ID NO: 226744 - DNA, 2355 bp, Cannabis indica
aattatcaaaagcttctcgttagtatccaggcctcaggcaaatggacaagtggaagttgttaataaaaccttaaaggatactatcaagaataagctagacgctgccaaaggtagatgggttgacgagctacctcaggtactctgggcccacagagctaccgagaagacagctacgagacacactcctttctcgctggcatttggcttggaagcagtgctgcctgttgaagtgaacatatcgactcacaaaagagagttttataatcaagaagtgaaccaggaagttttaaaactgtccttggatttacttgaggaaaaacgaactgagtcgccaatgcagcataccaacactgagttacaagatacttcaataaaaaagtcaacaaaagactagtcaatgttggagacttggtgctaagacgagtctttgcaagtacgagagatccatctgcaagagtcttcaacccaaattgggagggtcgatatgtcatcaaagcagtagatggagttggagtttataaattagctcgacttaacgactcgctaataaaaaactcctggaacgtagaatatttgcgaccctactacctataaataaatgatgtaacttgcagtactgatttaaactttaaacttcagttatgaataaagagaatcatttatattaagtaattaaaaagttttattctttaaaaattacttaaggggcattcatgtatgattaaccagaattcatctggaaatacatggtataatgcaaacctgccatttcatttttttttttgaaattcaaacgttctcgactaaacctctttgacaaaagtggagtcgaattgttacaactccatgaccaaacctttttgacgagagaggggtccaatcgttataaaatcttgatcaaacctttttgacaaagaaggaatcaaacaactataatttttatttaaaacctatccgacgggaaaggaaaatcaaaagttataactcacgtataaaactaaatactaacggttctcgtgagctaggaaagtactaaacgaggtatcacgatgccttaataaaagtatttaaacctaaaaaatggatggataatataactattcatacgagcaaattaaaatatataaagtgataaaatcattaatgtatatttaagtttgtttaaggcagattggaactgctatagagaggcagaattcacaactgttcgaaaatcaaaaagtttggtagatcactaactacttaaataggaagagtacgagtaatggaaaaacccaaaagtactgtgcatttgatcaaaatatagttgtttacattgtgaataaaaacgcaagcaaacacaattgtattaagttcaaatgaaaatagtacaaggcatttaagataggaaaaaacctaaaactggttacaaacttgtctttacaaaaattcctttaggggcaaactattaagtaatctacctaaacaaaagatgagaggggaagtcgataaactcgagaaagaccatcttcatagagcccgagaaagaccgtctacacgtagctcggagaaaattgactacacatagcttgagaaagaccggctacatgtagataggcttgatctctacacagacctcattcttctaatcatcagaagctcccatttcctgaagctgagatctctttcccaaccttaggatttttcttcgataccagaaagaggttggcgcaaaggtcttctggcgcaggtttgggtcttgggttggctggattctctgatagaaaccatgccaacttccttcccatattcatctgaaaccacgccaactttcctctggaattccttataatcttgaggacgacctttaagatcgctcacaagatctatgcccttgaggatcactggtgaagaacgcccatggcgggctacggggttcccctagtttggatgactcacaagctcctcagccttggaatccattgttttcggctccaattgaggcttgaagtccttgggcacaaatggagaatggttggtgcatccttgtaatgccctgactctcaagaacgccacatgtgtgctttacaatcttattatcactaatctattaatttagggaaaagtatggtttaattaaaacctttggttatatttaaaataaaactttcattcaaaattctataaaaatatggggatcccctgctaataaaattcttttacaattacaaaattgttattacaaaagtaggttacatttccaattatagaagaggattgatcctgcttctcaaaagccaagacgccacggctgatatgtacacagctagaagacctctgaatcgtggctaagcacaacttttaacctttttacct

SEQ ID NO: 226745 - DNA, 1708 bp, Cannabis indica
aaactacagaaatttcttgaagcagatcgagctcctccacagttcctgacaccagctgatcaaagactcaataaagtaaatccagagtatgaggactaggaacagcaagacaaccttcttgtctcttggcttctttcttctatgtctgagaaaaccaccaataggatgatcggatgtgataccacggcacaaatctgggaacaacttacagagtattatacggccttaaatgttgcaaacacaagtctttacaagactcaattgagaaacacaaagatgacagggtcactgaatgattacctgctcaagatcaaaggtttggtggatcgccttgctacgatcggtcatcgacaaaccactcaagatcacaccgaagctatattcaatggattaccagctgagtatgatgtatttgttacatcggttacaacaagaaaagatctctatagtgtggcaaaaattgaagcattgttgatggctcaatcggttcgaattgagaagaatgccaagaatcttgacatttctaaagctgaagccaacctctctcaagctcgaaacaatgactttggcacttatgggcgttctaactttcctgcccctacggttccacctgggttcaacggctacaattctggtttcaatcaaaattttactaatttcagcaaccaaggacatcaatatcagtatcctatggcacgtggtggtcctcctcctcatcgtggtggtcctacacctaatactacatctagccgtggtccccccttcaatcgtggacaaaacaacagtaatgggcaaaaagtgcagtgtcagctgtcacaaattggggcatactgtaaaacagtgtttctaccgatttgacaagtcatttacaggtccagaattcaccaattttcctcctgttgctaatgttgcagaaatgcaagccatgcttgcaggacctgaatttgtaagtgatgaaaattggtaccccgatactggggctacccatcatctaacacctgaaatggctaatctccacaccagctgtccctacactcgaaatgagcaagtctatgtaggtaatggagcaggactgggcattgaacatataggtaactcatctatcctatctcctttctcattacagcaattgcatcttcaaaatctgcttcatgttcctacaataaccaaaaatctgcttagtgtttctcagtttgctaaagataaccaagttttctttgagtttcacccttcctattgttgtgttaaggacatagcaaccaagaagatcttgttggctgggaaccttgaccaaggcttgtacaagtttcaacctatatctctcaacacttctccaagcccttcactacagatcagtcacactcaatctctcaactctcagtgtcacagtcatactacaagtagcaataattcttctttttctttgtggcatagcaggcttggccatcctgctgctagagttgtaacattggctctatccaaatgtaatatccctttttctaataaaaatgtcagtgaagtttgtcaagcttgttctcttggaaaaacacataagctaccttttcctacatccactacacaatacaatgctcctttagaattgatacactctaattgatggggtcctgcccctatcaattcatcaagtggatataggtattatattagctttgttgatgctcacactaggtataattggatctatttg

SEQ ID NO: 226746 - DNA, 1303 bp, Cannabis indica
gatgtttatttcgaaattcaaaattgagtcgaatttactagcatgctgtcaatttaccatcaagtgcatataaaaggtttggtcgaacccacagccccaaactgacaaaagagcacacttgcaaaaacgtataagtgaccaagagtaataagtctgctcggtcaattggggggaacctatacctgtaaaagcatttggtaaaaataaaacaaacacagttgcatgaaaattataaacagagaatgaaattcattaaagataacaaaagcatgtaaaactgggattaaaggctgcccagtcaacccgttgtctgaaaaatgaaaaataattccaagtttaaagaccgcttggtcagtcactttgtcttgagaaaggccttatggccagacagataaaaaagagagataaagaaagtattcaaatggctagagtcacatgctctttatacgggtcttctgggtcagcttgaacttgaggatcgtttgtctgagcggggggcacgtcaacagtctggccaaaggtgaaagtggtcacctcgggttccctgtaggccacctgagaagcgcaatactagagaaacatgtctttggaattgcccaaataatcaaagtttgcctggggattagccttccaaaagtcatagaagatctcgagaccagctgtctctaaagcatttcctttccctccaagtctcgccacttcagctctctactgcttggcctctgatttatacttctcaaactgagcttcaagctccgcctccttaatcttcttctcttcttcaaacccgcggaagacaactcgaagaacgtccctttcttcttgaaggctggtcacttcctttgacaaggaggcaatgggagtttcaagttggttggaagcctgtagatctttagtcagctcggccaccttcttctcagcaacaagaagtttcttgttaacctctcccagttccatccggacacccccaagttgaacgctggccatcggcatccttcctagccaggttcacttccgcctgcatagtattggaaatggcagcattcttagagggagccgatttagaccaagaataagcgtaagctatcttcagaccagtctattaagagaaagaatgttaaaatctgaactaaacgaaggaggacaaaaggaaactatcaggaaagacttacccttgcaaactccttcagtgctcctcccatcaccaacttcagggaaaggtcattgtttgccccagccagatactcgtttgcctcagggagcgaccgagtcacatagtaaatgagcatttctttgcctcttt

SEQ ID NO: 226747 - DNA, 1372 bp, Cannabis indica
acattaaaggtaatgtagtggtattcctagttctttatattgatgacattctacttattagaaataatgtagaaatattatcagatgtaaagaagtggttggttgataaattccaaatcaaagatttggaaaaagcaagctatgttctcgggatcaaaatttatagagatagaaaactgagaacattagcattttctcaagcaacttatatcaataaggtgctcaaaggattttaattggagaattccaagaaaggatagttaccgtccagacatagaattactctatgtaaagactcctcaagaggaagaggacatgagaaaatacccttatgcatcagtagttgagagcttgatgtatgaaatgttatgtacaagacctgacatatgctatgttgtagggattgttagttgttctcaatctaatccatgtttggaataatggatagttgtaaagcacattctcaagtatcttcgaagaatgagagatctcatgcttgtatattctggtggagagttaaatcctactggatatactgattctaattttcaatcagacaaagacaatcaaaagttgacatttggatcagtatttactctttgtggaggagctgtagtatggggaaaatcaagcaaaccagcattgcagattcaattttagaagtaaaatatataacagcttgcgaagtagctaaggaaacaatttggttgaagaaattctacactgatctggaagtagttctagaattagaaaaactactagttctctactgtgacaatagtggattagtgaccaactccaaggaaccaaggagccacaagagaagcaagaacattgagaggaagtactatcttataagaaatatagtagagagaggtgatgtgacggtcttgaagattgcgtcggaacataacctggtaaatcaattcacaaagacgctaccagcaaaatcttttatggatcatgtaactaataaatgattaagggagatgcccaatttcttttcgggcaagtggaagattgttagggtttatgtcctgaaaagcctataagacatttttgattattaataaagagttaaatattttgatatatgcatgaatgtaaaattattaatatttattattgaataatttatataaatatcagaaaatttcttatttatatatgaagttgacttgtagttgtacagagaactaagatcacttagctataaataaagtagtcagtaacatattaaagttatagaatctttaattaatggttgctagtacggttcactaatgcccgttcttgggtgcaagtaatcttagtttagattacttatgtactatgacatataagtgaaggtgttgtatataataaatattat

SEQ ID NO: 226748 - DNA, 2199 bp, Cannabis indica
cctctcaaaaaaattctttctcacatatattgtgtatttatgtggtaaacttttattttagttgaaactaaaaaagaaaaaaaaaccctcttaattcagtttgggcgggttaacccgaccaaaccgcccaaaccgtcggtcgggttaagatttttttttttaaattgggcaggttgcatgtggaattttacaaaccgatctttacgttgggttaaaaaatatgtagtataaaccgactaaaccaaccgatgtacagccctagaatcaagggcgagagatcttgaacgaaaggagtcattatattccgctgcaaccaatgtaagatttttctaatcccttatgtatttaatttcattattttagagaattcatatttaggatgttattcaacatacttattagtaaatctagatcctggtaaaatattcccaacagggtgaaggtgctgaagaggttctggcttactgcgagcgaaccaagaaagaagaggcagtggaatcgagaaacaagaagaagattcatccaagtctcccaccatgtagacttggtttttattttgttttttttttattatttaaaaaaatggccctccggtcgagataatggttgcccctagtggcattatttttgtaaagacaaatttgcattgttggatggccaactttgcctttttttttatatatatatttatctttacttttaataccttatatcttatctctgaacttaatatatttgtttacttgcgttttagttcacaatctaaacatttatattttgatctaacttaagatactttaggaagcgtttccattgctctcgtatttctttgatgcataaaagtagttatcaatctactaggtatgtgcgcgagaagttataatctatgtgtattttcaatccgcaagtagttattatttgttttattatacgcgagaagtttgtaatttacgtgcgcgagcagtcataacctgcatgtagtacaattcacgagcagtttttatctgccttatataaacatatttatctattttttagagcaaacttagaaatacttcgaataattcacttcaggaactattttgtatatctttggattgctcatatgaatagttaggtcttctattcatattttggcttaagtattatatttcaaggcattcttatgcctcgtttataatacatgcaagaataatgcgagccgttaagttttcaactcgcatgtagctttatgttgttttgtgagttgatctcatttacaactgctattttttgactattttcctttctagagaaaaggtttttcaattccttgactttatattgtctatagacaattttaatcaattatccttacctttgtggaaaaaatttaaaataggtttgcaatataatatgtacttctagatgaattccaattaacatacacttatatatgcccctcaagtaattttaaagaagatcaactttgtaattacttgaacaaaatttaactttattaataataagaatttacatattacagagataaatacaaaatttacattttaactttgttggtaataaaaagtcgccaatgttcactattcaagtggttctttattagcgagccgttaagccgagctaatttataaaccccggttcccacttctgcttcaataacatagggaccttctcagtttgggttaaacactccagcagccgaatctcatgtgtttgtaaatactcatcttaagaccaaatctccaacattaaagagccttttcttaactcttttgttaaagtatctcgtggttcgatgttgataggttgcattagttatttacgactcattacgtttttattcaagtaagtccaaggacagatttgaaagttcttggttttctacttgattatagaattcacgcctataggtcacaatattaacttctactagtagcattgcctccgagccaaatgctaacgagaatggagtgtgtcccgtcgctattttctctgttgttttatgagcccaaagttgtggtagtccatctacccatcttcctttgcagcatccaacttcttcttaatagtatcttttaaagttttgttaacaacttctacttgtcaatttgcttggggtcttgatactgacgagaagcttttgataattttattcctttcacagaactcagtaaatagttcgccatcaaactgagt

SEQ ID NO: 226749 - DNA, 2072 bp, Cannabis indica
tatgcaacaactcagtctatggtcccatgcaagaaaccctctcccatgaagaaggacataagtaaaagagatacatccaagttctgccatttccatacggattacagccatgacataaacaagtgcaataacctgaagcgggaaattgaatttttgatttgaaagaataacccgcacttgtaaaagtatgtcaaggctgaccagaatcaaagggccgcccaaacagacaataactagaaccaattgatgcctccaccagtgaatgggcatttacaagttattattgggagtccacatcctactggagactcgggcaaagctcgagaaaagtatgcccaagccttgcagtatgaacaaaaggaaacagttttggccatagaggagagaaagccaaaaataccacgggtaggggaacccacaataactttcactgaagtagatgataatcatgtccacttcccacacaacgatcccttggtcgttgaagtatagattgcgaataagacagtggcatgaaccatgatagagaatggagcctcttcaaacattttgtttaaaaacctatgagaagatggggcttctgcttaaagatccaatcccatgtacccaacttgtatatggtttatctggccagagcgttgcacctctagagcaaatccatctacccctcactgttggacaagatccgaggagcataactgtgatggcacaattttcgataattgatatcccattagctttcaatatcatgctagaccgaccagtcctatgtgacttaaaagttgtcacattagttttccatttgtgcgtcaagttcccaacaaacaatggggtagggtgcctcagagggaaccaaagaatagcacgggaatgttataaccttacccttactaaggtcagaaaggaaagtacctccggccagagttcgggcaagagaaaaagtattgcccaataggaggttgcccaaggcggggacgaggacatggatccctgacttggggaaccaaacacaaatgaagggccggtggaagaattggaagaggttgaaatcgacctaaatatcttgactaggaaactcaaaattggcaaagttttgttgctcgaaataaattagctttaataaaatttctaagagcaaacctagaaaatttttcctagtcacatgagtatatggccagtattgacctttctataatgtctcacgtcctaaatattgacccaaactttcgccccattcaacaaaaagaagattgttggacaaagaatgggctcaagcattgaaagaggaggtagaaagactgcgcaaaaacaagttcatcattgaaggcttgggtggctaaccccgtactagtacccaagcctaacaaaaaatggcgagtatgtattgatttcacttaccttaacaaggcgtgccctaaggattattttccacttccaagaattgatcagctcatggatgcaacaactgggcacgaaatcctgagcttcatggatgcctattcggggtataatcaaatcataatgcatccaccagaccaagaacatataagtttttgaacatatatgggtctgtaatgttacaagattatgttgttcagtctgaagaatgctggagctacctaccagaggctagtaaataaaatgtttaaagaccaaatcagataaaatatggaggtatatgtggatgatatactcatcaaatccaggaaagctagggggcagatagaggatctggatgaatgcttcaaaatcatcagaaaatacgatatgaaactcaatcccttaaagtgatcctttggagtcagctcgggtaagtttcttggttttattgttaatgctcggggtatagaagtcaatccagaaaaaaaacaagccctcctaaatatgaaatcgccaataacaactaaggaaatccaaagcttaactggtcggatagctgcactcagtagattcatctcgaagtcaatagacatgtgtgttcctttcttcaacatccttcgaggtaacaaaaaatttgaatggacggaggaatgtgagaatgtttttcaggaattaaaaagacaacttgcaaa

SEQ ID NO: 226750 - DNA, 1638 bp, Cannabis indica
gggttgagttaaggttctttaatataggagagcttaaaccttttttatagataaaataacagatatttgcatattaaattagtaaaatacaaagactaaaatgaccccttaagaaaaagacattttccatctactttcgtgggctgctaaggcccagttcgaagtctagcttgctgtccacgtgtaatgttgtgcaccaaagtcctaccaggtcaaattctggccagccatgcacctgcaggatgcaggctggccggccatagggccagccagcccctcgaggtggctggtctgttgctcgtcgtctcgtttgagtgtcgggacacctcgttggctatggcactaagtagatcacttaaccttcttattggtgagttgtactaccacgtgggattgatattggccacgtagacatgccgcataaggtgggaaaaaattgagataacatctacccctaagtccctgtgcagacgtctgtgcgaatagggacttaccagctaagttggaactgatgtagcctttattgagtaaatgttgctgtaattttagtctttgaaatacctactctagaatacctgatctcatttgttacagtaagttaactgcattgtacttctacatactttttagttgagtactacgtggcaagtgaaggagtggtcccacagaaactatataagtcttttggagggaaacttctcttcacttttcacatttcattctctcactaggaaaagaaactttcaagaagcttctccttctctctagaggtcgaacccacattgctccatctctcgggatttttgcgccatttaaacgatcgaagctccccaatttctttgtcaacgatttcttattatgggtaagctttttattcctactattcacttgatttagttgatattgccataaatgcatgaacctttttcttttctttgaatgtctttagattcccacattagattataatcttttcagtattttgatgctcatggtagtcttaggatgtgtactgtaatttctagacgaaaaagatttgattctaacctttgttgtgatttttggctctttgagtcatgaagaacacgaagagcacgaagaacatgtttgagttcttaaaaaaaacacatgcttaaatcctttgtacaccttggtcggccaaggaggtcttgttcaagacctggccggccatggggtctggccagccaagggggaataccctataggctggctggcctattcttggaagttgaattcctggccggccctaggctgggtcatgggacctggccagccctttgaggcttgggaaccctggccggccaaggccaaggttccaagtaggcgaccagtcttttgtcctctgctgacctcggctagggtcttgtggcagccttgtgggcatatacaactgttatcttatgtgtggttccccttgggaactttgtataagacttggtaatgagtccattatagtcaagtgcacaacttaagactcactatttatctaagtagatgtacttgagatggtactttgctgatactcaaccttgtacaatgtgatttacctggaaagtacccttgggtacagttatttagaaccttatctgtagcgttgtcaccaccccttgtctcttc

SEQ ID NO: 226751 - DNA, 1881 bp, Cannabis indica
gacataatttagtatatgtcaaagttcgggagaaaaaattaccaattagcattttgagaaatattagtaagtaataagaggtgcttccaaatagcaatcctcttattaaagtttgcagttcttctctcttagtatgagacactctcactctcatcaagctcaagttcaaagaacttagctgaaaccctaaaacagaacatacatttcttgaggaggaaacccaatccctcaatctcattctcaatcctgcaattcaatgaatgtttaatcttcatttcggttaaacaaccacaaagatttaggaattaatctatctacctttacttcttccaattcatctaaagattaagttttttttttttctttcttttctttgttgttacagtatagggccatgaaaaggactaaacgtacatcatcatcatcatcaatggtggttggtgatgatgacataatttcgaaacttcctgatgcattgatcattcacattctatcatttctcccaactgaagatgcggttcggacatcccttctttccaagcgttggagacccatctggtattcagttcccacactcttttctccaaaaatactaaatggaaacagggtaatgaagataagctgttcgaattttataacaattgtttgaaataccgcaaaaatgttaagcatcttattgttaattcagacataactagttttaagcttgacatagatggttactatcaaacaagtaaggctggttttgtagataaatggttaggttttgcagttgagaataaaattaaggaaatttgtttatccataggtcaggaggatcttgatgatgatgatgatgatgtcattgattacagtgagatatgctactgcttacctaaaatactaggcaatgcaagatatttgactattttggagttgaatggggtgtttttggatacttcttattcatttagttttccatctttgaaaactttatcaatggaggatgtttatcatttacctactgcaaaggaagatggggtggtgaaatttttgtgggttgcccttctcttgagagattatggttacatgattataaattcttaggtattgatagtcatcatcgattacaaagtttaagcctcaagttcatggaaattgtatttgaaagctttatgaatgatgcacaaattcaagttgaagccatgaatctcgaatctttggttgtggaatgtaatatctttgacatgatagatttctcttcttgcaagaaaattagaaatttatcattaattgacgtttacattggaaacgaatacttgtcatcgtttgaagctcttatttctaatattcctctaattgagaatttggttttgagcaaatgcgatttactacagtcggagcaccttacaatctcgagtccacacttgaaaagttttcatattaagaattgtgattactcggatgatggtgatgagatgaaggttgttacaattaaacatgcttccaaattagcatacatttgttatgaaggaaatctcaattttaccatattaatggagccatctaatttgttaaatggaaaaattataattcacaagagactggaggactatggcgcaaaatggtttatcgatatgctgacttttcttgtgaatctcagttgctattggaatagtgtgacattggaggtagcaaattgtaaggtatgttcattacttgtattatatatttgttttatataattatatgtagtgtcatttcaacttcatattgaatctctatatatgaaggctcttgatatgttttcataaatctgtatatgtagtctctcatttggccgaaaaacttgaagaacctaaacctatgtcgttaccccttgcttaactggaagcatctcag

SEQ ID NO: 226752 - DNA, 736 bp, Cannabis indica
ataataatttttagagagtattgttagccaattgtaagatgatatgttgagaggtgttagacactactggtatccaataacaatgcttttcactttaagatttataaggtactaattgtgtctagcaccatttaaaaatgacattttacaattaattaacgctattccaataataatataataaattggaaaatccaaggcaacgctatacctctttagcaaatttcttaatatatatatatggttggtgttgcatgggaaattgtaatgtatataaatatataattagggcatcccattccattccatgcggcttctctgactttttatttacaccaacccaccatataaatataaatatgtgcacttacaaaggaatcttatactcatgctctcatacacattttaattattgtatatatattaaaattaaatgaaagagaatagcatcaaatttgacttacctcatatttaggatcttatatattattatggattgtatcaaaaaccatatatgtataagtggatagcatgtggcctccaaactcaaacatagtatacaaatgtatatctctaaagaataccatgatgtgtatatcaatcaagtgtatgcatagctataaaataaaatataaactattttatagtatttaaaagaaattaattataacattatttagagtctgattggtacagtttttaaaaaaattaaaacttgttttttttttttttgaaa

SEQ ID NO: 226753 - DNA, 2152 bp, Cannabis indica
gggaaatcggggccaagctcaccatctgtgtagaagacgattcctcttgcgcactgtctatgtagaagatgattcctcttgagccgtctgttggcatgagagagaaggggttgtttaggctttaacacaattttagggtttcaataaccggccttttaacttctcaaaaaaaaaaataccttttatttatattacttttaatacttttaattttttttagcaaattaaaataatattattttaactcttgatttaactgagagaagtaatatttataaattgattttttctttcaatattctttgtgtataacgtcgctccatgtaagactggaaaagttatcatagtcgcgcgtagagtgtcgtgcaaactaattaatttttcacaaataattatataattaaataacttttagtgacacttcatatgttttagagtcatgtactttgggacataaagttaaatatttagtgttgaataatgggtgtcactaaaaattatctctatacatttagtgactctcacctttaagcgggtcactaaagagtgtcactaaaggctatatttgtagtagtgaaggtcgttgaagctagcctactctactaggaagttggcaagggcttgtccttttatcgacacccgtggctggtagtggatgtcgaattgactaagttctatagcctgctttaataatctaccggatgactccaacttcagaagcacctggcataggggatgatttgtgagaactcttatggcatgggcttggaagtacggtctcagcttgcgcgatgcggttattaagcaaaaggtcagcttctcaatcataggatatctggactctgcacccaacagtctttttctcacataatacaccggatactgaactttatcttcctctcgcacgaatgtggcactaatagcatgatcggacactgccaagtacaagaacaaatcttccccctccacaagctttgataaaataagagccttagttaaatgcccctttaacttttgaaaagcaacttcacactcttcagtccacacaaactttttgttgcctcgtaacacattgaaaaatagaatacatttctcagtagattttgaaatgaattgactaagagcagcaatatgcccagtgacgctctagacatctttatgctttttggaggagactatataccctaggaattttttggaggagaccctgaagtgcactttttgggatttagcttcatatcgtactttcttatcactgaaaaggcctctttcaggtctcgtccatgcttttcaaaggttttggactttaataacatgccgtccacatatacctccatgttcctctccaactgtcctttaaacatcgattcaccatttgttgatacgtggcctccacattcttgagtctgaacgacatcaccttgtagcaataaatacccttatcagtctggaaattggtatgttcctcatctgtagtatgcattttgatttgatcgatttgcgagagcgggaaatggtcttttaggcaggccttgtttaggtctataaattctacaagcatcctccacgtgcccttggatttttggaccaataccaaatttgcaagccaaattggatacaatgataccctgaggaaatcattagtggtcaacttattaacttctgccgatactgagttgtctctaacagggtccagaggtcttctcttttgtcaaaatggggtctcatctttgcggatattcacaacatgaaaaatggtatttcgatcaatcccgatcatgtcagaatagctccaggccagcacatcatgatctttcttgatcgtattaataacatcctctcttatgacaggaggtagattctttcccactctgatagtcatggtgggatcttcatcactgatattaacttcttctacctcctccattggttaaaaatttctttcaattccaagtcttggaactaactcatccacacactcttccaaaacatcttctgtgtccatcgggtcctctaccccagaagctacaggtatttctttccaaaccataaacataatctgagttgacacattatagtagttcctcgcactttcctgatcacctttgattgtcccgatgcatcaattgtcacatgagaacttcatacacaa

SEQ ID NO: 226754 - DNA, 1558 bp, Cannabis indica
cgtaacagtcggagtaaccatcggaacattaacggagttgacaaccgggctttgagaagtcgacccctgcttggtcagcagacccgatcgcagccacctcgaaccattagcgtagttacgtcgtctcggagctgccttaatttctagactataattcttcacaatctgatccctttgagtgtcgaacagcttctcacagaacctctctgagtggcctaaaactccacagatgaagcaaaaagtagggaggtcttcatatttaaaaaaaacatgacatactcggccaccttggatcttaagctttttcttcttcttcaatggaatattgactggtattttcacccgaatacgtaagtaatcccgtcaaacaccaaaaaaattattcggatccgacttaatgaagctaccgagataattaccaattccgctaatgattctttgagacataaatccaatagacatgttatgtaattgaacccataattctaaccttgttaatggaacaagtcgaggattggtacccggtttcacacgttcgaaaatcagaggagcccgatcgaaagtccatggactgccctcaaccaccctttcgatgtcgacttcatggtaaactgaaaaaggtataggttcggatcaagttccttgacataaaggccacgacctagctgccatagagtggccattttgttctgcattgcttggaaatcaatagaacgattcgtcaaaaatcgacccactaatagccacctatcgtcaatctcggaaagttcatccgtccctgcctcaaaaaacagtccttcctcatccttatcctctatagtaaaagccgcatattgttcatccatactcacgaaacctcagcaaaaactcagcaaccaacaaacgtacagtattaacaatcaataacaaacactatccaccatgtcaatatagacaagactttcgcaactactactgatttcttatataacataacttgttttacttacttttttaacgttaatattattataataatataataatataatattaataaaagttttattattaataattatcttatcatttcttagttactaagaaacttttacttctaggacgctacattaaatcctacatactcctaattacccaaataccaatattattaacttatcacaatgtttccattaattctattaattaagcatgttatgacaattttcgcccccgatcgagttttcaagatcgccaaacctgaagatatttttatttcatatatagttcatattatattcacgcatgctatataaatcttcgtaatttaaaaattacacttgtttatccacttatagcaactttaaaattttatgctgaactagattagtaggatcataatcccacttattacctggttaactcataatataaatataaaccctaattattaattattaagcttattgggatattacatgtaatgtcacggatgtcgaccttttatgcacgccagatcaccaagtgacagttatgctttttctgatgaagatcaaatcttgtctcctacatccaagca

SEQ ID NO: 226755 - DNA, 2150 bp, Cannabis indica
gacatgttccaacattaaggaggagcttaatctctttgagttttaaatactcgtggttatgactattttgcaaaagatggtgaaataactatcaagaaatgtggcttggtacttgtgaagggtaagaatgagcgaaatttgaataaattagtcgaaaagacagtttaaggtagaactgtgaaggtggagtcaagtcacaaaaggcattatgttggtgtgaaggaatgcgacaaggtggagaagactccaatttcaattaaaggttgtttgaagaaaaaaatcatcaatgagagattgaagaatgtgaaaacaagtgttcaagtgaagtttaatgaaagtatgaactcgatgcatatatactcttataaagtgatggaaatttgacccgcgaagacgggtagaagactccaatttcagctaaaggttgtttgaagaaagaatacatcaatgagagattgaagaatgtgaaaacaagtgctcaagtgaagtttaatgagagtatgaactcgatgcatatatactcttatgtagtgatggaaatttgacccgcggggacgggtacccaccccgaatggaatagggattacccgccttgatggataatggggcggggtggggtgaaattttatatacccgaagcaagttcgaggcggggttaggggtgatactaccccaccccgtattcaacccagatatataattttcaaattttccatataattttctaattattacgtattaaaattattaactatacacttacaaagttgtctattaatcttctctaatttactatgtactaaaagctttttaattggtagagtgtttgtttattttaaagtcaatatcttattttttatttttcattttgaattatattacattattttcttcttcttattattattattattattgttttaattgtaatgggtaccatataggtccccatacccagtgggaattcccttaccccaaacttatgatggttctgagttgtgagtttagagaatttgagtcgaggtggagattgttgaagtttgactcgaattttttttacttatttatctatatttgtaaaggtataatttctttttaggtgattattaattgtgtgaaaataaaagtcttggtgaccaatttttgaagagtcttctagatgaagctttagaatgtcttggtgggtatatgtaattttgaagtgataagtgaaatatatctatctttgtagatttggtagttttactagactgagtaaattgttttgttttgttttttattattttgctgtgcttgaaattttcatttttcccaacataatcaaagttctcatgcttaatttggaaaatttagtcggactattgagaaattcagtatgttgaaaagtaagtcaaatcattctatattctataagagatcaattgctcgtatcattttattagttgtgtatgtggaatattaactgcaagagactaacataaacactaatttagtaacattatgtatccctacagttggtatatataggtcctatttggcttagattccttaaactcttttttagcttttagatgataagcaaaaaaaagagtttaatcattttagaatgtatccttactgttggtatatataggtcctgcttggcttaacttctttaaactctttttcagcttttagaatgataagcttaagacttctcttatttatcacaaaatgattaaatgaaacacttagtctattatgtaaatatgtacataggttaagttgtcttactatcttaattttattgatttatttgtaatcctaggtggcccaagtctctttaaaaatgcttataaatagagaaggaacaacctcatttaaattagcttagaattaaagaagagtagaatctttgtggagagatcaatcatctcgaaagattgagaatttagagagacaagcatcttcaaagcttgatattgtaactttgtcattgtttttttttaaaataaagatcacttgaggaattcattactggagtttattttgaaaaatagctgatggaatatttatactctaagattattctatcaaataggtgcggtgtgcggacatggtgcctaagtgctagagatgtatatttattgtatatattagctgtaaaatta

SEQ ID NO: 226756 - DNA, 1641 bp, Cannabis indica
tggcctatgggccttttaattttagaacacttacgtatttttagccccagggacttcatgttcgtactcttagcctatacacacacacacactcattttttgaacattactattgattaatcctatttctttttatcatgaattgtgtgatgaccaggtggtctttaatcctggttagcttcttatgcccttgacatgtaagtatctatatgtatttttctttatgtaaagctgaagtatgcctccacctaatctagaggtaggtttagtagcttattctaagcattaaaatttctctatgctagttcgatgcattatacggtatgggtggaccccaagtgagcacggagactaacggtctcttggacacttgctattcaccaaaattcatagaccttgccttagaattctcttagggtgctacctgttgttcacatgtggaactgaaaaagaataattttaagaaattaatcttgttagcaagtggtttagacaaaataatttgaacgtaaacattgttttttattcattaatcggtctttgctattttacaacttacataaactgaatctacaagcttacataaaaaagttttgcttttagatatcaaatggctacccttgcttgacttgcatagtagaggccactgtttaagaatggtgggaggccacgccaaaaagtggttactagctctttaacactataatgttgagttggtagaactgctaccgctaagtaatgttttgtatgtttgttacggaaagtatttgcgaaggtgctctccagtaaaatgttttagtaggagaacgagctcaattttctctttgtaccttccaaacaaaggctcccttattacttagaggccttgataggagccttcccaatatcgtctgaacactcctactgctaaatctatggtattcaggaacactcttcggagcatcaggtctcctatgaagaatctcctatccttgacttgcttgttgaagtcccttgctaccttttgctggtaggcttgcatctttaggtgcgaggacagacctttcctcaaaggtcaaatgacaaaaacaaccaaatctcagcaactagcggcacggggagccagccaaggatctctggctcaacaacacccccattatacaaccaatgaggagcacccttggttggcaagagtaaatcacttcctccccaagcggagtgacgtgccaaaggtcaatcttcaactgacaaggaccaggagcaagttgaaacacccaaaattgctatttaagaagtgaagcagatgactttagacacctagatccaccaaactcttgcaatcggtgtgatctacgtcctatcaacacacaaaccacattagtcaaccgaggagtcatgggtggccagaccttgcttcctgtaggtttggccagccataggagcattgtaagtggccaaaccctgcccttaataggtctggctggccacgaaggaaaactggtcggccagaccctgtctaactgtaggcctggccggccaagcaaaataaccaggtgtaggcctttctagccaaggcaagctcccgtacctagtaatggctagcaagggtctacaatttagcataggtatgactgacctttatgagttcaagctgcacaactc

SEQ ID NO: 226757 - DNA, 1734 bp, Cannabis indica
tcaaagtgggggatatatgagatattttgattgattaaataaagtgttacaatgagatgtcacaaattttaatctagtggggaatgttatatatttgttatttaataaatatataatgaagattaaaatgtggcatattaatatgagattaatatatattatgtattgaaggttatattatatcatatatagtataataatacacataaaattgtaacatatgaggagttacaaacctgaaaataggttgtaacctaaggatcaaaattgataaatatgtaattatgtgagttgttacatatgggagttatggaattaatgggataagtttctagctgctagaaactgttacaatactcaattatatcatttaaatggatattgggacgttgggaaaagatttaactcggagaggagttacattttgagttctctagaaacagttgtttaatagttgtttttatgttgttttatggttgttttcgaacatttggaaccagatttttgaaaacgttcataaacgtatataaattaattgagcatgtttccaactctcttgtccaacgtttttatcccattaaacacaaattaatgtgttggtaacaaccatgtgatgaaagaatttgattttcaaatgtgatcctcaaaacactataaatagaggtctttggttcacttgtagacaacaacaattttctatcttctaaacactaagctagaaaatattgagaggcttgtttattcccaaaagcatttccattctattccctaagtgttttttatagggggaaataagctttttggacaaaggtgcttaaaccttgttcaagcctttggtgatccccctttgcttacttgtgttcttcttcatcctctattttctatttattttctgctctcttctcctctttattatatattcatatattatatctcttctatatacactaatatatatacactatatatctactatacatcatacatatatacatatttatatatatattctctttttgtttttacatttatgtgtatattttgccttgagttgtaacttcgttctcattctttctttctctttatttgtattttgtgctttgggattgtaacttttatttaattagtccttgtaattttgttgtatagagttgtaattttcttagtctctttgttcatcttattgttattcttctattgatatcttattttttcctaattttatcttatacgtttttatgtatatattattgggaagaataatcacaattacaagtaaaatatggtgatgatagtggcttgcatatagtggcaagtacaattgaaatacggtaataataataatttttaatattgtgacgactacatatgaaatacggtcttgacaacagttttttagatatctatttatgttaggattcttcaacttctaatatatttttactacaatatttgaagatatctttgtttggttctttttttttttttagataagatattttatgatgaattttttataacataaatttatttttcttagttgtgtcaaaaaaaatatttttttaagtaaaatagttctcatataattttttttaaaaaaatatatcaacgatattaaaattaaaaatataatataattttataatttagttatcactaaacgaaatgtaatcgcacgcgaagcgtgatttgtttcttaattaattatataagagtaattgactcttattagtt

SEQ ID NO: 226758 - DNA, 2401 bp, Cannabis indica
ttattagcgagtcgttaagccaagctaaactgtaaaaccctggttcccacgataacttcaataacataaggaccttccagtttgggttaaatactccagcagtcgaatctctcgtgtttgcaaatacacgtcttaacaccaaatctccaacttttaaaaagccttttttggactctttgttaaaatatctcgtgatttgatgttgataagctgcaatgggtatttgcgactcattacgtttttcttcaagtaagtctaaggacaaattcagaagttcttggttttcttcttgattatagaattctacgcctgtgggtcgcaatgttaacttctactagtagcattgcttttgagtcgaacgccaatgaaaatggagtgtgtcccgtcgctattttctctacagttctttatgcccaaagcacctatggtagctcgtctacccatcttcctttagcagcatctaacttcttcttgatagtatcttttaaggttttattaacaacttctacttgtccgtttgcttgaggtctcgatactgatgataagcttttaataattttattcctctcacagaactcaatgaacaattcaccgtcaaattaaattatgttgtcagatactatttttattaggattccaaaactgcaaatgatgtttttgataacgaagtcgaggacttttttataagttatggaaactagaggtttagcttttgtccacttggtgaagaagtcgactgccaccactgcatatttcactcctcttcgccctgtgggtaatgctccaatcagatcaatgccccatattgcaaatgggtatggcgaggtcatcattctcaaatctgttggtggtacgcgaggtatatatgcaaacctctagcatttgtcgcatctcttaacaaattcatgcgtgtctttgttgattgttggccagtagtatctttgacgaatgattttcttttatatacttttccaacttgcatggtctccacataagccttcatgaatttctttatttattttattggcttttactggtaacacacatcgtaagagaggtatgaaataacccctcctgtatattttgccttcaactattgtatagcgaggtattgaatacaagaatttacgtgtctcagttttgtcagtaggaagttctctgttgagtagatacttgactataggtgtcatccatattgatgaagtatttatcattttgacttcttccttttcacatttacttgggtcactcaagacttcgattggtaccaaattcaatttgtcgagatcatactgggatgctagttttgctaatgcatcgacattagagttttgttgtaataccctaagattaagaaaatggattagcaaatcctaactagttaaatgtgtattattgtggaattatattattatgtaatttattatatgtgaattaatttgatatatgacatgttaagaccctattggtgagtcaagggcattttcgtaattttgaccagagaagggtaaaaactgtggaatttatattatgatgtgcttatgggctatattattatatagtatacatgctttgtcctttttcaagtgttttctgacaggtcgggcgcggtatagtcacaattggaaatttttggccgaattgagtttgtggccgaaattcattttttgagattatgtaatggcattttattggtgtgtgaatattctgaaatttatttgagtgtatatgtgatgaaaatgacataattgcccttgaatgcttagttgtgtgttatatggccctaggggcattattgtaattttgcctaaattgatttatgtttcaacaaaaaggaaatcttgactgaaaattgaagtactttctggtttatttctcttctcaaaaccgacccccgttctctctctctctctaaatccatctcttcaatttattgttttgcttgagtttgtgttggaattcaagcttgggagttagaggtgctagggttgatttttacttgaaacttgaggtatctttctacagctttaatcttaagttttattgctggaatttaagttggtaaagcatgctttttggtgttggagttcttgtatgcatgtatgtggaagattagcttaatattgatgctttgtgcttagttgtgttgataatctttggttattgttttggattaagttttaaagagaattttaggtattttattggtgttcctaatctgttatgcaactttgaattttgttgttgatgtgagctgagaattttggttaggtatttaagctcttgaagttgggattttggtgaatcttgctctagtttagagcctatgttgtctatagtataagctggttttttaatgcttgttctgatgtgaatataagctttagttggtgtttatttt

SEQ ID NO: 226759 - DNA, 2165 bp, Cannabis indica
atgttgtaaagggtggggagatgaaggagaatggaggcaccatgagtcactgaccataattggaaaggaagggtcattgagaagaaagttctcaagatggaagcgagattgtttttgattcctggaagaaatgtcttctaattggagtttcagggctctgtaatcggatccataaaaccccaaatgagtgagagaggcatgagggaaaagacttttccaagaagaggaaatagtacaccaatcaaggcgttcaagaatagagccatggcgccaagtgaacttgttcccagagtaagggaggggggttaaatttcgagtatgcagaaaattgtgaaagtggtgcatggcatgtgggggaggggaggaagtggaattaggatcattaagagataagtaatcattaaagtcaccaatcactaaccacggtagaaggggagcagtgtcaaataaacgattaagaagagtccaagtaaaaacttttgaatcaatataaggagaaccataaaaaccagtaaagtgccagtttatatcattagaattatttatgaaacagtccacatgattgagggagtaagagacaacagttacatcaatacagttgttccaaaaaagcaaaagaccccctctaaaccttgcctaggaacttctaatacattatcaaaattaagcttatacttcaaagaaagtccacgactggcaggcaatttggtctccataacaaaaagcaaagatggctggtgctgcttgaccaagagggagaggtgacggaacgctcgagaactccccaaacctcgagcgttccagctgcaaaaactcatttttctcggcggggtcgcgaagcgacacccgccgttggttcatcattagagagagaagggataactgcatcatcacctggggctgcacgagcgcgcttgagcatgctcctgacagaatcccccacttgagtggactgtcgagtgaagtgctttcgggttccaacagaggaagtaggagaagagcttgtggagggttcattaataactagaccaggaggcctggtgtgagggggacttgaagtgggcaaagcaataccttttcctttcgcaatgtgggagatagttgaagtagtcatgattgggggtggaatggtggggtgtaaagtctgaggaggaggggaagtggggatggcggaggtggaagtaacaatggtggtggtgcgaggtggagaatgaactcgcagaaattggtcgacagcatgttgcaggctgtgagctggagaagcgagaggagggaaaagttcctcaaaaggagtggcattggatatttcaaaaggattctttttgttgtgggattgagccgaagcacgaagagtgtcacgatattctaaaatgggaggggagggaaaattgtcacaaggagaagataacgggagcatcgattgtaggtatgatccatacggccacagaagtagcagaaattagggagactcttatacttaaaacttatccatttgggttcatgaatggaccggaaacgaatggtcattcccctgcgcagaggcttactaatgtcaagtaagactctaatcctaaggaaaggaccagagttctcaagcagtgaaagagggtagatttcaataagatcgcccagttcatcagctatgaactgagccaactgagggcttctgcggccaaaaggaatgtggtgggcttgaatccagaagggggtgtatcgaatactttcaggggtgggggtaggtgagacatcattgtgggtgaacactatgaggaacttatcaaagtgccaaggttgttcttcaaggacacgacggcgatccccatcacattgaaaagtggccaaaaagaggccagagtggtattcagtgatttgggcaggaaagcgaagggtccaggcctcggacattgctttctcaatccaagcaggcttagcagttctaggggataggagcttaaagatgaggcagaaggcattggggtcagaagaggaagacagagagatgtggtcaaagtcatggatgaggctttcttcttcagagaggggagtgagaatgttgggattggttgaggaggaagccattgaaggataagtggaggatagggcaaaagagaaggtgagagaaggagaggataacgatcgaacataacaaacagagaataaataga

SEQ ID NO: 226760 - DNA, 1890 bp, Cannabis indica
atattgtgctgcccttggatgtgcctaaacaaagaaaaggaactaacttatcactttatttgattaaagactaactcttttaaataataaacttaattagttcttacccttatataattctgccatacttcttcaggagcagtcacagtatctttttcacgactccatccaaatccagtttgtttcgacaattcagaaaactcacgatacctggtgcgtaacctatgaaacttttgcttaacttgtttcattacatactttcgcttacttttactttgcaaatcctcaagaattcttgcccatgtctttgagctaaactgaccacttgtcatatttcccttattcacttcatcaaccatgatatcaataaaaattttctctatagttggtccccacaagcatgtatcatcatctatgttctcagttgtcatactcatttcaaatctagcaatatgccatagcaaaaattatcttcctgtgtatgtaagtctaaaattctaagttataacaacaattctacataacctcctatcaaataatctaaaaatctcaattgcacttgctgcaaacaaaaagagtgttttggaatcatcactgaaatcataatcaattttaaagtcatgccctctcttgtaaacaaaaggcaaaaataccaaaaaagaaaagatagtgagaaaatccaatcagagaaactgaatacaatccagtgattagctctactaatcaaagatatactgagctaaaaatagaccatgatagttgtaatcaacaattaaaaaactaattaaaacataataagtttctctgcataagtggactaaacagtaaatagaacaaattgcagactcgagaaggatacagccagatgcaactagaacataatctattattgaggttttgaggttgttcttctttgattgccttcgacaatgagaagtttgttatagtttttattgtattatatttgtttaaaaaaaaaacaaacaactggttttagaatagtcttctcccaaagtcaatatataattaactatggcccactaatatttatgcatagttaaacctacatgcagtttcctgcatatattgtgaatgtctaactacagtaaataatcactagtgtgtctctcggcctcactgaggagataaagaaggcattaaagggggctttgaaatatttggtttgaactttataattattctatacaaatcaataatcatgattcgtatgcttttgcaagttcagtgtcatgttttataaggcaaccaataccatcctacttcacctgttagctttgttggtcaaagaaatttactaacaggtttaagacaaaacttcatactagacagagatggaccaatataattgaaatgatatattttcttgtcagtagtacaatgctaaaataaaggaatatatagcataataattaaagaaaatcaaatgaccaacgttagggacttttcttttcatttcttgtgctattttcttagtagtttagaacaactaagatggtactcaaaaagggacggccttcttgctataagcacatggagtcttctaactgcacattctttcaataaacacactcatttcccaaagtttattttaactattcagaaagggaagttagaaaccttaggtgatcaaattctattcacaaacaaaaacagctaatttttcaaagatcagacaaactattctcagagtgtagaacccaaaatcaagcaataaataaatcataaatcaatttaatgctaagcaagaaaaaattgtaagaaggggttgataagggtcgtgttctaaaagtattgctctgtattgaaacccaaaaaatccataagacaatgaatcaaaaagtattgttcaaactgaactaaccttatttg

SEQ ID NO: 226761 - DNA, 1684 bp, Cannabis indica
tatataaagatttttcctttttaaaaaataaataaaaaaattagtaatattctcctttttaaaaaattagataacgtgaggtttgttagagagatatgtggctaagatgatttttttaatttaaaaagagattattaatatttaaaagattgtttaattttttggtttaattattgggtttatttgttaacgggagatcaaacctaatcgttaaatttaacagaatattcttttatttttaagtatattctgttaaaccaagaaatgccgttagataggcacttttaatatataaagatatatatatatatatatataattaattttgttatctttaggggtgttaaaattttaattgtatagttgatattaattacactcattattgtacagttaagattatattgtacaaattgaaaatgtctccatcattaatctttgtttgagcatgcagttttttttttttactaacgaagattttcattaatcaagaacaaaccatacaaaacaagcctcaccaaccggctccacctaaacaaccctcctcaactcatcaatcgcatatacaaagtatttccttctaatacatatttaatcttaggcatgctatacaatctatactttacaatatctttaatctctttaactatatatatcccaccatataacaagtgctgttatgtacacaattgttcctatttttctacacaaagtaaactgtggcagcaagaatcatttgtaaaagatgaattgttttgcttgaagtcttgatcgaaagccaattcatccatagcccaagcttcaaacccaatccacctgaaaatctcatttaacatagcagtagataactcataactaaaaaataagtgttcatgactctccaaatcagcacaacaaactgggcaatttaagttctccaaagcaatgtgaaacttgtaaaacatgtcttttatgagcaagttactatgcacaacttgccacattatgaacctatgctttggaagcaacatgttactccaaatagcttgcttgtaagggaacacgacctgctgaagttgatcattatagagcaaagaagtagagaatttacctttcctcccagcagccatcaatttatccttgccaaacttcattctcaaatggcaaagctttctccaataccaactagtatccatcttgagctcatagtcccaaaaatcttctcccttaagataaattgtattcacccatttcacccaaagaatatcatgtttttccataatagctcaaatgaatttttctagaatggctttattctaattagatccatccttaaagccgagcccaccataagctttaggaagacaaatagtgtcccaagaggcaagatgaatcttacttctatctcctttaaatccccacaagaaacccctacacaacttctcaacctccttaataatactttgaggaaggatgaaaatgctcatccaataattccttagccccaagagaacggattgaatcagttgagtcctccccgcaaaagaaaggtttcgaattgcccaagttagcaaacgagctttaatctatttaaggatgacatcacaatcctctcttattcatttggttggcctcaatggaaccccaatattgttggaatttattttaccaggatcttagatttactaacaagtatgttgtttaa

SEQ ID NO: 226762 - DNA, 1490 bp, Cannabis indica
acatttaataatttgttatttttttttatttaaaaaaaaagtcacccaataatttttcataaaccaaaaattctgttatatagccacattttatatagaataaatataattatatatatatatatattttattttttttttttaaaaaaaaaagaaaatattaatttaattgaaatttaaatatttaaaaattaatattatatgtttgatatttttttaaaggttagaaaaatcgtgaatttgaaaataataatttaactcaatttactcaatttaatattttgactgccatgacacagctccccctgcaaaagcaacatattctgttacacagctccccctgcaaaagaatttaatatttttaaatatcatttaaatattattttatttttattaaacataatttaactcaatttacttacctaattagttatttcaaaataataactaaaaaaaacacttcaggttaaaattaataataataattatacttttactattttttttggtgccatttatgttttgagacgtatcggtcttcttttttggtgagtcaacaacacatttcatatattgtattgaactgaatccaaagtaaactacactatgttataatgttattttgaggattatgtataacaaatttattctagctagcaatatatctatgtaatagttaatgcttgtttcttaattattatatgtttattgtaaattcaccttttgtaaagctaagagtaaagccaaataagagaaattggtcattaattttggtgttgtttgataacatttttactttttaattttttaattacaaaatgaaagtaaaatttttgtttttgaaaaacaaaaatgcgttgtgttagctggatttttagccaatcgacgcagagtcgtaataaatgagatttaaaccaaaattgtaataataaatgcaattaaagacaccaaaatttacaataaatttaaagaaaagatactggaatttaatgaagttcggccccagatgtcagtaatagcttactccccttgtgttttattaatctgagttgcaaaagtcaagaatagactcttggttgcaaagaataaaaaagtgtttattgttttcaagtgctcaaaattacggatccccttcccaggtcatggatgaccccttatataggggaaagggtcggtgcttctcgcttcaggagacttgaccaacgcggagctacctcaatcgtctccttgatttttagagatagttgaagtctaatttttatgataatgccttgctattttcgtggttaacaactgtctttgagcctttcatgagatttgaacatttgaaatggtcactgacaacgagggtctcttaagggtgtgacacggtcgttgaccacctttggggatgaagcccatgcttgggagcgagattcccgaaaccaaacttgaggagggtgacaatcgtcatcgcgaggtgaccccccgagatccaacttgaggagagt

SEQ ID NO: 226763 - DNA, 2338 bp, Cannabis indica
gcttttgaagctgaacaccagtaccgataaatgcctcttactctcaaggtgcctcttttttgtgcatcctctttctttctgtgattattagtacccaccggagaagtagaagagctcgaccatatattttagtctacagttatatatattatattaagaaccggatcttttagttattataaaatgagaaatttttctgctcttaatttgtttgtactttaataatttgctgaactatctgaaaagaggcatagtaggaccaagaattcattccacattcatccttgtattcaatttgtaatgaagaatggatttactaattcttaatcaggaggaaagaatcataaactattgttttctgataccctagtagttaaaaagtggttggtgcaatacattgtttgctttgcattcaagaccaaatactctactgaggctacaatgacaaagagaaagttagttttgacttgacttttcaagtctttctttgtaggctgattgtctttttcttttatattattgaaacttttcctttagtaaatataaatatatacatatatgtatgtgtatctatgcatcaggtaggaaaataagtaagagtgaaaaataaaacatgttaggccattaaaaggaattgagcggaacattaattatgtatgaatcctttcaatatttatttttggtgaataagtgagaataatattgatcataagaatctaagaacctgtacaaaactagtttcaacactcattacaatcatttatcatagtttttgacaaatatttttgagtcatagttggttatttttactaactcctttgtataagagttttacaatgtaattttttgtttacttattgttgttttctattgacactattatttattggttgttagttgttgttatgtctcatgtcatttcatgtgtgctatatattgtataaatagtgggaaatttatggtcaattgatcttacatttcttagatgatgatgatgcttataattggtttgacttctccttgttgtcacttctgtattttcaaggggtcaaaatagatattaattatgttttaagccattatggtttgacatcctctttcttattactttgtcttatagttttactctggcgtactttaattttttttttcatttcagctgacattgtagtccatagaattccattgttgctttgaataattatgatagatttataattattttgtaggtatggatcaatatatgcgatatagattggctgaacatgatgaagattgtgtagaatcatttacagatttgttgatagttaataatggtaaaaagaatactagaggtgcgacacaaatgcgtgatatttggggtaatcgtgatggtaaaaaggtacaaatcacatgtaatgaatttgggcagccacatgataaaacgcaagcagacttacaattttattgggacattagtacgagatggaaaaaatgctctaattaactataagagttggcataaggtaccagacaaatataaagatagaatgtggaaaattatacaggtaaaaattaatattttacttttatttaatatcgcattttagatcattagctgaactaattttgacattcctattactaatgtattatttaaaacttctaggaaaaatttgatattcctcctttcgcaaaaaattggactatgtggtcttgtggtaaggaacttaaaaattggaaagcttttcttaagaaaacttattattcagaaactttatcttttgaggagcaaaaaaaatataaggacaaaagagtatatgacgggcaatgggaggaattaataaaatattgagcaacagatgatgcaaaggtactttttgttttcatatttaattgagtatattgttttgatcatatttcatgaatttaatatttattaagtgtaatttatatattgttttagaaaaggagtgccacaaacaaggctagtcgtagtcaaaagaaatacaatcatacaactggcacaaaattttttgcacaaattcgagatgcacaggtaaactacaaaattattttagcatgtaaattgaacattgctttgtaattatgcgtattttgattaatatttaactgcaactaatacttttatttgtagaaaaagaatggtggaagtgcaccgacacgtgctgatatgtttaaaatctgctatacaaataaagataaaagtgtaactgatacaacaaaagaagtaatggtatgattgaataattttaaatttatgcctacaatttttttttttatttcttaacttatattaatgataggtacaattacaagagaaacaagagttgaatga

SEQ ID NO: 226764 - DNA, 1418 bp, Cannabis indica
aatggacctattaagtttgcaaactttctcttcctgccttggaagcttataaccttctggttgctccatatagatggtttcttcaagaatttcgttaaagaaagctgtcttgacatctatttgccaaatttcataattaaaagcagcagctatagagagaagtattctgatggatttgagcatggcgactggactaaaagtatcttcatagtccacaccttctatttgggtataaccatttgcaatgagtctagctttaaaatttttcgacttttccaccagcacctcttttattcttgtagacccatttacatccaattagatgataatcattaggtgcatctacatattcccagactttgttctttttaatggaatccatttctgaatccatgccagctgaccattgtttccattccgaacttgccattgcctatttataggttaatggattgtcatcaatactatcaccaacaaccatattgatttcaccatccaggccataatgagctagttttctagaaaccatcccactaagatgaggagtcgtgatcttctgaacaagaacattagtggtagacttctcggacgtatcaattcttgcattggttcaactgagggagtgggattatcctcagtttgagtagaagaggatggaacattagttggagttatatctgaaagcatttcctctaacactactttactttgaagcttgaaattcttaatatagtcatcttcaaggaaagtgtcgtttgtagaaacgaacatgtaatgaccgcattttaggatatggattagtaaagacaattagcgttaattattgataattctataaatatttattaatgtatttaattgtggattctatttttagaaatgggcattagagttataatttctcaattctagagattttattaaactctagatgtattatttgtattatatatgaaatatgcaatttatataatttttgctcggggacgacgaaaaacgcgatgatggccattttaatcacatgggtaagattagaacctttttcttagtcagataaatagtggagataaatagaatactagttttgagcggggttatggtttttgaccattttacccttagactttaaattgcttaagttttaggctaaaagggtattttggtaattttaaatggagatttaggtggctacatgggagagtggaagctgcccactttgtttacttcatcatgggaattaattaattaggtttgatttatcttagtaaaatcaaagaaaaaacaaaaaaattaagaaaagtcaagaacttccctttctctttcttccttgctcgaccaccgcaagaccagcctagacctgggatttttctctggtgttaattaaggagtgctagatgaattcaaggagtaattagtga

SEQ ID NO: 226765 - DNA, 3465 bp, Cannabis indica
aagccaaattgatgtttgcccctgtagtgattcaaaaaagaagatgtcttaagacaccattgtcttgttggcatttggaagctaattgctaagagcaaacaacatgagtgaagcatggacataagagagatgagtgatgcgaacactttgactagcaggccattcaactttttcacctgtaagttcagtaagaatgcaatcacgatccatatcattcacctcacttctagccaacgatagtgtgtcaaaaataaagcaattaaataagataaattaaaaaaagtgttgacctcgcttttagctaacgagagtgagtctaattttgtaagcgataagtagtttaatacgattgaaatattgtaaagcaaataaagacacaagaattctatagaggttcagcctccagcagttcggtaatagcctaatcctcgttatttgtattgacttaagaacaaggggaatagttcctcttcttatagctcttacattagtatctctgaatatgaattcttagacaaaatctttcgaccctttgcccagtgaatatgaatcactatttatagggctataagcttaagcttggagaggaagtatttcccttctcgttacaattgatataagcagaaagattgcatagtaaatacagaatacactgatcatgagatttggacagcttgccatatctctgtaatctgatcccaaagttataaggatttccttgatgactcacgatgcgaaagctgaattcgcttagtgttggcgttgtgtgtggatagcccactgctcggtctataaaacttcatctgagcgaatgtacaaagtgtcctgttcggcctgtatcttgcgagcagatacctggagtcgattccacgtgttaccatcgagtaatgccacatcagagtgcgaaaattgggataacatttgccccccaagtctgtacgagactttcgaagttgcgtgtaggcttcatctgagctgtctttgcatttagatgggtgacacgtgtcaggcgcacctgtttgaaatttgatgttaggctgactgggcatcccttcgattttaggctaataaatgctctgacgcaattaatgcttcgaaatttgcttttttctcaccacatttgacggttgcacttgattgctttttatttcccatattcgcttttcgttgtttgcctataaataccattgagcatttgttcacaaactcagtttcactaaccttctttgctaagcaagttcagagcgaaaagagaggtttttagcttcaagtttgctgaagagttttcacaagaactgtttgttcagtttggcgtaacctgaactcagacgtttgatccttgagtaagttatcgatttcttttacgtttactttgcacatttattttctgaatgcaactttaactttgctgtagaagatatgtaggaaaccataagtttagaaactctccaattttcctttgtaacgattcatgcaacttcattgttcataatgcttgctttttaaactgcataatgcctgtctttcatctttcttatactaagcttcatgaaattttttgccctaactcgtgaaaattttaaactactaagttttgacttttcgtcgaatatttttattctttaatctgttgagtactcctagttggcatatttgcttgtttaatgtttgatatcctgaccaaacactcatctcgcgtgttttcttttgtagatgaaccctggtgagttttggggaagcaaacacaaaattgactaggacctgcttcaacttttgcacgaggatcatccttgtctttctctagtcagccctcttcaagtgacggacattttgattcaattttcccgtccagccaaaggatgatggctcgtattaaacaaataatgcggaaagctaacgcatctaaccctcacgtggcgatgcacgccaccttgcctggcgtctacctaggcgagttagactgttacattcccgcctataacaatcgagccacaaaccttgagagaaatgtgtgcttgttcgggtgctcatgctaagcaaggggcgttgctacctttgcacccatattttaggaaggtggcagactttttcgtctctatctgacccaattcacttcttagggcatcaagtttctgtctgccctgttcattctctacgcctcccagaagtgggatatgccctctccccacgaggttagctagtttttttgacttgaagtctacccctaagcaaggcaggtcggggtacctctacttctctcagcgagactacaagtggttgacaggcaccaaggacaaggccgttagcaaaattggacatgttgttgacgagtatttcatggtggatggcatgggcaccacctacactcagttccagcagatccctgtatatcaccgcccacccttcacacttgctcttagggacagagctcagaggcttgctcagcttctgggtgctgaccgaaatatcactttgttgacctccgaggaaaactttgtggagtacgggctctacccaaaggatttcatccctcagcccgcgaaggagaaaaagaggaaatctagtactggccgggctgagggagctcatcaggaggatgaactcattcatcttaagcgtgaggctaagttgaagggaggtgtggggaaaaacagtatgctcatgagcctttgatccttaagatgaggatgaagaggagcaggtgactccgctcaaaaggaggaagaagcttcctgccaagcacaggcctgttgaacacgcaattcgaattacggggccaagtctacctgctcggccatccactcctgtactaggaaaggggaaagccgtcatggacgagataacagatgtgtcaggtgatgatgagcctccaagtcttgctcaggcaaacgcttcgaaaaatagttcgtcttatttttaatcttcttgattattatgctttcatagttttagtgcttttctttgaccatgttacttttatttcgggcagacatgtctcagaagatgcttgaagctttgaagaagagagttgggggaagctcaggctcgtgtcctccggccaagaagtgtaggggcggtgagacaacaccgtctagagaaagggcaccggctgaagctgttatcaatctttccaaagagctaaccgttgtggacccttctgcccgaaagcttccaagtctaaagtctctcaaggaggtagctcaaacaggcccgaacagtcgaagggcgaatctgagtagattcgggctcgtaccccacctccatcactgcatccagagaccataagaggcaaggagatgctcacccacctacatgaatcggtcggtccctgaggtgaatgagcagcttgccgaagctggcaacgagccttccttggagctgttgatgggaggagtcatgaaggagtttacgagggtgagtctttcctgacagtttcctttaatccttctttacttggctcagatt

SEQ ID NO: 226766 - DNA, 1631 bp, Cannabis indica
ttagtacatgtcaaagttcgagagaaaaaattgctaattagccttgatatttttcagagtgttttagaaaaacaacaaaaatgcttgatcaactttgatatttctactggaaacattatttattacaaacgcaaatttgatacattcaataagcaaaggactaacttttacacaaaatttggtttttatgattatcaaattaattaattaaatattatactattttcaagatgtttaaagagacttaaaaaactgtttgaacagaagagatatgtttaaatagaaagtttattgagagcaaaaacaaacatgaaataaagaacacacgagattatacgtagtatcaacaatctttataaattgctactagtctatggggccacacctagagaatgaaatttatgagatgaatctcaagtgattacaaaaccaaattgacttatacaaataaacactccttctttgaatttgccacacctttagtaatctatcattctaatcaaatttctgaagtgctgagactttgaaatcccttcaaatcatagcacttgcacacttccttccgaagagtactcacttgcacttttctgctcgaaaagtgactcacgaacaagtcttctcttgatgcttgatgatcaatatctaaagtgttcaacctacataatttcaataaaaaacaatacagaagaacacaataacaaaatactaagaacttgttggactcaagttcttcacacaataaaaaaactctctctaaatttgagaaatgatttagaaaatgatgcaccaaaagagccgctaaaaactaatgacctaaggatgtctttataaattttagaaactctttaggtcgtgaaagaaaaatcaacaaactaccaaccattaaatgaaaaatctttcaaaaaaggaaagtaaaagattttgttcaagcagaccaaagtctgttcaaacagatacattgaatattgaaaatttttatttggtgtcaggtggtccccagtcgcagaggtggtccctagtctagtcgtagaggtggtcctcgctcacaaatgtgttgctacagtgtaccctcgcaggtgtgttgtctccactactcgtacctccttactttcagagcttttaggggtcatggttgaacacttctcctttgcacgccttgtcctttgatttccctctaacaatattctctttgatgtgcattcaaattttaccttcactcctcttcacaaaaacaacacacttggcactaaacaacaccttcacactaacggacttgcatgcatacaaacacacacacacacacgcacacatgctcgcatgcgagcccctcgtctcacacccttacagtcgcacgcacacgcacgctcgcatgcgagcccctcgtccgcacccttacaaccgtacacacacacacgcatgctcgcatgcgagccccccatggtctcgtacccttgtagctgcacacatacacacacacacacacacacacacacacacacacacacacacacactcacatgcaagccccccatgggctcacatgcgagcccctcgtctcgcacccttgctataggacgcgcgcacacacacacacacatgcacacaattgcatgcacctaatgcacacacac

SEQ ID NO: 226767 - DNA, 1272 bp, Cannabis indica
ctactctttacatctgataattggcagtcacttacacagtctaaaaaggtcgtggagttgtcaaccttagctctatccccaattcttttttctttgtagagtatatcattaaaatcaccaaatactatccatggtttctgagtagcaatactacgtaaatcattccaaagaatcttcctcccattttcatcattgaaaccataaacaaaggtagtaaagaacttataccttttatttaccgtttcaacatgaagatgtatcaatggactagtacatttgatgatactagtattgaaaagaagtggattccaagcaatgattattctccctcttttatgccaagctaaatttgatgtaaaacaccatcctaagaacgttcttcggtataagtctccaagttttggaggcttaaccctcgtctcaagaagaccaagaagaccagctttttgaattgcaataaattgcttaacattcatttgcttttgctggctgtttatcccccgaacattccaacaaatgattctatccattggcaagagagggtcctcccccctctcttgtattactctcttgcattccatctgttataattccttctgctaccatatcttcatgtccttctccttcttgctcaagaacattgaaggaattaatgatcactgtctgctttggtggttcttttcccctgactttccagcctttagtgactggttggaagtcctccgttttctctttgtcaataacagcaaccacagctggcttccttgcatcccttttcatcacccattcttgctgtatcttgtctttcttcctacaatcaattgtctcatggcccattcctttacaattcttgcaaagaattggtttccattcgtaagagactgtaaccgacacattcattccatgctcattttcaaaataaatggtatgtgggaactcctggtgtatggacacctcaatgagcactctagggtagctaagtttatcttgttcctttgtcaccgcatccaccattatcgattctccaatctgcccaataattttgaatagggacttttcaccccagtatttcagttctagatcatccagagtaatccaaatcggtatcctactcacatcctccttcttgaaatccacatttggatgccaagctttcataatgacaggacgtttgttaaagaaaatgtaaccacccttaagaagagagtctatgtcaacagtctcatgaaatctaataaaaaaaataccataggatagtaatcctaccttatc

SEQ ID NO: 226768 - DNA, 1127 bp, Cannabis indica
ggcgttacaacagtgtcgaggtcgcttcgtgaagtcttcttaggaaacgatttttgtgtaaaaatcacggtagcagtaacactgtaggtttacgtcttccttcaactctcaatgaaagtactaaaatatttactgaaattttcagaaagtaaatatttgagaactaaagatataataaaatgcgaaaattaatgagatgaagattttttcatgtttcaggtgttaatcaaccttagtccatgagtcagtttattagcctctaagggcgtatttgatgtgtttacaatattttgtaggaaaccttaactctatgttcttagtttctcttgaagaagaagaagacttagaacaatattggtagagctttagctatttaggttgtaatcctcccattgtatataaatagaaggttatttataggctaagggtgggtatacacatgcccatggccggcctaagtttatgccaaaatctcaaaaatgggataaattacatgcaaaagagacctgactattggaccccttggaaacaattgtgatcgtgcgtgctggagctggacaattggggaatgttgtacgttatgggcacatgtcatcaaaaggtttaatctggaaaagtagagggcacatttcctctaaatgtttgacctttaaaagtagaggtctgataaaaaggtggatgatgcgggcacactaccatgtcttgatacgggggacaaaatctgattatatgtcagaaaaagcataacctttgctgggcgatccagattacaccaaaggtagagatctgtgacactcttgggcggacagtgtttgcaattggcctttcgagtacccatctgggtattagttaggaagatccaggtttagactgttggatattattttaccaggatcttagatctactcacaagtatgttgattaacaccctaaacatgaacttctaaaatgattataaattaaacacatatgaagtatgagaaaccttacattgggtgcagcggaataatatgtctccttccgttcagatctctaacccttgttacctttctgtcacagagtattatcaagatctgaacctggaactctttctctcctttctgtaatgctgaatctccttcttgttg

SEQ ID NO: 226769 - DNA, 1588 bp, Cannabis indica
ctttctggaccaaaacacaataaaaacacatgattttttgatagaattttactcagtattatgttctaagagattgctggtgttaattttgagtattagacatactaaaaaaattgtaaatcagattgaaaacccattctgaattttaagaatagaaaaaaaaactcaattgtgatatgtttctgaaccaatttgaaaaataaaatcatgtagaaacattgtaaattagtcaagaatgagattcgcacaatcaattttagtcaaaaatcaatagaatcagaaaaccccaaaattaatttcataatacaatcataaaatctttaaaatttgaatttgaaaattctctcgatttactaaataattttatgaatataatatatcattaaaaagagaatttaatgaggaacaaaactcttaaggatttaagatcaatacataaaaaaaatttaacataaaataatagcgaaatcaatatgtaatttaagaaaattaacatatattaatgaattgaataaattataggtcctatatcatatacaatatgtaatctgataccacatgttagaaaaattaataattccaagatacgaattaatatataacatagaatactatagtgtatatatatatatatatatttaaaataaatacctgattgattcataacaattggtacgattcgatagtgcaatactatcaactaagtcttcctctctatatttttaaatcaaaatcaattttatttattttattatctaaagtatagaattatgatgagacaatatatatttatagaattagggatgacacttaacttagctacataaccctaattagactgggtctgctcatcaaaaacttcagttaactagaaaaagttacacttttactttaactagactttacacacatagatactaaacccattgactattgatcactaaaaattaataaattcaaataaaaatctaacacagaatactatataacttacgccagtggttatatatttcgctaatttaatttagatatttcaaaatattccttaatggtaaattttatagagatttttttatttttacactttaaagtagtttatatatatataaaaaattttatataaaaactctcatagcaactaatggagcaacctaaaacgtaatcaaaatgcacatagaaattcacatagaaactaactgagaaactaccagagcaacccaaaccgtaaatttttttaaaaaaaaaaatagtacataaggtaatttctaaattttcgattgatattttagttacctatgttggcatacaatgttagggtttgggataagataatggggttacatttcaaaattaattggcaataggagcagtagtctatttctcatctttttatattgtgaaaattacatgaaatatgggatttcataacaaagttagaaaaatatggcatttttaggtttgccactcttctatggcattttttcatatttaagattttttatggtatttgatatgccatatttttataaacttattatccaatcccatattttatgtttttgattttagcttaattagttttatttat

SEQ ID NO: 226770 - DNA, 1056 bp, Cannabis indica
agtcgcgaccagggggttaaacaaaaaccctgaattcggggatttcaagctagtcgctaccagctgacgaaaaatctataaaaaaacccccaattttcaccatttcaaaccaaaacctaaaattcaaattctcagccgccctcaccctctccccttcgaaaatttgtttttccttcaccaaattttcaattctttccatctatctaccaattcttcaatcccaatccatccaaaacctaaaattcatcatcaatcaccaattttcatcaaaaatcataccccaaaacatcaatttcaccccaaatccaaaaataccattgttctttatcttcaacctcaagatttcaagaacattcaacaatggaggtggagtagtggctttttcgggtttgtaagtatcactctctatcatatttaagaaattcattgagcatttagggatttttaatgaagatattgaatattttggaaagtttttgttgatagtggaattgttgggtttatattgtggatttgaattgttattggtattatctgtactgttctggtgatttttaaaatttgggaaagtaagaattttaaggggaagtgctgcgcaattttttctacattattttttgtggtaaaaactttggtattgtgctaatatgggtccaaaaagaacaagacacactgaagaagggggaacatcatcaaacccgccacctacgggtttcgatcgaacccaatttgttagtgaggcggcacaaaatcggttcatgaggcttaaggttaggccacacattgaggactggggtattgaattccctgaaaatcctttgaggcgtcaatcgaggtttgagacaatttgggcccaaattgaaagaatgaaatggggcaattttgttgatgctaggggctgggccaatgtcaccatggcatgtgactttctcgccaattggcccgagcgcagaaatggggaagttaaggtgcggggtaagaaggttcccgctacagttgatgccttcaacgctatgttcactgtcccagactacccaatattctgcaccgatgtga

SEQ ID NO: 226771 - DNA, 2203 bp, Cannabis indica
ctgactgtcacaatcaccccccttacgagattcgacatacttatcgaccacacttccaactaggtcaaggctctgatacaattttattgtgtgacattcagtagttccataatctgtaagggaaaataccaggtaagctgtgcaatcccacattgccttaggaacgtcaagtgtgatgattctaagacagtgtaagtatgggacaacatagttgaagaggactaaaatggattgattggtactacctatatcaacaaggtacatcttgttttccggtaccctatcacaaaagaactccacaattaagcgtacttgaactcgggtaattttaggatgggttacatcctgggaagttttctcaagaagcgtgtaaatgaggacaaagcacgctagaaacactcgtgttgatttgtaaggctaggtcattagtccatgaagcagctagagtggcatacccatgtataagagccatgagtttgtgggagaaagcccaatcgaggcttgaagcggggacattacaaatggtatcagagccttgtggttgatgaggatgtcagatcccgaaaggagggtgattgtgacaattaaagttctgtgatccgcaaggggaaatactagaagctatgcaattccacatcatttgggaaggttaagtgtgatgattctaagactgtgtaggtataagactacatagctaagcatgggcgttacaaattataacatcccgcttcaagcctccatttggcgttcccccacgaactaatgagtcttatacataagtaaaccactctggctgcttcctagactaacgactggccctacaaaccaacacgagtatttctagcgtgctctgtcctcactcgcatgtttcctgggaaaacatcccaagaggtcacctatcttgaaattaccccaggtcaagcatgtttaactgtggagttctttcatgatgggctaccaaaaaatatgatgcaccttgatataggtagtaccaatcaatccatttaagccctccccaactatgtagtctcatacatacacagtttgaaaatcatcacacttgactttcttcaagtgatgtgggattacacagcttacccggtgcttccccttacggataacgggactactaattgtcacacaatcacccaccttacggggttcgacgtcctcgtcgaccacacatccagctgggttaaggctttgatacaattttttgtaacgatcttgcttcaagcctcccttggcccttacacctacagaataatggctcttctacacgagtatgtcactctggtttttcttggaatgatgacacaccctacaaaccaataagagtgttttcaacatgctttgttctcactcacacacttcctgggaaagcttaccaggaggtcacccatctcaattgtggtgttctttcgtgatggactactgttaggctatttttagcctatgtctcgagtttaatagataagaactttctcgattatttttgcttttggagcgattttacgcttgattttcctgtttcagtttcccggggcattagagttcaaattcagtcaattgacaaaaagacgggacaaactggtgaaaaatcggccaaagctgctcaaggggagtcagtagtcgcgaccagcttgaagcctagtctcgaccctttttcatggtcgcgactatggttgcgacttggggatttggcaaaaactcggttttttgagttttgcctgtggtcgcgaccagcctttaagtgggttgcgaccaggtacagaaaacgagatttttgacctacttctgatttcttcccaattagaggcacacctctcattcctatataagggatacgattcagaaggccaaagcaagcacaaaagtgacccaaaaagtgaatgaaagaggagaggaagcaatcttgaagacccgtcgcgatatcaccatctagtttctttcttttaccctctatttgtcttttatgtctatttttgtttcagaattaatcatggatgtttatattatttttatgagctaaatttcccatttagggaggatgatgaatgtcatctaaagttttgcctaattaatgattaattgccattccttcaatcttgatttgtgaaattatttatatttgtgtttaattccatgtgtaagcttgatcaccttctacatgttctatgatctcaattaaaaaatctgaaaa

SEQ ID NO: 226772 - DNA, 1148 bp, Cannabis indica
gacttttctatgattaaatggatgacatataatatacccttattattaataagcttattaaataagctgaaagtaataaaaagaataaaagaaataaaactaattattcccttaacaaattctatgatcttgaaagaaaagcttctaagggcattttagtcctaaagaaaatattccgaccaataaccaatactttcgagcctaacaaagataccccgaaaaataataaaaattatttacattcacaacatgactctctaaaggtccaacgtcgcttccctcagcttccggacacagccacagaaattaagaagttcacatatagcataatagcatatataataataaatatatttccaaaatatacatttcataaatattaatttaatctcatacataaaccctaattatttaataatttaaagtattaatcatatgcggtctttacagcgtaccagaggagcagtgtccactcttaattattattttttttaattttttttcttccaacccattcttaaaaaatatacatatcaaacaaaataaattctatattaaatattataacaaaaatgttaaaataaaaaattatataaaattttttagaaaaaaataaaaagttatatatcatttaaaaaaatgtgaaaataaaattaaaataagtattgagattaacacaaaataatgcgagaaaaattcttaaaaaaatattaagagtgattttgaaaaattattttaagcttaatttttttaaaaaaatatcagagtgtacttatcattttgtgggtgcaaatagactctctttaattttataatatgaagtctttattctcttactttacttggtgttgtaaactttcacgcttaacaaaaagtttttacactacacattgaaattttgaacttttttatttttatattgtggggtagaattttttttaaaaatactgtgtcagttttatattatatattgtgttaagttttcaccgttgttccacggttgttttctagtttctccactgttgttttagttgttctgttttgttgttttagttgttctattttgttgttttatggttgttttacaaaaagacatgatttttataaaagatttcgcgtgaaaatttttgtccaaaatacaatatttt

SEQ ID NO: 226773 - DNA, 1478 bp, Cannabis indica
gactcgaacctcgacccgaaccagactcgaacccgaactgaaaacggacccagccctagacccgaacccaggacttaggacctgaccactacaataatctattaatacaagtcaataccaaacatagtattgtattaaataatgctaatatacaatcaatacaatataatacaatctaaatggacccagcccggacccaaatccaggacttgggacctgaccactacaataatctatgaacaagtcaataccaaacatagtattgtattaaataatgctaatatattctctcaaaaaaaataatgttaatatacaatcaatacaatataatacaatctaacacattacaatacaatacggagtactaaacatgccctaatagtcaaattgattacttaaggatcttagccatgaagaatatcaaaatattagtaatatgaacttaaaattttttgatatttttgagatatttgatattattggtgagaattttttatttatttatttatttttttgcataatttttatttgctcatttgtaaaatcacacattaggattaattattgaatttcaataattattttttcaaaaaaaaaagaaaaagaaaaaagaaaaatgtgtaatatttaattgatttaataaatattttattttattaaattatttttaaattttaaatttttactagtagacatgatataattatatattataaattaattattttgaatcattaatataaataatacaaaatttgagatttttttaagtaaaatatatttatttagtagaatatttgatgtgaattattagaattactgcaccaaaataaaaaaaaatctaaaattacaaattaaattggtgtaactgttaaagatagtctactcttggagataaaaggaagggagctgtattaaatttgatgctagattggagttactctaatttgctatttctaccacaagagaaatatggatgattttttacaccctttcccactactaacaaaaagtacaatttgcattggtcaacacccaaattaactttaaaaatagatgcaattagtcacctttaaaattttgcatcagctgaaaatttatttaattcagttaaaaatatggaaatttgcgtcaactaactgacacatatatgcaatttaaacaaaaagttaaaaaaaaaaaataaataaaacaaatgggtcaacccatattcacataaaactctacaaaccctacactcacatgatactgtctcaccttatgagttgtctcacattatgagacgcctccaatgctaaatcctctcaaattttcaaatatgatataacgctactcacccttaaaaagtggtcaacatctaattcaattgagttgtattgattatacaattcaatcttatcaaaaaaaaaataataaatattaattataatttaattagatattaaaaattagaattctaaattcgttataaaaatgtc

SEQ ID NO: 226774 - DNA, 1690 bp, Cannabis indica
tatctcctctactttgctactatttgtaatgcccacattttggaatatggattagtaaaggtaattagagttaattattgatatctttataattatgtttgagtttattatgttgtgggtcatatttttagaaatgggtaccagagttatgatttctcaattttggagattttattaaacactagaggtattatttgtgttataggtgaattatgcaatgtttatgatttttgctcggtgacgacgaaaaatatgatggatggtcgttagaatcacatgagtaagtctagaacctttttcttagtgggatatatatttgagatgaatttagcggggttatggtttagactattttacccttaggcttattaaagtttatgtttaaagaacaagggtattttagtatttggctaggcggtatgtggctgaatatatgagtgacacctagcctttattattttcagcctagattaatcaatttaggagtgtaccaatcggaagaaaagtcaaattggagaaaagacaagaaacatttagaacctctctttcctctttctcttttcaaacaaagaaggaaccaagggttagggttcaaagtcagattgctgtgtttgattcttgctggcaattcagtagctcttgtgaggagaaagtgaggtgtggccctcatttcttcttgttaagttctttagtacaaattgtttgttcaagcttattgaattggtgattttgttgctgtgtaagttaggatggatatgtgattagtttgtgttgtttaataaggtttttttaggtctgaatctactggttttggtgtttaattcttgggttgagcaagtttgagttctaagaactcaaacttggctcaacaatgacatttttggattgagtatgtttttcttgtttctattgcttggaatttattgtttgaggttattataggtgttctggaaagtttggtgaagtttgggcacattttgatcaaaaattggtttgttttgggttacctgatgcaaacaggttaaccagtttgacaggtagtgtgaaaccggttcaccggttttgggaggttcccgaacaagctattttgtcaattcgtgttacttttagagccttggtttggttaattccttcatacttaatgtatttttattttggttgtcaatagcaaaacccttagttaggggttttggtttcccagattagggttttggcgcgtcgtttacccgtttatgtaatgtgactagggcatccattcggcatgaagtttttcgttcaggtcggtcaactcacttgaatttggaaatgaggtaagaatagcataaaatatattgtatatatgcgaatgtatgtatgtgtgatatatatgcatgcttgttgtgattcgtacactaccaacactagtacggtagccgtacagagtgcattggtatagtgtacaatgtttaaagagtacgttacagtgttaccagcactagtacggaaaggtacgggatgtgtgtggtacaatccttagtggtactcggggtacgaaacaaaccctaccaacactcgttcagtagtggtacgtagtgtatgtggtacagtagctgtacattagtaaaaatgttcttactcatttgttaagccttgtaaatgggtatatgacgcctagatacggttcaatgttatattatctgttatatgcttt

SEQ ID NO: 226775 - DNA, 1533 bp, Cannabis indica
tgggtttaggaggttttactaccgaaattttagaattgggggttagttgtaaaaacctgaccacttaaggaggttatgccgcaaattactctatataaatatatagggcttatattacaaaaagaaaaattcatctggccaaataaataaatatacagctcaaataaaataaattatacaaatacttcttaaacacaccttcaatccacgatccatgcttcctgagattaaaatcttcgtctgatgtaaccttcgatcaaccacccaggaagccaacacaaccgaaacagaatctaacgaaaaagagaaccaccattaattctggtgacttcacatgagaagacgactagaaatcaatcaaagcaggggctatttcaaatttctgaaaaaagtgcagaaaaactactacgaaactaaaattcaaccagaaatccagtttattaattcacataaaactaatgtcttaacttcaattttcagatccatgaaatgtagatctcaaaaagttaaattagagttcctaagcaatccaactgaagtataatctaaaaaaaaattacatcaatactatagtaaaatatttattttggtatatttttgttgttttctaaattttcattggtgaatttattcatattaaatcacgaagagacatgtacatagagttaggtacgtgaaaatactgttatgacttttataatagttgcataaatattttgctaacagttatttctccatatattactattaaggtacaagtaattatcgatcagtgataaaaagatattgatgagtagttttttacatataaagattcacatttaatatttttagttgcaatgaagttgcattgtagtttcatcacagttgccttgaagttgacttcttctttcccttctagtcgtcgaagttgaaatttttttcaggcaaagataccttcgactttttcttcactggatgacgaccaccttttgccacagagggagcaaaataagagttatcattgtcgatgactagacgtattcctttagccttgttaacaactgatttttgactaatttttgaagctttttttggtaatagagatggagaagcagaagataatatataaaaaaagcgaataaagaaggcagttgggagaagaagatgacgaaggttacgggtgggaggtggtttgcgtgggttttaaatgtgcgtttcgaaagtataatggctggaagatgattttgcaatgaacaactaagaaagaaaagggaaaaaactgaatggaaaatttgaaaatgaaaaataaaagaaaaagagggaaaaaaagttaataggttctatacacagtaagtgatagtgtacgaggtatattttgataaccatctccaatgggagatgttaaaattgtaccatatttggcacaaaaagtaattttgtggtaaatttacactaaatttttgtgctccaatgcacaattcaaaattttgatgtaaaatttattatctaattaatgttttattaaaaaaaaaaaaattgaataactttata

SEQ ID NO: 226776 - DNA, 2180 bp, Cannabis indica
ttcgttttcgtttttttttttttttgacaaacctaaaattttattgaaaagaaaataaatacaaagttttgaggccaagaaggaaggtaaagaaccattccaaatatactcactgtctaatcctaaacctgtcttagcacaaacatgagcaactttgtttagctcacgaggtacatgaacaatgagcagattaggactgaacaacaatgagtccttaatacaattaataatatcaataagaacagaactatgacaattagttgtagaaattttgtcaacaacactctgataatctgattgaagaacagtgacaggaagctttgtcgcctgcaatcaggagagagcaatcaaaatagctttagcttcagcaacttcaaggggaactattcccacaatgggaacaatcaaaccggcctttatattgtcacaatcatccctgaccactattcccagactatatttctttgcagtgttgctaataccagcatcaatattaattttctagcatccagacagaggagaggatacctgttcatcacctactgaagcacaaatatcgattttacaataaccagtgttagaagcatgctcatattcccataaataattagcggcttcatcataaagttaccaagaaggcaaaaaaaatttattatgaaggagacaattcttctaattccataaacaaggcagaataaaacaactacattatatttgtcatagagttaactttatagtttcttaatttttaattttttaaaagattaacctaaattgaatagaaataggatttggttgtcaaatttgtatagagatacacaaattttctaattaagtttaattaataatagaatgaatgattaattaatatgattttttttttgagaatcaaactgggcatatcttcctaatgatcttcttcacttggtttttgaaaaaattgaatcagtcaaagatgctatcacatttggtgctatttagtggcataaaatggttatgaataataggagtaacttaatcaaaatgatgcctcataatacggtacccaattataaaaaacaaattcgtactaaagatagtaattcatgaatagtttatactataacaaattcatcatcatcatcacatcacattaatgtcaaaaagaaatcaaaattgtaatcacttcctatctataataaacctttttcgagatcatccttaggatggttagccgttcttgagataaatttagctgtaacactctataagccgatacattttaggaataaaaaaaaacaagtataatgaatattcatcttcctccactatttcctccaaaggatatatcgcgggtttattatttctcctgtatttatcaattcaaatttattactaatattaggtgtttaattgttatttaaattaaacaaacggtaaaaatgttgaaaatttctcaacaattgaaatgtatatatgtatttttgtggtaaaattttcaaatgaattatagctttctaattaaattttgattaattgagttatttttcatatatgtatttttcaaactccattactattagctctttttaatttcagacaaaaacaaaacaataatatataacaacattaatgtgtgtttgtagaatgtttttttttattaatgggaaccttattagagagcaaacacaaaacacattaacacaacagagatgtagtgctaacaaattccaaactctagtctgaaactacaacataccttactctaatttcctctggacttcttttgagctctgcagcagcaattctttgaatccaattctcagttataatcattccctgaggaccaccaaatcctcaaaaggcagtgttactagtaaaacacaatgtaatatctcatccatattaagttcaattcatttcaatacacaacttcattaacaactttctatctattaacataaaacaaaaatgaagaagaaagaaacaagaaagaattattagtcccaccggctgcaaaaactccacgcacactggtcacagtgctccctggcttggtggctgtttgtggtgttccaaaagcgaatacatatctccgctgtccctcctctagatgcaagaaggccactctggtgaggtgaccaagcaatggccttaacaactgctgtatgttccgtcaattttagaattggttgttggct

SEQ ID NO: 226777 - DNA, 1102 bp, Cannabis indica
aagagaagtcatacctgatagttgaaaccattctaactctgccattccacttgtcaaccaagccaatcaattactgagacagccaggcgtttttgtattcgataggttggggacgactcatgatctaagaagcgatctgaacagaaggagaggagtagacgatcagcttgggacaacgatcgtacagcccagaacccgtgcttaaattcctgctcaaagatcattgtttctctgtcgagccatgccttggaacataatctgtagttcgagttggaccgagcacgtggaactcctttctctcccgagatcaatctcctagcattgccccacaagtttaaaatgccaacctagaaaatgtacactggaagagaagatcctgtttcccacctcaagtattttgagatgcaaaaggatctgcaagggatacgaggggatgtgtgttgcagaatttttcttgctactctctcggaagtcgcccagcaatggtatttcaagctggcccctggaaagttcaactcatggaaggccttctcttcaaaattccatgcaaaattctcctcctctttccaactttcattgcatctatgagacctggtagaagtcaagcaaagaccaggcaagcttctccaagcatacatcagcagattcctgatggaagcgaccaaggtctcatgggtagctaaagatggaaaattgtccgcaatactggggggtctcacgggtaactaaaaatagaaaattgtccgcgatacttgggggcattgaagtcctcaatgaactttggaaggacataaggaagaacgacccggtagactcaatgagcaattttctcgaccgtgttgaaggcttcatcaaacttgaagaagttattcatcgagcagaaggtgagcaaaagcctatcaagtcaaaagctccttccactggaacgtctgccccattcccccattacccaaataactcaagctcaaatagtaaacgttccaacaacaacaacaagcaagggaatgggaagaagggaaagttcaccggtaaaaccgagcaagctccccgggagaatcaagcaaagtacactacatttaccatcttgactgaggatatagaa

SEQ ID NO: 226778 - DNA, 1690 bp, Cannabis indica
ttggcggggttgaatgccaagatcaggcacgatctagttatcaccaccaacgacaccacgacctatgctgaaatggttgacaaggctcttcgagctgaaggaacaataaagtttctgcaagaaacctgagaggctcctagggctggtggaacccctactctctttatttctagtcttggcaaggagagtggtgattccactattgagcagaagaagagaactttcccacctatagggagttcaggcaaagcaagaagttttgtagaaatcatggtaaagggggacgccagacctactcctatcctgagtgcccgcgctgcaagaagcatcaccccggaccatgtaaccggtgggcttgttttcagtgtggatcggttgggcacctcaagaaagattgtcccctgctgaagaaagaggaacccaagtcagaaactaagcctgtaccagcgcgtgtgtttgccatcactcaggcgaatgctgccgctagcccttcagtggtcacaggtcagctctttattaacggccttacttatactgtattatttgattcgagggctacacgctcatatgtagcaatgagagtacttaatcagcttggtaggcctagtgatgtttttgaaatgggatttggaaccctgttgcctaatagggaattaattatttcaagaaagtgggttaaatctgtgttaatcagaattgaaggtagagaactaagtcctgatctagtggagttacctttgaccgagtttgatattatactagaaatggactttttgtccaaatactctgccagtattgattacaaacagaaaatggtaattttccaaccagagaatgaggaatcatttgttttttttggttcggttcaaggttctcgtgtctcaagaattttagcgctgaaggctagggatttactacacagtgggtgtgtaggatttctagcagttgtaattaattctagaaaacttgtgttactcggacctgaggaggttaaagtggataaggaattcctggatgtgtttccaaaagaattaccaggactaccaccacaatgggagatagattttattattgacttgatacatggggcaaaacctgtgtcaaaggaaccctaccgtatggctcctgtagaattaaaagagctgaagatacaacttcaggggatgttggatctaggattcactcgacctagtgtgtcgccttggggagctccagtattatttgtaaagaagaaggatgagactgtgcgcatgtgtattgactatcgggagctgaacaagttaacaattaaaaacaagtaccctttgcctggaattgacgatttgtttgatcaacttctgggtaagatgatattctcgaagtttgatttgagatctagttatcatcaattgagaattcgggaagaagacataccgaagatagctttctggactaggtatgcgattatgagttcctagttatatcgttcgggttaatgcttcggcagcctttatggatctcatgaatagggtattcaaaaatttcctcgatagctttgtaattatatttatcgatgatattcttgtgtactctcgatcggaagcagaacatgagcagcatcttcgtatggtgttgcaacggcttagagatcataaactctatgcaaaattcaaaaagtgtgagtttttgctgtcacaagtgtcttttctgg

SEQ ID NO: 226779 - DNA, 1350 bp, Cannabis indica
aaacgtaaagttcaggtgatttaactgccaatatccctcaaacaattttactatagtttcgcattatttaaattgtttgatagttttacttggtaattataaaaatagaagctcagagcagttcactaaactcttagtgagatcttgtatttaattttcgtttaatttgtttcttgtgtgaaatgtctttctttgcaaaaagaagttttgtatctcgtcctccgctactcaatgactcaaactattcccactggaaagtgaggatgagagccttcattaaagcacaagatgaaaaggcatggaaaacacttttgtctggatggtctcctccgtcagaggaaaatgaggatggttgcccaaaggtaaaatctggaatatagaagaagaaatgttatctagttataaaaataaagctcttcatgctatctttaatggtgttgaagaaagtttcatcaagcttgtttctacttgtatttctgctaaagatgcatggacaatccttcaaacctagtttgaaggaactgcaaatgttaaaagatctagatttatcatgttacaaattaagtttgacgatcttagaatgactgattctaaaacactatctggattctacaaaaattcatctgatatttctaatgaatattttgctcttggtgagaaacttaatgatttcgttttggtgagaaagatagtgcgagtacttccttacaggtttaatgttaaactcacggctatggaagaagcaaaggattttaatactatgaaagtagaagaattgatgacatctctttgtaccattgaattgcatcaaaagattcgtttaaagcagaaaatgagtacctctaaggaaaaagagaacattattgctttcaaaagtactgaaaaggaagcatcagatgatgaagatagtgataatgacatagctatgcttgcaaagaaatacataaagaaaaattagaaataagaagtttaaagttaagacttcaaaatgtattatttcttctcttaaaccttttcaatctaacaagaaaaatattcagtgcaagaagtgtaagggattcggtcatatccagtcagaatgtaaaaataccttgaagaagaataaaaaatgtatgatagctacttggagtgataatgactttgagagtaatgaagatgaggaaggtaatgttgtattcacttctgttatgctaaattctgtatctaaagctgaatattttgtttgtttgaataatatcttcaaagatgaagaaaattctaataatgatgaatctctaagtgaatcttacaaaaatatgtatggttcatgggtgaaaatttgttctgaaaaccggtcattggtaagaaaaa

SEQ ID NO: 226780 - DNA, 1473 bp, Cannabis indica
ggagaattcaatcagagacaaatacttactccatgaacctccgaaatccatgacacaagcttctaacaaattctcaagtatttgaatggtttgtttagactgcccatccgtgagaggatgataggccgtactaaacctcaagtaagtactcatggtcttctgcaggctcatcctgaacttcgatgtaagattgaggtccctatcaaaaataatggacttcggaacttcgtgaagacaaaaaatttccttaacgtacaagtcaggatattgctccaccgtatgggttacttttacaaacaagaaatgagctaattttgtaaaatgatccactataatgccattctacttccattctggaaatgttaaaagctaaagtagtcctgctagtcactgatgctctgctttgacttaatgggaggttaaatatttagtcacacaatcaactacattccttttcattatgtaccaccagtaatagggcttcagatcttgatacatcttggtggtacctggatgcaatgagtaaggggtagtgtgcgcttcattcaaaatttctttcttaagctcaagattactcgggacatgcacctgagccttaaacaacaacgtctcgttgctcaaaattgagaagtccttatcttttccttctaagacaccttctcgagccttaactagctcagaatcttctaattgtgccattttgatcctctccaacaaatttgactgaagtgtcaggttatgcaattctccaattacaaatttaatgtttaccctagacatatctgaggctaactgaggagaaatcattgctggattgaaagtttggtcaggaccctttcggttcaaggcatcctctacaacatttgccttcttggggtgatacaaaatttcacaatcatagtctttaactaattccaaccactgtctttgtctcatatttagatcttttcgaacgaaaaaatatttgagacttttgtgatcaatataaactttacaccgctcaccaaacaagttttgtcgccaaatctttaaagtaaacacaactgctccaagttacaagccatgggctagataatgttactcataatcctttagttgctgtgaggcataagctatgactttatctacttgcatcaacccacagcccacaccccgtctagatgtatcacaatacaccacaaacttctcttgatcagttggcaaggctaagactggagctgtaattaactattatttcaactcttggaagcctttctcacactcatctgaccacaaatcgttgattctttctagtcaactaaagcgtgttgcaatcttagagagtccttccacaaaacgtcgataataactcactaagccaaaaaaactacgtaccttttgactattttcggcctaggccaattcttcactaattcaatcttccttggatcaaccataaccccgtctttcctgacaatatataccaaaaaagat

SEQ ID NO: 226781 - DNA, 1758 bp, Cannabis indica
gaaagttcttatttaggatgttaataaacatacttgtgagtaaatctaagatcctggtaaaataatttccaacagtttattattatcatttggttatgcctaatttgtatggtattcatgagggcaaacaaaataacaaaatttgtatatgggtagtagttacaaaccaaaatcattataaggatacaactaataatattttgtttaaaatgtttattattaatttgttagttgaataataatgttgttattgtttattatatattattatgatttatgtttgaaatgcccgattaataatttttttgtttattataaaagtggtttagaaatattaattaataggaggtatcaatagttatattttttagccatacattatttatcattaaatggttgtgattaattttaaaattaaatataaataaataataattaaattataacctaatagtcacctaacaatttatttccttataaaactttaacaaagattaattatatttattattaaataaggatcttttagacatctttttgcctttaaattattgaaatttattatagcaaaattctttataatttataattatacacgtgtaatttcataattgaaattttattaattatgtattagaactactaagaggagcagtaatctgaaatgtattagtagtgactttatcgtgaacaactagtaatgataccctactatagaattgatcgaggactttgtgtatcagaactactaagtagagcagtaatcttaaatatattagtgactttgtcgtgaaatgataccctaatacggaattgatctttgtgtttgtgtctcagaactactaagaagaacattaatcttaaatcaattagtgactgtgttacgatcaaatagtaatgataccctaatacataattgatcgttgactttgtgtatcagaattagtaagtagagcagtaatcttaaatatattattgactttatcgtgaacaactagttggagttctttttgtgttttgtaaaatatataactaaatgataatattatttataaattgcattttttataggggtccaaaatttaaattagaacaggacatccaaaatgtttaagatatgaaatataagacaaggtgtggaatttaaaggacagtagacaacaaccagtcttttaaaataaacggcctgtctaaaacaccagatatgttatcgaaacacaaaatacatgctttcaatatttaaaactgcttgttgtatgaggcagactatgcgtcgtatataaaagacggcttgtcaaaacaattatgatatttacaaaaaaaattgtgttaattaattgtaagtactacaaataaatatgaatgtagataaatcattgaattccactaagacgccctatgcgaccattatgataagacccttctattagttgaccatacacaattaaaggacggtagacgacaatcagtcttctaaaatagacgtcctatctaaaacaccagattggttgttgaaacacaaaatacaagctttcaatattttagactgcttgtcgtatgaagcaaattgtgtgtcgtatataatagacgacttgttaaaataattatctatacaaaaaaaaatattaattaagtgttaatactacagataaatatgaatatagataaattacaaaattccactaatagatcttcgaattgaactaggagaccctaagcaactgtttgttgggttttatgccgtaaataaaactcatt

SEQ ID NO: 226782 - DNA, 1297 bp, Cannabis indica
tgattctctaattaattaacataatcatatgcccaattaattttacgaataccaatttaagcacaattatttgaagtcatacaaggcaaatcacacttttccaaagtaagtaattccactatccttattttttccaaaattaagattagcttgcaacttacgaatgatgatcaagcaaaaataaactattacacaataagaactcttgaatgaacaaaatcatttcactaaacatagcaacaaaatatcacaatctctagtcaacaaaataattctagcgaaaaaagaaattaactcataataaattgtgtaaaaattacaaagtttcaaataagagaacgatgaaaagaaaaatctatattgaagttgtcataatactccaaattttctttgccaaaattttcttcttcttccttttaatttttaccaatctcaaaattaaaatacaaaactaaaaccctaaataacactcaaataaactctctcttttttttgttttttctttttcttctctttttcttcttcattttcctctgcttctttgtgtgggcgtcccttggagtagcaaaaacccagctgcctccccctttgccttttatcacatatatgaatatataccttatcttagcccttaaatcatgtgggctcttccatttcttcattgcttctttaactaaaaaaaaccttagcccaatattcttctttcttttgatttaaacaaataaagcccattaaacatgagcccagtctaattagaaataaatagagaaaattacactctatatccactttttgttttatattttaatttttaccttcattttactactttttaatttatacccatttttataagttatattcccattatttgcattaggaagtctaattttgataagttttgtgaggttatatttggtactttgattataaaagaaggtatttatcaattaaaatgattttggagttatatttagttaatgtgtaataaaaaaaaggtagttttcaacttatcccttagaaatatgcctaattaaaatagagaaatttacatggtatgttgacttcagctctttttttttacaaaaatactgtcaagcggtatttttactttttactgtgtatttttataagtttcatattgcagtattctatgtttattttttagtttttttgtttgttttaatgttattttagagttgttttccataatttacttttttaacgttgatttcactattcttgctccatcttgctggaattaatgattattttctgggtgttctcgtggtgctgt

SEQ ID NO: 226783 - DNA, 2243 bp, Cannabis indica
ttgaacttggttctcaggagccttgaggtctattgtctgcgaggctcacttcttattggttgtcgtcttcctgggccttttgaggggctccacgttgatgtccaaagaagtttctgaggtagctaaccttttctttccctttttcctggaagaatggagaaggtcctcgagatccatatctgcgagacaaaaaaatgtgttaacacctgtttaaaaatgggtaaaagggaaaatgggaaataatttcccacttaagggatttaccataatcataagaggacgaagaatgaggactatagtattcactaaatattctagatcctgtgatcctgaatatgtcataagggttaattggttctaagtcccaactcaaatctatatgacctgacatgtccagcatactctcatacttctcggcaatcccatagtaggagctagtacagctaatctgaacatggaattctaggtaccaactatcgaacctatgtgtaatgtgatctatgagaaaaggattccaggtgtaaaaattgtactgactatctcggaaagacactagctagtgtggtacgcttggccctaagaactgtgggtgaccatccacattgattacctcaggatgctctttcttcagcttctcgagggactgcgttctgaaggtaatgcgcatgagccacataatcctgagtttcctcatcagctgggatcggaacatgctgctacaatgtatacttgggatatttataattactagtatactcgttcacagcgaggaggcccacggacctcaagtttgcctcgttcataagaaactcgacagatcggagacgaaagggaagacccagcaggagcctgtgtcgctcgaacatcacggaagtaggggttggtctttttgagaccgctgtcaaaatgacaaaattacaagtcagcgaggccaaagttaaaaatatggaataatctaaaaccaaatggaatggaaaaaatgtagaccataaaaataattatcgaacccaggaatgtaaagaaaaacaaaaaagaaggatgagacacttacagtttgaaatcgggttgtggtgcgatgaacgattctgcaattagggatggagcgaatgacgtgatgatcttcgtaataccttgtgatcgaacaatagatccgtatatactcgcaaaaagaaagtgagtgatagtgagggcatgcaaagcttcgtaaagctgggatagagtttttcgcagaaaagctcaaaaaaaatttgtaatggcaaagatggtgaaaaggtggttcctttttcagttttacaccattgggtctggactccgttagattgaatatacaaaggatctaacggatagaaataagagagaagtggaaaagataccctctgcaatcatttaaaaagcacttttcattgaaaatgacttttaaaggggaaattgttacacccgaaattcggctggtacttcagaatgtacacgtgtcattctcagggaatatgaatcaacaaaaatattgataattatatcaataaatattaaatggaataactcattaaatgcagaactaatagagtatatttattactcgcagactgcacagtctttaacatgtttaggatgtacaaactattgattcgtgtattgacgagaaaccatttcgtgtcagaagacataatcccaaggagaacataaatagcggatagggagacatccatctcgctctaggaaggcatactcttgttaaactccagctcgctgccagggttattgttgctattgagaaccttcaggacatgattgtccagtctacaaggccttatggtcaaagaacagttcttaaatttgctcaatacactggtgctcatgtcattgctggaagacttacgaataaatcaagttgttcatgttcaagtaccaagtgagatgtcccggcgagatacgttttgcagcgtgtcttattcacacgtcagcattgtccctttaaaagcgggttaaaatatagctttatgattttcaaataataactacatatatttatgtggagcataattatagctcacaatttcgagaaaatatcgttgtaggattcgaatttgaatgtaattaactaccaacttatgttataataaataggggcagaatgtatgaaaaaggggacaaaaaatccttagagaaaaaaatacatacactgattgtaaagaatgttctgtatcagcaaaatctgaataagaatgactcgtggactatgcaga

SEQ ID NO: 226784 - DNA, 1756 bp, Cannabis indica
aaaataatttccaacagggtcttcaacgagtgcctttagtctgtgatcttggaagctcgtatatgttaccagatgcactaagacttaagctgacgtggagacttcactcaatgaggagttggttaagttagttatttccctaactaacttaacaaccttatttcttgcagccaccgactttagaatcttgatcctaagcctataaataccatcttagcttgtcattcagaacacggttcaaatcaacattgagaggtagagagagagagaggtacatagaaaagggagagattagatttggattttgtaagaaaaatcttctgtagatgaagaagattcttgggtaagatcgtgagaatagaaacactaggagagaactcaacagagaatctatcttgactgtattgtacccgttcttgctcaatcaataaagaaggatttggtggtgttccaaaactggagtagagtcataaatcatatcgatctattggaattaaaccagtacatatcttggtgttaatttctttattttctacatttattgtttctagttttccatactctgttcatccctatttttcctccgattactatttgcatttgttaaattttctcattgctaattgtttcattgtttaaagtttatttggtttaattctccactattagtcataatttccctcaaattagagcttggtaatcgatcaagaatgcagaatcaagattcttaccgttgtaattcttgaaaaaactttgaatgacatcaatggcgagattctaattgagaaatttgatggaactggggactttgcactatgaagagaaagtgtgaaaggattcctagtgcactagaaagtctccaaggttctttgagattagaagttattggtagaaaagaaatcagagggaaaagtagaaatggaagagatggtgtactacacgatcatcatgtatctgtgaagtagtgttcgaaggaaaatcatcgcagagaagatggcaaaaggagtttggaataaattgggagaattatacttgaaacaatcaattgctagcaagattaattttcgagaaaagttataccattttagaataattttttccctatctttagatgataatattgaaagatttaatgagattattgtaggattggctaatataaaccacaaggttgatcaaaaaagccggaccatcatcttgctgagtttgcttccaattgtatatcaagaagtcaaggcagccatcaaatatggcagagatgtgattgtattggaagatgttcttgtcgcacttaagtcaaaagattttgaattacaattagagaaggaatccaagaaagaagaagtgtacttggtaagaggaagatcgtccaagaaaattagttcaaagagtaaacaccatcactctcaatcaagatcgaaatccagagagaagaaaataagaaaatgttacttccgtggtaggtgtggacacctgcaaaggttctacaagaagtacaaggagcaataaggcttcaacaaatctcataataaagagggaaaagacattcgacaccatcactctaggaaggactcagctgcaatcgtaaaggttagtgatgagtgctcaatagatggaaggagaaactgttaggttttgtgccttaaataaaacccatttcaatataatcaaatttactagtttataaagatcagaaatcattttatgttacatggtttacatgatttatttcatgattataaattctattaggtcc

SEQ ID NO: 226785 - DNA, 2016 bp, Cannabis indica
acaaacaaaactagaacttttcacggcgatacacaggatcaggtaaaccctaaatcaagcatccccctaaaatcataactttaattccttaaattctgttggagttatactataaggtgtcttagaagccacctatacttcaaatgccaaaataagaacaaagtctatctttgttgtagtggtaatcctagaagttctttttgaaatacatccaagaactcttgtaccacactaatatccacaggtcgaactgtctcaactaggtggtatctaataccaacacaaggaattctatacatccaagatagtaattaattgtttttttgaaggcaaactaagatcaattttcttggagccattcaaacacggtagggattaactcgaatgtgatatgccatcatctcaacatcgacccagcttacccttcaaaacgtcagaaatgacgaccttcagatttagagagatagaatgcactaaaagaagaggttgacaaattattgaccaataacttcatttgagaaccattttaatccctcgtggatatctaaccaaatttttgttcccaaagccaaatgggactggagaacttgcatatattttttttgtactttgaataaagcatgccctgaagattgctttttcactaccgaggattgaccaattggtagatgcaacagtaggacatgaactaatgactttcatgtatgcatattctagttataaccatattcaaatgcatattctagatcaagagcatacaagtttcgtaataaatatgggactgtattattataaagtcatgtcattcgggttaaaaaatgttggaacgacataccaatgccttgttaatggtatgtttgagaaccagatagggcgtaacatagaggtctacgtagatgacatgttgatttatgcttgtggatgttgaatcaggtgttttggaaggtttgacttcatttggggaagttttcagcaattttcgaagctcttgggtttttccagcggaatcgtttctccaaaaatggttaaccattttcctaggaaggatcccataaaatagtttactgttttgaaatctggcttatcgattttagtagttttttgggagccttagtttttatgtttcctcgatatttaaggtattgtcatgctatctatcaacttctagttttgagtttaggtccccgagaaggttttagcaagttgtttacccgatttatgtgattgtgacatagggcctctattcagcatgtgaatttctatttaggtcgactgacacacttgaatctggaaatgaggtaagattagtataaaacatgtatatgtgtatgtatgtaaattgcatgctatgttatgtgattcatatactactaacactagtacggtagcagtacggagtgcattggtatagtatatgatgttcaaagggtacgatccagtgttaccaacactagtacggtcaagcacataatacatgtggtacaacactcaggggtgctcagggtatattcagccttaccaacactagtacgggatgagtacttagtgcatgtggtaagaacgttcttgatcatctgttaagtattgtaaataggtgtatgggcgcttaaatacaagtcagtaatatattatatattttatgcttttcttactaagtctgttaactcacaaatattatttgcatgtgtacgtaagggaaaggctaaggtcgagcaccattgagtccagaacttagggataattgtacatatcaggatggttagacctggagagttcggtctcgggacgacttgggccttcattttgtagtcgcggagcggcatgtctttaaagtgtattttgaataagaatgtaaattttaaagacaggatcttgactttagtacgaatatttttatatttataaaagtttaaagtttaattaaaagtttaaatttgtcatgatttttgaaaaaccctttgattagcaaaggagtgcacaataagtagaaaaattactgtagcgtgcctaggcaat

SEQ ID NO: 226786 - DNA, 1732 bp, Cannabis indica
aattatgattacgtgtctgagttgttattcttcccagcttgacatctgtcttcctctgatgtgctagccgaatttcgggtataacaaaaagtattctccatcattaccgtaattataagtaattcaggtaatcttccttaccttagtgataccactactttccctaacattttttatacgttactctggtaacgtccccgcctcaagcctccattaggccccttacacaaacggattgatggctcttatacacgactacatcactctaactgcttcctggactgacgactggccccagagatcaatccaagtgtttccaatgtgctttgttctggttcgcacggttcatgggggaaacttcttaaataaaaccaccccaggtcaaggacacttaactgtggagttccttcatggtgggctacaaaacaagatgcttcttactaacataggtagtctcgagcaatccattcaggtcctcaaccactatgtaatcccacgcctacataatctcagaatcactacatatgacctttaccctaggcaacatgggattgcacaacttctggtctttcctccaaaaatcatggggctctgattgtcacaacttgacttatgccccctggtagtgaatagatccacccacacaatcattgcctttgattcacctaggatttcggacaatactcaaaaattatcacactaatactaacactagatcacttttaatcaaaatattccattctccaaatcaattgatggatacctccattaactactcatgtcctatattctacttgggaatatcagcaaatttaactcatattgccatttttttttctaccctgtcagatgaacaaccactaaataacatacaggcacagtccatttagatcttttgatgtcccttcattgagtgtataatgtttaatatcgatatcaattgaaacaacaactataatattgcccataaaaattctaacttgagtcagccgaaggaccgatactcggatccctttgaatcttaactggcacttgggaaggaccagtacacttttcttctttaacaacagtctttcttaactgtgggcatgttcttttcaaatgacccactaccccacaataataagatttttttattctcattttgaccgctatcctggtcgccctagaatcttttgttcggtttcataattagtggttaatttagtttttgccaactgatctgctcgtaagttgggtttatatatttgaccacatccaatggtacaacaggaagtgcccgtagtatatgaatagacataaaacgagcttgttgccctttcagatctcagatctatttttcccttatcctctaatcatatcttgcataacagaatttacatgtttcgagtattacggcaataaaagattctcttcttaatcgtttgtcccgagcccaaacaactcaccaatcaagcaattcaattgcccttactgtacagcttgtcacacatttaatccacattttcgaaacacttaaaactcaaacagatatcaatatcaatatgcatatatcatacacatattcttagtatagatagtcagtacgcttcttctcccatcatacactataattgtctaagcaggtaaggcaatagcaaataacataaatacttactataccatgagtcgacttgtcttcacagcaaatgtacatattcaaccagtcctcaggacctttaaaactatggct

SEQ ID NO: 226787 - DNA, 2446 bp, Cannabis indica
gagaggttacattttcatggcaatgcatgtagaggctgtcgaattggtaaagaggggcatctccgacattggaggaaacaacttcgacggcggacccaatatgatattcgtagaaaatagaaaagaaagaagataagagaaagggagaaagacgtgagactcaccgagttggggttttcgtcgaatttcgatgggctttcctcaaatcttgttgggtttctgtcgaataaggttggggttgggcgaagatgaggttgggacagaagacaaggaggatggaggacaaaggaggaggctgggacgaggaggacagagtacaggaggaggcttagaatcaaggttgaagacaaagtgaaaagtgtgtgaattgaattggggtttagggtaaattgataagattagcgtcattgtacaattgaagctatattttgtagtgtaggttctaaaatgaagggaagaaggttagcgagccttttcaacagacgctaaagacagttattttttttaaaaaaaaattcactattactgtcggaagtgtctaataagtaactgacgctaattaataattttttcgtcgatttagaagtgacaccctaatattcccctatactattcacgtcggttgacgcaatgaacagtagcgttaatcgacgtaaatagtactttttttcgtagtgtgaagtcaatgataaaattaatttctcgttgtagtggcaatcctggtaactcctcaggacacacctccagcaattcccttacagccttgacatcattaggccaaaaatatttctcgtctgctagagtcaattacaactgctagaaaccctacacatccattgtgcagcaaatccctagcttttaatactaaaatgattggaatactagaaccataaatggatcctacaaacacaaatggctcctcaccctctaattgaaaaaattatcattcttcgcttgcaataaatgttggccgagtacttggacagaaaagccatcccaagtataatatgaaactaagaaaaatctaattacaccaaatcaatacttaattccctcttctaaattgtaattggcatagacctaacaatcattttggagataaccaattctacgctaggtaataaagttccacaccctatcttaataaaatcaccaggcctaccaaatttcttaattacccttgctccacatatgaatgtgtagctccaaattcaaaagtacagcataataggactcattaactagaagctaacctgttaccacagaaggactgactacagcatcttcttacataagggcaaacacccgagctagagcgggtttcagctcttgtttagattcttccctcttcgactatgggaaatctttctagaaatgctcaactacaccacactaaatgcatgaccttcatttacactccctgaaattgtgcttcttacatcaagaacactcaagatatgtataggtttgatcaccatatgtacctcggctcctttgaaaccttttattttgactctaccataaccaggagtaggaaaagtggtggactaaccaaaacatggagaccctggggcctcctatagaaattatactacacttttggctcgaagagccttctcaaccatctcggcataagtttttgtgttatttgtagtaatgaccaaatcatgtatgatctgggcatttaaacttgccaaaaatttttccttcttactaaaatcagtaggtactatacccgaagccaacttggagcagagcctagttcaaaggcaccttatcagattgctccggcagaactcaaggagctaaaaatagagcttcaagagattcttgatttagggtttacccaacccaatgtgtcgccgtgcggagctttgattttatttgtgaaaaacatatattgatcccttcgaatgtttattgactattgagagttcaacaagatatgaattaagaatatatacccattgcccaaaactgatgaattattcaatcaacttgagagtaagactatcttcaccaagattgatttgcgctcaggttatcatcagttgagaattcaagaggaagattttccaaaaaatgcattttagaagagatatggtcactatgagttcttggtaatgtcacttggtttgacaaatgctcagtaacttttatggatctcatgattagagtgttcaaggatttccttaataactgtgttatagtatttattaataatatccttgtatagtctcaaattgaagcgaagcatgagaaacatctttgaatggttttgcaacgactcagagatcacaagttgtatgcaagtttaaaaagtgcgagttctggttatcacaagtgtccttcctagggcatattgtcagaaaggatagaattatggttgatctggggaaagttgaataaattaagaactagatgagaccaaggataattgttgatg

SEQ ID NO: 226788 - DNA, 1036 bp, Cannabis indica
aacaacttattccaaactttggaataaccctaacttcacaattggacatattctaactctccactagttcaaaatagcttatccgttactaaaatattcaaatctaggctctgaaaaacacccggaacaaaactggtttcaaggctaaagaccaaagttttcttcccctgctaccaaaaccggttcaccagtttcacatcaccagtgaaaccgtaaacccgttttccctgctgcagaaacgggaaaaacatggtttttactccaaaatcgaaccaaaactcctccaaacctaatgaaaccttccagaacagtataattccaccaaaataacatatctaaaacatcaattcagcatatttcatcaatttatacaaaacaccacgttagaaccaaatcaagttcttaaactaacattccaactctaattccaacaaccacaacaattacataacctatgcacaaggattccctaattaaattttgtaaacacagtttaaaatcaatgaaacaccacagccttaaaattcctagtaaaacctaacctagactatcccaaaactcaagaatttcaataggaaaagtatcaagaacttacctcaatacttagccaagcctttactccttccaaaatgatttaagacctaaagaatcaagcaaaaaaaactgacattctaaaattctaaaccagtccagaatacttccaaaataatccatcccatattgtcatgacattactgaccacaccgtcaaatttcaacagtcgacaggcctgaaaatattttatttcaaaaataatattcacgatactcacatatttcaaattaatctccgcaattaataaattacgctttatttaatcattaaatatattcacactaattactctaagtaagatcataatcttactccattaccaaaataattacatatttaataaaatatgtccaattaatactatattattttccagaatattacagacatggtactctataattattcttaatagtcttatttgttctctccttaattctct

SEQ ID NO: 226789 - DNA, 1200 bp, Cannabis indica
aggcaaaaagaaatatgtcaacacttgttcaaaataagtaaaaaggagattgagcaaaatctctcactaaaaaaattaccataatcatctgatgataaggaagaactataataattactaaactccctagaaccagtgatcgtaaagagatcaaatatgtttaaaggagacaagtcccagtctggattgcttgccctatcaaaattagtgccatactgttcaaaaattctgaagtagggactattacagcttaattatacatggtgctcggataccaactatcaaacaaatgggctatgcagtctacacaattttagatataaaaattgtattggctatccttaaatttaactaaggaagtgcacttggtcctaagtactatgagacaccatccacaattattacctcgagatgcttcttcttcagcttcttgaggtgttgtattccttaagaaatggatacgagccacataatctttgtcttcctcgtcagcagagacatgaacctactgccacttagaatattttgggaatttgaagtcgcaggtagcttgtttgctgccgaggagattgcaggtcttcaatttgatctcgttcaataaaaaattagctaatcgtaatccaaatggaagaactaagaggattctatgtcgtttttccatctgtggagtcggaataggcatcttcgaacctgctatcaatacaataagcaaaataagtaagtgcctacaatcaataaattgaaaactcaaaaccaagtttttgagatgaggtagtacttacgtatgataccaaatgtagttgtattgattggggcgaggctaggcgtccagaagaagtcatctttaatttcagtcttgttgggtagccctttgatcattcgtgttggtcccaaggtaataaaaccacttgctcctcgcttccttgcggaacatgcttttatagagtaaaaatataaaaacttctagtggggttgggcattcccacccaaaaatttggtataaaactttcaggcaggccaaaattctgtatgaagttggaatcagctgaaaaagggtaatttcgaggtaattacagaactctttataatagtccttgagagggagtactgcttcagctcttatttgttcgaggctccaagcgccaatcccagatgactagctagtacgacttaacccaaatatttataaactaaataacc

SEQ ID NO: 226790 - DNA, 1633 bp, Cannabis indica
cgatggaacaaaaagttttaaggaacttataaaatcataccaagagttcgagttgtatactcgcttcattgagtacacgaaaaagctacgctgatttaaagcgtagggatattgaatttcaagtgggagactcagtatttcattgagtatcaactataaaagggatgcgtagatttgggaagaatggaagattaagccttagattcatcgatcctttttagatattggagcgaataggccagatggcctatcgattagttttaccacctgcattgttcggggtgcataatctatttcacatttctatgttgagaaagtatgtgtcagttttgacacgtattttgagttacgatgatattgaactccaaacaaatttatctcatgaggaagggacttgggaatttgagtcacatatgcgaaagttgtatacccaaattattcaagtaaatttcgaggatgaaattcttataagaggggatggttgtaatatcctgataagcctaatggtaaataattaaggtttataattattttatggattaattagataataagtgggattatggtcctactaatctagttcaacattaattttaaatttgttataattggaataagcgtaatttataaattatggagatttatattgcatatgtgaatgtaatttgagttactaatgttattaatattattatattattaatgttattattataatattattttttaaataaacttatcaattatgataagttatataaatatattatattattagtttataacagtaaacaaaaataacagaacaaaaccctcttctcctttcaacaaaattctctccttcctatatctattttcttcgattttcaatccaaaatctagcgatctaagctccggtagtagcgggatagcaaatttttagagcagaaaagcttaaggtaaggtttaattccattttaagtttaaaacaattggtttcgtatagggttttgtgaattagaatagttataaaggttctgaccttataagattgttctcgagtagtcatgggactaattctaatgttttcttgatgaaattgaagtgattttgggttagaaattgagtttagaactttttataacttaagtctgaacactagtagtgtttgccaattacgggctcgattttagattctattatgtaagtatggtagtatgtatggtatatatgtgccctataaagttcggggcggtttgaacaggttccggtagtgtttcggtgagtgcgtaaacttcgaaaatcatattttttacctctaaaaatccagtcaaccggttctggccaatcggtttaccgttttgggcagcctcgggaacttggaaatcgtaattttgccataacttttcactcgggtgtctattttggacattctatatacattttgaagcttgcaacgagctctatcatatggtgtatgttttagagccaaaatataagttttatttcagtgtatttgaactacggggtttggtaggaaaccctaggttgtcctttgcaactattaagcagtgttttgggataaacacttattagtctattatcgttttgatttagggcccgggatcatcgattgtactccaagtaggtcggc

SEQ ID NO: 226791 - DNA, 1486 bp, Cannabis indica
aactgaaactgtgactaggacccggacctcgagaccagaaccgaacctaaaccaaaactcaaactcagacgagacctagaccgagaccttgactaggactggaacctgagaccttggacccaaacttgtactgcgacctggacttgacctggtcctatacgctcaccgggacctagaccagaatctggaccctgatagggaccagaacccaaacctagaccaagactatgaccgagacatggacccaaacccggactgggaactggactcaaactaagactcgggacccaaaccaaaacctagacccagaccagacttaggaaccggaccttgatgggggacctagaccagggacccaaacacgaaccaggacctgacctggacccgagaatccgaagtcggactcagacctggacccaaaacctaccccaaacaaaaactaggacaggaacctagacacaaaccaggacaaaacctgaacccaaacttgaacccaaaatcagacctgaactcgggacccgaattcagagccatacctagaataagacccaaacatagacctgaacctaaacctgaactcgaacatagaccgagatcggaacccaggacttacacctagaattgaacccaaacacaaatcgagttcaaaacttgggacttgaacctggagcaggacccataccaaggactcgaacccacactcggagcctgatccagacctagaccaaaatctgaacccaaaccaaaactcagaccagggattgaaccccagacccaaactcgaattaaactcaaactttgaaccacaattagatctagaatcggactaggactcaaaccaagaccaggacctaaacccaaacccgaacccagataaaaacccagaccgagacccaaacctgaaccaagacaaggactcaaacccgaacctagactaggacaaatacccaaaccagaactgggacggtgacatagaattgggatagggacctaggaaccgaaacaaggaccaagacctagtacccgacccccaacttggacttgaacctaggacccagctcgtgactcggcacccgaaatggaaccaaatttggacccaagatcgtgattcagatctggacccagtgcttggaccgaacccatagccgctgtctgcatctggtgaccaaccccgaacctaaacccaaacaaggacacgaacccagagccagacctgaacccagtcccagacccaaacctagacccgaactcgtaccttatgacccaaaattagaaccgaaactggtagtagaacgggacctgaatgggaccaaaactaggacatggacctggaatcgtaaccggacctagacctagaattgtaaccagaccaggaaccagactccaactaaaacctaaacatgaactgggacccagacctggatcccaatccagacctagactcgggacccaaacccgcaacaaaactcctacccaaacatggaac

SEQ ID NO: 226792 - DNA, 2125 bp, Cannabis indica
agagcttcatattcagcctcattgctggaggccttgaaacaaaatttgattaccctgtgcagtttttttccctgttgtaatgagggtaatgtcttcatcagacaagtggtcagtacaacttccgtcaacatgtaacttccaggctgaatctttgtgctcttgctgctgataatgctctcacttcttctctggctattacgttttacccaaatcttgagatatttcaagagatatgtctgtacattcaaccataaagtcggtaagagcttggccgtttatggacattcttggtttgtatgtgatctcaaactagccgagctcgatggctcacttgagtaatcagccaaatgcttcaggtttctgtaaaacttattgtaatggctggtcagtgtacacccttattgggtgagcttggaagtacgaccttagctttcttgatgccaagagcaagcagaatgtgagcttctgaatgagtggtatcgactcttagtgtcaataagtcttttagtaatgtaataaattggatgttgggtactgtcttcttctcttattagaactgcactcacaacatattctgtgatagccaagtatatgcctagtttctcattgtccataggttttgataggaaaggaggttgagccaattggtttttcagctcttggaatgctctttcacacccccatcccttttgtacttgaccaacatgtcatccacatacacctccattttccggccaatgagatctttgaacattttattcacaagtctctgattggtggcctctacattttttaacccaaagggcatcactttatagtagtataggcctaggtctgtcattaaactcgtatgttcttagttcggtgggtgaatcttgatttttttgtaacctgaataagcatccatgaagcttaggatctcgtgaccagctgtagcatctactagctggttgatcctagtaagtgggaagcagtcctttggacatgccttattcatgttagtgaaatctatgcacaccgtccacttgttgttcggtttgggtacaatcatggggttggatacccaaagcggatagaatgcttcagtaatgaagtcattggagcttagcttttcgacttcatctttcagtgcttgtgcacgttctttatctaccaacctactaatctattgtagaggtcgaaagtttggatctatgtttagtgcatgggacatcacggatggatgtattcctaccatgtcttcatgtgaccatgaaaagaggtctaggtttgcccgtagaaattttatcaaggctaattttatttccggcactaaacttttcccaatcttcaattttctagttggaagagtgggatcaatctccacttcttccaatttctccacaggtccagagctatctgtaggatccccaaagcaaggatctatgtctgcttcccaactttgggctagacttcattactttctaccagactcttggtgagagctcttgacaggcatcttctcttttttagccttggacaaagccaggttgtaacactgttgggcagactttgggtctcctcttaaacatcccactccatgccttattagaaactttaggcataggtggtagatggacattactgtcttcaggttgtatagggcaggtcggcctatcattgaattgaaggctaatggcacatagattgctacaaattgtgctatcaacgttcttattgtgggattttctctgactatcaaaggtagtcagatgtatccaaagggtgcaatgccttggcctaagaagtcatacattagttgagtggatggtgctaggtctgttagttggagccacatcttttcataagtctatttgaaaagaatgctagaggaggctttgttatccaccatgcacctagccactatcatgttccctatttgtgcagttatgactagatggtcattgtgtgtgaacctgacctaggcagcatcaacctctatgaaggagatgctaggctctccaagcctgagttgccttggagtctttttcctcggatggctaggatgtcacttttgggctcatgatggagagtccaagaatagcgctccctagccttctgtctcgcctgttatgtggggtctgcc

SEQ ID NO: 226793 - DNA, 2024 bp, Cannabis indica
tattttatagtacttagtttatataatcctaaaaaaaaaaaaatgttagtttatatatagcaatttttctcctttaatgacaagtttactacacattatttaaaattgaaacaaagtaatggagaaatataacagaataaataaagaataatcggaatcaatatttgtaatatgttgtttactaaaactgtttagaaatggaatgatagtgatttatcttgtttactttatcagcaaacgtaatcaaaatgcttaaattgactaaattacccttttgagttaaactatagtatatggtagttattttgtaaaacatataaaattgtcattataaatttaatattaaaaataaaataaaaataaataaaattcattacccttaataacattccttacaaaattggtgggaaagttctcttttttttttcttcccaatttaattaatttctctatttcttaaatttaataaattaaataaacaaatgtaaatgaaaaattttctttccattaattctcattgtttattccaatatttaaaaatgtgtgttattttttttattttttggaaaccttgaaaaaagtgttctgtctgatctaatacactccttccttattctgaaaagagaaaaaaaaggttttgttacaggaaataaagctcaattgattcaacttttgacaaaacaatatgggtttccggatactgatcattatggtgaaagcgatggtttggtaacccatcataatccattatattaattaagaaccaactttagttttcaattatattaaaatttgtacgtacacacatttaagaaacttaactaaaacaaaagtggtaagaaaatatagatagatatcaatcatagcattattacgaacaatagttaacttgtattgtacgatatcagcgaaaaaagaaccagcttggttggaccaccgactacttttaggtggtaattgccgcgaacattcagtaaaaataatacaacacaatcataaaacttatacctacgcctctttttcttttatgcaatacttatttatgttgcaatttcttacaaagtaagtgaattttcgacgaaattgccgcgaacattcagtaaaaccggtttcttgatgaaggaactagtttcttgataatttcttccggtgatttttctgacaacaatgtcaattttgacgactttttttagaatttgctgtcagtgtcgaaaaagtcgtaggagtagttgccggtgttagaaaaagtcgtcggagttcctggcgatgtcaaaaaagtcgtcggaattggcattatcgctaaaaaaattagtttcttagtgattttttttgtgacaatatcaactccgacgacttttctagcaccggcagcaattatgacgacttttccgacaccgacagctactctaacgattttttacggcgccggcagcaaattacagtaacttttccaataccagcaacaaataaaactgacctaaacaaatataaatattaaatatgggctttgaaaacccaatttatatgacatatcaaataccataaaaatatctaaaagcaaaaaataccatataaattggtcaaacttaaaagtgtcatatttaagtaaacaacttttaaaatcctacattgaacataatttcctcttttgttatatgatagtgtatattattgttattggaatattatatgaatttttaaaaatttgtaaataatttatagtatcactaatgtaatggattgttcttattgaaatattaaaaaaaatttgaaagatccgtaaaaatagaatcagcccaccatgcattacaagtgtctttgataaagtagttcttatttttatttataatttctttttttaatttttattggtccatttgactttcctatgataaggaggcatacacgagatttcccctacatatatattgataccacggaatcttcatgtcagacatattttgattaaacatatatatatataataaacaaaaaagcaaaactagtaaaacttattcttgatc

SEQ ID NO: 226794 - DNA, 1476 bp, Cannabis indica
tttaggatgttaaatacatatttgttagtaaatctaagatcctggtaaaataattccaacacttcaatgtattttattcttaaaacactaagctctttgtaaatgatatttggaaaaactaatataattattaaaatgagtgctttatcatttatcgtgttttgccaaactcaaagaaaatcatcctttcaaatctaaatagttatagaagttatagattctatatctatgattaacgctccaggtcaattgtactaccgaattcccaagacataagtatgagctagtcctacgggtaagctagtaacgaacaagtcaaagaacccatatagtacaattaagctagaacttagccatctcaggattgagatcaattgatttatgattaactaagtgatattcaattagaaaagatataacgataagtttatagtatcttttctactatcaatatcggtctagtctgatgtatagccaatatatctgatacaaagttacattagtaatgcattggaaaagacattccacttatctaagtgtaagtaaaccacatcgctgattatcacatcagtgtaaatttggtgaactgataaattacgagactaaataatttgaagcatataatcacaattattttccattgtgatggtactactattgtggtggagtttactcactctctccctgccatgtcagctaactacctatcctagctggcaaaaaataacagttgattcggttggagctaaaccagtcaagttaagcttttataaccaatataaaaggcagccaccctacacgatcaacaaaggcttttgtaattcatttgtacatgcattcataacactagagagtttctttttagagagattgaggggctgttaaagtctccctcatgtttctattgaggtgactaaagtgaggttctattgtaacttattcttgtacaattttctctcaaacatgtacttttgaattcaagctattctccatgtaattcaaatgatcatcaaggaataaaagtggttgtgagtttgctaatcttttctaagtattcattttaagttttatgttctttactcttgaactatctccaatttttcggttttatgtttcttatcattgttgtcattgtttttggattcaatcttgccactattagctgagcaatattgtgaattaagggtgattttgattcaccacaaatggtagcagagcaaggtgtcaagaagaggtttcaagatccacattcaaacctccaagattgatcttcaaacatctagaaactgtttgagttaaatggttgctgcaagattcgaggtggacaagtttaatggaacaaatgacttcagtttgtggagatttaagattaaagccttcctagtgtatcaaggaattcatgaagctcttgatgaagaacctatgaagctgattgaagaccagaagaagaagttggaaatcgaactcaaggcacac

SEQ ID NO: 226795 - DNA, 1175 bp, Cannabis indica
tcagaagaattaaattggagcacatggaatgatgaaaattcaataaataaaataaaaaataaaaaggcttctcactaagcttaccacatgtatgctccgtggagtgatgggaactcgattacttcagtagacttatcccaaatctatttagaatagaatggtatttaaaatagcgaacaacaaatccgtaaataccttaatattgtagttgtctgacataattttctctaaaattaatataaacttatattttatatgaaaaaaataataataaatatgttattactaaacacaagtcttattagtagaagttgaaaagataaattttaaaaataaaaatgtacactagttagcatttgaacccttgaccattattatatatgtaaagtagcttaattattataccaaaattaacaaggtgtatataaatatcatattttattataaatgtatgctttaactaactaacatgtatatacattttttttagagaacaattgcaccatcgcctctatgtgagtctgtccctaattctatatttttatttaatttatattataaataatctcatatatattatttataaaaaaaataaaataaaggaaagatcacataaaatattaaataatagcatctccacactatatttaagagaattactgtttggtcctttaagaagctcaacatcacactaatatggcactctatcattaactagtgatttttggtatcatttataatgtggataatcacactttaagaacttgttagttttaatattattgtgaaataaacaaaatacttataattaaagaaaaccagaaaataactaaaataatataatgttctagtatcaaaatcaagagacaaaaaaaatttacgagattcaatctcaagcgattaatgcttggatctaatcctcggaggaaccaccttgtgaccaatctttatattcaagaataatgttgctcaaagttacaaatttgatcttcaaagatcgatgtcataaatggtgtcttgtacctacaatcaactcacttgagggtgttgtgatcaaacacacacaacccttataaatctctccttactcactatttttgtaacaccttactagattaggcacgtcacagtgttttctaattactatgcgctcttttactaattaaagagtttat

SEQ ID NO: 226796 - DNA, 1979 bp, Cannabis indica
agggctgggctcgggggcctaactgctcgattttctcaattttttcagaaccaaaatgtccgcttccgcgcccagttccaagacttccaagaacggggcggttcaactagccaccctggaagaggtcatgcagggtccctgtggcccaggagaaatttaagtcccgtgctaatggttgggaggcggatgagctccactccaccttgacttgtgcccaccagcttgaaaagattgtggtggtggcaggcatcaaaccatcagcctccaggaccttccaccagctgcctcgggacgaggagacacccaatcacaattatggggacttcagcgcttggagccagacccatttgatgtccggggctatgctccctcttcaggactactttgtaaattttttagtttttgttggcctcgcgccgtaccaactaattcctcaagcataccgcctgctttcaggcttatttattttgtatgctgcccgaagttggggttcgcccagtccggctgaaattttgtatttttatgaacttgtttctgtccccaagaagggggacaaatttaaaaacggattttatggacttcggtcccaccctttgaacgagggcccggtcccttttaattaccagaagcacgtgaaggagtaccgtcaccacttcttcttttcctccggcttccaggccatggacctcccggagcttcttacagagtgggttaggatccctccttacatgcggaccgaacctactcaagtattcctccagcgggccaagactttctccacttatgacaagaaggccctcaacgttggagacttggtcacgacggagaactgtcggaaggccaagctgatatccgagaatcagtcggtggatgacttcaatctttccaaggtcatctgcccgaatgtaaggactccggctgcggaaagggcgctccgggtgaacataattgcctcagcagaggacctgtaccagaagtacctcttcaggagggcacaagagctagcttacatcgaggcccaggttgcagctgggacgaccgttcgtcttgaagctcctccagagcggaggccctccaggcctaagcgtgtggtcctgattcccaacactggtgctccagacgccaatacttcagggtctggtaagtctcctttagtaattcatcatgtcccttctgtccgagagtacacccaacttagacctatagggttcgatgagcgtctctgtaggtttagaatgccttccacccagtgggggagttacgctaaagaatattatttttcccacttgggccatttcttgggtcagtcctggatgggctctggacctccagcgcctatttcccttgaccattcagcccatttatcctagctggtttctcccctcagacaactttcttggggatgatgaagccaacattgtagtccaagactttgctagggctgaattaaagagtcaaggtaggactagtttattgctttgttgttgggtgcataccttcttatagttattctaatacttagtttacttctttgttgcagcatccaatccaaaggaggatctcctagcaactctcgccggggcccatagccctgacgcttctctgcctccggccccatcccaactagtgacccccgggaggtcctcgtccagtgccctctcaatcacgattgtcttgatagactaggagggggaagttgaggaggatgagggcgaggttgcggcgcccttgagcacaagcggaagggcgaaatggttgagaccgagccttccaagcagcctaggaggagggacactctgggtgttagcgtcgactccgggatccctcccgaagcggaggagtacactatgccacatggcatcgttctcaccccggtccacgtagacgaggaaaggcaaacgctctgcatcgctaaacacaactatgccctggacaaatacagccagggacatgctgaggtggaggccttgaagaaggtc

SEQ ID NO: 226797 - DNA, 1227 bp, Cannabis indica
agatatgcttttataaattaatttataataataaattatgatttattaaaacgatgtgatttaattaaaattaaaataatttaaaatataacattacaacttttaaacttaagggatctactttttaaatttttacaaagttgccaacttgacattccatccaaagacaactaattatttttatagacaacttatgtcctgacaatttggcgctgctggtcgtatgagttgatgtatacattttgctggagaatactctaattcatagctgatctaatttgttttttttcttacctgtactagaaagcacctgtaaattacaaacactcaaaataataacataaacattatatatcattatacaaacacgataaaataagcacgaacttcaatttatatgcaagaagtcacatcacatgttgcaaacaacattaatatcaaatatttgtctaacaagataaacgttcaatgttatttaataaagtaacaatttcaacatcgctatctaatgagacacatttcaatatcgctatctagtaagataaccatctctaataaatcataggaagcactatgaaattatttttttataataaccgacgccatagggtctttatgtcatcgattattccctatagcatagcctagaaaaacgtcagtaacaaatttaatcaaaattgaaaagacaatcatttctaatactgctgtctaataagacaaccattacatataaaacctttcaacagttttacgtagagttataactttttattacatacaataatcactgtgtcacacatagacatgctttgaagtataattatactttttttacatccattcctaatttaggtgtgccgatttgagtagaaatcgctcgacgatccaatgccttatgtcacattagcagtaaactagtaaatatcatattataatgctttctatgacttaaagtcaaaattaaaagtttctctattgataaatagcttgacaataccttaaatataaagaaaacacaaaaatcgagctaccccagactgaccaattgatccaccaattttttaggccaaccgattcatggaaccggtagactggttctgtgacaaaaaacccaaactcaaaaatttttagtagttctcttttttccctatctgtccaaaccaaaccaacactctagaaacgtttatacactaattacaaaccaatacaacaactcaaatcacaaaa

SEQ ID NO: 226798 - DNA, 1900 bp, Cannabis indica
acttggcaaatttagcagcaagggaacttccaattacagcattgctggaatgcgtgagagcattagtgcaacaatggacacatactaataggacaaaagcacaaaacacattcactacattggcaccacctgcagaacagatgctactggatagctacacatactcgttgaacctggaggttagatatataatatacattttaaattttaaaaaataaaatcattctggagcattcgtgtgtttttcgagaattgttttagggttattgtactgttgttctgaatgtataataaattttgtttacaagtaagacaggtaaaattaactactgattacttgtttgaggtaacaagaatgaaaaaaatcatgaacagcagacctcaaggagagaacatgcacatgcaacaagttccaaatagatgaaattccatgtggacattctgtggccgtgctaaaggagatgaacgtgggcccatacaactactgctcagaatactacacataggaaaaatggctagaaacttatgtaggtgcagtgtacccaattagacaccaaaacgagtgggatgtaccacaaaatgtgaaagacgtaatagtcttgcctccagttgaaatactgaaatcaagaagacctaaaaagaggaggtgggaagctggttaagagaagaagcaacacatcaagtgcaacaaatgtggagatttggggaacaacaaaagaacatgcactagaaggcatcaacattaaaagagaagaagaacaacagaggaacaatcgcaaaaaattaaaaaatataagagagcatatggtacaaaaaaaaattagaaaacaattttcataatagtttactttttttttaattgggatgtcatattgatgtgattacatacattaaaagatttttaaactattagatactaaatagaattgagatataaattgatttattacttcagattatttttatataaaatgatactgagaaagattaaaaattcatgagaacaatattgttggtggaaagataggaaaaggagaataaaaacacaaaggtaaaaaacctatcaacaaaaacaacaatgattattattaaatttttttaaaattttaatcacaataatattactaaaaattatatgaacaagtaagaattttaaagaaatttagtaaaccaaaaaaaaaaaaaaatacactacaaaagaaaaaaaaaacaacctcgaaccaatatagaaacaactcaaacataaaaaaactttggaatttaatatatattgtaactacggatgcacatttccccatccccacggggacccgcccttaatagagcgggaattccccatctaaatgggaaatgagacgggaacggagattactttttatccccgaatgttaaacagggcggggacaaggatgactccccaccctgatgagaaagtatttcatcttatatttttaataatgttttataatttataatttatgttcgtatttttttagtatattagtattttctttatgaattttaagttgtgttttagataataattagtttattgagtaataattaatgtgtaatattttaattttgatgtagtttgatatttttatatattaaaaattttatttttttattaggcaatttcccgccccgtccccgcccccattaggggattctccgtcccatccctgatggggaataagtggggatgggaattaaaattcttaacgtggatggggacaagggaacactacctgccaattccccgccccgtgtgcatccctaattgtaacgccctaagaattaggcacactaagaaaactagtaatataacctaatcccgctaaactgggattactagaaaaaaagagcaggaaaaatttaaactttgattacaatggaa

SEQ ID NO: 226799 - DNA, 1851 bp, Cannabis indica
tgtaatataatgaataaaaataaataacacaaaataactcaaatcagttataattaaaatagaactggttctataacagtgttataatgaataaaaacaaataacacgaaataactaaaaccagttataattaaaatagaatcggttatacaacataatgaatacaaaataagtaacacacaataactcaaaccgattataattaaaaacaaagaggaaataagttcctaaaaatactgaaacacaaattaaaaacaaagctagttctacaacaaaatacctcataacacataatacattataaaaccggttataatttttttttaaagaaaagtggagatcaattccaaaaaatattaaggcatatatatgaaaaggaactagttctataacaaaataaataaacacaaataataacacacaataactcaaatataatataaataaatcagttatatttaccaactagttaaaaatttgagacaaaaacactaattctgtaaagcaactaacataaaaacccacatataaaaccaattaaataaagtaaataaatcaaaaatcgatcttaaagatagtcgaagatgagatatttaaacaaatcaattaaatacaaaataccatcaaaccatttagaaagagatctactttcacaaagaaaaacagaaaaagaaacaatttattctaaaactaaactatcaataaaaacataataataattaaaaaataaataaaacacttaggtttctactgcagcttttacgactaaaatcacattatgtatgtgataagaaccaaacaagcaatatccaacttcttacgtgtttgactcggtatgtgacatgtgtgaccctacattctttgacactcaaatgcactatgaaaatcattaattttaaaatatagatttagttatgccaattatgcttgttgccaaattaagtctgacattagctctaatgaaatcggacattgagaaagtcatctggatttaaaaaaacttggcccctcgaaattcattgttgtatctaattgatcctctttcgcgttggagtttcgatgatgacgatgatgattgaattcttcaaaaattactcctctgcagtaactcagcaatccaaccaaaccgctcaagtacgtaacgtctctctctctctctttgcaataaggaaactcgtatccaatttcttcttctgagaatctaatctccttgttataattagactagtttctgatttcaaaatagtccaatacaagcttaatcgatctcaatcaggttcaattccttttcgaactgagaaattatcccgaacacttcgtccgctactcgttcgttgtcattggctagctcaaaccttgctctcctcgcttgcctagccaccaaatccactaactctttcacttcacccccaatgttgatcgaatctagcagaagaacgtctagagccgtcgctacagcctgaaaatgaattttgaactgagatgcgactaacttgcacttggttagaatccatatcctggaaccttcacaatggtcaacgaatctggagagaggcttctagatttaatgggggctgagtcggatcttcaaggcttctggttgtcgtttgggctgagtcaaaaggcaaaggttgtggcgtaggaggctgtactgtcgagtcttggaaattacagaactaaaataaaatctctaaaaggcagagttcctccaactttcaaatgtgacgaaaaaggataaaatataggatttaataagttatttacaaaattatggcataaaaaaggcccataaaaatataaacaaaacaaaaaactcatacctgttataaatattaataattatgtggatgt

SEQ ID NO: 226800 - DNA, 975 bp, Cannabis indica
gatgctcgaaagaatttctaaaaaactccattttcaatggcctagattgacaaaatatcaacttgggcacatggcttgctccagttgtgaaatgggcactaggccctattatttgtacctaggaatttttatttttcttctaaaaggacctatttctccatttttgatgaagacaaagatgattcaaaagttgaatctttgatatgatacttggaaggtgcccggattgatagaatgtaaaccttggcattgggtgctcgaggccccgggtgctcaaaaatcaacttcctttgattctaattctgatgcctcaaatatgtccatggtatgtctagttgatgtcccaattcaatttttgacccttttgcacttagaaggtcccaaaatctaaatccctagttgaggatgtcaacatgggcgccgggtgaaaccctaagtgctcaggttcgcttctaggttgcaagttcatgtcattttagattttgatggttggattaggttgctctatgtcttcaaaatacaaaacactaaaagatagtgggttggattcaagttattaaagtctgaactttcgtcctagagatcctgaagtcaacctaggtgcacggctagggtcccctcctaggtcaactgctatgactcgagtctagtcaactctgtgaggcaatccttcatgccaggtgtcaaacattgatgttcacatcatcagggaaagtttccaggttaacatattccctccaagtcaactttacacttgtgtagagttgacttgatgacgtgaaccgagcccgtttcgtttgaaactaccagatgggcattaatttttacattcttaggcacttctatctattcttcaagcattcccaattgaattaggactttaaaaactttttcttagtccttggaaattataaaaattaattaacaaagaaaaagagaaaatatcttattttttcttatggcattaggattaat

SEQ ID NO: 226801 - DNA, 1474 bp, Cannabis indica
attgttaattccatttttagcattatgacaaaaatattttataatttaattcttaaattttggttgaggtatttatttgattttcatattttttattgattgaaatatatatatatatatatatatggaacaaaatatgtgtagcttttctatttatggaaaataaggtgtaaagagtaagtttgatgactcatcattttttatctttccagctgtgaatatctgattctttgtgagtttttgaatatgtttgattagatttcttgtgaagaaaattgaagtaagattttcattttctataaaaaggaaagtcgcacttattgctcacaattttgtaggtacagaaataaaaattcttgggatgattgaagatttattttacagaattgtctagtgagttgtggtcttctttagaccgtgtatgaactgtcaataaggtgtatatttattataaatacaccttataccagctaggtcgtgcatctctttcgtacactttaaattgtattcctatctttaaaaaagagagtctttatttcgtagagaagagtgtgttcgtctcttactctgtttatatgtattttgtattatcttgagtttgtattcaagtctaataaaaaaaaaaaaaaagaacaacggtgctaccttcgggagaaggttctataagctttcaaaagattacttttcaagtcttgcctctggagaaaacaagcactcttcaaggagatcgaaggaagtttgagcacttgaattttaaaaaagattcgattagaaggtggaatacatcaagcttacgacatataataagaaagagtctatttatgcataagtcagttactttctcattttgagatctatttaatgaatcttatctttggacgtagccccgtggactagtaacaatttgtaagaattagtaatgccacatataagaaccttgtgtgtttttatttttctgcactatttggttttattttgtagttatagagttgtgttctgtacttacagaataactgtttcagtaccatattcattattctgtatttaattaattgattaattaaataataaattagtaatattaaaataagaaatttcatgttttaaaaaaaatacttattctaatttatttttcacttttacattttcttactattcacattcaaactatttcatactatttttctttaattaatcacattttataaaaaaagtcttaattaatttctttttacctttactaaatatgattcttttactttcacacttttctcatttcttaacactctttttccctcttacaaaaaaaaataattaagagcactcctcctatatctttccctagagtagtatttttttttggatattttgtaatttattcggagttgatttatgaacgatttggatattttcacaaggttgatgtcttattatttttctattgatttatagtttttttggttattttatagtt

SEQ ID NO: 226802 - DNA, 1197 bp, Cannabis indica
ttcaagtaagcacgaagatccggttgttgttggttatagttgctaacggacctcatcctactcatggatctcgtcctgatcatggacctcgtccttgagtaactttcagttttacttgtgcctatactttctcgatcattattgcaattagttctttcccttcctcgtgttgatcgactatgggttctcatgtgttccgaggtaacactcgcctcttcacggctcgtccttcttccttgggtatgggtcgttgcgtgccccctgctagggtttgtacatgccccttccctgttggttcgagaaggatgttagcgatgtcttgttagtgacgcacatgccccaagctgagtcccaggatttccctcgttcccatgggggatttcccgttccctggttcctggttgccttctgttctcatttttgtgagagggctctagttgatcatttagttgttcattctcagggggaccctcagtttccccaggttgttcttcctgagtgttttgaggattctcctgagccgcctcttgcctcctagttcgtgagccacgaggtctgcctcgtggtcttctcactctaggatcaggttggttttgtgaacaatttacttgtgccgccttggctgcggctgcctcccattctaactcagcatttcattggttttcctcctctaggcggtgcctgagatggtgattctccaactcgacaattggcacgtatcttgtggtatcataggcaccttcattatcatattctgtggttgagcacctcccagattgggctcttcatcccctacttctgagttctggacattttcatgatgagtcctccttgatcatgcggaccgcgtactcgggccaccttcatgtttggcctttctaaaacgagtggtccgtgtagatcgtgagttgggaggcctctgtgagcccattggctcttttccaggacgttgagtggtttcttcaggatgagtaccaacattttctccattatcagccatggagaaaggtctttcttttgatcttgagggtttttctaagcttttttcacgtaggctctcaatgaaagcaccaaactattaacacggattttcattaacttaattatagcctatttcgtgatggattgcacagaaataataatagtcaaagaagaagaaataacacaaagctttttttacgtggttttgcggttaaa

SEQ ID NO: 226803 - DNA, 1094 bp, Cannabis indica
aaaccattcatttcaaaattaatccccaaaattttcccctctttttactttgcctgtaaatatctcaaaaaatcttattatatactttacgtttcttgagtgttcagagcaaaaattgagatagaatttccaagtttttgagcttttttcttcgatcaagtaatgtgcggatgtttctttggaacctccatccccaatcattgtatcaatagtgagtaagttttctaacttttcattcccgtgaatctttgtataaatctaaatttgtgttctgcaatttttttttgaatgtttgaatgttcttacttcaatttttagatccatgaaatgtagatgtcaaaaaagttaaattgaaattcccaaacaattcaactaatataatccaaaaaaaaaaaaaaaattatatcaatactataattaaatgtttctctcgatgcatttttgttattttctagaattctaattgtgaatttgttcatatattaagtcacgaatatatatgtagatagagttagatacgtggaaacactgatttttaatgtttcataatagttgcattatatatgcataaacattttgctaactctctaaaaattgaaatatcaattattataaattgataagaatgaattttatcatatttgcaagtatttcatattaatggaatgcaatataaagctcttcaaagaaacttttataacatattagttttattaatatactaaattagttgatataaagttggtttacagaggtttaatagttgtttctccacatattactattaaggtacaagtaattatcggttagtgacaacaaaaaattgacaaatagtttcttatagatacacattcacatttaatatttctcattgcaattaagttatacgttagttgaataataattttgctactacaatatcatagtattataaaaataaggcttggaattgtcaaatacgtgatctgaacagataaaacacgattgttgtattattcgtttgtattaaatatgtgaaattattagttattttgtggttttatattagctggctcacaacagatgtaactattgcatgacagttttctcatagt

SEQ ID NO: 226804 - DNA, 1667 bp, Cannabis indica
attaaataaacatgttccaaatggtatcaatatttgttacaataataaaaattgtaaacaaaattaagtaatataaccgcctttaggtttgtgattttgaattgaaggaagcatatcagctgcccattgttggcgcatgtcatcaatttgcttttgtgtatatggcttaagtgttagctacaaaaaaaatacaaaataaatttaatttattagttcattataaaaatatatataatataatttaatatataaatgataaattattatatatacctgattgaagtaagcttttggactttggtcacattcaattaagtctttcatcatcctcaacatgaagtatccacacaccacatcgtcttcttgatgtggacactagttatttaaaaggtttaaattaataacgttgtaaaaataaacattatatgaattaataaaaataaataattaaaattttgttacttacagtaggttttatgatttgtagtttatccttaattaagtgaggcatttctttgaattgaagaaaacggttgaaaacagtaacaatcaatcgcacaatttcctcacgattttggaaatcaacattaagaggatcacaataagcagcatagtaagcatatggcgccaatatgattaacatccagtgcccactacaaaagaaaaatataattatttcatataaatattatattacatttaattactgataaaagttttagtttacgcacccatggacccagggaacaatcataagctgtccagttgattttaattgcttacatagattgaacagcttttgggcacgatcctcaaatgaacctcccgaagttgccacaatattaggattgacaaataaatttttttgtgcgattttgttccactacatacctgtgtaacaacctaataaaatatacaatatatgaacattgttaaataaataaaatatataagtatttttaaatataatatattacaatacatatatacctcatgtagcatatgacaactgcttgtccaatcttctccatatttgtaaactgaagtatatcatccttacatatgtaaaaatgtgacaaatcttgaccaaatacttcattctctatgatatatttgaaacactcatccttatcagcccaccgagaaacgatattatgtatctgttctaatggagtccatgtctgttgtgttaaacgatctattagaggtcgtttctctagtggtggtggttgtgttaaaggagttggtggcctttgtaatcgacctccacttgttgtttcatgatgagcatgtgtaactaattaaattaacacttagtatataaaaataaacactaataataggtatacataattatataagtatgtgatatgaaaaattacttgttgatgtacatcatcaattataattattaaatgacgaggccaagggatcggtgtcccaacactttgatcaacataaaggatgtccaaactaggacatggaataggggcaagaaccattctattcaaaactttaataaccatgactgtcatgtagtttgagcctggtatccctttgtcaattgtaacatccccgctttaatcattcattgggtccttacacccacggaataaatggctcttatcacgattacgtcactctggctgcttcatggactgatgact

SEQ ID NO: 226805 - DNA, 2079 bp, Cannabis indica
ctaggtcctgataaaatataatccaacagattataccctctaaaccatcctttcgtagatgtgcctttgattctctttagaatctctcattgtatcacaaggtgcttgcatcctccatttaattctatctctaatgacttctcttccaacacttataagaacttactaagtgttaattatgttattgggggaatcccttcatggatgtgacaaccttttagtggtgacgaccttgtaatggcgatgcccttatggtagtgacacccttttagaggcaccgcccttttggtggcaacaccgttttgtcttttggagagattgctttgttcggagttgcttgacaacgaggaatgattagttgaggagagccttgtgtttgcttgtaatgaagggacatggttttggcaagactcttgtcttttttagttgaaaaggcgtggtaggaagccattttgtgtctctgtggcacgctcccgcttgcatgtaattggcatgatgccgcttggggggagatgtcagcgacatggtgcacaaaggcaccagcggcgtgacaatgtggattgtttctgatctccaatggcgcaacaccaagaggtgcttctaatctccagcggcacgacatcgttgaaggggaggagactccttgctcgcattgcctcttgagctctcttattcttcttcccttttgttacaacccaaatattattacttagcaaatttttgaagtcaacacatactgaattctaaaattattattttaaaaaaataataaaaaatatttatattaaaaaggattctatggtgttgttgaaaattaactttctctctatcttttcatctttagtcttaataccaaataatataaagaagaattactatccttttccatccttcctaaactctccctccatacaccctactcaacctccttcttatcaaatataacttagtatttttttgaacattctctagtatgtcttcctgaaatttttaccataatagtgaaaaaatttatcaaaataagcatttttgtatcaaatgtattatcaaataatgtaaaaatatcttctactctgttgatataatatgttgagaagttgacatatacttatataatgctttggaatattatcaatacaaaattatatctcctaacttataattgaattaattagttgtgtctcttgagtttaaatggaggaggttggcataatgagttacatgctaattttttaaagataaagatagagctcttatttctagcattcctttgaatatcactcaatgtcatgatgatttagtgtgttctccaactttatattgttaaaagtgcatataaattgatacaataaattaatggagagtgggatgataatgtgacagtgtcctctaggttcggaagaaagatttggagtttgtaaattcttccaatgatgaagaatttgatgtggatagctgctaggggttgccttccattaaaaaaagaaaaagaaaaaactgatgagttgtgtctccaaattattactaaagtattatttttattataaaactatagccaattaggtaatctctcatttattagtgacggattacacacctcaacatattagtaagccattggattatagtataatatagatttctggcatccaatggtggtaatttgttaagattagttttatttgcaccctataaaatgataaatatactcaattattaaaaataataaatttaaacaatttttaaaaattatttttaatattttttttcaaaatttttcctcacaattattttaagttaatttcaatacttaatttgattttattttcatatttcttctttctaaattatgtatataagtttttatttttttttaagaaaatttcatatatttttttgtcataatatttaaaatataatttatttttatttgataggtatattttttaagaacgtgaattggaaaaaaaaaaattaaaaacttaataaaattaaagatataaattttatataatataaagattattaaaatagggtgtctttttaagtttttggtaatgtaaataaaattttcctttg

SEQ ID NO: 226806 - DNA, 1608 bp, Cannabis indica
ggccggtcatgatgtcttagaaaaggccctgaggccaaataagatatataaaaataaagagataaaaagagaagtgtataagcagctgcagtcccaggctgttggttcggttcttctaggccaattggagcaggaggatctgttaacaggaggtacatcactaatctgaccggaggttgaagcagccacctcagttttgccatagggcacttgggacgcgcagaactcaaggtacgtgtccttagcatcacccaagtagtctccaaggcattgatcttctctttcaaccttgccacctcagccgaaagctcctcctccttggcttccttctcctccttcatccgatgaagaactcctcgaagggaagtcctctcatcctaaagactgttcaccttagcagataaggtctcgatggtctcctcaaaacggtcagcaacctcgagatccttagttagctcggtgatcttcttttgagcgacaaacaacttcttgttggcttcacccaactccaacttctgcccgggcttcttcagcatccttcctggccaagtccgcctccgccctcatgtagtcggacagagtcgtggtcctggacgcagcagacttagcccgagagtaagtgtaggccaactttagaccggcctacacaagtaaaaaactttagcatttgagctaagtatggaagattatagggaaatatcaagaaagacttaccctggtgaactccttcaaaactccgcccaccaacaattccagagaagagtcattgttagcactagccagttattcactaacctcaggaaccagcaggttcatctccttgcccttcttagcctctagaagcatcggcaaaggtagagtaggtgcccacactcgttcaggatcactcctgaccagttcagacccaaccttcggtggtccagactccttggacttagcagctttaggggtacagaggtttgcagcagttagctccttgaaaagatcaatgacctccccagcaggcctcttttccttagaagaggacccctcatcgcccttagacttcttggccggaggagaggcgctagagcttctgcccattctcttcttcagagcatcaagcatctgccgagacaagtctgtacagaacaaaaacaacatgattagaagaaacagatatgaagcataaaaatgaagaagctccaaaacaagacaaagtaatatgcaaggtgactgcccgaacaagactcagaagtccatcatcacttgacatcgatcttatttcagacataacagctttcccttttccgaacacgggaggggatggccaaacaggtgaaatgggctcccttatgcgaatcgcatgttcaacaggcctgggtggggccaggagtttcttcttcctttttagtggagtcacctgctcttcctcagcctcatcttaaggattcaagggctcctgagcatactgcttggcccttgcacctcccttcaacttagcctcgcgcttcagttgaatcagctcatcctccgaatcagctcgttcggttcggcaagcgccagatttcctcttcttccacgtcacaaacttaggagtaaagtccttgggatagagcccgtacctca

SEQ ID NO: 226807 - DNA, 1043 bp, Cannabis indica
aggttattctcgacccaggaaatcccgcaaagtgtgtatatattgggaaaaacttggacgagtagctcaaatagcagctaataagtttttttgaaggcaaaacaggatcaattcttctggagccatggagatatgatagggatcgaccctaatattatctgacatcagttaagtgttgatccaaactacccagcaaagaggcagaaaagagacccttggattccgagagacaaggggcactaaaacaggaagtggataagttgttggtcaacggctttatacgcgaggtgtttaatccctcatggatagctaatcctgttcttgtcctgaagcctaacggaacttggagaacttgtattgatttctctgatttgaataaggtgtgcctaaaagattgtcttccactaccccggatcgaccagttagtaaatgcaactgctgggcacgagcttatgtcatttatggacgcatattctggataaaactggataaaaatgtatgtcccagatcaagaacatacaagcttcgtaaccaacatgggactctattgttataaagtcatgtcgtttggactgaagaatgttggggcaacatatcagcgattagtaaatgaaatgttcacagaccaaatcgagcggcacatggaagtttacgtctacaaatagcttggagaaagaccagctacaagtagcttggagaaagatcagctacacgtagctcgagaaagaccgcctacatgtagaaggtttcaagctctgcatagacctcattcccctcatcagaagatcccatttcctacagctaagaccttattcccagccacagtaaattcctagacaccagagaaaggttggcataaaggtcttctggttgcaggtttgggtcttgggttgcttggattctctgatagaaaccatgccaacttccctctcggattcatgtgaaactacgccaactttcctctgagattccttgtgagcctgaggaggacctctaagattgcacacaagatctatgtctattcctgcggagacataaaaaaa

SEQ ID NO: 226808 - DNA, 2051 bp, Cannabis indica
ttgactttgatcgttatggactggtaccaagatcgagccctagacatgcagacctaattttaacagtgtgtataggaacaatgaatatggctcattctttagtgaaactatatgaacaaatgccaaacataaacaatcactaattcatcaactaatatatttccgcagagtcgaaaactaaacgataagggttttgtgaaatcttctaagatgttaatgggtaaagggattagagttggttaaatgtatttaccaaaataccccaattcttttttgctaaggcccacatagaaatatgctactgacgtgagtaaagctaaatcaacgatagtatttatatcatttgtgggtgctaaataattctttaaattgcttaattagtttaaaattttaatttaatttttaatttttttaatcattcaaaatgactttttataagatctaaattaatttttttaagatttactaaaaaaatgttaaatttttcacatttttattttgagggagcatgatttaatagttatcaaactttaaggggcaaagttattaatttacaaaaatatattagcatttaaatagaataatgagacgaaacctaacagaatgactaaatttctgtacatataaaagttcaaggaagattcttaacaagccactatattttaaaggggaataatcagtattgttgaaaattcaagaggtaaaattactaattattctttatgatacatttttttaagatacagtttactaaaatagtagcttactagatgataactcattattttcgaaaataaatttgaaagttactaaaatgtattaatataacctaaataattaagaaaatttacataatagaccgaaaatttgatttatttttttttttttttacaaaattacatcaattacaattttttttttttagttttacacttttgaactttttaatttattaaaatacattttcagtgaaaataatgaattatttttttattgttttgtagtttatttatagctgcattatagctgtcataatattttttttttagttgttttatatttgtcgtaaggttgatttcacattgttttctagttttaaatttttaacttttgctgaacaaagtgtatttttgtaattttaaaactttacaagagtatttttgtaattaaaaattttaggccaaaaaatcataaataaaacataaatgaagggtattttttgaaaatttcccaataattaattgattattaaagtgtatacatgtaaatttttgaggtaaccaaaatatatctcaaattatataatataaaagtaatacttttttatgaaaaatttactcattggtttctcatcaacatcagaagtaattaaaattacttttgaaatgcaaaaaaattttagaaaaataaaattccgagattagtttcatttcaagaatattattttagaattaaaatattttttaatagcgtgataaaatattatcataattaaaatttattaaattatttttgtaattatttatattttaagtatatttttaaaaaaatctcgaaaaatcgtcacattttccctcaaaaaggattttaagcccaacctcagccaccataaaatagacggtttgggcctctaaaaacagtacacgtcgttatatctgcaaacgacgatcgtattgatgcaggtgaaaaatcggttcaatcagtgagcggggacactttcggaaattcagtttaagagagtagcgtcaaaatggcgcgatcttcaacggtttttttttttttgtacaacacaaaataaaaggaaagtgaatctttcaagaaactttccttttgtttttttttttttttttttaaattttaaaaaaggaaaaaagtttacagggaagaaagaaagaaccgaacttttactaaaatggaaggcacatgagcgctcactcactctggagtctggagtatggaatcaggataggtcgtcctcacctgtgctcgactgtgtaaacattattcctccaatcaatatttgccacgtagctcaccactttccccggttt

SEQ ID NO: 226809 - DNA, 1063 bp, Cannabis indica
aacttactcattgttcgatgtctaagcttagtccaagcggagctgctcggatgcttttggtgggaatctcatgacagacttgaagtaaaaaccatttttgctatgagtttattagtggagaaattggtaaaagtaaacttgtgaggaagactcagctttatttataggcagagaggtgaaaaaggcaatcatttcaaaatgcctttagatgcttcgattccctcccaaaagtaaatattgggaaatcaaatgtaatcaactgtaaccgtcaaaacgtgatgagaaataccgagtttcgaggcactaattaagttagagcattaattagccgaaaaactgaagagacgcctgatcagcctcacatcgagtcgcgcactgacgcgcctaacacatgtcactcactcaaatgcaaaggcagctcggatgaagtctacacgcaactttggaagtccagtacagacttgggggcaaatgttatcccaaattgtgcactctaacgtggcatcacacgatgttgacacgtggaattaacttcacgtacctactgggaagagatatgccgaacagagcaccacatatattcgcacggacgaagccttcttaaccgagcagtgagcagtccgaacagcacgccaacacttagcatttttagcactcccatcgtgaatcacagaagaaacccctataattttaggatcacataacagagatatggcaagctatctaaatcccttgatcagtgtattctgtgtttaatgtgtaatcctggcaattatatctattgtaaacagaagggaaacttttccctcgaagcttatagccctataaatagagatctattctcactgggcaaagggtcgaaaaagttatctaagaatacatattcaaagatattattgtaagagctctaagaagaggaatcattgcactctttgttcttaagtcaatacaaatcaaggggagtaggctattaccgaactgctcggggtcgaacctctatagaaactttgtgtctttatctatttcattatattatatctatattatactacttatcgcttac

SEQ ID NO: 226810 - DNA, 1391 bp, Cannabis indica
aaaaaaaaaaattacaaaaattcatctacacggaaaaaatttcatttctactcttcaaaattttttaattatataaatatctcttcatcaaaaataataaattgttttttttattgttttatagtttatttatagttgtcataaggttgattctcgttgttttttggggttttttttttaactttttacttgagcaaattgtatttttgtaattttagaacattacaagtgtatttttataattaaaacttttagactataaaattacaaataaaaaataaaagaataatatttttgaaaattctttttttttttttcttagaaagatgtaattttctaaaaaggcaaaaaaaaaaggataattacataaggtactatttaaaaaaatacatttttacgtttaaataattttttttatatttttacggttttccataaaaacaacaagaaaacttcataaaagtaacatgaaaataacatctaaatatataacatcaaaacaacaacaaaaaataacatacaaataacaaaaaatcaacagtaaattaacaagagtacaacataaaaagattgtattttccgtaaataaaatcaaaaaaaatcgtaaaaatatttaaaaattctgtaaaaaccgtatttttgtaaatttttttgttgtttttgtgtatttgtgaaataatcccaaaaaaaaatgtctaattttttggcccaataccctcatgtcacacatatctattgttactagtaatgagcgttgctatttggcaccagtggtacccaacaccttttatataagtgacgcctaacagtttgttagcgatatttcctataagttattttcttaaattatataggacgagatacttaattacactaataatagtataacactaaggagaatgttaggcagtggccttttaacaattctctactagtaataatgtgcacatacattttacctctaagtactacgtacacacatttatgtggtaaatttatcccatcaattaaattaaatttatataggggctcacttaattaaaagagaaaattacattatatacccattttattttatttattttaatatttaccttcatttttatattcttttagatatacctacttttataaatgatgttccaattatagcccttaagttgatgtaaattatgtgctagacttaagtgaagagtgagggtatattggaaaatccaccaacaaatgtgggtattttttaataaaatataatatgaagatattttttattaatgaatacaaaaagatgtattttttaacttatccccaattaaaaagtattatcacgcaagtctgtaatattttggtgtaaaaaaatgtgtggacatattctaaaaaaaatttaataaata

SEQ ID NO: 226811 - DNA, 2118 bp, Cannabis indica
ggttgtatccctggcccattcatttcacgtactgttaaaaatggcctcgagcgatgagactttctatggcatctttcaattggcaacattcatcggtcgtatgccaaatatccttatggaatttacaatacttgttaggatctctcttaccccttgaattcctcatcgacttgggcttgccgaaggccaccttttgctcatgtgcaaggtaaatattatctcgagtttcattaagctcggtataaatagtatacgctggcacgtatttgtcatgcttcttttttttctttccatccttcgacggttccttaattccgttctttctcttcgaatcggaagcccccgagttatcaattctcctggaaacagtacctgttgaaacattacaggatttgcttcccgagcttgttttcaacagattcatttcctctcgtgcttcttccttttgaacgaacacctaagcccttttgttgagctcagtgatgcttctcactagatgaccttgtaagtcatcccacaactcgccccccgtggttaatggatcagtagcgatccccggctgaagggttgtaagttgcgtgttgtcatccaaattcctaaccctagtcgcagtcgtgctaaaacgacttaagtatgccttatgtgtctcgccgggctgctgctttatattagttagcgaggccgcttcgggtcgcctatccctagcagcctgaaattacttcttgaaatccctagagagctactcccgagaaattattgtatgatgagtaaacttgttaaaccagctactcgctgctccaacaagcgaggtggggaacaaaatacaacgtaaattgtttgtcacattactcgctcgcattattgtgttaaagttattcaaatgcaagactggatcagtggttccgtcatatgacgagacatgtgggtttttgaatcccaaaggaaaaggggtattcattatgtctggatactatggctcaagctcctcattagagtcgtatctggatagtttccctaattcccccacttgatatctcctgaacttgtcctccagctcgtttatccgcaattggattggatcctcttactttggactaagttgttggcgaagttcaggtttctttcgattcaagtgctctcgcagatccgattgggagtaattgctggcagacctcatcttactcactgatcccgtcctactcatagactttgtctttgagtggctcgagattttattggttccatactttctccatcattagctcgttgagtactttctcctctttgagttggtcgattgtgggttcttgaccgcctcgaagtcacacttgcttcttcacgctctgttcttttccctcgatagcggtttatcgtatttccctcattagggtctgtacgagtcctcgctctatgggtttgggaagaatgttggtgatttctagtaggtgatttccctcatgagggatttctcattcatcagtttccggttgtctcccatctggctgttagttctgatttttagggggtgtctcattttccctgggttgttcttcccgggcctattcctatctcccggttcgtgagccataaggtctaccccatggtcttctcactccaggtccaggttgattttgagcattcgtcccctgtgccgccctaaccgaggctgcatcatgttgtaactcagcatttctacgctacacctcttccagacggcatctcaagcgcagttttctatttcataagttccttccccatggactgtgcacctccacgattgagcttttcatccctcgtcccggggttctgaccattcccatgctgagttctcctcgagtgtgtttttcgcgtactaggaccaacgtcgggttgggttctctgagaacgtgcggtccgtggactggggccacccttaggatgagccctccttgaactggtggtccttctggactatgagttggtagatcttctggagcccatgggctctttccaagaacgatgattggtttcctcatgtggggtgttaacattttctggattttaagtcatgaaggaggtggtttttcttcaaaagaagggagggtttttttttctaagctttttcatagaggctctcaa

SEQ ID NO: 226812 - DNA, 1859 bp, Cannabis indica
taaaaaataactcagttaaaaaaaaccgatctcacaaacttaatatatactgtagtattttatttataataaatgacaatattattggtatttaaatttattaattaattcaaaaattctattcaaattaatataatagaaggtaatgattcaatcctcccctttttcaaaagtatcaacattaccctcctcaagggtagttataatactaagggaataacattccaaggctaaagactcaaaacaaacaaggtaatatttcacattacctttcccttgttagcattaacccattccaaacacccccgtaccaccctagctaaatatataactttacttcaatgcccttcttggttctaaaacttctaacatatttgcatttgccttcaattcttttttatactcacctacttaactttttaattagtttatatttatagggcaagactatggtaggacttagcataagttccctaccggtagggaactttttttgaccattgattttagatcatgtggttattaagatgtaaggcttatatttttatgatagaactgtatgtatacaattaaaactttatacatattataataatatttaattatatttatttaaaaaataaaataatattaataattaaaaaatttattaatttttaatttgaattattattatttattagaagagttaatttaaattatttttatataggtactgtctattatttttttttagctatgtaaagatctcaatttttttttatctcctacataaatagttattatttttgctaagtctccaaaaaatctttgatgctggttaaaatatgacaatatatataaaaagaaattaattgtctaaatttttatacatctctaacccatatgaataaattttgaaattttatttttaacaaaaatattgtgtaaatgaagcataaatttcacaactctatctcgttaataatttttctatttgcctcgtggtatatttcgccatggcagccattttccaagagagtgggtatgaaactaaattgtgagtggtctcaaaaaaaaaaaaatagcttcgattatggtgtaggttttcatgatacatactcatttgcttgattttttaatatacgaagcttaactagtttagtttacagtattagtaaggggataatgttgtgaaacttttgcttcattcaacacaatgtttttgttaaaataaaattttagaaattataacacttcacagtgctcatcaaatttattatttagaaataactttggtataaaaaataaataataataataaaactttaacatactgtgtatatttgcatatattcaataataagaaatactcaacaaataaattttcaaaaaaaaaattctcaacagtaaaatattattttgttaaaaaaaaaataaaaaaaaatgagtaaagtattaattaaattaataaagtaataaataatctcatacaacctagctctaacataacatcaatgcaacctatttttttaaatttttattggttaaatttacttccctatagcatagggtaaaaacaaacgtacctactatagatttaccctatatatatatatatatatatatatggcaagactatggtaggacctaacaaaagttccctaccggtagggaagtttttttgaccattgattttaaatcatgtagttattatgatgtaaggtgtatactcttatgataagactgcttatatacaatcaaaactttattcatattataataatatttaaaaatatatttattttaaaaaataaataatattaataaattaaaaattatttatttttaatttaaattattattatttttttaaaact

SEQ ID NO: 226813 - DNA, 3050 bp, Cannabis indica
tcaaaggggggtatgatgttcctgatttgggggttgatgggaatattcctattaatgagaatttgaataatcctggaaacaaaaagaatgtttccaaatctagtgccactgaaagaggaaagtcggttgttttttgaaatcatgtgcaaggagggaaagggcaaccttctctttttcttggtggacttatcgggccacatggaggacaagggggccgtgggccttctactgattctaagagaatacgtcaacatgaaggggtaggtgggcctgaatatgttgatatggatgcagaggatagtgttgaattggatgttaatggactctcaaaaaacgagttcaaggtgggctctggtttccagacccaccgggcattatgagtacgttaagttggaattgttgtgggatgggcaacccacgagcgatacaattcctttatgataccgtggcccataagaaacctaattttatctttttatgtgaaactttgtgtcgtaaagatgtgttggagcgagttcgagcgaagttgaaatttgaaggagtatttgcggttgatgcatgtggtagaagtggggggggggggtagctttgttatggaggaacaaggatgatgtcaaagttctgaattttgctacaaactttgttgatgtggaggttcagtctagtaatattggggagtggcgtcttacgggattttatggggagtcgaaaagaagtctgcgtgggtcttcttgggagcaacttcggactttggctcatgggaacactcttccttggtgtgtgattggtgatatgaataatgttctctctcaggacgacaaaagagggggacacccctatcctaactggttaattgatggttttcgggatactattcaggagtgtgggttgattgacttagacattttggggcatcagtttacttgggagaagagtcgtgggacggataactggatagaggttcgtttagatcgtgctctggtgactgaaaggtggctccaactttttcctcaagccaaacttattaaccttgaggtatcttcttctgatcattgtcctattttacttgatgtggttattcataatattgttcctgggaatcgtaaattccgatttgaaaattgttggcttcgggaaccactctgttatcaagtagtgaaggagtgttgggaggagtattatttagtgggtatccaagaaaagctccaaaggtgtggggagttgctttcggtttggggcaaagattactcgggtaattttgcttctcgtataaaatattggaagaatgaggtttgacggtggaaacaaggtagagatcctgatgctattgctaagtataaggaggctgagacagaactttttgaggttcttactcagaatgaggttttttggcgccagtgatcgaaacaattgtggttacaagaggggaataaaaatagcaaagtttttcatgcaatagcttcttctcggcgccgtatgaatgctattgataaacttcagtgcgaagatggaagttgggttgattgggactcgggcttatttgatgttatgtgctcttactttcagaatctgttcactagttccaactgtactatggatgatgttcttgatgtgctttctacaactgtgactccacttcataatgattctcttttgcaaccagtgactgatgaagaagtgaaagcagcattatttcagatgcatccagataaatcccctgggccggatggtatgactcctggtttttatcaaaagtgttaggcaattgtgggtgatgatgtcatcaaacaggtccgctcttttttcttatttggtcatttgccaactggtcttaatcatactaatgtagtgttgatccctaagaagaaaaatgccactactatgggtgatatgcgtctgattgctctttgtaatgtcctttataaggtgtgctctaaggttctagctaatcggttgaagcacgttcttccttctgtcatctcagaaaaccaaagtgcttttattcgggtcgtcttataactgataatattatgatttcgtttgaggtaatgcattatcttaagcagaagagagttggaaaggaaggttatatggctcttaagcttgatatgagtaaagcgtacgaccgtgttgagtggctttttcttaaaaatatgatgctaaaaatgggctttgatgttcgtgttgttgatcttatacttgcattgtgtctcaacggtcacatacactattactcatggggggtcgtgagatggggccaattgttcctggaaggggtctcagacaaggtgatcctctttctccttatttatttctcttgtgtgctgaaggtttttcttctcttataaggagattcgaagctaggggagctcttcatggttgtcgtgtgtgtaatggtgccccaattatttcacatatgttgtttgcggatgactgctatatctattgtaaggctattgatagggaggcgcatagtgttcttcttttgctccagctatttgaacaagcctctggtcagtgtgttaattactcaaagtctactatcttctttagtctcaacactacttcggcttccagacaagaaatgtgtaaccttctccgtatgaatgaagctccaaagaatagtttgtatcttggactgccctgtattatgggccgcaataagaatgtcattcttggctttttgaaggacaagatgcagaaaagaatccagagttgggaaggtcgcttgctttcaaaagcgggcaaagaggtgttgattaaaatagttgctcaagctcttcctacttatgctatgtttgtgttattgttgccggtggaaacttgtaataagttagaatgatgagtaaatattggtggagttcgggttccaatcagaaccgtggcgtgagttgggcgagttggaataagttgtgccgtcataagcatcatggtggacttggatttcgacatttacgggatttcaacttagccattgtaacgccctaatggtaaggcacgctacagtgctttttcaattactgtgcaatctttgctaatcaaagaaattt

SEQ ID NO: 226814 - DNA, 2999 bp, Cannabis indica
ggaacattgctatagtggggctcgatagtttcatgctgagccgcagacttctctccactgccaaggccctcagtaaatggaacaaagaagttttcgggcattgtcaatttaaactccaggccctgtaacgtcttttgattgaagttcaaaatcgaatcccctctaaggagaatgtcgaattggaaggatcaattatgcttgagattgatgaagtagaaaaacgtcttgaatctatttggaagcaaaagtcaagggaatgttagcttaaggagggagatggtaattcaaaattttttcatgcttctgtagaagtgagacgtaaaaggaattttatttgggccattaaagaggaagatgggtcttggattgaggggaaggatgctataagtgattatttcagatctcatttcatggaactttttaattccacgaatcctcatttcgattccgagttggagagcctgttagagtcgtgcatttctgagaatgagaattctttccttactcactccccatcatcggaggaaatcaagaatgtggtgtgggaaatgccctctctgaaatccccaggcccggacggcttccctacgaaattcttcaaggattattgggatatagtcggccctcagaccattgagttcgtgcaggagttttttagaactgggaacttcaccaaggagattaatagaacttttatagttcttatccccaagagagccaatgctaactgttttgatgaatttagacccattagtctatgcaacacttcgtataaaattgttgctaagctcttggcgaatcggcttagcaaggtgctggacaaaatcatttctccaaatcagtcggcctttgttcaaggaagatggattgtggagaattcaattattgctaatgaggtgttctttgagctaaacaagagacaaggaaactcggcttatgttgggattaagtgtgacatgtcaaaagcctacgaccgcttggaatggagttttattttgaaggtaatgaaatgcttgggctttaatcaattattctgtaagttgattcactgctgtatttcttcagtcaactttcaacttttgctcaatggtggattaactaagtcctttgctcctaagagaggccttagacagggcgatccactgtcgccctacctattcataataggtgcggaagtgctcactagaattcttttgagggaagaaggcaatggtagtttgtgtggtttttctttctctcgggaaggtccttctattacccatttgatgtatgctgatgaccttctcattttccttaaggctgatcaaggtaatcgtgagacaatcacccatgctcttgataagtactgctgttggtcagggcaaagaattaatgtggccaaatccaaggttttcttctcgaagaactgccctgacagatgccgtgaggaattccttcaggagttgggttttgaagagatgttgggggaggaaaaatttctgggcaacccaatcatttttaatggaaggcgaagctctgattttgactttgttattgaaaagataagctctcggctggaaggttggagggctaatatgctctcacaagctgggcggttgactctaattaaaagtgttcttgcttctattcccatctatacaatgtcaactttccttctccccaaaaagactactgatagcattgatgccattataagaaagttttggtggactggccaatgtaaaaagggcagatatttatctttgaaggcatgggatagcctctgtaaacctaagtcttgtggcggattgggctttagacgagccaaggacatcaacttctgtttgctcgttaaattaggttggctcctagcctctggttctatgtctctttggactgaggtcattaatacaaaatactgcaatgatgctggattcctatctacttctcttccccctaaagcctctcctgtggcaagaggcatttgggcaactagggacttcatagctgatcatagcatttggattggtggccaaaactcctccattgattactggtgccaacaatggatctgtggagagggtactattatccacaaaggtctcatcaatccgttgactacgaactcggcctcggttaatgacttggttgatagtgattactcgggatggaatgagcgaatgattgataatgtctttattcctgctgtggcttcgataattaaatcctcggacagaaattctctcccatccatggacgtggcctgttggaaatctactaaggatgggagtttctctttgaaggcggcgtactgggacttaaacaagataagatttgctgaaaaggatgatatctgtggaaagatttggcttgctaaaattcatgatcgattcaaggtgtttttatggaagctttgccaagatgccttgcctttcggatcaaaattgcagagtatttttggaaagcctcctggtgcttgttctctctgtggcattgaaggtggggatgtcatagatcactttgttgctggctgttctgtcacgaaacggttatggttttcatctcgatggggccttcgggctgaagctctctcatttgacaatgggagagagttggttgcttggctttctcagcctccttttcatcatcttctccattcgcaggaattgtccagcttttttctttatggtgcagttttgtaccataaattgtggcttagccggaatgatgcttttcataacggggtgcctgtggatattaagattttgcaaaagattattgagagctgttttgctgagcacgacagggttcggattgagaaaggagttagaccgaagctgtgtcatggtgtggcggaaaccagatggggtctcccgaggcctggaagagtgagaggatttgtggatttcgcaacggacagggaggttggggcagttgccgtggtcctgtttgatgcctctggatcggttatggcttttggtgcaaagaaagtaatggttcatgatgtcgttcaaggggaa

SEQ ID NO: 226815 - DNA, 1733 bp, Cannabis indica
tttgggtcccgagtccgggtccgtccatagtccaggtgagggtcttcaatccaggtctgcatcctgggtctgtgtctaagtttgagttcaagtccaggtttgggtttaggtcctaagtccaggttcgagtttggatttaggtatggatcttggtccgagtctaggtccaagtttgagtttggatcctggttcggtctggatcctgggtcggggtccgagtccaggtccgattcccaaatttgaacaccgataatgagtcgtgtctaagccccaggtctcgagtcccgagtctagatcatgatcctactctagttctagttcaagtcctcagtccctttatgggtctcagctccgagtttgggtctgtggtcaaatcatggatcccaggtcctaggtcctcgattcaagtaagggtcctaggtcctagtttgggtttgagtaccagtttgggttcgggtctcggtttgagtgcgagtcttgttctatcatcgtgtctgggtcctggacttggttctctgcccattttgggtctaggttccgttctagttctcgggtccctagtctgagtctcgagtcccgagttccaagtctcggtctgagtcttagtcctactctggattcgagtcctaatcaaagtccaagtttgggtcccggtccgagtttgggttgattctggttcttggtccgagttttgttacgggtttgcgttctggtccgggtctcgagtgataggtttcgagttcagggtcctaggtccaggttcaagtccgggtcgggttaaggtctgggttcggatctcgatcgcgatttaggtccaggtccgggtttgggtctagttctgggtccggttctgagtctcgttccagggtccaagttttagtttcggttctaatttttggtcttgagtctggctctaggtctgggtactggtccaaaactaggtccgggtccgtgccctgagtcccgggtcctgggtcaagattaggatcccaatcttgggtccccgtcatgttccagtttgggtcccgagtcccggtccatgtctgtgtccgtgtccgtgtcaaggttcaggtttgggaccgagaccgggatcgggtcttcggtgtcggtcccagttttgggtcttaatttcaattttgagtctgggtttgggtccctaatcaaggtctgggtcctaggtatgggtccgagtctaagtaagtgtctgagtttgggttcgtgtccggagtctcgatctaggtctgggtcctggtcttggcctgattccgattctaggtccaggtccgagagtgggacctagtcttggtcatgttcctaggtcctagtttgctttcgatttgaaattataggttataggttcgggtctggggtcgagtacgggttggagtcctagatgcaaacactgattacgagttaggtccaagaccgagtctagatctagatcccactcttagttccctatcttgttccacttcgggtgtcgggtcccgttctgggttctggttcaggtccctgtctgggtttgggtcctagtttgggtctcgggtcccaggtcctggttctagtgtcccagtaagggtctgggtttaggtctgggtcctggtccaggttcgggttccagttcttaggtcttggtctttgtctaggtctatgtgtaggttttggtctgggtttgggatcagtttcggtcctaggaccgggtcctagtcatagtttcgatttggattctaggt

SEQ ID NO: 226816 - DNA, 2021 bp, Cannabis indica
tatccagtgcatctctatgtacatcgatacaaatcttactgatatgctaaactaatggctttaaaattggcctaacatatattcatcgatatttagtgcagctctatgtacacaaatttcccctctttctaatatgttaactgtaatgaccgcatgctaaattatagattagtaaaaataataagcattaattattagcgctttctaattatatatgattttattttgttgtgggctccatttttagaaatgggaattggagttataatttctcaattttggagatattattaaactctaagagtattatgtaagctaaatatgaattgtgtaatttttataatttttgctcggggatgaccaaaaaatgcgatggatggtcgttagacactacttcaaaagggctcattagcgtcgatcaatgcatctcaccaaaatggttggccgaggcaaaaaaataagcagagactttatgcttcagagtatgaccgaagctaaaaaaatacaaatttgttgataagttaagcatctagatacatattcaaccacatccttcttcataccgcactactagtaatagggtttaaaaattggtacattttttgttgtactaagatttaatgaatagggaattgtatgagcttcatcaagaatttcctttctaaattcgccactgcttgaaatgcaaactcacattgaaaacgtaatatcttgttagctggtaaaaaaaaatctttagctcggccagctatgacttcttctcgaatcttcaccaattctggatccaccaactaagcatttctaattcttcctaacaagtctgattgaagagccaaattgttaaatatgccaaccacaaactcaatacctgatttgaccatatcagctgccaattgaggagaaattatagttgtactgagaacctacccgtgacctttcttgcttaaggcatctgccactatgttggcctttcgaggatgataaaaaatttcacattcatagtctttaactaattccaaccaccacctctgtctcatatttaaatattgatgagtaaagaaatatttgaggctcttgcgatcggtgtagatttcaagcttttctctatagagatagtgtcgccaattcttcaaagcaaaaccaactatggaaagttctaagtcttgagttgggatatcgtcgctcatactccttcatttgatgagaatcataagcaacaatcctattaacttgcatcagagcatcagaatgcttgctagacccttgctggatgcatcacaataaactaaaaaattttcttgattggatggtagagctaacagaggatttgtgatcaattattgctttaactcttggaaacttattttagactagtctgtccatataaaccgctcattcttcttggttgactttgttaaaggcatcaaaattttgaaaagcccttctacaatagaatacttttgacttcagtgactgtcttcggccatcgctaatccctaacgaattcaatctttctcggatcaaccatgatcccctctttactaataatgtgccctaggaacgacactcgggataaccaaaaatcacacttcttaaacttgtcataaattttatgttctcgtagtcgttgtagaaccgttcgtagatactcctcttgctctgcttctgattgagagtacacaaggataccatcgataaatataataacacttatattgaagaaatccttgaatagtacctattgttggaaattattttaccaggatctagatttactaccaagtatgtttcattaacatcctaatatgaattctaaaacaatgaaataaacacatataaagtttagtaaaccttacattgaatgcagcggaatataatgactccttccgttcagatctctagcccttgattcctttctgtagcagaacataatcaagatttgaaccttgatctctttctctccttcatttgatgctcattctcctacttgttgtttggattcttcacaatcttacacacta

SEQ ID NO: 226817 - DNA, 2284 bp, Cannabis indica
ttgtccgttgagtagatagttgattgtaggagccatccaagtgggtgagctatctatcatctcgatgtcttccttttcacatatacttgtctcatttagcatttccaccggaacaaagtttagttcatccaagccgttctacgaggccagttttgctaaggcatcagcgttaaagttttgttctcttgggatttgctcgattttgaaataaccaaacctttccaagttcttccaagctctctctagatacttagccatttttaggcccttagcctagtattccccgagaacctgatttacaatcagttgtgaatcactatgacatatgagattcttgaccttcaatgcttctgctatcctcaaaccagctaccaaggcttcatattcagcctcgttgtttggtgcgtcaaattgaaatcccaaagcattattaaacttaaatccttctggtgacattaatatcacccctgcactcgacccttgctcattggatgcaccatccacaaataacctcaacgtgtccgcatctcgctgaacaagcggaattttgtctagagttattccttctattaagaaatctgctaaagcttggcccttgatggatgttcgaggatgataagttatgtcaaactaccccagttcaattgaccattttatcaatcttccagaagcatttggttttgataaaacttgcctcaagggttgatcaactaacactttaattgggtgtgcttggaagtaaggtcgtaacttgcgagatgcatggattaggcataaggcaagtttttcaagagggggttacctcgattctacccccagtaaccttttactgacataatacataggttgctagtgctttcactcttctcgcactattgctgcattaatcctgtcttctcagagagctaaatagagaagtaatgtctatccagttaccaattttgccaaaactggaagtgttgaaaaatgccttttaatgctcttaaaggcctccttgcattgctctatccattcgaattttttgttgcctcgcaatatgttgaagaatgtagacacttatcagttgacttcgaaatgaactgttaagttctgccatctttcctgttaaggcctggacttccttaggcttcatttgttatggctattctatcaaagccttgattttctcagggtttacttcaatgcccctcgcgttaactatgaatcccaaaaaaattctggaggagaatctaaaggaacactttttcaggttaagcttcatattatacttccttaatatttctaagcactccgcgaggtctgtagtatgacttccactttttaccaattttaccaacatatcatcgacgtaaacctccatgtttcacccaatttgatttgtgaacatttcattcacaagtcgttgatatgttgccccaacattcttcaacccaaatggcatgaccttatagcaataaagtcccatgtttgttacaaagtttgtatgttcttgatctgggacatgcatttttatatagttatatctcgagtatgcatccatgaatgacataagctcatgcccatcagttgcatccaccaactggtcaatcattggtagtggaaagcaatcctttgggcatgccttattcggatcagagaaatctatacaagttctccaagttctgttggatttttgggatgagaacaggattggctatccacgagggataaaacacctcgcctataaagtcgttgacctacattttatccacttcctatttgagtgccccttgtctctcggaatctaagggtcttctcttctgtctctttgctgggtagtttgtatcgacatttaagtgatggaagataatattagggtcaatccctatcatatctccatggctccaggtgaattgatcctggtttgcccttcaaaaacttattagctgctatttcaattattcatccaggttcttcccaatgtaaacacactttaagtatttgactttaaattttagattctacatagaaatttttatttcagtttccaagaatgcattggacaatatagtatgattttcacaagttattaatatctatttcctgtcaatggatccaaactgtatgttaatgtatggaatatgagttttgtattctgtgaccaggatccacttagactattctaagaaatttttattgtaactaaaccttttctcatatataggacataaccacataatttatatatctattgcatttgtatcttgttcatactggttttgacaagatcattctctgcaaagag

SEQ ID NO: 226818 - DNA, 1431 bp, Cannabis indica
acgccaaccattggtagcatgcagtgagctgatttacaagccttcagtctcgacctcgaggggtaggggacaggagggctcgagaagaaccatttttggatgagaactagagaatttgacttggtgcacagacccagtgggttgttcattggcactcgtcgcagctgggacctccttctctagagacttagttggctcgatggtgagcatgcctaaggatttcttcttgttggccttggttttggtccttttaagctcttcagtagaaccataggcctcacaaacttggaaagctctcttcttagacttcttgttgactgggcgaggactcttgaacatgttctccaaatcctgatccatatctttgaggagacggaagcacattagcacttaagtaaaataaataagtgaaaatggggactaaactcccatttgagaaaaataccataattttcagaaggtgacgagggaggactataaaattcactaaactccctagatcatgtgatcataaatatgtcataagggtttagtggatcgaaatccccatttgaatctatatgacccgatctatccaacatagtctaatactgctcggcaatcccatagtatgaactaatgcagctaatctaaacgtggaatttcgggtactaactatcgaacctatgtgttatgcgatctacgagaaagggattatcgactatctcggaaagatactaggttgttacgttaggctctaagcactgtgggtgaccacccacattgattacatcaggatgctgcttcttctcacggggcagttctctgaagatagtgtgcacgagccacgtagtccacgctctctttgttggctggaactgtgaccttttgccatgaagaatagttgggtactttgtagtcacaagtaaattcatccaaggcaagaaggtcagcattcctcagattaatctcattgcataagaagactgccaatctcagcccgaacagaagacttaacaagattttgtgacactcggctatctcaggagtaggaactggccttagaggaaccgttgtgaacaaataacagtttaaaaagcaacctcaaaaataaaaatcaatatatttcaaggttaagtttagaaagagaacttacttataatgcgaaaggcgattatgtttattggagagaggctcgtcgtccaaaagaagtcttctttaaactgtgtcttgtttggcaacctaactatgatcctgcaatcattcgtatcagtgttgaggtagtaaaagcctcatgcggctcgcttccttgcaggaactgcctttattgagtaaaagtagactatctccaaaggagtaggacactcccatcctaaaatatgatataggaccttcaattttcattattaaataaatgattaataaaatacatttttttaaattaatgagctt

SEQ ID NO: 226819 - DNA, 1440 bp, Cannabis indica
tgcaaaaaataggataatatttgtcttccaagtctgcgcgggaccttcctggtcgcacatggacttcactcagcttggagtcttgtttgactgggtgacacatgtctttaatgatggatgttgatctgatgtgactctgactagggatctcttcgctatttgaccatttaatgcttattgatagttataccttaaattatggtttgatatttgagcacgcttaacagctgtactccctgcaatgagtccttaacgtctacttttggggggaacccaaaaaattgaattttaaaatgattaattcctttttcagattgcttataaataggacttggaacctttggtgatcattttagccattttaacttaaaaaccaaagcaatatattttcaactaagttttctcccaagttctttgaggaattcatagaaaaattcttgacgatacgtgagcagagcaagaaagtttcaaatcaatgagtaagttcctcattccttacttttatacatttgcaatgaaatgtatgtatgatttctaaatttttcactgtgaattttgcttgttcttgaactgttctaggttaaccgtagaataactaggtttaggattcggaaattccattcatgtttaaccataatacctggatatctaactgcgcttcgattttaaccttaaaactttcatttccactcgtccataagattttagcaaaaatcaaattccaattgaagtttcaaacttctgggaacgaaaattctatttctgggtgaaacctttacttttgattctcaatcaagcctggtcggcatatacaatctgtttttcatttgttactctaaccaactcttattctcttgtctcccacctattgtagatgaacccttgtgagttttggggaggcaagcatcatatcgaccaggacttgcttcaactcctatacgaagatcacacatgtctcattggtagcccatccttgtctagtgacgatcttttaaattctagcttcgaagattggaaaatgagtagcgatcatacacctttcttggagcccgaggtgcaacaccatttctatcttggccagattcgtggtgaaggatacgatcgcttcatctgggaacttaggaaacgttggagacgttatcttcctgccctctgggcgtacagggtccattcgagtgcagttgacaccttgcccgagggccgtccaatcccagctgcagagggaaaacctattgccaattttgttgtgaccatttcaaggcacacttttgatagagctccgtccaaacgtagaatgatggtacgaaccaaacagactgtcaggaaaccttcatatgccgacccccatatcgtccgtctaactactctggccagggcagaacatgttggaaatattttaccaggatctagatttactaccaagtatgtttcattaacatc

SEQ ID NO: 226820 - DNA, 1564 bp, Cannabis indica
gatgtccatacctctatgcttcagattggctttagcaggtagccaattgtggcacattctccacccaaaaagcttcattcgagggggaagtgaaggctccaaagcattttccaccaactctgaattgctgtcaaattagagcatctagtgggattaagattcatctcccttccaaccctatacccacttttcacaatgtattgaccattaggagtgaaaggccaaattaaagtgtcttccatatataaatctataggaattccttggatccaagggatgtcatatttgtgaaaatatttggtgatctcccccatgtcccaattcccatcccaagtgataaacttatgaagtttagtttggggtggaagaccgggaaattgagaaagagtagctacatgtggccggggaagctatttatcttcccaaacattgatttctctaccatttccaatcctccatctagcaccttccttcaaaattttcctaccccaataaattcctttccatacacaagaagctcccgcgggacaccctgcttgcataaaagatttgttaggataatagctatttttcaatactcgcgtaaggagagattggggattatgaataagcctccacccttgtttggccaaaagggcttggttgaactcagttaggcttcgaaaaccaagacatccctcttccttgggtctacataatttatcccaagtactccaatggagtttcttgtgatcttttgtatccccccaccagaaattagcggccaaggagtgaagagatttaatgagtttttttggaagccggaagcaactcatggtgtagcttggtatagcttgaatcacggctttgattaatatttcctttccggcttgagagaacattgaagatttccaaccttttagtttgctccatacttttctttaatgacttcaaaaacctcttgtttctttcttcccacaaagctaggaagccccaagtatttagcatgatgtgagaccagccgaacccccagccgattagccatatcctgccccatgttcgaagagatcctcttacccatgctcacctcagacttttctagatttacttgttgacccgagagcctagcatatctctgcaagatgttcttcatcgtatcacattcattctcctttgcctcaaggaaaacaaagctatcatctgcgaagaataagtgcgaaactttgattttatccctcccaaattggatcccatttattcggccagccctctcagcttcatgaattaggcaagaaagaccttccgaacaaagaaggaaaaggtatggagatagcgagtcaccttggcgaagaccctgggtaggttgaaaattcccaatttgttcaccattaatgaggaccgaaaaagtaacactttccacacatctcataatttttccgatccattgttcctcatcgcccaaaccccgcatcattgttcttaagaaattctattccactctatcgtaggcctttgacatatccaactttagagccattttctttccatttccaaatctttttgtcttcatacaatggaggctttc

SEQ ID NO: 226821 - DNA, 1507 bp, Cannabis indica
ccctctgcggacctttctctttcaggaaatctgagtgaacctttcgcggatcctgtacccttctctttctccctgggatggaagtagggttttttcgttgattttcttcaaagggataccgtatagggcttggttccatagacttgtgcttctgagtgcttggagaggactcttctggggtttcctcgagtcctgctgggatggccttagggtgtatgtaaatccctactgtctccatggcgaccatcacctcttgcatctttttattttgttctttagcagctttttgcctttagagcagcagctctgtgtaactgccttcgtcgtaggcatcatactcgtcaaagttttcctcgtacttgtcatcgttggcctcctctcgctcctcagaatccacgttgactcttgaggccacttcctcgtcttcgggattttgagcatcttgattagggcggggctaacgtgtgttgcgagtttctaccattgctgcttcaatttataagattgttgtctgtttgaagacgcttccttcagctctcaatgaaagcaccaaaatgttgacccaggttttcggcaaccaattaaataatatataagaaaagctgtaggaagtttaatgcatgagatttttacgtggttggggcattaaatagccttagtccacgagtctttgttattaatgagagtatttattacagagaatgttcttggtgaatttctctcctattttctctctctgattcctttttcccccagaatcctcgacccccttctcagtgtgtttgtggagtatttatagtatttttctagggtgatccctagaaatgaatcacttgtctttctgtgcaggcttaatagggacacatattcccaatagatacaaaataggaaatacatgacttataccgtaggtatcttaggggttaggtggatataaccttttatcccctcttgattaatgtgatttctcataaagtagtcgtcactagccttattaatcatagcgtaatagctgaaacaggggggttacgccatctgtcatatcgtttgtggtagttttaatacatcttcccccatgcggcatttaatgcaaggtgattgttcaatagagtccagtacctcccggaactgctttagtatgtccatggcctctgggagcgtaaagagccttttcatgtcttcttcgggagacaccttcccagagacactcctctgttgtctaagacttagttgatttctttaagagctggtcctctcagctccacgtgtcatccttatccaggtccacgtattttgggtaaaatcaagggcaacagtttcattttcagacatcttaagatcatataatttagcttgaagcgtaataaacctagaacgctttacatcagatgttctttcaatctgagtttgaaggatcagccaagcatccttagcaaattcacaagaagatataagcttaatatagccttaacctactccattaaatatagcatgtaaagctttgcta

SEQ ID NO: 226822 - DNA, 1758 bp, Cannabis indica
aaggagacattattccgctgccaccaatgtaaggttttcttgactttatatgtgtttaattatcgttttagaaagttcatatttagggtgctaaacaacatacttgtgagtagatctaagatcctggtaaaataaatatccaacacttggaccaatcggtcatgggatcaagatttagctcccatacctccccagtataatcacctcgaaaaggcccatcttggacctcccttagcctttttattaaagcatcggcctctacattgcctttgggtagctcgtccaccgcataattgtgtttggaaatgtggagttggacccgctcttcatcaggataggtcggggttaggagaatggctaagggggcgggaagtcttcagtttcagtccggatcctagagttagagctaggactgggggtggcttaccgtctaggcttttttgaaggctccgaaagggaaaccacacctttccattcccagtcaagtaggggtacctcttcctcctcttccttaatcagtacaccacctggttcccaggtacctctttagtcgggcccccaggagtcaccatcacctggggaggattaggcacctccaactcagggctatgagtggtggctaacatggccagcaagttgtccatgggttttgctgttcaaagcaaacaaaaagagttaaaaaaaagcactaaggaatcacaaatgcaagtataacacaacaaggctaatcctaccctgacgctctaatttttccctagaaaattcataaattaaaaagttagtgtcgtcatcccctagaaagctatctcaaggaaggaactaactcaaggtcatgtaggagaaatgatccaaaagaatgggaacaagaggaccggagcccatttgagactgacccaagaaacgactcaagttagaaaaataaaaacctttgcattatctccccactgagtatggggcatccgaaacttatacaacctcatgtcaaaacccactggccttaagtaagaataatattggatggatggaacaaaatgaaggttcaaaggggacttacgggctctagaggtaccagtaccgggggtcccaaagttcagaacaggaaaagggaatttaggcctagctagcgtcttttcttttcctaccttctcttggatgagcctcccagaagcctcttagaggggagcgtaatggagatcctactccttcttgtatctaacttgttgtatttatcctcgacagttgaaataatgtcggccctgagcgcctttttgctcccaggattatgggtgttagggaaaattacttcggaaaggttaaatttctcaaccgattgaccctccgacaattggcagtcgtcaccaaatctcctacattcaagtcttctttcttatagtcagcaagcacatggacatggttcaagaaaagttgagttggagcagtgcggtgcattggggggatcctgacccagtccgtcaataggtccaggggctcaaaggctgtaaacccaaaagaaagaaaaaactatatgataattccttaacgttcttttgaaaattgaaggtaccggggtttcattggccagatgagcttgcaacttgtaaaatccatctttaaatttgtcacccttcttcggacacaaaaagaagtttgtaaaaatataaaatttcagcggggctgggagcagcccaacccctagtcagcataaaattaaaaaggacttgatagcaggtggtaggcttgaggaatcagttggcatgg

SEQ ID NO: 226823 - DNA, 1585 bp, Cannabis indica
gaagggagagatgagttaccaatgtgacttatagcaattcttttgccattatcaacagccactgcatctgaaccagaatagggagttttagagtccaaatgttccatgccttgagcaatgtggttggtggcacctgtgtcagcataccaatcataatcttcaacgaattctggtatggatgaactggaataaacttggggatcatcatggtcgtcgagttcagtaagaaaagctttggagtcattgatctttggtgtcacaaataccttatcgaatctgtagtgtcagatcgcagtagtatggcctgctttgtggcagacttgacaaagtagccgagggatagatgcattgtttcttggataggtacgatcttgagggcgttgcatttggggataactacgagtttgatttgcaggttgtcgataactaggtctgttgttgaatcttgggttgtggatacttagatggacaaaatatttggattagagtcattgacagtataatgtctttcaagcctgctttcatgagttagtaatagagattgaatagactctatagaaagattatccacaagactggtaacatgaacaacaacccgatcatattcaggtcctaatccattaaggatatgcataacaagatcactgtcatccaagggatgacctgcagtagttaaagaatcagcaagaattttcactttgtcacactaatcagtgatggaaaggttacctttcctaattgttgagatttgcgatttgatctggagaagtctggccttagattgactagcaaatctttgttccagggcacgccaagcttcatgagaggtattatgttgagccagagaaccaagaatggtttttgtcatagaagatcttaaccaattgagcagtaattgatctttgcgtttccaggtggtaaattcgggattggtggcgccattaacaagaactcgagcgggagcaataccagtgagcagtatatcatcgagaccatgaccgatgacagtggggatgacttgtgatttccacgcaagaaaattggttcgatccaatcgaacagtgagggaagaattcagcgaattctgaaaaggattccattgttgaatagctggagaagccgaagtagcagagtttggagcaggagtttgagcagtgagttcagggtgtcgaggatccatgaaaacgttggtcaaacgctatttgataccatgtaaaatctgttgaacttatctatgcaattctaggaggacacaattgaaaaattgaatcacaagactttgcaaaagttagcaagtcttgattagagcatggtatttatagaaagctaagtacagagtttgttacagaacaaagaaacgaaaaataagcaacaaaagggaacaattacataacaaccactagctgttataactaactatgcctaactaactctgtagacagtttatcagaatcaaatccaaatataaaggaacaatacatataaggtgaatctcatgatattttacaattatgttatctttatgttttcctttaacttttagtttctcagtaaaaattataaaatatttattttattttctcaa

SEQ ID NO: 226824 - DNA, 1452 bp, Cannabis indica
tgaagatgctgcaattgttgggaagctgcctattggaggcagatatcagtgggattcttgctcgcttcatcttgaattctgctttataaatccttggcttctctgtatttcaatgtgatgtcacccacttcactcttattgaactgaattagatcctgtctaacccgataaagcttctgcatgataccatccaaaccactcctagccataggactttcccaagcatttaacaccctttgcttgtaattaggataatcaacccaatagttgcaaaatctaaagggtttgaaacccacattactctgctcctggtttcggattatgcaaaaactatgatccgaaacattatcccatttgaaaaaagcatccgctatggtaaaaatatccagccacaatttgttaacaaacacccgatcaagcttagagaaaataaggtcaccaacctcatgcttatttgtccaagtgaaaaaggatccagtacacttgaattcctcaacttgacccatggcgagccaattttgagcatcttcaatgtccttggcttggatttgtctacccccatttctatcttcgtaagagaacatagcattaaagtcacctaaaataacccaaggcaagttcgggtgaccaatactacttagcattgcccacaaattcttccttttctccttagaattacttccatacacagctgtgacaagaaaagtttccttgtgcccacaaactttgattttgcaatggactagttgagcatcttcatgaattatttccacttgaacaaatttagattgccaaagaattaaaattctacccgagatgggatggctagaataaaactcccaattaggaatgttattttcaactatctccttaactttgtcatgtttcacctttatttcaaacaaagctccaaaccccactttattcagcctacatacattgagaatcacttttttcttttctctcttattcatacccctcacattccaacctagcatattacaaacttccattaaaagtaacgaagataggaggagccaaagtctcatcgttagtctcttgtaagactgcatagccattttttattttctctgttactcttgtctcagctactgtagcaacctttagcccttttttctttggagtaatccattcacttacttcagcaccagccaccttcaatgacccctggtttttccctttttgcacctgctcataagcaagtgtttcttctactgccatatcagtccctgctttgtcacttacatcaggttgtatatcctcaccaataggtttagccagttccttgttaggagctgttgtaaccttcttcttccaagccacctttttatctttgttgcagttcaccactgtatgccctagtaaatcacaagcagcacatttcgttggaagccattcatactccaccaattgttccaccaactgtttcct

SEQ ID NO: 226825 - DNA, 1813 bp, Cannabis indica
ctctaagtgatacactaaggggaggacactgatcgaggaacgaacctaaaagatgacgctcatccctggaaaagtgggggaagaccgtttctctagggacagaccacgtttcaagaggtagccgttttcctaagataataaataggcccacactgggactgaaaagggggacaaatattcactctatctctatagttttatgattaaacttatcatttctctacgatctgaaatactctttctcatcccgataagcaaggtttgaccgtcatcacgtaaccatagacacaggaagtatttatttacatttcttattttcttttctacttagcactataaatttattaacttgaccgtcggagtgccttcggccggcaccaccccggtgtcccaaggtttcacggtcatcctttgtctttgttccgcaggttgtcggtgcccactaacgctcattccgaatattgtagattttagcgtctacaaggaataagctaagattgggtgtattggctatacatcaaactgggctgatatttacagtagaagagatatcgtaaatttaccgtaatatctgatctaggtaaatatctaatagttgatcttagaacaatgatcttaatctcgagatgattagcttctggcttaactgtgttatttttgttctttaacttgttcgttcgcagcctacctgtaggtttggctcaatacttacatcttgagagtagggcaatacatttgagtgggagtgctaatcatagacatggaatctatagcatctgtaactagatataagtgaaatgatgtttccttagagcttgtgtaatagacataaaagaaagagctcttattttggtagttatattaatttctaaaatattatttataggacgccaagtgtttaagaataaaatacattaaagggtaacacagtagttttagtccctatcaatgtagacaatctaaaaggatcattgactatttagattgaaataattgataattaatagcgtatctattatcggagaataaagtgttctatgtaatcaagagtgcaattaattagaattagaaaatcaattagaattttaaatgagactagatcttatttgtgaattttactaagcaaaagcgaatttgagaagaaaaaggaaacaaagagtttatttattaattaagagactatgctaagtctaagtaataaataaattaattggtaattttatttgataattatttataattattaaatagaaaaataacatttaaaggcttagaatagaaaaatggtattattgagaaaagataaatgttattccaacttttatcctcatgatgtgacatgcttacgtagatagaaccagtgcaacatgtcagtacatctcactaaaagtaaggcctagtcagcatccgaataaacgaagacctcaacactccaacgggcatcaagtgagctagtcggccagccttaagacatcaccatggtcagccagtctggcctccataggggcctggctggccaaggagtgcactccaggctttcctggacatttctacacgtggataacagctatgggctacgaattgggccctaaagcccaacataatggctgaatgatatctagaataagggcactttgatcttttgtaaatatctaacaaattatacgaatactaagggatttgaactctaaacctagagttttaggcctcctttataaaggccttatcctcaggctaaaaacctaagttgcctctaagctagaaacctacttctaaactttaagtgtctcataaactatctcttcctcacttc

SEQ ID NO: 226826 - DNA, 1877 bp, Cannabis indica
ctgaaaatgaacttttttggatttgagcttcgttcccgacttttcttactacttcaaaacattctttgtaggtttgtcagaatggttcttacagtttttagacttgaccatcatgtcatctacataaacctccatgtttcttctcagtagatttttgaacatctaatcgagcaactattggtaagttgctcccacattctttagcccaaaaggcacgacaaggtaacaatatacacctttatccgtttggaagctagtacattcttgatcagccaggtgcattttaatgtggttgtaactagagtaagcgtccatgaaagataacaactcgtaaccagatgtggcatttaccatttcgtcaattcgggataaagggaagcaatctttgggacaggtcttgttcaagtttgtgaagtcaatgcacactcaccacgtcttgttgggttttggtacttgaactgggttagccaaccactctaggtaatagacatcatagatgaagatatgttcgacaacatttttcccacttcttattttaacgcctctgattttaccaggtcaaaatgggatgccaaatctactgcacagtacgtttttgttaacgtttagaacatggcagatgatgtttaaactgatgccagtcatgtcctcgtgactcgatccaaagatatttgtggaatcaatctttgatggtttccactattttagttctttcgctgggatcaatgcccttcccaacatggatcacctttgtcgaaacttgtcacaaacttgtatgtcttccaattcctccataggttcgagcacactcttagctcctatttgagcatctaactcgtcttgtacccctactggatttctctctttagtttgctgagccattaggacagcctgcttggtagccacattataaaactttctagcttccccttggtttcattggacagttcccacacctaccgtatgggtaggaaacttgaggcataagtgcctaatggaggttatggcttcaaaatccaccaaaatcggacatcccattatagcattttaagttgttgggcaatccaccacaacgaaggtacaatatttgaatgtgctttgaggagtctcagggcacaaagtcattgggagccttatttttcccatgggaatgaggaaatttccatttaacccatgagctagaaccacttggagacaagtcttagtccgtgaggccaatggcaaggaaagcttctttgaacaggaaatttatagaactccaattgtccaccataattcggttgactatcttgttggcaatgggagtttcaatcaccatcaggtcatggtgtggaaaatgcaccgttcaggcaacttcttcaacaaacattatacgctggtccatgaggcgaggtctttgcattggcagtgggcctacttcccatacctcttcattgtgatccaaggctctgccgtagcattttaactcattaattgcgggttgaaccccgatatgggagcctccagagatcatagtcactctcacatttggcctaggcggctgttcgagtagatccccttaatttggtggattgctactaaagaagcctgtaccactcctccgagtggtgcttgagctctggcttgcccttctctcatgtgtggcaaatgatttcttatctacttatacaagtggcctagccgtattaagctctcaatttcatcttctaaatgtttgcatccattgattgtatgcctaatgtcattataatacttgcatcgtttgttgtgatccctccgagaactatctcaaaacaaaggaggagccctctggtaatgaacattttatcatgtagataaatatgcttctttagtgtccaccaaattggtaatctgag

SEQ ID NO: 226827 - DNA, 1347 bp, Cannabis indica
gagtgttactttaattatattctccactatatgtaaaaagaagccaattataggagtcgagtcaagtcaataccagaatgagaattataatcaatatatttgagaccctctccttcttctttctttctccttttttttttctttatatatttagtggagaataaataatgattttccctaaaactaggattagtttatattttgggaagcaacaagtggtgaaataataacaataataataataatggtaagccaattgtgattatatttcaattaagttggtgggacttcaattaaagccaaccggatcctcgatcaaaagaattgtatctggcgagcataatggaaatccatacattatgattatatctataatctaatcaatatgcactccacattattatgatttttatttttattttgttttttctttggaagcaagtagtggtggatgtgatccctcacattacagcatttccaatgaactactaaaaaaaatggtgtgttactatttttttaaatattttaataagaataagctccaataatagtataaaatatgtgctaaatttgatccatgctaaaagttacatcgagtttggcacaaaagattagaagtgttcaacaaaatttataaaccgcccaaaccaaaccgaataaattgacaaaaaatacaacccaaaataatacaatgataatccaaacaacccatattaggtggtttataaattattctaaaccgcctaattaatacgaataaactgaattaaacagattaatatattttttaataaaagggtatataatatattacataaattatatttattagtgaaactattttgtatttaaaatttggacatttgagtgtttaacttaaaatctagactttatagttaaaaaatttttattgtatttggatattgaagttgaagtttaaaatctatataatattcttacttttttttgttatattgtttaattatttcatgtttactcaattatattttatattatattaaagtttttaaatgttttatttttttgatgaataagaatttttattgctctaaaccaaccttttacatcactaatctttacattttgctaacaaatttacacttacaacttagcatttttacaaaatcaaaccatcaaaatccatgttttatcttcttccttggccttcttgggcagcagccccttaattcttagcttgctcatttgctgatatttcttcaccgtagtattaatgagccacacttgttgattccatagtacttcattcctagcctttcatatgtggtacaaaagacttgcaagaacagttttcaccatacttttcct

SEQ ID NO: 226828 - DNA, 1876 bp, Cannabis indica
ggtctggtggatgcattttgatttgattgtaccccgaactaggcatccatgaagcttaatatttcgttgcctgttgttgcatccacaagatgatctattcttgaaagtggaaaagagtcttttgggcacgccttgttgaggtcggtgaaatcgatacatactcgccatttcttgttcggctcgggtactagtacgggattagcaacccaagctgggtagaaagcttcaattatgcaattattgttgcgtagcttctctacctcttctttcagcgctagggcccactccttgtccaacactcttcgtttttgttgaacaggtcagaaatttggatcaatattcagaacatgtgaaattatagaaggatcaattccgaccatatcctcatgggaccatgcaaaaatgtctaggtctgctcttagaaattttatcagtgctgattttatttcgagcaacaaaccttttccaatcttaagctttctagtcggaatatttggatcgatgtcgatttcttctagttcttccactggaccaacattggtgtttggatccccaagtcggggatccacatcttcatccccctcttgggcggtttcctatttggcaatgttttttcccttgtccaaactctggctagaggatacttcctttttagccttggttagagcaaggttgtaacattcctgagcaacttgctaatttcctctcaagcaccctaccccattctttgttggaaacttaaggcatgagtggaatattgacgtaacagcctttaagtcatataaagctagttggcctaacatgacattaaatgatgatagaacgtccaatattaaaaattgtgccattatagttatgctcttcggagcttgcccaacaatgaggggtaggcaaatttgccctaaaggtgcaacactctggccggagaaaccatacacgggctggaggtatggagtcgagtctttgagttggagccccatattttcatacggtgtcttgaataaaatatttgtagaggctccattatctatcatggttcgcgccaccatcttgttggctatctggacttccacaaccaaagggtcgttgtgagggaaattaatcttgacagcatcttcatcactaaatgttatggtgggctctcctacctatggtatctttggcttcctctcctcaacggccaaaatcacttcttcttgctcgtgctgtaatgttcgggaatacctttcctgggctttgcctgaatctctagctatgtgcagacctccaatgatgacttgcaaatgtccatctactggtggtggtagtaaatcttgattgttatcagccctttgaatttggtcggccttgacatatttttgtacgtgcggattattctttcttatcagaaattcaatttcacgcttcagattgttgcattcattggtgtcatggccgtaatccccataaaaacggcaaaactttgtcatgtctctcttgcttgcatctttttttatgggtgcgggcttcttgtatggagctaatgactgagtagccatgtagatagtttctttatcttccgtcaggacagaaaaagcagtaagcttggtaggattttccctaggagcctgttcggttttgccagcgaactttccctttttcccattgccttgcctattgttattgttggactatttaccactagcttgaactgcttgggtactaaaggagctggacagatgttccaacggagggagcctttggctggccaggtttatgctcgacttttgctcgctggatgccttcttcaagcttaatgaagccatctgcacggtcaaggaagtcgctcatagaatctattggtccgttttttctgatatccttccaaagttctcca

SEQ ID NO: 226829 - DNA, 3210 bp, Cannabis indica
ggtccccaagtcgaggatccacatcttcatccccgccttgggaaactccctacatggaaatgttttttccattgtctatgctctggctcgaggatacttccttcttagccttggccactgcaaggttataacattccccagtagtctgctggtttcctctcagacaccctaccccattcttcgttgcaaactttaggcatgagtggaatatcgatgtgacagccttcaagtcatacaaagctggtcagcgtagcatgacgttaaaagctgaaggaacatctaatacaagaaattgtgccataatagtcatgctcgtccgaacttgcccaacaacgaggggtaggcgaatttgccccagaggtgcgactccttggccggagaaaccatacacaggcaggagacagggggctagatccttgagctggagtcccatcttttcataggcagttttgaataagatgttggaagaggctccattatcaatcatggttctggccaccatcttgttagctatctggacctctacgaccaacgggtcattgtgcggaaacttgattttgacagcatcttcgccgttgaaggttatggtaggccctcctgcccgtgggattttagccttcctttcttctacggccaggatcacttcttcttgttcgtgatgtgctgtttaggcatacctctcccgagctttgctcgaatctccagctatctgcgggcctccaatgatgactttcagatgcccatctatcgatggaggtagcaagtcttggttattatcattcctctgattctgatcggccttgacatacttctgtaaatgcgggttatttttccttatcaagaattcaatttcgcgcttcagattgttacattcattggtgtcgtggccgtagtctccatgaaaccgacaaaacttggtcatgtctctcttgcagacatcttttttcatgggcgctggcttcttgtacggggctaatgactgagtggccatgttaacactttctatttcctccatcaagatggtaaatgatgtgtacttggcttgattatcccagggagcttgctcggttttgccagtgaactttcttttcttcccattctcttatctattgttgttgttggaacgtttaccgttttagcttgaattacttgggtaatgggggagttgggtggacattccagtggaatgagcttttgactttccaggctttttcttaccttctgctcgctgaatagcttcttcaagtttaatgaaaccttcagcacggtcgagaaaatcactcatcaagtctaccggaccgttcttccttatgtccttcgaaagttcactgaggacttcaatgccccctagtatcgtggacaactttccatcttcagttacccgtgaaaccttagtcgccttgtcatgaatctgattatgtaggcttggaggggttcgcctggtctttgcttgactttgaccaggtctcctagatgcaacgaaagctggagagaggaggagaattgtgcatggaattccgaggagaaagctttccatgagttgaactttccaggggccagcttgaaataccattgctgggcggcttccgagaggctggcaggaaaaatcctgcaacacacgtctcctcgtaccccctgcagatccatttgcatctcaaaatacttgaggtgggaaagaggatcttctcttctagtgtacatcttccaagttggcattttaaacttgtggggtaacgccaggagattgatctcgggagagaaaggggttccacgtgctcgatccaactcgagatcattgtttctctgtccggccatgccttggaacatactttttagttcatccagttgtgcttgcacagctggactaacctgtttggcattttgaccgatttgaccacgtcagtatctttctgagtgggaatttgagcacgggttccgagctgcacgattggcgtgccaagctgatcgtctactcctctccttctattcaaattgaatttgagatcatgagtcgttcccaacctttctgttatcccaaattttacactctgacgtggcatcacgagaatggtgacacgtggagaccacttggagcatctgctcgggaagaatggaccgagcaggatgcctcgctggcacatccaggataagatatctggcgatccgtgcagagcactcaatacttagcgaattcagttttcgcatcatgagtcatcagctcaatccctataactcagggatcaacttacgtggatatggcatacacacgatcccactatcagtgtactcagcttcaatcccacgatccttgcattcagcattgatcacacgatctttctgtttatgcgcgttgtaacgagagaggaaactcttcctcctcaagtttcccagccctataaatagtgaggaatgttcacttggcaaggggaccgagagattgaaagtcaatacgcaactaagctaagactatattattatctaagtattatatattcagagatatttttgtaagagctataagaaaaggaatcttcttccttgttcttgagtcaatacaaataacgaggattaggctattaccgaactgctcggggctgaacctctataaaattcgtgtgtcttattatagttttattatatattcattacgacatatcgtttattgcttgtaaaaaaactcattgtcgttggctaaaagcgaagtcaacactttcgaatacagatacgcctagatgtctcagtgattgattagtttggttaacgtgctgaccggcaccattaacctggttggaattatcaggtatgacttctctcgatgaattacaagacaaggtctgcccacctgtgaccgaagatttggcggctggccatttgtagtctgagaagtattcattgctggatctttgtctgtttcacccctgatagtttgataggcctttcgtatcagcacagtagcttgccgactacgattgtcaatctctgcatgatgggcccttaatgattccatctctttgtctctccattcgacaaacatacgcctctgctcttcgaacgcaagatttaccgcagcgcggagttcctccttatcatgatgtagggtgttggtatgaccttgcatgagtccaagagcagcacggaggttttggatctcagtatcatctccaatggtcgttcaaacgttggtagcaggcggaatggctgtgttatgaa

SEQ ID NO: 226830 - DNA, 1133 bp, Cannabis indica
tttgttattgtgaaaaactagacagatggttgaaacagaattagaatcggataagcagaacccaacgtaccagtctatttatcaacctgggtgatgggtactcatattggagctttcggaatgttgtttagatactttcaaagttctagaacttgaggatgaggtctcccaccttgtctttgacaattctagattcaatggtttaatcagaattgacatttgagtgatagaaaccaacacatcaggttgattgtcaacttgggcgctggccccaacactaggtcaacttgggcgttgggccctttttcaagggtctcgagattgtggttttcttcccgagttttcttgaatctttattattttttatgatagaaaaactgcctgaaacactttttcaagaacttgattagaaacggcccaggttaacaatatgtcaaccagtgtgttaggtcccctttattgccctttggaacatccgtgtggtccccagaaatagttgaatcttaatctttgctgaaaacggagaagttgcttgaaagaattctcaaaacatatcatcgaaattagcctaggtttacaaaatgtcaacctggacgttgggcattgcttctagcacccaagaagtgttgtttcttccctaaaactacctatttcctaatttttgatgaagatgatgaaaaattcggatcattgatatgatacttggtagtcacccatattgataaattgtcaacttgggcgctgggtgcctaagcaccgggtgctccgggtgctcaaaaatgaactttctacgaatctaatgtggatgcctcaaatatgtctatggtatgtctagttgatgtcccaacaaaaattttgacccatttccattaagacggtcctaaaaacaaaaaacccttgttaggatgtcaacttgggcgctggtgaaaccctagaactctaggttggcttccggggtgcatgttcatataattttagctcccgggacccagatttggtcactccatatcttcatggtataaaatcctgaaatgtagtgagttggaaacgagttattgaagttcaaactattgggattttatgccctaaataaaactcatttcgatataatcttatttgttatcaatagaaga

SEQ ID NO: 226831 - DNA, 2094 bp, Cannabis indica
caatggagctgaattgcaaaggtaaagaagccgattggcatggctccatgagctccaacaacggagccgaatggctccatgagctcccacataggagccgaatggcataatggagtcgattggcacaagaggagacccaattgacataattttctatttaaaaatatatatatatacatatacaaaagtaggcgtggagatgggtatatatgtttatgacatatatactcatcaattcctacatattttaacctactctacatttttgtctttactctctaaagcctaaatagccacaaacacattttttcctccatttcaatttttttttttttggatcaacttagggatttcaaatgttcatcactatcatcttcatgttcttcatttttttccaaaaagtttatccaaatcataccaaatatataaatctctctcatttctaaagtaaagagtggattaagataacccatagcctacattgctaagtttcattcatagattccaaaaattacaagccaaatttcacaatattagaaaaaagcaaatatgtaaaaagagggttttacaaaaaaatctaaagaacactatgatattcatactttctatgtatttttacatgggaaatagaattaaatagtgaatgggtgtgagaaacttactcaatagtgatgcccaagcttgaatcccctcctataatctttagtttccactttgagcattcctttgaaatggttcttggagctatttgagaggatttttagaagagctattattttttataaagagtgaagagtagaatgggttgtaaagaaaagagagaaactatttaaaggctataagggttaattaacttttttttatttcacttctattgtttgtgtccaaagatgcttaaaaatattgttggtcttctacatgtctacattcagcagtatgcgggtatggagtccaagaatgcggggattattttttctacaagtccatcataatattataaaattatgataaacttgggggaaaaggttatctctcaaaaaatccaaattgatgtgcatgaatttttattctagatgtggaggtccaacaaggtggagcccattggccaaagaggagctgattagccaaaaaggagctcgttagccaaagaggagctcattggacaaagaggatctcattcgccaaagagtagctcattagccaaggaggagctcattgtccaaggaggagcacattggccaaagaggagcactgtggccaaagaggagcattttgggcgcactaagctcccgacactgtcaggtgctaaggtgcaaagagctcctcagctgccaaattatctcaaggacctgatgggcacgaaccgacccaattggctctcctcatgtacccatgaccatccgggtccgctaaatatgagagacacgtgcttttagagctattccgaaaatatagtcaaaaaatgataagtgaagagatatttatttttgatataattattttattattattattttgtatcttgaacctaacccgactataattacgggaaggtatgcctatgtttaagggatttgaaatcctatatgaatatttatataagggggtgaaatcacttgtagaagggaccttgaacttgagactcacgagatcatactctagagcccccactctcaaattctaaaaactcacttgaggagtgaactcttggagaacataactctggagcactctcctcaagcattgagatcaataacactccaagtggactagcctattactgctaaaagggggtgaaccactataaaattcttgtattcatctttggtgaatttatttttgcaaatcggtttactttgattaactattgcttgtgttcatcttgctcgttttacgatcttcttagatccgttgacgaaaaactgcgtcaacaaattatattatttgtgttctacaatctattcgttaaagtcgaccaatggatcttctcatgacatatagattaaggacatggtagttgaattaagtgggagcgctaatcatgaatacagaatctatagcttctatctgtacataaaagtgaaacgataattt

SEQ ID NO: 226832 - DNA, 1056 bp, Cannabis indica
ctgagttggtccagaaaacaaatgagccaatagacaagattaaagctcgaacgctagcttctcagagcaggcagaaaatttatgcggaccccaagtgtcgagatgttacattccaacctggagatcatgttttcctgcgtgtgtcaccaatgaaaggaattaggcgctttgaaagaaaggcaagttaagtcctagatttataggaccttttgaaaaacttgaaaaggttggacaagttgcttacgggttagctttacctccatcattgtcagctgtgcataatgtattccatgtgtcgatgttgaggaagtatgtatctgatccaatgcatattctgagttttgaggcattggagatacaacctgacctgtcttatgatgaacagccaatgcaaattctggataggaaggaaaagatccttcgaagcaaaaccatatcattgggttaaagtgctctcgaggaatagtaaagtggaagaggctacttggaaattggagtctgacatgaggactcaatatccagaattgttcaggttagatttcggggacgaaatccttttaacggggggataattgtaatgaccgcttatggttaatactttgggttattaaatgattagggttatgcttgagacttaattattatccataatattgcatattggataatttctatatgtaaatcgtttaattttaatatatgttaaatatgttatatgtaaatttctcaatttctatgtttgtgtttggaagctgtggaaagcgacgttgggccattagagagtctcgtttggtatgtcatagtgggtttttattctttttaagtttttgaaagaccatgctagccttgttactcttttagtttttgaatttaattaggggctaaatggtaattttattaatcaaatcttttgttttttgaaaggttgtatatttagtaaaacctgattttcttttattctttactttattttaaaataaagtgatattagagtatttggaaaaatctagagaaaaaccaagtctccttcttcactaagctttctctctctctctc

SEQ ID NO: 226833 - DNA, 1166 bp, Cannabis indica
tctctctctctctctcgtgaaccctagaaccagcaaagaaccatggattttcttcagcaattatgagattagatagcatcatggttgaggtttcaagctggggtaagcttccttgttcattttctatggtttctttaggttaaaatggcttttcttgaatgattttgagtatttagggttcagagttgtggagtgatgttggtttgtgtttctgaagtttaattatggtgaaatatgttatttttaactaatattggtggttgctataagttttgagcaagctttgagttttagaactcaagcttggctctttaatggtgaatcttgattctgagcttgtttagttgttttgttgcttggaatatgcttattagggtatattatgcaagtctggaaggtttggattcgaactggttaggtttttgaaatttttgggttacctagtataaaaccggttaaccggttttacaggccctgtaaaccggttaaccggatcagaaaccggttacctgaacttttagtgttgtcgattcgggttagtttcaaagctttagttggttaatttcctaattttttagggtattgccatgttaatttttagtaggaaaacttttggttcaaaacataagtccccagttgtgatttagcatgtcacttatccatgttatgaacgatgtgatttaggggcctgtaatttgctgagcagttgttccactcaggttggccggcacacttgaattcggaaacaaggtaagattagtataatgatatgcatatgtttatacatgtttagtgtacatgttagttgcagtcagaataacgtatcaaggcatcagtgaggtgtacaaagagttgcactgagataccactagtatttagcatatcagggcatcagtgaggtgtacatagagttgcaccgagatcccaacagatatatgctaagctatcaggtaatatgagttatctactaccacatcagtatgactagagtactgagtataggctggattcgcagttagtcatactttttcgagaacgttcctgactcagttaggattatggttgggtgtatgggcacctgattataatccaggttattattatgttttatgttatgcttttcttactgagtctgttgactcacaactgttatttccatgtgtagg

SEQ ID NO: 226834 - DNA, 1764 bp, Cannabis indica
accagaatcctcaagaaagtggggggcaagaaggatttcaagtttcatgaaagatgctctcccatgaaactaaatcacctggcctttgcagatgatgttttgttattttgcaaaggggaattcaaaagtatctattgcatgttgcagggattgaagcttttcactatgacatctggtttgcaacccagtctccagaaatcaacaatgtattgtagcaatatgcctcaggaggaggtgaacagaatacaaagggcttctggttttactctaaaggatatgccttttacatatttggggttgccaatatgttctaaaaggatatctgggaatgagtgcattgcattggcagaaaaaatgactgcaagaataagaacatggagttcaagaaacctatcctttgcagcaagggtggttctaattaactctgtgttgatggctattcatacatattggtgccaagtaatgattttgcccaagaaggtggtgaggcaacttgaatcaatttgtagggcattcctatggaaaggccaatctcaatcaacaggccctggtttagtagcatgggaagcagtgtgtcaatcaaaaagtgttggtggcattggatttagaaaaatacaagaatggaaccgagctgcaatggggaagtatatctgggcagttgctcaaaaacaagatagcctatggatgaggtggatacatagtgtctatatcaaggatagagattggtggagttacaaagcttcaaatcatagtagttggtattggagaagtctggtcaatttgaaagatcactttaaagaagcagctggacagcaactatttactcaacaatatcagattgaggaaggctacaaggtactttgtccaacccaaaacaaagtctcttgggctcagcaggtatgggggaggctaaacactcctaaacactattttattatgtggttggcaatacaaaaaaggcttagaacaaaggacaggttgaaagctacgggaatggcaataggagaacaatgtgaactctgtgataatcactgtgagaatgcagaacacctattttttacttgcaggtttgctgtaacatgtttacaaggaataaaaacccggctgtcttggaacatagcagcaggttcgttgagtgcattaaccaggtggataggaagatcaaaactcagcaaattcaagaggaatgtattagctgctgccatcagttgtctggtatatacagtttggagagcacgcaacctgtctgtgtgggaaagcacaaagccggatgcagagaaggttataacaggggtgaaacaagatgtgatctatagaattaatgcaatatggccaaaaaaagtctctgctgatgatacagtatggttccacagcttgtaaaaaaaaaagaacaaaaaatgtagtgtgttaaagagaggatcaagaaatagaaacaatgtacagattttattatttaggccctgttttgggtgctattgtttgtaaaagtttattgtgagcaatacaaattttctgattcatcgaaaaaaaaattatagagttttaataaagtattttaaataataaagtaaaaaaaatagtgggagtgttctaaagatactcatttttaacaagtgattgagaatagaaaattatgggaaaacaaaatgttattgatgacaaaatttagctttaatggattccattattggtctcagctttctttattattattattacattattgattggactttggtgatgatagataatagagatgatgat

SEQ ID NO: 226835 - DNA, 966 bp, Cannabis indica
tagttcatttatagttgatttattgtcacaaagttgatttttgattattttttagttgttttattactttttgctgagcaaagtgtatttttgtaattttaaaattttacaagcgtacttttgtaaattaaaaactttggactgtgttgactgtggatttagccaaccgactcagagtctgaataggattggattacgctattaatgtcacgtgtagaacgataataaatgtaaagacattcagatttatagaggttcaacccttttgttcaagtaatgatctactccccttttagttgtattcattcttgagataataccaagaagattacaggttgaaaccttgtaatttctagctatgactatcttcagtattataatgagaatgtattttgcaggtgagaagtatgagaaagagagagaattgtatgcttagtgcttctgagcgtacttgcatgaataattcagcttgaggtcctttttcatgcagggttaagaccccttatatagtattagggttacaagttgctacgtatcacaaacaggaaaatattcctttaaaatagggaagttacattgtatatttgaaatgcaacacaaataattaataatccgtaaagaatagggttgttatttgttgatgaagaatccctatttttgtggatagtttgagctgttccgaagttgtaagagtgctgaggacgatttggatgacttattagaaaaacacaagtgttggggcaagcctgtatgcttggccaaccaaccttattgaaagactgcccaatgcatgaagtatgtcaaccctagccgaacagctataggtctggccaggatttgctggtggcatgatgtcaagatgaacctggttgtgtcaattatgcagccatggtatcttacaggatggaatgatgcacggtactaacctagccgattagtgattgcctgtcttcaatatgtcttcta

SEQ ID NO: 226836 - DNA, 1565 bp, Cannabis indica
taaagtgtttgtgagaggtcattggttttctttctctccccaagatgtagcaaaagcattgcatcttctctctctagctattccaaatgaagaggagagtgaaccacttgacaagaatgaggttctctctaagactgtgggtcaaaggatggtgtggcctcaaaattctattatctcggccaccaatctcactaacatgtatgccatacttcacaagtttgctacaacaaattgaaaactgacttctcacactgcaaccaactcctttgatatggcttctttcttgtacaaggtcggaactggatgtgatgttgatttggccattgtcatctatgaccaaatcatttgtttttgaaaaggtaacaagaaaaatctaaatcttccttttcctctagttatttacaagattttaagtatgcagaaaagtgatctcaagacagagcaaaaggatttggtggctccttccactgctgcatcttacaaggcttctactccaatttctgatattgttgaagcctcatcatctaagtaatccaagcctaaatctttggtgtttgcttcagatgaccttcctgcagaagctcctgttccaactgcttcagcatctgtctctgtagaactctctggtgttcgagcttcccttgatgccttgactggtcgtgtaatgactcttaagggactccaatatttagttctggatgttttcaaagccttgtctaaggcctcagaagcttagtttttcttgtccttcttttttgtctccattcctaagaacattgatactttctttagtcttaggtttggcatatttgttttgtttttttgttttttttttgatactttagctactttgacacaaagggagagagtagactcaaaaacctattatattttgatttgcgtaactctggaccttcttattttgagggggagttaagtttttagtttcattttcatgtttgttataagctatgcatgcttgtagggggcgttcttctcttttcttatttctaacaggtatgttgcaggttttttgttttatttttatctatcaaattgccaaagggagcgattgtaaaatcttttattgtcatatttgataaaatagacaaaaatattgtttgtggtattctcaaaattgtctttattattttattcattattttcaaaaatctagtttccttttcttatgtgaaaaggctttcaaaatcagatcttatattcttttgacttagtcttttaaatatgaattttcctttataaattatttgattttatactttgcttttcatggaaaaacttattcatattttatttcttttgatctaatttcttgaccaagaaatcatgcacaactatgagtattaatgcagtcaaagttgtcttatttatttatggaaactttgctaaaaactatctaggttcactgtatatgtttgaacgaactgactgtctgtttaaatagattttgaattttctttttggaaagattttcatttaatgacctaatctgtaatgtccccgcttcaagcctccattgggcccttacacccacggaataatgg

SEQ ID NO: 226837 - DNA, 1393 bp, Cannabis indica
gaatttggttactaatatttatgagagaatctctcaactacttaagagaatatctcaacaaccttgaaatatttataaccacttttcaaattagatatttatctaattcaattaaataatttattaacctaaaaagacaatccaatagggacaggaacaagctacgcacctaccactatctttaggacaaggttggtgtattttgtcctgacaaattttctcttaataatttttgtctttttccctatttaattaatttaaaaaaaatatttacttattacaaaaactaaataattactattttaccaattcaacatagattttcttcaaatatctttatagaactctttatccctacccttaacagtgtttcaataaactagattatttattgagtcttatcaaccaaataatatcttgtttattaattccatgattactccactataaatatagaacttgcactcttagtaattatagaattatatttattgaatattcttttatcaaaaaagaaatagatttatttcattacttatttaatgtgttatttggttcgcatgtttatttcatgatcatttttttgatttataaattcatccaaatccttatcacattggtattcttggttattgtgatgtcaacatagtggaaagtaatcaagattatgtgattaaatgaattcctattatttatttgtacacaggatttaactgatatgataatctataatgtagtttacttgcaccttggataagtgatatgtcctttctaggacattggataaagtaagcttggattggacgtatggagtatacctcataaaggaccgatattgaacttgaataagatataataaacttaccgtaatatttatctaattcaatatcacctagttaatcttagatcaaataatctcaatcatgagatggttaggttctagtttagttgtattatttatgttcttcaatttgttcgttaaagtcagccagtaatggatcttctcgtgacatacagattaagaacatggtagttcaattgagtgggagcactaatcatagatatagaatctatagcttctatctggatataaaagtgaaatgatgattttcttcgagctcggcttaatagagataaatagttgagtactcatttcagtaattatattagtttactgaaatatcatttataggtagctaagtgttttaagaatgaaatacattgaaatgtgtaacgataaatttgtccctactcgatgtagaccatctatagaggatcattgattattaagattataacaatggataattcatagcgtatctatatcttgaaacatgtagagcgttctatataattaagagagtaattttgaatctatagtggcgcgaggaat

SEQ ID NO: 226838 - DNA, 1575 bp, Cannabis indica
acataacatacacataaacttattattgaactcaaactcaaatataaaaagctacttagtgtgtgatagagtatttaaaatgttaagaaaaagaataataataaaaaaaaagttgtactagcttaaattatagctagttacctatatatggaggaaaagaaaattagaataatgcaaatttaatataacataatagcagttgtgagtggtaagtagtctattgagactgagagaggaaaaatacaatataagaaaaaaaaatgtttagtgatatgacttaagttagagaaagatttatgtgggtgagtgataaaagaagtaaaagaaaaaagaaattgtaatacataaaagtagttgttaatatgtaatacactaaaaaagaaaaaacaaaacaaatgaaggtatatttgtaaaagaaaacagtgttacattacaaatgttataatctactttttctaagtattctatgtaaaatattcccattatgattgctttaaaatctaataagatatgtgggcatcatacactactatgatagatatgataaatcatgatctttgcatggaaggagtcaataaatgtataagttctgttttcagcttagtgttatgaggcagcctatttcatttgatgctgaagtaatcaatatgcatccctaaatttcattttataaaattttgtttattgttctcttctaacactaactatatcctactccagctccttaatctaaaaatacaactaggagaagcactgtgtcatgattcataagttcaatgctgccaatagatcaaaatcacttctagatagtcaatgaactatctccttaccataccagtcacgtgcaaaagtttcttaactttttttgccatctgaaaagatgaaccaaaagttcaaaccccataatagccttagctagacattgtttgttgcactcaattgttttcaattcaatgcagtaggtgcctaggtgatctttattcactatgcctcagctttttcacttttgcaaagaaaagttgtttgcaattaataatgcaaaagtgggaatagaaatttcaagtgttgtgtgtggtgatctccattctctactctctagggtcactcaagaagagcagagtataaaactatctgccttttgagaatattgacacatccctacccagcaaccaaaaccctctggaagatggtctctgtcttttagagacacatggggatgatgaggtattaaaccatgatcacctaccctattagatatcgaaagtgccaaaatatgatttttctagtgttatacatacatcaataacagagtggtaaaaaacttggaagatgcaaactatatgcatacatcaacaacagagtggaaaaaaaaacttggaagatgcaaactagatgcaaactttgagtttgtttcaaagaaggtaatctaagacataaatggacgcttttccatagatcattaactacaattcccacaaaaccgaaagctgaatatcataggacctcaaaaatccttgacccatttgcccaagatatcaaactccgaaacaacaaatatatcatagtaaaatccaa

SEQ ID NO: 226839 - DNA, 1088 bp, Cannabis indica
gaagtcaactgctaccactacgtccttggctcctcctcgcctggtggatattgccccaattagatcaatctctcatatagcaaatggataaggcgaggtcatcatccttaattccgttggcagtacgcgaggtatctgtgaaaacctctgacacttattacactttttgacaaactcatgggtgtccttattaatcgttcgccagtaatatccttgtctaatgatctttgtagataggctctgccaacctacctgatccccacaaaagccttcatgaatttctcgaatgatcccgtttgcttctgtagggtgaacacaccgaagtaaaggcatcgaataacctcttctgcatagtttgccttcaattattgtgcatcgccactcatttttgtcaattggaagttgcacgtcaagtagatagttgacaataggggtcatccatgtgggtgaactgtctatcatctccacgtcttccctttcacatatacttggctcgctcagcatctccaccggaaccaagttcaattcatccaagtcgttctgcgaggccagttttgccaaggcatcaacattagagttttgctctcttggaattttttccattttaaagtaatcagattttttcaagttcttccgaaccttctctagatacttagccatttttaggcccttggcctagtattccccgagaacctgatttacaatcagttgcgagtcactatggcagatgagattcttgactttcaacgcctcagctatctttaagctagcgattaaggcttcatattcaacctcgttgtttgatgcgtcaaattgaaatctcaaagcatagtgaaacttaaggccctctagtgaaattaatattacctcggcacccgagccctgctcgttggatgcaccatccacgtatatcttcctagtgtctgcgtctcggtgaacaagcagaatttcttctggagttattccttctattaagatgtctgtcaaggcttggcccatgatggatgttcgagggtggtatgttatgtcgaactgccccagttcgattgacaattttatctgtcttccagaagcatatggttttgata

SEQ ID NO: 226840 - DNA, 1461 bp, Cannabis indica
ttacttaataaatgatatcatgactttgattaacttatgaaatggtgcaatattcaagacaatactatatttatggtttggaacgtatgatatgggggaatgttaaacactgtttgttgtatgtatgtttttaagactttaatttttttttttttttgaatagagtaaagacttaaattgaatatacatatatagatatataaatttagatgattttatatgatatcatatataattaaaattgactcgttgaaatagactgtaatcactacataattagatataaaaattatgataattaattttacagtttggagttataatttttttattcttgtaactttagtaccgaatttagtgatatctttaaattgttgtagaaaactcatttgtcatgtaagatttaggactaaagagtagaaatttggcattatgaataaaaaatcaaattttcaagagaaccgttcattatcccctttaattaaataaatttgataaaaacaatgaaaatagaaatgacaaaaacactaataaagcttaattatcatgtgcaacttttcttggcaattttctaagacatgtattacaaagtagttggtagtattagttaattcagttggaaaaattatgagtcataagtagtcaatggagaaaagtcagttgttaagatttactattggaaggagttgattgagtgataatataaatttctaatttaagtttgaaacgtatggaataaggaatataaattcaagactgtattatataataattctaaacttgtaagtagtcatatataaataaattcaaatctgcaactgcaaacccaaattaatctactcaccaaaaatgaagaatcatttgcccttcctcactcttatgtttagcttcatcatgatcatcatcatgtgttgttgctatgttacaccacaacaacatactcttaacaactctttcattagttcccctccactgagatgcctccctcacataagctctgctttgttgcaactaaagcaagagtttgtctttgatgatccaacttcttactcgaagatgaagttttggaaggaaggtaaggattgctgtgagtgggatggtgtcacttgcagcaccaaaacagggcagcttataggccttgatctcagtgaaagtttgcttcaagggcctttgcgttccaatagcagcctcttcaccttaagtcaacttgagagacttaaccttgcctacaacgacttcagttattccaagattccatcaagctttggtctgctttcaaggttaacccatctcaacctctctaactcctttttttttggtcaggtcccatatgaaattgctttgttgtcgaatatgatttcttttgatctctctggtttttatcatgatggtgttagtctttcatatagtacgacaataaaacttgcccaaaacatgaccaagttagaagaacttcacttg

SEQ ID NO: 226841 - DNA, 3276 bp, Cannabis indica
acatagcatttctccaaatacaagtaaactctattttagattgtcatatcagtaaaaccctagtgttctgataaatctaggaatctttcatcacatagtcatgtttactttccaatgtgctgacaacacaataaacaggatcaagtatgtgaaaagggtttggatgaatttataaatcaaatagacaaacaattgatgagatgaaccaaaacatacaaatgaatgaaaaatacttctgtttctttattgatatcgaatcaaatggattacattgaaatggagttttatttagggcataaaacccaacaacaactgccaataaaaagtgagcctcccagactgctaatctcgagatccctaaaattgagactcaagctccaacccaccctccgacccctacacatacttacgagctaattcccaaaacgactcaagctttcgcctcttcaagccaagcccttacaactctacctgtcgaggctgggaatattcgcccgaagtacattgcagaatttggtgcagcttgttggcgtcattttaaggccctcctcccccatgaatgtgacttaatcaataatggggacttggaggagatgcttgaaaagagtgtagctcatggcctctcggtaaattcctctacccttatccgcttacttccttttttaacatccttcaaaatactcattcatttttgtttgttggtttttagcaaattttcatttccttcgtcgcccaacggcagggcatggaaaaaaggaaatacatggagagcgagatccaaaacctgataggtcagcgcgaggctatgaccaaggaatggaatgatgccaagtcagagaacactcacctaatcaaagaagttgaggaggtgaagaggactcacaaggccgagcttgaagttgctaaaaagtaggcaaaagataaggccgaggcataccaaaaactcaaggaggaataccagaaactccaaggggaacttaatgcagccaaggtgacgctcgatgggaaagatgctgaaaccattgagcaatgtaatgatgttggactacattccatctaccaagcctggatggaaaatccagggatggatacgagtttcttgggatagtccaagggggaagtcttggcctactacgagaaggctaagaaggaagatgaggaagccgaggcagcagcagaagaagaagaagaagaattttccaagtcacttactatgtaggcttggtttttatttatttttgttttatttaggcaaatggccttaaggccgagacaatggtttgccgctgtggcacttttgtaaagacaaatttgcaaagttggatgaccaactttgcttttgttttatctttattgaatgcttcatacttttatatttgaacttgacatatctgtttacttgcgttttcattcacaacttaaattattatattttgatcaaatttaaaatactttaggcattttcattgctcgtggtttcctttgatattatttaagcagttagtaatctactacgtgtgcgattaattattatctgctatgtttttgatttgcgagcagttataaattccgctttgcataaacaattattatttgttttaagcaaacttgaatatacttttaatgattcatcactttgtatatttttaattgtttatataaatattaggccttctattcatatattacgtttaagtatttttcaaggcattttggtgtctcgtttaatactttcccaaaaactacgagttgttagtattcagcttcgcatgtagcttatgagttatatctcatttacaatttttgattttcctttctcgtgggaaaggttctttaataaaaaactttaaaaattttaaaattctaaagtaatgggtttgcaatatatcatgtatttccagatagactccggttaatcatacacataagcccctcaagtaattttaaaggatgatactttgtaattacttgaaaaatgattcaactttattaataactgaagtccaaaatattacatcaaaaatatgagttacaacatcagtttaccggtagtagggtcgcaaatgttccacgttccggtagttctttatcagcaagccattcagtcgagccaatttgtaaacccaggttcctactatcgcttcgatcacataaggaccctcctagtttgggttgaatactcctgcagatgcgtctcttgtattttcaaatactcaccttagcaccaagtctccaatgttgaagagcctctttttcacattcttgttgaagtatcttgtcactcggtgttggtatgctgcattagtaatttgcgactcagtacgtttttcatcaagtagatccaaggaaaattttaaaagttcttggttttcttcttgattataaaactctcatcagtgagtcgcgatatttacttctactggcaacattgcctccgagccaaatgctagcgataatggagtatgtcccattgttgtcttcttagttgtcctatgagcccaaagtacttgaggtagttcatcgacccatctacctttggcagcgtctagctttttttttgatagtatccttcaaggtcttattaatagcttctactcacccatttgcttgaggcctgaatactgacgagaagcttttgataatcttgttcctttcgcagaactcagtgaataattcaccatcaaactgagtcccgttatctgatactatcttaatgggtattccaaaactacaaattatattttttactacaaagtcaaaaacgtttttccatgttatggacaccagaggttcaacctccatccattttgcaaagaagtcaacaaccaccactgtgtactttgctcctcctcgccttgtgggtaatgcaccaatcaaatcaatcccccatattgcaaatgggtaaagcgaggtcatcattctcagttttgttagtggtacgcgaggtatatgcaagaatctctgacatttatcacacttcttgacaaattcgtgtgtgtccttgtttatggttggccagtaatatccctgtctaataatctttttttacaagctttgccaaccttcatggtccccacaaaagtctccatagatttctttgatgatctcgtttgcttctgcgggaagaacacactgtagaagaggcattgaatagccctttctatacaatttgctttctactatcgtgtagcgaggcactgaatacaagagttttcgtgcctcgttttagtcacttggaagttgtccattgaggagatagttgactatgggcgtcat

SEQ ID NO: 226842 - DNA, 1148 bp, Cannabis indica
tccccacaaaagtcttcatggatttctctgatgatctcattcgtgggaagagcacaccgtaggagaggcattgaatagccccttctatacaattttccctctactatcgtgttgcgagtcactaaatacaggagtttttgtgcctcattgttgtcagttggaagttttctgttgagaagattaaaaactataggtgtcatctaggcatgcgagctatctatcatctcgacttcttctttctcacatatacttggctcgtttaacatctccactggaaccaacttcaattcatccagttcattctgcgaggacagttttgctaaggcatcagcattagagttttgttctcttggaatttgctcgattttgaaatattcaaacttttccaagttcttccaaaccttctctaggtactttcccatttttaatcccttagcctggtattcccctagtacttgatttacaatcaattgcgaatcactatggcatataagatttttaaccttcaacacttcatctatcttcaatccagcgatcaaggcttcatactcaacctcgttgtttaacttgttgaattgaaatcttaaggcataatgaaacttgaagccttctggaaaaattagtatcaaccctgcaccggagccgttctcatttgatgcaccatccacgtataatttctaagtatttgcgtttcgctgaacaagcatattttcccctagagttattccttcgatgaggaaatctgctgatgagtccatatttatcttataaatatgattaatttatttattaatattcttaaatttattctttaaattattgattagtgtgattttaatttgttaggttattttaaatactattcatccatttagagtcttttggagggattttaacatattttggtggaaaataatggaagtcggggagctcgattgtacaaggcggaacttaattataaattcggacgaacttaaaggcaaaattggacttggagctcaacatgaaagttttagatcttgttcttagctttccggaacatcttgaatcgtccaattctaatcaatattgagagagttttggccaaaatactatcagtcgtcgcagcaggaaatttctaaaaaaaaaagatagcgaaaataaagata

SEQ ID NO: 226843 - DNA, 3532 bp, Cannabis indica
gaaactgctagagtaaacgaactactgtcaatctttgaaaaagcttcaggccaacaagtgaattttggaaagtcgtctgccttcttcagtccaaatactccaactgatacccgcacaagaatctgctctgacttgggaattttggaagcatcagaggatagtaaatacatggggctaccaagcatgcttggccgaaataaaaactctggtcttggttatcttcgggataaaaatgcaaaagcgcattcaaagttgggacaacatattcctttctcgagctgacaaaaaggtcatgatcaagtcagttgttcaagctcttccaacatacgctatgaatgtcttccttcttaccaaagacatttgcaatcagatggaaagtttaatgacccgtttctggtggcaaacaaaaaaagactcatcaaaaggaattcattggaaaagctggaaaaatctcagcaaacacaagttcaaaggcgggattaagagactttaaccttgctcttctcggcaagcaaggatggaggctcctggttaatcatgacagtcttgtgggaagaatttttaaagctcgttactatccaacaacctcttttttcaactctgagcttggaagtaacccgagcttcatttggagaagcatctttgaggctaaacctctgcttcgttctggtagccggttgtgcattggatctggtctatctgctaatgtcctaaatgatccttggcttccgaatgatactgatgggtttattcaatcctctcaccctgctcttattggaacaactgtcaatacccttatgcaaactgatggtatggcctgggatattgatattttaaatgatcttttcaccgagagagacaagaaccttatccttcaaattccactcccttcccactctgaaaccgatcattggtactggtataaggatcgcatggggaattactctgtcaagactgcatatcactttactcctgcaacttaatagcaactctggcattgaccaccattctgattttttggaaagctctgtggaatttacaacaaagacttcttgtggagagttttgctctaattgtcttcccacaaaggtacagctcaaaataaagcatgtcaacattgacactacctgccccctttgcaactcttttcccgaaacttcaattcacctcttcaccagttgcaacttcgcacaaagctgctggagaaaagcattcggaacagtaagaggctccattgaaggaactttcacggcctggtttgactatggacttacacactggctcaatgatgatataatacacatctctatgttatgttgggcactatggaaaaccagaaatgatcttatttggaacaaaatttctccttctgtagacaaagtcatctcctctgcaaaactcaaccttgaacgatggaaatctgctcaaaatatgtctctccacccactatcctctccaaatgatagtgaaggacttgagcaatggaccaaaccaagtcatactcaacagaaccacttcggctatggctttatagccagagatcacgatggaatccttattgaagccttccaatcttgcaaaccaggtgctattggtgctgaacttgctgaagcaattggcgtcaaaaaagctcttagttggatcaaaagaaaaggctggcataatgttattgttgaaactgactgcattaatattgtccatgctctgcgaagtaaagtccatatgatctctccatatggctccattattaatgagtctaagctattgttatttgttcttaataatgtttctgttattttcgttaaacgatctgcgaataaaattgttcattttcttgcaagggactcttattctaaaactgattgtattattagtagggattctattcctattatgttaatgtccttgattttgaaggacagttgatcaataaagaatcttctttaaaaaaaaaaatggcctctaaaattcaatttcattagatatgtattattttcaggtgatacacatcgtggccgagtgaaattattattacttcatcaactataaaaaattatatatgaatctagctactatcaaggaagaccatcgattgagagtgaacagtagatgtctttttaccaaaaaaggaaataaataaataacaaaagtacataaagaaagtgaacagtagatgtctacaactcatcgatcttgttgtccacatatttctctttttgaaaaatgttgtccacaatattattattagctggtattggtcaagttattatattgagagtattgttattaggtactattggtggttagcacttctcgacatgtcacgttacgattagttagcaatactctttaaaagttattatattaaattatatgagacccgacatttaattagattaatagcgatattaacacataagaagatagtagaccactagtaccctttagtatttatcttctattaattgtaccgacagtctctaccacactttatagatatgtattttaacgtttagttagcttactctctattttattatattaattgaagacatgatattttattacaccaatcacaaaatcacactaaaaacacacttttgccatttctcatattatttaatctttattatatacatcatcgttatatatatattggtaaggtctttatataaaataaaactaggccaaattatagaactgtttacaaaagtacttctctttctttcttgatcttctgttacaaaagatggcaaaggtgaaaattatagaagtgtgcaaggtagctccctcgcctgctagtatggcaactacctcttcctcctctccaaactctctccctcttacttgtttggacctaatctggctaaggttgccaccagttcaacgtatctttttctacgagcttccaaacttagaggatccaaatagagatacaactctgtttttccattcagacattgttccaaggctcaaacactccttatctctcaccctcaaacacttccttcctctttccggtaacctcatttggcccgaatcctcctataaacctctcattcattacaacgatggcgatgaggacgtcgtttcttttactgtggctgagacagacgctgattttcaccgtctatcaggcacaaatgaattcttagaagcaacagaataccatcctctatccccaacttggcagtgtctcccgaacgagccgcaatcttggcattccaagtcactttgttccccaactttggattttccattggaatggtcaatcaccatgcggcaatagatggaaaatcagtacacatgtttctgaaaacatggacacatatttgccaatcccaacaacaagagtacaactacagtcatagtcctttagagttgaaaccttttttcgacagaactgtgattgtggactcgaaagggattgatgcaatcatagccgaacaacttcaagaattagacggaggacctcacaatagaagcttaataccatggaagatagaagttccaacaggtgcagttaggggca

SEQ ID NO: 226844 - DNA, 1113 bp, Cannabis indica
tagagagttcccttagtgcttagagatagaaaaaataagattttggacaaaggtgataatatattattcaagtcatggtcatccttcctattctacactcaagattgtgagtgaatatataaatatatatataaatattcttctcttgtaatatacatattaattatataatatattttgttcatattcttcttttatcttccttatatattgttgttgtaacatttttttaatcaatcttttagtcattgtattatattgcaatagtgttgtaatattttgattttcttccattataataaaatctctaacatcttcatcaaagatccaccgtcgtccccgatcaaagatcctcctccaatctttcggcggcatgtgaatcgattcccatggtgagccaccataaacaccaaaaatagcctctcgaacacgctcataaccttgtacgccaagatccaatgacatctctatcttctccggtgttggagttcttcgagctccattcattgtcacaaatctaggatccacaacgttcgatgaagtcaagggtgccttcttcgacttcgatggtcctaccatcatcgccatacatcgagcaggcatcaatctacttcgatcagatttaacagaaacatcactgccggcgagattgacgaaaggcttttctattggcttcatgattctcacttgttcctcaaaactaccaatgagattttcgacctccggcgaaataggcagggcctaagctaagggaaccagagttttctcaattgatgagcaatatagctcaactctaacatctaatttatctttgagatgcacttttattgcattcagatgagcattgaagaattgatctatacgcaacttcatagatttcaatgtggatctcacgaattcatgaagctcttcatcagccattttgccgagctctcaatgaaagcatcaatgatagatttagtttctttgatatagaaaaaatcctcaaatctatttttcgagacagtgtcttggactaggatacttgccacttgatcctatatgagtccacacaaactcttttacactaatttactatggggataattacacaaggtactattttttgtaaaa

SEQ ID NO: 226845 - DNA, 1885 bp, Cannabis indica
taaagaacgttggggtaacatatctgcgattggtaaacgaaatgctcgcaaatcaaatagggcggaacatggaggtttacgtcgacgatatgttggtaaaatcaataaaaagtaaggattatacctcaagcctcgcggaatgctttaagatattaaagaagtataacatgaagctaaacccgaaaaaatgttcctttggagtttccttgggaaagtttttgggattcatagttaacgcgaggggtattgaggcaaatcctaaaaaatcaaggcattaatagacatgccaccactgacaaaacctaaggaagtacaagccctgacaggaagaatggctacacttaataggttcatttcaaagtcaactaataagtgtgtgccgttcttgaacatattgcgaggaaacaaaaagttcgagtggacaaaagagtgcgaagaagcctttcagaacataaaaacgcatgtagcaacgcctccagttttggcaaaaccaataactgaataaacgttgtttctctatttagccatctcggaagatgcgattagtgcagccatagtgcgagaagagggcaagcaccaacaacctatttactatgtaagtaaaagtttactaggggcagaatctagatatccccctctagaaaaactcgcgttgtgcctagtccatgcgtctcttaaactacgaccatacttccaggttaaccacctaaaagtgttaaccgatcagctcttgagacaagttttatcaaaactagatgctttttgcaagattgattaaatggtcaattgaacaggggtagtttgacataacataccatcctcgaacatccattaagggccaagctttggctgacttcttgatagaaggtataactccagaagaaattccacctaatcggcgagacgcggaaacctggaagttatacgtggatggtgcatccaacgaacagggttcaggtgcagggttaatattaatatcgccagaaggctttaagtttcactatgctctgagatttcaattcgacgcatccaataacaagacggagtatgaagccttgatcactggcttaaagatagcagaggcaatgaaagtcaaaaatctcatctatcatagtgatttacagctgatcgtgaaccagatcctcggggaataccaggccaaatgcttaaaaatagtgacgtatatagagaaagtttagaagaacttggaaagattcgattactttaaaattgaacaaattctgagagataaaactccaacgccaacaccttagcaaaactggcctcgcataatgacttggatgaattgaacttaactccggttgagatgctgagcgagccaagtatatgtgaaactgaagatgtcgagataatagatagctctccgacatggatgactcctattatcaattatttactcgacggataacttctaaatgacaaaaataaggcacaaaaactattgtattcagtgcctcgctacacaatgatcgaagccaaactatatagaagagggtactaaatgcctcttcttcggtgtgttcttctcgtagaagcaaatgaaatcattaaagaaattcaagaaggcttctgtggggataatgcgggctggcaaatctgtctaaaaagatcattagacaaggatattactggccaacgatcaagaaggacacacatgagtttgtcaagtaatgtgataagtgtcaaaggttttcacatgtacctcgtgtatcgccaacagaacttagaatgatgacctcaccctacccattttctatactgggggattgacctaagttggggcattacccactgggcaaagaggagctaagtatgcggtagtagcagtcgacttcttcactaaatggacgaaggtcgagcccct

SEQ ID NO: 226846 - DNA, 1144 bp, Cannabis indica
aattcaatttcccgctttaggttgtagcattcgttagtgtcgtggtcgtagtctttgtggaactgacaaaactttgtcatgtcccttttgttggagtctttcttcatgggcccgagtttcttatacgagactagcaactgagttgccatgtatacactttctgtatcttcagttagaatagtgaatccagtgtacttggcatgattctcatggggagtctgttcggattttccggtgaactttcctttcttcccgttcccttgcttgtggttgttgctggaacgtttgccacttgagcttgaattgtttgagtagttgggaagttgagcggatgttctagtggaaggagcctttgacttgcccggcttttgttcaccttccgcttgttgaatggcttcttcgagcttgatgaagccttcggctcggtcaaggaaatcactcattgagtctaccggcccgttcttccttatagccttccaaagttcaccgcgaacttcgatgcccccaatattgcagataactttccatcctcggttacccgcgaaactttggtcgcttccgtcatgaatctgctgatgtacgcccggagtggctcacgtcgtcgttgctttacttcgaccaagtctcccaaatgcaatggaagttggcatgaggaggagaattgtgcatgggattctgaaaagaagattttcgatgaactaaactttccaggcgccaacttgaaataccattgctgagcggcttctgacagagtggcaggaaagattctgcagcatacatctccccgtaatccttgcaaatccatttgcattttgaaatacttgagatgggaaagaggatcttctctcccagtgtacatcttccacatcggcattttgaacttgtggggtagtggtaggagattgatctctggtgagaaaggagttccgcgtgctcggtccaactcaagatcattattcctttgtccagccatgacgtgaaacatatttttcagttcgcctaactgagcctatacggctgggctgacctgctcgacattctggtcagcttctttttgagcgggaatttgagtacaggctcgaggctgcacgatcgttgcaatattatgctcgtctactcccctccttttgttcagatcattcct

SEQ ID NO: 226847 - DNA, 1689 bp, Cannabis indica
tatcttcttgattcgagttatcttccttgttcgtcttgataagaaaaatgctaagtgttgagaagttattcatctcgttgtgttctctttgtgacttttgtaatgtgaggtgctcttctcgctatatgtatatagcgagacagtttaggttgatacattcattctgctcgggtggatgaatgttcccttcttgtctgtatattctgaggcatgtgtatgtctcgttaatctcaaatcaatagttgttattcttgtctcgcttttaactataaaggcaatgttctttcaaaaaaaactataaaggcaatgagttttgaatattatctatttaaccattacataataatgagttattaaatatgcatttaatgatatcattatatcatttagaattgattcgtattctttctgttggacacgtgtcaacttctaaagtgtaactgaattgcgggtataacaattgccccataaaaagtactttttaattaaaaaaacttttaaatgattacaagggtaatttttgtcttaacccaattttgaaaaattgcatgctttggatttttgacagtttagaacttcgaggcacatcattagcattaaatgctccgtcttttacaatttgtagtgtctccatccgttagattcaacttattatgatctaactgtggtttttaatagggtattaaagacaagaacatcagtctattttgccatttttgcattctcgtgctttaaatttcttctgcaaatcacgattttcccccttcaacttgcatgccctcattttcattaacttatttcttgtgtatttcatcggatttcatcttcaatctcagagattcttaaaactcactgattcaatcatcacaatctcaatcacaaagttcttctttgtttagaaattttcatcaaaatagaaagtgattcatctctttctcttttatgcctttttttttcttcatatttttagtttgattttcatgattgcctatcttctttatctgctttgtttggttattttttaggtaatttttgttttgttagtttagataattttagggttaaggaaaatttctaggttattagattcatagatttctgggttaagttgaatttaactttttcagaaattgggattacactcgttcgcaagtatgacccaatttatttatgaaactataagcccaaaattcttagaaactgtatgcctttaaaatttagcccttccatttgaatccaaaacttatgtaccgaaatccatacttgagataaacgataaaaaaaccaatcaagatgaaatttcaagtcgctataggcgatttttacaagaaataactgagggtaaacaccgttatctgcgagatgcagcttggcctgaaccccaaactttatcttctattcctttagcgagacctttgtttttacctcgagtcactgttgctttttcaccaggtgacttagatttcaaaattatgaccactcaagctcgaaaatcaaagacccctcaagatcccacagttacttttgaggtagaatttattgaatccaaagtcaaatctataggagcttatgttggtaatatattaaagtcttgtgtcatcaaatacaagaaaggatgtcatgttagatttgtcgctccaggggaatttagctattttccccttgaaagagtgattcgagaagagtgtg

SEQ ID NO: 226848 - DNA, 987 bp, Cannabis indica
aaatgacccaacaccttcggataacaaaccctctcaaacatggtggaaacagttgtggacacttcctttgcctcccaaactaaaacactttctttggcgtgcttgtcatgatatccttcttaccaatcacaacctttttaaatggaaaaccctccattctccacattgctgccgatgtcactatcatgatgagaccctagagcacgctctttccagatgccccgctgtccaggaggtatgggaattaactagtattcatgattttattactaaaaatatttcactaacttttttggattcattacaccttgctgccactttgtttactgctggaaattatcacttctttgtatgcctgttgtggaagatttggaactgcaggaacagttggctacatgctggtttctcttcttctcctgctcaagttctgcgtgaggtaacagactgcatcgaccaataccaaagctgcaacaaaaaggtttccactattagacagctttaagatgtttcgttgatgtccaatggaagtgcaccatctgctcctacttacaacctacagctttcagtggatgtcgctcaagatacacaactcaacaaaataggttttggtatgtccattcaaacaaacaaaggggaggttcttttaaagttggcaatgtcatggcgtggaattaacacacctttgttaatggaagcacaagccttacactttgctctttcttggtgtcatgctcattccttttatttggatagtattgtttcggattgcaagattttagtggattatatttgtaataatgatacttacaatctgcatctcaatactttcgttacagaaattaatagcttgctatcttatttccctaaagcttttattagctatatccaaagaggggcaaatgaagctgcccattgcttatctattgaatgagtgttacatgaaaggggataaggggtcaatagtaaattttatagttagtataagta

SEQ ID NO: 226849 - DNA, 1488 bp, Cannabis indica
aaaatataattatgtttaataaggaatattttattaaatatagaatattatatatttaaagcataatgggtgaggttcataacaagctaattatgtaataattagagattttaataaaaataaataaataagcgtaatttattaattaagaaaattttatcagattatgtgggtaaaataaatgatatttgtgaaataaaatattttaaagtctgacaacaatagaaacccaattaattagcctgtaatgtcacgacaatattagtgggtattttagtgttaccgtaaagatttatgttatggttggaattatggggaaaagagccttatttattaaatgaccaatttacccataaagattaatgttgggttttagtgtgaggaagggcaatttggtaattgccatgtgtttcatttattaatgttttgaattatttcattagttattatcctattattttatttgattttaattaatgataagttagttatgagttttgtagaaaaatcaagaatagactaagttatcctcctctcctcttttgttttccttcatttggctcaaaaaaaccagaggaagaaccaagttttcctcctctttttctcttcagtttctcaacaattaatcaaccctaggagctacaaaaaggttggggtaagcttctaagattcttctgcatgtttttctaagtttaaagttaggttttaagagcctcaatggtgattttgggtatgggattttctagcagtattggagttgtttttattatggtttagcttagaatttaagtttgtttagtgttaggttatttctggttgtgtttgaattttaagcttgagttttaaaaactcaaagcttgagcttcaatagtgattttatagttttggtgtctttgtgatttctaagttcatatatatgtcataaatgtgattttaagctattctggaaagtttggttgagattggataggtttaggagaggctggttttgaaaaactggagtctgagtattcctgcagaaaagatacagttaaccgtttttacaatactgtaaaaatggtggatcatttttcccaatagaaacccaagaaacaatgagttgtttttgatgattttctagcaattatatttttgtgtattatcgattattaaggtatttctacgctatttatcgatagatgaacttcttgttttgagtttaagtcctagaatgaattaaaatgagttgtttatcagattatcattgttgtgacataatatgctcgggatcatcgggtatttttcacttgagttaaccagcatgcagaatttggacttgaagtaagaaaagtacattcgtaccacatatcatgtcaagatatgatatggttattctcatctacgaatcgattattatcgagtataagatacagtaattaacattttgaaagaaagagtcattactctatattgaaactattgttatgtttcttacttgttggttacctc

SEQ ID NO: 226850 - DNA, 1046 bp, Cannabis indica
accacttttctattcatatacagtattgaatcaatatagtttgcttataatagcaaatccaccattgccttatatcactcataacataaagattgagtatttagctagaatagaattatgactattttcaccactttctggtcactaacgaaaacaataataacgaaatcatcacccatatttttaattttacagatcctaatatgcaatttgtgtatattttttttacacaataccaaatctcaaaaatttaacaataaaaagtaccaaatcacaattctcgcgctcgaaatcaagaattttgatggcgacaatctcgtttaagggcttacagagagctcgatgtacagaagcgctaacaccatggccaacctcctcatagagctcgtaatgctcagctccagtcggatatatcttcttctcaacttgctcatccacaccaccacctctgattcttcttactcttcttcttctccatatttcctctgtttttccccaaaattcaaaacgaaacctaaattctctcaaaacagaaataaattaatacactacaaaagagggtttcaaatcaaaaattaattgaaatatatacaattgatcttattcacttacgtccaaacgttcaatgtctcgttgtgccaagaaaagaggcttaagaacatgtcctttaatgacaattgagatttttctttcatacaagtcttcgtaccttaccaattgaggtctctgcctcttcgtttttcgtgatcttcatcttctcagattcagctcgattttccaaaaccttcggtattttactatttcgatgcttgatcatcgtcgaggggatttctcaaaccgccagtgaaaaccgccaaccttcgattatccagcgagaaggtcaccgggaaatctgagggaggtggcagatgactgaggagaggagtggcttgagtggttttctggtatgaaaaggggattttgagttatgtgggtttaaagtggttttctggtatgaaaaataattcgacgatctgcgattgggagtgagaatggaagggaagagt

SEQ ID NO: 226851 - DNA, 1395 bp, Cannabis indica
attgcttcctctacctccttctctttgggtccaatttctgcctcctttccttttaaaacacgagccccttaaatagaaattagggttgctacctctgaaaaagtcaaaaactggcccaaaatcctgcgttttgctcctggtcgcgattacataaagccttgtcgcgaccataggcaaaatacgaaaaaaaaacttgttgtttggcctccatggttgcgaccatgcactactacaaaattgtcttctcccaacgatttataactgtcttttatactatttcccaacggttcctaaaaccattggctatgtaggtgtcataaaaatgctgaactttaaattttataactgttggaaaaaatcattttaaatgactgttagaaaaaaccactttaaataaaaatttataactgttggcaaaaatattatgaaaattaaattacattttaatatatatttttaaatattaaatatatataataatatttaattattaaaaataatatattttaataattcacaatatatacaatattatcctaaacaaaaaaatacaattgaaaatagataataaatatttttttttgaaaatattacaacttaatctttaaacaaatatgtaataatattaatctctgaacaaaaaatatgaaataatacagatcttgttcttcaagaaaaaaaaatacattacaacttaatttctaaacaaaaaatatctccaacctcagcacagtgatgatcttcttcacagtaatggtcttcttcacaattaaaaaactcagttggtcttcaacttgctcatattagatttcatctcattttcctcagatgtcaatgatttttctaaatagaccaacacaaaatagaccaaccgaagcaaagaatgcattcacatagatgaataaaaatataaaatcttttaaaattaacacctaatatgaaatagactaaaagagaaaagaatacacactgaaatccataaatggagacgatgactcaaccagacccgtcgagatccattgattttgttgccggacacgactcgtctgagaacacgagagagggagcaaccccaccgatcaccccgatccaaccctcactatgcagagcccgtcgccatctcctccaccaccccctgcgcaaagcccactgccatctcctccgccaccccctgcgcaaagcccgccgccatctcctccgccaccccctgcgcaaagcccaccgccatctcctccaccaccccctgcgcaaagctcgtcgacgtcgtctcctccattgatgcgtgcgaccgagagaaatacattgagttgtgcagctgtgagagatgagagatgatgttttgagttaggtttttcaaattagggctagaaccttttctatatataccctaattaa

SEQ ID NO: 226852 - DNA, 1529 bp, Cannabis indica
gcatatatttgcacataaaaaatgaaagtagattttcatatttttaattttagaaaaaaatatatatgtagtatttcatttagtttctcttttatacttgtgttaatgcagattttcgttaacgatattaaagcctaatttcgtgattgatttgtacagaaataatagtagtaagagaagaagaaataacacttaaagctttttacgtggttttgcagttaaaattctgcatagttcatgagtctatcttattagatttctctgatacaaaattagggttctttttttaaggatttttcgtccctttttcagtatattctagccctatttatagttacataggaaggcagttaattacaatcagattaatatctcacaacaatattttcctgaaattatgggatttgattatgtcccacgtaaaataaatgcgattattatttgaaaatcacacaactgtgatttatccgcttttaccgggtcaatgttgacgtagatttaaatatgctgcaaagtgtatctcattgggtcatctcgctgagatagcaacaataaccctgacagcgagctggagcttttcccatatcttttcgaggttaataatgtaaacatcatcgtttctgctattgaagacataacgctccatctgacaatcgcagttcttggtgacaaggtgaacttcagcagtcaacattatttgaatgtcagcttctatctgagagagctgactcgacggagcagtggatctcattgaaagatgtctgaagctgattagtgaaggtatcatgagtatgccttcctatagcaagatggatgtgtcgctatttgttgttcaaactcaaccaactgttatgcttagtttgtataatgtatattatgcactaagtgttctaacagtcaacatgtctcatcattaccttcttatacgtagcgaggttgattcctcgtcgggtattatttatgccacccttatgattgtgtcttctgatgtgaaatggtttcttgtcaacgcatgagtcaataggttgtacatccttatctcgcttaagactttacagtcagcgagttataaatatactctgtcaatctcgcatttaatgagttattccattttaatatcccttaatacaattgccattctattcgttgattcatattctcccaggttgacatgtgtcctcctctaaagtactagccaaattttgggtataacaattgccccttaaaaatttctttttaatgaaaagtgctttgtaaatgattatagagggcatatttgtcataatccattttaaaaaaatgcatgtcctctgattctggcagttttgtggtttcaatgcacatcagcatttaataaccatcttttccacttcttttttcaaattctacccgttggatcaattgtctccctgatctgacggagatcaacccaagagtataaaacaaaaaaagaatcaccttttcactacctttgccatttcaaaagttctaggaattttttgagctttttttgtagaaaaccataccca

SEQ ID NO: 226853 - DNA, 1626 bp, Cannabis indica
aagagagaacgagaatagtagatagagaggagggttggtcgagggtcggtgggtgggtggccggaggtgggtcgtggtcgtggactgcgttgttggtcgttgggtcgttgggtcgtcgtcgtgggcagcgttcgaaagttgtaaacgacagagagagaaagagagagggaaagagagggaatagcaaacgacagagagagaaagagagagtgaaagagggaaagacggaaagagagagagagagagaataggaaaattaaatttgaggggtattttgggtagaaatgagtaatagtggaattaatttgtataaattagtggagggtatatattttgaaatggggtattttattagggtcaattaatgaaatttcccttttattattgaattacatatatatccttttagatgatacttatagtaacaaacgaattacttgtaaataattgaaattaataaccaagtaaactttaaaaataaatttgtaattttaatattttaaaaaaattgtacttaataaattattattaatttattattggattgtaataaaatttaatatgttagattgtttatttaatataatatatcttgtgtcaaatacttaaatatattacatactttaattaaagaataacttcactattttttttaggtaatgtttttagtaagaagagagaaaattctactaaaatagaaagatgatactaaaaatattacattaacaaatgaaagtggagctatatgagacaaaagcaatgctaggtgtagactaagtagggtggtcacctcatatgaaaatattaagactagtcttaaactatttggagtttaggtctaaataaatttttttaaggctttatacaaatatatttgtggtcaaataaacttaagtaagattgtttgatgtagtagtgaaaatccttttaaaagttaaagaggtcacaagtttaacattccacaccttaacttttttatttttatatttactacattttttttaagaataactaaaatattattgttgaaatttgaattacctagaaaccgtgtcagatgaaaatataaaatgttattctataaaagtcactttaacataattaaatacattttattatatctaattctataatcttgttgaaattttgaagtatggataagatataaaaatatgtagtcgtctcacttcaattttatttctaacttcgcccctgatatgacataggggagttctatttgtgctccacaaagtaaaaagtatactctaatattttaaaaaaaataagtttaatataattttttataaaatcacttttaatattttttttaaatttttttcatattattttgtgttaatttcagtacttattttaattttatttttcgtatttttttaaatcgtgtataatttttttctaataaatttcacatatatatattttaaattttttttataatatttataatatagtttatttttgtttaatagatatattttttaaaaaaatgatttggaagaaaaattaaaaaaaaaaactaatataatgaaaaaatatatatttaatgtaaaaatataattattgaaatgagatttatttataagtttttggggtgtaaataaaact

SEQ ID NO: 226854 - DNA, 946 bp, Cannabis indica
tcaaaattataattttttctttagaagatgggagtattttagctcatctattaggagtaagtatggttttatttatcctattatctaattaaaataatattttattgtatggggagggacaaagatggtgatatggatgtaatttattggatatgattactttttttcaactagttaaatttattaatgcaactaacctaatgctcattttagaaaaagatactactatctcactaaatgctttataactaatatatagttttatttaacgtctcctataaattcatttctaaatttttagctacttaatttaataccttgctttcaaagcttatcttactaaatcaagcaactctctgttcaagcctgatttattgctaaaaagactatggtagccacagaaattgtttactctatgagcaagaaaaaaggaaagtcaagatttatgatatcaagttagatttggaaaaacttacaataaaatattgtgggatttcatctcagaggtgcgtcggtgccaaaaaaatcaaggggatgatcaataaatcttgttggcacctttgtcccatggtgtgctctcaaacaaggagatccattatccttattaacccgaaaattttctctggtgacgtggacattaatatttgacatgtggcaagaaagataatatctcggagttgagtagtcttgagtcatagcggtcaaactgggaggagtccctagccttacttctaggttgactctaagaactctgaatgggtgtttgaatttcgataagtcatttccaactcactatctttaagtattttgtactatggacacatgaaacaaccaagaccaggccccaagagttaaaaatacacgaattagcacctcgaaaatcaacctaggcacctatggtttcacctagcgcccaagttgatgaccccaactagggtttcaaatt

SEQ ID NO: 226855 - DNA, 1562 bp, Cannabis indica
tagtcacaaccgggtatttcgggacgaacgaggttcgggcccgaaatgcaatttgtgatgaaatgttggcattttatttgatatttgataatctgaaatatttttggaattaaatgtgtacgaagtgacaattatgcccttgaaagtgtttatgcatattaattggcgctaggggcaaaatggtcatttgacctttattttctaagtttgacaaaattgaattttgagaaaaaggaaaagcgaattctagtgcttttatccctctcactcgacccctctctctctctctaaatcctcttcttttcaactttgattttttggtgaaattggagtgatctcgcttggtttggagcttgaatttcagagattggtggagtctagctttgaatttgaagtgaggtagtttttcctactgaattttaattaaatttcttcctaaaaatattgtaagaaaagtatgaaaagagtgtggtattcttgtttatgcatgttgttgagtttgatgtttgatcttggtaaattgggtgtgaataacttgaaattgttgtaggtttaatttattaagttgtggctgaggttttaggtttttctcttggttgaaatccttgtgatttttggtatgtggcggcagtaaaatactggaaataatttggttttaagctcaagttcaagagcttggattttatgagctaaagtcatgattttgtgtatagttgtgggatttttttttggtaaattctgaggcatttttagggtttctttgagtttgaagtttgattgtatactctaattttggttgtgtaaaactcaagcttggagctttaatggccccttttgatttttagttaaattattgtgtttgagctatggaatatgtttaatatgtcatatgttgatgctctggaaaatttggtagtgtttggggaagatttgagtaggttatgggggcttaaagattgaaatttttcgtgttgttgctgcccagacaaccagaattccggtttgttcagggttgttccaaccggaattccggttggactatattgggaaatgctgaattttgttttggccatagcttttgactcaggacttagttttgggagttcttttatatcgttggaaagctcgttccaagctctatgtgattatctgtgttttaaatgacatgaatatattttatgaatttgaaatcaggggttaaccctatttgtgaaaatcccagattgtgtgattaggattaccggcacctagtcaggagcacccggggatttggaatctctgcctttgcgggacaacaggtaagacagtagttagcccgtagaatatgcacggtggcacttatattgagattgatatatgtgagtaagtgtaacctggattagggttattaccctaacatgagcggttaatagcctagggttattaccctagtgatataagttgaataaatgctatgccatgctaagcgtatgattatattgagatttaaggattatgtgatcaagacataatcaggttggactcgataatcagaaccgagaagcaccattctaaggccttat

SEQ ID NO: 226856 - DNA, 1125 bp, Cannabis indica
ttatacatatatttatacgtactcattctccgagtttttttttaatggggtgctttagaaagtggaaagacatatatactcttaaggatgcttcttgaaatttgggtgcacgtgttttgcctggcacgtattttaatgccaaaaaggtgactcttcgtttccgtttttatggcatcttcattaatctgcatgcaatttttgtataaataggcttctcgttgagctccttcttttttcatctaagaattttcttcaactctcttttctttttccgggttagttcagttgagtttttcgtttatccttcctgcattatgtcttccttactcaaaacccagatacatcactcaaaagagccttcctcctcccacattttctcaggattgcagccattggatcctgcttttctttctttgaaccctttttctagctttcgtgatttcaagcccactacacttcctccattgcatttttcagaggtctgcagctgtccctgttttgagcaagctgcattgggccttagaacttatgctgcttctcgcgtcgaggttgcgccacctctggctatgtgtcctttcgctattttttctcccatgttgacaccaattgaagcggttaaggaggagcctgaagtgtcagagggaagctcaactcagacgacggcggcttattaccccgagttcgagtctactgcccaatctgagaacttcgaagaggtccctgttcctacagatgcttcgccctcagttttctgtatatctgcttcttcctttcctcaagagtcacctcgggtggtgtctgagattatatgccctccttctttctccaaccgtcggggtggcttgcaatgtggaggacgtttcagcagagggaaagtttctccgtgtagggggtctcctccttttccccctcctttcccttttttttttatttacattgtaggcttacgtcggcgtcttttctttttttatgtttgtaatttgtaaattttgtaagtttgctcgacgtcatataccacattttgtattgggccgactactccccactttttttgtaaatagagtaagtactctttttctataaaactttaatttttagttgtaaggtaggggtaaagtggttttt

SEQ ID NO: 226857 - DNA, 889 bp, Cannabis indica
tgggattagtggtgatggttgaaatttttaaatccgggtattgtagtagtgtgttggtttcaaatctgagtgtaattggtgcggtgatggtggttgacggaggctatggtgatgtggtggttacggttataactttgacctttgcagttattttatttttaattattatttatttatttattttaaatttcatatttttgttgtatatttttgcagttatttttaactactttttcaaagaagttataaatatcaattattattattttatttatttttttagtagttattttataatagtattatgatttttttaatgaattaattattgtaattttgcatcaattattttatttatcaattattatttatttttcaattggagattcataattaatattttcaaatataattttaatttgatggttggatagaggataaatttatttacttgccttagattttaatgtaaggttatatataggatcacactatatgtaattggtgtttatagttgcatttttatggaataattttatatgttggtagatttttatgatataagtattggtagttattaaggtaaatatattattttgggtagcatttcttattttttattgatttattattttaaaatattgttctctttttttagttattagattattttagttttcgttttcttattacacttttacaattttttatttatgtcgttaagttttatccaatttttcttttaataagttattttatttgttttaatattgttagtattttttatatattgttgtgttattttgtatggtgatattattatgttatgtaagtttattatgtaagattttattttttggagttggcaaaaatttaacgagtttgaaca

SEQ ID NO: 226858 - DNA, 1300 bp, Cannabis indica
tgccttcatcactttgtcaaaattacatttatatatgtgactatgcatatatcatgcatacccatatttatatatatattaatcattacctgatctttgataggtcctacagaaggagaggatcttaccaccgaaactggggcacatatcacttcacaagaaacacaacctgtagaccctcatagacatggcttggttggtgagcgtcatgttccttctaggtctataccggatgatatgatgtcgacatttttggagggtgaccaaaatgttttagatgatgcatgttggggtagtaatttatctgaaaaaggtgctaaaactcatacaaatcacaagctgcaatgtttgccttgttcaacaaatagcagccatgatggatcaattcagactaccattccagttggaccaattcctacgattgcatcctttggggtacgaaagtacttaattctcctcttcattcttgctttatagtatattatgaataattttcttatacacatacatacatatatatatacttacagacgggaggattccttgacttctcaaaaacttcaaatctattctctcaggatcaagaggatatttcaagtcgtacaccaaccatggctaacattagtcagaatgcccataaagcatgcccatcagctcctactgataatcctttagtgattgaacacattcaagtagaatctgagtatggtaaagatttagcggcacttgttggcttggattcagaatgtttggccccacttgggccttacacatcacgattttgctcactttatgcctcactggacaaggattttacctctttctttgagaatctttccccaatcaagaagtcactatttattcagctaagttctccttgtttacccttgcttcgcttaacatttgaaatctctgagcaacactactctcatttgttggagtattggaagatactttgtcttattttcccggaacgaccttctgtgttaggaaaaattgttgaatcctattttgaggctgtcaactcatctatccgctatcgtcatttggtgggagaacttgaaaagatgtgtgaagaacgggatataaaggttagagaagttgaagagctaaatcataagatagcaggtatgaaacaacgttgtaaggatcaaggctctccatcgaacacctgggtttatactcccccttgatgaaatacgcctttccttttttttagcctactgtttttgcttggaagcgtttacacaatagcttgtctttgaggtagaatacacatgtactgtattatcttatacat

SEQ ID NO: 226859 - DNA, 2030 bp, Cannabis indica
acattctcgttctttaatctgttgagtactctttcttatttatcgtttgatattccgactaaacactcatcttgtgtgttgtcttttgtatattaactcaagtgagtcttgggagaacggacatcggatcaaccaagacatgcttcaacttttgcacgaggatcatccccgtcttcgttctagcccacattcctctagtgaaggacattctctaaatcctgtacccagccatagaatgatggctcgtacaaagaaaacaacgcgtttggctgacgtatctgaccctcaagtggctcggcacgccactttgcccagcgccgaataggatccagccgtcgaaatggagggggatcgtgaaggggacgctgaggtccattagatcgaggagcaggacgatgtacatcctggcagttccttcggggcggaggaagaggccgaggttgaacccctaaactacggggagcacaacgaggctggggagccagtcgatgctgacggagatgtcctagttgagggtgtggattacgtcagtaaggaacttgctgctgcgattcctcactagaacggcaacgtgccttgggcgccaagtcgtaagccctccgtcaagggttactgaggcgcgccttttgactctcgaccaggaaggatatttaggcaaactagattgctacattcccgcccacaacaatcgtgccacaaaccctgaaaaggggatgtgcgcctggtcgggtgcccatggtcagcaaggggcattgatgcctttgcatcaatacttcaagaatgtggcggatttcttcggcctctgcctagcccagttcactcctaagggcatcaaatatctgtctgccctctttctcctctacgcttcccacaaatgggctatgccttctcctcaagaagtttcctggttctttgatttgaagtccacccccaagcaaggtaggtcagggtacttgggtacttcatttttctcaaccaggcttcaagtggtggatgggcacggacgattcggccatcagcaagattgggcgttttgctgatgagtacttcatggtggatggcacgggcatcactcgcactcggttccagcagattctgacaaatgaccgccctcccctcactcttgctctcagggatagcgctcaaaagcttgctcgactaccgggggaagactggaatattatccagttgaccactgaggataattttttgaagtacgggctctatcccaaggacttcattcctaagtccgtgaaggggaagaagaggaaatctggtgttggacgggccgaacgagctcattcagagaatgaactccttcaacttaagcgcgaagctaagttgaaggaaggtgcaagggccaagcattatgctcacaagcccttgaaaactgtagatgaagctgaggaagagcacgtaactccactaaagaggaagaaaaaactttcgggccgcccagacctgttgaacattccattcgcataagggagcccatttcacctgctcggtcgtcccctcccgttttcggtaaagggaaagctgttatgtccaaaattagatcgatgtcagttgatgattaatttttgagtcttgtttgggcaatcaccttgcatactactttgtcttgtttttgtgctttttgacatttatgccttatgtttctgatgtctatttttcctgaccatgatgtttttcattctgtacagatatgtctcggcagatgcttaacgctctaaagaagagaatgggcagaagctctagcgcctctcctttggccaagaagtctaaaggcggtgaggggtcctcttctaaggaaatgaggcctgctgggaggtcattgatctttccgaggagctaactgctgcaaacccctctaccccaaaagctgctaagtcaaaggagtctcggggaggaagcttggacaggtctggaccaccgaaggttgggtctgagcgggtcaggagtgaacctgaacgggtgcggccacctactccacctttttcggtgcttctagaggccaagaagggcaa

SEQ ID NO: 226860 - DNA, 2446 bp, Cannabis indica
ctacgttgcgatttttttttatatataaacatgtacatgcaactcaaaatgcatcttaaaatatttgaaagatcggaaccctccaggttgcactgccgcgatatgtacaatcactaccgagctttatctcactgttcctccagcttcgctttgcctttacctacacaaggtagcaaactgatgagtcaacagactcagtaagataagcaagacatatatataagtaatacaatgccggctttgtgcttaagccgccctgagctcaataattgagctcaccaaatggataagaacgttcttaagggaagtacgaccactgtaccaaatgtacgaaagtaccaatcctgtactcatgttggtagagccataactgtactcccgggaatttctaagtgttgtaccacatgcacgatgtaccccctggtactcttgttggtaacatcgtaactaccctgatatacaacactatactaacgcagctcgacgctttacagggccctagaccataacgttcaaagtttaatgagagacacgctaaaacccatagcgaggatttaaaattaaaactaaggataaccctatcgataaataggatactcgaaccctaaacaacacaaaaacagggaaaactggggttcgggaaaaagtcccaaccggcagaccggttcccaacgggaaccccagttcctggataccaaccggtcgaccggttcttatggtcccccagaaccggtcgactggttctgtgctgggaaccctaaaaccgatccccttaactcaattcaatgccaaactttccaaaacttttcaggatacctattcatgtcccaacaaactcattcaagcatcaaaagtataacaaacaacttaaaccaagaaatcaccattagagctccatcttgagctcttaaatttcaactaactcaaatagcacaacaaccctctaattaagctcaaaacagtaaagataatcataaattaacttcaaaaaatgaccccaaactgaacacacacacaacccctaatttgaacctaaatcactcaaaacacaacctaaacttgagtaaaacttaaatagaattgctaaagagatataccttgctttagaggaccttaaacctactagaatccagagatttcagcaaagaaaacaccaccttccttgctgggttgatggttcgaaagaaagagaaagagagagatggagagttgtatgacttctaggttaagcttctattaaaccctttctctcatataccattaatataatattaattcaaataaagtaaggcagccactcacttcactacaagccaaaagaagggtctcaaggggaaaagacctaattacccctctaactaattaaaatagctacaaactcccaagggtaaattggtcattactaaacccaaaaattcaacacccaataaaaacaccccgataaaacaacatattccaaaacatatgaaatgtgactctgtaaaggcccaacgtcgctttccacagcttccgaacacaaacacagaaattgagatatttacgtaaatagcataataaacatgtatgaacttaaatatatttccacaatatgcatttttataaataataataaaatctcatgcatacaccctaattatttaacaatccaaggtattaatcacaagcggtctttacaaatctaataggtatcttcaagaagccgaagcgccttcttagccaaatcgtaagctacactacagatttggctaatcttgatatttaggcagtgtaagaaaagtgtcctcaactatgaaataagatcaccaaaaatactacaacactcattagtgttgttcaaatcatcaattattgccttccagtctgtgtctataaagtgaatggggaagtcttcatggagaaaccaatttagggagatgatgagagttttgagttcttggatgtgaggttccctgattctgaaataagggatggtaagggcagcagttgtttctccattattgttacgaagaaccccagtaaagcctgacttgtttgagtgggtatcaatggttgcatcagtggatagtttggcgacacccggtgtaacaccgtactagtataggtgcgctaacgtaatttttaacttaactgtgtagctcgttgctaatcaataagtttattgaaaatcatgaataattaaaactttatttaactaattataaataccaaaataacatacttgtattaaccgggatcctgttttacaaatatttacaaatgttacatagtgcaagttaaaaaagtttgtcgcctagtgattatataaaataagccctgctatcccaaagatcatacgctccaagcctaactgccccgacatgtacaatcttcatctactcgctctcacggctgctcaatgctagtcttgcccttacctacacatgcaaacaatatctgtgagtcgaca

SEQ ID NO: 226861 - DNA, 1559 bp, Cannabis indica
aagataagttttttgcgtcatttaaaaaatgacgttaataaaaaattatttgcgactacagtatatatgtcggttttttaatccggcgtaaattctttaaatgacacttaaaaattgacgagaattgttctttttgtagtggtggagaccggggtcgggtgttgggtccccatcccagtcttgggtcccgattctggttctaatttcaggtttgggttcccaatctaggtctgggacctgggtccaagtctgagtctccaatctcggttcaggtcctgcgtctgggtctgcgtccaagttcatgtctggtttttgttcgtgtcctgagtcataatccgagttttgatttgggtccatgtcctggtccaggtttgagtctgggtcctagtccccttgtcttattcccatgtcccagtccgctttcggttccacttccagtttcaagtcacggggtacgggtccaggttgggtctgggtttgggtttgaatccgggtctgggtttgagtttgggtatggatccaaatccaaacatagactacgggtcaggtccaagccctgggtccagatcaggatcccagtcttgggtcctagtctagttccacttctggtcccaagtccaggtccgggtcccaattcagggtccaatttcggggtcaaatcctgggtctcggtgctccttccgaagcccgagtccttggtccaagtcccccatccaggtccgggtcctaggtctcggtctaagtctaggacccagtcggggttcaagtcctagtctgagttggggttcgaatttccgatcctgctccaggtccaaatctgggttctagtcacgggttcaagtccagatccaggtccgagtctgagtctcgagttccgatctgggtctgggttctgagacccgggtcctaggttctagtccgtgtccatgtttgggtttgggtcctactactagttccgatttcgattccgtttctaggttcgggtttgggtctgggtctgggtcgaggtttgagtgatggtccgagtctagggttgggtctgggtccaagtcccgatccttgtcagggtcttggtttgggttcggccctggtttttgggtctggttttggcttcaggtccatgtcccggtctgggtccaggtcccggtcttggtttaggtcccaggacactagtcccggtctgggtccaagtctcggtatgggttctggtctaagtttgggtttaggtttgggtcctgttacagtcccatgtcccagttctacttccagtcctggtccgatcacggtctgggtatgggtccgggtatgggttcgagtccaggtttgtacctagatccatgtcaaggtccaagtttgggtctaagatcgggtcctaggttcaggtctgacccgatcccggacccgaaatcggaccaagactgggactagaacccggacatgggactgtagcaggacccaaacctaaacccaaactcagactagaacccataccgagacttggacccagaccggtacctgtgtcctaggacctaaacaaagaccgggacctggacccagac

SEQ ID NO: 226862 - DNA, 3368 bp, Cannabis indica
aatataattaaacataaactttgctgcatcttttctttgatttcccattttcaattaattattttgtatgtatccataggataaattgtaattcagttgaatgaaaacatgtattcgtatgtactatatatatagtccataacaatataaatttaaattacatatacatttgaaaaacatctatttattagatccattttagtgggcatacaaatattcatttcacatgcattgaaatgaatatttgagtggcagctatacaattttttcagtcaaagtatagtactaaataaaaaaaaattaattgttatatagtacgtgtcacaaaatacttttagaacatgtagttttacttcttttttaattcttgtaaaatttaattcttgaaatatatacttgattatttttagaccactagattaaacacaatccaagagacaaaattaaaaaaaatatggaaacaaaattaattgaactttggccaactgtctctcccttcatggctctatttcgtgattgttggatcagaatcgaccagatctggtgtggggttagtgttggtggatggcctgttcctgataattgtgatggtgtttcaaaatttacgatggtggtgtttggtttcttatttaattttctttcattttgttatttgtcttttttatttgtaaaagtgtccattttactgtttttcgattttaataacgatgtgtttatattcttgtttgatctccaattctttttggatttagacgacgcacttgttattttggtttttttttccagtgtcttttgacatcttattttatgtgtcatcctaattttatatgatgtggcatccaattaggtggcacatgtactatgttttataatctaggcagatgattatactcctagcaagccatgcagattaatatgaagcccaaagacgtcatacatgaatggtaggatgtccaaacaaggccactgatggacattcgaccaacttgatcgcatgattaactcgcatgtaccgaccaagggatgtgagttggtaatttcagagatggacatctttatttctaagcttgcatgccatgaaaacaatccctacatatgtgggattaatttgtacctttagagaataaaggcaattagcttagatttcccaatctccttattgtaattatggaaacatgttaattttctattttatttgttataaattaagggaaaccattcttcatgtaattagcccctataaatagtggtttaaactcactattcagggacacaagataatttagaaagaaaacactcaagagtgaaacctcggtctaagagtgaattactcagagatcattgtaagagatttcgagagagatcagagtattcttgctcactcttctcacaagtcaatacaacaaaaaggagagtagactattaccaactataaaggatcaaacctttataaatctagtattttctttactttatgatctttactttctgttatttaattaattcttatcgctttaattaagactcactattgttggctaaaatcaagatttatatttttgtgctttcattaagagcaaagacacccaagttttttgtcttaagtcttttacaagacaaaggatggttgtgcaaactcgaagggggaatcagaccgatacagtcgatccaatggtgacagattcgagcgtacagacacatggaaacccaagagatcaacccaagatggcccctaggcagattaatttttagccacctacaggctcacaaactgccggccacggagtgactacctctctatcaggattcactacgggcgtgcaagaaactggaaatactagtacggcagctaagcacactactcatggaaactggaatcccatccacttcaaatactcaaaggccgatcggggatgacactgattagggttgatgcaaggccacaataacactctagcaagatatccaagtagctattaatcttgcttttgatgagcaaaggaaccagttcaaagaatggagggatcaggagatggagatcatgagagcccaacagaaagatattggtaaccgttccaggcaggccactgtctatttatacttcggctgaatctttacaatttcaaatgaatggtctagatcctctctctgaaaactacaattcaattcgacaaataaaaagttgaaaatatagtatttaaaatttggctcaaagcattcatttttcatcattgcctgccttgagtacagcacacattaaagaagggtcatttcaatcgaccaaccatctttacaatttcttccaagagacgcaccctgcacgcgcgtgttatcaacgaatgtagtaaaggcgcaacatgcgtgccacgtcatgaaccattagttcttggccctttaattgatgatagctcaaggagtacattcgtgatcctaacaatcaccacgtgtcataaatttgtctttaagatttagaaggagactgcaagctcccacaactcaaagagtctcgaaagcttggggttaaatattattcgtgtttcgaaagaggtgacacatggcataaaaaggaagagataatctcataatctcactaattaaaatctctgacgaaaactctatcacgaagaagcttcattgatccaagaacaagtcaagactgagagataaatggaagtctacctcgccttatcttagcttctcagacacagaatacgtattaccactctagaacccggagtggtccaaactcaaagcctgcccaaatgatacctagatggatacttgaagggcctatcacagacgctgactgtccaagagtatcgcggggacgtctaccttggatgcaaacccgaattgcccaacgacggttatgctttttctaacacaaaattagattttgtcccttttgctagaacatggtagttcgtgcacctcacacacttttttaccagatggttattccaagcatcacttttaaaggttgaaccttttggcggcacgtgtccaccaagtacaatggtctcttattgtccagctggtgcaacacacgagcataattcttttcaaggagctaatagttaacttttttttttacatgtatttgtcccattagtgggctttttgtaaaaatcctaggcgggtcatgggcatgtccatacttgcccttatagcctataaatacctttctattttcatacgaatggggggatcagaacctaagagctgaaactctgctcacattattctaagctttaatcttcttctaaagaaatacagaatacagagttagggtttcctgctaaaaaatacaacatcaattacataatttaaggctaatagaccgagggactaagatttgttaacaccta

SEQ ID NO: 226863 - DNA, 1323 bp, Cannabis indica
cctttggataatttcatcccaagaaattctatttgcgtctgtccaataatcatttccttttcagataacataataccatgggatttggtgatagaaataaattgggtcaataacgattgatggacttttgcatcaggagaaaagggcaaaatattgtcaatatagatgagagccttttctaatatcgggccatatatcttggtcatagctttttggaataaagaaggggcaattttgagcccaaaaggtaagacggtctattggaaatgatgatttaaaatgcaaaaggctattttcggtcggccatcttgtttgatgcctaattgtcaaaatcccgtttttaggttaaattttgaaaaatatgggcttttgataaattggcaaataatgaattcttatttggtattgggaatttatcgtctgctccgaactcatttaagagcttgtagttgatgaccaacctttgctttcctcgagctttccctgatcgattattgacataaaatgcttgacatgcacctgaagatgaagttgactctattaaaccctggtgttgtaactatttgcattcattaaacgccatttgttgatgttctggatcatgcttgggtgactagcctgtgtaaggtttatatcttcattaagcttaaaaggaaggtttacgaagaacttttgatttttccataaaggatggtcacatttcttcaagaactctgcatgattgcacatgagacttcgatgagctctttcttgatttgatgaaatgggtcatggggcattaagaaatagtttggtatggcttcccatggagaaaaatgttgtttgtaaccaagtccatttggaagaatacgcaaacctttcttctttgtgtaaagatcaaatccaatatttaagtcttttccgagtaattttgatccaatgactatgtgagtaacagaacaccctgggaggaacaacaatcaaatcggtttgctgataaaaactacctccatttgcaacatgaaagtattatttttctctcttccaatattatttaggaagaatatcagggttcattatcgtgtatgacgctcccatgtcaaaaaatcttgacacttttatcggcttggcatattttgttagaagaacttgtacagtgatgacaggggatgatttcatcgtgtgaatagtggatattggataacattttggagtatccgaatcactcctttgtttaaatacacgaagagattctgagttgaattcatcatttgtggagaaggttgactctataatattctccttaagagacatcccaattgtttgttggatatgtgagataag

SEQ ID NO: 226864 - DNA, 1452 bp, Cannabis indica
actttgctagggctgaattagattctctgggtaggattagttttactgctttgttcttgtgtgcataatttctcgtggccattctgacacttatttgtttatttctttaagcagctaggccaatggaggagcttttggcgactctcgcccagacctacagtgctgactctgctttgcctctagcacctgaccagacggtgaccccaacgaggtcttcttcgagcattcacttgggccaaatcgtcctgatcaacgaagacagggaggccgaaaaggaagaagagagagagatccttgcccctctagaccggaaacgcaagggcaagatggtggaggttgagtctactaagaagcccaggagggttaatacaccagctgccagctctaactcagggatcccacttgaagtggaggaatatactgtggcccccagaattgtcctgactctcgttcctgctgatgaagagagacaatagctccggatcgccaagcacaactatgttatggctgaatacacaaaggggaacgctgaggtggaggccttgaaaaaggtcttaagggaggcccaggagaattcctcgcgtggtgagttctttgggaaagcctgggacctgaacatggaccccctgacagactggttcaaccgcttcatcgggcctacccttgctccgtttgccttcagagttaacgagccactttgtctccaacctaacccagctcccggccaagagatatgcagcctgcgcttccacaaactcaatttaacaaattgaggatattaacactactatgactgttgtaagtctatctgttagtgttctcgggccttgctttatggcgcctgatctcccgtacttactcatttttcttgtatcgccagattgctgcagagaccggtcgcctctcaaagactttaatcgatcatgggtacatcatgtctgaattcaggggcatggatgaggccatgaagagtctaagagacttggcgacagagaagaaagctttccgagaagaggcccagcagtgggagactcagatggagcggaggcaccaggaggcattgaaggccaaggctgaggagttaaaggcaaaggatgatgccctgaagactcgggatgaggtcgtgagcaaggcaaggcgtgagcttagtgaggccaaggaggcgcttaaagatttgactgccaaacttaagtccttagaagagttgcaccaggctgatctaaaaacgacagccaacctggccgttgaggtgaaggagcttcgtgacttcaaggagcaggctgaaaagaaacgctttgaggacggtgtctttatggcctggcagactaatgtttagaaccttaagctcaacttctatcccaagcctgaagaggtccttgtctgcttctgggagaagcaaaaaagacttgatgccttgctggaggagtgtaggggtcctcgccttccaccttg

SEQ ID NO: 226865 - DNA, 889 bp, Cannabis indica
aaaaaattgtatcggtcacagttaaagatattttatagtattgattttttattatatatttatttttcgtaaataagttttatcttttaagggtctttttattttttcaaataatacatttaattattattaaaaaaaaagtaagcaaaaattaattgactcctatctggaatagaattatacaaaatatatttatattttaattagtatttcaggtttaaattactacacaaatttgtttcgatgaaatgatcagttcttgagactttattttgtcattacacgaaaatcaaaatcattgagctaatgttattgattcaattcctcattgttgaacttgaaacttttattaattgataaaataatacaacgatgtattccaatctacatatatatattttaaaatatatatacatataattaatattttaatatagaaaataataatttaaaaatctattacatataatatagatatatagattgaatatttattcaatttttgtaagatttttttttaattgaatttataagaaaatataatgtaaaataaaataaaatatttttttatacatactaccttctgcatttggaatgttgctatgggattgttagcaactcttagatgagttgaaaaatgtttctttaagttttgttaagcattctgccaataagactgtgcactttcttgcgcgtagttcttgttattcgccagttcgtatgttatattctaatgattctcctttggaattattagacattgtaatggttgattccttattttaataaaacgccatttttcatttgataaaaaatatttctctatacatcctaatacaatataaatttttttctagaatttattattttttgttttatttattttaat

SEQ ID NO: 226866 - DNA, 2503 bp, Cannabis indica
gctcgttcatacactagattacacctaaaaaagaaaattcagtgcaccaaaatagagttaaaacctcaaatcagaaaataaattgcaaaatagttgataacacacaatttttagtttcaatcctcggcaatgacgaccaaaaacttgttagtaaaaattatgtacgaaagtatacgcagtcaaacaagtaataaaatgataagtaagatcgtctccacagggattgcaaacaaagtttgatgtaaaaccaactaattacaacttaaagtaagaggaaataacatgaaaatggttgagcaatgattcaaaattaaaatgacagtaattaaacttgctaaaattaatactactgttgctagaaaaattgcttgcaagaaaaaaaatgtaatatggtaaaagtggcttgaatagctaattccttctagtcaggttttttcccaggtgttacagcattggttcagcattactccagcattttgcacagagataacataaattcctctaggcttgtgagaattttccaaaactcacaaattaaagtctaccacttagctcaatatattcctatatcaaaccagcaagcagaacactattcaaacatcaattcttaagttatgcaaggtaaatgaaatattcctattccacttacaaagaaaaacctaaatctaggttttcacttgctccattcaagttgaactactagatctagcccttccggaacaagatctagcttagcaaattgttattcatggccaagaaacaacaatcaaataaaatgaaactcacttgaatgaacaaaggaaaaaatgctaaagtaagcttaaaaattaatcatacccaacatagaagttcatagccattcaagcctcaaaagtctagctcatattcaaatcaaaaactaaaatccaatctaaaaatgtatcttccatagctgctgcccagttttacaatttaacaaagtctttaataactaaatacaaacaacaagaaaagagaaagagaaaggaaaatatttagagagggtaaaagaaaaatcaaacactaaagctatgtcccccttttctttctcctttgctgtactttttctgcacttaatttccttcaaaaattgcagctcctacgtgatagagaagatgatggtgtacttagcttttttcccctttttttagttgttgggtccctaaggtacaaaaatcacaccctaaaattagaagcctaatcctttttgcactttggcccactaggtttagtcctccctttacaaagcatccaactggtctcatttttagtgacaaatacactcctgctgatgtggacagctaaatctcatgtttccacgtcactgccagaatgctgactttgtttcagcattgcttcagcaatctgccccaatttcagcttttgttctcacttcttccttgcttccttttctttttcctatcaatgtaattctttatttttcaacaacaaacaaggacaattaattagaaaaaacacacctaataatatcaatttttacaagacttaaaagttagcttactaaatagaaaatgaaactaaaactaactaaaattaagcaaacaaacacattttcactcctcttctcacaatacttttagtttaaaatcatataaaataactctataccatagagttatcaacttacgtatataaaatagacatagtgagaccatcttatatagtataagatgatggaacacttttggtttgaatcaaatagtatctcttctactttgttactttgttttaagatttagtaatgttcttagaaaagtagtatttgttaaaataaatactttcttcttttaatgaccatagaatgatccacccctaatcactttagaatatctatcaaacatgaaaacctaaactaacaattctagcttttcttaagttcatgatcagggcatccctgaatctagcaatggtgtacactatgtatacgactattacatcattatgaggttatcttgggatcagacttatgtgggatgatatttagaatattttttgctgtctctaagccatatccctagaaggactcaggaaactgctagtaactaatcatagaccttaccattttcaataaaatgcgattctaaagttctaggaaagtaagtttggatacaattcaaagtttaacttaatgatctttgaatttcataaccaaatatttctccagccctatcagttcgtaagatctctaactacttacctaattagttttccccattgctagaaactcatgaaaattttcaaatattttaaatttctttgcataaggtaaagagttattgtctaagaatttaatgaaatgctcatatccacccctgaatatacatccacatgttcgaagacataaggacatagttccaaatgggtattgacacattttctctttcgagagaatgttcttgttaaagccactatgaacaagatgtaaatgccatagatgtatgttgttgttgttgtggtcttttga

SEQ ID NO: 226867 - DNA, 1521 bp, Cannabis indica
aactaatatattagtaagaaatacatttgtaaaagcacacatgtggtgtccctgaggttcaaagcattacaaccatcgaacattcgtcttcaacctttactcatttttacaataggaaggcatcggaccaccattaggcctgacaaaaaaaccaatgttttgtccaaaactcagatctggtcatttcgaccctaaatttaacatctattcacagataacaaacattaatcatacaatttattcttttgacaacattgccgatagtgaatcggtagctgatggagaagtcgttgggtccgcggtggtcattgggtccgtgggtccttgagtctatagtcgtggtggtcgtggagagaagggactaaggttatgggtggtgggttgtgggtcgagtccttgggtgagttcaaagagcgagagaaaaaagtgagaaaaaaagagtgttaggtgtttgaaatgagaggggtagaattgagttttataaaatatcagtctattctattaatatgggttaacttaagtttagaaaaataattttaatttaataaaggtataaaaaatcaaattttccattccgattttgtattttacaaaatagatcaaactgatataatgtgctctaacaaaataattttctaagcacattttttgaatgattttgtttttggtgatattagaaagggaaatatcacttgactaaaattgacccaagggtatcagagtgtgatctattttacaaaacagaaagattcaatacatttttttttatgaaatatcaacttcattaaattaacattctcagtacaaaatatccaaaatagtaactggagcattagacacagaaatagtacgaccagataagtatcgtgacatcctaacaacaacatgtgctagacggtttgctgatcgtttaacaaaacggacttttattaaaggcatagaaagcataagagaatgacagtcttgaactagattcccataaatggaacaaagtggcgagcggctacgaatagcttagatatagactaaactgtcagattccagttcaacatgttgccaaccttgtcgtttgatccaacttagggcctctttgattcccataatctttacaacctctggtgtgaagacaccattaaaacaatgagctttagcatcaatgagagctccggagtcatttctggcaaccataccatagccatgttggttatcactagcaaagatcgcaacatcaacattaatcttgattgtatttgtttctgatttagtccaaagctcagctccatcatcatgactaccattgtagatatgagatagagaagtgttatcctgagcttttcgccaatgatcaagagctatgcatgctgaagatatgacatttgcaacagtgagtaccttatctttctaaactattgagttctttgctttccataaagaccacccaaccataaccattgaacagactcgatcagcatcaagagactgaaaaagaccgtccaaccagctagcaaaagagagatcaag

SEQ ID NO: 226868 - DNA, 1410 bp, Cannabis indica
taatacgtaagtgactattttgcatttaaacttggttttaattattccatgtattcagttttagcctccctgacttataatcttattattttgatagcggttacgaaaagaccaactcctacccccaatatggttgagcgacgtaggctcctgctgggtcttccatacggtctccgatcagctgagttccttttgaacgaggtcaacctgaggtccgtgggcctctcgctgagaacgagtatactagtgatgataaatatcccaagtatgcatcgtggcagcaaatttcggtcccaactgacgaggaaactcaggactacatggctcgggtgcactatctttagaacatagttcctcaggaaggcaaagaaggagcgttccaaggtaatcaatgtcgttggtcacccacagtgcttaggaccgaacgtaccacattagtgtctttttgagatagccagtataatttctatacatggaatccattcctcatagatcgcattgcacataggtttgatagttggtacccaaaattcaacgttcaaattagatgtactaactcctattatggggtagccgaggagtaagagaccatgctggataggtcaggtcatatagattcgagctggtatttagagccaattaattcctgcgacatattcaggatcacaggatgtagagattttagtgaatattatagtcccccttcttcgtcttcttatgattatggtaaatcccttaagcgggaaataatttcccaattttccctttttcttgtttttaaacaactattaacacattgttttgtcttccagaaatggatctcgaagaccttctttattcctcaagaaagaagggaaaaaggaggttaactgccttggagacttccttttatgtcaacgtggagcccctcaaaattcctaggaagacaactagaaacaggaagcgagcctcccagaccatcgacctcaatgcccctaagaaccaggttaagactcaccatccggccctcgcgcaattttcattattaaaatatatagctaaaaataaatgattaattaaaaatacattattttaaatactgagctttaatcaaagagatattcgatctccattgttggtattacaatggttaaatgttttcaatataacctcgagacgctagacttcgtcccccttatggatggttattcgttgaaagcatttaacactgtaagatctcatatgataagtattttgcaagttgtcatttctattagactgccccctacggtgactacttagaaataaatttacagagtatgaaacaatggtggaagtgttggaattattttaccaggatctagatttactaacaagtatgttacattaacatcctaatatgaatttctataacaatgaaataaacacata

SEQ ID NO: 226869 - DNA, 1322 bp, Cannabis indica
tataataaatttttaaatatttaattatttttaaatgatattaaattatttttttataacaagaagaactaagtatgagttattctatttgagtttgtggttgctttgttttctgagggagcatgactttgtttttttgactctggtttggtttttttgagtaaatgactccttataaaaaaagatgaaggagtttagccattttttttagaaaatacattcaacatatttcactttttactttttgaatattcaaataaaaaactaaataattaagtgtaataattttaaattaaagttataagtataataaattttaaattataaagagttttggtataaaatttttaataatttaagggcaaaaaaaaattgttaaaagattcttatttaatacgaaaaaattaattaataattataattaatttaattatagaatataattaatttacattaaagttttataagcaaataaattattaggtgactattaggttacaagttaatcattatttatttttatttaatttctaaattaatcacaaccattcaatagtaatttaatggttaaaaaatgtaaccataatgttacaaatatgtaaccattaaaacctcctccacccttatatattatatattatagtgtacaatttgaaagttaaataaatcattattttttttcacaattgatatatgtatgaaaaatactaaagggtgttcacgagtggtgctcaccaccaccgcgaagtattgtaaaattaagtatgaggtcttatttattttaatttaataattatttttacaaaaattgtatattattcataaaacatcacatctcatgaagattaaactaatgtcttataacactctctatatgtaaatttgtaggtttttactaattaataacattttgagatctatgatctgtataatatgttaacagtgagaaagcagtgttagaaacagaaatgtcaaacaatgaccaaggtagttagtgactatttagatatgtgatcacaatatcttctctattgattgcacacttcaactatttaatatttatttacttttagcaccccaccacaaccaacttttcaaatctttctgaatctcatcaccccccaaaataaattcattaaaagaaaaaaaaaaaagagtttataaggctaaggaaattatactctctatctctcaataacaaaatttaagccaataattaattatggaatggatccactcttggctgaagattgcatttcctcccattatcatatttctacgctttttgattctaccaattatattccattcaagtttctaca

SEQ ID NO: 226870 - DNA, 1428 bp, Cannabis indica
tatactaccatacatccgatactggtaaaacttttgccaatgaccctggaaaggacagaacacttatccaaggtgtaagatacctatcgttgattatcatctcaatctaaatccagtgaactacaaatcagggaataaactttcgaacatataattatgattatattccactgtgctgacaacactataatcattaacaaattcatatgttctggacttaaatagaattcatacattatatatataatcatgaaataaatcatgtgaaccatgcaacataaaaatgttatttctgatctttattattaagtaaatctgattatattgaaatgagttttatttagggcacaaaacccaacaatcagaagttatcttgccaacagcttccatggcaagaccttccacatgatcccaagacggcactcctccatccacatggtctaacgacggcattcctccgtccacaaccgaacctcctgtcgctgctatcagccctgagacggttcttgatcaaaacatgtcttcaatagctgatcctcttcgagagtccaacactaggcgcccacctcagtacacctccaaagttctagatttgggttctcccattgatgttgtcgacaacactgtcattcctcctcagcgatcgattgatcgatccattactgatgacctctcgagtcctttatttcttagtccgagcgatcatcctggattggttctcgtctctaaagttctcaacggaacaaactatcaatcatggaaacgtggaattacgatggcccaaactaccaagaacaagattgcattcatagatggatctttacctcgtcctcccactggtaatccctctcttaattcttggattcgttgcaataatatggtcatgtcatggcttgttaattccgtttctactaagattgctcatagtataatgtatttcgatattgccactgatatgtggctcgacttggctgagaggttcaatgagggcaatggccctagaatcttccaactacagacacaactcactcggttacaatagggtgagcaatctgtatctgcttatttcactaagctgaaatacctttgggatgagttgaaagaatttcaaccaaacacaacttgcccccgtggtgccatgaaaatcattcttgattactacaatcagaaccaagtcctccagttcttgactggattgaatgagtcttactcatctgcatgggcttaaatcttgttgaatgaacctatcccctatctttcaagggtttttgccatgatcattcaagaagagcatcaaaggactcttggatcttcagaagcacctcccctggctgttgccgctcatccaccatctacttatcctccatgagccaagaagcctcgtccttcatgctctcactatggaaaacaaggtcatttctttgacaa

SEQ ID NO: 226871 - DNA, 1954 bp, Cannabis indica
atgccttttcgtcctaccaagagaaacatttacaaaaaaataatgaaaagaagtgaattaactactagctagaatcatatatatttaatgataattttaatattaaaaaatatctggcataattttatgatgaaaattagaacttatctgagtgttattattatatctgatttttcttaatccaatgaaatatatctcataagtcattataaatgcttaaatatagtttatttcatttcaaaaaaaaaaaatatatatagtttatttaaaaagtgtttaaataagtttcaaaagaatttacacggtctaaaagatctcatgattgatttttttttaaaagaccaatttattgtaaggaaaaaacaaaaacttatcttaatattgaattcttttgaaaaaagattagtcatttgttgagtaaacaggaagtagctaattccaaacaaaatggcttaaaagtaaaaacaaaaataatattgttataaatattattgttttagatatctctcgctatagtaataaaatcaaggttaattaagatttttgccctatgaactttaacatatactaaattatacattttgaacatttaaattcattaaaaatactccttgaactattgagatttttggatttaataactttttttcaattttagtaaaaaagtctaatgtggatgaaagttcagggggcataatttagtacatgtcaaagttcgaagaacataatttagtagatatcaaagttcggagagcatggtttaggacataaagaattactgaaatagtaaacttgaatgaaattagataaaaaatccttaaatccaacaatctcaatagttcagggagtatttttaacaaccttaaaaattcaaagaacatgatttggtacatgtcaaatgtcaaaattcatggacaaaaatattaattagcctaaaaccaattaattgtttgtaagttaattattttttcaaatatacaatatatttttttaaaaaaaatattaaatatatgagatttgtaaaattccgaatatgtaaaatttctccaatcacgaggattcgtctttcatggtgatggtgatgttttgatttattcgagtattcaatatctttaccaaataatgctccaatcaaaaatgaacattgttcaattattaaatcccatttttggttttctacatacaactattattattatttttggaaatttaaataaaatatacttttacgaaatattgtttattttagatggaaaataatattttttagacaaaaaaataatatatatttttgtaaaatagaaataatatgatttgattatataaatctataaaagcataattttttttactatttttgagtatttatgaaagaatttagtgttatgtgaattttgtataatatataattatacatataggagtccttcaattgaaattgaagttatttttactatttatctccatatccaatataattctatgtttaggattatagtctactttcttgtcttaaaaattgaaaaacattctatatttttctcctaataatttattccaacatggaattttcagatatcaacaatttcaatacgttacagtccaaaatatctattggcgtttggttggaagtaatgaaattgtaatggaatgaaaatgaaacaattttcattccattcctttgtttgattgcattttaaagtattggaatgtcattctaatggaatgtcctttcaccattttggtggaatgactattccattttgaaatagaagaaaaaactattacaatgtaacatgagaaaaaatttaatgtattttttttattaatttcttttatgcaatttaaattttattccattctattcctattcctattcccatatttttattcttcccaaccaaatgccacctaaatttttacgcgtcatcctagtcagctactaaaacatatc

SEQ ID NO: 226872 - DNA, 1749 bp, Cannabis indica
cataacacttgtacaccaacttatacattaaaaaagtaaatatatacttatttttctctttgttaaaaataacctaatagcaacgaataaacaacacaataacaattctattttaatatgaaaattaattgtacatcaactaatagtgtagaaaatatgaaagaaaccaacaaacaacaaaaagtatgaaccatgaaaaaccataaactatttttctcttgattaaacaattaaatatgaagaaataaaataactagataacaacttcatattataatacataaattaattagttaacaacacattgcatcaactacaaaaaaaaaaaaatcaaaaacaactgataaataatcttaaagaaaaaagtaaaagcaactgcaaaatactggtgcattaacttaaaaaaaatatatacccataaaaagtaaacttatattcatttaatttttttttacgtagtacgttaaacaactaaataacaacgaacaaacaattagataacaaccctattttaatatgaaaagttaatagacatcaacatgtggtgttaacttgaaaaatacaaataatcttagacacataacacaacaataattttaaatcaattgtacatcaactaatagtgcacaaaatgaaagaaaccaataaacaacaaaaagtatgaaccatgaaaaattaaaacataagctatttttctcttgattgaacaattaaatatgaagaaaataaaataactagataacaatttcatactaatacgtaaattaattagttaacaacacattacattaactcaaaagaaattcaaaaacaactgataaatattcttaagaaaaagagtaaaaacagatgcaaaatactagtgcattaacttaaaaaatatatatatacccataaaaaagtaaacatatattcatttaattttcttatgtagttaaataactaaatatataacaaagagcaaacaattagataacaaccctattttaaatataaaaacttattagacaacatgtggtgttaacttgaaaaacacaaataatcttagaaaaataacacaacaacaatcttaatatatgtatccattaaaaattaaatatatatatatatatttaatttttcataattgaacaactaaataacaataaataaatatatatatataataactccactgtaacataatatttaaatagacattataaaataacttcacaggctgcataactccaagagtaaataaaaacacgattaataaataaactaaactcaaaaggaattacaaagcgtttcaaaaatatattgtacccataaaaattaaatataaatttatttttctcttggtcgaataactaattaataatgaacaaacaactaaatagcaatccaactttaatataagaatatgaaaattaattaggaattaatacattgcattaacttaaaaaataacacttaagtaatctcaaaagaataaataaacttaaaagcaactgcaaattaattttacatctactcaaaaatatatgtaacaacaaaaaattaaacatttacttctttaaaaaaatttgctttgatattttatcttggtaatatattttattttttaatttacacaaagtactatttttggttgaaaaattacacttttacattcatatatatactttaatatttttacgttgttctataaaataacgtaaaaataataaaaaaaaaacaacatgaaaataacataaaaataatata

SEQ ID NO: 226873 - DNA, 1533 bp, Cannabis indica
caatccgcacaaatacagattttttggattttttcaatccaatccgatctgcataagtgcaaatatctgcactttgcggattgaatttattaagtatttataacaattctttttgtttggcatgggagattagaggagggaagggatagttggatggagagcaattttttctaaattccaatttataatccttccattaatggaaggatccactctcactctttaattgttggaaattacaattgtaccatctaaatatattattaaaaatattatctataaggataataagataatttcaaaaataaatactctctatccttccaccattctatcctttcgaccaaacaacttaaaaggaatgctacttcactctccctctctccttttctacatcgttcatcaactctccattctctccattctccatttctcttacttgacataaattgtaagttttaattttaaattttattaatatcaaaaattataaaatctaaatgtcaaataaaatatcacaaagtctaaattttaaataaaaaaataatttagttattgaacataatttatgtaatatataatttttaaaattataaattaatttaattgggttaaaaattataaataattttacaattttaactcgtccaatatattaattttggtggattgaaataaattttaacccacttaatatataaaattgggcatttttttttgaataaaattggtatctttattaactaatcaaatcgttaataacaatagaacgtgtttcagaagaacaatcctccaactgaaacacacgacttggagagaaacaagagtctctggctaagcagtgagctagcttgtttgcagattgtttgacaaaatacaaatcaatattttctaaagataaaagcaatgcccgaacatcatgcactaaaagaccaaaagaagatgacataaagattttactttgaatagcttgtacgcataccaagttgtctgattccaaaatcacttgtccccaattgtgccgatcaatccaacttaaagcttctttgatgccaaccatctctacaacttcaggttgaaccctcctaaaatgaccccaattgaaagcctccacgacattgccatggcagtcgcgagccacacaaccccacccaaacctgccttcatgctcaaataaggcgccatcaacattaaccttgatctttcctgaagaaggtgcactccaatgctcaaccaaatggcctccgtcaaacaacgaagacaaagaaagaccctttcttttttgagcgtctttgaactgatcaagtagcattcttgctgatgtaaccacatttgcagcagtccaacttttttgctgccaaacaaagccatttctggcacgccaaatggccctgaccatagtcgcctcctccaactcgcctcttttcctcggtattgcagctccagtagccaattgctgaaaatcctcatccatattaccgccacaaaccacacttgtcctatttccagcaggcacgagcatgaacacacccc

SEQ ID NO: 226874 - DNA, 1508 bp, Cannabis indica
agataaggagatggaaacgttaaggactcagcaggcagtcattgacgaccgtagtcgacaagccactgtgctgatatgaaaagcctatcagactgtcgggcaacaacctgtaaccgtcatccccttgggcgaaacagacgaagatccatcgatgaatacctctcagattataaatggtcagccgtcaaatcactggtcgaaggttccacctgtgggcaagtggttggcgagcagaccttgtctagtaattcatcaggagaagtcatacccaatacttccaaccaagttaatggtgcctgtcagcaaattggacaaaccaatcagtcactgaggcagccaggcgtttgcgtatttgataggttagggacggctcatgatctcagaaacgatctgaaaaggaggagaagagtggatgatcagcttgacgcgccaatcgtgcaacccggaacccttgcttaaaatcccgctcaaatagatgctgatgtaactcaggtcggccaagagccgaacaggttggtccagccgtgcaagcatagttggacgactaaaaaatatgttcaaggccttgctggtcagaggaaaaaccatctcgagttggaccaagcatgtggaacccctttctctcccgagattaatatcccagagttgccaacctggaagatgtatactgggaaggaagatcccttatcccaccttaagtatttggatatgcaaatggacctgcaaggagtacgaggagatgtatgttgaagggtttttcatgccactctttcaaaagccgcccaacaatgttatttcaagttggcccccagaaagttcaactcttgccaactttcgttgcacctaggagatctggtcgaagtaaaccaaaaaccaggggagcctctccgagcctacatcagcagattcatgacagatgcgactaaggttgcacgggtaaccgatactgggggcattgaagtccttggtgaaatttggaatgacataaggaagaacggaacagtagacttgatgagcgatttccttgaccgtgcagaaggatttatcaaatttgaagaggcgactcagcgagcagagggtgaacaaaaacctagcaagtcaaaagctccttctactggaacatccgtcaagctcccccattactcaatcaattcatgctcaagtagtaaatggtccagcaacaataataaataagggaatgggaaaaatggaaagttcacttgcaagaccgaacaagctcgccgggagaatccttccaagtatactgcatttaccgtcctgacggaagacatggaaagtgtttatatggctacttagtcattagccccatacaagatgcccacacacatgaaaaaagatgtcagcaggagagatatgacaaagtttttgtcgttttcatgggggattacggccatgatacaaatgaatgtaataatctgacgcgagaaatcgaattccttattaaggaaaaataatctgcacgtgtagaagtatgtcaaggccgatca

SEQ ID NO: 226875 - DNA, 1258 bp, Cannabis indica
aataagaaacaaacatgcagagaatattgacttcggtgcaatgtatgtaatctttctcatagcatatggaggcaaagcaacacgatgctccatgagactgttctcaaatacagtctgcacaaggaaataaccgaaggctttacaaactatttaaagacaagaaaatagaagaaatcaagtcctagaataaaatattaaaactactttacaaagtataattccacattagaaacttacaacatacaattactactacaattgtattgatagcatcagggtcatctctctcagctaatctcatgtcagaattatttttcaattcagttatgtcaatctttagctccctggtagcaaccttattttggctatcaataaaatcttcaaatctaatcatattgtcatcacaattactactgcaacatatgcctttcatagccaatcttactgccaaactcttatttctcttttcaggtgcaaaaatatttggtttacagtttgctcctccaatatttattaatggagtaggagacatcccaaaaaacttagtcttattaattacaaatacttaaagaaattcctttatatatttagcctgaaaccaaaatacactatgttaatgaaaattagcataatgatcaaaagatttgaaaaaaaaaaattgatgcaattgcaaaccaaataaacatgagtaagtcacattcatatatgaagaaaaatacacattcattctaatgaaaaatacttgttgagatcatcataggttctccgaaattgaatgtttagtagcaaaaaataacgaaatcaaggtctgagtcatattcatgggtctagctcaaaaaccttgtttgaaagcgctaccaaatcggaaatgtccgaagtgagaagccatcaatatcttcctttgcttcttcgtctactcgcttcccctatgactatctataagtttttttttgaatcagtacgaattgatttccttcacagatcaatttccttattgaagtaatgagaatcgatttgaatgattacggggatgaggatcaatttctttattgaagcagtgagaatcgattgtttctttattgaagcaaggatgagaataagaatatttgattatttcttgttgaatatttctagacgtctcattctcagagctgagaataagaatgaggaaaagatgttggggtttatgccctaaataaaactccatttcaatgtaatctttgttgtttaaatatcaataaagaaatagaagtatttt

SEQ ID NO: 226876 - DNA, 1369 bp, Cannabis indica
agtcaatcttattagatttcttatagttttttcagagcctttcttgtatgattttttcatcctctttttgatcttacttgccactatttataatcacatagtaggcagttaattacaaagttgactgtaatctttacaatgttttctcctgaaatcatggggtttgattacatatcacgtagtataattgcggttattacttgaaaatcatacagatgtgattttcccgcttttactaggtcaaaatgatcgtgtatttaaacacgtctttaattgtaacatttagggatttctcgacaggagcttggttctagtgaccgtgatagcaagctggagcctttttttcttatcctttttgaggtcaacagtgtacaccttgttgcttctttgtttgaaagcttaactctttatttgtgacaatcgcagttcttattaatagagagtttctcgaggctcacttgaatgttatcttctaacccgtcgagattgtaagtctcgctgagaagatgtttgaagttaactgggggaagttataggaatgagccttcctatagcgagataggcacctctcctattaggtctcgagccaacccgactgttatacttagtttgtacattatttgctaagtgttatcacaatcaatatgtgtcgctttcgtcttcccagatataacagagttgatgtctccctttatgcattcaatgacatatggtttctcgctaatataccaaacaacagtttgcatatcttttcctcgcataagaccttatagtcagcgagtggccagtatgctctgctacttatacaattaatgagttattccattaaaagtaatttcgtcgatccatattccctttatcttgacacgtgtcctccactgagatggtagccaaatttcaggtataacaattgccccttaaaaagttctttttttaataaaagtgctttttaataattacagagggcatttttgtcataatccctttagaaaaatgtgtcccttgattctagcggttgtacggttttgagggtcattatgagccatatgtttatgttctggcccatcccaaaccgttagatctcccaacctttggccttcttgtccctgtactttgagtataaaatggtggcttaagcttgccatattctacacacctttggttttttgtctagtttcatcttgagaagggattgtcattctctcgtcaagatgccccatccgagtttagaaatttatccctccaaattcaatacaccagaatgcaccaaccacttttcttctttatacgttcccaaggacttcaaacctcaatttgaattggaaacgtaggattccaaggctgaagagcttccgatcaatccaaacca

SEQ ID NO: 226877 - DNA, 2100 bp, Cannabis indica
atagatttctacatttatttttagcttctacaaaaactcaacccgagaaagctactaagacgatttaccaataaatgataaaaattttatagttaaatttagttaaaaaaaaaaaataaaaaaaattaaatattatatttaatccaaattttattattatgctccattacattaggagttgaaagttttagttattctaaagctaagtatttgattttaggtatgattctgatgaattaaaactagaaagataacagaattttacaagtttttttctgtattagaaacacattccaatcgaatagtgtttggatccccaagaactgggtaaagtaacctccactataaaatcattaagaatacattcaccagttctgatttacaaatcaataacataatttgaaatggtcttacacgagagttatcggccgatacacttgaatacaattaactaattaggaacaaagatataagtccacttagatctgagaagacaagatccacttgcttccaccaagctgaattcccttcagtagattagtctgaactcccttcaaacattgcaaattcacactctttcaacccttgaagatccaatgaattacgatctgcaacacacaatcaacaaagagctagaatcacaaaaagattctatcaaagatggagagctagttagaaaaaagtattttctcctagcagagcaagaatcataaaaagattctatcaaagatggaaagctagttagaaaaagctttatgagcttaatatatctcacacttcagtaaaattgactcaactaactaactactaactcaacagttcaagccagctagcaacaagctaaactaactaatgaaacaaactaaaaagctagctgacttggcaaaagaaaaatgaattcagaccaaacagatgcaactaagaccaacttagatgaacaactcaaaagtcaaaccaaaaactagaacaaaacacaactaaactaatataaagcaacataattttccttacaaaaatatggtacttacaatctcccccttgacaaattatgatcaacaactaagcaaaatattcaagaaagaaaacaaaacgctaagcacaaaaagacactaactatccaaaggtaaaatcaagtcagcttacaaactgacaaagttaagttcaatagacaaaataacaaactaaaaactaaacccaaaatagttacaatgtttagaatatttgtataaaaaaaagaaacacaatatctccccttgatgatcataattactcgctactggaataggcgacaagagatgcaagaagagcattactcgaaggctccacctagacaccaacagtttttgaaacctcctgaacatttacaataaccttctccccctgaacatcaacaataatggtatcctcctgaatagttgcagaaactttctccccttgaacaccttcaggaacttgctccttttaaacaacaacacaagtattaagaccttgatcgacaaccatagaagaagattgaacatcagaaacaaggatagaaggcctagggactacagcagcagatggatttgcatccaaattagatggagagaacactggtgaatgcacagagaaggcaccatcaccatatgaaaagctaaaaaataccaccagtgggaacaaaaggaccaacttcaaaagaatttaaaacctcaatcatagtagaccaaacgtcaattacaaccttctcaaactaacgttgtctaagataatcacatgcataagattcagcaaaagtattcacctaggaaaatatctgaccttgccaagtagtaggactgaacccttccagaggtgttgaaggagcagtcgaggattatgggacattagaggctaaagccttactaatagcaagaacatccataaccaataagagtaaaggcttgccaaaaacaagagagaaagatttgtcaagggtaggaacatgaaaaatcttgtcttgatcaaacacagcaagaaaccccctttgcaccacacgattaatcagacttggataaggcaaagtgtgtagagttcacaatccaatcatacataagtgagtgaagatcaatactaacaccagta

SEQ ID NO: 226878 - DNA, 1128 bp, Cannabis indica
tttgtccatggaaggtatattgcccataatattctggtgtgtcaagatatggtgaggctatatgggaggaaaaattgtaagccaagttgcatgattaaaatagatttgaggaaggcctatgacactattgaatggggtttcctagaagaaatgcttgcttccgattcagttcattgagcttgtaatgatctgtatcaagaccgcaaaattctctctcctttttaatggctctatatgtggattttttaatgcaaagagagggtgaaggcaaggagatcctatgtctcccctcctctttgtattagggatggaatacttatctcgaattcttcgaaagattggtgaaatgcctggctttaaatttcatgaaagatgctcatcattgaaactgaatcacatgtgctttgctgacgatccattagtgtttagtcatggagattttatctcaatcatgttgatgttaagagggctgaaactcttctcttcaacttcgtgtttaatgccgaatgagaagaagacggcgatctattgttcaagcatggcagaggctgaagttggaagaatccttgaagcctcacaattcaaaagaagctccctaccattcaggtacctcagaatacctatttgcttaaagaaaatttctaattctgaatgtcagatcttgttagagaagatcgttagtaaaatcagagggtggagttctagaaatttgtcctatatgggaagagtaactttgattaatgctgtactcatagctatacatacatattgggctcagattatgatactacctaagaagttgctcaaggatattgaggcaatatgtagatcttacttatggaagggaactcaaatgtcgacgggtcttggtttagtggcttgggagcatgtgtgtctccccaagagtgctggtggacttggacttagagatattcagaaatggaatacagcagctatgactagatatgtattgggacatagctagcaagaaagattgtttgtttgtcaaatggatacataatgtatacttgaaagattggtgcttgtgggactatgaagtccctgccgattgcagctggttttggaaaaaattggttggagtcaagatcaggtgaaggctagattgat

SEQ ID NO: 226879 - DNA, 912 bp, Cannabis indica
aaatcttaattagccttttttttaatgttaatccttctccaatcccactcaacctgaaccaacacatataagtacatattttaacaaaagagtgtcgaacgttatcacaattgataagggaaaacgtcaacaacaaccacttacaacacggggcactaaggcaggtttaccaccggcagatgcagattgtaataatttagggtaattttttttagatagttttttttgattaactttttttttttgacaaataagataaagcttcattaaatcaccaaatcgttcattattatagacatgaactctgagggggcgtcactcacctgataaacacgatcagagataacactagtagatctctttgagaattgagctactttgtttgtagatcgtttgataaattttttaaaaaaaccacatttatggttaaaactatatgacagactcttacaatcattaataattctgccaaaataagacagtatagcatatgaacttcttatagcttggccaactacaagacagtctgtattcgatgtcgactttgttccactgctgatctttataatccaactgagggcttcgggaatctgaattgcttcaacaatttctggttgaacttttcctctagtgcaaattaatctagcctctacaatggttttgggccacaaaggaatagctaaaacaattggagtgataaaaaattacagcgtcaatattcaccttaaacattttttctattagagttcgccaatactcaactccatcttcagaattcaccaatcctagagatgtatcttgtgttttgtcttgagctctttgctattgattaaggacagtctttgctaacaccacaacctcgcccacaacctttattttttgttgggttttatgccctaaataaaactcttt

SEQ ID NO: 226880 - DNA, 1880 bp, Cannabis indica
ttcctgccactttctttttttttttgtacttaccctttacatgtttttaatacataaaattataatatattataaaattagttttattttattgatcaacagggctgaaaaataggtgagctaaggtattatattttggccctatcacaaaatacacaaaaattgctcttttttctcaataagagttcatacatatataatttgcattagatatttgggccctaagtttgggtggaccctaggcatgtgcctagcccgctttagctcagtgctgagcttgggtaaccctagttttattacttttttttttaaaaaaaaagaaataagcgtattcattcattaaataaaacaacagttagatctctcggtcattacaaaatagctcctccggtaaggaggagatcaaaatagagccgtataactagtgggtgaaagcccacttaaccacattatgggcaacaaaattacaagtcctactaatattagaaaaattacaactaataaaagaggaagatgacttaatacaaaaggagacatagttatcaagagcccaatggaacaccttcccattgagagcattgatagctagtctcgagtcactctctacaataacatacttataccctaactccatagccagcgagatagccaaacagtaggccacaacttcttcgcataacacatctgagaaatccaaccaagccgtgtgaacccaaatcaccctaccaagatgattccttgctacaatagctgtgcacatactctctaagcccactctaacatcacaatttattttttatccaatcctgaggaggtggagatcaggtctccctcaagatcggcgtaggattgggagagaatcatgtaactctacaaaagaagtacaaatattgtcaatacatttcaacacatcaggaggagaattattctgaaccctttcattgcacgtcctccatatggtgtcaacaacaattaaagcataaagaaagacgtcctcaactctgatccccctatttctaagatcccaaataaatttcacccagtcccaaacacgaataccagtatcacaaacaaagtagattccccaaggtgaagatcgccataaatgtagggccacctcacaagaaagaaacaaatgttcaatagattcatccctcagcccacacaaaggacaacttgtatccttaatctgaaatcgtctcctaatctcaaatctaacagggagcgcattagacaggatgcaccacgaaaggaccttatgatgctccgaaaatttgctattccaaagtgacggagcaacctcacagtgaggggctctttccaaagcctgtgtcaggtaagctgatttgcacgagaactgttcgttgctttccaatgtccaaatccatctatctttaccttggccaccttttaagattgcagaaacagtctcatgatcaaaaagactgtttaacttatggacatcccaccctccacttgataataagagatcagctacactattgtgatccgttacaacagcaccattcggtttcaggacaaaacctttacaatgaggaatctaaggatccttccaaatactagtatccctaccattagatatctttttacaggcccctttattatacctattttaatttttacctttcttttagtaatctttaatttatactcacttttctaaattttgttcccgttatacccttagattaatgaaaagaaatagaattcaattacatctccaaataacacgataacttctgccaccctttcgtcttctgtgggcgcacattttcacgctcatccctcagtcgacgactcaactcagtcctccatgtacggttgataaggtgcccgaagcagagttcctccatattagt

SEQ ID NO: 226881 - DNA, 592 bp, Cannabis indica
aaaaaaaaaacttatacaattaacgactccaatttgaaaacatatgggatctcaagttacgaaaacaatattataaattgccaaatattactcattatatcttcaattacaaatgaaacaacccatcatgtcatgatataattttcacattaaaagaagtttgaaagagatatgtatggcttcaaatgaggctttacaggaaagtgtagaacatggtccatacgtacttaaagagatttttaaaaaaaaaagtaaactatctaaacttgtgccagcataatagcataataacacatttacgaagtatgtaaaaccttgacctgtactctttagccatggcaacacatcttctcctaaagcttggattaacctcttgaaccctgtacagttcttctctgtcacctctagtactcgatgaatgaactgagtttatgcacaataatttggccatgtttatattaattatggtttatatcatgtaaacgtaaagagaggtgtgaaggctatttatacaagtccacaagtagagtaaaacatggagactagtgtgacgtgttcctgttagataaattaacaattaacccaagatcta

SEQ ID NO: 226882 - DNA, 5153 bp, Cannabis indica
agctggaatgatgtgttggcaaggaaccgatatattcagcaatagtagctctgcaaaaagctatcttgatcaatggcaaaacgctcaaaaaactcaaattgagtcatcttggtctgatcttcaagactatgatgggacggagcgatggattaaaccacagaataatagatcaagatcaacgtggatgcggctatattgaaggacaaaatcggtttggggtgctattgttattagagatcataatggttttttaattgaaggccatactaaattgcaccaaggcaacattgctccttctgtagcggaggctttgagctttcgggaagccttaagctggatcaaagatcaccaatcatatcccgtatgggtggagaccgactgccttctggtcattcaagctttaaggagctcgactagtttgacttcttattttggttgtgtgattcaggaatgtaaagccatgttggctaacttaagcaatgtttatttttgtttcgttaagcggtcagctaatagagtcgctcatgagtttgcaagggcgtctttattttatcctgattgtactttcagtatgggaaacatccctactgagctgttgcctattttggtgacagagtttgaaggttaataaagtttaattttctttttttttaaaaaaaaaaaaaaaattctcttgtttatgaacgagttgacataaaacaacaggcaataaaattaatacacgtggtttccaattttgactcccgataaaacttgcttacttggcataatttaacaggtccttcatccaaccaaagcttttattcttggttctcggatctttaaaacggtgacgtcttaaatcctagaccggaccccaaaaatggcgaaagggcctctctcgcttctcagtctcggataccgatcaaatcccccaaatccctccttttccctatattgaatggaagccctaatttgtttatgattcgtattgggagaaatttgtttgcaatctgatcattattgctcaaagatacacaaatttgagccctaatttcgatcgatttgggtgagaattttcaattgttggatctgaactggaacttcgtattctatttagctattctagggtttgattttgaaatttcgttggcgcgctgtatgaacagcacgtcaaaattttaggatagggatcaatcgcgctgcaaggagtagagagggttggggggagaagaagccaccgatcgacggaggcgaaacatgtctgccatagtgtgtgggaagagatccatttttgaagagttgcccactacgccttcagtttctaagagaatcagattttcttcttcttcaacctctccttcgtcttcacctgcccgtttttctcctccgaaatctttctctgtctcagtctcagcctccaaccaataccccttcggaacttcttcgcaatcccttcatttcattgattgtctaaaggggcttttcccggatatggacccccaggtttgccttcgaagttttctttctgtatgattttttcgtcaaatgtgtaaatgttcagtgattcaattttttttttttattttttatttacatgtttgttttatgaatgaaattgggggatttcgtatcgtttattgtgttttttttggtgaacccatatggatacattggccataaaaatcaggcttcaagttacgttggattgcactcaaacctcgttgagctccatcttcctgctttattgcttgcccttagagggtttaagtgctaatttattgttagaagttttgtgttgggtgtagtttgcaaacacaactctttcagtttcgtttctggctttggcttattcttggtcaaattggtatatgtatgtatatatattattattgggtaattctggctcatatgattgataggctgttatttagaattcatccgcattgctttggagttaatatatgttctctgtatggaatctattcgacttgaatgtgtctttctaggtcgtctataatttttttccctttctcttgatattttttatccatagtgtatgaagtatcttgtagatttttaatttatatgaaaagtttctgacaattggaattttatcaatccagcttctggagagagcagttgaagaatgtggagatgatttggattcagctattagaagtttgaatgagttacgattaggatctgcttgccaaaattcaggctctgctgcaggcacatcagatgagcagcagcagcagaaggaaatgttcaacaacaatcacaaggtaaattgaaagccttgtggccaaaatcctggaatgattacatgggtgtttggactcattggactttaactttgatttgcgtgaaaatatttatttatatggcattggacagaggcgtgagctattctttggtagggcaatactataatgaatagtgaatatattgattgacaacgaaaaagaactagttaaatcaaaagggctgaagagatttctttaatgcagggagaaattttgttgaaatttgtaggtaccaaaatggctgtgatatctagtgatctttgtattcttctctctttatcaatgatcaactctatgtttttttttctctatcttttctttactgtctccttttcttcttattttaatggaaattgtcagtaattagtttccattattgagttatgttcgccaagtgattttaaaaacaatgttgttgttatcaatggaattaatgaaacatgaatattcttttcacttgcagtgacaatcaatggagaggttccaattggggaggaaaatcttccgaaggatggcgcagattgggtggagctttttgttagagagatgatgactgcatctgacatggatgacgccaaagctcgtgcatcaagagtgctcgaggttttggagaaatccatctatacacgtgcaagtgcagaagtggcccaaactatccatcaggttctaaattatctttgtgattttatctgttgcctgtacaatactctaatacaaaaattttttatcttcttctgttgcttagaagttgttggaccataaaaatttgatgttaatctttcttatgtttgattttaattatttgtaggaaaatgttgtgttgaaggaacaagtaggtgtacttatgcaggaaaatgcaattcttaagcgagctgtgtctattcagcacgatcgtcacaaagaatttgaaaataagaaccaagagttgcagcaattaaagcaactggtgtcccagtatcaagagcaattgagaacactggaggtttagctcacgacagcccctaacataaacatgttttttccttgctatgataatttgtttatttattcaattatgataggaatgttattatcatgcaataattggatttactaattgatatatgctgcccaatcaggtgaacaactatgcactaaccatgcacctcaagcaggctcagcaaggcaactccattcccgggcgatttcaccctgatgttttctgatgtccttgtaaattgaatttttttgggtagataagcaggctgtgctactaatctgaagggcacctgaagcccttgactgctatgtactcatcgtttgtggccatattagcttccggtggagtgccctttttatgcggcaaagataagcaccggaccaaatacacaaaattgcatatgaacacttaatttatttttgttttttacctctctttctcgatctttgattgtattattgtaaggaacctcaaaaggaaaaaaaaggaatttgattgtatttacatacattaataaattctcttaaaattgcattttgaaatagcgatatggagtttctccagtctaagtattacatatctgctcaatttttttttttggatgaatctgttaccatgactagaagtattttttatatttggggaagggattcgaatttgaaactttttgaagaggtgtcaaggatatgagtatctataaatcctcatttagagttattttgtattcaactttacaatatacttggaattagacaaacactcaatattggactaagtacttttgtcgtgttctgtgaggtgcctcttaccttataagattagtttttggaaaaactcataaaagaagcgaacataagaataaggaaacaccaagttttcttttgcacatgaccccaatttaaagcacttggcaaatgtttctatctacttttgtggtttgctttatactcttttcttacacttactttttgagtctttgggttagtttcttttggacttagctgcacagttagtgaaaaaaaaaaaacgtagggtttgcttatagcacatttaatttacactaaatagagattttatatcttagattcaatttaatcggcaaacctgtagattgaatgattattttaaattgcttacattatttaatattaattaaaaaatatatttcttttgacataagcaataacaaaataaaagaaattagtgttgttttatgtttcaaatatcaaattaaaataaaaaataaaaaaaattataaattcaaaaagaaaaaattatatatatatataaaaaatatttaatcttattttaatttatatttgtattatatctattaaatttttaaattatattttttttacattgaattagttatatacataagtacaaatattcgtattttacggagtagattaaatctccaaaattaaagtagatttaattatttatgaacatccaaagaaagtgtattgtatatcattatccaaagttgtatatgtgctaaaaacttggtatgggtttagtacatacagctaacattgccaacgaagctctgtactgtaaaatagttatataccttcccaaaaaattggtgaggtaaagcagacaataggcagacccattggtttgacgacacatatttcgaggtcaattcacacatcttggccagattagacatatgcttagcatttgttgaatacaaaaattaaatagaaaactaatacacatgatccaataattcattgactaaagtgtaaaaaagtggtttgttggttatcattcctcattgctgtacaaccaatatgtatataaatatttttttttgatttaacatatataaatagttgctacttgctatattgaactgaatatttttttatcacacc

SEQ ID NO: 226883 - DNA, 1229 bp, Cannabis indica
ctctctctctctctctctctctctctctctctctctctctctctctctctctctcttgtgaccctcttcgaaccaagaaaaaatcagagattttcttatcaattcaagtcattttcaacaaaattctaagggaatttggaggatcaaacttaaggtataaccctagatctttctcttttgtttttggaagctttaaactaagtttaagcatgcatttttttggttgaggttatgtccaaaccttttgagtttgggtttagttttttgggtgctctttaagttttttgaagctagttcagggtctttttgctggttgtgtgtggagttgagcaagtttgagtttaagaactcaaacttggctcaacaatggtaaaattatgtttttttttagattatactatttagaatatgttttgatgtttaattaggtggtctagagtttattttgaagtttggagttattttgagctcgaatggaccattcttactggaaaattatccaaaaaaaatagtttgtcacttttataaatggcatgccgtttttctaggcagatttgccatagtctcattttttttttttacattttctctgtatttagggtatttccatgctatttatcgatagaaaaacttttaattttaagtttaggtcccaaaaaggtttagcaagttgtttacccattttgcgtgattgtgacataggtccttcatttagcgggtgaatttctatttaagtcgaccagcacatttgaatcaaaaaacgaggtaagaatagtataaaatgtgtatacgtatatgtgtgtattatatgcatgttgtattatgagatttgtatactactaacactagtacgattgcggtatggagtacattggtacaatatatgatgttaaaagggtataacatagtgttacccatattagtataagacgagtacagagtgcatgtggtacaacactcagtggtactcaagatgcggttcattcctaccaacactactacgtgacgagtacttagtgcacgtggtatataagtcttacttccattaagaacgttcttaatgcatctgaagccttgtaagtaggtgtatgagtgcctagatacaagtcggtattatgttatatattttgtgcttttcttactgagtctgtcgactcaaagttattgtttacatgtgtaggtaaaaggaaggcgaaagctgagcactaatgagtctagggcttgaggat

SEQ ID NO: 226884 - DNA, 1216 bp, Cannabis indica
gttgccacgtgaaacgttagtttcatcaaggacttgaaagaaaacaaagtacaagttagtgtcaaaggacacgctgtcgacagcctttttctaaggttgcttggccgtccagaccccttaaagacaaattattggtcgactaacccatggatgtctgccctaaataaaacccatttcaatataattagatttactaattaataaaagattagaaaccattcaatgttgcatggttcacataatttatttcatgattatgtttaatgtataaattctattaagttcagatcgtatatatgtattggttcatgattatagtgtcgtcaacacagtagaatataatcatgattacatgttcaaaagtttaagtcccatgatttgtcagtaaacttgatttagactaacatgataattgccaataaggtatgcttacacctcggatttagactaacatgataattgccaataaggtatgcttacaccttggataagtgttatgtcctttctagggtattggcgaagtttacaagtatcagatgtatagagtatacatttgattggaccaatgttgatcttagataagatatcataaacttactgttatatctttatgttcttcaagttgttcatgaaagttaacacattgttctggtagatacttaatcttgagaatatggtagttcaattgagtgggagcgctaatcataaatatagaatctatagtttttataattatttagaagtgaaatgatgatttccttcgagcttgactggaaagaaataaattattgagatcatattttagtaattatattagtttactgaaatatcatttataagtagctaagttttttaaggataaataacattgaagggtagaacggtaaatttgacccgtttaaggtagatcatctctagaggattttttactattaggattgtaaaaatagataatcatattgtatctatatcttcgtacatatagtgttttatatcattgagtgtgcgattccaaatctatggtggtgcaaggcaaaattaataggttatggaatttactttgtaaattatgggtctacttgtgggaagctaggttatataggtcgatggtcccttcactagttgagataataatgcttccatactcagttaattagttttaattaatcaattataatgttaaaattatactatgtcttatttatgaattttcact

SEQ ID NO: 226885 - DNA, 1781 bp, Cannabis indica
acatggggttgcgggctcggagtcggattcggaggattcgtctccataagaggctatcaaagcctccatactctgtgtctcttgcttggaactgaaccgtatttacatggttgcttgctagttgctactgccgtgggtgtgtggaggctccaactgatcagttttttgttaacgctatttagatttttgtctcccaagtccgaagtaacttaaagcatctccaattggagttcaaaaaacgtggtttagtcctatattttgtttagagggtaaatattattggaaaattctacaatacactccttaaaatagatatattgatgcaccattatttgttttagcacccaaaataattttttagtcaaattttttttcatggtcgtgtacgttatagttatttaagacatcctgcaaaattttaagaaatttggaaaagtttaacatgccgaaaaatacgttcaaacagtgtgttacacgcgtgactattttattttatacgcgtgtaaaatagacaatttgaatattgttttctatattgtaaattattctgaatttctcaaaattttgtatgttatcttaaatagctataatgtacatgaatatgaaaaaaaaattagactaaaaagttcttctggatgccgaaacaagtcaaaggtgtatcagtacatcgcttttaaggaggtgcattgtagaatcacctaatattattttggattatgagttttttaaaaattattaattgaactttctattttgttaaatgattctgatgttaatttttaatataactaacttaaagacaatttttaacatgaacagatacaaaaaatataactagttttgtcataacatctctagatcagattattattaagttttattttgacaaaaaatcagttcatgttcctatttgtacaattttgaaaaatacaggatccattttgtcatttaacaaaacagaaggtctaattggtatcttttgcaaaatacaagatctaaaatagtatttattctatttttaacacacttaaacagttaaacctactactctaagggggcgtttggtacaagaggttcaaaataatctgattaaggagaacactatgaaggagaatatgattatatgtaaacttattactctgtttggtttatacatgagaatatttaattagattattattaattagattatagtatttggttgagtacatgaatcttatatataattttaaaaaagtgaaataaaacaaaataataattgttatacccctttaagctataattatacataaaataaaataactttttgttaattatatttattaattaataaatttatgtcattgtattaagtaaaataacaatctttcacttatatttttatatttaatattttttatatttatataaatatataaaattattatagtaatcaaataagcatagataaaaattatactcaaataaatttttaacgaaatgctaaaagaaaaacaaaacttcataaatttatttttgaataaaagtataatctaaaatatttatgttcaaaagagaaactgtgatgattatttattgtgtgaaggaacaaagaaaagaagaagatgatgataaataataatggcagtagactaaggagctatataattttttttatgttcattttagttttttatttgactttttatttaatgaaaatcatattcttacgtcaatgtaggtgatggaatatttgagttccacctttttttaaagagagagtattacacccttttagggta

SEQ ID NO: 226886 - DNA, 1166 bp, Cannabis indica
aacaaaataatgaaaaaaaaaaataataatttacattttatgacataaaatttattatacaaaatatagtaattttaaaaaaatatatatatataatttaaaaaatagaaacccaataaaacaacataaataaagttaacaagatttaaaagaacaaatatcgatgaaaaagtcgtcagagcagctatcgtctctaaaaaaatcactagagcaatcgtcgtcgcacaacaaaagtcgtcggagtagtcattaccaccggagtttgtcgtactccccaaaatttgtcattgtcgtcggaaagtcatcggacaactccctggagttgtcatcatcgtcaaaaaattcatcagagttttcatcgtcattggagttagatgtcagagttggatgttagaatatgacataaagaaatcggttacattcactacaagaaatgttacttttaccagcacagtttgctattacttttaccagcgcacatttgcagtggctaaaatctaaattttaccagcgcatttacgcgctggaaaaaattatttttgccagtacttttcattttgtgctggcaaaagttctaataccaatgttgatttaccaatcccttttgccaacacatcagtatagtaaattctattttaccagggcaataccaaacttttgccagcacaaaaatgtactaggaaaagtgacattttttgtagtgatttatcaactagttaaaactttgagataaaagattggttctacaaagcaaccaatataaaaactaacacacaaaaatatgttatataaaataaataaataaaaaaaaatagttcatttaattaactaaatcaacaattactaaattaaaaagcaatttcttgaattgactaaatcaaaaactggttattgaaataaataattcaagaaccggtttctaaaataactaaataaaatactagctacgaaacaaagcaaatagaatacaacacagtctttgcaacttattagcaactcatggttctggtcaatctttaaatatgttagctagaaaaaaaataaaacaacataaaaaatattaggaatcggttaactttaacaaaaaacataatatacaaagagtaatttgcggcataaatatctaagttttatgtcgagtaacagataagtacttaagtcgtatt

SEQ ID NO: 226887 - DNA, 1253 bp, Cannabis indica
aaaactaaatctatggaagaaatccttggggtggaaccaatggaattcactgatgatgaagaagatggagtagttgtttatggtgcagcagagtctgattctcggcgagatgtcatgccagatcctttgtctctgagatcatctctgaaagcgatacttcagcaagatatttgattcgatttttctcatttcacggaggcaaataagaattgttctttctcgattgccagaggagatacaatgatgcccccaattcttagaactgggaatgtggtgagaaacctagaaaatacttttgataagtctgagaaagagaaggcagtcaagattactatggaagacatagaagatgagatagcttactggaagtcatctattgtttgctatgtgctagtggccaatcccttattattagttttggatggttttgttagacgcatatggagtggaaagttcaacaagctcagacttctgtcgtatggagttttcttaatcagatttgatacaatggaccatcgtgatgaagtgcttaatggtggatatatatattcttcaataagaggcctgtcatcatgaagacgtgggatccaaatacaaacttcaaaaaggaggatatttgtactgttccaatctgggttcagcttacagatttggagttgaagtattgggggcaaagagctttgttcaaaatcattggccaagtgggagaacctattatggtggatgatgctaccaaagagagagacaaacttagctatccaagagtcctcatccaagtgtccattcatcaagacttcctaggtactatctattttgaagatgagcatggaaataatatacctgttgaaatcttttatgagtggaaacctataagatgtggaaattttaaaggaataggccatgccactgtggattgtcgtaagaaagaaagtttgaagcaagagtgggtggtcaagagcgataaaaggaaagctgaacaaaaaccacaaccagcaccaggggagttttaagaagtaactaaaggctggaaagttaaagaaaaagatccaattacagggccatctacatctaattcttttcaagctctacagggtaattctcttatagaagaggctgtaacagaactgtcagtaaagtcactcccgatggaaacagagaagacaggaggagggggagatcctcctcttctcaatggataaaatcatctcctggaacgtccgaggaatcaacagccagcaaaagcaaaatatggt

SEQ ID NO: 226888 - DNA, 1655 bp, Cannabis indica
gaataataaaatataattaagtctttacattcgtattttacctaattaaagtatctaaaggggtttttcttttttaataaaatgtgtcatatatatctgtataaaaagctatttatctcgttgttgtggtatttcagtgtttctctatctatatatactactataactattactatatataaagcaaaatagtgactttacgtgtaacttctcttctggcggctaaacaaatctcttttgaaatagctgtgcatacaactaatctcaaaattctcatattttattgaattaatgatataattaacacagaattgaacaatttgtgatgttctcatatatttataattaatatgtatggcatggcttgctttgaaacctcccaattttaaagtagagcacacttgcattttctaattaattctaattaattctaattatatatatttatatgcaacactaattttctttttcagcaactacatttattgtatttgattttgattgacatatagaagcattgtgctgtctgttgttgtacccatttggccatagtctagtaccatataaacaggtatatacagtatactgtatatatatagtgttgtatattaatatatacgcttgtgctgattcgtgcactgtactttttttctgtgagaacattattttgatggccctttctaccaagtgcgtactttgaattatagagctcttttttatgcgtaattttcatgcttattttgcttaaacgattgtgggggcttttttttttaaaatataataaccaatttaactattgtgtgactcaccttttttgtttgtactggtgttaatgttattaacttttaccattataaagttgacattagtgtaaacaaaaaaagatgagttacaccaattagttacaatttttttttaatttaaaatatatattatgagttacaatttggttatgctaagcaacaattttggtttagtttatgttactgatataaaaacatatatttttttaataaaatatcattaataaaagatagggaaattaccttatctgtttttttaattttttttttttaaatttacggtttgggtttctaaagtggttgcagcgctagttgcaatatgggattctatgcgatttttgttgcaatttaagttgcagctagttgcaataagagtttctatgtagaattccgtaaaaatgcaaaaaaaatgcaaaaaaggaaaaaaaaaaaaaaaactagttttgaagtgtaaaaaatgaaaaaaatccgtaaaagatatacgaaatttttaataaattttaatttttttatataataatgcgcattgaagtttttaaaacactctaaattttttaaaataaaaaattagaacaattcaacataccaaaaaaaatttaaaataatttattatacgcgtgtgaaatagacagtttttttatttttttagaaaaatacgtcattaaaatacgtagactcaaaaactagtttggccaaagaataggcaacactattagtcatcttaggacaaaacttaaaagaaatattagtaaaattattacaataaataaaaatatctctaataatacaactaaaataagactgattcacatgatgattagagatagcgtagaattttttttatttatgctt

SEQ ID NO: 226889 - DNA, 724 bp, Cannabis indica
acaagtaagccattgcaagagcccaaaacttcggtaccgccctcaaaatcgattgggtgattgagttccacaacggagttaagattatcaaggtcgacccagtatatgtcgctccagttaagaaccaagccggcgttggagtaggtttccttggagtggttgaggtgccgcttgatgaaatcagggctgtcgattaaggagcaccatggcttggatacgcacctgtagcggaggaggtccttgacggggagccgaataagtatgtcggcgatgatctccgatgggaggctcgtcgtcatttactttggtaagaggtgaataggaagagtcaatgggtcatatggcaaggcaagagtcgcactgtgttttgatttgaaactacggaagggatggatggcgtatacaacaagcctcaaagtctcatgggtaaagggattaatgtgtaaacgggtacacagtaagttggtgcacttacactagcgtccaataaatgataaatgatgttttttttattttattttattctttttgataatgataaaaaattaaaaatgataaggtgatgcttgggttgtgtgttctggttcttgattgaaatttgaaaggggaaatttgattttctatacttacatatacctaatattttatttttaaactaatacatatcatcattgaaaatatatgaccactttatctaaaatccaaaaatacccctctcaaattt

SEQ ID NO: 226890 - DNA, 3511 bp, Cannabis indica
ttatatagaatagatatagaaaaaatttgattttttttagaaaaatttaatgagttgatcgggtcaactcgaacctgcgagctcgaaacctgcgaatctgaaccatttcacggatcaagcccgagtaaattttttaaatttgaaacccgctcaacccgccccatgttcagccctataaggattggtttgaaaaaaatgtctgggaacacccctacatgcatgaggtggtcctaaataaggctttataatggactgtgtattttacacgtcaaagagcagagcctagtttgggacgacgtcgtttatgtatttctaatcctaagcttttttcttgtgaaagtgggaaaccccaaaacccaaatattatcttcaatttaaacttttcttctccaattactctctacaattacatattgcgtctggttcgctttggatttcgcaattacaaaccctagaatactaattcataaacaactcaaacgccccttaaggtatttccattttcccagggttcattactttacctgaatttaaatttcgtgttttatcggaaaccctaataatcgcagttttattattctaatttctcttcttccatgtattagtaattcgcttgaggtcttctataactttgtaattgcaattttatttatctattaaagggttgcagtattgaattggtgtttgaagaattatgcttgatttttatggtagcccaatttgtatatatatttgggattttggggtttttctgtgttgcttttattgttcctaatctgttttccgatccctgatttaatttacgctctcactctttttttctgggctagtaatccagttttggtacgtacttattggaaggtattgatttaatttgcaggaccttttggttcattttcattttgtgactttgtacatacatcaacttcatggcatccgttgatggtagagttacttattcttctctctctaagctagaccatgaggacagccaaccccattatgatgacgacttcaatgataatagtggatggcctgtgccggagggcaatatcagttacccatcagtattgtcaaagtcttcaaaacaagaatacttgtatcaatttcccgatgaatcagaagattttattggtgatggatatgattcaggtgaggatttcagcaataacgctctcacaactaagacaccagaggttaatttgaaaaatgtgctgaatgggatatttgcaatattaaccgggagtaataaatctttaactgttcccacgaataagtcgttacccagttcaaatgtttcgtttctgggctctggcaaggacggaaacacctatttacactcctcagtttacatccccagtgccccgccccttcttgagccaagtggaatcaattatagtgcttacaaagaggtattggatgctgaaccccctgattgggttcctgatagtgctaccacagtttgcatgcagtgcactgctccttttacggctattactcgtgggcggcatcattgtcggttttgtgggggaattttctgcagaaattgctctaaaggaaggtgcttgttacctctcaagtttagagagagggatcctcagagggtctgtgatacttgttacgacaggcttgatcctttacagagcattcttatcaacagtgttagcaatgctgcacaaattgccaagcacgatgtgatggattggacatgtactagaggatggttgaatcttcctgttggtttatccatggaacatgagatatacaaagcatccaatactttgagaagctactgccaggtgcaattttgattttcaatcctcttctttgtgattatgtatctgatagtgactttttctatgtacttgtggaatatcataaatttgtgtttaaacaaacaaaattttacagtgaaaatcacctgtcatcgtgttattatgtaacatctttttgttgttttgttcaatttgacagattagtaggcttaattctgaaaggtccattcctctagctgttcttaaaggagccaaaggccttgcaattctaacagttgctaaaggtggtgtcgttgtgtcttacaaagttggcaccggtttggttgttgccagaaggtcagatggatcatggtctgccccatctgccatatcctctgttggcttagggtggggtgctcaggtataatttgctattgggttcagctgaatcaagttgaatgaaataaatagatagtaggaatttcatgtagaaggttgttgcagtctaaagtcttgcctgtagtttctttctgtttcattatttccgaaaatcttattattgtttcaaacttagttgctcttttaaggtgattattctttattacagattggtggtgagcttatggacttcattattgttcttcatgattcacaagctgtcaagacattttgtagccgcatgcatttctctcttggtgctggctgtagcgctgctgcaggacctatcggaagagttgtggaggctgatctccgtgctggagacaaaggttcaggcatgtgctacacatatagctgtagcaaaggtaccatactatctttccaatctcttgtgtgttcaaatgttttgcatagttacattcatgtattttgtgagaccgagactggggagccttgtcatctatggtttctttctttatgtcattgtagctcaaaaaacgcatttgacttatcacttattgtgtaggtgcctttgtgggagtttcattggaagggaacattgttactacaaggatggatacaaatctacgtttctatggcgatccttacctcacaacatctgatatattgcttggggacagtggacaggccaaaggctgcggagcccttgtatgctgcccttgatggtctctattatagcttgaggcactagtagtttcagacgtttatttgctctttgtacatacgtacatacgtaatgctatatagcatctgtcttgttcagtacttactactccccccatgttatgtttatgtctctctgtgttcagtctcattggtttggttttaatgtttatttctcatctttgattttgtaactgtacaaaaactcaatctcattgatgttggttaagcttaactctcatttgtacatattaattgtacaaactaccaaccattgcaatatagaatgaacccatctatttctattttctactcatttttattactataacttaatgcgcactgacaaagataaaacaactccttgatttgtgggacctataaagcaataaattatctttgcttcgattccataatcattgtcctatgtttgaagggaaatgtttttggacaatgtttaacactctattatgtgttaatattattattggtttaattaagtatattatgtgttaatattattattggtttaattaagtatcgagtcttatataatttaatataataatttttaagcagtattgctagccaatcacaacgccacatgcctataaggtgttagacactactgatgc

SEQ ID NO: 226891 - DNA, 614 bp, Cannabis indica
taattattatgtatcctacttttattattcataataatattctgtgttcctatttctttcaattttagatttttatctgttgttgctttttttaacacaattgacatgttttcctcacttagttaatttaccggtattgttagttgagtagattcataagtttgttacttttattagttagtacagctcatgtttccttagttagttgagcttatttttcctactttctatgaataaagtgttcacgaacggtgttcgcgatgcgggtggtgcgagttttgactattttttcaaaccaacccacacatgtattttttttcaatttccaaaccgcacccgcaccacgaaactaaaaaactgcagaaaacctactacaaaaaatagtgcggtgtgtcacggacttaccttttcaggcagcggaacacccgtgcggcaccttaacttctctaagacaaggtcagtcttccaaccatccgagtaacaatgggctcatttttcgcgcgacagtgtgcctcgtggatgttagattaaaattctcaatatgggctcatatgtatattagtgtattgctatttgaagtttggcccaaaataaagtgatcatttttagtaatt

SEQ ID NO: 226892 - DNA, 904 bp, Cannabis indica
aattcgaaagtgcccttttattttcgtctgggcattcccgccgcggccaaagaaggtctcgtcacggcgagatggcaaaaaaatacacaattctgggaagagtatttcgccgtggccgtaaataattccgccgcggcgaacattctacctcaccgcgaccacatacgggctcgccggggccactggacagtgcccagaaaaatttcttttttttttgaacaggaataaaaaacaataaactaaaattcagtttacaaattcaatgaacataaaccaacaaaaagcaagaaaaacaataagaaagttcaactaaaaacaccattaaaacttgggttgcctcccaagagcactgtctttattgtcatatagccggacgttgattgttttcttcaaagaggcgccagaatcacggcagacttggcttggtcaatatgacctcccaagtaaagctttaaccgctacccattaaccttaaaagtgtttgggttttcgccttttagttccacaactccatatgggaatgccttgaccaccgtaaatggtcccgaccatcctgacttcagcttactaggaaatagtttcaacctggaatcaaaaagtaggaccttctgcccgagttgaaactctttcctaactaagttccggtcgtgccacttcttagttctttccttgtagatttttgcattctcataggcctcatttcgaaattcttctagctcattcagttgcagcaatattttctctccaacagctgctaactccttgtttaaggtcttcataacccaatacgccttgtgctctaattctaccggtagatgacaagcttttccgtacaccaacctatacgatgacatgccgataggtgttttaaaagctgttctgtatgcccatagtgcatcatcta

SEQ ID NO: 226893 - DNA, 2262 bp, Cannabis indica
ttttttttattaaattagtttaaaattttaaattcttactagtagttatgatatgattatattataaatagttattttgggttaatcatgtaaataatataaaatgtaagatcttttaagtaaaatgtatttatttggtgtgaattattagaattgttgtatgaaaagttaaaaattatatacagatttagtgtagattttacaccaaattagtgtaaaggcttaccggaaagtagaagagaaagggcttaaaagtaaacaaaaaccttagaactatgggcattttgaaaaagagaaggcttgaaagggtgtgttagaaaactaagtattgaatttggggctaagatgggaaacattgaaaaaattcggggctttattgtaattttgaagaattgagatctttgacttaaaaattgggatttagatacacctgagagggttggtgtgcatgattgggagataacatatgtatgtcatgtggctactgtagtcaaaataaaaccttagcttaaaaaaaatagaaaaactttgagtacataatttagaactaatgcactctttatctgttttagtatttgaaaaaaaaaattatagttatttacattgtagttatttaacacatcttgtaaaattttgagagattcgaaagaatttaatacgttgaaaacaaggttcaaacagtatattacacgcgagacttttttattttgtacgcgtgtgaaatagattgttaaaccgtattttcagtgcgttgatttttttttgaatttttcaaaatttcgtaggatgccttaaataattacaatgtagactaataaattctcttgaatgccgaaataaatagagtgcatctgtaaactccttttaagagtgcattatataactttcaataatttatttttagaaaataaacctatttgttaaatgtcatcattttttaataataattatgctaagcaaatttttacaaaacaatttgaaagataatcatatttatagctgtaaatatgtttgtgttgtgccggcgaggtctatattttgaaaaatctgcaataatatgagtcgtgttgtgtcgacccaatattttaaagggtaagcccgacacggttcgtaagtctacatattcgtcttgtgctcgaactcgtgtcgtgctttactcggaccgtcccgctttttataaatgagtcagcccgttttcttatacaggtcaaacttagacttcactttttcaatttttttttatatatataattaatgagttaatcactaaattacatgtattttttattgttttaattgttttaatataattttttaataatactttacgtataatgatataagatattaattagaatgtttaaaaattgaatatttatcattaaatacatacatattattattgttaaattataataatttttaacatgttttgtttttgagctagtttatttgtgtttacatgtcgtgtctttagatttatcgcatcgtgtggtgcttaaacctatttttatgtcatattgtgccaatttacagtatcatgttatgtcttacccgaattcatattttttcgtttagggtaaaaaaaaaataaaaaaatcggcccatatttataattctaatcatatatattagtttaaaataaataatacgaatatatgaatgtattttgggtatagcataatagcaagacacacgttatataaaacgatagaaagagaaaaaaaaagtttaaataatccaaacaaattgaatgggagaaaaaaaattatgttgtgtttaatgcttgtactcaaataatatatttataggaacacgattttgtgccgttaatatatttaaaggtatttattccgtgatgtatcctgaccgttagatggattagttatttgatttgagggctgaggttaatctagggatatttaggatgaaataaattagtaaggttactttttgtaataaaaattagtaaatttaaaaaataaaaattgacatgaccaccatcaatcatatcaaccccaaccgtcctcctctcttcttcttccttcttcactcatcaccctcttcttcttcttcttcaaacttcttcttctttcttttacattaggacaaaactcttcattttccattttcgtttcaaagtaggcaaaactcccattttccattttcttcacttcgtttcgtgtacatactctgagggagcaagtgtgtggtgtacattattcgtgttctgccatttttgtggttgttacagtcgtgggt

SEQ ID NO: 226894 - DNA, 926 bp, Cannabis indica
atttaacgccgtagaatctcgaaagataagtactatttgcaagtgtttattttagtatggatcaccctaatggtggtgacttgcattttccaaaaagcaattacactttcaaaaaaaaaatataacaattaattagctttctttattcttgaaataggcgtaaaggtaaaagcttaaccctagttatgttttccctttcatctctctcccctatatttttgctcaaaggcggcacagagacaccagccacaatcgcaaggcaacgacagatcgacattcaagatgagctcacggcaagggggcgtcggcactgttcaaggctttctggtcgagcacaacagaaagattggcccagatgatggttgggtcttcggcgggcgttatacgacttcaatggagcaggaagctgaggtttttgccccaaaaatatcaggtacccgcttcctcttttcttcatcttctttttctgattctttttcaaattagatttttacttttctctttctcaactttcattttattactgtgtttaaaatagaactctgttatatggtgttctctctctcttgttgaatctatgtctaattttttctctacagatgatggaggatccgtattgattcggactcaaaaatggacgggtttcagttagtcagggaaggagattaaaacttgaattaatgggacctaagttttttttttttttgattttttattcaaatgctcatacccataattttaggtttacattgttgtattttcttttaaacaattacgtattctttttgctggttttgtatttgtgtttgttcatgtggtgtgaaaatcttctgagtattttaattatgtaatctttaaaaataatatcaatcaatatatatatatatatatatatatatataaaggaaagcaattaaggtagttga

SEQ ID NO: 226895 - DNA, 668 bp, Cannabis indica
aaataaaagggtcaaattaaaaaaaaattataagatggaaggctaaaactttattagagacttacagtcgtaaatccattgttgccaaaagttgagtcgacatccactcggaaatgcagtaaagtctctgttagtagcgaacgcaaacatggcattatggttaaccaattctggacaacactcaaccaactccaaagccaaatctattgaaaatgaatgataattattatttgtcataatttatttgatcctttttggtatccatattattagaaatcgctatacatttctacaatactcaattaagtctaaaattttctacacatttgtagaaaatttactctaaacttttagataattgtagaataatttagaattttttaaacatgtgaaaaatataatagaaggtaggcatttttagaaaactttggtctagaagtttctagttatgtatgcttaagaaatatgtagaaatgtatgaataaaatccttgaactagaaaaatctagagaaaataattctagcctcaaatgcttgaaggctagcaactataaatacccaattccaaattgtaacaaccaacaccaaaaaaccaagatccaaactatcgataaagtttactactttctcatacaaccctctcttctaagccaaactaatttcatata

SEQ ID NO: 226896 - DNA, 946 bp, Cannabis indica
tttttttagaaaaaaaaaactgacctcattaaaacctttcgagtaacccaacaagatttttccttttgcaaagaagtaacatattaggatagtcagaccagtgaccaccaaacatagttctcattcaaagataaaacaaattttgttagtgtgagccacactactaatagtcataggtagggatggggccgagtggggactcacccgtagtggggcagaggcgcggagattcactgtctaaagagggaatgggatggggattgggatcattttttgttctcgaatggtaaacagggcaggggcaaggatgacactccttgctcgaatgaggactctcttaatatattagttatattttataatatgtgtttttattttttattttgttatatattagtgttatttttataatttttttaaattgtgttttatatggtaagtaatatatattgaataataaataatgtataatactttaatttttatgtaatttaacattattataatttattttttaaaataaattttatttcccggcactgatttttcgtcccatccctggtgaagaataaacgaatgaggattaaaattcttaatgtgcatccctactcttaggccaaaatatatgtaatatatttttattatttttgaaatcacaaaatagatgtaatttaaatgtgtatatttagcattaatttgattgtatgtacacattgttatgtctttttattcaattaattattctcgtgataatctatattacatgcaagaggcaactctacggcaccataaaggcacaataaatagagaaaaatattagggaaaaaaacaggaatattctaaaaatggtaaaatattacaacaatactgtgggccggcccaatcaacatttgtacagcccaaaatgaaaatattacaaaaataccacttgcccttaccttcagcc

SEQ ID NO: 226897 - DNA, 1329 bp, Cannabis indica
aatttcccatttaatgacattattaatattaaaataatacatgaaaaagtaaaaatactggtggacaaatacgaacgtatgataccaaaagggaaacttacaaaaatactagaatttgagttaatttttacaaaaatactgttacacggaaaacttttcaaaaatactgtatttttataaaacactagtaaaatacaaaacagaacaacttaaaacaacagtagaacaactaaaaaacaccagtagaacactaatgaaacttaacacagtatactgcagtatgaaacttataaaaaaatacagtaaaaaagtaaaaagattcgcctgacaacatttttgtaataaaatgacaaaagttagtatactatgtaaatttcctaccaaaaaccatagctcacaactaaatctaatgactataaagttgattacggattaaacatctttgatgatgtgagactaaactccttaccccattataaatgtaaatttttttaaaaaaaaaaaaaaccccaagaaatttttttttctagtcccgctcgcgccctctctctctctctcttaattcagatataatcttttcttgagagagagagacagaaaagaaaagaaaagaaaaatagaaaaccccaaattgtaaaaagagggaaaattggtaccagtattatttgtagtggaagtagtggaaataggaggaagatgaggacagaagtggggtttttgatgaccctctggtgaccgccttacgacctttgggcttcttccattgttctccctatgttttccagtatattccatttatacaccacccactttctcttttttcttatatgccctccttcagaggaagactgcaaaaatgaggggttttcaaaaactaaaaaaatatatgttgtaggatgacaagaaaaaaataaaatacatttatatatgagaagagaacctttaccaaagaaattaaaaaatattaaaaaaaccctaaaactatttaggttttcatagattggggcctttattaaggttttataagtaggaatgacataaactaaccatagttaatgttgaatagaggcttgagttagggttttcttttttttttttggataactttgagttagggtttcttgttttatttttttttttaaattattaaattttttattatatttttataaattgatttaaaaattgtaaacattaaaaaatccataatatcataatttgttcataagaaacaacccaaaaaagcatagagactataccttttgtaaatcgttattgaaatgcccttaattgccattcataccacaaagttctttgccaagccccttt

SEQ ID NO: 226898 - DNA, 1952 bp, Cannabis indica
gctcacgcatcgtcacacgagaaggatcacaaagtcacaaagcagaaaaggcaagaagcctccttgctagctagtagacaccaatgagaaactaaacttgtttgcattcataaggatatctcatgagaacaatctcatctcgacaaaggcggttgtgaaaagaggtgaacaattcttcttcttaagatcccggtgacattcttcaagatcttagcttcacacagtaccaacaacagtcaacaagtacaatgttcaatagttaatattagactattacaactagagcattgctgccaggggcggaggtacattgcagccaagggtggccttggccccccaccccaattagtatacatgcattatttttttaatgtttattatatataatctaattttaagactttgttactaagtggccccccttgatcaaagtaaaatattctaaagaatttttcaaataatattacaacaaactttacttgtagagtaaatgttcaaaaaaataattagtttccttatttttttttccattttgtaagtcattgattgcatttttcttattatttattattaaatttaataattaataatataaatgattagcaaaattactcttcaatttttttaaaaaaaatatcaaaacacttacaataatcaaatatcatggtaactttttttttttctattttatttcaaagcaagtcacacgagtcaccattttataaataaggtgatcatatatcattgagttttattttgatcctatacgtataaatatacttttattattaagataaaatatagaggctttttcatttttacactttaaaacattttttttttgtatttttacggaattttacatagaaaactctgttgcaactagcgttccaacaaaaaatcgtatagaaatccctattacaactagtgctgcaaccactatagaaacccaaaccataaatttgaaaaaataaaaagttttaaaaaaagtatatggagtaattcccctaaaaaataacacatatataattaattggtggtagtgaatttggccccccctcacttttaaacctggctccgcccctgatgacacccatatcaaaactagaccagagccacgcccaaggctagaggaggccggtgagccctggtcggactaaaagaagattgtagtagcaaaaggtttagagagaaatcctagcacccaaagagaggatattatttgtttttattattattatttgactgataactcaagctagcatctaatgttaaggggttagaatgtaaaaaattaattaatgagggaccaaaatagaatttattttttaaataaaaggaaccaaatataaaaagctaatgatacaaattaaaataataaaaaaaaaaatagaaggggcccacacccacaatgtgtctctctccctaattacacatataaaattattatgatggtaaaaaataataaataaaaagagaaactctacatggaagcacgaaaacattaagacataggtcaaattaatttagacacaaccatgtcattaattaaataactctaataataaccactatttattttttaaagacgttttattaacttctaaatttcatgttttaagctataactactcataattttgtcttttactgttaataaatataatagtacgtgtacgaatgtgacgcaagacacaccgagaaagtaactaaaatataattaaagatataatatttaataatttagttggtgcgtgacacgtaaaaagggtaaaaagcctcatgagtgagtgagtgagtggtctatcaattttcatttttaataaataataataataataataataataataataataataataagggtaaatactattttggaccttctgttttgtaaaagttaccaattggaccctgtatttgttaaatgacaaaatggacattgtatt

SEQ ID NO: 226899 - DNA, 3065 bp, Cannabis indica
aaagggtttgaaaagtcaaaccgatggtgacatacaggtggcatgtgttgggaaaagtaatttggtttgtgtttctggtgggccgaatgttgtgggaaaaaagactttatcaattggccccaaaggtgtatcacgtgatgggcctactacatttgctaatgggcttgatttaattaatgatttaaatgggtgcactcatttttctcttgggccgaatgctaaggataataaggatatgggcttggagttaagtaagtgtgcataatgaaaaattgaaaaaattagttgtgcacccaagtgaaaatattttagaaggagatgttggatctaaattatgtattgttggtcaagatgtttctgatcatcttgatgagaggagatctcttgctagattctttcaagctcaggaagggtatctccaagatatggctacttttgcttctcaagggccagttaaaagaaaagcgggacatcttgacattggtgttcaaccgacatcagaaactaatgatagaactacccctgttaaaaaaagaaaacttgacatcgattctcactctttaaaactcttgcctaagtggaacatgagaagagtgaaatgtgtggtgaggaacttccctcgcggagtggggccggacgtgtctgataatttggagagatcagaggagccggaggagccgtctatggatgatgggagctctccagtgcccactaagttctgggcgggcagttcacagcaagttgacaaaccaatttatgctgggcaatcaaagagactcacggcctggaaagctagggctcagcttgtagatatcaacatcctgagtcagagccaagtccttattgaagatgcgggctctattgtgggtggttgtgtggagcattttacccctgtggaggaggtggacagccctcctccacaggagccatgataggcgttgcttgaaactgtagagggttggggcagacctctacaattctggaagtgaaagccctagttcggtcgtgctcgcctgatttcatattcataccgaactcaaaagcgacccgactcacttggtacgttctctataaagtttgcacttttattttaatattattgtccctgcggttggtggtgcaggtggtctccttcttgcttggaaagccggttttacttttgagattgtctgtatttcaaaaaaccatatttctggtattgtgtactcggaccacgagcatcacccttggatgctctcctatgtctatggcccgccatattttaatgaaaagaaatgtttttggtcgaagctggtggatcttgggctcaaatttggggggccttggttgattctctgggatgtgaactttattctgaaaagctctgaaagggttggttcgaaggggagggatcaatttttgcctttcatttcggagttgatcagtagagttggcctttttgacatgcctgtcaagggtgattgtcttacgtgggacaaccaccgagatggtgatgctcatatcaaatcagctcttgacaaggctttgactaacagtggttggcttaggctcttccctctggcggtggttaaatcttaccacacgtgtaactcggatcaccgccctctgtgtattagtactcagaaccatgatgctagagtcgctaggcctttccggtatgaggcttggtggaccagggacccccgtggtgagctgatcgtggagcatgcctggggctccttgtctcatcattgggccccggcgaggattttcaagaaggtgggggccacgcgcttggcgcttaaaaagtggagtagagatcaattcagaaaatttgataatcgcattgctaatctggaaggtcatctaaactccatccaggggcttccttttgggtctagggtttgggatgaggaggtggaaatcagaaaatcccttaaagaagctctaagacaaaaagccctctactggcaacaaagagccagggtttcctagatcaaggagggagattagtgttctaagttctttttcaccactgccacaattagaaatagaagaaatgtaattgagactatcttgaacaaagatggggtgtggttgagcaacagacgtgagattggtagagagttctcagagttgtttggaggcatttttcaaaattcggttttcgggccgttggagagtctagaccatctgatttcggaccacttttcgacctaggaacaacgagatttggttgtcattctgaattctgaagagatcagacaaacgctcttttccatgggtagtatgaaggctccgagtcccgatggtatgtcgatgctgttttataagcactactggaattcggttggtaatgatttctgtgaggctgtggaagatttcttcatctctggatgtatgcatagaggtatcaatgcaactaatgttatcctcattcccaaggtggccaaacccaagaaggtctctcagtttagacctatttccctctgtaacgtggtgtataaggtcatttctaaaattattgctaatagaatcaggtcggtacttcctaaactgatctgccctactcaggcggcttttgtcccgggcagaagcatcaatgacaataatgttttggttcaggagattatccacacgtttaaacgtaaaaagggcaaagaaggtttctttgctattaagattgatttggttaaggcttatgataaactcagttggaacttcttggatcacgtgctcagtagttttaaaactcctgacattttccgaaagtgggtttcccagtgtatcactgttgtgataaatccaacacgcaagtatacgtatcgttttaacaagtaatactcaggtaagtgagatcgttcccacgaggactgtagctaagtaccaatcaattgaactcttatttctatttggcagaatcaataataaggttgaataattaaataactaaaaattaaaaagcaggataataataataaaaaatgtaattaattatggatgaatatttagggaaaagaatcatgttgatttaattacccaattgttaatgctaattactattctctttctcaatgtgaatgaca

SEQ ID NO: 226900 - DNA, 1966 bp, Cannabis indica
tgattttttttatcaatatctttttatgcattttttaaattttatttttattttattctattcacaatttctaattttatttctattttttttttttattctattttcatttctatacttatatttttccattcctcttaacctaaatatcatctaacaacatctccaaaatgcaaaatatagttcactttgtcaaaattctagtattgtaaatacaaatatctcacgtaacaaaagtgatttaaatttggatcacaatatagcatgatacaaaatttgtatcacaataaatattatgctttttatatttactattatgtcaatttaatattttatattaaaatctagttagcatgtaaatttgcattaaatgacttttttaattattattattttattattaaattttatattattattattattttatatttttaataaaatattaaataacatattaaattttacatcaaaatttataattataccacaaaattatattttatgctaaatatagatcaatttttacattgggagatggtctaccatattagtaagtaagtaatacaaaatagatggttaattacagttaatattatattcatctcttaaaataaatatagatatacaaatatcacaattaatttgtttatttaagtattagctgtaatagaaaagaaaataataatttagacagccataatcaataaaactaaactaaagtcaaagaaaagtcattttcaagaaatgagaaaacaaaaaatatgcaaatgtaactaatgcaaaattcaaataaaagcaaaatttgaatatacacaatatttcaaaacaaaaataaataaaaaaaaattaccatcatcatcaacaacaaaatatttgtacctgaatttcgcggcgaatcttagagaaatcgtagaatcgttttccaggcaaatgacgaaactcaccccactctgctccttcatcatcggtctccggccgattctctagcacaagcagaagcggtctcctcgtgcatatatcgcagccgcgaggaagaaaatcccggccgacgagtgcctctagaacgctggatttaccgctgctctggctccctataacagccacgagaggtagagaaatatccaacgaagaattgtttcctacgggagcaataatttcctggagtttgttgatgatcggtactaatgaggaaccgatcgtcgccgccgctggaccttttcccattaatggagtttttttttgttttttctatagtttttgtaataatgagaaataaattatgaaccctaatgaaatgtgtgaagtgtttaatagttagttaattgtgtaatttagtccagtgtttgaaaagattttgaatactttattaagttatagcttagcttttttgagaggatgagagaatctatgttctacttttttttagtggagaatataataataatgataataatattaagattggtggtaaaggtaaaaagaggaataaaaatgagatggttctactaaatttgtacggtagcataaatgatatgaattatagtgtgggactataaatgattattatggtcgcaaaacgattataattttatagtgtgcgtaataattttatagtgtgcgactatagagtaaattaagtgaaattattttgtaaattttagtattttacattattagcttggcaaataaggaagaaaaatagagagaaaagaaaaggaggatggaaattttaagtgggttctactaattttttttctcctctaaaatggtaatgtataggggtatttgtagttgtttaaccctttatatgggaggattaatttagtttaatctagtcggtatatactgatatcgctcaatttattacactgtagttgtgttagtaaacgagttatatcatattcacagggaggtaaattattactaaagagtagtataagtagaatatgttagaaattagaat

SEQ ID NO: 226901 - DNA, 989 bp, Cannabis indica
atccaatctaaaaatcattttatatgaaattaaaaaaaaatgttgggtaactaaaggtcattatgtgtaatatttactaagtctagtcttttgacttgtttctgaaagtattgttgctgttgaatgatttgtttctgggctgcttgttttgtatctatgtggctgtaagagtttggtattggatatgacttccagtagtcgtacaggatttgacttaaacaaggaatatgcacaaataagcttggaggaggaggaggaagggatcttgattggtgatgataatgagggagaggaggtggcgttcgatgatcgttggtgtctcgtgggtagattcttgacgggtagattgtttgatttcgatgcgatgaggcatatgatggcatctctttggcaaccggggaaaggagtatatatcagagaattagatacgaataggtatctatttcaattttatcatgaaatcgatattcaagcggtcattgatggcagcccatggaccttcaataggattcctttgatattccaccgtctgaagagaggagaagatccgaagatggttcgactacactgcttggatctttgggttcagattcacgatctgaaaacggggtatatgctggagaaggtggttcgcaaggcaggtgactatgtgggcaagtttgtgaagactgatgcgaagaactttaacggaatttggagggaataccttcaggttcgtgccacaattgatattgacaaaccgttgaagcgtcgaatgaagttatgcaaagacaatggtgagtggatatgggcgaactttaagtatgaacacattccaaccttttgctttgtgtgtggaataatcggtcactccgaacgattttgtcctcgaagatttgacgaagattataatcccttagttaagccgtatgggaacggaatgcgtgcacagactaagaagaaaaattatttgatcggagctcaatggcttcggactggttctgaacagg

SEQ ID NO: 226902 - DNA, 842 bp, Cannabis indica
agtgatctacagtgcacggcataaatgccgtgcactgtagacaaaacttgaaaatggtggcacaattgcagtctccttggaacaaaacaacggcatatataaacttttgccgtgtccttgcaatgctcttagtacgaggactagaaacctaatcattccataaatttcacaaaatgtaccttaaaaatctcaagaaatatacgtacaaattgaatttttatgaaattataatttattgtattatgtattatttagaaaaagaaaaaaagactcttatgaaccatttcagttccaaattagacaaattaaacattccccgaccaacacagcccgggtcctgtgccaaaataaccgacccgaacccggtaaccagccgtgatgaagaaggaaggagagttattcgtaatttcgtacaatcaagaatgtttgtaggggtcaaagtgtaaaaaaattattgtagaaggctaaaattaaatttttaataaaattacaaaattataacatccagctcgcggattctgattcggatctatagcccgacccgagccgaatcgcagctagagatagtattctactttggagagagacgaagcgcgtgggagcaagaaagcacgcgcccctgttcttattacagtttttacagttgaaaatgagatcaacacaacattcaataatcacagtgacacaaatacagctattaattattattatgatgaatttgatgatcaaaaaccattataaattaaataactgaccatatagtatagaaaatggcattacataattgaccagaaaattaaaaaaaaaaaaaaaaaaaaaaaaaaagtaaatacaacgtaaag

SEQ ID NO: 226903 - DNA, 1408 bp, Cannabis indica
aaaaataattttttaaaaacaaaaaacagaaaacaataccaaacgtgctcttaatttgatatgaattatagttttggtttgttgtatgctaagatttagtgtgctatatatatatacacttagatatttccaatgattaacaaccttttatggttgtaagctcaatgagagattcttatataataaaatatatgatatatatatgtgtatatatgatcgatttattgcaatatatagctcatccatgtatttttataaataaaattttagaaaagttcctatattattaaatgaggatttaacattttgcagggaaaggttgctctggtgagtaacgaggccattcatcagcttcacatatttatttttgtgctggcagctatgcaaatcgtgtatagtactctaacaatggctttgggcagggttaaggtacatatatatatatattattgacagatattaaatataattattatctataaatgtaaattttgactttatatatatttatatatattacagatgaaacgatggaaagcttgggaaaaagagacacaaacaacggagtacttagttgccaatggtatgttagaatttccttccaaatattacattattgctaatctatatttgtgggtttcaaaaattaggttccagtaaataattctagtttttttttttttgaatttctataattgattgttgattaatgatataaggttaaaacaaaaagggaattgatctaaacatgaaaaatttatggatacaattagcataacaaatctagaagaagcaaccgtgtatagtagggagactgcagaaattttcaactggttcaaaagagttggactataaaatcattatggtcctaaattttgataccgattgacgtgtattaaacatatgcatttaattcttcttatgaaaaatgcgctcctaaatatctttattattataaggccttgcccaaagtcttcccacacgtgggatgttcccgtacctcaaatattgcttcatatataatattttcgtggtaaaacagacaaccagagaatttggacgaaatattcgccgtaacacaatttttttttttaaaaaaaaaaaaaaacttgaggagtgttaccatcattcttttggtacaaccttttagtcaacctctgtgcctggaaatatatgttgaaatactttttttaatttttattttcacgggtagtgttcgttatgcttacaacatcatccgtgtaaatttttgaaaaaatttcgtaatagtttactagtgacgaaatacgtttgtaagtttttggaacgcgagtggtaaactgaaatatctctctacttttggttattagtaactattcggaatttctcaaaaactttaacagtagatgatactgtaactataacgaaa

SEQ ID NO: 226904 - DNA, 1370 bp, Cannabis indica
gtaatagttttacaatccaattgtccacaagcattaatttatatgcatgcaagtttgagagacattattattaaggattaatttagcaaataataattattagagtatataaaaaaaacactaaatattgaacaattacattttgaagttaaagcaatgaatattcaattatatatttgactaaaagtcactacccatacaacaacaagttaccaacaaattgcctattttttatgtattattatattaaaaaattatttattatatttagtatttttattcaaagacaaaaaataaactaatcgttataaaataatagtagttattagttttatcaataccgagggatccataaaaatatatgatacaaaataaacactatgttgataaattaaattggcattgagatttgtgtaaataaaattcaattgttgtgattttttttttttaaaaaaaaaaatcatttgttgtgtttcaatagttaatagttatggcttcaattttatgctggaaaccaatcatctttttcaaggcagataccataacattcgctcaaccgtcgtcgtgttattttttgctctgtaatggaatggtacttacgaaagtccctactttgtctcttaaacatcctttacacgtctgagtattttatctacaaatagcaagtggaaataaaaaaaaaaaaaaaaaagagaacaattctatagcggttctgcaaataaagaaccagagttaaccctttgccagtagctatcaagtgtttgtaaattttcaaagccacaatatgcacacccgtattgttatcttccactgtggatgttcctttgcagagatttattattttttacctctctggtttcataccgatccttgatgtaatggttctgcttccatggactgaacacgattactatgctgattgtccaatggcatgtattgtgacatgatagccattatctccgagtccatgtacgactgcaaacaatgttaaaagagtttcaacaactctaattgacttacaagattaacccaggtgtgaaatgaagcttttagattatttagacatacccgaagcctgtatctgtaaaatacataaccagcaagaccaactccaaccacagctgcaagaaccacaaaagtgacaaaccatgccaatcgcgatccatgtctctctgcatatcgtatttgagcagaattaataagtttatttttctacaagaacttctactagaaaaatcagcaaaagctaatacttaatacgactgtgatgtaaagtctagagtccattgtcaccaagtttttcctcaagatgacttggtcatagtagaattcaaagaagtcataatcgatagtctacataaatccatagc

SEQ ID NO: 226905 - DNA, 591 bp, Cannabis indica
actaaactaacgaattctaatacattttttttattatttttgagaaaatgaatgaaagcaaatatgtaaaattcaatttgttatttacaaagaaatactatatatgttatatttcattaataaagttcggtgtagtggttaagcaaatgatacaaatttattagagcaagagattagacactgatttataccacattatagcattagtacacctaatatttttcattagaaatcttattacttagttttaaaatataaagccaatattttaaataatacaaattcattgttactttttattcttacattaactgatttttttaaaaataagtttccatttagaaatattgaaggagagtgaaatttctataattactttttctttccataaaattaaatgttatttatatcgtgaaaatcacataattactttaagttaatttaaatggccatattgaaaatgtgtgcgttttagatggggacagttatttaactcaaaaagaaaatatatttataaaattctctcataaaaaaaaattagtgaaaagtcacatattgtaacttaatttacactaagcctacaaaatataa

SEQ ID NO: 226906 - DNA, 1570 bp, Cannabis indica
gggaagttggtggagtgacattattggttgatccaatcttggtgggtaatttggattttggaatcccgtggctttatgatgctgccaagaagtttttgaggagttttcaggtactttctctcttgtactgcatcgtctattgttatctttagtcctcttttttccttttgggtgaaaaattaatggtaggaatatttattttgggagattgtaaggttaatatggatgagtgttcttattgtttaattttaagtgcagctaagtgatcttcctgaaattaattgcctgttaattacacaaagccttgatgatcactgtcatttgaagattttgaatctcctctctgctaagtaccccaatcttagagtgttggcaactccaacctatatatcattctaattgttaattatataagcactgtggtttgctgagtcttgtcttggtaaatgcatacatataagcactaatttcagaaacatgaaatggaatatctccattctgttatgaactttgtatgttacttatacgttgtgttctagagttaatataaaacatcgatgttttgttcttaaatctctcagtaagtgggggggtttcatcttacaatggcaagagcaaggtccttgtattgtttcaatgttgtttacttcttttctttttcttagccgttttgttgttttactaatgaacatctttaatcttgacaaatagttgagatagtggatagtgtaacttgataaagtaatattttggaaggttttatttctgtgattacattaccttgccattttgattattgccctttatttttcagcatactcatttttaaccaatcagtctttttttttgtccctaccataccaaaaagaggtatgggaaaatgaattttgttagacataataagttgaaaataaaaatggtacacacaaaaggttgattagttgaatttgtgaagccataatgggtattattagttataaaataattcactctaattgttactattcactagtgttatgctgtgatatgtggtgtcttcatttgtttgtattatattaactataacatccaactctccgttcatttttatttttttaaaaaaattatgatatggagtgaaggatcttgaagattgtaattgaaaaaccagcttaattaattatatttctaagctgaaaaaaaattcattattagccactctgaaacaagagtataatcattagtgttgtgtgtcttcattcgtttgtattagcttcaacatccaattctgttcattggtttgattttgatacttgttagttgaaactagtttattttattatctttctaagctgataacttattataggtgtgcacttgtttgactatagttgtcaagtcaatagtgaagattttaaaaggaaatgattctattacatgaccacaccaacttttacaaatacaaaagttgttattctatttaattcccaacctatatatctttcttatctttgctaaataatatcgtatcattttgcctttgtacaattgaatttagcttacaaaacacaaacacatgtaattttctctt

SEQ ID NO: 226907 - DNA, 3237 bp, Cannabis indica
atttttttatatactttaaatttgattccattccattcatattcctattcctattctcatttctattcttatattttcattcctctcaaccaaacaccaccttagaatctacgtttgtttatgaaaccattaacatctatgagatcataaggattggataagtagccaaaaagtgacacaaattcaagcttcatgacaatgcactaataccaactacatacctaatgcataatgatgcggacagagatggcctaccttaaaacattgtatataaatgtgtgtttgggctacataccgtcttgccaatcctggggaggttggctccaacaggcatgatttcctgcattccagaatgtacaaacggaagaactaaagggacattgtcggcatcaacaatcaacctgccaagtatagtatttaaccaaatgtcagtaaggcagaataaaaggaaaaaaaaaaaagaaccatagtagccaaaatgctactataaaagaggggaagggggtgttgtaattgttgaccttccgacacctcttttagaagatctcattgttcttcccccatcacgagaacgactgccttctgggaagatatgaacccacccaccttgattaagttttgaaatagcaatgtccatgccctgaaattaagaagatcaatatcaaaacatttgccacaacatcagcaaatcagtactaaaacttaacagaataaacgtacaagaacataaaaaggtacatattagagaaatactacaaaagaaaaaaagacagaaagtgcaattggaccacatactttttccacatataagctagtgtacaacttcaatcattcaaacaaacaacagaatctgattcgtgaaacttccaccagatcagattcatcagagcatcgtagtttcaaagaaagaccaaatatctagtccctcactactactatgttagcaaatttttaaactaaaatatatgtgttgcctggatcctacgcacacaccagtgagcaaggaactaagccatgtggcttttcttaacatttagttatcacagaattgtggtaagatcagatataagcatacaggaaactagtacagttgtagacttatatgaagttggcatgtcaagattgtttttttctttctaaaacattgtcaatagctttactctacaacaaaccaaagacacactattagtatttaccttctagataaattccatcaccacgagaaactggtaagaccttgactgatcgaaagaatgcagaagtcacaggatttttaaagcatctatcacttgcacaaagtgtccatctcaaattctgagcatccaaaagaacatgtggaggaagcaaagcagcaataacaaaggatcgtctacagaagcaacatggttgctcacctgaatcagaagaaaaaaataatgtcaatcaacaacaactaatcaacatgaaattaaatcctccaaaaaggtgtgcgagaagggggatataccgttataagaggcttgtccttgggtctatttagcagagcatcatggaatttttctataccatagacctatataaattcgaaattgaaagttaactcttggattcttcaagttaagaaaagagcaatcaagttccccaaatgcagggtctacgcgagataccacacaaacctgaatgcggtttaatccgtgcataaacacatgacaaacattcccaataacaggaacagcaacagcttggagcattcgaagaatgaccgaatcctcttcggcactaaagtttttgctcactgcgatcacaaggatcaattcgatcacaaaaacaaatcatagaaaacaatctcaaatctcaaacatttaggcacaactttaaacgaaacacacagccaatttgaaagacaacgatctactacctcaaaatctaagacactagaacctctaaaaacaagaataagtctaccttattcgcttgcatatggaacaatcaacacaattacacactctgggcactagtaaacgaatatttcttatcgtccaatgcgtacatacgattcaaaatcagaaaaatataaccatgtataatgaaagtacctcgtttgatatagaacgcggaggaagaaggaagagagtcacgacggaagtcttggaatcgttgaaggtaacgctggagagtggaggagaagtaaccatggacgaagatcgggtggcgacggagcctcctgtccaccgccactctgaaccggttcctcagctgaagctgtaaagaccgtgccttgttcttccagagatctccacgctcaattctggccgccgccatgagagtttgagaaagcgacttagagagaatgaaatcaagtagtattcgatcttattcttccgcgcagaaaagaaatatagaatgtgttgtttgttcctctgtattgaaaaacccgagttactactgttgtgttagggtgcgcctgttacatttcattgtcttcaaagttcaatgcgcatgtatttcattatttactaagttgccatttctggtttcatttgtttaaaaattatttttaatggattataacatagctatttttatttttttaatttggttgctttcagataaatatcagtaggtttaaggtacagtacaaaacaatggaggtgtacacgctggcgttcgtagtggagagacgtggccccaagacagaggaatgacgtggccattgggccacattccagaaagatcttttaaagaattttgggctatttacaaaatatgggaaaaaggagtaaagttttgatatagagcattgctattaggtactagtggtgcctagcactttctcgacaacgcgttgtaattggctagcgatactccctaaaacctattatattaaattatatgggatctgatacttagttagatcaataacgatattgacacataggagggtgctgggcaccactggtgctctttagcatttctctttaatatatgagttttgtatagttaaattctcttaactatcattttatatacacttaattctctaaatttaaattttaacagtaaaattctctaaattactaaaatgcttataaatttaaggtatatttattaaggctgaacattggtcggtttggttggttttttctatataaaaatctaaaattcagttttcggtctggattggtgtaatccgaaaaccgaccgaccaatccagatgctatcttaaaaccgacaattttgaacttcggtttggtcggt

SEQ ID NO: 226908 - DNA, 791 bp, Cannabis indica
ttttttatcatcttgagaggcaatattattgaaattgccaatgatacaccagggcagatttgttgtggttgcaagcgtacgcaatagagtccatgtagtttgtttgagagattgattggcttctgcatagaagctagtaaggcaccatcaaggcttactaggaacttgaatttcaatatcgatgtgatgtgcagagtaccccaataaataggcgtcctcaaattttttctagattaaagctaaaccttcctttctaacatgggcctccacagagtaacaaccctcaaagcccaagcgagcctttactcgatcaaccacatctttcttacacatcctttcacacagaaataaccaattgagtttcttttgaacacaaatatcctctaggaattaggtagcccatggattcccaagtttacgacaattctaactaataatattcataatgattggtgggcctgaacaccaaaacccacctttattctctttttttgaagcccaataacatcatcaactatcgaatccttagcatcttcaattagcaaaacagtggacttattatcttgttccataccatcaccattcaaaagttgaggcccattgggagagttaggcctaaaacgtttctttttagatccattatatttaatttcttatcaaaataaaaggttgacttattaccatgaataacaatagatggctcctcaacaaaagttgattgtagattcttgcccctgaaatcatgtggttgatttccttcattaattgtaatatctgttggaaattatttt

SEQ ID NO: 226909 - DNA, 1229 bp, Cannabis indica
tatattgccttcatcatatactgttgctagtgtttgctgcgcttgagcatgggaggattctacaatatccaaacccgtgaagctattagataaaacaacaaatgagttgttcacttttgccccttctgcttctgcaatactcttgcctttgctcccctttctgacttcttgaaatccatcttcatcagctattttttccttagctggtgcttcttgttttctttcttttgctacccattgttgctttttccctatctttcttacgacagtccactgtttcatgtcccatcttttgctacccattgaacaggaaactcttgttttatcgacacctctataagcactctaggataattcagtttgttcctctccttggttacaggatcaacttgcaaaggcgttcccaattgtcccaaaatcttgtataatgacttctccccccaatacttcaaatcaagatcagggagttgaatccatatcggtactgtccttatatcttctttcttgaagttggtatccggatgccaagccttcatcaccactggtctgttattaaagaacacatagcctccatttagcacctcatccctgttttcaactgtatcaaaccgtactaaaaataccccataagacaatgagccaaccttatccactttcccattccaaactcttctaatgaacccttcaagaaccaagagaggaggattggctccaaggacataacacacaatagaggaacttcagaaatgaatctcatcttctatatcctctagaattattttgaccttaggagcaattccagtattcttgaaagagttatccaaatttcgaactacatttccagatctaagaataggtggagtagcaaaattaccttgttgaatgcttgttgcacattcccgattagcatttaggaagaattcaaaatccttgctgatctcttcttgcctctgaatttccttcagtgaagacctaggcgataatggggccctgaataaatctgcttcttgcgatcgaatgatcgtttcaccttctccatcatcctccaagaattcaatcagttcaatccccagaactgcgtccatcaattttttttttcgagcatctgccgtggaggttggccctcttttccttggttttttgacttccggttgctgcttccccagtctcgccctggttttcaccatagcaccagcccaagagagctgcacgagagagagagagagaga

SEQ ID NO: 226910 - DNA, 1195 bp, Cannabis indica
atagttgcatcacgagatgcttctatcgaagcttcacatggcctagtgtcgccagaatacaccatcttccatcccgggatagattttccaatgctattagctctctcagctgccttcaacaccacaccgaatgcctgtgtggaatgaacaacaggaaaactaatcaaggcctccaaaccagcatcactgagaattttctttaagctctttatttctgtgacattgtcaactgagtcgattttcccattaagtgaatcttttgtggtgtggtgacagtcaagaaacatcatgtctaaatcttcaagtctttggtatgcatctaaatatctcttgagttgttccggtcctataacaagtactggttcgtgaggatcttcttttaacaattcgcgtctaaagacaagtattcttgccaagcctgcataatgatcagcatgcatgtgggaaatccaaatgcacctcagtcctctcacgacatcatcggctttgtctacaccatatctgtggcaccataaccactataagttagtagatgatataaaaagtgttatggataacatgcttgggtttaccttcgtttaagctgtcccaaggttccttcaccacaatctaaaagcaaaccccctttggagaaaagattgatatggatagagctgacattccgatatttcgatggctgagatgatccagtcccaagaaagacaatctccatgtcttctcttcctatattttccaaacaactaggaagagtgtcgtcatccaaccacggccctttaacgctaaacttaacatcttgaacagagcttatttctcctgttgatccagtggacgtatgccacaactgtctgacattttgggctgcaaaggtgatatctggaatttcggaatgtaattcatcaatgatttctgtgggcaccaacaaacttggtacacaagatttatccaatccgtgcttactatgaggtttcaaaacaaactgttcaaacaacaaacagagaaagtagactattattcatatatccattgtgtgaatgattcatgtgaaaactacaagatttcaataatcaaattgaaaacttaataaataaataaggttacaagaagattgattatattaaagatacatatactgaataaattactagctaaatccaagtaaagatgccattcaaagtttcataccttctgaagattt

SEQ ID NO: 226911 - DNA, 1850 bp, Cannabis indica
gggagagcacaaaccattccactgtcttcactgacgttagtgtagaaaaagatttaaaccaaaaatcggagatgcgtgacgagtctgaccagttttttctttaacaaacagtgatactctccggtgaaaagagtggaaagtaccaaaaattcctatgtttgccatcagcaatattagtgagatttaatccttggttaggaagctgattgatgagaagggtctcaagttggcaggctagactctttcccgggactgtgaaataaaggaatctggctttttgcatcccgtcctttgagcggtgggtacggattcgtccctccaaatcatcggtctgtggtaatggcaatgatgaacatggaaatttgtttttcaaattagcataacagtataatgacaatggtacaaatgaggtaaataaatagattagttcattgaaagaatacctgtcccacatatagtttttaatcaggcctgagcataacatagacacaagaagcacctacagtagaaggaggtggttgttccctaggaccaaccggaacacaatggatttcgctaagttcgggtattttttctttcttgtggagctctatcagcttcttttgacatatcataattacatttgtctcaacttccttctgtaagacttccatttgatttagtgacctgctcctttcagaatcttttcttccagagttatttgattgaaaatcgggtctgtcagaaccattcaaactttcataagaacacaagtgttgtatttcggtgtcattttcccctggaatcccttcttctgcataaactgaattataaagctcttcagctctttgaattattctttcagaaattccttctctcttagctgtctcaaatgcaaggctttctctacaaatcccgtctagcaatttccaagtcggttttgtttggccgttaacattaacagatcccattgctttgaatacagtgttcttcgcattgagtggcaaactaaatatcccatgcaaatgggtggatacaattccaagacaacctattttatcaagagtttcaacaatgctaccggcaatacaagtcccctttgctgtttctgttcctcggcaaatttcatctataagcacgagacttcttttactggtagaagcaataatagatcgaatctctgacatctccacctgatatatagaaaatgaggtaatgaatgccattgttagtgatagtagcaaaaacaatcggtgtttaagttacactgaaatttcagatctactgcaatttcttacaaacaagctgagaactacaagctattgtgcctaccaatgaatgttcaaaggttaaacaaaatgaagagacgaagattttcatatactggggatcggaattgtaactgccattaatgaacatcttatagcaatgtcagtggaaagaagcatgtaaagatacctgaaatgaactctttccatcagctggactatcgtaagatttcatgtgaagcataattgaatcaaaatgaggaattaaagctgactctgcaggcaccatgaatccacatgttccaagcaatgcagcagcacaaattgatcgaagtaaacttgatttacccccaccatttggtccagtcaaaagaaatagtgactgcatatcaacagtattatttacagcactaccttctgcaacctcaaaccagtatggtgatagaccaactagtttcatcccatctgttccattgaaagattctacatcctgcattcaattccttaatacacatgagatgtcaaaacaatttaataacatagttaatatgatattagataatatatcttacatattaggatgcttaaaatatcagataaaaa

SEQ ID NO: 226912 - DNA, 1525 bp, Cannabis indica
caggaggtgtgatccgatactccggctttatagttacgcgtatacccaatccagctgcacattcagaaaacaaagaaaatcgaaaagttggtcaaaattccaataataaacaacaagacctgcaataattccctaaccctaacccttataagaataaaaagaagtgaaatttgtagacttacaagaagcagaagagggaggaggtgggttgtgggggtgttggggaaagggacgggcatggttgggaccaagcttggggtagagagcggaggaagaggtgggaggaggaggaggagcgtacatagggtggttgggttggggagaggaagagtgttgagggtacatggggatttgggcttccaaactcctgaattcgcagtccatacaaaaacaccaacaccaccacgccgatgatcccttaattaattcttcactttcctttttttctttttcttttttcaataaatattaaaatccacgttttggaactttcttgtacttttcgcgggtgtttctcaccaaaaaaacaattattattatgcaaaatatagtttattttctcaaaattttactttatattgtgttatatcttaggactagtttaatatgtcgtattatattaggactagtttgatatgtcctattatattatgttagattgtgttatattgtattgtattttatattgtttggaacgtcgtattaggtcgtattgtattatattgtattatattgaattggattatatatattatatttttatataatattatgttaaactttaatttatactaaaatactgtatatttaggtgtccataaaaattaatactatatatagttttacataaaaatattgcataaaatacaattcaatataatacaatataacttaatatggcgttccaaacgagcccattagtattatttaatacaatactatgtttggtattgacttgtattaatagattgtgttatattatattgtattagtattatttaattcggaacccggtcccgggtcggggtccgagtccaggtctaggtcggatttcgggttcgagtccggatccgagttcaggttcggatgcgtatccgagtccgggttcgggtctaggtcagggtcagggttcgggtcgtggtctgagtcctaggtccggattagagattggtgttgaccccgaatcctttataaatattataatacaagctaatacggaccatttgttatgtattaaataatacaacatacattgtattaaaaaaatagtcataataattaatacaatacattgctttatccaaacatagtgttatttattatttaatgcaatacgacccttatacggcataccaaacgagcccttcgataacaaaaagtgctctaaatttagattggataaataccattttggatcttgtgttttgtaaaagttactaattggaccctctattttgttaaatgacaaaatagactctgtgttttctaaaattgtacaaatatgaccatgtattgattttttgtc

SEQ ID NO: 226913 - DNA, 2913 bp, Cannabis indica
ttcatgagtgattctaatcactttgtcaaaaaaaaaataaaaataaattccctttatataaaggaaataatatgatccactacacccataacaacctagaactggtcccacaaatacatttcagccaatgaagaaaacgagggtatatgcgtttgtaagggtccggtagagaaattacctataaatagatatttgctttcttttctctcaaaacttaatttttaaaataaaccctaaccctgtttgcccgatctctccatcgacggtacgtactctgtgactttgatgattttgattacatttggattgtgttctgtttgttttttaggccagcccgagtgtgtgtataaatatatatatttaattaaattatttgtttaacaattgatcttgatctgttggactgtttgtttaatgataattgatttgggaatttaaatttgcatcattgaattgtgttgtcggcgaaacataatccactaaaataagagaatatgagtgaggatcagtttttaattgtttctcttttctcttttctattttcagactgtatggatttccaattgagacacatagaaagatcaagtttgtttgtttgtttgtgtaaattgattatttcaatttggttattaaaattataagagaaaaagtcattctcgggcatgttattatttcttctcactctgttttgtttacttaatattgaattaatattgactttctacaggtaatagagaatcaaaattaaccaacaagaacatggcagaggaagaggcaccttgttacgattttattgatccggttggctatgattgggattgtacaccatcccggaagggaccccccatatctaacgacaatttcgatcccaaaatacttcgttacgattcagatgaagacgaagaagctatccttcattatatcaaccaactcgaactctctgatgtatcattattttttctctctctcacactctcaattagttgatgattattgctgatgaatgatattatatttttcttttatttatttatatatgttccatagggttttcatgctgataagccgaaaaaacgattttactggacttcgtttgtagtagataaagttacctcacaggactgcattgatgcagcttatgcagcagtggaagaatttaacaaccttaaggttggttgttcattttatttattaaagatacatacatacatacatgaatgtttcttttaatttatatttatatatgatgatgaactttcttacttaattatgttgttgtatttgtatcaatgcatgttgtagggtgctgatttgaagtttttgaaacttttgagtgtgacatctagaataactggaggaatattctattttttgacattgcaatgcaccgatgaacgtttttatgaagctaaaatcttcataactcttgagggtgctcgtgacttgtttatgtttaggcctgcaaagcattatccaaggccaaggtgaagtcacttcactttcatttcattaaattctttccctttctctttctctctttctctgtaattatatatgtatgtatatgggcagtacaaattgaaggaggaggagggtagtgctgctaaagctgattgtcctaataagtagtagttatttggtacaaggattctcattgtgtaggagacttagaaggcacaacttttatctttcttttgttcttttgaaattatgactacagaacgtttcttttggaatatcagatctcatcttaaattttaccaatttttccatgggttatttaaaaagttggtgcacattatatacgatgaggtgtcacgctgggtacacttacctttttttttataatttgatttaaataaagatcaatactattacaatatactcttataagaacgttttcacgtaataataaagtgatctaaatttaaattacaatatatcatggtgaaaaagttgtctcacaattagtgatgaaaatttgatctgcagggacatgtactcacaacgaatggggcgagagtgaagtacaattttatatagggatatttttatgaatatacattaagcacattttttttttaaaaaaatgcgtttataaataaaactgaagttagacctcatggtcattataaagaatattaacaggtatagtagatatctctaccatgtccgtaacattgttggcaaacgcctatttagccacattatgagccgcgtagttacagtttctagcaatacaagaaaaattacaattagtcataaaagtagagaggagcttgcaatgtcgcacatagttctcaatcccccaaatggagtcatctccttttaggttcttaataacaatctcagaatcactctccaccaaaacaaaaggatgatgcaatgagaccgccgtctccatggctagaagacaggctgtagcttctccagtgagtgggtcagagaagtgtagactttttgccgctacccacaaaactgattcgctatggtctctcgcaatcgccacagcacacatagtttcacctccgactttaacatcgcagttgattttaacccaatcttctggcggcggagaccaagctgacgcccaacagactgaggaagggaaagaaggcaggagccataatccgtgtaacaagaagaaatagagtcaatatagtgtttaatgttacccattgatttattatgtaccttgtcgttgcgggccctccaaatcatatctaccacaatcgaggcatagaggaacaactcatcagtattaactcctctagatttaagattccatagaaaagtaacccagtcccatattcgggctcctgaatccagaacaggcataaccccccaaggagaagatcgccaaaggtggaaggcaaagttgcaatacagaacaagtgctctgtggtctcctca

SEQ ID NO: 226914 - DNA, 582 bp, Cannabis indica
tcgattgcattctccatcagctcgagctggcctccactttcccaaagcaagagatagccaggcagtatacctcggggtaagatatccaagtttctagagctaagctgagcaagaattcgggcaatttgatcaaaatgtcctctgttggacaaagcatcaaagagtttggagacagtttcaatttccggcagaaaagagctattaagcaattgatcccaaatggcttcagcttgtggaaacagcccattttgagcaaaacaaatcatgagtgaatacaaggtcgaatagtcatcatcattgtcggtaggtagaaagtcttgagatttagaggaagaggaggacttgagctccaacaaaagctcatcagccaccccaactagttttacatatctatcatcttcatccccacctctctgtttcaatcagaaaatctctttagggaaatttaccaaactaacagcatgaaaatgttaaattagcaaaataaccacattcaatttacattgtgagaccattatcatcgaacagtgtaaatttatggtcgcatggtgtaatgtttcatggttattttactaataaaat

SEQ ID NO: 226915 - DNA, 873 bp, Cannabis indica
atttggtacatgtcaaatttcaggagacaaaaatcctaattagcctatgatatatattataattttaagttgaatataaataatgtttttaatgatccaatgttttagtttttgcatatagaagcagaacaagcttcaagagaaggtagaaaccagaaggtaaaaccaagagagtaaaaacagagcaataacagaaaaaagagaaacaagttacagaaagagacaatcatgttagttaatctaattgttataacaaatcaaaaaaattataacaactaaacaaactaactaaactaaatctttattggttaacattgcaacacttgtatttactaagtagtgtaaataaaaggaagctccctttttttcttaacaaattatgaatttaattttccttacactatagatggatattagtggatcagggcaccatccactgattgatgagatcactactatcttccctttggttcttttcaagtgtggaattccaaagtgaatgctattaactgtaccccagaaattaacatcctaccaatgaaatatagtagtatatataggtcagtaattaataatgttacaccatatttgtagtgattttaatgcagtttaccataatcgatttgtgattagaaatgtggtcaatatcctcaaatttgctcagtattactatcccagcattgttcaccagatgatccatcatcacattaaaattcagataattaaattaattgtaagtgagattttatatatagattaagaaaatacacacaaactaattattatgatcaattacattgaccaaagtgatgaactgcttcatctataaacttcttacagtcttccaccctagtaacatctgcaacaatagat

SEQ ID NO: 226916 - DNA, 602 bp, Cannabis indica
ttatcatataattttttttacatgtgtgaatcttttcacaactttctttacatacagaaaataattaagaaagaaagagtaaaaagttaatctcccattaattaaaaataaattaaaattgtgatgagacccttgtcttgtcgaattgtcattgaattttttcgtttcttctctccaacatgatttaataaacaaaatcatccctctttatatttggttgttacatcccaagttttggaacttctgccggccggcattagcaatccatattatttaaatattcatatatttatacgtggacttctatatatatggtttctcagaattatctcatatattattttttaaaatttacggttttaagtttttaaaacgattgcaaagctagttgtaatagaaatttttatacgattttttattacaatttaagttgcaacgctatttaaattaaaatttctatgtagcattccgtaaaaaaatatatataaaaaaaaaagactgttttttaagtattaaaataaataagtctcatcactgccggacccaatgaaggaccagtgtgaatgctgaaaaaaaaaatatttcttttactttttaactaa

SEQ ID NO: 226917 - DNA, 3942 bp, Cannabis indica
aattacaactgtgttttgaattaatatcggtattagaataggatttgcataactacatttctaccttaccaaactctttatctgatcacactctttcactcatcattttattatttttacgtcattcacatttctatcattttctatttatactaatctttagtggtaatttacctccctgtggatacgacatatagcccgtttactaccgcgaccgcagtgtaactaattgggcgacatcaccaacacatagacataggcatgcatatatggagcacaacatgaatattatcggtatgacatcttcccgatataccatggatacacatttatttattatctatatatttcgtaaaccataacaagaatagctagggcttcaatccatcgttactttcctagtcctccatctcacgatccatgagcacccaagacccatcatccaactgaatcatacccttatttttctcgacccaccagttgctcgtcacgagatattcatccttcaaaccatccaatctcttattcaccagtttgatatcacgatccacttccaacttgaaccctcccccactgccttgggttccggcaacgccatgcaaataaacctcaagctggtgtacggtattttcggcttctttcaagtacggcgacagaagggtgtctatgaccagctcctgtccgacgtggtcgtagtcgaacaatggaaggcataattgatcatcatggcggtggtctgtcttatttctcaggcgcaggacgtgaaggttgttgagattggagaatgtggccttgaaacctttgtttcccaaggatggacttgcgaaaacaatggcggtgaccagaaaggccttatcagaccttccggtcggcttgttatagctattgtatacgatgtcagtggcggcgagagtggcgactgcggcgcccatgctgtgtccggtgaaggtaatgcttacttcctcatccttgtattgatctaccaactccctaatctcagccagaatctgatttaatacggtccaaaacacactctaattaaattaacaaacttacgtgtatgattaattatacttaatttattaaaacagttaatcatcaaatattgcaggtactaaataaatagaacaattgataagtttcattagccaacaacaaaattagaaaaaactagttcagatgcaaaaaaaaaatattaattaatttttcttatcatagaaatacgtacgtacaagcacgagaatctgatagaattaaagtatagatacttgcccaaaaaaaagtacgtatgtatcctaaatattttaatgcgataagttttttttttaaaaaaaaaacattacatcattggataaaaatttgaaaaaaattacaaaaatacctcaacataaaatttgttttacttttactctttaaatttttttatttataaaaatactttagtaaaaataataaactatttttcttcgttgttttataatttatttataattagattttagttgtcatgaggtttttttttttgttatttatgttgttttatagtttatttatagttgatttatagatgttgttcatttatcgttattttttaggtttttttttttttttgttttgaacaaagtatatttttataattttaaaagtttacaaatctaattttgtaattaaaattttaggctataaaattataaataaaacataaaagaaaggtatatttaaaaattttcttttttatataagttattccaaattatatgattatttaagtactaaatttataacaaaattatatgagagatcagactagttataaggtatatgactgataatatacctgatctctgcaactgttgggattgtaggttgaaccaggttcacaagaagtgtaatacaagtaaatatctttaagcaccataggattattctcatttccaagtatctgtgaagcagaaacaaaaatatgttcgaaatccgcctcaatctttgggaataatcctctaaacgacaccaaaatatcccttctccccaacacctcctttccttcatcagtcgccaccgccacaaacccgaaccactttgattttcccgccacccagttgggagagaccagcgtgtcacccttgaatgcagtggaggagtagaagtacttcttcacctcatacttgaaaggattattcccactctctaacccaacctttgagaagaggtttctcatggagtacctacaaaggctgaagttatccgatttggactcttcaatgaaggaatccaccacagcctggaccctctcgccgtaatgaattatgtagcagcggaggtcagagtcgagagggtcaagaagaccctcccactctccctcaccgctcagaactctccaccttcttccgatgtttccggcggccatttttgtgtagctaaaagataaaataacaataataattatgtggaatatggtgtttttttttgtcggtaatggtgattttaaaccatatcattatctctttatcgataattccttcatgttttcatgaatatatcttagcgagtagcaggtttggctcgttttcaacattaatatttgatagtacgtaataataaaagtaggccctagtccccagtggtggcattaatagatatggaggccttgttagtgaattacaataatatgacctcgtgatcgattttaataggatgtttactcaaaatttgatagaattttatcccctgattatatattgtaaaaaaattctcattaaactttgaaaataattataaatttaataattcagtttatctaggaaacaaaccacgcatctggttgtattttatttagtaataaataagtcaataaaattagaaaaaaaattgtcgaaaacaaatctgttaaaaaaaaatacaaaaaaaaaaaattatgttttctttgtttaattttttttagatactaaataaaagtaaaataatattaaaaaataataaattactttattaaatttaatttataagccttatttaatgaatcatcatacaattttttatttaaaaaagaaagatggtatacaatcatcatcatcaaagagaattcttcaaatgttataataaataaaagatggtataccacatatggaggacccgaaatcatatggcccttctctagataatccaaatgcaattatgcagaatgttaaaggaattagtataagcagaatttcatatgtatagccaaaaaaagttactgcaaaagatatagaatggtttaactctttatgttagaatttgagttgatgacatacattgtatagatttttccaaaattgttatgagagatgctgaataggttgtaaattgttaagtgaagtaataaaatacaagcttgttttatataaaaaaaacatcccacaaaatagaaacctaaaaaaaagataattgcatataattttaaaattgttatcaacactatatctctcttgtagttaatttttgctatatttaaagtggatgtcactatcgcatctcacttgtgcaattacttcttgccaatatgattgttgcccatatgattgttctgtaaaataaattaaacaatgagataactacacacttttatacataaataaatcattctattacataaagttttttagaagttatagataaaacattaaaaaaatataataaatttaaaatttaaaaatgagataattgaaattaataattaatcaatatttataaacataataaaaaatttaaaaaataaaggaattaaagagagaatagattaaaatatttggaatgatgatgtcactgcattattttgtatgttatatatatatagggatatgattttgtcccgttattgtactttcacggattgtaatccgtgatgtacaacagccgtcagatgagggagttatttgatctgacgtctgagattgatctagg

SEQ ID NO: 226918 - DNA, 1298 bp, Cannabis indica
aaaaattaaatactattttaatcaggatagtacagccacggggaaaatgatccttgtcatttttcttcatcccctatcttcagcttccgggttgtttgattcgtttctctgcatatgggctcgactgacccgacctaaaacccgattgtaaaatagttatttgacgaccaaattaaatgtttttaacccaaaatgatctaaatggaaaaataaagagatcaacgtgagttttatacatctaaaacacgtaaaatgttgactttaatttcaagaaaacattcggatccaaacattgatttcaaaaatttttccactcaaaatatgttatcatgctcgaattcattatatagcactatatgaacgtgatgaagctattcataaagaaattatatcaaattttgaaactagaaaattttctttcccatggttccgacaataaatttttttacatatatatacacgcatataatacaattttactgtataaaactatgagaaatatataaattagattattctcattaattaaataataaaatcatataatcatagaaaattatatataaatatgtataggcaaagctatatatacgtacatataaatatatattatatatatatcaatttgaagaacatgaatatatatatataaaaataaattaaatatgaatgtatatactaattaagattatataatataatgtatatacaaatatatatttatattataaatgaagaacttgtacgtttatatatatatatgaataaatgaatctcaaaataaatgaaggcagagatatataatttgctctgatacaatctgttggactataatatagaatgaacaataaagtatatatgaacgatatgtaatgccaaaaaaagtagagacatatcaaaatcgtatatgcgatgaaaggatcaaaatacctcgagctattgaatttttgaactttagtcccacacaagttttgatctgcaaagaaagttggttggtgtgggtaatcaggcttccaagctctctctactctctttagatggatttattgttatcataaaatgagtagtgaattcgagaaccaagaccctacatttatataggtgagaccttccattaagatctctgccacaattagttgtcaaaatattttgacaatcaattttgaaaattaaattgggtaaatgaaatatttagtaattaaatctgaccataattaggatacttttaattaattagtaaataattaattatattttataattcaaatcaaataaaatcaatcatcaatcaatcaata

SEQ ID NO: 226919 - DNA, 1650 bp, Cannabis indica
ttggctctttgattacggcttgatcgacgatatcctgtccccgatggaaatttttcctgtatcatcttctgggttttaactggcctgtgcgaaaccctaaatggctcttcaagtgtcaggttattccaattctaagaatcctcagtttttgattctggctcccccaaattgtgagcttttgatttaggccaaaagcaatcaaagggttttctgggtctcttttgttttggcaattgtggaagtatgcaaattgggtttttttttttttttatttatcattattattttaatatagggcttttgacttaatgaagatggtatgcaaaatgaaatagaaaaactggggttgtaatgtttagaagtataattcaaaaggggtttctggatttgcttgctcgatatggttagcaacccaaatcggtgggctgaagtattacgcagttgtgtatatagttttacataaatactttatgcggtaccctgtttggaataattatctatgctgtagtttttggaactttcttaaacgactttgaatttttttttttgtaaatcatcgtgggacttttcagagattttaagtttattgatagacgttctcattatatacaaagttgaaagtttttctattttacttttgttgctgatttagtttgggattatgattatgtgcatgtacaagcaaattatgtgaccttttaaggttgaaagccagtatttctttttcttttcctttaactatgagtaatactcatcattctgccatttgttttgctagtcaaattgtaggttgtactgtattataattgttctatgatgctttgacagtgatgagatgtgtatttttgatgttgttttcattaagttttttaattaggctaataattgggttgttcaaaatatatttttgtaatgatgatatttgtttccagtgtggagattgatggctcattaggagattcagagggccttaaagaatctggatcaaagaagaggtttgtgcagtgtgtattttgccttttacgtttgttatagattaaagaaagagcatggtccccgattaattaaaacctgttgttctttatgatcttttaatgccttaaatgattatacttcacctttatgattagtttattgcctttcacttttaagtttgtactgctttatggagaagatgctaatttgtctccacagtttatagatgtttgtttaaaattgaatcatataccaagtcaagcttgtccattcatcaagactgagctgctcatggtgggaaattttcgtttgtagccaggccctaatttatgtgaacttttggccagtgaggttacatgtgaggctgataagtgatacagtaaccatttatgacagcatgaaaaaagcatatgttttaatcattagatttctgttttacattaactaaattaatatttaattgtatttcttgtcttgattgcttggaaagtttctccatattaattttgggttttcatttatttattccatttctctgagccaaatggaggatgtggggtgattaatttgtagagttcttaagacaattattagatatccataaagttttttgatgtccaaaagtgtggattatctgcttttgtgctgttatctgaataaccttaaatttagttg

SEQ ID NO: 226920 - DNA, 588 bp, Cannabis indica
atagaaagaacagtaatttgtatatgcaacttaagaagtcaagtgttatatagtatagtatagcttacactaccatcaaaataaccaaatgcccatttctgaccttgagccaaaggcctaaaaagaaaattaaaagggaaaataaaagttcaagttacaagtgcctcatacaatgctatcaaaatttcatagtttggtaatttgcctaattcatctaattattaagttcatgatatcttaattttgaataaaaatggagacattatcaatgaaagttctgccatcaaaacggcaagaaaatcaggagaaacattccttcccctaaagatacgatcagcactagaacaaacagtagaaaccaaaaaactggtcgccttattcacaaatcgctttacactaagaataaaaacattatctaaattgtgcaatacccgtttacagtaacaacaagcaaaccaaaaggtgagctcatatcagtagcactacgaatagcaaacccgtgtacctgctgttgtttgagccaaccgagtgcttcccttactcccgtagcttcatcaacaggtggctgcactctacagcagtatgagt

SEQ ID NO: 226921 - DNA, 1908 bp, Cannabis indica
gtacgtatcaccctgacctaaaagtaggcttaactaacaaatcaaagaacacgaatagcctttcaagattgagcctaatcataacaggattaagatcatttgatctaggatcaactaggcgatattgacttgaatagatattacggtaagtttaataaatctaagtcaaagttcaatatcggtcccttccgatgcatactccatgcatccaacctgagctttactttaaccaatgctctggaaagaacatagcacttctccaaatgcaagtaaactctgttgtagattatcatatcagtaaaaccctatgtctgataaatctaggaaactttattcacatagtcatgtttactttccaatgtgttgacggcacaataaacaggatcaagtatgtgaaaagggtttcagatgaatttatacattatgtacatataatcatgaaataaatcatgtgaaccatgcaacattaaatgttatttctgatctatattaataagtaaatctgattatattgaaatgagttttatttagggcataaaacccaacaaaaatcgggaaaatttttctcccaagtccctgtccgaatgcctattcggatagggactttacactttgactggcactgtaatgccctttgtcgaaaaactatgcatggtcatactttgatctcttcaattgatccatcattacatcaattgtcaacttcatgtcaatcaatgtggaaatcgtgtgacagctgcacactatctcacatttaaacttttggtcttctgtctcccatgcatgcctatattgatggaattaactattagggtttatgcactaacaatcttgtaatgacgtttttttttgaacaaaagaagattttattcaaaagaaccaacaaaatacaaacaccaaataccaactccaaagctagccgagaccagcaactactaccaactagctataactttacataaatgtgcatcaagcttggttttactagttcctacaaagtccatacacctgtatttaactcctttcttaatatccatgctaatacaagagacaaatttgcatctaagctcaaaaatacaattatttctattaacccagatattatagacaatagccaaacaaacaacattgaacaatttttcctccaagtttttgaggggcttggaaaaccaatcataccagtctctggagttcttcggccagtctaatcttcctaaccacttgctaacattagtcacaaccttcaaagtataaggacaatccatgaagatatgggcatgagtctctttgtcatctaagcacactggacaaagaacatctggaatcggcatgatcctgctgatgtggtctcttgtcaagagctgattattaatcggctgccagccaataaatctatgtttcgggatgcatatcttatgccaaattcgactagcataatcaactttttgcatgggattagctgatatgtaaaatatgttagttttgaacttaccactcgtacaagcattaacaatatctgacatgtcaatagtgcttctcagcctcaaaagtttcttaaaataccagctcgcatcagatttaaattcaacctgccaaaaatctttcccttttaagtaaatagcatttacccacctaacccacaagttatcttgcttgctcgagatggcccaaacaaattttgccatcaaggttgtattccattttctcccctcacgaaagccaacacctccatacttctttggaaggaaaactttttcccacgaggacaagtgcaacttgctgcggttacctttggacccccaaagaaatccctacaacatttgtcaattgctgcagtgattttctgatgaaaggataaacaagctcatccagaagttcctaattcccaacagaactgagtgaatcaat

SEQ ID NO: 226922 - DNA, 1241 bp, Cannabis indica
cttgtgaaagcatctcctgagacattgcggccatctacaaaaagggcagtcatgcaagacctagtgggggaacccctcagatgcactcctaatcttcccttgaataattggacatgcattgttggaccgcaccaatataatgggaggtgcaagactgctcccacgatgggttctctagcacaaatgaaggcgttgttcctgaaccaccctcaccaaaggcaaaagtctgattagagtaaagatcttgaatattagcgtcagaaggcgggtaggaggccacgggcgcagggtgacctgataagaaaataagaaggtcataatacccctactgctcatggattaggggagagccccggtgatgagagtaaatcacctgaggatcctcctccataaggtgtttgcccctaccttagtgaaagtagacgaaggagcacccttaggatggttaggtgcattagggtcgacttggaccatctgaggagagggaactcacctgaggatcctcctccataaggtgtttgcccctaccttagtgaaagtagacgaaggagcacccttaggatggttaggtgcattagggtcgacttggaccatctgaggagagggaaactgatgccttaactgcctgggatgccccctctcttctctttaaagaactgcggtttggatatcatccgcttcattggtgggagagggcaccaaggaatcaaccctctctaaattggttggatgcattggcgaccccaaatgagaaggagattgagatggaacggtggtaacgggtgcgagaccacaatggaacccacttgagacaagtcgggggtgacccaaagggcatagaactctaaggccctcaactaactcttccttcaattaaagaaggatgtcccaaggacgagctagctgaaggccgtccaccaatgttctttttgagaaaatttcttggtcctcgccgatagacccttaggcaaaggtcccagagcgaatgggctccgactgatgtgctgttggcacggctaacttctcacccaaggagcaaccccccgaggactcacccgcagcacgagaccatcgacgccccgcaagaacatcattcgcaatatctacagtagcctcttctaccgcctgcactctccctcacgctcctgtgaaagagcatggttggacccagcgtcgtcctccagccaccctctttccacctcacatggaatacaacctgtctgccttcagcttgtcacctg

SEQ ID NO: 226923 - DNA, 951 bp, Cannabis indica
tttttttcagctgatggactaatctcagcccatataatgtaaaaataagaaatttttctaattaaatagaaaaattaatcataaaaactcaaaattttctaatattacccattcatgagtaatacccattaaaagtgcaccaatatatatacatatttctattagaaattagaccactaaaccaatgttgtcaactatgttgaagcattgaagttagatggaaatttgatctgcgaggacgggtactcaccccgaacgaggctagagtaattacctaccttaatgggtaacagggcaggatggggtgcaattttatatacccgaagcgagttcagggtggggtcaggagtaatactacccaccctaaattcgacccaataaatatatagtttctaaacttttcatataacttttatctaattattacgtattaaaattattgactatacttataaagttaactattaatcttcattaacttactgtgtaataaattttttttaataagtagaatatttatttattttaaaattaatatcttgttttttatttttattttatttgcattacgttattttcttattattgttgttgttttaattttaataggtacccgatgggtctccatatccaatggggattctcctaccctgaacccattggagattgagcgaggcagaggcagtgatggaggcataaatggggaatagagatggggttggaggtgcattacccgcttattacctacctaatttctatccctaattgaagtcaacacattcttatgtttatgtgtccgagagatagttaagttagttgggggtttccatttctctccaaccaatacaactgtcaacctataaatagactacacagctctacacttaaatgacttcagcacctagaagattgttctatactgtttaaaattatcccaagttaagcacgctt

SEQ ID NO: 226924 - DNA, 1754 bp, Cannabis indica
aataaataaataacacgcgcctggccagcgaaaccctactaaaagccctaaacccattgtttcgtttcactgactccgttgagaaactcgccccaaagcttcaatttgccgattccgttgagagaaaaagagagcaaagcaacgatgtttcctggaatgtttatgagaaagcctgataaggctgtggctctgaagcaacttaagacgcacgtcctcatgttcggatcatgggtcgccgtcatccgagttaccccttacattcttcactacctctacggtgaaaaggatgagctcacactcgaaatttgaaggtgatttttttttagtcttttatcaatatgttcctcttaatttctcaattgaatttatttttattgttatgatgaattgagattattctgtgaagtggctgtttcgccattagtggttgatgactatgttttcattgtaggcctcttgattcaatatttattgatagatagaaatatgattgagtgcttttttaattcatgattttgggaataagaggatatcgaattttggtttgtttggcatgaataatcataaaatctcattcaatggttggcagctgctaagaagtcatcctagtgtgcctgttgatgcaataacagccaagctttgaaacatcattattttaatttaatagactggggttggtatcattgtcaattaaaaagatcaaggagtaatttgcaatcttatccaggacatggtagaatgttagggattttcgggggaaaagatattttttttattgtaaattttagcacaaaacgattagtgacacaagttgtaacttgttcagatctaacatttagattccattctcaaagatgttcaattttactaatgtaagttaagaagggataaagttgctgtggttgatgggagaaaatgttttaaggttttaaaatttgcaggattatggtgtaaatttaactagtttgcttgttactgtataaacggtatgtatactttaatattttaatcattagcttttcctttcaaatgtcatgattgaattatcatggtagaacgatggaagttctacgttcatctgcagagctatagtaattattttgtagtttggcgggtggatatgggtaccctgatcccttttgaaacatttttgatgattaagctccaggaaagaagaatgagttattgaaataacgtagtgataactatcttttgctagtgttcacactattggtttccatatcactagtagctgtgtgatgtatctacatatttcattacttcttaatgcttttaaggttatactggaactttagttatgagttcaagtactaagcaggttccagtgttactttctttattgagagttaaaaaaatatatttgttttggtgacttaggttttcaaggatacatgttttatagaatttttaaaataggtgtaaatttgattagctttctatagaaaatgtagaactgcagccgtgtgatgctgcttctgtaagagctgagtataaattaatgctgaataagctgattgagtataaatcttaggtacaagggacagaagatagggaggagggacgagatgactctagtcttattgttggtaggagaggattgagagaccttcccttgaaaatggtgatatttgacgatccgtttttgtgacatttataggatgccaatatatttttttttagggaattaccccatatactatttttttaacgttttttttttcaaatttactgtt

SEQ ID NO: 226925 - DNA, 802 bp, Cannabis indica
gattcctctagtctttggagtatgatgaaaaggaaaagtatcttaaaggagctaacttcttcgacattgacattaaaccttcagactctaggctttggaaagtgattctcaagtctagaccattactcagtcaaggtatctgcaggaagatcggggatggtaaatcaagttctatatggtttgacgattgagtaccaataggggatcataaaccaaggcctcttttagatgctacccaaggggctaacttggtaagtgatttcatgaagagaaggttagacaatggttcagcccatccgatgctatgcatatactcaacattggtctccctgcgctcccacaagatgattcatggcactgggtgggagagaagagtggtgtttttacaacaaaatcagtctaccaccttgtttcacaacactcccttgaagaccatcctaattggatttggaaagccatctgcaactctccatttcatgcacaatttaaactactttggtggcaaatccttagcaactccctccctactagagagaaattggggagtgcttttcccattccttccatagactgccccatttgtctaattgtcgaaattgtataactagtatttttacagagcgattcgctgcaacggatcctgcccttgctgaagctcaaatgttgggaagtgctgccactttcccagtcaaaaagcagtttcgaaaagtcattttctactgcgacaatgcacttgtggtcaccttcttcaacgatcatgctaaggaaaggagtaatcttaatttggaaggtgctgccactc

SEQ ID NO: 226926 - DNA, 1629 bp, Cannabis indica
aatagtaaaagaaaatttaaaaatataatattttattttctctataaaataatttaaacattatttattgacattctcacatgtaaagttactccaataaataactctttaaaaataatctcgaacattattatttaatatacattttaatttttagttagaataactttttagctttaattttttattaaaaaaaataataacatcaatattccaacataccattcatcaaatttttagaataacatcatatcatttcctctctaatagtataaaatcttaatattttacagctatgcctatctcaccaagcatcctttaacattttaccgaattaccctaaaccgttccctaaattttactattatttttcttttgattcatttataaaattaatttataattaataaattcaaattataaaggagttagttttttctttttttttttaagggaaattataatttataaaggagtagttggtgcctatatcattcgtgcaaatatgaaattagtacgtaataaaaggaagtttgactttgaccttgaaaggagcatttgcaggtaagcttttgtggatccaaacatctttagtccagtcaagaatgacaaagatcctccgaaccgtataaagcagcggaaccaaagctcgaaccggcggagaaaacaaagacagtccacttattatgttctctgtcaaaatctgaaacgacaacaagaacaagtgcggcgtggcggagcgtacggcgtggtcatcccctctagcgaaccctcccaacacgtaacccaaaggcaagaacagcccaatgagtgttcccatgatcacgtacactctgaacattttgctaccgtggaacagctcttctgaggttgttgtcacgtgaccagtgtgcgtgggaaacgccagcctggacagtgccaagaggtaagcgcttgccaaagctgggaacaccaactccactagtggcaccaggccacttactgaaaacaccataatgaaggccacgagttgaagctctatgatgcgcagtgaacccattatgccacctgttaccggctgttccagttcctcattgagcctcctcttgtgggattctgtggctgtggtcgccgtttggtctggctccgaccgtggtgccatcgccatagacactccggacatttttcctctgtatacagaaaactgattacatgaagaaacaattcagagatgtattaattttgaagtagagagaggtcgttatccaaattggtcaattataagaccaaaaacatgaatgttcataatgaacagaacaaaaaacaagacatggattatgcatttatatatagaacagtaatttaaagcagtctaaatatacaatggtatacatatatgatcagttaatagaaacatatacctagtaattgaggtgtatatgtcaaaatctgaactgttcactgaatattgtatgtgatttattagaaagtgaaggagtttgatgagtaattaagagtttagattacaaatgattagatcttctgtttcggacgagtagaagtcagagacataatattgagatgttttttttttaaagctagagtagaagaaatgaagaatatttgattgctaggtgtgatgatatttgg

SEQ ID NO: 226927 - DNA, 1776 bp, Cannabis indica
acatgagatacagcgtgtttgattctgagttgagacattgtggggaggcagtttgtacacgccctccacaccaggtttttcatctttggaggcatttttaaattccaaaaaatcttccaaaaccagtttgcttgagactcctccatattcaccagccccttcaactcttgaacacgtttgtaggcgcttttaactgagtataaaccagataactctccgttccaaaccaggtgatctcgggtgggaacaatattaactggaatttgaagaattaattccttatcccttggttcaaatagatcatttagcacatctaagtcccaactgagcccgtccattgtgaaaaggttagccacttttgcattaacaagtcccggatgtgttgaagatacccaagcattaagcttatccggcaaccaaggatcaccaagaacattaatattcttgccatctcccacgcaccatcttatcccatttgccacaagattttgcgcttcaaggatactacgccacacgaagctaggattagatccaatctcagctgtaaggaacgtaccattcgagtaatatcgggctttgaagatgcgagcaaccaacgagtccggattagtgagaagcctccatccttgtttacccaacatagccaagttaaagtctctcaaatttctaaaacccattcccccttccgacttatggtgacaaagtctttcccatgacatccaatggatccctgaattgctactagcagaggtcctccaccagtatttggacatgagactctccatgtcatgactaatctcaacaggtaacaggaaaacgttcattgcatagctgggaagtgcttgaacaacagactttattaggatctcttttccagctctagagatgaatttagacccccagccttgtaatcttttcctcactttctcctttaagtaattcaatgcagctgtcttgtttcttcccatggaactaggtagccccaaataaaggctcccttccaaggctggttccatacccaagccgccacaaaggcgatttctcagactttcagaagtgttactactaaagaaaatagaagattttgagaaattcaccttctgacccgatgctaattcgaacttgtgcaaggcttctttcactcggtttgcctcatcttcagtggctttacagtataaatagctgtcatcggcgaaaagcatgtgggaaattcttggcgcgccattagctactttacaaccatgaagccaacctcttctttcatatcgtctcaacaaagctgagagcccttctgcacataagacactaataaaaattacataaaagactttaattttacatataccaaatcatgccccttgaaatgttgtaaatataaatatttttattcattatacgtatattaataaaaatttcccaataaaaaactagtacatttattatggtgtaaattttacattatagcaaatgttgtgtcaaatttggcacaaaatttactatgtgccaaatttacatcacattttaacacactattagagcacaatctttcttaaatgagctatattttagttttccatcacttatttacatctccattagagatgctttaagtttagaaatttatataatagaacgattttttttatatatatataaattatgctaaggaataatgctagtagagtcacgaaaaatgtctgtaaatataaatatttttattcattatgtgtcattctggctaattagcaatttttttccctgaactttgacatatac

SEQ ID NO: 226928 - DNA, 1661 bp, Cannabis indica
tggtaaaataatttctaacagcatctatgttgctagaagtgtcacctttaatgaacaagaattcccctacaaagatcttttttgtcccatatctacacaaaccagatttcttgatcccactgcctttcaaataccatctgttttgcctaccactcaacctactaacccctcaacatcacatactcactcagtagactctaccaatcaaccaaataaccctccttccctaaatccccacttagaaagtctacctgctactcaacctgttactcctcatacacctgattccacctctctccaatctgtctctcagcagcctcatctacacaatgtccatcccatggtcacaaggtcaaaacttggcatttataaacctaagacatatcttgcaaacactataactaaacaagaacctaaatctgtcaaagctgcctttgctaacccgaaacggaagcatgccatggataatgaaattgatgcattaaagaagaacaagacttacactcttgttcctccctcccctgatatgacaattgttgaaaataaatgggtctacagaattaaattcaatacagatggtactgtggagagattaaaagctaggttggttgccaaaggctttcaacaaattcctggtgtggattattttgaaacatacagcccagtaataaagccatgcactatccgaataatattcactttggctattacacacaaatgggacatacaacaaatagacattaacaatgcctttttacatagagagttacaagaagatgtctacatgagacaaccacaagggtagatcagtgaacaacatcctaactatgtttgcaagcttcacaaagctatctatggcctcaaataggcccctagagcctggtatgacaacctcaaaaattcccttaaacaatggggttttaccaatagcaaatctgacaacagcttatttttaagaagaactcatgggaaacttgtcctacttctcatatatgtggatgacatcctcattactggtgaagattcaaatcaaatacaatctgtcatctccatgctgcagtccgaatatgccttgaaagtacttggttagtaatttactttctaggtttcgaagtcacaagagatggcaccaatctgcacctcacacaacaaaaatacaccaaagacttgctgaattcaactcaaatgatggactccaagtttcaatcaacccccatgtgctccactagaaagttctgccaacatgtgggaacacctatgaccaacccaactcaatacagaagtgttcttggggccttacaatatctaacaatgactcggccagacatcacatttgctgtcaataaactgagtcaatgccagcaagctcccaccactaatcattcgagcgtctgcaaacgaattctcaggtatctttcaggcactctcgatactggtctcaccttcaaactgagtcccacacttgatatacaagggttcaccgatgctgattgggcaggatgttatgatgacagaaaatccacttcatggtactgcatttttcttggaggtaacatggtaaattggtgttcaaagaagcaaattgtggttgctcgtgtagaaaattattttaccaggatcttagatctactcacaagtatgttgattaacaccctaaatat

SEQ ID NO: 226929 - DNA, 817 bp, Cannabis indica
tatgtagatttctgtaaaaatgccaaaactgatttaagtgtaaaaatacccccctttttttatcttgagtctgaatttttgtttgtaaatttatctatgcaggtcctgcaacagttctatgtgataatttgagttatttgttcatgtttctctccattgcaacttctaacatggttgccactgcactagccagacgggttagtctcctttttgtgatacttaatgagtatatttagcaaagtcttatcatgaatcattataaagatatttgttggacgaagaaaatagaaaatttcatttttagtattgtttaaactatattgtctttctggtgaataggcaaatagttgttaagtgggttgtaacttcgatggtccgagggaatgataaaaagtttgcaattagattgatgttcatactaaaaattcgatatttccttggttctctctgaagcagattgtattttcttgactacttctatatgctatatgttagatatctctgctctacatggcttgtttgtaggggggtgaatgactttatattattgcattgatggagctttcaatgtaatcattaaagattttttttttacatgaattacttgtgaatatgaattgaaaatgaagctgttttggtgattttttttattcctttcgcacgctatttgctatttcgttttggatgtttttatttaattaccttattatttgtcatgctagatcttggttaatatcctatgacagtgtttctttggttcttttcccttttttaagttcagtgcttaaccttcttgtttcgctgcaggataaaaaag

SEQ ID NO: 226930 - DNA, 571 bp, Cannabis indica
gatttttggatggaggggtacagatagagatgcacatggatacgaggcggtgcagggaatgcatttcccgctccccgtctcgaccttttattattttccccatctctgccccgtccccgactattccccgacgggtaataggacaaggaatccttgtcggtaatatagacaataacggggatccgtttatttaaaaataaaaaatttttagtattgataattttaagaatatttgcaaatatcaaagtgaaacaattaaccacataaaaattcttcattccataatctataatcatgcacaccagttgcaactacgacaaagaaaccacttacaattgcagagaagaatatagcgtagaagtgtgggattggttaggacataggagagaaagaactagagaaaatatatatgagatgagagaattctagattctttatatttatggagaaagtgctattcacatattgttagaaatactgtaaatctgtatatagccctaattaattcatgagattaaacaataagattaaggaatagcagagcgtaccggagtcgacctttaaatgatct

SEQ ID NO: 226931 - DNA, 1211 bp, Cannabis indica
attgttatttattttaaaaattatttaatgattctttagaaaataaaaatgagttcgaacgctaatatattaacatgtgccattttacttaactaaattaacacttagcggaatttattgtaaaaactgtaacgtcagtcgaaaaaaaatattacttattaagtgtgatgtgtgtcgtaagtcgtatcaaatttattaaattattttatttctatattacaattactttagtataatagtaaatacaggtcagtctcacgaggactataatcaatttttattcaaaaattagtaataagaatgaaaagtagaaatttttataattataaagattaaacaatgaactagaatacaaataaatatagatattacactattaggaaatatttaagaatctcataaatcattcaagatcaataataataaatattattcaaatttctcatataaatacttttgtccaatatctattttactataatataatcaataatcacctctcaaattttgtattgaaataataaacaaataattggtaatcaagcacctataagcattaaaaagaaataaaatagatgcacataagaaattgaagaataattaaaattgtattaaaaccatagaaaaatatcaaacaatatccttaacaccctaattaaaaatttagttactcatcgtcattgtgaacaattaaattaaactaaataggaaagtgaaattaaaagaagaagaaaagaactcgttgataaacaatgatggtagtctcttcggtggctctctgccaccaatttcatacaccacaagtctcaaaattcaaaagcaaaagatgtaaatggggcgggacaggagcaaggattgctcccacacccctatacatgtttcttaaattcaccccgtacccgtcccaatatccatataaaataaagtggggacagggtggggattacagtacccattacatatatattttaaaaaaaatgatatctcaaaaagaattataataaaaaatatataaaaactcattaaaacaacaaacataagtgaaatagtacgtatggtaaatggagttaataaatacaaaattagtaatcttaaaataagtggttaagtgtcattattttaaaaacagttaagtgtaattattaatatgcattaccgcaggcatttcatgaaaactgaaatatctcattaatgtaatcaataaaaagcct

SEQ ID NO: 226932 - DNA, 1051 bp, Cannabis indica
aatcacaaacagagacctcaactgatcaatcgaagaggttggctgtctactttaccatcttctagtgtaaagcaaaaaaataatatgagctgtatgttcttttttcccaagcgaaaacttttctctttacttacatacctccttatatggtagtattagaaattcaatttttaattttctaacaaattcatcttcaaaacttaacggatttttctgccatgggaattactctacctcagaaccagtgtaaccactagctccaagaaccccaatacgaatgggtttttctgctttttgagctttggtattcacggaacatttaacaaacatattccctgcatttcgcctcttagccttagtcaccttcatttcatcctacattcaaacaaaaatacttaaaaacattaaatccaccaacatttaaaacgatgataacaagaacaaacaaaaagctttcatagtcaattttctaaaatggatacaattaaataataaaaaaagcataattttatcgaaaaataaaaagtaaaactaaaagaaagctaaagacgcaaaaaattatagacgttggaagtaaaacagaccttccataggcagccagagtcaaagcaaaaggaacgtgaggtggaagagctcatttgacactgccacataaaaaaaaacacaatcgtgaatgtttcaaaagacttgatgaggctttgaagtagtaaagcaatgtgtaatctgtacaagcaattcaccttcaaagggaaaaaaaaaaaggtaaatgaagtcttggactatgaactgtgttgtctatttttcagtttcggcggaaactgtaaagatataggaaaagggagttcgtgctttttgagatactgacaaacaagaaaagtgtagggatgtcaatggagcggctcagttcagatccaccaacacccgcctcacgccgtttaatgggctgtttggtatacatgtttgcttactgaggattgggaatttaaagcccaacccaaacatgttggtattatttttatttttgttagctggggattcattttactatggg

SEQ ID NO: 226933 - DNA, 1200 bp, Cannabis indica
tcgccaaactaggggcatgtgttatagtgcaaattttttgcctagaaactcgagaccaggctcccataagaatgaaacgtggactcacatcccctgagaagaagagactcctcgagaataaaccttgccttaatcaaactcgcaaaatgatgcgaccgtgacagtctagtcgctttattacgcctcgcatattagtaaagcaagaccaagaataaattatacaagtcacgcatataccgaaatatatgcgataattacatagacttcccctgtgacttagaaaagatcatttctttacctaacgagttggtccaaaagacctaacgtactcgatgactcgataaggactcgcatgtcccatgttagtgacgctgataaggtatccacatatgcgactctatcaggatgcagatacctaagcacgaggtatgttagcctcctttgtgataaaatgcaccctaagcctgcaagcttgtgcgagaagatgaacaggaaactcgcgctagggaagtcgcatacgttgttgtatttagtgaaacagatttaaactgttcttcatttattccatttatgttttagtttaatgttaatatttaatgtaaaatggttctataaccaattaggttttgtgtaactaaagggacacttcctttgtatataaaggagtgatccaacatgaataagacaggacacaaaaccttgcaacagtgcactaagcagaccaagatctggctgaaccactatacttccttgtgttcattgttttcattactttctatttctctgggaaattttgtttgagtattcactgttctaggttgaatactcattgtttttctagttaatgattaaatccatattttattgggtgttgtccaaattccttcgacaacacttatgatgatctaaattcaagaaatatggatcaaattcacattgattgaccgtctcaaaattagacatagtgggagccctaattatgtggaagggtttctcaccactactagaagagctcactcccggagcacctatgttatgcatcacctccttgaagtggatggaaagttcttcagcctcgtttaggccttctcggaattgtcttctccaatccttcaaccattgctcattgtcctttactgcctttaaagcctccttagcagtaataaccatgatggcctctttaccctcgtctgggtcccc

SEQ ID NO: 226934 - DNA, 1819 bp, Cannabis indica
atgttaattatatataaaaataaaataattatttattaaagaaatatatttattaattagtaaatattaaatttattgtattttttattaattgaaatgaacatttctgtgtattttatcactatgttattttatttttgtttgcaatatcatttatgtataccatcagcataaaatttatgtataataaatatatatatgttattgctaataataataaaaataactcaagttaaaaaaatcgatctcacagactaaatgtatattattggtattaaaatttatttattaattcaaaaatgttattcaaattaatataatggaatgtaataattaaatcttacaattttttaaggtatcaacattaccttcctcaaaggtagttatattactaaaggaataacattctaaggctaaactctacaaaacaaataaattaatatttcactttatcattctcttgttagcattgacccattctaaacagcgtctaaaagtaacaaaaaatatcttatataaaagattgagaaagagagtgggaatcaatttatttgcgagatggaagatcatcattctagtgatgagagagtgtgtacgtaagattaatatatttaatatttttgaaccaaaaagataaattttaatccctcataactcattttaagaattaattcaataataaagaacaataatcatttatatgaaaatgcttagatagagtcacgaaaaatatctctacatacagacatttttttttttttcattatgtgtcattctattattttatactattagttaattaattttttttatattttttttattttttttaaaataatttagtgacccttaataaaaaattactaatatttaatattgtggactcttaaatctaatttattaaaagatcttcaaatgaggtgtttacatgagaattttttttttaaagaaatacttctgcaatgtttttgtttgatatattgtgaaacttgaagattgaacattatgaacacatttgacatataaaactaaagtttaaatatatgtgattgtacaattaattactcaaataatattttttttaccacagtttgtatgactctgttagtatggctttcgataaatattcgatataaatattcttcacttgaatgttacttatgttgtatcaacttacatattgttcaccaatcaagatgctattaaaaaattctaataacctatgactcatcctttaatcatctacatataaaagagaaaaagtgacatatatacgtattacattgatcaaatgaaaaatattgtagaagtatttctttagaaaataaaataaaattttttgtataagacaccacatttgaagattttttttgtaaatgaggcttaagagtccacaattattcatttgagagatgcttctggtactttgagaacttgggagaatggtttgggggatgttatggtggattactttaatgaaatttttaaggctgaaaatggcgtatggggagattttcttgactgtgtggtgtcgagggtcaaagaggaacacaatcaaagtttgcttcggcccattcactacaacatttaccgttattagaggcggaggagtccgctggtaataatccattaatccgctggtaaagggtaatagcggcgggacccgccgctattactccgccggtactacttggtcgttaataattagtattagcggcggactgacactcccaccgctaataatagtgtcagatttataatgtgatagtattattagcgacggatgagtccgcctgtaatactttttattttcttaaat

SEQ ID NO: 226935 - DNA, 3778 bp, Cannabis indica
ataatcaacttgaaaacaattcctaatacgaccagatagaaaaaatgtaaacaattttgtcataacacttttagatcagattataattaaattttattttgaacaaaaaaacaattcaggttctatttgtaccattttagaaaatacatggtctattttgttatttaacaaaatagagagtctaattgataacttttgcaaaacacaggatccaaaatggtatttacctaaaaataaatgattataactccaacaaatacattacaaatccgacaacaaggagaaataataacaagtcattaataatttattttatttacttaaaaaagtaatttattttattaaagacttgagactaaattattttgcatagtaattattttatcaagtgttgtacttcattttattaaaccacttgaggctagctcaagtggtcatagaagagtgcgtgtgtgttggaggtcttgggttcgagtcccaggttatacatggttgtaatatataaacgcttaaaatcaaaaaaaaaaaaagtacttcattttattaagtggttataatactgagtttagactttagacctttgtggtggaaaaaatacttatatcttgtttaggaaaattaatatttttatgatacaaaagaaaaatcaagttttctcatatttcccaaccaaataactgagaatgaccaaaattttatttatttgttatttcactaatactttaaaaatatatttttagatcaataaataacttatctaaacattatttattgaggtgaaaaaatataatttttaattttacaagaatccaatattaataataataaaaaaaaaaaactatttataaagagtgattttgttttgatttgagtcatataaaaaggactattaattatgggcaatatgcatgagttgtcccatttgatgtaaatactaaataatccatataaatattatttcataatattttcttaaaaataaaaatagagtatgggaaataagaatacaataattatcttttttagaaaaataaaaaatgaatacaatactatacatacatacaataattataattggggacacacaagtcccaataagtatgagtattttataggtgcaatttaaccaaagtttgtacattaataaataccatgttaggtaccctacaaatattatttatttaattatactttgtttaaaatggaaacaattggtaaagtttggtgattatattgtttgtgctataagcatattatgccccaaattacggattaggattatgattgtgatagagatggatatagatatatcatatttaattactaattttatttttatataaataataaagtacaaataattattaaggtatcaattattattatcatttattaaatatttattttactatgtaaatcaaaatttgttttgcttgaaaactataagaagttatagcttatcaatatatgagtgagttggctcatttaattatttgaattaatgtcacatttctttttgtttagattggaaattatattgatacattactttaacaactaatcaacttagttaatcttagttgctaaaactaaatagaaaagaaactttgttaatattaataaaaaaaattaccatatttgtaactcttcgttatattctatttttcttttacaaatatagagtaacaaaaactttatttatttaaaaaaaggtctaatcttttttaagtaataatatttgcaattatattatttaaactataatcattataaaaaagtaagtgtaagatctattgccttcttttttaatactagtaataaaattatcatatttgtaaactctaattaattcaattttacttttactatttaaaaaacctaattattattattttaaaaaataaaatatttgacggattgttattaacaagtgtgacctgtcatatgttcattcaagatgtaaattttgtattcttcacattttgataacgacttatgagttacttagttgaagatgctgttagcaatttttgtcatatttaatgtaagcaatttaattagtctatttttattgatttagcttggatgagtaatatctacatataatgaattatgtctagaacattttccccatagagataggcctcacagggactcgcccttatgaggcgggaatttcttgtctaaatgagaaatgaggcggagacggggattattttttgtacctaaatgttaaacgagatagggacgagaatgacactcctcggagattcgtttagtattttattttataattttaataatatttatattttataatttatgaatttgtattttttttagtatattagtatgtaagttgcgttttggataaaaattaatttattaaataataattaaggtatagtattttaatttttattaatctccaataaggaataagccaaaataaagattaaaatccttaacaagaattaaatcatagaagcatccctaactatgttcgggttaccaattaataaaaattaattttttttaaaaaatatataggtgattctacaatgcacccctttaaaagagatgtatcgatgcacccttaacttatttcggcattcaaaaaaaaaaaataaatctaattttttttcaatattcatgtacgttatagctatttaagatatcctacaaaattttgagaaattcggaataatttacaatatagaaaataatgttcaaacactcgattttacacacgtataaaataaaatagtcacgagtgcaatacaatgtttgaacatagatttcggcgtgttaaacttttccaaattttttaaaattttgcaggatgtcttaaataactataacgtacatgaccatgaaaaaagatttgattgaaaaattatttcggatgctaaaacagatagggatgcatcaatatattcattttaattttaagggtgtgcctagaatttttcaaatatatatattaattttattttttctaaataaataaatgtaagatcaagtagagccttaagctcatgatatcctctccttttattttattattattaatattttgttttgtgtaaagacaaaaccgtggatctatctcatcccaccatctctctctctctctttaactttctctctctaaaaacataaaacatgaacacaaaataatactcaaagggctgcaacaaacaaagctttctctctctacctcttaacctccaatggacacaaaataaaaattcaatttttagggttttttttttctttatctttctttctatttttattttttaaacaaattttctctctaaactttctttctaagcaaacaacatgcaatatcaaccttcagatctgtctcatacccacttctcttctccaacatattaatctcaaagttttcatcttttttcttctctctctctctacagttcgatctgggcaatacccacttcgttggtttaatcactttctctctctagaaatgtcttccatgcgtccagatctgacttgtagagtatacccagaaccagattccatggaaatcgaccacttagatcgtttacctgactctgttcttcttctagtcttcaacaagatcggagatgttaaagctttaggtcggtgctgtgttgtttcacgtcgttttcataaccttgttcctcaggttgaaaacgtcgtcgttcgtgttgattgcgttatctccgatgatgattcatcttcctctgcttcctcatcggataagtctcgtggtcctttctctaat

SEQ ID NO: 226936 - DNA, 2327 bp, Cannabis indica
aaaaaaaaaaattaagaaaaatgaaggccagcgtgaaaattagaagaaatatactcattttcttacttaaacacaccaactgatcacctcacataataataattatcttttctttttttaatgttgcaattagtaatttggtactcacataatcacatatacaaattttgttttttctttttatcataattaaaattgtacaaagctttgagattaagattaatcatcaccttaatgaacccacccaataaatataaaaaaaaaattttaaaaaaaaaatcaaaatggatgcaaattcctactgagaccattaacattagccaaaaaccccacaaaatcctgtttgtacgtagttctcttcctttcctcatccttattcttaatcttctctccttcgtcgttttcaatggaaacggcgccgtttttcaaattttcattctccgccgcaatcgccgccgactcttcttttccggtgcgtttcgaacttcctagcttcttaatcgatggcgcaaacagaagcccttcctttccgacactcctgctccggctcaaaatatctcgaagcttccaccgcctcgacgaccctgtcgaactgcactttttccgctgttcgtctgaaacctcgacgtttttcggcttccaaacgcagtatgtaccttgtttcaaaccgtcgagttcgtcggcctcggatgaagaacaagacgatgtcgttgtttccctctcttcttccaccatcaatttcctcaactgtggccgacgcgtacgacgcgtcgtttcctgaacattattattcttctttttcgcatcgacgtcgttcgtcgaggaaatcggtttttcgagcaaggactggtcgaagagagggtaaaccggtttgatctgaccattatagaagatttcgtccgcagatatcggcgaagaatccggttccgttgcaacaaacgcgaattcaaactcactctcctcctcgtcctcttcttcttcttcttcctcgcgatgaacatcaggtatggtgattaacgaacggctctgattaacttccccaaactgatcccacggtacataatcatattcctcgagaccaaaaacgctgccgtttgaaccattctcttgtcgaaactcgttaacgactctagcagcaatatcagctagatttcccgtaccagatgatgagtagtcattaaaactcggatttacagaacgtaatgaatctgtctgcattttttttttgttcaatagaaataaaccccacaaatctatagatacacccctatatatttatatatagctaaactgtgtgtgtataaataaaataaaacaatatcaaagataaatatgaaagagaagaaggagggagggaggaagagttaggtgaaaatgaccgaaagtgtggggtgttttttaggcaaaatataaggactcttcagtcttcttttctctctctctcgagggatgtatataataggtttataagagatgagtggttggttgtgactggtggtggtggtcctgatcagaaaagtaaaataaaaaaccaaaaattaaattaaattggagaaaataacataacacttgcttataaatatttaaaaaggtaaaaaggtaaaagaaaaatggaaaatggtaacgcggcttcggtaaatagaattaggattgggctaattttacagtggttatttttttatagtaaaaaagaaatagtctgcgcggaggggaccgtctagagactctagtcgttttagttttaattttttttttttttggataacccgttttagtttaaattagttaaacgggaaggaaagaaatggtggacgaactatttttatagtgtgagaaataataggttgttgaggctgggattatttttattattattattatacaatattttcttgcgtaatacgtaatatgtaatagtgatttatacgtatgtggacacgtgttcatatattatagagccaatgacaagagggataatagacatcactcggttcaggttatgttcacatgtgttaaagtttcctctctgcttttttaaggtggtttaataatggttcgttggttttttgtttttttaggctattatagaaatacaaaaattatacaccagaaatacaaattgatattgtatgtgtgtgtaattatataattcaaaatataatgtgattccactaacaagtattaatgattaaaataataatctgaagcaaaagaacttttatataaatataaagtgcactagagggttttgcaagcttattggtagttgtttcttttcatattttgtatggattgcacaaatttcgtttaagataattttcatatga

SEQ ID NO: 226937 - DNA, 758 bp, Cannabis indica
aaaaaaatcatttgaaagtgtaaaaaaataaaaaaaagagtccttcgtttcttttttgtaaggaagagataaaagtactacaaataccatatttgaggagttttttaacctaaacaaaataaatttagggaaagtttaataattcaagagagtgaaaaactaaaaaaagctttagtattagttgttttttttttttttttgttgagagaaccttttggtacttatgtttgtacttatgtttgttcacttccgctacaaatataataatagttatattcgaagtgatagtaactcgaataataaccctaaaataaacaacaaactcactcacactaactaaacccttttggaaaataagacggagataaggaaaacacacacagacaaagcttccaactcctccaaaacatggcgaggttgaggacggccatggattcggcgttctgggatttggacgtggctacgcctcgagtccttgaaggctccgctaaggctgtaccgggtgagccattccctatggacgctactcgagcaagtcgagctattagaatacagcaagtctccttcttgggaaatgggtttcctcttggcattatcccttcttactttcctacttcatccaaggattctggttctttgagttttcaatccctctttctaaaaccggccacctccaactggtaagtaataaccccacacacacatactcactacacttttgtttctctttcgttttctctagctttgtttggtttctc

SEQ ID NO: 226938 - DNA, 1226 bp, Cannabis indica
ttcagtaagagctgcatcattatataatacattagtttgattttaagaactaaaaaatacaactcaaaaccccatttttcattgaaattcacaagaaaggattgacaaaaacacatttcttttcttcaaaaaagaaagagtcctttggcaaaataacctttatgaaaacttttattagtaaaatgaacactgtgagaccataaacgaccgaccatagatttacgctatgcgactatcatagtagcatagagtaaattaagtgagactattttgcaaatttgagtatttcacattagtgtatgattttaagaactaaataacacaactcaaaaccccaaatttcattgaaattcacaagaaatgattgacaaaaaacacattacttttcttcaaaaaaagaaaatagcccaaaaaaagaaactcttctttctatcaataaatagctaagaaaaaggaaaactccaaactccatacacaccttccaaaccgtcgaacgaattccagcaccatcaggtataccctgcgaagctattctcctcaattcacgcatattaatcaccttcttcgataactaaatcacaataaaaatccattcttgaaaacaaattcaaccccaaaaaaaaaatcaaaattaattaataacaaaaaccaaaaatcaaacctcagacaatagctgtgcttgacgagaaatatcctcagcagaaggtccaccattaacaacatcctcagaaaacctcgaatcatctgaaatctcacgccttaaaggaggtagtgaaggcggtgggaccgggactggtggattgagtctaggagggtcggaagctgaggctccgccggtggaggtagtagtagtggaaacgacgtcgtcgtcgtcgtcgtcagtggtggttgttgtggtgggtttggaggagtagcggttgaaacgatcttcatctggaggtggagtagaggaccagagagaactgttgagccagtccggtactctcttcttgaccattgtttggaattggggaatttgggaatttgggaattagggtttagttgaattgggtttcttgtttgtgatcaaatgaaaaaagcttccattgaatttgataataacaatcacaattcaagccacgttctccttaattatttgcagtaaatgtctaatactcttttcgattataggaaaattctacaatgcaccccttaaaatagatatattgatgcacccttatttgttt

SEQ ID NO: 226939 - DNA, 2161 bp, Cannabis indica
aattcgaacataatattttagtgaattggaggctacttttattttaaacagcatatatatagtataaagaataaacaattaaatatatatggagaacaacaaataattaacataagaagaaaacactaacaaaagtagatataaatataggtagaagataataatatatattgattatggggttattaatttataatttttgattccttctttaatttatttgtaattaataattatatatatatatatattatcctatatatattatcctagacggccctgagttaaaatagaccataagcaaaagaaaatttttggacccttactataaagataaatgatatttttaaaaattattaaaaaaaatgtatattttttaaaatgcatttttttaatttgggctcctaaaatgagtgagccctaagcgcgagcctagcccgcctatgcctaggatcggccctgtccttacagcatatatatttcgactaattaaaatttttgtttccacatgtattaaattatattttttcaacttttaaagttattaaaaattttctctgaatcttgagattgttagatttgaggacttttgtctaattttaataaaaaaattttaacatagatgaaagttcatagagtataatttaatacatgttaaaatttaaggagtatgatttagtagatattaaaatttaaagagtatcatttaacacataaataatcacctaattagaaaacaaaaatctcaattgaccatatataaacgctgatgtaatatataaacgtttaaataaaaaatatatatatatatatatttatatattttattacactaggtgtaggagtataggaccacttgaattatatgtatgtagggtcatctattaaattcaaatcaaggaaatttcctcgaagtttcttgatggaggtaaaggacatggagtaggtccactccactactttaatattaatttatgtgtaataattaatttttttgattaacttaattacactaatttggatcttttctataaactaataattcaaactatgccttcttcttctacttctttaattattagtttctctatttatgcttaataattttgtttttctcaataattaaaaatgttgttcctaggctacaatgaacactcactttaattatttcataatgtacatattaggtagatggtgttaatttatcatgcatgaatggtgtattacttcgtatttttggattaatttaagatgcaaaaaatacagtttaaatattttaccatacacatataatatattgtgaacactaattttagcattataatatattttataaatttctcataaaatgtattgattttgaagttagaagaaaaaaatatctacatataatatcataataaaataatgccattcctaaaaaaaataatataataaaataatgggcatgtgttaataataaaaaatagagcccatccatgaacagttctaataattaagtgaaagttgagaattaatggtaccccatctcacctgtttgtttctgcaataatcacgtgaaaataataacttgtgatttcatttaaaaaaaaaaaataataataataataacttgtgatttatttttcagctaattttttccaaattgagaatggtactttatcactgtttattattttttatctttgaattttgacatgtactaaattatgattgaaatttttttgactgttaaaaattctccttgaactattgagatcgttaatttaaaaacttttatccaatttcattaaattttactaatttatgctccccaaattttaatatttactaaatcatgcctcttgaattttgacatgtgtgaaatcatgccttctgaactttcatccatattagacttttcttactaaaattagataaaaatccacaaattgaatagtcttaataatgtaaaaaagaaatttttaacaaatttcaaaaagacaatgatttagtacatgttaaaaattcgaaagacaaaaatcttaattaacaaataaaaaatatatattcacattaggtgcaatatattatattgtatcaaaccaataagaatgttacactttgttatatttaagcaatattgtacctttaaacattttatcaaaaaaataaaaataat

SEQ ID NO: 226940 - DNA, 1320 bp, Cannabis indica
taaaaaaaaaattaaaatataatctaaacaatgctacttcttggtatacaatattttttgtgaaggttggaccttccatctcaccatcatcatttaatttgattattcctcttataatgacataaatacttatttagagagatacaattcttcatgtataagagattattcttcactttagttttgttgattgtcatggaaaaacatggtgtaaaagttatcctctattaagcttgaacgatcatctcgattcattgagagacaaaataattttaaaattgtatcattttgacccatatttattcgagaaataattattatatatatatatttttttttttttaaaacaattaattgctcatcaaaaaataattaattaactatgttatttatgtctcaactatcactttatttatttgttattatagtactttattaaatccatcataaatcagctaaaaatcaaattaacatgatagatttctaataaagaaaaaccttacaaagttggaactgttgaatattttacttaaattagttatatttattaattttgaatacttggtatgcctaaaatattcttgttggttacgttttgaagagcctacttaagaaagttttggaatgacttgatgcctaagttaatttatttattctaggtatatatgtggtatgtgtgtgtgagagtagagtgagttgtgaaaagagaaatgagtgtgagtttgttgtgttgtgttgtgtggtgagagtgagagtgaggaagaagcaaatggtgtattgagattatggtagaaagattgaaatactagtatatgtaatttaaagctataagtgaaatatatctcttttgtaggtttggtaattttaccaaacagagtaaaaaaaaatgcttcgttttttttattatttcactaagtttattatttttctaaacaagtggtatcagagccaatgttcagatttacaccaaaaatgttgaagttgatgtcttccataaaatttgagatcgagctttttgatggaaagaatagtttcagtttagggtagagcacagtggaagatgtgttgatatacaacaagggtttctaaagcattgtaggtaaagaagactgagagtatgactgatgaagattgggaggagctataggcaaaatcattaagtttgactcctaaattaaagtatagtttattgaatgaaacatgtccttctaagttatgaaaaaaattaagaaacgttttatatgtcaaaatctctaacaaatagattatatctgaaaaacaaattatatgagttaaagataattgaaggggatgatgtta

SEQ ID NO: 226941 - DNA, 920 bp, Cannabis indica
caatgtcagtgaaccacatttaagactttttctttcaaacttactctctctctctttttccagaattatttaaaagcaaattatatattcaaatttaagaagttaatatatcatttcttttctttccaatccatattatacaccaaacacaagttaatattaagctttcaatctaatccatattgatgcatctatccaattctgaacaccagatagaacctctatgctttatatttgtagtcatattccaataactgagaaaagatggtggtagaagttagtttcagtttattgttgaaggacagtttcttaacatgataatatttatttagtggtaaagttgtttgttatctttgatctgctaatctattactcattaagtggcttggattgatcagtgagcaacagcctttgcgattgaaccctgctgaggtatctgaggtcattgctgcagtttgctctgagacatcttcatcttcatcaaatgctaatgtcatgacagtatcaactagattaaatagtcacagtggaaaaccatcaatggatgttgccgtgagcgtccttgttaaactcatcattgacatgtatgttttgatgcatttggcaactgttatttcctaatattttctataccatgcaagtattttaaaggtgtattctgtaacacttcttcttatacccatggactcttttattaatggatgcatgtttaagtacatatgtctatcttatacaaacatgtctaaaatttgtatttgcaagttatatcaaatacatgctcctactttttgtgatatcttatcttatcttatctttttcccttttcttttcagacaagttcttttgacttaatagttagttgaattttggaattcttgacaaattattataataattagacttactttcttgctggagca

SEQ ID NO: 226942 - DNA, 1117 bp, Cannabis indica
aaattaaaaaaaaaaaaaataggaaatctcattgtttatttttatatgtacatggacaaaatttcaaaaaaaaactacctattttgatgagagaatacataatttgtcaaaaagacaacggtagataattgggtgtatttacggtgaattcttgataaatgtgtatactaatacatttttcttctatattttcaaattgtagctagttttagtttgaattattttaaattattgtgtattatagttataaacacttttattagtttaaaaataaatagaataatttaaagtatagatgattttgtattgtattatattgaattgaattatatatcatatttttatataaaattatattaaattttaatttatactaaaatattatatacgtaaatatccataaaagtcattaccacatataattttacataaaaatattacatgaaatataatttaatataatactatacaatacaatacgttgtaatacgacgtaccaaacgagcccatataattttaaacaaagcatttgtaacaacaacttcaatttagtacttatcattagacgattaataatatcaggttaactagaggtttccttttaatgtgaaaggaggtgtggattcaaactttcctggccacattgttgcaggtaaggagtttttatcttgaactttgacttgtttatatagtaatttggatgcatcacaacaaaagttttcttgagaacttttggggaagattggaaaagaagtcagtggaccttgaatttgtattggtaactttgaagaaatagttagcctaacttaaaaaagtagtcgctatggaaacttttaaagaagtacttgatgagtgtagattgcttgattttagctctattacaaatgttttaacttggtgaaatgagcatggaaataatagagttatggagcgacttgattgaggtctctgtaatatagaatgtcaaaatcaatttgaaagggttgacattatgcttctttgaaggggctgtctattttggcccaatattctcttgaccagtggtctcatacacaagatagaaactagattccgattgtagcattcttgactgttgttgatggttgtgatcgttggc

SEQ ID NO: 226943 - DNA, 3414 bp, Cannabis indica
  modified_base (62)..(62): a, c, t, g, unknown or other
gacttttctcagcaaatggatagtatatttgggaccgatggaatatggtccatattagtcgngtgcaatatcaatgagacgccaatcactatcttttctatttttggtttttgtccttctctttggagtctcaaattattattattatttttccttcaaattttgtcaccattgaaaagtttgtttttttttctgttaaatattgttcaaacataagttatgaacaaagtcaaatgggtgaattcaaatttcgcgatatgagaaatatttaaattcatgtttgatttttcaaaagaagatagcaaaataatgttaagaaaattggtattaaaataaaaaacactaccaattgagtttaaggtagaagatattacatttacatgcactaatactagggagagtgacacactttctggtatggaactaataattgcacactacgtttacaaaaaaaacaccaatataaataggacttccaattagcatatctatatttttaaattaaattatttacttttcaaaataggattaaattaaaattgtcactttaatatgtcagttaaatgagtcagattaaatgatgcaagagagtctttctaccatttttttttttttcatatctcttcttcactttcaaccatcctttttattgaacttttttttttcttttttttttttcactttttattatcttttatatcatatctttttcaaagagggcgaggtatctcctaccattgatgcatgcaaatccatattcaactttttggatcattagatcttgtgcaaaataagtgagattttctatcaaaatctctttcacaattgattgttaaaatcatgtaatcaaattagataacaaattaaattgtgaccatcaataagaatacttttttttttttttttttaagaatatgtgagaatagcaagattcagatttttgaatctgaatgcagaaatatttaaaccgttcaattttttaacatatgaatgtatttttattttgatgtttcaaagaaaaagaaataccaaatatatgtatttttttgaaaaaagaagtaaaaaactaattttaataattctatgttgaatgaatagtagcaaaaaagaaaaaaaaaaactaattttaataattaattctatgtcaagtcactaggcatgcatggtttgagtgtcactcaacgcatactatgctcaaagttactcaacatgcatagtttagaagtcactcggcatgcatggctagaatgtcactcgtcatgaacattgccaagtcactaggcatgtatggcttgagtgtccctcaacatgcattttccaaaatttcacttgacatgcaacttccacaattccatgacgacataactatacttaatcaaattttccagagtaaagaaaatgaaagagtatgacagcaaggagaaggtgcgcatgcgaaatgtgtataatcacgctctctacaagctttgaaagcaaggaggtaggagaggcaccgtacctgcaaagcttgatagcccggccaagggtacatagcagtcaccactcctgcaaggaccacttgatactagaaaaaggtataaggcacaatgccacatcctgcaacctacaattcgtagactatgagtgtcatcatgtccctagggaccaatattgtgtaccaggatattaaagcctataaatatcctattctcaaatgtgagaagaggttagaaaatcagtcttgtaatcaacacattaaaagcaatagaaagaaatttttctctcaactctaaaatttcattgtcatttgaatttgcacttcatattcatcttcatcttatctctgacttttaattttaaattttttattttttggctaaaaagtttgttgacgagttcttactgtcaacaatttggcattgtccgtggaaaggacaggctaaggctatgttgtttccttatacacaatcattgcaaaatgcctagacgcacacttcgtctccaagatgtaggggttttccttgatgacactcaactgatcacttcaaggcgagacccaccatcacccgtcgctggagaagaaggtgctaatagccacatgcctcaacaagagaagaggatgtgaacatttgcatgcctcaagaaggagagaaggtgcaagcaggcgaaggtctttatcgagataagaagacaaccgccgtgaggaagtctcgatggacgaaaaacgtgatggggcgaccgcttccatcacacctgatggtgggagcaggtcacaaaggcaaatagttcttttgcctataaggcaccctccaccaccgatactaaaagatctagaacctcacaccatagatcgagaaaagagaaatgagtttattcaataagttcaagctcccaaactcgtattcataatgaagagataaacgagctgagaacgaacaacttatagttgaaagaaactactgtaaacatgcaaaaagtgctggagaaattcctaaaaggatgctcttatgcgcctttgatctagcgaagagagccagaagttaggaagaaaggcgaaagttaggtgggggaggaatgaatgtccaaatactcaataaataacacgccgaaatcctcaccgccaaaagtttggtcccaaaaagacccagaaccctcgtcgcgaccaaataagactgagttgaagatgatccacagtgatttgaaggagaaactcaatcaaaaggccactgtcgagaagcgagtgccatcgttgataatgcctcaccatgaggaaggtccgaaacacatgccgccagaccttctagaaaagttgaaccaaaggaggcaagagcttgataaagaaatggaggacctccgacgaagaatagcattatctgcgtcagaggagtgttattggcacaaagatgattttgttgatgaatcgtctttctccagagagatctaaccgaacaactacctcccaatttcaaaaagcctaacatactgccctacgaggtaattaatggaccaaaataccatttggatgccttcaaagaaatcataaagatgaagaaggttacaagcaaggcaagatgtcaatgcttcgttgtaatactcagtggtgcgacatacaaatggtttaaaaggttggttcctggatcaattacctcatgaaagcagtccattgatgaatttttagtccaacaccacgcctcccgagattatgttgttttgtaaacaagtctggcctacatcaagcaagaagagaccaagagcttgaagagctatattcaatgtttcaacactaagacaaccaaagttgggagtgttgggatttataccctaaaagtaagtaattaatagataatatattataaattatatgcaacacaattataagataaatgaatacattaattatataagtacaattaataaatatctaaaaattcctta

SEQ ID NO: 226944 - DNA, 2615 bp, Cannabis indica
caagctccttgagctcctcatccttaaagggaaaactctctctatccgtttaagggctgcctcaacagccctccaccctgcaactgacctcgctcctctgtcaggcctccgtgcaccctggcctgtgggctgtatcacaagctgcccagtaggtgtgggccctagtgaaggaagaggcagagacgacccagcaacatcccctccacgagaagttcaggccaccttggctctcactcgtcctgcgggctcatttgatggtcccccagtgagacgtctcagcttggaagacatatctgcaaaaagtagcaaagttagaaagcaatcataaacattcaatgcaagacaaaaatatggtgttatcaactaccaaataccatcgtcatcaaaagaggaactatcagagtcctctacaaccggcatgcccttgcctttagatgtaggcacggggcgagtaggtccctttaaagcctggcctctaggttcaatgcggagagaaaaatcaccaactagacccccactacccaggcactaacaaagagccctatccttcctctccaaattttgcacaatgtgagataaaggtaccttgtcatctcagtctttgtccacagctgggactcctgcaaccctaggggcaggaggatataaaccatacttctaaaaattggccacactgatcaaccagagtatatttctctgctctgctgagagagacttaatgtggttgtctatatcccttatttgcaaagtggggatagaacgcttgcaaaatggcacactctggaagcgcccatgacaaacctctttaacatcccaagcaatgaagtatttatcggcatactcgcaaaccttcgacataggtgaattttttgtaccatctagccactggtgttcaccttggctaaagtatgtagcgttgtctagaaattattgattaaatggtaacactgcgctatgctcaatgtggccttctgaccacgccaaccatcccaaggggagtcggtgcgcttgataatctctacatggtatcgcacagttgatacccctcactacgccacttgcatgaaccttgctaaaagcctcattagaaagagtagaagcaggagaaacccaactgtctccttgtgatctcgcatctagtatctctgccttagaagacagttctaagtcatgatcccatcaaagctctgaaggcccaccaagaatgtttactgggttaccattggtgtcataattacccaatggacagttttggaggatagaacaagtcttgtacctcctcctcctcactagtacaaccttctcatgatcgaacttggcatcaggactctcagctccctgatctatctctggattgatatcaacttggggttgagcaacgtcctcaacggtcctgactcgaccccttgtggctgctctggcaacttgagggtcacacggttgtgctctagggagagtttagttcattcttgccataaataaagaataaataagggacctacacgatgttcacctcccctattcaacacccagtgctacctccatagaagaaataatgggaggtgagcaacctgacaaagctacaaagacattctagttaacagtacccaatggtaccttccaggtaaatcacaatgtataaggtctattatcgactaagtaccgtattaagtacacctactaagacaaatagtgagccctaagttatattttttagtataatggactcactaccgatccttatactgagttcccaagggtgaccccgcataaggtaatagttgtatatgcctccaaacccgtcacgagaccctagcctaggtccatagagggaaacaaactaactaccctcttggagccttgcccttccaggatagggttctaggccttagtggtcggctaggccccaggacccagccaagtggctagccaagaacccatgttccaggcataggccgaccaacctatggggtaacccccttagccgtctagaccctctgacagcccaccatggcaagccaggtcttgcacaagacctccttgatcggccaggacctgcacaatctaaactagtgtttagtgttttttaagaaatcaaatgtgttctccgtgttcttcatgttctttatgactcaaagagccaagaatcactacgaaggtcggattcagatcttttttgtctagaaattatacattatgtattgtaaagctatcatgcggatcaaaatatcgaaaggacaataatataatctcagaatcaaagcatgttcaaaacaagaagtagtgttcatgcattcatggcaagattagccaaattaagtgaaatagaaggaatagaaagattatcgactatgagaaatattggaaatattttactaggatctagatttactaccaagtatgtttgtttaacatcctaatatgaattctaaaacaatgaaacaaacaaataagagtttaagaaaacttacattgggtgcagcggaatataatgactccttccattcaaatctctagcccttgattcctttctgtagcagagcattataaagatctgaatttggatctctttctctccttctttgatgttgattttccacagtcttacatactat

SEQ ID NO: 226945 - DNA, 989 bp, Cannabis indica
gatatctaactttttgtaattggattggattggatcggttcagttcaattggattggattggatgatgcccacccctatatataacaatatttacattgatttgataaagtatatattcatttgtattaccaactcaatagaaaggtagttgtgtctctaaaattagaagcatcatttctaatgaaagtgtccttttgacattaatatataaacacctatatttacagttaatatgtgcctataaattacatttcaacatcacacaccattttcaaaccaataaggtcagtttagataaatgtgattattactttttttaaaaaaaaaaaattaatatatttttttgtttaattttaagtacacatttaattactcatagatatattcctacctcatttaacaatgatttaatataggggaatcagtcaattgactattttttgatttcaaaagaaaaatcttggtataaatcttgtttaatttcaaaagaaaatattcataacactaattatatatatatatatatatatttatatatacttgtggggaagtaataaatatctttcatttcaaatcaggtggtaaaaatccaaaagataaatatatagtggtaaaattacataaattactattttttttgtaagttttttagttttgtgtttttacggtattctataaaaacacaagaaaacaaaattaaagtaacaagaaaataacatcaaaacaataaatgtacaaataataaaaaattaacaaaaagataacaagagtacaacgtaaaaatacatcaaaagaccgtattttatgtaaataaaatcttaaaaacggtaaaatatttaaaattctgtacaattatatttttgtaattttttttgttgtttttgtatatattttttaagtaatcccaaagctaaagggaaatttacaaaaatattggaatttgggttaacttttacaaaaatattgtcacacgaaaaagttttcaaaa

SEQ ID NO: 226946 - DNA, 598 bp, Cannabis indica
gaagaagatgttgacagccaatcttcttaataaatttctactggttagttctgaaagactggccggccagcttgggaacgagctgagctgaacagggaattcattctcccctatgtggctgaggattgaatttagagcaaaaaggtttgacatatcataaaaaagcttgcttgtcttgccgggaggtattgggattcagaaattaatattgatgaagaatcctggtaaagctccctttgtaaaaaaaagaaaaaaaaagttcaaagttttaggtattgctcttcattgctgttattttctttcatgttttatgaacaagaccaggtatatatatgtgcatgtatatatatacctattattattgttattattattactactataagtaaattgttgaatcattgcaaggggttaatgtatttggaatctggttcttgacttgtgtttttttttttcttcttttttcatcataattgattgtatctattcattgtgggtctttgaaaattttagatatcaagaacaccagccatacactcaatgttatataggttgaatataagtagaaattgaaagagatttcttttttttttttttt

SEQ ID NO: 226947 - DNA, 1708 bp, Cannabis indica
agccctaccattcgttacgaggggtatgttagagagtctcacattgctaatgtgtggaaagataatagaatatataagagtaatgggctactcctcccattgccaattgattttgggatggaacctcattcaccttattcacaaattctaacaccactctctctcttgtacggtactacatactatgttgccgtaaggatagtttctctttcatcagtaaggatagtgaaaattgtgaactttagagccttctcccgagggtgctgtcggtcggaatcattattaaacttttatttctttccattaccctgaatatttccgttgctcgaccttttaccatcgtggccgggattattaccagctagagctttagaattttgattgtgttggacgatagtattggcagcagtggctgagctttggtcaatgtttttctgattgataacatccactcgcaacactgctttttcaaggtttataaaatttctttttattattttaaattacttttaattttttaattaatgtttataataatcaaaataatttagaccaatcaaaatataacacgtgtataattgtgtacacatagacgacattttaacacttaactgtgaaaacctaacataagagtaaaggtcctaacaaaaataaagttagaaggattccggctaattatggggtaaatgtaacaaaatatatacttaatgtaatatcccttaaaataataataagattttttttggcgattaaaccctttcaataatcgttttacttgtatttaactttttaaactcaaattttagttgtaaaaccctcaaaactattaaactgttagcaaatttaaagtatcattcggttacttgacaccatggactgcttatgtgtacactattgtatacgtgatgcatttattttggtacacctaatattattatttaaaaattattttagaaaattaaataaaattaaaatattttaaaaaataaaaaaatattaataataatatcaggtgcacgatcaattacgcccaaggccccacccaagtcaaaaaactcgttaacaaaaaagctctatatttatttttcaaaaatactatgttgtattttaactattattttttaaatatataactattttttaaaataaattaatttttttaagatactacattaatattttattaagataaaaggcttacttatgttttcaaaatactatattttaaatttttactgctatatttaaaaaacataaaaaaatttatataaaaaagacttaattaaattttgtggcccaagcccccaatcacttgatatataaatggagaaaattacattgtatatccgctttattttatttattttaatttttaccttcattttcacattctttaagatataattatttttatagatgatgtccttaggtgtgttcgcggtacgggtagtgcagtttttgactattttttcaaaccaacccgcaaatgcggtttttaaatttcccaaaccgcatccgcaccgcgaaactaaaaaaccgcaaaaactgcaccgcaaaaaatagtgcggtgcagtgcggtttatgcggtttttgtgatttggactatcactaaataattaaactattacaaatagaacaaagcttgagcaacacttgtcaaaaataccataaggcttgaaaataaatatgaaaaaaatgtttcaagttt

SEQ ID NO: 226948 - DNA, 999 bp, Cannabis indica
attttttgtagttaatttgtagaatataaattaaaattttcatattttataataaatgagtaccctttaaaataaaaagtcatgttgaatacacttgcctccgactagtatatgtatatatctcaatttacgcattattgtacaaatcaaaatgactccaataaaataagtgagaatttcctttactactacctatatgtggagatgaaaaacacatttattatatattttatgggtatttatatgtatgaaatgatacaaagaaattaaagtgggaatatctaaagactaaacaaattaaattgggtatataaaaagctcaagttaataatattacattatagtccctgattctcgaataggaatgggaccccaaggagaagttctctacagatgagatgccattacaatggaaaaaaaagatgttccataatttcctcatctctcccacaaatcggacaggatggtctttggtgttcatatgatctttaaggatggctccaatcggaagagcattggaaatgatgctctaccagagtactttatgtcgctcatacattttactattctaaagtttgttccacaaagaaggaacaacatgacagtgtgggtttctctcaagagcctgcaaaaggtaggtagatttggtggaaaaatttaccattcggttccatggtccaattaagtgatccctcccttgtcctgaatgctttcccccttttaaaagggcttaaacagtgtcccgaccatacaaccaatttagtttcagaagatttcacttcccattctccaataataagtcagccacggtcatatatcttgaagaaggaaccccattaggagttggaaaaaagacattaccatgtgtcgatctttacagatattgatatctcttccatcagttgccacatatcaagcacccctcctaagaatatctgttgccttaaccacaatcttacataaccacgaatcgaagttcttataattgcattgaaggaa

SEQ ID NO: 226949 - DNA, 991 bp, Cannabis indica
atttatattgtatatatttattaatatatgcaacacttatccatttaataaatttaatttaaaatattaaatttctaaatttaatttaattacttaattaaaaaatattaaaaatatctcttttttatactctaactatatttatatttaaaatatttaaatcaaacttcaatttttttttcttatttttcttcaaaaaaattcatttttcttattttatctatctaattagaaaaatctctcattttaaaatgatatgtattgaggttattccatcgagtaaaacaattaaaaaaaaaatcaaaaaaaaaaaataataaaaaattaaatttaacttaaatattctttatatatattcttttgatatagtataataaaaataattttaatatatttttttaattaaatagttaaattaaacatagaaattcaaaattctcttttattattcataattagatcaaaattaatatttttaaaatttgttagtaaccatcaatgaataatacccattataaaatattctatatatatatttctcaattagtattatatattaatagttactaaacaaatttaactataaatattaattttaaaattattaaactattagattttgatccaacgaataataaagagaaattttaatttctatacttaatttaacgacttaattaaaaaaaaaatatatcaaaaatatcattttttacactatatcaaaaatatatttatatacaaaatatttaaattaaattaaattttttttatcttttttattttgtaggaaatttattttttaattcttttcagttcgatagaataattttaattagtatattttgtaaaaataatagatttttttaattaaataaaaaattaaacataaaaatttaaatttttttactactactacgtagtacatattaagagtgtttattgtgtggtgaacaaccgacttatatgcaccatactttcttcttgatttgga

SEQ ID NO: 226950 - DNA, 666 bp, Cannabis indica
ccaattaatatcttattcatatcaaaagcaactaaatagttgctttttcaaaactcccaaaaagcgaaaatttatggaaacgagattttttcagttttttccattttcggtaattgttttgaatttcggtatgtatgctgacgtggcacaacggtatttgtataaataattttcttaaaggtatttttataaataaaatcaattttaaatataatattaaaaaaaacccaattattaaaggtgtaattattttcttagaaatatgttcaatatttattttgtataagaataatacaatatgaattctatgtaaattgtgggtgagtattatgtaaacttaaatgctaaaagtgctcaacattataaataaatgttataatattgttatttagtgttatcatattatatctaacatatttttatttttttgataaaatgtttaaaggtacaatattgcttaatataacaaagtgtaacattcttattggtttgatacaatataatatattgcacctaatgtgaatatatattttttatttgttaattaagatttttgtctttcgaattttaacatgtactaaatcatgtcttttgaaattgttaaaaatttctttttacattattaagaactattcaatttgttggatttttatctaattttagtaa

SEQ ID NO: 226951 - DNA, 1457 bp, Cannabis indica
tttttttcttcaatttatttttactttctttaacttagtgaataatttttgactaatgtgatctctatattttacctagaaaactacatgcttgtatcagtacagaatgcactgagcatttgtggtgttttgctgagccttctctccttgcattcattgggaataacacgattgatgcccgaactcgatatctttccttgcgtctacagaatacattaaggggaggtttgttgactctaccataccacccagggtatgtatgatcttattctttcatataaattatatgactatgcatatatatttattaatttctgtattttccattacagacgacattggatgttgattcttatcaacccatggcaagaaattgtgttctccctcaatcctagcgggcaaaagattggagatgatgcaatgacatgtgttcgaaagtatatcatagattatttttttgttaattagttattctctattataattgtttaacctatggattttttaaattttttattttagtgcatttgcaatatacaatgcatcaaagggtagaagaggaaatagaaatggccccaaatggataacagttcaggtactctttcaacttttcatttatggaagtctattaaattaaaaaattaatttatacataaaatgagatatgtttgggatgttttcaattgagtaacaaatacgaattgttaaagtttgttgattatagaatctatatatgatgtaaaggtgtttgattatgctataatatttttacttgtagtgggttactgatttttaaaagaaaattcttgagaattttttgtaattgagattatatatgtataaattcttgttgtattgtttaagcttaagtatatggtttcatttattttttttcttcaaaattacatttaaattcttaaaacaaaaaaaaatgtatatcttaactttataacttactattcaaaatttgagtgtcccaaacaaccaggaagtgtggactgtggatactgcgtaatgctttatatgaaagaactcatgacaatagaaaatgaccgaaatgaacttcttgaaaataatgtaagttatcttatatatttcttaatatatatattttaatatatatattgtgtcatctaactattttttttatatatagtttaaaggaaaagttgagtatacaatggatgaaatcaacgagttacgtgaagaatggactgaagcacttatggatcatatggcataggataaatacattacctggtatatcatatatagaaagaatagactgaaacacttatagatcctatggtataggatgtatgtatacatcatttggtataagatgtatgtatacatcatttggtataggacatattgatgattaaatttgtgtttttattcttttttacaaattaacacttcaatgtaattgtaagacagatagtattaatacaatt

SEQ ID NO: 226952 - DNA, 1417 bp, Cannabis indica
tttctctctattctttctcataaacattaaaaaataaagaccaaaatacaaatttgagtgtcaaggcaaagtggctccctgatgtatccccttcttgcaattaaaagcttccaccataagaattctagtctatcatgggacacattttaaaaaataacattacatttgctagtaatgctctagtctgtgctgtgtaaatttacgagtaaaagtgtccaatcttgcaaatatcctaccaattaaatgatcttacttttaaggattcctaactagaacaataatcaaatacgaaccagccatcttggcagattagacatttgacgtttcattactgtcttcctggttttcgtcacttaaatcatcatttttgccttacaaatatgactcgtcaataatcttaagtcggcctcctggtaaccacaatccaatgtctccactgtacaaccaaccatcaccatcaatgacttttctcctgattcatgaactgtataattaggttagtcaaattaactattattttagctcctagaaacaataacacaatcaagttggttacgtttgaacattgtctttgtaatagccacagaaaactctgggaccccttgacacaaatttctccatgaggatgaggcttatcctctgaggtataatttaattctggaacatccacaagttttattcctaaaagaaaataaggaaaaaataaaggtttaaacaacatagtacaaagcaagcaaatcatacagataattaagaaaaatcaagaagatgataattctagagcaacaagttcaaatttttttgtttctgtgtatattgtacttttctttcaaactttgagaggttttatgcatgccataaccaaaacaatatgctgctacaagaaaatatggtgttttgtgttctgtgtgatatatatttacatgcactgagtaaagaaactcaccacaggcagaactataagatcttcgcataaaacgtctccgtaccatatccttcaaccaagttacatccaaaataaattgtaactttcacatgtttagcatccaaagttaagtgtgtaatttagacatgtttcgtgtctaaattagtatttaattttgatatgtttggtatcaaaattcttgagaatttgagttatgtgaaaattaatcttttatgattaaatttttaaagcttaagtacttaaggagaataatggtcagcttaaaggtggacactatatttggctagcatgattcgcttggaatcaaaagtgtgagtgtaacaaatcgcttcatcttcatacaagattaaagcatgcatttcgaggaatggaacctaaactcctcccttagttgttttgctcattgatggtaacatatcttaacactagtgaaaatcaagttttaagttcaataggtaataacaagtcaat

SEQ ID NO: 226953 - DNA, 1509 bp, Cannabis indica
atagtttctgttagtaaaacatcaaacttagtcaactttggcttaattttatccacttgatgtgattatatttagtgttgtaaacgaggctgaagtttttggcatggcgataggaggcagggtaacagggttatgacccgacacaaaatatgaaattaagtaccacacggctcggaagatatgtaagtacaaataaattaactcataaaaatttaataatttaataataattaataaatattaaaaattttattattattgtggaaaaattatataaaagtaattaaaattataaaaaaacataagctgatctttgattttttttacgacattttataccttacgagcttatgtataaatcataagattttattgtaaattgtaaatgttatcaacacaatttgataaaccactttccgatatgttttttgtcgttagattcttcttaaatatttaaaaatagtttaaatacatctctatctgttcatgcaactttaacagcaaacaactaaaccacaaaaagtctcaaccaaactgaataatattattaagaaatgcataacttctggggtttcaattcatgggaagaaagtaggataaagtccaacttctttctgaatatctttctctctaacaaactagaagccggacactaaaactaatatggtgctaaacaagaacacaccccgggggtttcaaaaatacttgggatgtacataataaaatccacatccaaaagcacataaaaattaaacataatttcaagtagcaaaacttcatgtttttcagcataacacaatatcacagcctaaaaatgcataatccagaaacgaaatagaaattatctaaacattattgagttccttttttgacacaagccctgcccacatgacaggccaatattccttaactgtagcccacttgttgttgttgctgctgtggctgctggtagttcccgtaaccaccagggtaccctccatagtacatgttggggtcttgagaaaccggggcataaccatatccctcgtgtcctggtgcatatccataatagccgccaccgccaccacccccaccattccattggcttccttcttgttgggtctgaggcaaacatcacataatataagtaggtacacaagggaaacatatcaaaaaaatctgaaagaaaaaaaagaggtcattaaacataatcatctgatgttaaggtatagactagactagaacctgtttatttggactgcggccccaagatagtctaatattttgccctcctaactgagttccattgagtaaccggagggcttcttcagctgagctcctgatgaacataaaaaacataacagaacaatcaagaacacagttcccgaatgcatgtcattgataaaaattactagaaaaataatttacctctcagcaaattggacaaacccacagcgcttgccagttggtatcttaacgtgcacaagctcaccatattgggagaaaaacttgtctcaagtgatcatccgt

SEQ ID NO: 226954 - DNA, 2106 bp, Cannabis indica
attaaaaagctatatcatatggtatggagtggactatggactatggacccgtgatgatgaaaactatatggacaactttccagatgtctttaatagcttcacatgcatggaaattaaacagagaaataaccaaaacacagtactaagtcagttttccaaaacactagattttattctatatttatatggaacatgtattgataaagagatagtaactagtaactagtaactagtagtagtaccttaatatacaagccactaagatttgctcactcctttttgcctctttgattatatggtattctcaattctgatggttaaaaatagagttttgttacttgggttttgtaaaaatatcacagaacaacaaagtatgagcttagtttttataatcaaggccttgttatagtatgaatgaccaagcaactactctgataaaaggattaagaaaagaaagctcagaatagaaaggattcaatttgaaggaaaactcattagtatggacgtttttgtgattatagacttaaaatcttaggtgtctttgtaggtcagttgcaaattcacatcacacaaggtatcatatgttgctctgattgtgattttgtgagataataaggttttgatttgacataattaatgactttttctaatatataatatcacatgtttagaattgggatgttgatattcattatctttaattaatgttgcttaaagcttgagaaaacaaccctctagccctactttaacatatataaatatgcttaaaacttgtttaacacttgtcaaaattctttgtattctttactctaattcattgtatcaagaagcatggtcctttttctttttcttttctctctagttttatcaatgcttttcttgttttagttgaattaaacttgcattgatgggaaatgagatgaaatttgcttttgtagcatccttcttataaaaagctacatgggaattttgtcaatgattttgggttatgcttatgaggattgattgtcactttggtgattactacataatttatgtttaagatagcatttggcaaggatgatttgagtttgagatataagactaatcaccatttagcacaatgtatgtttgatttgattttaagtctaagatcccttgaaactattctttaccccaaatataaaaatattactacgagtattctacgacatctaatataacacaatttaatattgacttttacatattttattttaattttaaatatcatgaaacctaataatatcaatttaatacaaggtgttcaacaccttaagtgaccttacattaacaatcaaaaatagaatattgatataagacatcagtagtatttattattatcacgaagtaacactttacaaataggtaacaaaattctataataattactaaattaaaaaaaatgagatttgatacttaattatatatatgacacattaaaataatgttagacggtgatgtttttaacatttctcctaatataatgtagcatggtgatctaaagagtaaatcatactcacatttctatttcctaaggatgctcacttttcatataacaacaaacacaaaatcttttgttgggatccttaaaaaaaaagtagttgacaaagtggtggggctgagaatttttttgtgctaaacaaaaaggagaaagggtaatccctttgttttgttgtaattgtttcatgtctcactttttctttctttaagtttttgtagagagtacaaacaaaagcatgagatgatatttggtggtgggtcagatcagggtaggcttatggttccatgatacaaataacatacatatacatgatgtacaatatacaactactcctcctttcaattattagtcataattataaataataaaatgatatagcataggagggttggaatttggttttgttcatgtattggagtaaaacacaatccttatataaatcacattttgtttttttgtatgaaaagttcaaacatggtcatttaagaggggcaagcatttcagatgacttggaaatcaatgtctcttttgattctaagtaataaagtttgcaactttgttgttgttggtgttagcagaaccat

SEQ ID NO: 226955 - DNA, 664 bp, Cannabis indica
gaaattttagtagtaattaaatactataacaaaaaagaataaagaagaaatttcaataaataaataaatacaaataagttaggaaaaaaataaaatggaggaggatggatagtgcggacacgtgaaattcattgccgcgttcgcgtataataattattattactgccagatcaccaccaaccttttttaattgttttctttccctccaaatattttatttattagtaatgatgtttaatatttttaaatagattgctttacgattaattagtgatatagaaaaatatttttttttgcttaacgatacaaaaaggtactaagtattactgatgtctaatactttttattgacactttataattcgtttgtaataattcttaaaacttattttcttaaagtatatgaaactcattacttaattacactaatagcagtataacactaagattacgcttgattaggaagaatgaaaacaaaagaataaaaataaaaatagaaataagaatttaaatggaatgtaatagaataaaatttcaaatacatctaaaaaatttaataaagaaattattaaattttttctaattatacaatttttctttctatttcaaaatggattagtcattctattaaaatgataaaaagaccattctaatttttaatatga

SEQ ID NO: 226956 - DNA, 1540 bp, Cannabis indica
atggattcacgatgtaacacctacggacttatagctcttttgggtatccacccattatgagactatttcaagtcaaacatgcttaactttagagttcttaagtgatggactaccgaaaagaacacgtatcttgttgacttagaatcatcacacttgccttttttactaaacaatgtgcaccttacccgatctttttttctatggatcatgggattttaactttcacacaagaacacccaaatcatacattgttgttacatatattggcattgtgataattaaattcaataatataattaaaatatgatgtaatttccacttaaaaatattttatattctgtcaaggggtggtattggatggctaattttatgttaagaaattatgatgcctgtagtggctttcatgctttttattctctacctaaatatacttttgaaagcttttgcaagtagtgtttggtgatttgattttcttgattgaatttgatcacaacattttgagaaatgctaattatgaatggatttttcaggccttgcctcctgagcaattcactctgaaggtggttttcccagtacattgatgtaattatgttatttaagaaggaagattaagttgtctaaggatttgggaaaaacaatatctaatgtatgaaaattttttaagaagctaggtggcgatttgcacaacactatttgggatctactattggaattcgcaagtaaaattatgatgaaagaaattatttttttgcaacaccaattagaataatttggatcatgttcttctgattgttgtgattgcgatgaatattatgtattggatcctcttgtattttaatatcttggaagagagtcttcattttctagtgtcatttgctaaagacatttgtccaacagttgaaaaatgttaatgataaaataaatattataaagtaatattaaaataacttaaatcactttaaacaaatatttactaattaacttgtttaggaataatgcagcaaatgttgagcaagaaaggattgtcccataatatccatctagtgttgtaatatgactatgaaataatattaaatatttaaattctaataattataattttttatatatgactatgatttgtgtataactgttgaaaaattatattaaagtaattaaaattaaaataaatataatttaataattaacttattgtataaaaatgtgaaaatatagagaatgaattcaagcaccaaaatggttcatctcaagtaaagtaccatacaaaaatatctagctgtgagtcatgttaggtttaccttataaaattatttacaagacacatttttttttatgatttggcatgacattaatgtatttgtacaaaattttcaaaatatggatcaaattaaacgggtgacacataaatacaggtagaagtcttatagcaaactaaacccataaaaaaataataatttttttatgtttttttgaacaaattatgaaattttattaatagcaattagataaaataatagctcatttcaaaaaaaaaaaaaaa

SEQ ID NO: 226957 - DNA, 4084 bp, Cannabis indica
tttttttttcctctactgacttgttcatcacttctttgctagggactgttcgtcggtttcttgaaaagcagaaagataaaatcaaggctgttgttttttgtactactacctcaactgatacagagatttataaaaggtttctcaataccattttagtttttaatttttgttgcaaatgtgaagcatccattatttaaagtgttgcaattagtatggtttctgtctaaacattaggaggatggaactctcattatttttcttcaatattttcttgatgtagattggtttctgtctaaacattaggaggatggaactctcattatttttcttcaatattttcttgatgtagattgcttccactttacttccctcgagataaacatgaggaggaagttgctatttctaaactacctgcagatgttggagatgaaaatggtgagacaattatcgatgaacgtaaaatcaggataaagcctttgccaaaaaagagcattctaaagcctcctgaggctccggttgatcttccagtcagtgatgttggtttggtacgaaggtgagagattttccacatttcttactattctaaagagcagctttatttctgctgcattgtcttgttaggttcgcaattgtatcattgataaaagaaattgaaatgattaattatatagttaaattgctcatcaattacttcttacaccttactgcgtttattgctgatttctttctgaaattagataatttgtctttaaatggttattttcatatagatgtatttattcaaaatagatatgaaatcaccatatgctttttgtaagtagttaatatgtgtaaacattgtgattttaacaactgttgatattttgaatcttaaatttcagtactttcactcttgtgctgtgttcttctttgctgtccagcctatttttctgtgaaaagtaactggcattagctttggttctcacttgtataggaattcatcatatttggatactttcctggatcctgccttcatgtccttaataaaagatccagatcagagacgtaaagaacaatgggaaaaaactgctcaagcacgaagtggatggaattgtgctaaaatgcttggatttggcgaccttggtggacctccattgtctgctgccgaagaatactcacttcattcacgatatcttgccaaggcaaattctcttaatctttcagagattgcagagatgaaaattgtgtaagtgtgcattcttatccttaacatcacatgcctacttttagtttcagtatctttccaagtcaactacaaaaaatagctctttccctatgccatttctccatattgagcatttcagttttcagtcacatattgataaaactatttgcaacttgtagcgtaagccttttttttcttcagaatttcttattaatttaaacttacaaataaaactattaactattgagttgcacataagagtgtgtccgctgtttattttatattttcttaaatatagtaaaagtagtcagaaatacattgctaaaatgtggttgaattgttcaactaaactgtggttttacaaatttgcagtaattctttggcaaaattttttctggtctgccaattacttccttatctgttgatgttcaaggacctattaatttatggtttgcacgtctaggatttatattaatggttttagatctcttttaacattattttatgattatgctctgtattcagctaccgtggtggggttgacagtgagggtcgttctgtgatggttgtcgtgggagcacattttctgctgcgatgtcttgacttagagcgatttgtacttcatgtagttaaggtaatggcaactgttcatattatcatagttttgtttttgtgttagtttagattttttctcccttttcatttcatggtatcacattgtgttcaaccctgtggagttttaatctatttgattgtggttcttgatataaaattattattgtgcttggtgatttcaggaatttgagcctttgatacaaaagccttatagcattgtatacattcactcagcagcatctttacagatgtaagtattgtatatggttctctctttgactattatagctgaaaatttgattttgtagggctactgcaaattataggggacttttgaagagttgtttattgatggatgtattaaggcctttctttattatattttatttttcttgttttaggaactcttatctgtttatatagttttcactagtattatttattacatgatgagaccagtgtactgaatcgggcaatgcagaattattttttcacacaactattttgtgagtgaagctccttgctgatttgtagacacatttaactatttttctgacttgcttctgaaacagtcagccagaccttggatttatcagaagattacagcaaatacttggtcggaagagtcagcacaatctgcatgtacaacttttttgatatttttgacctcgttacagtacacagccgttgtaaatctatcactatgatactgatctttattgggtttttttttatggtaggcaatttatgtcctccacccaacctttgggctgaaggctgccgtatttgctttgcaattgcttgttgacaatgtggtacgccttattttcttatggttgattaattcctgaaaccatatattttttttctaagtctactgtaagatatatctgatattctttcttaggtttggaagaaagtagtgtacgttgatcgccttcttcagcttttcagatatgttccccgtgagcaattgaccatccctgactttgttttccagttaagtctacatattctctttatttgttcttccaacatgtatatattttgaaaaataaaatcattgaagctacacagtttgatgactaaacaagctttgattccattgcgcatgccatttgctagtctgtgtttgatgattcatatttctattctcaagttccaatggctatcattttgcaggcacgatttagaagtgaatggaggaaaaggtcttatcgtggatccccgaacaaagtatgtatatcatcgaccatagcaaagaacatgaacaccctgcatttcggggataaagcaggcccgtggactgctattgttttggcgttttttttttctttcgataatttattgtgtaggtggaattgggagtgaattgtttgtgaatgttgtagaataatgttgtccttccttactggtgtttctcttgcataaatctttcagtgtctaaattaattacaaacgacattctttctacttgtatcatctttgatggtttctcaataaaagaaatgcaagcttgtgaaggctttctttgtgaaattaaatgattctgctgttctctcattttttactttttgtgattttttttttacttatgaattatatccctctagtgacctactggggttgggtaagaaaaaatgtggtagagattagagaataactataaaagtaagggaagatcgataaaaaaacaaggattgaaattaaatttcattaacagcctttgagagatgagacacaaaaaattgttagagaagtgaggtgagggtagaaaagtttcacactaacaaacaactttttgtttattattttttttaaggactctaacaaacaaatttactaatgagaattttaaatagcttaaattgtagcaactggatgacagtttggatgctacaagtaaataagtatgtttaggagagatttaggtgtaatcctaatgtattatattaagtgtaatttataatattgagtctctaatatttagagtatgtatatggttacatttttattgtaactatcatgattatattttttttaattgtaataacaggttatcaataggtaaaaatttcttttttagaattacttaattataattaattattttcttaattgaatatttaacaaggtctctttcaacacttaatatttataaatatttttttttcatataaattcctattataattattttaacagttaagttatttaattataatatttacaatgtaattttatttattttttttttaacaaaaa

SEQ ID NO: 226958 - DNA, 406 bp, Cannabis indica
tctctctctctctctctcaaccccacaaactaactaggcctctctctctctattatggccccatcatttcactaccaccctcattttattttgtcctttactctcacaccattcttcatcttctctctttttagggtatatttggttttatgggaaaaaaaagaataaaatgacatgggaggaatttaatttgattctaagtatatgtttgattatgattttaagtattcggaaaattatttagtttaaacctaaaatggtatgtgtatgttttgtattttttttcaagtgacaatatttattgtaattgtttaaaatatttgaatgttttttaataaattttaaattatttaagatgttgaaattgaagctcgaacactttgatggatgtatgtaaaaaaaatct

SEQ ID NO: 226959 - DNA, 1142 bp, Cannabis indica
ttcctatcaattggtatcagagcaactgttcatggggccgaagaaggattcgatggcaaaactcattgaaggaaaagtggaagcagaggtgtctgaccttcgccaagatgtgcagaaggtgaatcaagggttggaaaaattacagggggatattcagatcactatagagcagattgtcgcaaggcaaatggaaacggtggtaagtcagatttctcaactcctcctacctccgggaaagccctcgccagaggcggtagctgcgagtgccgatcgacaaaggagagctgtcgaaggcagcgggtcctcagtcggagaacccagtttcgggggagcttatccttcgcctaaattccctgcaaagatggcaacaccaccatttcctaattcgacatcacccccaattcagattgggacgtttcagtccggtcaagcgtatgggttcgattaccgtcccccacgaatggagatccctgtgtttaacggagagaatcccgatggctggatctgccgtgccgagcgttacttcttgctctcgaagatgtctgaacccatgaagttggatacagccattgtggggctcgacagcgacgcactgtcgtggtttcagtgggagaaccagcgacgacacactgtcgtgatgacattgttattaccgaaaatgatattgaaggcatctcatcccttaagtccttcattcatacccagtttcacacgaaggatttaggggtgctcaagtattttttggaagttactcagagtacataaggtattttgtttcacaaaaatgtatgtacttgatttgttaactgagacaggaaaattgagagcaaaaccttgtaatgctccaattaatccaactgtgcatcttacacgtgatggaaaactgtttgaaaatcctaagaaatatcgcagattggttggaaagttgaattatctaactgtgactcgtccagatattgcattcccagttagtgtcactagtcagtttatgtcttctccaacaattcatctttgggcagtattagagaaaattttatgttacttgaaaggagcaccaggacgaggtatagtttacaaggatcatggacatacacagattgagtgtttctctgatgcagattgggcaggctccaaggtagata

SEQ ID NO: 226960 - DNA, 5011 bp, Cannabis indica
aaaaactttaagccgaaaaattgtaaataaaacttaaaaaattctccttaataatactagataacactcaatattctaccttaaaatatacgtaattaaatgttttctttattgaaatatagttcaatatttttaatttatatatacataattgaatcaaatataacaacttacaagaataaaaatgtcaacctttttagttatagataaattttctaaatacatgcatatagaatgaaataatatatggaaattttgacttttatggattttaaggtatgagttgtaaaaatagtttttttcaaaaaaaaaaatatatttaaggggaaaatttagaaaaaagtttttttttaaaaaaaaaaggagaaaatagtataaggtaactagttaccctaaaggtacttgattttcccatatttttctaattttttctcataaattaactcttttaaaaaacaaaaccatattttattaaggaaagtatataaaatttataatttgctagtgttttaaattataaagatcacttcatccaacattataaaaattgtaggatatctagagacagtacagatcataactgggctgggtctgaaactgggcttgggcttgggcttattcatgggctttctcttaatacaataagtatatattaaatgattagacatcctaacaaaaagtcgctttggccgagtggttaaggcgtgtgcctgctaagtacatggggtttccccgcgagagttcgaatctctcaggcgacgtttattttttatttattttatttttattaaccaatttttcatgtgaataaataaataaataaatatatatagttaaatatttgagtgatataactaacaagttgcttgttttttaaactatccctattgaaagtggacaacacttgagttttatagccagtcaaaactacaattctgtatttattagacaagagatcaaagaaaatgaacttatttttgcttcttattaaagtaattaatctttacaataatataaaaaaatatatgaattgtatatattacatcttcgaccactacttttaatataacaacttctttcctagtgatattattatctttttttacacataaaaacaatatgcatgatcattgatcaccaacaaatatttattaataatcctttattctctctctatatgtatatctctagtatacaacaacttctatacatatatatataatcacaattctctctttctcaaacattgtccaaattttgcctgaaaacatacaacaaaagctctctctttttctctctttcacttagtgatattctaaattatctatatggacaactttaaaagaagacaatttcaaagaaaatgggaaaagaagaaaaagggttttttttttttatgtttttgtttgaataggaataatggatcaaaattccaaaaagggtattattggaaaaaaatggtatttttgacaaaagaaaagaagaaaggtaggttttttaatattgggggggtccaatttccaaaatgcaattttagacttggaaatcaaggaaagggaaggaagaaatatcttggatcaaaccctcaaaatcccattctcccattttgaagttttctccattaataatattattgttgttaatattaccattttgccctccacccaagatcatagtaccttctcctttaaaattgtctcccatattaaaacaagtactattactactactactattattactagtagtaaccaatgaagcccccatattgtgatgatgaattaggtcattaggaacatcaaataagtacttatgatcatgatcatcatagtccaaaactccataatctccaagagtagtactattaataatatcatgatcatgatcatgactattattattattattatagccaaataagcaattgggtattattgcattattatcattattgactaataataaatcatgatcaagattaggagtatgatgatcatgatgatgatgcatgtagaaattagatgatgatggggaagatgagtagtccaagtgcatgggaacctgttgttgttgcatcacaatgttgttgttgttgtttgtgtttattaatgtttgattattaataatatcttgatctgatgaattgctgtcgtttggggaagatgaggatgttgttgttgttgttgttgttgtggaagtagtgttgttgttgttgttgactcccaatttattctaacttttttttgagtgttgaattccaaaaattctttatttcattgtctgttcttcctggtaaacgagcagctatttgtgaccatactaaaaaaacaaaaaaaacaaaataataataaataaataaacaaaaattaattaaggaattaattaatcatatgtgaaatatttaaattttaaattataatttcaaaacttaggatggaatttggaaagtaattaactttatccttatagtataattactaaataaggataattaggtaccatattatgcctttaaaattttttctccgttaaaaattttccctgaattattgagattgttagatttaaaaatatttttccaatttcattcaattttactaagtctgtgatttttcgtgtactaaatcatgctccatagactttaatatctactaaattatgttgctcaaactttgacatatatcaaatcgagtcccctgaattttcatccatattagacttttcttactaagattagaagtccttaaagtcaacaatctcaatagttcacgggagattcactacaagaaatgtcacttttaccagcacaattcgctactgcgctggtaaaagtaatttttaccagcgcatttcgcaaactgtgctggtaaagaggtcaaagttttaccagcgtacatttgcagtggctaaaatctaacttttaccagcgcatttacgcgctgagaaaagtcttttttgccagcgcttttcattttatgctggcaaaattctaataccaacattgattttccaacttccttttgccaacacatcacaagtaaattttattttaccagcgcaataccaatttttgccagcacaaaaatgtgctagtaaaagtgatattttttgtagtgatttttaataaccttaaaagttcaaggagcataatttaatacatgttaaagttgaggggataaaaatcctaattaaccttactaataaaatagtaattataatttattttaaaatacaatgtgtgtttggatgtaattgtatattgagttttattttcatgtagtaattacatagtttaaaaatattaattgtctagaaataacaatattttataattacacgttataattatacccgaaaattggagagtggtgtaattatatagttgaacaagtacataattattctgaattatacgcaattcaaattacataatgtgactatattaactaaaggcccaactctaaatataagcggactaggcttgtacttaaggcttatctagtctatggtccaatttttttttctttttaaaaattaacacatttattttgtttggttttgaaaataccactatttttttaaattttggcccatttttatatgacccactaaaatctagggtcagcccttatattgtctgcgttataatttagggtaaataacagcataagtacccaaaattttaggtttttaagcggcataaacccaatatttattttttagcggcataagtaccaaatgtttgtaaaactgtaattcttctttagttttgtcagtatagactccgttttaaatttattaaaggaatatttggaagtaactaatactacatgtttctgtctagacccaatgatcaagaatctagacctttatatgtggcatgtttaagaaaataacagggtttgtacggacgaaattaagaaaaaaattactagttttacaaacattgggtacttatgccgctaaaaataaacattgagattatgccacttacaaacttaaaacattgggtacttcttaatgggtattacctattaatgggtaataaacaaatttaactataaatattaattttaaaaatattaaaccattagatcttggtccgatagcgaataataaaagagaaatttaaatttttatgcttaatttagctacttaattaaaaacatatcaaaaaatacctcttttttacactataaaatatatgtttatatgtaaaatatttaagtcgaattcaacttttttatcacttttttgccaaaaaaaaaattaattattttgtttttagctgatagaccaatctctgtccatataatatatatatatatatattatttagaattgtattccaagactctacccacacatgctgccatatactctctctataatcacttgaagtactattggcatctagtatcttctttagtgtttattattattggtataattaagtaactataacttaagaaaataacttttaaagaatatcactaactaatcataaaatgtcacttatgaaaagtgttagatacaactgatgttcaatagcaatattcaaacacaagcttatattatactagtaattaacatagatatgtatgtattgtatacataatatatagatatataaatttaaaagcattgttattgagtatcagtggtgtttagcatttttataggtggcgtcttataattggttagtgatattttttaaaaattaattgtttaagttatatgaaatgattcgatacttaaatacaccaataataatataacaccaaaaataatactaaataccaataatatttttttagtaattctctaaatttatatacacagcacacacataaatgcataagattaacgaataatgagcaattactacaacggtacgccattaataagcataaaagatgatatagtagaatagtcaaccaaagaaattagtcaatattaatttttaacaataaacataactttaatttattggccattatgattgattaat

SEQ ID NO: 226961 - DNA, 2202 bp, Cannabis indica
ataaaactattatgtaacttgaagattaatttaggcaacaatacatattttcatataatttaacgattttaataaattaaaatagaatttttttgatttattcaaaactatttgggtactgaaggattaatatttttatactatttgttttctgccagaaaaataaagattggatatttaagtgttacattctttaaatattgattatttttgccacaatttgcccatcctttaacaaacacaaactcttgtattaatctacagtattgacttaatcaaaataagaatcaaacaaaggttaacaaaaaaaaaaaaaaaaaacaacaaactcaatatcacaacttcactgtgaataagaggaaattaaaggactagttagtagtgatgtgtgcctaatcatttacaatggctcaaatcaaaagggtaaagaatcaataacgttgtacaatactgttaaaacacactaaatctcaaggtgaggtgtgtattctttcacgaggtgttctatgtctagtgcaacagcttaatttctctattgtgttgtcacactcttagcaagatttcgaggctgatcgacattgaaacctcgtaaaacagtgagatgataggccaacaactgcagcaaagaagaaaaatttcattactaagtataaggcatggaatgttttcaacaattctcatcaagacaccatacagcaacacaagcacatataatattatagaatatatcagattgtggtgtcaatattacctgtagtggaactatattaactactggttgaagacaatcctcaacttgtggaacttcaatcactcgacaagaaccactggagcacacagatttggcgtccccttttgagcacatcactatcaatcggcctttgcgagcatgaagctgctggatgacagactgttgcttgctgtcagagatgaaaattgttagtaacatagtagacaacttacttcagaccatgatggtgtaatgtaattactctactccaatacaatgtcaataagggagccaacctgaaacaagcatcgcgattagctatgacaacaatgggaagattttcatcaactaaagccaatggaccatgtttcatttcaccagcaagtattccttcactatgcataagtgccacttcctttactttcagagcaccttccagggctgttgcataattgtatcctctcccaaaaacgagaagtgattgctcggcaattagttgttttgcgagatccctcatctcttcatcaagcttcaggacctcactgactttgtctgcaaaaatataacataaaagaaatacagttatcaattagttacctaattgaaggcagaagatgtgattttgatcttttctttttgatgaagaaagcataaaaatcaacttgattgtacagcaggctatgatagattaattagaacttacttggcaagtcaaatagaccatctattatagcctctcttcttgcttgatttgacattgtgtcaccacctattgctagtgctaccatagccatcacaactatttcacttgtatatgcctaataatgagataagtaatggttaagcaagtatctgaatgaacaaataaagaatttggctacaattgtttaccttggtactggcaacaccaatctcgcaaccggcatttatatgcacaccacaatgcgtgttcctggctattatactaccgacagtatttgttataccaacacataatgcaccattgtccaaagcatattccaacgcttgcagtgtatctgctgtttcaccagattgactaacaaagacagctgtatcttctctgtatattggaccctgtcgatccaatagatcactagcaatttacatggttcaaatgatataaacaagaaagaatgaggtatacattttctgtaaacagcaaaaccattcaccaaaatgaaaggcttacgcaccagaaagttcttctagaatgggtcttgcagctaaagcagcattatagcttgtcccacagccaataaatacaatccttctgcttctcctgatcgttttcagatgatccttcagtcctccaaggagaacagtcttggctttgcaggaacctcctcggatgagccgccccctcattgtggtagttagagaagctggctgttcatgaatctctttctgcatataatgttcatatttgcctttgtttatttgttctacctcca

SEQ ID NO: 226962 - DNA, 2924 bp, Cannabis indica
ttacaaaattttttgtacagccctaatattagtacacatgtttgaggaaaatctaacacttttcacacctacacatttttatgtaaaaactaaaaattttcatagttaatgaaatttcgtaggaaaatataaaattgtaacggaataaaaaatataaaacgagagaatactaactctctcatcacacaattaattagatgtttctgatgttctcacaaataaattaatgcaagttaaaaattttattacgtaccttttctccaaattcacaccagatattttatttttctattactaaaaacagtaaaccattttaatctcaactttgaacttggtataatataatatttcacttattacatacacaataagtttgatttattatttaattttctcatctcttatttattcctcttgtatttatattcacatatagttatgaagaacggaaattggagaaaacgactaaatctgattctaggtttatcactttacgtgattttacatttgtgtttcatctctgcatcaagttcaataatacgaaccaagaccatcaacccaataaggttattaacttttcatttttatttaatttatataattgttactgaaattgatatataattcttcaattaaacatttaggggttcggaactaataagtacctcatctacacttaggatcagtcaaacacttaagagaaatcgaaaggtaaatatttttggttatgaatacgtggtgatcatattttattagttacttcgttttttttttttaattaattttatatatataatttgttcttatatctatcctaactaagttcagtgttcttttatttatgttttaattataatttgtatatattcatgattcaggtgataatcctagacaatggtattgtgcaactcaccttttcaaatccaggtggtgatttaattggaataagatacaacaatattactaatttgcttgaaaatagtaataaatatggtaacagagggtaaatgattgtcacatattctttaatctaatttattatatcatcctttcaaaaaatttattatatcataatatatgtaattcctcttttcaaatttagttatattgtatttgtatatataataaatcataagagtgtatcaaacatgtcgttctatatataggtattgggatattgagtggggtgaagacattgccggcagctcagctagtaattatgataggtaaattcttattatatttaattacttctaaaacgtaaatatatatatcctaataataatttttctaattcataaattaattaattgcagattagtaggaacaaaatttgaaattataacagcaaataatgatcagatagaaatttctttcactaagaaatggaacgattcatcaaaggtgtttcctgtaaatatggacaaacggtaatatacataaataacttttcaatcgctagaactttgtaaattaatagtattatttataataataaattctcaattaattaatacgaaatcttttatacaataattgcaggtatattatgttacgtaattattcaggtttctatacttatggaatacttgagcatcctagagatgcaccagctgtacaaattagtgttattagggctgctttcaagcttaaacaaaacaagtacggtaacacatttagttatttaattattgtcttcaacaaattaatctattttaaatggaattttacaagtttaaaaaatgactttcatgatcagttaatcaatttcaaaattaatgtccaaatcaatcaataaatataaagatgtatattttggttcatgatcagattcaattacatggcagtctcagacgatagacaaagaattatgccatcagccttagaccgtagaaatggtgaggaacttgcttaccctgaagctgtactattgactaatccttccaaccctaaccttaaaggagaggtattaaccaattttttgttcctttctttcatttatgtatatattgtgttttaagtttcgattgagtattttattattagtttattcttatatatatatgtatattaatttctaagtgtaaactatttattacaaaaaggcgatcaagttttggatggtttcacccaaaaaaataaggtgataaaacttaccactagataaagttttgggttactgcgacaaataacttctacaaatataataattaataagtcacatgcatataacaaattagttaggtagcatataaggattgttttaatcttttgtttttaggttatttttagtaatattgtacaaattactgactctatatatttattctatatattacttgtatgatggtgtattatatatatataagactgtttgtagtcttgcttccgacatcttaaataattcaaaaatttgtgagagatcttttgtaactttattctaaatcgtgatattaaataaaataaagttacattacagctagcttatttatgtcccaaaaatttcaaaaatatgtgtaaatagttattgaaaataattactaagatagtggtaccaattatgtctattttatgaataaaaaattaatatttataaaatcttggaatttaggttgatgataaatatcaatattcaagtgatcacaaagacattaaggttcatggttggattagttcatacccatctgtagggttttgggtaatcacacccagtcaagagtttctcacaactgggcctacaaagcaagagctcacatcccatgtcggtccaacatctctctcagtaagtttattacccaactattattttttttttctttaagaataattaattaaatagacatagaaattattagctatgcctatactattagtacattaaattttgtaaataatatgaccccaacaaaaaaaaaaaactaaac

SEQ ID NO: 226963 - DNA, 1027 bp, Cannabis indica
aaaaaaaaaaaaaactttactataatgaaaatacaaaagttcaccgactgaagataatcttaccaaaaactacaaaattttcaatcaaaatttgtattgaaatatccatttatattaggagtgttaccgttccatcatatacgtccagaactatttgtttttttgctatcttttctcttttaggtggaaaactgtgtgtgtctaaagtccaaaacacaggtctataaacttgtgcaagacaaaacaagaaacaagaaaggatattccaataagttcctaaccttgtttttttaccatataataatatgcctccacatccactgttgtcattaatatacacataaatatatagttataaattattttatagttatagtataagttacaaagtcggttcatcgtccaatctccacactcacacgatcagaagatcaagagatttgcctgtataaggctatgactagccccaatccacacacgacttgcctcactgtccctaacttccaccgcatcttcacaacatcccttctacatagacacgtgctttacacgtgttctttcattctttaccaaagcttttacaccacttactaacatactacacctaaaatcaaactattatgagcaaattactattaattaatttaaaatcaaaagaaaaagaaatctcagcggactaattgatttactagcagtttcatatggtttggaccctttccaatattacttaaaaatactacatattttgtctatcattttctatatctgaaactcaaaaggcccaccataaaagaaaagggagaaaaggaagatgaagataaggatatcctcgaccaatattcctaagacaatttcaacatttccacccataattttttaccatatctgtacgcctttagttttaccaatgaaattaaaatgacctcatttcgtcaacatataattaagctgtaattatcagtataagtctcaccgccaccataatttttttcttctctctccacatatcaagaattagttagtttta

SEQ ID NO: 226964 - DNA, 3242 bp, Cannabis indica
cgatttatatctttttttatatgatcacactctgttagcgtgttttcaaatctgcagaaaatgttaagaaaaaaaataattaatttaaaggccttgtgaattaaatcaggattaaattctgacaagtcatgatgataatcagatcataaatttaatatcacttcttgaatatttgttgataattgtaaagatgagaagtacacagctagcagaagattataaatgattaattaagaagtgctttatttatttacttatcattgctaggaaatggcctgcgtgggaactagtttttggagtttttatatatgtataagagaataataaaaacaaaccctacaaggacctaactatgttgccactattttaagtaacaacattttgtgaagtagatggatcgtgtgtattaatatgtatttgttgtgtagtagtagtctttgccagccatatatatatatatatatatatatatataagatattgtttactgaatatattgtttggtttcgtttggtcgtgtactatttcagtctgagagaggtggattggggaggaaaagaaataactccataagatgtatctttttcttttatctatatataggggtacaactactagtcactataatagatatagatatttaatcactctgtaagtataattcttaattcttgctttggataggccataggtggacacgtgcaagcatgcaaggagtagtttgaattctaattttagattataaaatgtttgaatttaattaatacttaaaaattaaaatacctataaataataagttaaaataatcaccactcaataattgttaattaatttatgatttttttgaaagcaatttatgatcttaatttatatataatttataatcacagtgcttttcacaagcatatgctttcagatttttctttcgttaggtccttatatcggactactttcatttattttttgtttcttgatataatctgttaatattaaatatattaataatacataactttcttttttaaatgttaaattaaatatatagttgaacaaattattaaatgccagcaaaaaagattcgacccaggtgctagcctttataaatataacatatgtatatatatttatatatatatttatacaaaatatgggtctttttcattaaactttcccgagcccagatatatagatagatgtgatggaattcggtcttctgtcatggttgcttaagataatggattcatgtttgtctttgtatatacagcatctttcaatatattacacttattcaaatatttccaaacttacggaaaagaaaagatatacatgtataaatttaatttcttaatcacactgatcgagtttgattaaatatatattgataaactaaaagcttaaagaataatattaaactgcacatagatttatatatcacaactaatattataggttggagtggtatttataggccgtgtttgtgttttttcaagacttagttatacaattaaattttaaacacatttattaaccgtttcaaaaattaaaattaaaatcccacttatttataaatgagttaacctgacctaacccacttaatacatttatataaaaagccatgtttaaattaatatatttatctcttatttaattaacataatatagttttcatataataaatatatatgtgtaattgtcatacatcaattttagattaagaataattgcttaaagatattattgatgcttaatattttctttggtatcatactgtaattggtataattaagcatcgaatctcatataacttagcaaatagttttcaaagaatattactaactatgagaaaagagatcagaaagaaacagagaaaaatcaaaatttttagtattattgatactcaactgattttacaattggaggagagagcttatatagctcggtttggatcaagaatctattggttaaaactaaccaatttgtaatagaaagagtacagctgtaacaaccatatctaactaacaaaactaccctaactaactaatctaaagttgatgattctatgttggagaagtgagtaggcagtagagctttggtgaatatgcaaacaaggttgttttgtcaagatacatgaaggagcttgatcgagccttgttggaccttctctctgatgaagtggcagtcaatctccacgtgctttgtgcgttcatggtattctcactaatgtgaatggcctggtgttgtcataatagagcagtggtgtaggcatgtcaaaacgatccatttagttggagcgggttggagctccgacctgacagatcacctctaatccaaaacagactcggaccgagacccagaccgagacccgagacccgtacccaaactaggacccgaacccagacccaggacccggacccggtcttggacccgggacccgagaccaaacacttggacttggaccggaacccgaaacctggacccggacccaaacctggacctgggacacgagacctggacccggaccccaactgggacccagactcggacccagaaccggactcggaaccaaaacccagaccaaaacccgagacccgaacccgagaccaaggacctcggaccaaggacctgggaccaggacaaagacccggagacggacccggacccggacccggacccggacctggacccggactcgggacccacacccggaccccggaaccccgaacccaggacccgggaccgagaaaccgggacccgaacctggacccgcactcggacccagactcagacccgagacccggacccggaccccaaacccggacccattgatataaaattaaaatggatataaaattataagttaatattaaaattctttaaaaaaaatagttgggtaggatctgatccgatccgagtatctgatccagcggggcggggcaaatccatacatgatctggatcaggtcggatcatagtcaaatcagatccgacctgccccattgacattcctacagtgctggagtagaatgattgatgccaaagtctttgaggagagtgaggatccaagtgagttcagaagtagcatttcccatggctcgatattctacttcagtagatgaatgggatacagcttgttgtttttttgatttccatgacacaagggatctgccaaagaataggcaataatcaaaaattgatctccttgtgtctcgacaagtcctcgaatcaacatccaaaaaaaaacgg

SEQ ID NO: 226965 - DNA, 1508 bp, Cannabis indica
acataaacaatcactgaaatagtaaaattcaatgaaattagaaaaaagtccttaaattcaacaatctcaatagttcaggaggcatttttaacgaccttaaaagttcaggggcaaaaatcctaattagcattgtaattttctttccatcctatgatctaactaaaattagtaactttctttctccagcaataaataacaatagcagcaacaacactgatgatattgatggctaaagccaactatatgactacaaacccccaaacccaaaccaacagaaatgtggacaatattttaattgcagataacttcaaatccttttctgcatcatattgagtactgaagcatttttggttgaattgacaaaaacacaattcactgtccaccagaaatgtaaacaagttacaaccaaaatcatgttatttatattcttttttagggggaatagagaacatcattcagaacaaaaaaaaaaaaactatgatttaaagtattaaaccaaaattatgtttagaaacaatatggattttgaaacaaagaataattataacattacatgttgtgatattatataaagaaatgcaaggaaaacaaaaggtttttaaactaagtcaatggttgcaaacctatttgaggatgaattttagaggatcataacagtgggtggtgaatgatcctctttagtgaaccaatttaaacaaagtagtagagagagaatatttagtgaacaagtaagtaagaacacaatttcaatctaatatctatatcaaaatctatttcacagaaaccataaacgaaaccaaaagtataaaactagcaataccatctaactcatcaatggttttaaagacagaaaacaggaataggttgatcataaagaaagtaaatttggtaccagaaaagttgacagaagaagcgtgagcacacttggcagattttctaaagcagtttcccatggcagaaaatgaatagcttaaaaggtgagaaattgtttcctaaaagtaatcaatcttcaaaacccatataatcttagagaaaaaaatgagaaacccacttggaaacagagaaatatttaaggaggaagaagaatacacgtctaagcaagaagaagggtcaacaagggccattgatgaactgtatgggaaagctgttttgagaaagcttagttggtcaacgaatcaatcagccgttgaatgacttcgtaagaattcaaggctcatttgttatcaaaaaaaaaagaaaaaagaattcaaggctcattagtgtaaaaataagataacactgatttgttcaaactataattaataactgggaaatttcactttaaaacatgtgttttaattaggggtgggcatcatccaatccaatccaattgaaccgaaccgatccaatccaatccaattacaaaaagttggatatccaattacaattggattggattggatgttaaaagttggattctaattggattggatcggttattggatgtcaatctcaaaatccaattaaaa

SEQ ID NO: 226966 - DNA, 1256 bp, Cannabis indica
caataaaaatatttttgtaattaaagaactttttgaaaaataaaattgaaaaacagattttatagaaaagtataaaaaactaaatataaataaaaatgtaaaaagaatgtcaaatttgacatttaagtgtaaaaatctcaaatattattttttatgtatattacaattataaaatgtttattttttatatgaaagtcaacacaatatttacctttttgtattggaaatggtgtaaagggcaatttcagcttttctcggagctaatcatgacgattaaattaatatcctcttttaattagactaattgcttatggaattgaagtacaagtgaggacctcaattctatattaatagggatatgtgcagtcctagtagtctgctcaattaatttattacgatgattcatcttatccaaaaaaaaaaccattacgaaagatgctcttttaatgtttttcataaaatgcccttggaaatgtgttagatataatggcatggatcttcaccttcatcgccttaacttaaaaaattattacgaattactgtaaatttcttgttgcacaatgttagagctgatggtttggacagttagtttgttattactgttatgagctgtcaagttagttacttaactaactgattggttgttatgagttgttatactcctttagtcacgtgtctattgtttgatcattgtataaatactcttccatatgcaattcaataaactgactctttcttcatctttggctctctctttctctggtttctttctctctgttttgttcttgcttttctctatgttcagctatggctaggaggtttaacatggtatcagagcaattcccgcctctcatggcgaacatggcgaccgtgggtaacaatggtgctgctgctgctggagtcaatgctgttggtgcaggaatcaatggagctcaaactctcaacagacaacgcaccaatcaagatcccgtgttcttcaatcatagcatctcaattcgattaaacgatcataatttccttctctggaaacagcagatcctcgctgctataaaaggaaatcggttaatgaagttcatcagcgagccacctccagaagagttcttgaatgaaggagatgttgcagctaatcgtgtcaatccatcatatactgattgggaagttcaagatcagttactggtctcgtggttattatcgtctatgacagaaagcttgctcacaagaatggttggatgcaacacttctcatcagatctggaa

SEQ ID NO: 226967 - DNA, 934 bp, Cannabis indica
gccatttatagtgaccacaaccctttctcgctctgagagagccgtagagacatcatgcaagaaggaatccatgaagacaaaatcagaaaggaaaaagtgaaggaaaaaaaaccagaaaagagaacaaaaccagagcaaaatatttaaaaaaataaggggcgggaacagttatggagaagaaaaaggtattgaaactgaagaaatatagtttaaaaaaaaataacgactaaaactgccacagagcaaattgtgaagggcagacaacgctcattatccaccatatataattgactgtgactgatacttattatctttcccttttttttattctcatttttattttcattacagttttctttcagtttttatttttcaatttttttcatccctaaaaacccatctcaacccacgatcaaaagtcatatacccacgattcaaagtttgttttgctattatcttctccaaactctccttaatcgaaatggtcactttcttttttcctattttttttatttgaaattatatatatatatatattaatggtgattactcattcttcttcgtctccttattgccctaaaaaacttctaaaataggtgttaaatttataacaaataaattcaaagacaaacacccagtcgtagaagatgacaactcggacttcggtctgcccattatcaaacgaaatcatggacctacgaagaagaaacctaaagttttcgtttctcaaaaaaattctccatctaagaataggaaagggaagattgaagttgctcatggttaggaggtttgtttatagttttcttttaattttttctaaactttgagtattttgtgtttttattttgtgggttgtgtatattgttttgatttacgttttagggtttagtattttttttttttttgttattgttttttagtttgattttaactt

SEQ ID NO: 226968 - DNA, 3221 bp, Cannabis indica
tttgcacatattttgtaattatttaaaataatgtatacaaaattgtaaaatgcccttttttttttagtataaagtatatatcgactgaacaagaaaatttaattataacatactcaataatcatataaaatcacttgctggatacaacaagtcgtctaagattgtctacataatttgattaaaaaaagaaaataacaaaacgattcgtctattagctaaaaacaacaaatatataactaaatcaaatttttctttggaccctttggaggagcctcatcatcactatcaataaaatatatttttttttttcatgaaaacatacttgaagaacaacacaaccaacctatcgttgcgtttctcaacatcaaatatcaaaggaatcagtttcatgtcaatgaagtattcaacaaacgataccacaaaacaaccactgagtggtctatttataggttggttgttatattggttggacagaattaaaatcccccaactaacttaaccgcctctcgaacacagacaaaagaatgtgctgacttcaatgttgtaacacagttgaaagtattagtttagtgatctaattcactaacaattatactttagaaaagattaaatattccccctagaatttttacattatataggaatttaatctagaagtgctaatagaaatgctaaaaggaccagtagtgcataacaccgtccaaataaatagattgtgccaagcaccacttgtatagtaatgcttatattcttgtaggctaaccatctaagttgttgattgaaccttatactcaactaaagtactcaaccttaataagaattactatgttgcatatttacccgttgaaatagaattacacaattaaagtataaaactcaccccacccactcacactaatctcttttggtagaaaactcaagcaaactatcaatagcttacaaaagagaaatcaattctctatgtattgaattgatttctacactatgcagttaaatttgaccatcaacttaacaaataatataatgtagaattaaggctttttcaatctgttatggccactcaaattttcctaggcatatggcaactctgaggcaactatggaccaaacgatcagtaaacaggcctccctcgatagtctcctccgctaggtctctaccctaaaagcagcaaaatcttaataagttgcagctagaaccgaaggatcacacaacaaatgcgattaagcaaaggccgagcatataaacaaacacactacagacactttacatctcctgcaaaatcctactaatgaaatggctaaaatcttctacaatctctcatgcacatcacaaccaacaacaacaattctaacatccctagttcttacaccacccatgaggagaaaacagctgacaggggatgaaggccactagctatggacatgaaaggagaaacatatatatagacaatgcacaatgtatgactaaaatagataaatttaaattatgtaaaactatactaagatttcaatgtgattgtatcatacttgtaaaccagaaaaaatgatttggagatgtgaaatgtgttcagaagggtacatatcacacatatcttaaaactaaagtctcataacaaaatccatgatagagttggcaaaaaacaaaattagagttggaacccaaaaaaaaacaaaaaatctgcaaatgataggaaaagactagactaaaaaactcaatgggaagtacttcattcttcttcttcctcatctccatctccaccagaagccttcttggcagctgccttctggttctttcgcttcactcggccagggcggccacctccgaagggacttgtgagagagaagtcaatgtgcttctgagagtcaactctcaccataaatgatgggatattgactacctgcctcccaaccctgagaagagcaaaagtaaccagtattgtaagattcattattatgtatcacagatgaaaatgcaactaaccaaaacacataatcaatttcaagattcaacaaaccattccattgagaatagtgaatgtaaccagtattctaagataatagtctgtaaaacacacaactaattgtaagtaactagtctatactaagattagtttacacctagaaaactaaagcacatcatccacaaactagaaaacatacaaaacaagcttaataatcccccaaaattatcacacaataagaaaacctttaacctaatacaactacagttgttctgaattagattataagtatttgggattaatatattcaaaaacataaaaggatggtgaaattgatacctaatgtgcctttgcctgatgagaactcgagcatggtggatggacttagccataccagacttgaagacaagggtctgaagacgacgctccaaaaagttctcaacagtaagagcaagaacgtaatcgagcttgttctggctctcatccaacaacccatatctgttcatcctcctcaaaagggcttccccttcgaaaatacgacgtgggtttttctcatcaagagtgagaagcattctagcattgttacggattcggctcaacacatactgaaccctccaaagctctcttttgcaccggagaccgtactctccgacaagtttcagctcagcgtccaaacgctccttctcgtaagggcgtctgggcttcttaaacgtcttcccatctgcacaaaaacacgattcgagattctatttttattgatgatgcgatgaaatgatgaataacacgatgcagatcaaaattaagagtaaattgactaacgcgattcagatcaaactaagaaattcaatgtcgaatcaaatcaaatcggaaatacttacagttcctgtagaagttgacgtgaaccatggctcggtcagatcgagaaggagaaggagaaggagagtagggttttttctgtgatgaaaatctagggtttgggaactaaagtttaaatatatagtggattggaatagctagggctaaaacttttacgaatgaagcgaaagttttgatatttttctaaacttgatattaaattgtgttatttttgtaaaatcatagatgatgaaaactaagcccatatgttaggccttaaggcccaatctgtaggaaattgcctttgaatttttcttggggtaagttgaaaaatgccacttgtattaatcatttaattaaatttacctctaattttatatttatttgaaacatacctctttttata

SEQ ID NO: 226969 - DNA, 1304 bp, Cannabis indica
gagtataaattctttaactaattggtataataataagtagtaatcctccctcctctcctctcctctccatcttaccaaaacaagaattaggatttgatctactaatcttggctctttccctctccccgtcgtacatgtaccaaacttcgtttgttattgttatttattaattattaatgtagcgaactgactctttttaataattgtcataatataaatatttcttagaagagaatacaataattgttaaggagtatggttaatgcgttattaagactaatggctttgaattatttaaaccgtaggggtgggggtgctccaacttgtcgtgtcgttttctatatggtcttctccttttgaatttgatgcataggacgagggcattatagtgatattcttttttgtatttttcttctcgcacgcctattacacatatgacgatatttatgttgtccaatattattaattttaagaatgaaaatggcatacgggtcccatgaagttgatgcataataatgggcagtcatttgtgatcacacaattaatcgtggctatttggatttctgttaggcgcttcatgttcggtatctacattttttcttcgtgctgatgggatggcaattacttcatatatgcaatttatattttagagatctatcatcaataatttttttcgatcaaaaatatatcatcaatcttattcgtacgtaattactgtatatcttcacctaaatatatgtacgtaaaagtctgtgccatacaaacaataccattatatgcctttaatttctcacacagagtaccgatattatatacaagtgttgaagatatatgagtttcatataatatacgttagaacgcaactaatggtgactatatagtggttattaagtaagggtttgtttgaaagtttgattttggtgaggaataggaaatgtaaggaaaaaaaaggtaaaaaacaataaataataataaaaattatcaggtatggaaagaaaaattatagggaaagaaacttgattgatcaaaattttccataccaaacatgaaaaatttatttttcagttttccatactaatttcaaactcacatagcctaaatctactattatttatttttctttagaagttgaataatatagatgaatttcatcttttaaagggggggcacggcttcatgtggcatagatacaactactgatgacaatatgtcactattgcatagggtaatataggcataattaataaaaattgtgaattttagaacgtaatctagttccattcattataaatatttatatattt

SEQ ID NO: 226970 - DNA, 522 bp, Cannabis indica
ttatttatttttttttgaaatagaatttattaaatgaactaattgttacaaggaagcaagcacatgggattgaccccaattttccttggctaatatatgagctacttgattggccttttgtacacaaatgttaacccattacaaagggtgattgtaataaagatctaattaatttgttgcacttggtgataaattagttttaggtacatttgatgaagtgttttagatatgtattttagttgattatattcattttgtgtagaattatgtttgttttcaatttatttcagatttaaatggtaaattttttaatataaattaaaaatgaaaaacaacatattaaatgagatgaatatgatgaatttatcatgaaatttaaagttctaagatataatgggcaaaaaattctaagttttagatgctcaacacgttcaatttgtgatcaaaaattgaatttgaagcttcaatttattttttttattatgatgtgttcactttcaagaaaaatattttgaataaaag

SEQ ID NO: 226971 - DNA, 762 bp, Cannabis indica
tgctttgcggatgatcttatagttttctgtaaaggaaatgatccctctatgaaatgtatggcgatagcttttcaggagttcagttgtagctcggaccttgttgcaaacaagagcaaataaactttctactttacgggggtgcaaagtagttcaaaacaaaccatgcttgaattgctaccattttaggaaggttccttccctatgaaatatttagaggtgaaccttagaccaacaaagtagaaattctctgattatgaagctatactgataaaactctgagctaaactacatacttgggcaagtcgacacctttcatttgtaggtcaaactctcttaatcaactctatcataattgaaattaggagctactagatgagtatattcatgctcttgcaaaatatttgtagaagaagattgataggatttccaggaactttctttggggtgaaaggggtgataccagtaagatacatctggcttcgtgggattgtgtgtgtaagtcaaaactatttggaggtttgggcttccgtgatggatctaaatggaataaagtggctattgcaaagtacctttgggcagtaactttaaagaaagattgtttatgggtcaaatgagtacattgcatatacttgaaggaccaggatgtgtggtctcatgagcttaagcaagatgtgagctggaattggaaaaagctcatgaggcttaaggagaccttctccctgaatgagatccaagctccctgtgttgagaaccatttcaaag

SEQ ID NO: 226972 - DNA, 1321 bp, Cannabis indica
tttaaatataaatattaattgctaaaagaggtcttgttgaatatttaattaattattttaagaaaatagttaattataattaattaattctaaaaaaggaatgtctactatttaattaattattttaagaaaatagttaattataattaattaattctaaaaaagaaaaatctacctattagtaacctgctattacaggtcaaagaaaaatgtaaccatataattacaataaaaatgtaaccattgaatagtcacccataaatataatgggtataagttttaatcccatatataatcttacgaccaaccttgctaaaatattttctctttttgattagaatttatcaatgatcactacatgaacctcttcaaattaaatcaaatactctaaccaaaaattatattttgacaaattaaccatatactgcaatattattttcacgacccatatagaatataaaactgcctcaaaaattcttcttaatgggcaggttttcttacctattaatattataaataaaactgtaattatatacaatgattgtgtgatgtgattaataatatcaagtcaaaaagtgtgtgaccaaattgttgaaataaataaaacagaaaagagattgtaagaatatatatataatagtaatatgctgatcacctataaatggccctcataataaggatgcctagacttttaaacaaaggagttgatatagaattcagctaattccttgaacaaaaacaaatataaatggtaaaacttaattaaaagtagtgtccctcctcagcactaatgctaaagggtaccagtggtgtctagcaccctcctatgtgtcaatattgttattagtctaattaagtatcggatcccatataatttaatataatagcttttagggagtatcgctagccaatcgcaacgcgacatgtcgagaaagtgctagacaccactgatgcttaataataatgctctatttgttaagagtaaataataaataaaaaactaaccaaaacaccaaattcaaaacataatttcctcctactttttaagtataatttttttaaaaaattattttataagaaaattgatggaaaaattaaagaagaagaactaggtactcttaagtaactagaggaataatcaattatcataaaaagtaaccgtgtactttaatttttttcatagaataatatctttgagaaaaaattacatttttataaatttatactttaaatactataaaaatgaaaattcttcaaaattaattaagcacccttcttccaacttttctccatcctcttactcttgtacaatttttttttt

SEQ ID NO: 226973 - DNA, 703 bp, Cannabis indica
tgctaaaggaatatgttgccaggtatgaacatgataattattaattgtccagagttttagagtaaaagattgaaactacagaatctaaaattatcatctctgcataaatgaaactatctcaaacatcaaattttattgaagtgtgattgcttgtgagttattaagtaatggcggtgtgtaaaatcaaatttccattctcaaatgacaagttcattcatttttaagtgacatgaaacctgaaaatttgagatttaattgaaggattgaataatgtgaattgtgtagtgcttttctgagtaatcatggttttatgtgctattattgctgtggctttcagggagaagaagaaaagagaagaaaggactggttcgacagccaatgaagctgttacaaaatgtttgggagattatcagtatgcacgccagtaattcactggtggatggggaatcacttgctatttttcgatgactttgaggtaatgttgggagttttcacagtctaggtaccttttaccagcttgtacgtttataattcatatatttgtgaaaacaagaaaccagctaatgaccctatcctctttcttcagttcatgtttacaacacgtttctcaattgtttcgtttatacttttgtatcgacccaaatgtattataacatgtctatttctcaaatttgcacttggcatattatattgtgttgtgctc

SEQ ID NO: 226974 - DNA, 781 bp, Cannabis indica
attaagctttgtcaatgtatgggccattttatattactaattattaaaattttaatatcgccattgaatccataaaaaacgattcagagaaatgacgcttacatgcttgtattatattcattgttgtatattttattaactagcatgaattaatataatttatatataatacttttaacaacaataaaaattataaatgtaatattttatttctttctattctattttttctaatatatgcatatataatatagggacacgattttgtcccgtgatgtactttcacggaatatactccgtggtatattagatgggtctcggggtacattaaataagtgtcagggtacgtttctactttttaaccccaattacccctagatcaatctcagccgtcagatcaaataattaatctctcatctgacggctgctgtacatcacggaatgcactccttgaaagtacaatcacgagacaaaatcatattctatataatatataggataaatctagagtataaatttttcggtagatacttatttatttccttaataactatttaatttaatttttttattaacgtgtataaataatattataattatttaagattatttataaatttttagaaaaattttatataatttacaatgccgaaaattagatttacatattttattatacctatgattattttttcctgataagcatgataagtaattatttaaattttatttttagtgtgcgaatttttgtaagaatttacaaatactaaataattataat

SEQ ID NO: 226975 - DNA, 1292 bp, Cannabis indica
gaattagatcaataagagaacttaatagttccctatctttcaattaacaatattgtcatgcaaattacacttctggaagaaaaagagaaaaaaaacagaaagaatgaacatatgcatattggaagttaactagcatttgattctcttaacagcgttttgatgcaacccattataagacgagtagaatagaattcatgcccatgatccattttctagaaacttcactgaaaaaatttatataaatatataaataaatatgtgtgtctgcacacactaacctttggatgcagtaggcccattcttgatgaggtactgactacttctatatgcaatttgtcgttagtaggaggctcatcaaccatgaactggaactcttcatcccaccttggatctctatttttcttcataggctgtgacatcatcgaagaagtttgaaagaatcattaaaacattaccatgatatgcttgcacacttgttgagcatataacattgttttctgtaaattcagattttagagtactaacagtttatccacatttacactaaagtagatatagaactacctatcacaagtttattacaagaaatctttttatagatattagaagggaaagttaaaatggcagatgtgattgtaccttggtccttttctcctcccctctaaacagaagtcggacatgtggattagtatggtgttttccctcaacctcttcagcttcatgaactatgacaacaagtagtcctccaccagtaggagttccatcaggagcattctgtactgtctgagtatcttcatagccttgtggcatctcatcttccttgaaaggtttatatgttaattccagaacaagctgtccacgtgatttctcattttgaacatcattcaactccatagttttcaggaggtcaagagtaagaacttttgtctcttcaggttgaagttctttcaatggaactacattcatacccattttgtcatgttttccaaccttaaaaaacagaaaagggagttagacaaggaaaatagaaaacaacaacagaattgtttagaggtacatcaagataaaggggtacctgctcccagtcataaacagtaaactctaacacctgggtttgtgggtctttcacaaccaaattaaactcctcattccattcagggttcaagttcttttgcttgacggtagtcttctttgatggtagcttatcttcagtgagcttaaatttgacataagggtctgatgcaccaaggagatctttctttttcagcttcattgcccttacaaccttcacg

SEQ ID NO: 226976 - DNA, 536 bp, Cannabis indica
gaattttagcagaggttctataggttgaagatcctcttccctttgttcatgaaataatggggtatttatagaaggtttctttatcattatgccttcagagctagccctactaccagagatctgacagtcgatctagtaggtggtcgctctatcatgaggtggatagagattcgatgagtaccgtctaaacactccctacgtatcatcccaaggtcttccatataagaatcaccctcttaaatggtcgctggataattgataggtacgatggtgcgcatgccttgtactatgacctaaaattggggagaaaaactgacgttgtactagaaaaagcattgtcatcactcttgtggtctgacaggtacggacgaagcctttatgtataaggaattttgatggggtggtctatgttcactagtggtgccttgtattcctctggcagatgttcagtcacctgctcacctctagccttcttttccagttgtgcctttacctgtacctgttgatcctgaccctcttcaaccacttgctgctct

SEQ ID NO: 226977 - DNA, 5113 bp, Cannabis indica
cataatatattcatatatatataaaagaaaatgcttcattataacattcgagctgagtctaacataatcaaattcatactacttttcttttccaacgagaaatggaaaacttaataacaatcacaaacccttttgacttctcataactacatttaaggagatagatacaagaacaatttgcagctatattgtacacagattttttttttttccagcttggtgaagtggaaaacagaaaacaaagaaaaaagatacacaacaatttcaaagaatatatacttggaagaaaaatgcaaataaggtaatctgaccaagtgctatatagtattcccccaaaccactctctcccagggcatttgccccataaaaaagtctgttcatctctatcattagttaaatatcatatcatcttcggatgctgctggccgcaatctgatgttatgaagaaaacaaattggaaaattagttcgatcgagcctcacttggattcactctgcttctctggaagttccagttggggtgggagaagtttcaaaaagctcccttgtacaggttgctggttagtagctactgcagactcatcatctggggaaagaaaagaaataaaactcgggttattaagagaaaattcggaaagaattgatttttatgatgatgatgatgatgattaccaaaaagggttttgatggaaggccttttactttttgtgctcttctttttcaactcagctgcatcgaggaatcaagatgttaaaaacatgcaactcgatgaatctcagaatttgttgtttctaaaatggattagtggtttaaatgtgtaacgaactgcgtacctatcccaggtaattgatgatcgtttacaatttcaaagtttttatatgtgtatcccacgaagttgatgtccttagatgacagcatctgcagcaagttcacagcaacaacaacaataacaaaaccgataaatgagcaagaaaacatttttaccacattgtagatagcaaatgaatagttctcgatgatgaaaataagattcattaactaactcccgagcaagaaaaacttggtggaatgtgaaaaccttataacaagaaataaagaaaaaagagtagaggctgaagaacatgcaaaactaccaacttcctcataaatgaatattgttgtgtgaactatatatattaaatattattttgaaatctaaaacttcaccaaccccaatatttactgccatttgatcagatgtgaaagaaaaaaaaaagcaattgatcattcttaattttgttgacaaaacaacatttatatttcaaaagtaaaatctactcggaaaataagttcacacctttctccacgggcctgcttttgatgagctttgaatttcgttctcaccctgttcaagattccatggtcaaaaagacagaataagttataaacttatattggtaattcttgtgagagcatatgtataagctagcatactaaattacctcatcaaacttctcaaagttctgagtatccaattcatcattgacctcaggaataaatgcagctttcatttgatacaacttgtcccactcaataccattgaaccatggatgagcctgaaaataacaagcaaagcaaactaattgaacatatgcgctactagctaaattgtagcacagaccgaagaatgtagcacagaacacaccacacaacaccttaatttcatccgcccctttggttccaagcctctgatcaacattacataagagtttactaatcaggtcctttgcctccggagaaagccttgcttcttctggaaatttcaaatgggttctccaatttactatctgcaagatattgagaagacgccaccagtcaattatcaaagaatggcaacaaagacatgaaataaatgtaaagtaaaatcaaccaagcgtcggacaagtgaccattcccattacaaaatatcaaaattacatcaaattctagggtccgttaccttcctgcaggttgacataggttcatccgagtaaaagggtggatatcccacaagcatttcgtacatgatggcaccaagtgaccacctggatagtattagtgaaggcataagtcttcaatgtcaagaatatatttatgtaataaacagaaaaatctacttaaaataccgaccaatcacattccatcccatatcctttcttcagcagaacctcgggggcaatatagtcaggtgttccaacagtagaataagcctgaaataccaatagaacatcagattttaaacataaaagatttctaacagagcatagattgtggataacagactgttcatgaaaatcatatgtctcgatagcttagtgcaaagcttcaatctactctatacaatattgacaagacatattttgaacaagtaatggaatctcacaagcattcttctatttctctgccagtgctgcaattgctcctgttgggtgcgttttggtgcaacaggccgtccatcactctgaagagccccgctaaggttgtttccaacagaaaaatctttttcttggagattactacagtccagtggtttacacaatccgaaatctgataatttcatgtgaccatctttgtcgagcagcaagttgtcaggtttgatatctctgtaaacattgcaaacataaagggttcacatgatggtacaaaaagactgatggaaatacatatctaatctgatcaaataataggaataggtttacaatattaacgtacctatgaatataattatgtttatgaatcgattcaatagcaagcactgtttctccgacataaaacctagcctcatcttcagtcaaagtgtccttccgcatcagtaaagtcatcatatctccaccaggaagatattccatgatgagatataaatattcctcgtcttgaaaggaacaatatagtttgacaatgcaattactgtcaacctctgcaagtagattcctttcagctttcacatgttcaacctgaatacaaaacatatatttatagggaataagaacaagaaacaaaacaaacgtaaaagattgtctctatgaagttaggaaaaagtaaatacttggcctctgcgaagcatctctgacttctttagcttcttcattgcatatacatgacctgttgctttttctctacacactctaacctacatgcagaaacaaaataggtcatggaagaaaaaaatgggaatttcaacttgattatagacaagcataagaaaatgatacagtcaaaacaactaaaaaaaactagctactgatcgaatcctagcaccgtacaacaacagaaaatttatctggcagtacatgtaaatgctcctcgggacggtgaatccagtacatatgttactaattgagatataaacttgagttagctattacctctccaaatgcacccttcccaatcattgttaatggctcaaaatcatcagcacccattttatgcctttgaagacgcatgtattccgtttccttcttctccaaatacttgagtaagttgctctgctcttcctcggagacttcagcatctgccaacttcttctcaagtacattacgtctgtattacacaaaatgcaatcactccaaatgactaagaattgaaaaaagataaccattgcttcatagcataaacagctgcatgttatatttaagacttcgaaattttagcttctctcaactcacaagagagttttaccataacattgccagcatcatttccagtagctattttgttattttcaatagtcagtgcattaaagtacattcaatccgaattttctatctcatatcccaccaagataatatgcaatgcctaaaatgattgataaccatactaatgccattagtccatgaaatgaacaaagcaaacatgcaaaacaattgaaaagtgaactccgaagttaaaaagtaactcaaaaagcataaaaaaccataccgttctctcctctcctgcaagcttttcatctgcttcttgtaatgattttctatatactgctttgcagctgcgaccttctgtttcgttacagttgaaggtacttcttcacttgcaggtgctttcaatccctctttcacattgcttgttgttgtagtttccttgcttttcgatgacctcaccttttcctttgatttcaacttattgacccaagccctcacagtgtccattattgaattcaacttttaacactatacgcccttgtgaatcaacacttctacacatacatttcgattccccgaaaatttgaagggactgcagctcaaaacgaaatctataacattttgcagatgacaattctgcaatggtaacaaaaagtctcttactttttgagtctcaatcaaaaataccccaatcgaaagacaacataaacaacaaaataatcagctaaacagccttttaatatggaaaaacaatccaaaataaataatagaaacatacccagaaagaatcactgagaaatttaatatggtaactaaatttttttcaaaactaaaactttgtacctaaaagtcctaaatatagaatacgatgagtaagttacaaacaaaacgtaaacaattttcagttttatgttaaaaactcaaaatcaaacgatcaaacaaaagtacaaaaacaaatcctaacaattcttttatatgtaaacaaaaacaagaacaaacccatcaatcaaaaatacattaagttcaactccaaatctctcttcaaaacaagtacatttcctgtggttattctcataaataaaccaaactaaaaacaaaaacccgatcaagcagaacctaaaaaagaaaagaaaaaatacccaaataatcaaaccatgaaaagatttcattttgaaccctaaattgaaaaaccaactaaattagcagataacccaaatcagaaagctcgaaaaagcttggtcagatacaataaaaaagtaaaaaaaaaaaaatcagtacctgatgaagaaaaacagcagtagaagcaacaaaagataaccctaaaagcaaaaatggaaaatttagggttagagtgaagagcttatagtagagagaagagaagggaagcccttggtttcttcatcattctgatgataccacccatttcattcattgctttccctttgggttttttttttt

SEQ ID NO: 226978 - DNA, 1564 bp, Cannabis indica
agaagaagaagaagagaagaagaagaagaagaagaagaagaagaagaagaagaaagcccaataacttgtaaaagtgagtccagtccaaaccaaatatgggccttttaaaattaacatcggtttgtcaagaaaggagtattttcaaaaataacatatttatgggaatttcaattttacttgttttatggcaaaagtttgtaaaactatgaatttaaaaaaaatgttatgtgggaatttttttttaaaacaaaatggaaaaagcagtattagttaccttaggatacataccctattatttttttttttttttttttgatgaatcagtgaaattgtattgctctaaaccaatttgtacaaactaaaggcacctcaatagaggcccaataataatggctaattacaacaatctttttacaaactttggaaccatattctatcttctttcttagttttcttaggcatgaacatagtaactcttagtttgatacattgctttatttcctcaaccattctattaactgtacactcttcctttctccaaatcactaagttccttgctgtccaaatcttgtaaaccagagcagcacatgctgcatccagcacaagttttttaaacttgctggtttttgacctgcctatccaccgaattagctgtgggagactgctgctaataacagaccagccgagccacattttgatctcctgcaggcagttttgagacacagaacagtggaaaaataaatgctcacttgactcaatacctgaatgacatagacagcagctctcttcaagatgtaacccaattttgatgagtctatcctttgttttcaatctattgtgcatagccagccacaatatgaaacaatgtttaggagtgttcaatcgagcccatacctcattactctagttggtcttgatgccatccgatgaaaaccatttgtatccttcagcgattgaatactgctgacttgtgaactgctggatgttggtgagttctttcagctggttttaactttttttttcttgtaaaaaaagtcatatttttgaggacgttctgtaaaaactcagtgtaatttctattaaatatatttatttttctctaatttaaataattatactttatttatagattattagatggtttaaaagtaattaacccttgatttttttttataaatgttataatataaattttatttaagagcttattctgtaaatataaaagtaaattacttaattataattataaattaaaatttagaagagagtagtacctctcacataacatatagagtactactagtacttctattaagtattatggtatctacgcaattatgaggtgatgtcttttgaatggtttgatattttttataattattattaaaataaaataaatattactatataataaattatattaatagtaatacgacactttataactaacattaattttaatgttagttaccatttaattaggtttggtagccaccaatcaattacatgtcaattactaattttatttgtctaaacaaaaaatatatatactaaattacaagaa

SEQ ID NO: 226979 - DNA, 3436 bp, Cannabis indica
tctagaaacgaacaataataattataaaaaaaaaatgaagaacggtttggacgggttaacccgaccaaaccgacaaaatcattgggcgggttgaactttttctaaattttcattgggcgggttacgattaaattttgcaacccgatatttatattgggttaataaaaatatgctataacccgactaaaccgaccgacgtacacccctaggctggagtacctacctgaccagacttctggcactctttgcaagaccttcgaggagaaggagggcgtccttctaggttgcgcaccacgggctagttggtcggaggagcataaggaggtggcgaaggaagactcgaagtggtagagctaaacccttccttctaggcagctttagaatggggattcttccccgggagcgcctataggctttctcttggtgaattgccccaacttggaaacgatatctgcaaaaacaaaacacaaagtattggtcaaagattgatttcaatgaatagtatttcagcataaagtaaagaaattataccattggcctgctcggaggcatcaccccgatagttgttaacgtaatatagagattaggaataaaagtttgatacatacgttacttgttgcttaaaatttatagcatgaaaaagtacattttaatcaataattatggtatttgatcatgccgtaaacatcaaaataagattgtggaaaagctatacaagcgtcgtgctgctaggggcaagcttccgatgtgtgacaaaaagcacaagccccattgaccattcatggtgaaaaaaattaacgagtaagtgatgttatttaaatgttattattgttattagtcattttgatgatttataatgctatttagatgtatgatttggttttctttgtgctttttgctatttttttttggtaatcgagttttggtgaaattgtattttctgagttttttgtgatttttttgtaaattcttaatagagtacatacaatagagtatgatgggaagttgaatattaacttaatataaaggttatggataaaagtttgacatatacaataattgttgcttaaaatttatagcatgacaaaatgctttttaagcaataactataatatttgatcatgctctaaacatcaaaataagattgtgtaaaagctcataagttagagaaaccaaatcaagatacaatttttttaatacatgtaaatctattcgaattttcatttcaatatcattcattatttaataatattttacaaaacaattatataacaatcaccacaactataatatatagaataattaacacattaaaacataacttttccagcaacttataaaataaataaaataataattaataattaataaatacatacaaattaaatacttttaattctcttatattaataaataataaaataatttctgtatatatacaataatttatatttttagtttttaatcattaaagtaacaaaataaaaaatattcaatttgcatcaatttaattttaataatatgatgaaactatgaaaggactacattattattaaggataagagacacaacttaatagtgtaaaggggcaaaaaggctgattgaataccaataacactggtgcacagccccagtgtagtgtaccagcgtctgagcaaaagagaaataaacatccttcaatataaattatacatcatattgatttgttaacctctcaaatcactactatctacttgcataaaattttatataaaatcaagactaaaaatcaataagttttcccaatctcaaagcaacaatggccaatggaacacagtaagtaattaactccaattccaccacacaacaaagtcagaatttcaattatacattagtttcaaaaagaaaagagaaaatagaaagaaagaaaaaaagacagctttaacgttataatgcctggttaggctcttcttaactctgtagaagtaactgtgtcttcgtatgtctgaaatgcagcgctgaactatcgaaccccgccattgcaacgctgtctggcagcacaagttcagaagtacacaagctaaacattgagatgggaaagtataatagcccggattttatgcttttactactcatgattagctcacaatagaggtctcaattaacccttgccctgaaacgtaatgataaaaatataataaatacacgcagcaaactcaacattttgatagcatatcctaagatttgttttgttcaagtaaaatttcaagttcatttgacaggttggagcagagttgttgtccttttactctcaatgagagagagagagagagagagagagagagagagcataagcatgagttcataaagaccaggtgtaaaatatctgtactaattcgcaaaagcctagaatctacagatgtttataaattatgagtcacaggacaaagtactggtcatcttcctaacaaagttgtgttgaagtattaatgtaaaaagagattaaaggtattggctgagttagagtagcttctaatattaagcctctagttttttcttctatacattttcttcaatgaacatgattagaaaggttcttataccttatggggtggagttccgggtcgtatcgtgctgtttgcaagcccgaatttcccctttttctcagaagactttaggatctggaatgagcacgtcaatgaatcatccacgctcatcatagcaccagcattgtcaaactcaccacagtaatttggggctgaaaatatggttactagttgccgctttgcaaaaaactcatatccatcttccacaacctaataaacaaaaaccaagaaatgcaagataaaacaaaagaaaaataatttaaagaatactcattgtgaatactagcatgttattttccattaagggggcgagactaggtaggaacaggtgccatataattgcctcgagattgtgtgttgctaaatagcaatatcatatctgtatagaccaaaagacaatcatccaattgcttatacaggggagcaaattttttgaattaaatatcttgtcaagtttggaagaacaagaaattgtatatcagaatgctgaattacttcatgccaaaagattctagcattcacaagggaaagaaaactaacacagtgagccaataaaatcatcagattatttgaaaatgtatacatgaacagcaatgcaaaagtattaaccttccaattcaatgatgacatgcatgagcatacaagcctcaagagagccaaaagaaagatagtcaaatcacctggtgagcacggcaaacgagatcaaggtcatgtttctggagaaattcagctaccttgtcagctccaaatgtatatgaaacacctctgtcattctccccccagccatcaatatccttatctggatcagcccataaaagatcacacaaaaggccctgatctggcacatcgac

SEQ ID NO: 226980 - DNA, 694 bp, Cannabis indica
atttaattacattgaatttataaattattacaaatgtagacaaatgattttcaaattcaaatatgacccagcttttaaataatacgacatgacgttattgctcttagtggaaatagcaacatgtggttttcattgaaacgacaactgtacattccattcgaaaacttattattatttattttgctaaggatagtccaaaatttcttaatttattattataaattaaaacattacaataataaaatataaaataaggaggaataaataataatagaatttccctaaataataatataaccctggtttggtttccttgctttgcttctccataacccatagcttataccacctacaaacgacctcacccgatcccctacgactcctatctctctctctccgtctctccacacacttgtaagtcaaggagttgcagatcgaaatgggttgctcttcctcccttccaggtaaatatccccaataatctcattctagttttaatccatttccagattgatagggcatacaatacaaaccctcatataggtcttcttttcgttatgtaattttctgagctgataagtttttgatttgattcgcaactagagattcaatttcatcatgactttttgtattgagctattgatctttgggcaaatgctttgaacttggtcgcccttttgaggatttctggtaa

SEQ ID NO: 226981 - DNA, 868 bp, Cannabis indica
gattctggaagtgggtgtttagtggccatattaagcttttgggtttgtaaatgccatgttgagagcgtgtgaccataggatgaattcttgtggaagaattagtaggttgtggggtaggatttggtaatatgggaggagatgaggctgcttgttgtggtatattatgactggtttgctgagatgaagaagtatcggatggtaaagtgggagggttgatttgattacgcaaatggtcattattcatagcaatagtagtggtaggatgtgtacatgatacatcgggtaaaggggcagttggaggatggccttcattattctcattatgttgtgatatatcataggtaggatgtgacatatcatgggtatggggaacatcaatagcaggttgaacagtgaccgtggcaggtattgtagtgtcattttcagtcctttgttgagcaggccgtggtccaccatttgtattctcagcatcattgttgtgaccattgggaaaaccaatattagaaattatattaggttgagtattaaaggatgaaaaagtagatatagaagtagcatcagtggacaatacctggtggtgtggtactgaattggatgtagaggcagtcttgtgaggataaaaatcctcattgaatactacatttcgggcaacaaatatccttccttcattattttcacataggtatcctttatgatgagaggaataggctaggaaaatgcattggtgagttctaaaatccaatttgtgcttattatatggtcttaagtgaggaaagcaagcacatccaaagggcttaaggatgttgtaatctggctttgtgtaaaacaaggtttcatagggagtggcaaaatcaagaactcttgtagg

SEQ ID NO: 226982 - DNA, 545 bp, Cannabis indica
aaaaaaagcatgaaaaccaaaaatttttagattgaaaaatacaaattcaagtgcaaacactcaccatcgatcgatagaaaaaatcacgagtaagaagagcgctcactcattcatatatttaaagttagggttttaggatttaagaatattttattcaaaattaattaagaatatactattaaataagcttgggatctctgaaggggtcatttacataataatagttagtgaaaataagagagtggtgtagagagaggagcggaagaagaagaaacaaaatgcgaaatcgtaaaactctggcctgcgattggaatttgactcctttaaatttctccgattggaatttaactcactctgcgattggaatttgattccttacagaatttctccaactggaatttaactcactctgcgattggaatttgattcctttgaatttctccaattggaatttcgttgctagaggtgatgaaagggtatattaattgattgggaatgggttcagataaaaaaaaaatcttctgtgggattgtgatgagagtgag

SEQ ID NO: 226983 - DNA, 1040 bp, Cannabis indica
acattgtgggttgatttgaaaatggtttatgtgttgctcttctcccttatttcccctcctgccacctttgtcttcttctatttccataaccgaaaaatttcaattcaaaatgtgtggaatacttgttgttcttggttgctccgatgacactcaggccaaaatggtgtcgtgttcttcagctttcacgcaggcaattaccattgctttatattaatttgattttgtttcatttctttttatatacaccgaagaaatcccttacttttgtgatttgggcgtttgtgtttgtgttaaacgttttgaagcccttttttcctatttcccaagatcggctttcctttttctgcttttctcttttttattttttattttttttgatattttaatgaacattcacggtctttggttgatgtgtgtttgatggttatacgagaagtgaagctttgtttgatggttgatgtggattattaaagtaaaacatgattttattttggattttggctgtggttggactacgtgagctggtttttcaaagtgggttttgctctttttattattactattagctacaggatgatattgaagcttattataacataattataactcattgtgctggctttaatttgtttaattggaccaaagggaggatttttagtattgggatggaacacacaaataggaaaaccactgccaattttcctgttttacatttcagcgtctatatgattatgtttttcattccctgttgtattactttaggctaccaacgttttacgtggtacagtatgttatatatttatgatcaactgggcaatactttatggtttatacacactcagtgttatttagcaaaaaaaaaatatatatatacaataaatgaaactgtactgtaatttatatctaatttgaggtacacattagacggattttatgcattttatgcaaatttgggtttaatgaacattcccttttttttatgaatcattcatggaagtgaactcgggcattgatttattgcaattttacttggaactttc

SEQ ID NO: 226984 - DNA, 1148 bp, Cannabis indica
ttcttttataagtaaaaaaacaaagaacatgtaacttaactttttggtaactttttttttggtgaatactttttggtaacttgacttgttgtgttaaagactttctaggacgtttttgcgaatctcttgattaagtataatgattagctattgatgcttccttgacagcgcaaggttgtaagattgttaaggaaatagtgatttgattttattgttggtgtatttttatttttacacttcaaattagtttttttttttttttttgtacggaattctacatagaaactcttattgcaacaaaaaaattgtatagaaacccctattgcaactagcgctgcaaatattttagaaatccaaaccgtaaatttaaaaaaataagtcaaaaaaaatagtatatagggtaattctcctttattattttatttgaaaaaaaaaggtctacaaaaccacctttggagcatataactaacgtaagggctgaggtcagaacaaatttcattggtaattgacatctatcaaaatataagactaaatacaattagaaaaagttggtcgcaacacagtattaatggcagctttcaagatattaccggatgaaaattatgggttgagtcgcgagttagttcgctctccttaagacatttgtggcattgtctagtgcaagtagacaccccaagaataaaacaacacaatcatcgtacactatctcagaacactaatgtacagtaacgaacatttgaaaacactctcaatatgatattgtagaggtatgaaaaggatgtaattctcccattagtttaattgaattgtatagacagatggactaaaaataaaggctaattaggatttttgccccttgaactttgacaagtaccaaatcatgccccctgaacttttaaggtcattgaaaatgccccctgaactattgagattgttggatttaaggacttttgtctaattttattcaattttactatttcaatgattgtttatgtactaaaccatgttccccagactttgatatctaccaaatcatgccctttgaactttgacatgcactaaattatgcccccctgaactttcatccatgttagacttttttactaaaattagaaaaaagtccttaaattcaacaatctcaatagttg

SEQ ID NO: 226985 - DNA, 1497 bp, Cannabis indica
cgatcctgcgtttggaagatactcaaggggatggataaaatcttgtaaacatatatcgaagagaagtaaaattataataggtttttgtctcattctctagtctccgtaatgagatttacaacaattaaagatggtgggccaaagtaggataggggctgaaagttgtgatgtccaggtatccgccggtccgaagcataattcactgtgaaaccatttccaattttatatcgaagtcctttaattaacagctatcttccttaacaaataccttgtcatgttaaggatggtgaatgccccatattagcctataagaagttattgttggaaaaatatatgtgcttcaataatcgcctcaacaaggaattaggcatgtcaaagatctgccaaaattgctttgcaagaagtgcttgattaaaatgaacaaaggatctaaaacccatactatcttgaaatttggatttgcacagtagtttccaacaattgtgattctacaaaaataataaataaaaaaattacctttaataatttctttaaaaaaataatcaaattattttgtattaattttaataatattttttcataaatgtttgtttgagtcatgtagaatttttttttttaatatttaaaatataatatatttttattttatgtgtattttttgagaataaaataaaagaaaaaaaaaactcatataaattaaagatatatattttatataaaataaaatttattaaaatagaatgtctataaaattttgagatgcaaataaaactcctcataacaaatgtgttttgcattttataaaaattacataaatattcttaaatttatacaatagtatagttgtgttgtaattacgggctgaacttcactgcatgaaactgtcacgagttcataaggcacaagcatgacttgacacgaaaaaatatgagcttaaacacgacacgacatggtacgacaaattttcacaacacgacatgaaaaaaatagacttaagcacgacatgtcacgataagtctgaaggcatgacatgtaagtatgaatagagtagcctaaaaacacgacacgttaaaattcttataatttgataagggaaatttagcttagcatgcttaaatataaagcatgatcttttaataccacccaattagaaatagagtatctgtacttttaatctatttttcccccaaaaatactcttacattttaaaaaggcctctctttctaactttctctcactctctaactctctcactctaactaagtctcgtcgtctccaccccgaaacctttaaaatccccacctatcgctagaattctcaacccaacgctcattttttgtaattttttatgaatttcacaatgtcgttaaacatcgctaaatatcgctaacttgacatagttaaacacatcgctaaatgtcgctaaatcactctcaagttttcacgatgattagcgatgtgcttttgtattttatagtctcatatcaaaaatacatc

SEQ ID NO: 226986 - DNA, 3347 bp, Cannabis indica
gttggtgaagactgtcctgtatttgatggtcttactcctttgttcagacctatgctggtggctcagttggtggtgctgttaagttgaatcatggtctgtgtgatattgccattaattgggcaggtgggcttcaccatgctaagaagtgtgaagcttctgggttttgctatgtcaatgatattgttttggctatattggaacttcttaaacagcatgaggttagtatagtatagcaatttccctttatttatttgttttacattattttgtggaactattgttgttggagtttagttgaggaattggtagaagggttttggttaggagattaattgaatacacacataaatattggtatgtaagaaagaatgaccactttgaagatctgatcagttatctgaattccttgggttgtttgtctgacttttgaacttaggtgtggtttggttagaggtaatgaaatggaatagaatggaaatgaaataatttttattttattcttttgtttggttgtattttaaaatgttggaatgtcattctaatggaatgactttttcatcgttttggtggaatgactattctattttaaatttgattctagtcctatgtttttattttttccaaccaaatgccacgttagtttttggttaagaccccattaattgaattactaattggatagccaagagacgtagttcaaatggtcaggcatgtagtttgtggagttcgcttccacaacgtctaggttcgagtccctcttgggtacctacctacatagcaattgtccccaaatactctagggttaggtgaggatcctagtttaaaaaaaaatgatttactaattggatgtattgcagtcattagacaagctttttgaatatgatggaccatttttcttaatgaaatattgatgtatcctgtatatgaatttctttttttgaaaaacagacagaggccattgtcttagacaggcccctacccgttatatattgaaaactctcacttgtggcggaggaaaactgtgattacatgaagtttagcataaaacatactaaaatactaaaacaagcacaaacaaatcaaaaacacatcataatcgtatgaatttcatgatctcattagagtgaatgttagaatatcaaagtaagttgcgtgttagactgtcggtttactcatagctcctaagagttttctgccttctaaatagaatattaatgtgtcttgaattatttgcagcccaaagtagagtgagtgttaatttttgtttttaatgttttacagcgagtgttgtatgtggacattgatatccaccatggagatggagtggaggaagcattttacacaactgatagggtcatgacagtttcattccacaaatttggagattatttccctggtaccggagacatagatgatattggttatgcaaaggggaaatactactctcttaacgtgccacttgatgatggaatagacgatgagagctaccatttcttgtttaaaccatgggaaaagtgatggaagtttttaaacccggggctgtggttcttcagtgtggtgctgattccttatccggggacaggctaggatgcttcaatctttctatcaaaggtcatgccgagtgtgtcaaatatatgagatcatttaatgtaccactgttgcttcttggtggcggtggatataccattcgaaatgttgctcggtgctggtgctatgaggtgtgattcttgttttaattttctattctgtttttcgaacacagagtacttttttaatagttacttagattcctttgtcggtactatttagtcgtagtttgcaactttcatttcattttgttttaatgttcattatgtgttatgctcatctgcaatacagactggagttgcactaggagtagaagttgaagacaaaatgccacagcatgagtactatgagtactttggtccagactatactcttcacgttgctcctagtaacatggaaaataagaattcacgccaatcactggacgaaatccgagctaagttgctcgactatctttccaagcttcagcatgcacccagtgtccaatttcacgataaacctcccgacactgagcttccagaggttggattctgtagatctttttattataattggaggaaaatatttctgcatgatataactcgtgtttttgaaggaaacaaaaactaaaatcttacttttttctttaatgatttttcaggcagatgaagatcaagatgatccagatgagagatgggatgacgattctgacatggacattgatgatcggtatttaatcttatcaaacccccttctgttctattgcgtttttatgtttattttgtttctatatgcaatttactgatttagcatttattttcacaggaaacttttacgttgcagagtaaagcgagaagttgataataacgaacttaaggaacaggtatgttctgttcactttcacagcctatttcaccttccatactatttcgaaatctacactttactatagactcgaagaagataaatcagtaataatattatgcttgtaaatagttttccgacaatcttaaataatgcagctactagatgtaactattatttcgaaatctagactatactatagactcagagaagataaatcgatgatattatgcttagaacttagctgggcaataaaccatttgagttagttttccgaccattttaaacaatgtagctactagatttaactaattagctagataatagcattccaagccttcccataaattgctttctacttattatttttaaatttaagaagtaatattaagactgttaatcaccccattaggagaatcaaaaaggaaatgcagagaatactaaaaggctatgatactgcagaagatgatactacatttccagttaagctctttatacaattatatgtatatatatcactagattgagattttgataaatgtatgtatatataataataaaattcaataatgtttgcagggcttagatgtgggatctttggcaataaatgaaccaagtgtgaaagttgagcaagagaatactaataagccagctgaccagctataaccccaacaatggccaaagctacaaccatctttagatgcattaagctaactctatgtttttgtgtaggattatttcttgtacttatcaaaaagagtttatattagtcaaatggattatatgctaagtaaatagtggaaatgtttttgatttttgatttttgattttttgttttattttttctttttctaacccatgaaatgataagataataattatgaagtactagtttaattttataatttgaaattatt

SEQ ID NO: 226987 - DNA, 909 bp, Cannabis indica
acgggaccaccaataatcgtcgagacataactatactagacttaaaaagatattttttctatgcacgtaataagtaacatattgttgtaaatttgatcaattttgagtttatactatggtgttttggtgttggtacaatagacgagatcaacacactgcattggtacctcatggacctttttcatatttaggtcatctcagttatatatggccctaatctttgttcttgtttgtgtgcctgaaactaaaggacttcctattgaagaaattgagaagatgttggagatgaggagtttaatttgcattataagttttgggaaaataactcatcatcatcattagacaatgtggaaattgatcctctaaaccaatttattatccaactcatttaaaccaactaacttaactaactttcagtcatgttagttagttagttgatgttattcttgtttgagttgaggcctatatataagtctagtctttttcattttaaaagagagaacagaaggtagaagagagaataagagagaggattagagagagttgcttagggttctaagctgagagttctgttcttgaagagggtcaagaacaaggggtgtactcaggttgatagagagaaaactgtgactgttttctctggtgtgtgtcgagtgtcatctgagctgtgattgctctggttattgtaattgtattgctactctcttattcacatattaatgaagttttggtgatatttctcagctggagtatggccaggaatcatgttgatctctaggactggaaccaggataaaatcttgtgttgttctttgattgatttctggtttgattcattgttttgttaattggtttatgttcattattattgtccaagttgtgattttattgcaggttttattgattgaat

SEQ ID NO: 226988 - DNA, 817 bp, Cannabis indica
aaagacatttgcccaagcttgccatcaactttgaattgaaccttaataaaggaacttttaatcatatcaacatagtattaggaaagataaaggaaaaaaagtgttggaccataaacataaatttactccacaacccttcgttccatacatgactgtagaacttttctcccagcttgggatgaaaattctagaagtagagacagaaatttttttgttgttatgttaaacgtgactaatgacatttcagatgaaatgatcaaagaatattgagccagaatccttgtgaaaagggcttgaaatttctactgttttaagaaaagaaatcaaactattgagataagacgggctgaaaagaccaattaacaagaaaaagtgttaggatattaggaaaaaagatatttctcattacctaataaaataggaaaaagtggtatttatacaaagtgggaaaaaacctaaacaaagcccaaaataaaaaataaaactcaatataagcccaatcctaatacaaccccctcaagatgaagtgcacaaattatgaagcttcatcttggatacaagagattgaaattgattggaaaatagagatttagttaagatatcagcaatggtgtcctttagtagaaacatgtaggagtttgaggcgacgttgttggagcttttccctcacaatgtgacaatcaatatcaatgtgtttcgtgtgctcatggaaaactgggttttcggagatgtgtatagcggggtattatcacaattataagacaggtgggccggtgtaatggatgccaaagtctaatagagcaaggagccaagtgat

SEQ ID NO: 226989 - DNA, 1030 bp, Cannabis indica
gttattaattatgttttctaaaaaatgattaatttgacaattagatagatatcattcaagttcttaactaataattcttctcaataataataaaaaaaattcttaacttataattttctttagtaaccattctagtcattagataactttaatcatctttgtttggataacgtatagaacaagtttatgaaattaattgatacattaatattgttgtcatggaaaaatttagttataatatagctataggtcaatatataattattgatattaataattaatcaccataattgccatatgcctagtttttattttctaccacacacacacttatatttcaataaaaagaatcacatgtttagtttaggtagctttagtatcacatttcatatatagatatatttataattattaattaattaatttagctaaaaataggaaatattataagtatatacaatgatagatagtatctctattgaaatatgataactcacgctcaaagcagacaatatcatacaaatataggaatatataatatttaaagtcttaacaagtgatattacagtcgggtctcaaaattagccatgtgaatgaatcttgatcaatttgccaaacaaaaaggagatgagtctctgtaatctcaatgggatctgtggatgtgctcatcaattagagaggccggcagtgtgctctgaatagaggagttagcctgagaaagaacaagaactctcaaggtatggtgtggtgctctatgtaaggcgtgtgctccaacatgaagggtagtacactagttggtaaagagatagatgatcatttctgaaggaaagcaagatgctcttttcttaaggagatcaagattattgggtgtgtaactaaagtcttacattggattaaaaataggaaatatcatgagtatactaatatttctattggtataagaggtattttgggaatatatcaaaaaaaaaaatataaaaaaaaaaaatagtaccgaacgtcctaataaattagtttttttttttttttt

SEQ ID NO: 226990 - DNA, 2145 bp, Cannabis indica
gacgacccaaattcaatcatccactcttttatagcactcaaatagatcggcatgccatcaacagcctgtgcttccaagctctttgaagatgactggtctagatcatcatcgagacagaatccacttccatcatcagcagtcataataccagacccgtatatcgtaacatcaatatctgaacaaggtttcataggaagaagctctagtgaaaccaatctcaagtctgaattatagagagaccaattatgaagcatacttcgaggaagctcatcaggattgcacatgtccaagtcactatcaaacactatgaactcatcagtttcttcggcagaggtcttgtaaaaagcaggtagaggatagtcatttgcaatttcatcttcattaattttaacgtagtacttgtttgaccctgagaccaaaccccggccctttttctgtttcattgattgccagtactcttcttcttgcaatagctttgctagtttcacatcatcatctacctcttcagcacaagcaggcgagccagatgcatctggtttagttttagcatctccactttctgaattgatctttaaggtcccatttgaagggatggtattcggttccatgaaattttgacgctttttacactcatctcttaatgtagcaagaacaggaacattgacaaacagttgaccatttttggatgtttcatccaagcctatcaattgtttatatataaactcaccctgagaaacaacaaaatctcttataggcaaattacctgaaaagcatttgctggcattcattgaacgaaaaacaccagctagtaactcgtcaagactgcaatcaaagctccctccaaatgatttagaaagttgtttgtagacctctacacaaacacgggccttctcaaagaaatgaccataaaacttcttgtaagtagcagcaggtttcacacagagataatcaccagcctcagtcgaaagccatacaactggatttccatcttcgtaaccagagatgtcccacgattctattcgcccaaaaccttcacatcttatgcctcctcctacggccttacccttgtcagaatttcttccaaaggcaatacaacgccagaaataaacatgtcatcgacttctaacatctcaagaggacgcgaaacaccatcttcatcatgaacaatgaactcagtaagccttctgttgggtcgatcaacatcacctccttctccacaagtaaggcgcaaagccaggatctcgtcgtcgacaagctgatccttctttttctccaaaaggttggatttttcggacaggcgaactgacttctccttgaagtctgtacaagcagctgctcgcttgggcagctttcgagccccagaagcctcttcttcgctaccagcattacgaggggaagcacgcttcttccctttaggctcagctttcacagaatcatttgttttacccttcttcttcttagatcctgttacaattactaagtatcaatatataacactatggaaagaagaagaaaacaaaaccacatgcagaaaaacagtttacaaaatgacccaattgtgttagaagaaatcaatcgaaatagattaacaatacctggattttcagtctgattggaaagagcatgctcggggagagaccccattcagggaagaatatgctatactgagtgaaatgggaggggagagaaaggagaacggaaaggaaaccctagaaactgagtgagagagtgagaagaagggggttttaatagtgtctgatttgatgggaaaatagagcgccaaaccgtgtattttgagacgaagttggcgccaagtgtagcattgaaatttcaaaacgtaaccaaacgtgcttttctttttcctaattttaccgattgagaagaggattcgttctaaatagtgtacggaattgaacaagataacaccccctccaactatttttttaaggtaaattagacgatataaggggtgttaatcaaaacgctcaatttacccgtaccacaccacgccgcaaaaaaaatacggtttgaaattctatacggtgcgatcgcgatttgaatttttcctaaaccacacggtgtgtaacgtgcgtgccaagatggcacgttacaagctaagtgatgcccataagttggccaagtggt

SEQ ID NO: 226991 - DNA, 2330 bp, Cannabis indica
tatttttgtaaatatttgtatgtgggctgtataaatgtttaatgggccggcccaagtattttgtaatttttttcctttttgtattttttgtttatgttttttattttgttccctatttttttttttattattctattgaacttgaagtttagctttttttttcaacacttcatgcaacaatagtggaatcacgaattttaatcaaacatataaatggctgccaagagacagactaattctacctatagttgcccaaccaaaataacttttgccattttgatccaataaataagaagcattacatattttcaggcatagtacaaggcaatagggcataatgcatgattggtccctacctagccaagtagccagccagggagaggagtcattaaaaagtataagactttcacgtaattaagaaagactaaaatagtaactcaccatcgaccaatgccaataaaaaccacttaagaaattaattaattctcactgctgtcacacattatttagctaaccaaaccaaaaaaaggttttgtactttgcagcctggcttccatcatatgatgtttccccatcctctaaccaaattaaactgacatttttcttcatcatttcattctttcattcaactaagaactttgcatatataaaaaaggtcgtaacaaagagttgaaatggtcaaagatatggttggttaatttgcatcattccaatatattcctatacacgtggcaatgaggaagaaatctaattcattccttcattcgtaatcctcgtgtaatgtaaagttgtagaattaaaagctaacttgataagtcgggatgttcggtttaactaaacatcgtagtttggagcaataataataacacacgaaagactttggaaagtcaattaagaagagtgagtgagaaatataagaagaaaagaagagtggcgtctaaggaaaattggcttctgggaattttgtctagtcattaatatttaatatgaaatctcttgtcttggttcaaccaaaatcagtactaaacacttcatttggatttggaccgatcttaagttgatgaatagtataccattttgttcgactaggcacatgtagagtgaatactaatattatttattttgtgattaacacgcaaaataaaacctgcatgttacgttatgtcattagtagattggaggtaacaaaacaagataccttagccccatattaatattgaattcaaactcatcaaatttgcccttttcttcttttttgctctttctttccattataagttataaccttttatttttttgaggaaaatttaccgagtagttaaggaccaagtcatgggaggtagtagtgggggatttacagtgcagtcaatgaaagaaacctccatatataatttgatattaaccactttcattgacccttaaaaacttaataatggtaaatagttgttgggtttgtttcatgagttgactcatgatgatatgatggaatggaattcccacagctttaatatttttaataaaagtaagaacaatgctgaaatagaatatgcaaaagacaggttccttctgtcaaaatgtggtagtttaaggattgattaattttgtaagataaaataaacattgacatttgattgattcacagtccacaacacttttagttttattcatttcacacacacacacagattgccagcttgcagttgcagaaagaagatggcccactactactactactacaaacaatagtgaaagttgaaaaagactttagaagaaatgtatcttttatccaaaatacaacctaagtattttttagcagtgagggaccactccctcaccaccaacaataaaacctctactaaagttttctttcataactgtacaacaaagattcgatctctagttaaaagtaagtaagaaacaactcatcatatgcctttagttgagaccaaaaagtaaagagaggaaaaaagtaactaaaagggcagaatatgtaaaaagaaacagcgaaacaaaatctcattctcttgtgctatacaaatacgaagctaattttctttaaaatacaaaaaacaatgtaaaatgaaaaactataaaattatgaacaaagtctaggcaatgatcttgtatgactttggcttggtgatcttgatttcataatctttgccatttgaatttgcattttcctacatactttttctaactccatcaccctccattgcattccttgcaaatgttctcttagatttttgttatcggttggaagatcgagtttccctgcataaaggacaacttgttcttcagattctgtgtcctttttcgtagcatttttt

SEQ ID NO: 226992 - DNA, 956 bp, Cannabis indica
tggtttgatggcagagaggatctactccgtgatcagctagttggcttacgacatagaggtggtgaaagctgaacatgacaatgctaaacaaaggagggaggaggcagaaaaggcattagctgatgccaatgccaacatggagactaccacaacgcagagggtgtccgagtatatggaaaagtccttgtgtcgatagaagatagctaccaagacggagagggaactcagagacaaatacaaagacctacactccaaggccctcttgcgcgttaaagaattggaagccgatgtgcagcagtccaaggaggacatgcggtaagccaatgttgggttttgtgctctaaataaaacccatttcaatataatcagatttactaattaataaagataaaaaatcatttaatgttgcatggttcacatgatttatttcatgatttatacttaatgtataaatttaattaagtccagaatatatatataaatatatatttattcatgattatagtgtcgttagcactgtggaatataatcatgattatatgttaaaaagttttattttcatgatttgatagttcactggatttagactgacgtgataatcggggataaggtatacttacaccttggataagtgttatgttctttccaaggtatgggcaaagtttaccagtattagatgtatggagtatacaatggaagggaccgatattgatcttggataagatatcataaacttaccgttatatcttcctaagtaaatatcaatggttgatcttaggtgtatggatattaatcttgatatggttaggttcaatcttagttgtattatttatgttcttcaagatgtttatggaagccaacaaatggttctggcggatatttacatctcgggaacatggtagttcaattgagtgggagcgctggtcatagatatgcaatctatagcttctataagt

SEQ ID NO: 226993 - DNA, 1427 bp, Cannabis indica
aaaaagagcgtcgaattagcaaaaaacccttttctccaactccaatagctgacttagtaaaaacccctcacaacaaaaatagcactagaagatctctcctttcttttttctccttaagaatatgaagagtttccaactttatggatagcaacgtgtactggtaaaaaattaaagaaaaagattggaactgacaatctcgtgaatcagctttgagtgtattaattagaatttgatattttataaacaaagaagaagcaaaaggcccctggttttcctttgtttttctttttaaccaaccttctctcaatctcaatctcaatctcaatctcaatccctttttaaaagccaagattttctctctatagtctctctctccgtacttacgagtctacaagttcggtgaaccagaattaatggccgtcccaataaaagagctccttttataacttctcctttgtctcaaataatgactcaacagaaggctgtgacaacgctttcttttcttggcttaaaagaaaatctttcagtttccgtatctctctcaaaaaactatttttatttttcaaaactaaacaaaaatgaaaaatctcagtgggcgtggcacataaaatctctgaaatgatgctttagtagaaaagtggtattttcccaattgagtgtagtgaagttgctctgaatacttttcagttttcactgcttgtgatgaattcagcatttgcttatttaagagagagagccgctcttgggatttgaaattccattaatgctcgattttgtttttctttttaaaaaactaacattattcaagttttttcttttttttttttaaaaaaaaaaacccttgtaaacacataattatatgtcattgaatcattgactgtagttgtgtttatttatattaatttgaaatgagattcgatttgaaagtttgaatacagatcttcttctagtatacgttgctatattgtttgaaatttctttgattactaattagttttatagtgaggattgtaatgaagctactacctgagaaaaaaattgtttattgttatttcagttcagcttgattcaaacaaatgtatatatgtggcatagtaacatatgaaataattccctttacaaaaaaaaaaaaaaaaaaacaatatgaaataataaaacgaattaggtaagtcatcaagactatgaagaataaaaatgtgttgttttaagtttgtcatatactatacatatgatataactctttcaaaaaaaaatatacatttgatatatattgtatggtatggtcatctgtaatgcatataattcactatttgcctcaaaacaaataaaatgtatgaatagtcatttccaatattatatagggttatttgcggcaaaactctctaaagtaggaggtttttgaaactaacccctaattttaaaatttt

SEQ ID NO: 226994 - DNA, 3081 bp, Cannabis indica
ccaaaaattaatttcctgtagttacaaatttataattgatcttaaataaatataacatacacgatataaaaaaaaaattaactaaaaaaactttcatgccgaaatagataaaccatatgtggcttacagtactacatatataatattatataatcttaattatttgtaataatttgaatttgtgagtggtgatcatgtaataagtaggcagttgcagcagatatatctgttaacacataacagagagcacatgacttaactcaaaaagatcaaattattaacacacacaaattacacacacagatgcatataaatgatttatatataaatatatagctctttttcaagaataattaatctttttattacttcattattgctaataatattccctgcctaataaagctgcccaagaacccattaatttgtacttaattgaatctatctgtagatatatatattatgatcagatgtgtgtatatcattcaatataacaattttccttttaatttatttattaattatatatgcaaaaactttgttagatccatgtcttaatatttaaagtgaattgagtgtcaattaaatttttttagttaaaatacatgctaggttgaaatattttttttttataatggtatttattttttttgtaaatttatgaaaaatttcaaatagtttacaatgtttgaagttttttgaatactggtctgaaatatcaggaagtctgctgttgattgtaaataggaaattttttaaacacacgtggtaaattaaaatatcaaaattaaactttttttaatttttacagagttaatattgtaattataataaaaattatcatggaaaaaaatggagaaattttttttttttgaattgtgttttcggatgcagaaattaactaattaagattaaataggaggtttatattaacactatacactcgtgataaaaaaattcaaaattaattatgcatggtttgaacatacattacacataaatataattttgaaagaaaaaaatgcctccaaaatctgaatttgtaattttgtacacataaacaattaatattatatagataaacatgtgtatatcaccaataataattacctcaagcagtaaaatatttctcaaggttttcatgaaacctcatatatatatatatatatatatataatataattgctacacaaatcatttaattaatcgatatattcatatgactaacactagtacatgatgatcttgtactttaaacgttatttataacatatatattattagaaaattaatataaataaaataacaacgtactatccttaacaatatatttctaacatataaaactaaaaataataaaaaaaattactcaatggcgattataactattatagggcaccgactcatagtgatgacgacgatgatgatgatgatgatgatgaagatcgtgatctgagtagtcatgaaccgcttgaagggtatcgagtgaagacatgaagtgataagcttcatcaaatcttcccaaattattattactattaccataaaattgttcattattattgttattattttcttctgatccaaacatagaattattgtcacaattactagtactactactcccacctgagttagaattattaatcattggctgcaccttgttctcatgatgatcaatattgtaattagggttcatcatcatcatcatcatcatgtgatcatgattatcacttgtcaccatattgttgttgggattaggcatcttcatcatcatgttattagtttctaattgaaaccaattttgcacatctttaatgtacttttcattagggtttaatccattggtagtattaatgttgttcccaaaattttgagctgcttgttccttgattgatgctagttgcgcttgtagattaataacctaataatcaataataattatcattaattaaataattgaaatcaattatcaaaacaatttttttgataaattacatacgatcctgactattcaggatcgtacgtatttataacagtaattattttttaattattatatattttttacctgttgttggagagcgaaaatatgtgaaacgcaaccatagatgggatctttagagtctggcttgagcttcgtaggagatggttacggcggcccaggacgatcactgacgggaaggtgagttagaagcttagacacattgcttgccccgaagaccttgtgaatggcggcgaagtgagaagcgccttgttcatggcaaaaataaggtgcgaaaatgcaacctcttatacattttcttctcaagaatttgcaagctccacaaggagaaccagaacctgtcataattaattatatatattaattaatatgaactaaaattgatcaaagaactagggttttttatgatgatttttttttttttttgagagagtataatttatgtgctcttaatttataaaggtttattttttggggctatatatatagagagaaataagatccatttatattcttctgtgtatataaagactatatatatatatatagagattagagagggggtggtggtgatttgtatattaatgaataattaattgcattaggttcccttaatgggttacataatttattatttaattcatattttaatattaattaattagaattaaattttagaactctctaaatgagattcctccaacgacaaaaaaaggaaaaacataaaccaaacccatttttatttgtttgctattcatatatacattattattaattatatctatacatataattatttcttctaatttatatttatatttatatatatatatattgttagacatttatatgtataaactgaaatatatatgtttaagtataaagtgcggaattaatcaaacatatatgcactataatttaaggatcgaaatacctccagccattgattcttgagcttcaaacccacataagctttgatctgcaaaggaaattgactaccatgggtaatcgggcttcctcgctctctcaactctctttagatggaatttgctgttatgaacagaatgagtgaggag

SEQ ID NO: 226995 - DNA, 622 bp, Cannabis indica
tcgcttagttttttttacggtgcggacaatttgagcggtttgatgaacacccctatattaatcagtatgatgagttacactcactacacttataataaagatgtgtgcattcatccctttcaagaaaaaaagttgtgcattcatccctttcaagaaaaaaaagttgtgcattcatctcaaaggaaaactcatttaacaattattgcaatcattatcttaaagcatatggctacaaacttacagttattaccgtttattggacatcgtcactgcttaaactcttcgatatttcacaaatatgaaggtcaggagagggccaatcaggcccaagaccaacgccttaggcccaaatgaaaatggacccttattttttttaaaataccaacttttctatactcaaaaaatctcatttagaaatattattttggaataaattgaaaaatacctctatttgtatccattaatcaaaaatatccttatattatattttattgaaatatactcacttttttgagtggattgttcaatataccttcactctctacttaagttttacctataatttacattaacttaagaggtctaacggggatataatcggatatattttaaagaatataaa

SEQ ID NO: 226996 - DNA, 1316 bp, Cannabis indica
gttttctcccaggtacgcctctattttgcgctttgatttattatagtttacagattcgggttgtgcaatttcagactcaaatcaacttcagttcagttcctttggttgggtggaatagaatcacttatatttattatagtttggctgcgaccttgacaacaatatcatcggcgctgagcttaggagtcttcatcggcgtttagcaaagattgatgtctctacaattttgacagttttacaatgtaagcatgactcttaatgtgtttgtgtgcgtgtctacaatttagtcaattattcaggaattgtcgactgaataggctgtgggatgaaaataagggctgatgatcttctatccatgaaaaactttattctcagtgttcagaatagagtgactgagttaaagacatcctcgcaagagagccaagaaaatataaacagtaaaagggttagtttgtttgtacttttcttccaaaatagctcttattcttctcatgaattttttttaactggcttggtaatggcagatggagttcatgcttgaaacaatatgtgacataaaaaacaacaagaaaagatctaaagacgatccaccacatcacacaaggtttaataaatatttacagaagatttttgtactttaaatttcaattcttcttacctctggttatagtttttgtcttttgattttcattgctgaaatatattccagatcaggggatccagttcaaagattggaaacaataacccttctcctacttccttccttgaattctcaaagtcgctccaatggtgaatctcatcatttgcctttatttctttgtttgaaaggtattgttttatatacatacaatatatttactgcatttgatcattttttttaggtatttattgtattgtctaacttgtacagtttgggtttgtcaaattgataaaaaattctttcctaaaatttttgttccgtttccagatttgtttcgtctattcttccgacaggaagccaagagcttaatggaaatgaagttgacacgatcataagtttcaagaatgccttgggcattgatgatcctgaggcagctgcagcaatgcatatggaggtactcactaattgctacgtgtgatgtagttggcttcattgactttaactttgctcaaggccatgattgtgtttgtgtgtgtttctttcatttgctttaaatttgtgatccctgaaactgggttagtccttgttggtatccagattggtcgaagactttttaggcaaaggcttgagactggtgatcaggatggactcttaaaggaacgtcgggtaggtcttt

SEQ ID NO: 226997 - DNA, 994 bp, Cannabis indica
tatatcaattctaatatttttctatctatcaaaatgaattatatatataagcatatacatattcatacacacgtataaatacttaaattttgattatatgtgtttgcatataactttcaataaaaactctgattatattaaatgaaattgattagaataatctattatatcagtttcttatagctttttaagaaataaaattattatataagtatgtatatacatgtacggtatatgtattgaaaattttattttcatttatatgtgggtatattttcaaacttttaatgctatatcacattcatataaaattatagagtgattttgtgcatgaaaaagatttgaaaaccattaaaatctgaaaaatttctcttaaaaacacgattggacccgaaaattttttataaaattaaagtctacagtttacgtgtttttgatacttgaaatcaatatggatctcttaattcattcatttagatcattttggaattggtttcatgaattatggacgtcgggaaaaagttttttggccgggttttgggtcgggtctgtcgaacccgcgtgctgtaaacgggtcaaaagtgacctgactggaggtaggagatgactccgtacgacatgtcatttttcttatgtgaaaaatgacatgttgtttttagtagagagtttttgagcccactccatacgacgtgtcatttttcccttatgtggaaaatgacatgtcgttttcagtataaagtttttgaacccaaggccatacgacgtgtcgttttctcttatgtgaaaaatgacatgtcgtttttcagcattaactttttcgagtccgactccgtacaatgtgtcgttttccactaaatgtcgaaaaacaacgtatcgtttttcagggcagatttttcaaaaaaaaaaaaaggaaaaattctaaatttttataaattttttgcttatttagaatattaattattttcttattttgtgttaatttagtcaataaatt

SEQ ID NO: 226998 - DNA, 1149 bp, Cannabis indica
atgcctgatgaatcacagtcttgcattttttgtttttttcgctgtgacacttcaactttcaaccctgcttcttcaaactggaaacatttttcagttaagtcagcaagagataaataaataatatttctgtttttccatttacttagaaaaaaaaattagaaaaaagatgtctaaaatcaaaacatttcaagatgatatcaaacaattgttactgttacatgagtgaagatccctcaactcctaaatcctaaagtccaaattcagtgtaatatttcatacaaatgaaaccttgcaaagttttatttttcttccttccttcttatatttaaaatatggagtaatactgaatagaaaggatcatatgatactaattttcatcttaattgtaaatctgaatactatcaattctgactcaatacatatacattagcaaattccattacatgaaggatctacattataaatttgtcttctttattaaaaaaaaagttcaaatcttgattaaggccacagccagagagcaacaagtttgcctatttaattacctttgagtataataattttttttaataacaataaaaaagaaattacatgccttctcctcaagacaaagcaaattatcccttttgttaatcttaatgtcattcatggtcaaaatcatttttctaattggcaagatcaacatatgcatttcagtatgcataaataatatataatatatatatatataaattacagaaattatcaccatgtaatcaaatggaaccctgcaatgactgacctcggatctcagaagcttatatttccggcgaggagattgagggattcaatagcttgaggccgccgaccgacctgccctgcgcgacgccgacgactgagcagctccggtgtgagaaatctgggaagaagaggacgaaggatggacggagctttcgcttttttttttttttttagattttattaaaaatgtaattaaaagtatcatttcttttaattctaatattatgaaaataaaatgacgtggtggagagagagagagagagagaatggcaagtagcgtggtgagcacgcgcctgtaatggccaagtaccgacctttgtttgtgttttggccacgcgacatttgtatttgctctctctctctctcctc

SEQ ID NO: 226999 - DNA, 637 bp, Cannabis indica
aagagatgagaagaagaagaagagtacctaggaaaggaagtcgaaggaatgaagctgaaaagtgcgatgttatcgatgagtagaagcgaatgaagccggaagtaggaagtagggaccatcctcctcagtcctcccccaacaaccattattaccagctttgctttgctttgttttgctttcttccgaaaccgggctgggattgggcttttcaaacaggccttgttttgggcctactactactctcaaagttaaaaaataccttttttaagtatcaatttaccgaaagtacctgcactttaaatttgattgaaatatacctaattttacaagtacattacccaatatgccctccacacaagtctccttcatgtttcagccatagactccttaacgcacacaactccagcttccgccatcgtacacaagctccaccatgacctccgccatcaccaccaccatcaaaactacacatcggcaaccacaacctccatattgtcctttgatttaaatgtatgtaacatttgtctttccttttttaaatttgtattaatttctctccttagatctagtttctccctccaattttctggttgtattgcttatgtttatatttgtgtgtatttgttaggatcattgt

SEQ ID NO: 227000 - DNA, 503 bp, Cannabis indica
ttgtaaagcaagtgggaagaaagttgaaaatttgttttcggaatgtatattctcttataggctgtggctaaatctgttagaggaatttgaattatcctgggtaccatcttgtgttgttcctctaatgatagtgagtaagctaatacgaagcaaacgtaaagtaaattatggaggacagttgtaatggttactgtttgggcagtttggttagaaagaaataatagaatttttgaaggaaatgagagttttgtaaaggacttatgggacattttaaagttttggacagcatcatgggtttttaagacaacctcttgaggaattttctttcttaattttatgtagagaatggaaaactgagttgtagtttcgatttatgtgttgcttgttttgtgtttatgctaaaattttgttaccacggttttcctccgccacaagtgaaggtcatcaatatacttgagtggggtcagtctaatataagtggccctttcaaaaaaaaaaaaaaa

SEQ ID NO: 227001 - DNA, 1218 bp, Cannabis indica
ttttcacaacaaatagcagcatccacatataattttaacaatccaacagaaggtgttaagtgctgacgaatgagtaactcgtgagggaagagaaatcttagcaacttgcttttgtgaattttgcgccaactacaataatattgaattgctcaacttaaaactgcagaagcattcctatgtggggtgccatatttttttttattacgttcagtccaaatgcaccaatcaaggacaatgaaaacacatagctgatgtggcgataacactgacaagagatgatggtgaatgtcgatgatattccaagagagactaggcttaacaaacttccaaaaatatgaaagcttctaaacttgaattgagagaaggcaaaggaaaatagcatgtaggacatcatcaaattgtcaagtacaataaaagcagcttccagaattggaacatgatgagctaagagcgcatagccagtagaaagaatatcatgacacacacgccaagtgaagaccttaagttttttgagaatttccaaagaccacaaagcacgccaccactttgctaaaggaattgacgaaaaagaatttggaccagggatataagtcactggtagggaatatccactcttgattgtatagactccattttcttcataatgtcacatgacttgtatacaaaataatgtcaatatgtgaaaaaagaaattatagaacataataaagaatatactcattgactaaacaattatagacaaaacttcatgatcaaaaaataaagacactaagaggagaatcgaaacattcataatatacaattaaaattctactcccatatatgccttcactctataaataatattttgataattaaaaaaaattataataacaaaataatgttgtatataatggcgactcaaacatgtacaactcttaacgtaagttcttataaaagagaatgaggagtgttatcgtcaactttctattacaacctcttagttaacctttgtgcttaaaaacacatattgaaatattttttcaatttttttatggcagtatgcttacaacattatccttgtaaattttaaattttttttgaatagtttaaatgatagtaggttatatgaaaaatgtaaacaaagactaaaaatttgttttaatatgccaaaataaactaataattttatttgacatacatgagtatatagacgtttctgattataagatttctggt

SEQ ID NO: 227002 - DNA, 1044 bp, Cannabis indica
agaaaaatatatgtgttttataaaaaggagaataaaaaactctacctagggaattattaaataaaatgtactaatttttttttttctaaatagaaagttcttctagaatattctacattataaaatgtcaatttttctctgtgttgtatactcaaaaaggaaaaaaggaaatcactcaacttgttgttttcaattttttttttcttgaagaaaattatggaaatctattgaaatcattcctctttagaaattcttttacctaaataagttgaacccatttagtacattccaatttcaactaaattcattactttcattgaatccatcttttttaccaactctttaccatatactcactcatttcatactttattagtcacatctctagcaagtccccccaaaaaattggtttagtatatagcaattttcttggaccccaacctttaaatgcactaaaaaacttatttcttttttttttattcctataattatttctttatgtgtcatttcatttgatttaaagaagaaaaaaaaactttattatagtgttttaaataaaaggtgtcctatgtttttcaagtgttaactctctaattctaatctaatctactaatttactttttttttttttgttagcttttttgaaacattttaggacagcatttcaagtccatggaccattgaacacggactcttatgctgtaattggggacaagccttgtcacaataagctgttaataactttctttctcattttctcttttttaattttaatcttattattctaatcacgtcatttaatattttattatattgattctgatttgttgtgatttgtgagtatctatctatctaatcaccaaagactttatatacatgtatatctatgtgtgtataataactctgagattattacaccaaccaaatcgtgccatttggcacaaacaatctcaattagccaagtggtcaggcatgatttgcaaggtcatctaatcttcaagctatgccatccaagttttatacatcttatttaatctcttcacg

SEQ ID NO: 227003 - DNA, 929 bp, Cannabis indica
tattataaatattattaattatttataaaatattagtgttaaacatcactaatgtctaatataacaatgaatgctttatacgaaaacacatagttttgtggatactactacatttaaattgtagatgctactacaacattatataagtcgtaactcattacatgatgtaaatttttttgttaaaatatgaaattatgatgtaaattcctcttagaatattcacataattacttaatatatcctcttgcatgtttcttgcttatgccataattttttaaaaaaaaaaagttaattagaatttttgtcccctgaactttgacatgtgccccctgaactattgagttattagatttaaggacttttgtctaatttcattcaattttactacttcagtgattgtttatatactaaatcatgctccccagactttgatatctaccaaatcatgcccctcgaactttgacatgtactaaatcatggcacctggactttcatccatgttagtactttttaactaaaattaggaaaaaagtccttaaatccaacaatctaaatagttcaaggggcatttttaaaaatcttaaaagtttaggggacatgatttggtacatgtcaattaaagttcaggggacaaaaatcctaattagcataaaaaaaaatgatctcaaaataaaatgtgtagtggagatctcttacaaatcacataaatggaagatgattctcaagatgatcatgactttgactataatatgttaagcttcaactactattgtattaattcttttttaattgtaaatactttagattcgattaataattaacaaaccatgtgaatcgggcttttaactaaatataatatcttattcatgatatactcaataaagttttttttttataactagatatactctattaagttattgtttcat

SEQ ID NO: 227004 - DNA, 1859 bp, Cannabis indica
ttatattattttataacaatttgcatattttatcactaaataaaattgaatatatatgactaagcatacgtgcaatgcaatacacgtaactttcgcctattatagataatagatgatatacaaatttggaaatttctataataaaaatttatctgtttttactgtataaattaaataaaattgcaaaattttaattcgttaaaacaaaacaaaacaacaaaattataggttaggtatgattttaataatgactaaaatgataactacattagtaaaaagaaaatactaaggagacaataaactcaaatagataaatggaagaaaagagcaaagattttttctaaaacttgagataaggaatggatgtaggccaaagaggatgcacaagagtgtaggtgtataaggcttttgcaagacgatcttctttaaattccccaatttttttcatcctctttttcttaatattataacgataaatataacgtttgcgatgcaataaaaatattatattaccatcttgtggatgaaaagcaatcacatacattcttccacctttccattcctttttctcaaaatagtgcaccaaaatccaaaccccatcatccttgtggccacaatgattctcattatctaattcccaaattttcaaaacaaagccatctattttagttataacaaggtgcgaaagacgcaatttggcctgtaccaatccaatctgcacgagtgcacgagaagagctccttcttccaacaaggatgtcagaggggaagttaataaatctgcgatgatttacatctttgaatggatctaaaacaacaatcctaactagattgcctctattgctatcctgatctacccaatgcaagactccattatttgtaagaataggaacaatgaaaggatgtatgtgcgtattataactgttagtaaaatacgttatttgggaccaatttcctgtctctgaggaaaaaacagatactctatttttaagtatactatctacatttagatcttcaatcacattccacgttatgatgaccttgaacctgatttgatggaatatttgattatattgattatcctcattatcacacaaaaccaatcccccataagtaaagtagtagttgtcgtacaaaggatcatgaagacctggaagctcaatccattgcctggtgaatggattgcatataactataaatttattcctatcacatccaagcagtaacaaatcttgatgtgaagccaatatttctatatcccccccatggtataaaatttaaataaccctccgacaacaaaggcctttttcggtcatgaccataaaaaagttcacagaaaggttctggaaatactgatctgttggttactctaaatataaatgtaaaagataatgattgggacaaagagtgatgtcttactatttgttgttgacgataataattaaaattaatgattgagaaccaacgcttgcaaacaatactacatcgaaattgagtggcacaatcttggagtctaataaatatttccaccataatatcatcgttcaacattgtatctaacaaacaaatcttatcattcttctcttttcgtttctttctcagcttatgatatttcatcatctttctctttttgcaactcagttccattgaatttttgaacactgaaaaaatagaagaattatttgttagttggaaccttgacaaaataaaatcaaaaccatacaattcaaagtaaagatgagatatttattgatttgttttttcttaaaaaaaatgattaaattttcacaagatattataacttttaaatattagaaacagcttccaaagttttttatgaatgaaaagatattataatta

SEQ ID NO: 227005 - DNA, 1016 bp, Cannabis indica
agtcatggtagagacatgaattgtattttattattatgttcacatcgtagactttttaagtaaagaaagacaaaaaaaagaaagtagtgctcaaaagtgaaacaagtaaccgtttctagaaatagacttgggtacactatatatactatatcttgttttttagttgacatatattggaaagtgtaaatatcaagtccttcttttaggctgttgtggctattatattataataattagtatttttgttcatcacaaacttcttacactatttaagttgtgtttctataatgtacgatattaataatacttcttaaaatataattttcataatactatagtctttttattatatttttatttaatttaattttaaaataaataaaatagtaaatcataattaataaatagatacatattaaatacatttttatcatttttacgttaataaataatagaataaaagagtttttatttttattataatttataatttatttttagtttttaatcattaaagtaaaattagtaaaaaatatttgcatctatttatcaattatcatccaccgcgtcactagtttcacgataaaattgaatagaatataataaaaagatcatgatactataaaagttgaattttgatggatattattaccgagctttatactataaaaagcacaacttagtatagtataaaaaatttaagaacaaaaatgataattattcttattattataataataatagataatgctagatccacactcaaattgtacacaattgttacatacaaccatacacattaaatattattcatttatattgttaagtgagaccatatcaattttaattatatgaataaaattaattacatatcattctaggttagaaagtgtgtctcaattatttaggttacatatcatatcacttttcttacatttttacaaactcttttatttatatttttaagattttgtattgttttaatgttatcgcaaatgttatactatattttcgca

SEQ ID NO: 227006 - DNA, 1081 bp, Cannabis indica
gatcaatttcatatcatccaaactacaatttttgagacaattcgacgaggattattctgactcccaggtggaccttttataggagtcttgctatctttaatcaacaacaaagctgtccccataaacttcaaaacatcccaaaacgtattccaaaacaaattcaacacccaccaaaccctaagtactaagctcattaagtactttgcagtgaaaaacccaaagctcttgtagtgatgatgaactgcattattattattattatttttagctgtgggaagagttggcaaagcctcgggatctgagatttggcgtgtacaagctagtaagagagacatgagagatataccatctccaattgagtgatgaactctgaaaattcctacagcctctgcctctgaggtcttcacattcagaatgtggagatcccatagaggccttgatttgtcaacactgctttttgtgaggttatgaatgtaatcttccacatacttatctgggctaattgatgataaatcaacttcttcaggacttatcacgtgcttctccaaatccacttctgttcgcacccatttcatttcaccacccttaagtttctcatccttaacctgttatatacattacattaatattaattatatatataaaggaaaaataaataaatataattatttatgaaaaagacttacaggcaaactacagaagcgagggtgtttgagcaaagtgtggggcaaattggctttaacaacaccaatgtcaatcttggttttgcagcccatcattgctaaaatatgaacattaaagtttggttcatggaaaagttgacctgctggactcaatggctgatcttgatcttgatcatgatcatgatcatcacctccttctcccttcatcttcatgatttgatcatcttcatgatgatccatattaaattttgttttaagaggcctcaatctcagaccttcatcacaatatgactgaatatccatgatttatgatcaaatagtactatactcagactcagagcatatgtatgatataaatatattgaatctagatatggtatgtttatatatatatatat

SEQ ID NO: 227007 - DNA, 2413 bp, Cannabis indica
atcactgctgatttcccaaaaaaaatattaattataggaacaataatatacactttaaaaatactaaatactataaagtacactttagcattcctcatataaataagatactcccaaatttttgacaattgaaagttgattaatggtcctactataatgaaaaagagaaataataccacttctcccataattcatgtcggttggtatttattaaattatttagtaaagaatttcctattaattcaagtgctccccacattgataaaagtaggagtatataattttgtatcacaaaatcaataatataatatataaatatatatatataattttacatatgctccaccgaattatatttgccaagccatctcatcaaacactaaaaaacattaattttagtaacaattttttagttataatataaattttttataattaaatataacttttagtgacaataaaaaattacttatgattaaaatgtaatatttaaatataatataactaatttaattttaatcacaataattattataactaaaatcatatttagtcacaacaaattatgatttttaaaataaatactttcattttagttacaatataaaaataataatttataattaattattatttttttattatcagtaatttttgttgtgattaaaaataaattcttttttatcaaaaataataatagtgttttttatcatatattctaaataaaaaaatgataataattaagttaaatggctaaagtcaactatcttttgatcaccaaaacacatgtcatgctctcattggtaactctacttcaaaacttgaaaaattcaaacttaagaaagaaaaaagagaaaaggaaaaaaagatcacactaactcatctacagaatattatccacacaaaatataaataaactatgactattcccttatttcaaaccaaccaaattaagaaactctcaactaaaccatggaagaagctctcatctccaaaacccagctcacaattctctccttcctcctaaccctaaccctagttttcgcccttacaaaacccgaagatggtttcgtcagagccgtggatagaaagcttctagggctaaaaaaggaaagttcagccactttcggttcttctggcacgacatatacagcggccgaaaccctagcgcggtgtccataatccaaccaccgaaaaacacatcgaaaaatgggttcgggtcgattagcatgatcgatgatccactaacagaagggccagaactaagctcaaaattgctaggaaaagctcaagggttttatgccttggcttcacaaaatgaggctgccatacttatgtctatgaattttcatataattcaaggaaaatacaatgggagcactctcaccattcgtgggagaaacaatgtgttcaataaggttagagaaatgtctgtaattggtggaagtggtctttttaggttcgcacgtgggtatgttcttgcaagtactcacaaattagatgatccttctaagggtgatgttgtagttgagtataatgtttatgtgcttcattactagctacctagttgtataattcttcttttagatcatatattataattaatgttttagttttgttgattttttgaattagtttataacaaaatgataattatacactacaaaaagtgaaataaaattggtgactaaaagagaaaaaattgtaattatttataaatcgttgtttttatatgtcactacaaaaaattgttacttttagtgataattttttagtcacaacgtaaattttttgtcattaaatgtgatttttagtcacaacaaaaagttacttgtaactaaaacatattatttaattatatggttgtcactaatttagttttagtcacaataaatattgtgactaaaaacacatttaggcacaacaaattgtaatttttgtgactaatacttttataattagccacaatttttttatttttagtcacaaatatttttgttgtgactaaaaataagagtttttgcagtggttgtaactaaaaaatttgaacctaactaaaagtattaatcataaaaattataatttaatgattaaatatggtttatgtcacaatacatacatgtgacaaacttgacaacatgtatctaaaagttatatagtcacaaaaatttatattattactaaaatattgtcattaaatatagcttttttatagtgatacgtgacatgtttagtgacagtgtcttatatcatgtttatatggctcctttaaagtttcctccatgaggggtgatttcaaaaaagtaaaataaaaataaaaagtttccatgagtgggctaaagctatacatattaaagatataataaatataggtaatggcggcaaaactctactttcgttttggtttcactaa

SEQ ID NO: 227008 - DNA, 2381 bp, Cannabis indica
cataacagtaattctagctaaaacaaaattcaaaaacatcgacagaaaataagagaggaataaaccaaccttaatcaagattgtgtcacctcggaagagctggagtatttatttccgaaaatagagagaatacacaaaaagctcattatattttgccttataacagttatgaataataaaaaatcacatacacaaaaatgtataggaaatgaaatagatcaaggtggaatattagcatgtttgatgggatcattcatgaggcaaggagcttctcatatatagatattatcaagaacactattaacataatctaaaacaaactataccagaaatatttagaacaaaggtaaataatataaaaacttacaatatgatttgaagaaagaagcacatgagaacaaacaagatatgataagaacctgctgcaaaatattcaaaccaatagcaaaatcttcaaacagtagctagaaacagtagtaacaattgaacagtagtaatggaatagaattagggtccgtttggtacgccgtattataccgtattgtattatataatattatattaaattgtatttcatgcaatatttttatgtaaaattatatatgatattaacttgtacagacacataaatatataatattttagcataaattaaagtttaacatagtataatataaaaacataatatataatctaatttaatataatagaataaaatacattacgacctaatacaaccaaacgagccaagagtagggaactctccaatatatatattatatactaacctgttttcactcacaagcacccccaatacattgacccttttcatttattctcttattctatattctattaactttgggcctaacaagatagcaccactttcattgaattttcaacttggtataaaagaaatgtttggccataatacacatttttcttttaagtactacttaagcagccaagagggtgatcaaattctgaaattgactgtaaaagcgataaaaaagccagaaagctctgtaaatactattgttccatatattggccctgtaagcaatgaacagctccttcttataataagtcccaactaggatcctcaaataatgacagcaacaatatattaagatcgagagaaattttagaataaaacattatggaagtaaatagtcgatctggtatttgatatggtatgaaggaaataataagaacaaagtgatacctcaactctccctagagcaaaatctcagttataatatattttcataatccatctcattccttctccactcttatttaagctgcataagtggatcaagaccatttatccgagagcggattctttgaattactgcagccacacgattctgctggccggatgtggaaaggtcagatttaactgcatcacctttagcaacatcactgcttggaaatccatgttgagtaagcaaaggtgatagctcaggcaataaatcaattcctgctaaatgctgcgcccatttgtatggacgagaagttctcttttcatcaaatacaagagaatcaccaacaagaagtttggctgattggtggggaagctcaaggccagtgtcatcagggaataagttgcacaagatggtattctcaggcccttcatgggatccttctattccagcacatacgacgttcaacttcaacaaatactcaaattcaatggtgacaagttttgtagacttaggagcagaaacctcatcgtcatcatcatatacatgaagcaccacttttagggggtgaacttgatgttctatctgttcaaggttgtccttggctgaaattctccttgttcgttttctccttctctggccatcttctttctcatcagctgcatcatcctccattccagaattctccagattagtacaaattccagtgtcaacattagcttgttggtgagctaaagtctgtgcatccttcaggcttccaagtatctctaaatcaacttgttcaccgaatgcttctttctgggccagcaactgtgagtaaagcacgtagagaggaggtggaagcaaatctaccgattgctgctgcttcagcttctttgtatgcagcacccctaataggttttgtactggcattgatgctttcttcagagatttgaggtgtgatggaagactagacaagaactttttgcgattcacaatggtctctgaaagacttctcttctgctgttcaagtttttcacgaagtttgcatagctctttgcgctgcaaaagttctaaatcgagcctcttcaacatgagattgtgtgcaggatcatttctcagtacagaatttggtatctcttttggtgcatcacgaagaaactcttcctcaggcacgagctcaatatcagggtattt

SEQ ID NO: 227009 - DNA, 654 bp, Cannabis indica
aaacttatacttattttatacttaaagagaccttagtaaattattgaaaaacttgagatgttaaatttgtagttgcagattaataacacattgagattgaacggttgagattgaatttaggtttgttagattgtcgttttgagtgcacataactttaaagatagttatgaattgtagtcataagcagacccatatagaagcgagtgcaagacggcagtcgtctcttaaaaaaatatatattttagttagttacgatatatatttgtaataaaaaataataattatagatataataataattttggtgtaatgattaagcaagattatatatagaatatagggcattgttcaaattctactaagaaattttttttccttttaagtttatttttgtccacctttaaaaaaataaaccctgttactttaaatcatgctctaccgcttagtttattattttttaagtgatacaagggtaaattattctcattatttatttagtatttttttacttgtataatattttatcattatagatttttcatttcctaattgtaggaaacagctggcattccgaaaatgccccctacacacaacaccaacgttcaaaacagaggggcaaaaccgtcctttatattggtgcggatcacaaaggga

SEQ ID NO: 227010 - DNA, 1140 bp, Cannabis indica
tgaaatctaatttatactgttgctaagcaatttgaaagtttgtcaaataatttaaccaaattttaaaaagtataatggaaatgttccaaactattatttttttactctttgtagttattaaataaagatgtggtgttccaggcaggcatgggaggaatctcatgtcctttttccttgtgttaattcatcagcattcgttctgtcatgcttgctaacctttaacgatctccgatctctataacaggatatcttcagtctctatatggtgtttactcacttagaatagagaatgttgggttaagaaggccaccgagcgatgatgttaaaatccaggggattgcaaatccaaatgctttcagaaaggtactcatagtatcaatttgtatagtcttgtggctcaattttgacaaacatgacttacgtttcgtttttcatcttcctttcaggctgttttgatgcggctttcgaatatgaggaatgaagttttctctagacaagtttccacaattgatgatgtcccaaatttgagggtaagggatgcattagatacttgttatgcccacctttttttccttcttttttctgtaccatgctatgcccacattgtagtttgagaaatataagaagaaaatcatcaaagataaatgaatgagtaaagagtacaagtatattatgtaaacaataagaaaatgttacttcatagatataaaaagaaattatttggttgaagttggagttgacattttagagacagaacaaatagaatatgagccttgtctacaatttctatttgtgcaaccgagaggcgagatctgggcacatgttgttgtttcattagaaacctagtgtggatgttcaaactgtttcttcttctaccttttttttctcaatggtgttcacttcttttttctttaaattcttccttggctcagttgcaggcgtccccatcgaaatctctcaggcaagattcattttctcatccaggagatctaattctactgcagaagctagaggaggttggaacttctgtcaaggtagagagccaacttttggattatttaattataatctttgccccacttttctgactttggacatgtttttcttcattactgcagagagttcaaactttaattgagg

SEQ ID NO: 227011 - DNA, 863 bp, Cannabis indica
ataatcaatttcttctttatattttcttttttaattttttttgtgttgcaatatataactaaattatttgagttattatttttcaggtaatgaaatatgacgaataagggagcaacaaaagatagaataagtcaattaatatgggagaatcagtctaaattttcatccaacctaaagatttttcattccttggttttgtcattagtatttttcaatttttagaaaaagtttaatctcttatatcaccttttcttctttagattttcctaaaatatttgaggtgtagcccattgtttttattttattattttgacacatttaagtaaattttatagtattcatctattttcatcaatgtatgtagtttatttaatattatatagcttagagctacataatttggtgattttttttttaaatgatacaatttggtgattaaaatttaaataatggtttatatgtatgattaattatcgataatatagattatttttacttttttacattggcaaattatctaaaatatctagattttttaaaagattaagaggtaacagtttttctactagcaaaagtttataattttatgtggccatacatatagcttagtggtttcacactttaataaatttgaatatctttctcccaatgtcaaaaaaaaaaatatatgttacgtgtttgttattttttttttttcaattaaaaaacataacaaatatttttgtaatccataattgtgaatttttcttctttctttagaaactgtaaaaaaaattaaagaaagataattttttatttgtttatatgttattatgttacgtgtttgttatttttttttctatggtttgtagtgcatagagcat

SEQ ID NO: 227012 - DNA, 1639 bp, Cannabis indica
cattgttcattactactttaaaattaacacaatagttaatattattttttttttctataatacaataaaaaatatttactgcataagtaaccgtaaattataaatatatatatatatatatggatatgattttgtcacgtgatgtactttcacggaatgtattccgtggtacattagatgggtctcaaggtacattaaatgagtgttaagctacgtttattcattcataatttcaaacaataaatattacataaagaatagtaatcaatcagaacacatatagatatgatagttttctgatcaactataattaatattggagtatataattaatagttgatgagcatattatttgggaattgtggtggcaacttttcccatgggtgatcttgcctcacgggccttcctctccctggaaagtattccggcaaccctacacacaaattacatatgtatatatatatatataagaattattatttcataataatgttcacatttatatattgacattatttattaatatatatgagaccacatatttgtatataaataattatatatatatatatataccttctgatagcttccttcattttgtaacaccatgatgacaaggctcacaagaacctgttctctaaatttaccgtaagtaactaggttttttcaacaaagcctctccaactttgatgagattattcatgttttcatttgtggcaacatccatagaagccaccgtatcacgttagtgtatcatcctgcagcatatatatccaaatatcatcactctcaaccattaattatatataacatacatatatggtccacacataataaaatgtgtcattatgtaatttgagaagaaattatatatttaattggtttttatactaaaacgtgctcaaaatttaatgggtttcaaaaatatatggttcattttttttttaaaatggaaaaaaaaaattgaaagaaaaaaaaagttaataaaaatgagaaaactaatagtaaaagtaatcaagtaactaactagaagagtaactaattactataagatgagtataaccaattaccttatattattttttctatattttcaatttttcttaaaattttaccataaaataatgcttttaagaaaaagtcttatttttgaaaatttatatcttaaaaaccataaaaattaaattcttcctaatttaatatgatgatgtgttcagacactaagattgggtgggctttcgaaatttagcaagaaattattgtgccctttattgttttttttttttttgttatttttaaaattactaaaatatattaatacttttaaaagaaaaatatttcttttgagtccttggactggtagttagacgcaaaactagcccgtcttaacccaagcctgactgatgatgttaaaaactatttatgcgtaataacaatactctaaaattgaacaacagaaatcttcttacttggattcgaagataattcttctcagagtgaagagcctgaaatacagtagaaaggaaaaaatcgaccaaatcactacttgcttgagtgaacatgtcgacaagaggagtagaatggtggctggtcagccatcccacaacacccccatttagcagcttcacttgcattgtac

SEQ ID NO: 227013 - DNA, 3009 bp, Cannabis indica
atgaagaggatgaagaaggtgatatggtggtaggtttttttttagaaggatggtttaaaaaatgagaaagtgaaaataagagtgatctgatggggttaagggctcgagcttccttttttatttcagccaatacatattgccagggacaaccattgacgaaaatatcgtcagtggttgtcgctaggaatgtattggagggtaaaatgccgccaaatgcaacagttataatttatatttaactgtgaatgatgacactataattatgattatattagctgtgctgactacactataatcatgaacaaatatatatgttcgggacttaatataatttatacattaaatataatcatgaaataaatcatgtgaatcatgcaatataaaagcgatttctgaacttttaataattagtaaatctgataattttgaaatgggttttatttagggcacaaaacccaacaacccggacctaggacctaggaaccagacccaaacccaagacctaggacccaaacccagacccgagacccgagcccagatctaggacccagatttggacttggactcaagacccagacccgagactcaaacctggacccggacccggacctgcacccaagatcgaacccgaacctaaacccatgatcagactcgagatctgaacccaaacctagaccaagacccaaacttaggaccccatacatgaacccggacccagaccctggaccccggacgcggacacgaacatggactcgggacctaaacccagacccagacccaaactcgaatgaggacccggacccaaaccctggaccccggacgcggacattgacatggacttaggacctgaacccgaacctagacccggactcggaccaagacttgaacctgggacctagactaggaccaaatccaaacccgagacccaaacccaacccatagccgatattagagtcgagtttattgaaaatatattataactttacataatctattaatgtaagttaatactaagcataatattgtcttaaataatactaatacaatacaatgtaatacaatccaacacaatacaatacgacgtaccaaacaaatttttataatgtcgaccaataatgaagaaatacttatgtaagaaatatcaaatttaatttagtagaaaaaaaaaatatgtcttacaaaagatgaacgttctaatattttttaaaagattgttacggttaaattgtacaatgtattcaatagattcaataccacatatttacttaccaaaataaaattcccacaatgagattttaatcaattaataattaaaggtaaataaaaaagaaaagttaataataaaaatttacaataaaaaataaaattaaaaaaaatgtatgtatagattattaataggaataattacataaaacattaatttttgtaaaaaaaatttatatttttatggttattttattacatttttacaatattctataaaaaaaataacatgaaagtaacaaaaaaaataacataaaaaataatatacaaataacaaaaaatcaacaacaaaataacaagactgtacaacataaaaatacaccaaattaaagaccgtgttttatgtaaataaaattttaaaaatcataaaaatattaaaaattataattttgtgttttatgaagctgctaagtactgtcaaattaatggtcgatgaaatacaaaccacattagacatgatattttctagtcaaaactcaaacagcacgtacattattaatgggagttacttctggttataaaaaacagcaaggaacaggggccacaggccattattatatgagtagtaatatatagatcataatagaagacagtgtgtacgtaagagaaaacaactatacatacacactcatttacctctcactcaccaacccaaaataagaaattatgaatttatgaggtctgggtgggtatagtattgatttctctaacatctaatttcgcaagaattagttgggggaacttcaatgctacatgatagggtaggtaaatcattttttcatttttatttatttcacactgctatatacaagtttcaaactctcgtgatcttttcaacttgatgatacacaataattttttttattttgagtaataatattttagaaaattctaggatgtacttctaaaaattggtttaggatgcatcatcttctttgtatttgctgtgcaaatagtaaatatttaaaacatcttgtaaatttttaaaaaatttaagataatataaaagtgttaaaattagagttcaaacaatatattataagcgattttattttattgtatacttttgtaaaatagatagattgaactcaatttttttttacagcaaattatattaaatttcttaagtatttacagtattgtataaacattattatattatataaaaaaaattaaaattaaaaatatctaaataaaaatatatgaaagggtgtatcaatacattaatttttagaaatgcactatattttagtattggcaattcgtgtaatatgtattgtgtttcgggctagcaagatttcgccatgacgcgatgtataacacaaatatggttaaataacgtgttacaaaatgtatatgtaaatacgacataattctaatttgataatgacagatacaattaacataatttaaagaagttcatattaatcgtatctaatcatgcttaacctattttgactcatatttgcttatgctaaacccaaactcactaatttcataccctttttaattaagtcgtgttatatagtatcatgatttatattatcaccctcaaataaaataatgttgtggcatgcgatcagatgctcatcatagccaaatgacattttgttttaaaaaaatttaattttttatgcatataattagccaataatctatatatttatctatagatattaactggcgttagttattggttcttggttcttggatctgggttcgttcgggtgtccatgacgtcgagta

SEQ ID NO: 227014 - DNA, 1046 bp, Cannabis indica
agagagaatttaagcattaatcatctgcgattttggggataaggggagttgattttggggttcatgggtggtttgatggttttcgaagggtggaggggcggaggagagccagaggaaccatatgggtctagctaaggaagaagaagaagggtctatctagcccaaagtaaaaactgggaaaattcccgccctacctcaaatgtctaatatttagaaagtgaaaaaaatgttagggcacgacaagtcggtccaatatatcttttatattaaaaaaaaaaaaaaactcattaaaaacattggacaacttctacaatttcggccctaaaacccttttgctgtaggcctgattttttgtggtgcctaactacagcgtgcctatatttaaaatttgttgtagtgttaacataatcttgcattaaataatattaatacaatacaaattacacaatactatacaatataaaacgagccctaaataacaataatataaaaatatgatgtaataaaaacatgcatgcagaaaacacgcatggccgatcacattcacgcaatgaggcaaattaagataatcagattttgttagtaatatatataattatataattgtagcctatttaaggtgtgaaataggttgtgtgagtactgatcataaatcatgatgtaagtaatatcatattcaaaaatatatagacaaaatgatcacgtaacgtctttttttttttcttaactgatcacgtaacggcgtgatttatatttagtgagcaaatgaaaaactatatttattattttttaggtatagagtaacatatatatttattatattatacttgtctctaccagctatatagaaaaatatttttggtaggtacaggtctgttttgttacattaaaaaaattaataatttaaatatttttgtagttttaaaaaataaatatttttatataaaagtgtatattataattatttaaaatttctcacaaaatttttatagtattttgaataatttatgatatttaaaataaacttcaaaataatattttttttt

SEQ ID NO: 227015 - DNA, 3394 bp, Cannabis indica
tatatattattgtataaagtgtgaaattaataaaatatgtattgcactaaaattaaaaatcgaaatatcttcaaccattacttaattttatggtattttggaaagcattaaaaagtattatagtaagaaataatgttttccataatagtatgtattaataaaaatcttattataatacttttaatgcattagggaaagttgtattattaaaaatcaagttacttttcataacatattttatgaattatgctaaagtattgctgaaaactcttttataatactttttaagtattattttaatacattaatatgtttaaatgagtattatctttattatttttcatagtaagaaattatgttttccataataccataaaagtattataaaaatcttatcataatactttttaatggattaaggaaagttgtattattaaaaattaagttacttttcatagcgtattttatgacttatgataaagtattattgaaaactcttttataatacattttaagtgttattttaatattttaatatgttattaattttcataatatattttttcacttaaaatatcattattattttaatatttataatactttttgtcacttaatattgtaagcactattgaatatactacataacacttttttttttgtattatgttatcatgttcataagattaaaatatcattattactatagctttcacaatgatttacaataatactttttcttatgatttaagaaaataattataacaataaatatagttttattcagagtaataaagaatacaattacatacttacaaccatggtagtatatgaaaaaaaaaaaacacatgtatctcctaaaactaaatcatcatctccaagagacccaagctcctaacttgcttgacagtttttgcaacaatcttgtgtcatgttctttagtagaaatcactgcacaaaatgtgagcaaactattacctcaataattaagaatttatttataactcagttacctctcatgcataatcagtggccatcagttcttctctttcaactaataacagagattagaaacacttttaagtaagattcacaataaactaataacagggcaaaagattacctgatgtcacttttgagcaaaatctcacatgatatacttaaatcagcaatttatgcttcttttacaccagacttcaactccggagaagtaagttcggactctacactctccgtagctggttgtttgtttctaataaaataattactgtgttctattcgaattgatcttcccataaacgcctaagggggaaaaaaagacaagtcagagaatctccaatttaaaatgtctttatgaaatttggatgcagaataggtccatgcttatagtcacaaataataagatgaaataaacatgatgaacaacgctggcacctttccttgaacagagattagagctgcctcagattctttctttgatttgaaggatacatatccatataccaaggaattttgtatagtttcgtggaatataacttcagtagacactacgctatggccctcattgttgaagaactctttgagatctttatctgtagcatcatatgacaaattcccaacaaacaaattgaatgtcacttctcgcctctttctgcaataggcaattttcaaaactccaccctccacttcctatatcatttgtatttcttttagcagagaacatgacacagaaaagagaaagcaaatgttacaagtagtcctctattaactgctgataaaataagaaaagtcatacaaagatggtaatatagagctattgatttcatcatagtaatttaagtgtgtaaagattttatatttgtttcaagcaagaattttagatttgctttcagctcaagtgttttgtgaaagaattcggtagagtactgggctggaattcacacaatgaattgcagtataacatcattatttcgtgtacatcttgtgaaaaacacacatacagaaaggtatgcaatgcaataattaactttgtaagttatttagttcttcctataattatacattagcaaagaagaacatggctaagtagataacaaatacaattaggtacacttacaattacaagaaagtggttacttctgtcaagtgccaaagatttgctatcttttgcaaaatgacccaagtaagaaaattcaagctaaaattccgtacacatagcaattgagaggattaaaccagaagaaatatgcttacaaacgattggagattattgagagccgcaagagcctcctcaggtgaacccattgtaacaaaagctatgcccctgtttttgggattcttaggaagctaagccaccacaacaaaccagcacgaacccatatcagaaactcaaaaaataaccaaacaccttcaaagaaaacataccaaatcatactcaataaagtaaataatttcaaggaaaaacataacaatattggaaacctcaccgtaacgtctacaacagtcccgtacttgtcaaaaagagtacgaacatcttgggaagtgtaatccaaaggaaggttctcggcatacaatttgtctttatgaacttccctggtgtctgactcaagttcttcgctttcactatcaccacttaatggagaagactcgagagattgttcttgggaagtggaagtggaagtggaatggagagcgaaatcgttattgactcttttggtcgtaactggtgaaagttgaagtgagtttgaaggaaacctacaaggaataaagaaagaagaagagatgtgggaatgagattgagggttgttggagaggaaagaggtgtcaaagagagttgtcgttctatgggaaaacatgtggtagctggggagcaaataaggcgtagggaagccatggatgactactctgagcttcgagactcgaactgagtggaagcgataatgaattcaatttttggataaaagaaaaaggaaattcgattttggactagatgaaacgatgtcgttgtagatgatagaatttctttagtcttaaatatattaatctaaaataatcaattcaatcactgcattggattgaatccaaaagaataattatcttttttaccccttgtacttatgacactacactattatgccccttaatctattcagcttgttacaaatagtccttgtataattttatatgcatacatttagtccttctgtttattttgtttaaaaataccgtttgtattgatgatgtggtattataacaaaggatagagtagtaatttcatctctttttagaggaaaaattgactatgaggtggcataataattgacaatgaaagatgattaaaaaatgatttcataaccttttaaaaaaaatttaataaaaataatttaattaaaat

SEQ ID NO: 227016 - DNA, 3285 bp, Cannabis indica
cacattgtttcgcgtatttttttagtgttccacttgttgtttaattgtttaatttgttgtttacgttagttttataatggctaattagtaactttttcctcccgaattttgacatgtactaaatcgtgtcccctgaacttttttgaccgttaaaaattccccccaaactatcgagattgttaaatttaaggacttttgtctaatttcattcaattttactgtttcagtgattgtttatgtactaaccatgctccccagattttgatatctaccaaatcatgcccctcaaactttaatatgtactaaatcatgcttcttgaactttcatccatgttagaatttttttactaaaattagacaaaaatccttaaatttaacaatctcaatagttcaaggaaaatttctaacaaccaaaaaagttaaggaacacgatttagtacatgtcaaagttcggaggaaaaaattactaattagcctttgataaaaaataatatttttgtaaaaattctgcgtgacattaaaattataaacttttactcaaaatccaatatttttataaaaaaaactcccaaattattaaagaccaaatcaaatgaatctgatgccaatgattcagtcaattaactatttataattctctgtttcgatcgcgattttagaattctcatcgctagttcaaactaaaccaaactgcctaatttatgtgtatacatcaataaacttaaaataaaaagtcttccaaccaaaatagagcaacaaaaaagggtgttgaaagtcagatcaaaaaattcaaattgatcatatacagagttcaggccaaacatcacaatgaagattgtgttaatgctgaagagaaataaagttcatgtatgcaaacaccaagaactaaaaaaacaaacttggtgttgagaaccaaaaaaaacatatagtttgctttaaaatatagaaattctattaaaagtggcaaaactagtctttccaagtttccttactcaaccttctagaggcaaggcgtttagaagaagtgaggctcggagaaggctttgatggcgtcctcggtgtctcctcatcgtcccagtcatcgccccaatcctcatcccatccctcattgtcggtcaacttctgttttccaccaacagaaaccggtagccctgtgtctaacttctgataagtaaagccacctattgaaagcaacttcctcctccggaagctaacaaacaaccaagctgaaaccactattagcaaagcagcaaaggacatgaatgcaatggtaggtctttgcgctggaaggcctaggtatgcaaacttcggagaggaattctgcgtgatcagatccttaaagtcaaggttgcaaacgcgattgcctgctcttaagatgatcaggctatcagttccttcatttccaatagaaacctcaacctgtaaacaaaagcttcaagttggaatcagtacctgctttgtaggtgaatcaaacatcattctttgtgttttgatctgaaacagtattcgggtcatttctaagggtaattggcagcaaaacccccttatgttcttcacttcacttgtgtttgtaaatttgagatgtcagttaaaatctcaccgttaaagaccaactagattgccactatggacacttgtgtatactctacatttttattggtttcgagattttagtgcagcgtgtacacaagtgtacacattgacaatcacaggtgacatttaacagttgaatttaaccggtgccttaaatttgcaagcagaatgaagttaaaacataagaaggaacaccagcccatcaagctgggaatagtttagcaatctagtgaaaacaagtatatactaaacaatcatgttcttgctctactgaaccatataaccatacaatgggaaattccagttatgcattagtatggcatttagagagaggaaacttcaattagaaacattaaacttagccttagtgtctcaaatcactattcggttttgtctcgagtacctttgtgttttctttctttttaagttgaacttttgttctgtctagctgaacaaaattaggagctgaaatgtcaactgtaagagagtcattgcctttgttctgtattagaagtgaaagatggggtgattctgaaaaacaaaaaaggaaacagtaaaaaacatcgaaaggttatcgagttcaaaagaaaattcattcatcagcatcatgaacagctatattgtattcatgtaattatctgtaaacataaaatgaatataatgttctaatcattttgaccaaagaatctgtcattcaaggatcaaagttaaagagaaactgaacttaacaaactgtaatagaacataccatttccgggaactctcaaacaggcaaccaattggttccctgcatcagtgcacttaatagataaataacattcatcaacactacttcctgtagtctcctctggcaatttcaaattcccaaccccgacaacgccttgcttctcatcgctcttcctaatctcatcatttttaacacctccattttcttcttccctattccgatgcaagtccttcgcttcaacaatctcatcatccttcttattcttttcacctgactccccctttcccttttccacattgagaggctttttagcctcttcttcacttgattttcgcctatcttcgtccaatttaacacccgcattcaaatctcctttggttttagcttggtgaagacttttcttaggttcaacaacaatgacatctaccttcctaccattctccacactctgatctttccccaagttcttcggtttattcgatttggccttaaccaaactcgagccattcctttcagccccatttcctccacctaaattctttacttcatttctcttagtctgataatccaaagtcaaattcaaaccatttgaatctccacttctttctaaatctaatgaggttttcaattctgtatctgttgtttcattagcttttacctaaaattaataataaaacacttaattaagcacaaacccagattaaaattaacaacaattaacactaaagtcaaaatctttctctattgttttacctgaaaatcagcaccaaagaactgagccaaatgtaatgacagtaaaaccccaatcaaaagagctaatttcttctccatttttttgagagatataaaaactcgttcttcaatcaaaactacaaaaagatcctatttttaatgaaattgggaaccaaacaaacaaaacccaggtacgaaattgatcagattcttccctcaaaaaaaaaaaaaaa

SEQ ID NO: 227017 - DNA, 3609 bp, Cannabis indica
ataatattttagtataaataaaaatatattatcccgtttaatataatatagtacgatacaatttaataagatgtatctagcccaataacatataaaattagaaatttggccgccaataactggtttttatatattttttatagtaaagtgccaaaaacattataggaagggaaaagaaatagagcggggtttttaagaggtgtacataagataggtggcagcagtaggagctatgtaaagagtttttgcatccatatgtgtctatggcttattgcatggttcggcacatctctcgttctcactcccaaatcccaattccaaagctactcaacccctcactacacaaccttctcacttcctctctcttctctctctctctctttatatatgtatatgactttaccactgctatgataactccaatactcgaaccttcacttctcattctccctaacattccaaaacccctttcgttttccaccttcaaaactcatcattttctctcctaaacaacccatcatcgactttcgcttaaactgcatccatggctgcactcccgtccaccgttgattctgtaaactcaaacggtacgatcttttcaatcattttctgtgaaatttaattgggttgtctttaaattcttgttttttcctttcagcgattattagtttcggggctgagatatgttgaatttatgggtctatttccaatggaaaatttatgcttatacataaaactaattatccattccatgcacatgattttgtggccatttcatagacccaaaaaaacgaaagaaagaaagatgatcttgttggaatgtttttgtgtttgtcttttacctttcttttgagtgtttgattttctgttgggtagttctgaataatgattgctgctgtttgttcagttcttgctaatagttttatctttgcgactgagttttctttagccttttcttgttttgggttgtgactcaggttatgagaatccaacaggtttatggagcagatcatatcatgttagtatgaaccatcggtttgcactcaaaatttttttacttgtttgatcatgttatctccttattcatatttgtacccttgctctctctgtccatttatgcagagcgtctatgatcaaaatccttatgttatatttcaaagttacgaaaacactcctcaaatgtcgtacagaccatatgcttcctcttctatgaggcgtcatggccactttaactcgccacaaccatttcccacctcagattaccagtcaccagtttctccaaatgctcaatatggtgctgcattaagttcagttactcaggcagcattaccaattgagttcaatcaatgtacaaacagtgagattgctcggcctagacgaggtccatcgccacttgaatattctggtagagaaagcaaccttattgaaaattttgatggttttagtttgatgcagcaaggattcgagaggttaggaatcaatggattatggtcagacgtgtctaaacctatgaatgatcagagttctctaatacaaatgttacctgcagctacttcttcaaagcaagttgatttacaggaattgcctgaacttagttttaaaatggttagtttcagttcaatatataagttgattggaaataatgccaatgccctgtttaacagctctttaagctactcatacataattttccttgctcttgtatattttatctgagctgaaaaaatcaaattattcggtgagaaattgcacttgcctccaaaatttgatcacagtgatgctgtgtagatattttagtgtatggtctaactgtgatttttacaggcttttcaacatgaaggactagtatatggctccagttcttgtacaagttcctataaaggctactgtaatgatgattaccgctgtagccataaaagtgtatcaaattacaggccagggagtaatggacaaacctggtctgtaagtaaggaggccaaggaaggaggaaagcatgatcttttatgcagttgtacaggtatgctagcaacacaaactgctcaaaataggggtcctagggctttgaagaaaaaaagcctgactgcaggaaatggttccatcattaatgaaagcaagaatggaacatccccaaatgtttataatgggaatttgaatctgctggactcttccatcaagtatagggatgcaaagttctttgtcatcaaatcttacagtgaagataatgtccataggagcataaaatatagtgtttgggcaagcactccaagtggcaacaagaaattagatgctgcatatcgtgacacaaaagaaaaagagcaagacattccaatatttctgctattttcagtaatttacttccaagtctttaagctaccatttatacgtctgaacctgaacaaatgtctaaatcattcgaagtttattagtgaactatgtgtagcaaaacaagggattaatttagtgatctgatgggcataggtccgaatggagtaatttaatgaactttactggcaagtttatcaatgttattcatttaagcagtcttctaatttgcatttcagaggagttataatttctttgtgtttagcgttaaaagattacaggtcctttggttaactgtttgtgtgcatgcatgcatatttgatggctcgtattatttctttattgtttttgctgtattattgacacaggttaatgctagtgcccaattctgtggagtagctgagatggtagggcctgtagattttgacaacagtgtggactattggcagcaagacaaatggactgggcaatttcctgtcaagtggcatataataaaagatgttccaaacagtcagtttcgtcacatcatactcaaggacaatgacaataagcccgttactaacagtagagatactcaagaggtaagaaataatatacaggacctgaaacttttgttacatttctagccatggagttctctgctccattttatctttttggctttattgtacgctttatctgtatatcaatgtgatcagaaaagaaataactatgtttaaagtagagtttttccaatggtgctagtactactagtatagtatttaatcgaagatttttgcaggtggaattgcagcttggtattgatatgctgaacattttcaagaactatgaagctctttcctccatcttggatgactttgatttctacgaagaacgacagaaatcgacgtgggtaagaaaggttggtcggcaagcaaactcaacttcgttgcttgaaaatagaggtaagatgctgcatcatcccaacatgtcaagtcactttccattgtcttactcaagacaatgttaaacagctattcctgatcaacttgtcattttaagtgtgaaattagaagtagacaaaaggggagttctttttttaagactttgagctagaactcagtagacaaaaggggagttcttttgtaaaactcacagctacaaaactaagtagaaagtattgaggaaaagagtgtcaaaagcccaacattctccattggcttctcttttttcttcacatattttggtgccttacatgtgtgtttttttcatactgtgtaatgtttatacattaatatatatattttt

SEQ ID NO: 227018 - DNA, 3451 bp, Cannabis indica
tttcttaaaaaagaaaaagaaaataccatcaatagagaatttcccaaattaattataatagtccacatacaatcaacacactatgggccgggccgggcctggccttagtacaaaccccccttccctgttatgtgatttatgagtccattcaataccagtcgggcccgcgtaggcgctaattagttcctctttccatttttgttttgttattgaatttaattttaggattttcacaccaaatttttaattttttatagttttattgtgtactgtattttcactattgttctacactattattctacttgttatattattgtttttaattattttattttgttattttacgagtattttataataagataattattttttttgtaaaaatttaacgtgatagtaaaattttataaatttttgtctaaaatctaatatatttataaaaaccccatatttaattttttttttgaaagaaacattaattattcttactgggaccataaaaggtaacaacctagaaacaacccaagaaactgagggagctcagaatgcttattttgtttttctgcttgttttctctgtcagtaaaaattcaataaaacatataataaatgtgtgtacgtatatatatattataaatatagaatatgatatcatgatatgaaaaagaggagatgaggggccacttgagaagaatttaaaaaacaaataagagagccatagtttttattattctaaaagctaacaacagtagttgtggagacaacaatggaaagtttttgcaaggattcaacatgaaatgaaatatttatagtaaagacaatgatattagattttaattaacctactcagactttggtgggctttgactgattttgatctacattccttctttccttttcttgaatttgttgttgtggatgcacctttactaaaatgggaatgaaaaacaattgcatttacaaaactccacttgaagctttggagttatactatcttagaaaatatttggtttctccatgtccatttgtaagggagcttctctttttttctttctcatactaacttgtcagagtcagattgtgccatggaagccagccgaatccaaaagcaccgccttgatttgctcgggtagcacctcctgcccttctctgcattgctgttgaacaacataaaagtttaagaccgaaacaaaggaaatgatggaaacagtaattaaagatatggttttgggaagagaagcatacctcagctcggaacacatctaaagcaaacccgttgaagcagctgattacagcttgctgaatgtccaatccaaggttgtccaaagccctcatggtagagagcaagagacctggtctccgagcacaaaacatgtgaatgttaacagcccttccttccctgagccgaacctccacctgcaagaccgaaaaattcattcccaacttaattgtgtttatgattgattatcttagctcatacagttatcaggttgtcaatatatgttcttgttaagttctcattctcacagagcaaagcaaatagagaatgttaaggagaatcaaggtctaagaaaaatacccttgcaggttggtttttagggctcggtagggagcctgggaacagttcttctttgacacggcagggaagggtcggtggtgttggtgtcaaagggtgaaagcttgaagaaggtggcaacaaagagccaggaggggttgactctagttcattatgaaggtcattaatcctctgaagtagctccttcaagtagtcaatggcatccccgagtatcgaagctctatccatctgtgataaaccaataaagaccatgaagaaacaaaaatggacactacttctaattgttacaacatattgatgaatcaacatatttcaaatccttaacaaagtctaaacttttagcttattattcaaagcatatcaaactaaaaattacaatatattgctggatcaacatagttcaaaccaagaagtaaagaccatgaacacagcattgaaactttaaagagaaaatggacactactaaaaattacaatatattgatgaatcaacaaaattcaaatccctatcaaagtctgaacttttagcatccactcaaaatacaataacataaaatatgttgttcaaattccaagtctaaattttaagctcatattccacaaactagacttcctccaacagaattatgtcagcccaaatcttcaataacattgattgaacattaatagttatgagacaaaattgaaaatgaagaacacatgaaccaagtgaccaaataaacagtgttgtaatgttcaaaaaatcatttcatgagaaataagagacacataaaattcttaccttacttattttggggacaacagacctaagcatgtaaagcctatcattaagtttcttcctccgccgcctctcagccatcaaattcttagccggcaacccttttttctttcccttctgatctcctcctccggtgacagtactattagcattagaattacttccaccaccatttttgttagtattatcctcaagcttactatactcattagcatcatcagaatcataattaagaccagaaacatcaatactctcttcaatttcaccatcatcaatactcttcttcctttttttctcaaaactctccaaacttttcccaaatctggtagaagctgaaacatccaaattccccaacttatcagctccacctgaattttgcctgagcgccgcccgtttctgaaacagagttggctgagcacccaccggaggaaaaacctcaagaggtctcaaaaccttagctctgttgttcagaaacagagcactaccagccgagccatcaaaaccctcgaaacccgtcggactaaacccacctccgagtgcagcggcgtcgtccgataagggaagcaatcgattccccggaaaatcagagctagaactcaattccggagtagttccacccatctgattctgctgcgaattaagtccagcgaaacccatcaaaacagggttgttgagaaacccactttcacagctcaaatcaaagccattatcaaaagggttgttattaacaacattaagaagagaagagaagcaagatttagcttgtaagaagttgtgagagtgagatgggtcaagattgaacgcttgagaaggagaacaagaagcagaggagtcaattggttgtaagagaagattattgttatgatcagtaactgggttattacagaagctaatatcatggtgattagtagtagtattattaggaggtggaggaggaagagaaagaccatggagatggtgagaaggagttgggttaagagcattattcatgtaccagtcagtttcgagcatggttttgaaagaagagaaagaattagcacccaaacccatttcttcttccttgttgttgttgttgggttcaacaacaactccttcg

SEQ ID NO: 227019 - DNA, 1622 bp, Cannabis indica
aaaaatcaaactctaaattattgataattgaagataaaaactaaaagacatagcatataatttcctactatacgtgtgaacatgatagtttcctaatatgatgtcgatctagaagataaaaaccaaaagacatagcatataatttggtaataaagtgacaccaaaaatcgtaaagtgcaatttgtcatttgtcacacatatgcaacacgagagacaatgaaagcaaaaggctttccgatagcatgtccacactttctaaatagactaaatgagataattaatctcacattgatatcagatacaacaactgctacttactaccatagaactaacagattgatgaaagagagatatccactacttagtatgcaaacaatgagattgaaaaatacattatccgttaaagagtatgattcttcctcatcatgtcagcaaatgctaccacagtaccaacaggatcaatctcaaatagcttctcaactatcttagtgtaggctgtcttgtggcgcttctcgtctgtagctatggtaccacatatttgtgccaatttcaagtccccatgctcctttgctagcctggcagtgttaccatgggagataacggtagctctttcttggaattgagtacagatgaaaccaagataaggattgttctctgtccggcgatcctgaaaacaaagagacattagcccaagtaaaagacaggccctttgaacatttttataggcttaacgatagagaaaataaagaacaaaggtacccaccattccagaaccgatcaaatactgaacgatcttctcaatttgcgacagagaaaataaagaacaaaagtacccaccattccataaccgatcaaatactgaatggtcttctcaatttgcctcatatcgattcatccactgaggtaaagatacttgttgaggaggtcaacatgcctgttctcttactgcgccgtatatcaccattattggccaatgagcgtggagcgacgaggtggcggagatcgaaggagcatttcaaagatcagaatcggatcacaataaatccaatagaataaacaatacatttttatacatcacattttgataaaaccaaaggcaaatacctctcgaatttgaatgcgccagatttgctgttatctgattggatatgaatccttggcttcatcgatttgaggaactcgcttcatctaccattatttctgatcaaaaccctacgactaaatcaagtaatcttcaaaaaagaattgacagaagattgagaaaaattgtgaaagaaaaattgtcaaagagggttcctttttggcgacagcttgtgcagaggccactttatcttcgcttaattaattttctctaacatcaatcacccaaatattaaactcaaaacgatcaccatgaatcataataaaaagaaaatcttttacaaatccattatcctcacaaattaatatagctataaaattacccaagtaaaaaaatccattatcctcacaaattaatgctaaaatctcaaaattagcaagctttattaaaattaggtttaaaaaaatttacaagactcgcgagaaaaaattccttaaaaaaatatatagaaagagatagtaaaggcacatgacaaaagtgc

SEQ ID NO: 227020 - DNA, 4136 bp, Cannabis indica
attaattttcaatggagcttgagcgctaatgtcaacacataaatttttcctcttattttggctagatgacccaaggttttcaaaggctaaaggtagcatgtggtgtggtggcaatgacattttggtaaatcttaataagcattttagttaattattttccttttcaattttattgccttgcaagcaaatctcacagttttagagagtgattttcggactctaaaataatgggtctcaagtaggcctaaactcaaaaagtataccatcaaaatcatttattagtcatcatatgctattttctttgacaattaaatttactaaattggatcgtttaagtgtttgttgggtgttggctttgttcactcagcataaataataaaaaacaaaacatctttaatgaaattacatacaataaatttaaacgaaacaaatttattattacatgattatcacaattataaatatatttttagcttttctataaatattttaatttcattttcaaatttcaattttgacttaggttggatttatctaaaattccaaacctaaatataagattttgtcaggttggatagtgttacttaactaaaattgttaggacattttaattttgttattatcttcaaattgttttcaaatattagaaaaagaaaaaggtggaaagaagaggtggtaacgttggtggtcacctttttataatttgtgcctatattctagctaacttctttatcatctctccaatttcaaaaaagcttcaaaaacgaacaaagtgaaacttcttgaattgtatatataaagataaaaaaaaataatagagtatatatattaacgaaaaactattgtacggtatttctaatctttactctctttctctctctcatttgttaacctcgacctcttcgtagagaaacccaccaagagaaatagtggctttatttgtttgccttctcattcttcaaaagggttgagattgaaaacgtaatacatggctgcgtacaaaactgaagatgagtatgattatcttttcaagctggttttgattggtgattctggtgtaggtaagtcgaatttgctttccaggttcacaaggaacgagtttaatctcgagtctaagtccactattggggtcgagtttgctacaaagagtttgaatattgatgggaaggtcatcaaggctcagatttgggacactgctggccaagaaaggtggatattttctgctatttttgtttgatttgtcgttttttcttacatgggttttgcttgttttgccttttgatcgtggctttctttcatttttatttgattcttgtgaaaatatatggtattgattgtatgggttttgattatttggtaagatggtagctcttttgagatagttttttgtgctattggttattttgttttgtattgtgggtatttagtgggttcgttcagggcattaagactggttgtttcttgtcaggattattttcagttttgtctctaaataaactatttttgactttagaagctatgtctttgaaattttgctcaatttgtttacttcttcatcgtttgctatatattatattctttaaatcgatttgaagcttcaatgttgaaagtaccgattatatacaaatttgagccattatatttatttatttaattgaatatgagtcattgtatttaattcagggaatgttttatttggggatgttatttttccgagaaatagttgaactaaagcctttctatctagtaaaatgtttatttccttggctaggaagagtggaaattgtgagttatggtgggaaaggcagactgatcataaataaggggatttgtgtatagtgctgtgatatttttgctaatatcatacatctgtaatagaaataaatatttacacggatggctgtcctctgaaaaacagatttttaccagctttaacgtaggcatttacaggtcgccaagatgaaatggtttcaaaactccagttagaacttggtggtagtaaattgtaatttaatattttcttgttacgtttacaatgaaaattggatattcttctattgaggtatatggagttgatgcctcagtatctagactttcctgagatatttaggagcctgctgtaaattactaaaccagtacccaaacaaaccagtagcaaatagaaccaccagctgcaatagtagcagcagaacagtagcaaaatagtagccaaacagtaggaaaattatattgaatataagagagaaccaattacaaactagggttcattgcggcataaatgcccaaagttttgagtttgtaagcggtataaacctattgatttttttagtgacataaggactcattgttcgtaaaactgtaattttcttacagtttcgttaatacatagttcgttctgaatttattaaaagaattttaagaagtaattgatgctatatgtttccatctagggtattatatgtattttgtttaagacactaatggagtatgtaatgataaagctagacaaaaattacagttttactaacattggatacttatgccgataaaaaaaatcattgagtttatgcggtttataaacttaacactttaagtacttatgtcactatttacctttacaaactatgggaccccttaggcccctttgatgcaaagagttttactcaagtcattgcataccctttctattctcttacctgtatatagtaatttctcacacaaaaccactccccaaacaaagactcaaatagtctttttatttatttatgctatcacaccatactaatcgtagtacctaacataaacgacctcccgtgaaagatgatagtgtcatctgttagctgctgttaaagtgcaccatagttagagcaatttgaggaagctcatgggatggtcgtgcaacaggatgtatacccgtcaataagtcatcctcgatcaataaatcaatcgagcaacgtaatttgccctcctttcatcaacaaaatgagttgaagttgaagcaaagtgactcgtgaagaagcctttggcctaatttcgtctcaccaaagagtgacaccaagcagtagagtttattgccctctgtcgaaaatccaatgctggacccgcactaggatggcactccacttctcaattattgaaggtatccgtagaactagatcataacaatgagaagtggaaatgttaatagcacatggcagtgccacacctatttcaaaaattgatccttcagtttgccaccattttgcgacttgggaagtgactctaatcaaattatataccaccacaaaccaataaatcaaatttggacaatcattatgacgaactagtggcattctccctcctaaaaacttggtccactctatctcaattgataggttaacattataataaaaaaaaatatctaaatcattgtgtttgaagaagaaacaatgaaatgagcatttactgagtttaagccgagtagtttcttcaccttgaggaagttgacgacaagggttgatggtgaacagatcgtaacaagacaacaaggcagagagcgtttgtccggatcccatgtctctaatgtagtcgtgaccccctccccaatgtgcaacggcggatccaaaaaggtatagcatccactgcttccttcgtcgcgaattgagttcttatgtagggcaaaagtcgtctcacaaccaaaactcacgttcagagtacaagtgcccataataccaacccctcacagtgacccaatagatttatgtttttctttatgtgggccagatctgtgggttgggtctagatttgagtgcataaacttgggcatcgtattattgtgctgcaagggattgtttaagaagatagatttaacgaccccttttccttcatcgtcggcttcagaaaagtgatctatttgccactttgttggtgaatgctaaaggtggtgtcgttagcaccatgatcgactgccacgctagcgactaagatcttactggcggtgcactcctctctggcatcatctcccttacctcttttttctcttgtgatagaaccatcttcggagttgtatccaacacaaccttcttctacaacatcgtttcaagcaaatcctattgctcaggtgattccaccagttgacagacccaatcgacttcaaa

SEQ ID NO: 227021 - DNA, 991 bp, Cannabis indica
gtcagaaatgtcatgacattattggatggattattttgagtgtataccgggctagtttagaaaattaggtcgttgttttggcgggattagttaagattaccaatttacccctagagtatgtttaatttaatttatgggtgaggggtattttagtcttttcaagggtaattgttttattgtcttttgataagtggtgggctgattattatgggtggtatttatagttttaaaaaaaaagaaaaagaaaattaattaagaagataaaagcctagagaagactaagtcaaacatcacctatcttcttctcccttccctcttgttcgaaccctagaaaccagccacaagcaaggattttctttagcttctccttcaagtttttggaagatttgatcaagctttgggactgtctaagtgtaggggtaagttttcctacctatttattaaatttccatgagttttgggtgtaatattaagttagaaattgtttgaattcaggtctggagtaattgttgaattgttgaatgaatctgaaagtctagttggattaaattaagtatgatttattagttattgggttgaatttggaaatattgagttttgaactcaagctttggttttaacttggtgtttcatgaaattctttggagtattgttaattgatatgtgggatgaattgattttatggtattatattgctttgggaagtttgaacaggtatggaggagttttgtgtggtttttggggcaaaaactaggaaatccgtttctaccagctgagaaaccggttgaccggttttacaggtgctgtaaaaccaatcaatcggttttgacagtgggagttagatgtctagttatggagattagggttggatttcggcgtttggataagttatttactggattttgttgttgtggcataggacccgagatcgtcaagcatagttccactcaggtcggcccgcatacctgatttttgaattgaggtaagaaaa

SEQ ID NO: 227022 - DNA, 1003 bp, Cannabis indica
agctggcattacaattgcataacagaaaaggaaaaagcaaatcaaataaagtaaaggacaaaaatagaataacagaaagagaatctccaacaaagcaggagtattaggcagtgaatggttaggtgattaattagatgactgattaaccaatgaattactctgtcttaacagtttccactttaacattgcaaaagacaaaataatgatcttcatgatcaacgaaaccaaacctggctcgagttggaagacagttcgccaaaattttccaatgatggaataactgtctagagtgtgagttttgtttccaaaagtttgtccagccaggctcatgtaatctcttcgcttgatccacctagtaggtacttttggccaaaaacaatccaaattttaaagctttccaaaaaagaatatcctgaccctcttgcaaaggcttaatattcaagatagccgaagctatatctgttaaaaattacttcacaatgagcattataaaaacataatcatataaaagatttaaacattaataattataatgctcaacaaacaacccaaaatcaaatcattatatttagggcattaaaagataataaacatacctctctagtgtgtattgattttatcatgtgatttagatccttttacttgatcaatcatttctttcaatttacacatcaaagaaaatatatgtgcaaggggtgtgaatgaacactactcttttcactctcaaaacatacatacccacatacatcccttagtcaccagtaaggagcatgacccctcttttataaggattagtgggtcttttggtcttatagtccaaatagagagaattcattgtcttggcccaatgggctgaccaaaaacgctttagagcgtgtccatgggccccgagcgtgttagtacggtatgtccatcccattatggctcgatggcaataccatgcattaccgattatatagtcatcattatacgctaatattgacactgagtgagcaacacttaa

SEQ ID NO: 227023 - DNA, 1128 bp, Cannabis indica
tttttgaaaaaatattttcaattttctcgtaaaaaaaacagaaaactaaccaaacacaccttaaataaacatttttacctataatttattctttttctcgtaatagtatttttattacttgtaattttcaaggatttaatttttgtaagttttatgtttttacttcaaaataggatttttaatctttgacatgcactaaattatacgcctttgaacttttttgaccattaaaaattatgcctgaattattgaaattgttaaatttaagaatttgttaaattttatttaattttactataattcgatgattgtttatatactaaattatgctcccaagactttgatatctactaaatcatgtctcttgaactttgacatgtactaaattatgttttcaaactttcagccatgttagaatttttttactaaaattggaaaaaaaaataccttaaatccaacaatttcaatagttcagaaggatttttaacgactttaaaaattcagagaacataatttaatacatatcaaaattcgaaaaaaaaacaaatctaattatatatgtgttcaaaaaaaatgtttatgtatatattaccataaattttacaattttattttatattaattaattatttaacaaaaaaaaatgatcaaacttatttttaattggttaatttatatctgatcaaattttgttttgtttttatggatttatatttacaagctttaattttctagcaattcatcatattttgggttgtctccattgttttagcctaacattttaatttcttttatatgtatgaactttatgttgaatgtttaaaatagtagtactaataataataataacattgttattaagcactttaaaatatttaaaactatattgatggatatagataaatacatagtagttagcagtttttttttataagtaactaaaatattaaacattaattgcatgcaaaatacttcttatgatgtttaacaccttataaaatgtcaattgattagtatttctctaaaaataatacttgtttaaaataatatttgaaataatactaataagaaatgccaatttatcataattctttaaatgtatgattctcatgaaatgaagtaaaaaaa

SEQ ID NO: 227024 - DNA, 705 bp, Cannabis indica
tttttttttttaaaaacataattatgttataaagtacttgctaatatcacacccaaatctctgctgtcatttttgtgtgtgtgttttgagtgggagaaaatacagtcaaaactagaaaatcacatatgacaaaacaatcacttaaattgaaagctatcatctattcatgcttagttatattatgattcatagttcaaagcattcatagttcaggttggtaaaatgaaatttgttttttttttttttttagtggtaagttaggctggttaaaatcaaatgaaaatgaatttgattacctcaaacttgatcataaagtcagtgctgtagccttcccaacattttttttttattatgtattttgtatatattaaattggtaaaaaaaattatacctagttatttataatttgcccttgccccctttcccctcccccccaaattttttttcttacaatttgctcccttaacgtatatttctctctccgccactaaaggaagcatttctctttatttttaaactgccaaagaaaatttgtccaaatgtggtcccccaacactaaggtgtataacacaattgaaaggaatcatttcccattcaccatcaagcatggtcaaccgctgctctccttgtgcacaataaagtggcacaggtcggccacaagtacggtgttagaaaccatgtgtgagcaccaccttgccttctggt

SEQ ID NO: 227025 - DNA, 915 bp, Cannabis indica
ctgtcgtttgtttgtttttttttttttttacaaatggttgatttttttttttttacaaatggtttcggtattactgcagttgcaatatgggttggtttgttcttgaaattaggctatgatttttgaggatatcatgtgatgggtttagaatggcatttagggttgcaaaatgtgtttcaattttgggggagataatgagacgtagggttgaaatatagaatcaaatggtcatgcgaagatagatagacatttcagatgaaaggttacataagaaacaaacacatggaagttcagatgaaaaagaagatgaaaggagaaaaaatccaaaaaaaactactcttaccgaaatatgaagaaacaataaagatgatctacaatagtgtgaatcaatccatagagaggaaagaaaactccatgaaaaagatttttctgctattcaaagagaagattgagataaaaagtgaaaatagaaagtgttttttgtgtgatattgaaaactcaaatgagtacttcttattccgtaaaaatgaaaaaagaaacttaaaataatataaaaataaataaatgaaagaataaaaaagtaaataaaaaataataaacgtaaaattaaaaataaagaggcaaattaccgtatagaaggtgatttccctttttattttgtatacatttgagtcaaacaaaattatcaagaaaataaaccaactgagcaaatagtacaaataaaagtaaacaaaacagtaaaatcaagaactacaaaaaaattatagagcagcaaaataataataataataataataataaatacggaaagcaacaaaacaaaacaaactagaatactctaataaaataaggtaaataccattttggaccctgtgttttgcaaaagttacagattagaccctgtgttttgttaaa

SEQ ID NO: 227026 - DNA, 1696 bp, Cannabis indica
atttcctttgcagatcaaacttatgtgggtttgaagctcaagattcaatgactggaggtatttcgatccttattcatagtgtatatatgtttgattaattccgcacttaatacttaaacatatacatttcagtttatatatataaatgtctaacagaaattgtgatatggtgtgttcataattgacctctacattttataattaaagaatattctgtagtcttggtactctcagacagtactaataaaccaacggcgtaaaacaaagatatgatcttatgatgagttcattcatgattcatcctttactttttttaagtagtatttattaactttaattatatatcaaaaaatatatcatttaaataatataaaaaaatataggaaaaaaaaataaagaaagttgattatatagtatatggcgtaaaataaaaaaaaatgttttgtggtgatgtattttaaagttaaaatgctgaaaattgaagacaacatacctacttttaggcacaattgtactcgattttaacaagtcacataatctcataatcatcaacttaaattcataaatgtatttaacatttagtaacatccaaagaaatttaacatttggtaacatccaaacaatttatggtttttattcatgtttaaatgagagtaaaatgtatagagcatattattcccttgtgtaacacactagttacaatgttgagtacatagaaaactttgtaaggatggatgaattattaatttgttagaagtagtttttcttcgtcccgttcttcaaccttgtcaggctgctacctcatattgactctcattaatatgatgttgtttgctttttgggcctcacggtttttttatgcactttccaaaatgtcttatattaatagaataggtggaacacttatatttaagacaactttggcttattgttccaataaggacttgggttgataccccaacaattttagagatttttagaagaaaggttttgaatcttacttatgtcttaagcattcttcttcttttatgtgtttcttatgttcaacactgttgtaatatttctctcttcttctcgtgtaatattgattctatatttattttttaatatcgagtttttgatgtaatcctccatattctctcaagtgtaatgaaaattctccaacaatctaacaaaaatcatctttatggaaatagtctttattatacatgacacaatttgttatggaatcacatacatattcaaaggaaactatacatggaaggagaaccatcaattgagatcatagaaaaagtatctattaatgatgagagatttcagtaagcatggtaattttattttatgataatactacataaataacagtgatatattattgtgtatttgtgataatatagctgattccaacattttatatataataaaatgatcagatttcaaagtttaatctcttcttttcataagttcacacgtgaaagcacatgtagttaggtacttaatttatggcccattggagccgtgtatggtcaaacaaattcatatcatattatataaacaatagctaatgtgtcccattggagccatgtatggtcaaaattttatatgctactacactctcactcttttgaattactacattgtgttcatcaatcaatctttcctttaatcctttctgagtttttgaagatctgatggc

SEQ ID NO: 227027 - DNA, 977 bp, Cannabis indica
gcgctgtgacaaagggtcaagcctgagcccagctccggtcggtggtgcacaggatttttcaagcacaaccacatcccagcctgctgagatgagtgtgtgggcgcaggccactcctgctatgctacctcctgctgagatgagtaagctccatttacttatagtaaaagttataaccaccttggtttcttaatttcttgctgtttttgtatgacctttctttggtatggactggccaattgtaatgtagtatattggtccaacttccaattcatgaattctcataaattgaacttttaattatgaaattccaaattttatctacttttgaatggtacccattaaatggaaataagtcaattgtgtaatgaagctatatatgatactattatattttcctgttaatacagtcttgtagacatgaatgaagtttcatttcattccaacactttcattcttctctcagtaaactagaacctagtttaacagcaaagttagaggcaaagattctagatttaatggttgtctaactacaacttggttcaatcaagctcttcaataattcatcaattcatatgtatgtagagaaaaataatcaattcctgatgagctcaaattgaaagaaaaagaggctacaactcaaaaactcaaacttaaatataaataaatgctcacgagaagaagttaaaactcgaggaaccgcaggcagaattggaaaacaagccgaaacatctggtgctggagccgaagctgaagccgaagcaggaagaggtgcaagagccggaggtggaggttgagccatttttgttgagattgaaaccctattcctattctgtttggaacagtttttatgattatgtggacaatcagagctagggttctatcatattctctttctcttcccaaattaataagattgattacttattaatggtaagacaaccacccaccaaaaccgcatctctttactcttaaattga

SEQ ID NO: 227028 - DNA, 545 bp, Cannabis indica
aattatatattttaaagaataaaagttatgtagatgttgtaaattttatgttaaacttggattaaaaagaaatgagttactgctatatttgagttaatttttgtaattatattacctttttcatttcttttatttattgatcctactattaaaatgttttattctagtttataagaagaaaaaaaaatgatttaatctattttcattcttatttcttgatgggtttttgacgtacctgagaataatcattaataaaataagtctctactcaactattgtaattaagtttacataaatatgttaaggatattttcttattttgtttattgaaaactcgttctactctataatcatttagagcattgaaagtacaccaatttattaaatttatgtagaatctttatactattttattttaaagagacactaaattatattaaatgagtgtacatcaatttcacactattagaatattttcaatgatgcactatttataaagttgtgtagaatttttgcatcttcccactcaaatgatacattaaatt

SEQ ID NO: 227029 - DNA, 1179 bp, Cannabis indica
gccattcttctccatctctcttttcatctctttttaacttttagttttctggtttaaatttgaactagttcttgtcatagttgtgttgtttatgcttggtatcttatgttcttaatcctcctttgtgtgattattaatcacaacaaatgatatcagagcaagatcagaattggagtgatcaagaattatttatttgaagaactctgctccaagaaatcgatccagaaatggcagcagcaaagtatgaagttaacaagttcacaggtaccaatgacttcagcctttggagaatcaagatgagagccttgttagcgcatcaaggaatttcagaggctattaatgttgatgcactcaaagcaattgaagatgagaagaaaaagacggagatcgaagccaaggcacactctgcaattctcctcagtcttggagatgaagtacttagagtagttgcagttgaagaaaaagcccttggcttatgggataaacttgggacaatttacttgaagaaatcttttgccaataaactgtatctaaagaagagattgtacaccttgaagatggaagacagtaaagaactcagaagacacctagatgatttcaacaaaattattcttaatctgaacaatataggtgtgaaagtgggagaggaagattaggctagcatcctactaatttctttacctaaagtgtatgaacactttgttgatacaattccttatggcaaggacacccttaacatgtcagaagttaagtcagccttgaactcaaaaggagatgcaaaagaaatttgatgaaaaactagaaattggaggagaaggattgtttgttaaaggcaagcctgaaaagaagagtttcaagggatcaaaacactccaatgagaagggaaactagaagacaaagtccaattctaagtgtttccattgcaaaaaagaaggccatttcagagatgaatgcattgctttaaagaacaagttaaaaagggaaaaagagaatgaaataggtcaagctgaatgtaggctacagatgggtatgattttgcagatgtcttggttgtatctaatgcagactctggccaagaatggattcttgactcgggatgttcattccacatgtgccctactgaataattgttcagcaatcttgagagaaacaggttgaactgttttactaggagacaac

SEQ ID NO: 227030 - DNA, 2254 bp, Cannabis indica
aaaaatcaattaagaacatactgaattaaaacgcaaacacacaatcaatcaaataataattgagtttgcattctaaaatatgaatatggataaaatagaacatgattgagccatgtatctgataaacagcaaaataatttttcttcctcatagtttgatgatgataaaaaaaaatctataaaaactcaactgaaacacccttggtagatggccaattatacaacattattagcttcagaaaggaccctcccactttgatgagagtctatggattcctaatagctaatataatgacttagagaggcaagcagatatagagactgaagaccttatttcacatattcattatagcatactaataaaataggagggaaacagccatacacgcatatacatacatatatatatatatatatgtataaagggtactaaaagccaaaaggaacaaaaaaaacaaagaaaaactggaacagagcattcttctagccattcattgttgccaatcgcacaatggctttaaacagagcaacactatggctatcatcattcatcaatataagtattaaaaaacgttaatcaagtaatcaagaaaaaagacacttacccacataggtgttaaataagatgacagctcatcaaagaaaggcaagaaagaggctttaaatgttttgatcaaagtccccaatatctcacccacctgaacatggaaaaagatgtggttaaaaaaaaaggagcaatagttattattgtgatacacttggagatagcattaagttactaacttggtcaaaaacttcttcctcttgttcattttcctccttaatcagctctatttcttcggcatcaaaatcttctgctttggccctctctgccctctccctctttcgacttgaactagcagtgatgacctgctttatctcatcaacaatggatctgacctgactttcatccaatagtggtccagaaatctaaaaaagaaacagaaaacaacattacaaatcattctacaaatttacaagagcattgaaaagattctcaactcgagctaatcttcacaatattcatttagttgtatttcataataactggtaaacagactatcacccttcaaatgaaacattaaagaaaaatcataacacaataatgaaaaaagttgtgcatttgaattgcatgcgtggaagagagaaaactccgtgtctgagtccctttttgaaaatacattgaagatactcctcccatcgatttttttatcattattattatttattagcgctattaaaggaactcccttcctgaaaatcctctttccttgttaatgagaaatcggagagacattttggaattgtttcctctcagttgtgtttaatctgctgtctctcttcttcctgattactacattaaagtcccattcaaatttttatttccatttaaacaccgactaaaagtgcaattgcactagttagatgtattttaattcagacaaagagcatatttattttttacaaaagtagaaggaggccattgtcttagacaaagaacatattgaaggtacagggttttagaaagtatgtacatacataaaatatagtttgaacacaactaacctgcaagcattcatttaaagcgtccaacatacttgcacaaatctccgtatcaggttcctgcatacagattcaacgtaagtatttcaacaactgcataatggcatcacaaaaaatacataatataagtttgagtgagactaaatgggcaataataccaccttgtgcaatgcttccaccagagccggaactatgtaatcagataattgttttatataggtctcatttcgaccttgagccagccccttctctatagctaattttgctgaacgcagtagctccggcatggctagaaccaaaagaaaatcataactacaagcttctaagctaaatggggcaaaaagagtgataaaagccatcaaaagtaaaagtggaatgaaaacatgtattgcttgttattggtattacctgatacagctgctttcctaacttcttcgtgaaaatagaatttcaaaagcggaactaaagtaggagcaacctaaaaaaattatcgaaaccttatttagtaatcaaataataaaaaacttagctacaaaaaagaggtatgaatcacaacaactaacctggtcaatccatggaaagaatccttccttcaactcgtcggcatagcaacacagcatattacaagctgtagctttttcctccaacacgct

SEQ ID NO: 227031 - DNA, 2419 bp, Cannabis indica
catttattcaacatattgatattatacagaaacacatgaacatggcttcattgtatatataaacaagttaatgaagtatttaaatataaataaatattaaataaattgactattcttttatttcttctttggatggtgttagtcaacacgtatgaaaatagtttatattttaatcatttctacaataagaaatgctaaaaggcaccagtggtgccaaacaccctcttatgtgtcaatattgctattggtttaattagtatcgggttccatatagtttaatataatagtttttagggagtatcgttaaaaatcgtaagacgacacgtcttaagggtggtgggcaccaccgaatgctctttctacaattgcataattttaaagcaataattaaataagcaaagctccttagatgcatgtttaacaatttaaaagaatgagaaaaagtagaatctcaacctaccgaatatataatgaatcttaattattgcacaagttttgttactacatatgattgccattaattttaagaattatgggattgtcttatgtatttatgtttggttgagtaataaaatatgagagagaaaagtgatggaaaattgggaaaatggatgatttggtattaaggtgaataataattatattgagttttacaaaaatattactagatattactatgagaaatggttagtttttacaatatgttgctctaggtacatttttttgttacacagtttatttagaattaaatttagagaaatgttagtattcctcaaggtgtcatatcgttattaatgagtatcatatctcatatgatataatttaataatttttatagaatatttataattatttgtaaattttttctcatagagattacaagcactactaatacttaatagcaatacaattaaatgtgacttttactaagtagtaattaatgcactcaacgaaaaatatatttagtcacaatcattactcaaatttaaaaccacacgacctcttgtgatatataatagaatgtgttatggtaagccatcaaactcttatgacaaaatgttaagaggaaaatcggttgctttgtagatgtccttattaccccttagctaaaatcacaaaagcatgtggtgatgtatgtgggtgttgtagggcacacatatagataattataaatatatatatatatatatatatttatagatcttgttagcaagtcacactcactattaggatcattgagcttacaataatatcatcattttttttaatttcaaataatttgtctaggactctactcaccaaaggcaaaagcacttgagagttgtacatgtcaatttggtggcttaaaggaaagtgagatgaaattgagtagtgtagtgatagttttacaaaattaggtgtaatagtggagtggagagagtgagaacttgcttcaaaggttgctaaacttgatttcaactttttgggaacttaaattttactcaaaaattcataccaaacaaacacactacaatactactatgcatgcttgctttgtaaaatggtataatatcataacacatttcacttataaattcatgtaatgaaaaacaaagagataaaagcttcaatactcattctcacttctcagacatggcatgctttgagagagggtctccagctctaaaggaaatcctgcttaaactataccggtaagtttttgtccaatcacataacgacacgtaattgattatatatcactactaaatcttactttattatgtagcaatgtatgattggaaacattaggatttctcttttagcaaatggggtcatagaaataagatgtcaagaaaagtaatacacacacagagacatgaacatacataggggcaaaaatggagtcttatacaatgatattttgtagcatgaggttaagaagtaaagtcaaatgaatgaatattgaaaaaatctagatgttattgaagaatacatagaagcacttaggcagacaggaaaatatgctttccagatggatgagcaatgtcctcagaagaaatttatggtcagagtgtgaaacttgtatagaatgggaccaattgaaatagtggaaattccatcatctttcactaaaaaataaaaatgtgttgtcacatctaattccagaagccatatttcaaacttgggataatgaaaaaaaggaaaaatagtctctaagtactgaataatttttctgagtctataggtatggaaaattgtgtaatatgattgtaatttggatgtttgatcatttaacagttcgtcctgtcaatccttcagggcctagataactcgattttctcccatgaactatttgtatcaatggattagttcgattcaaaacttgagataatgagtgtaatccgaaaaaaattcaaaagttgttgttaatgtagttgaa

SEQ ID NO: 227032 - DNA, 1639 bp, Cannabis indica
aaagtatttgcatagcctttgtagcattattgcttaatgttgattatatgttaatctatctcagagatgattagataacatgtgattaaggacctgaaagatctgaaaagagctaggtttattttataatctgtcattcacattgagaaagagaatagtaataattagcattaacaattgggtaattaaatcaacgggattcttttccctaatttctcatccttgattaaacacctttattgctttctttaattttcttgtttttctttattttaaaatctatcataattatttatctaccaaatagaatcataagtctaatttagtggtattcaattcaattccctgtggttcgacctcacctgcatgagtttactacttgattacgtgcacttctgtattgttcataattttcgtaacaccttgaaacccgagcactgaccccgaacctagacctagaccctagcctacttaaaccctaaccacaaacctaggcttgaacccataccctaaccctagacgcgaactgaatcttatttcttttcttgatgacatgtattaaagatactcaattacaatattttcttcaaaatcaatcttcaattacgctcatagaataattcataagaaatggaaaaaataacaatcaagtttcatttaagcttatgttagtgtcaaagaagaaaaagttttaatgttaggctcaaaataaggaactaaggatacaacttaacaaggttgggttgaaatgactcaatcgtttaaaaaaaaaaaaaaaaaaaaaagactacctagatatcgtatttctaaacatgcatcattcatgattccgtttcaaatagcaagcaagttctagaatttacacatttttatttaagatgcataaaatacactcaattgcaaaaaattgacctagtacactataattttcattctcatttaggggccttcgtcaaggggatcctttgtctccttacttattcattctttgtgctgaaggtctctctgctttattgagaaagtacgaaagacaaggttggatccatgggtgcaaggtggctaatggggcacctcgagtttctcacatgctttttgcggatgatagctacctgtattgtcaagcatcagaaattgaagctcatcgggttcgagaactgctgaccaaatttgaaagggcatcaggtcaagaggtgaatttatcaaagtcatccatcttcttcagcactaatactcctaccatggtcagaaatgttattagccagagactacaaatgaatattgcaactgaggatagtttctatttggggctcccaagcaccatgtcccgcaaaaaaaccgttgtccttggctacctcaaagataaagtcaggaaaaggttacaacaatgggaaggcaagttcctctcaagggctgggaaggaagttttggtgaaaactgtggcccaggcactaccaagttatgcgatgagtgtttttctcctccccaaagaaatcagtcgaagtattgaaagtatgatggcgagttattggtggcagactaacaaggatagtggaaaaggaattcattggttgtcatgggataaactttgcaagcataagaaagggggaggaatgggatttcgaaatctgcgggattttaa

SEQ ID NO: 227033 - DNA, 1094 bp, Cannabis indica
gtcaccaaattcaatgtacccttagcgttgagattctccggagcgaaatcgtgcttaataagaaatccattcgtttggttgactccggaaccgacctgccaaacttggttaagagtcttcgctttctccggtaccttaacggtagcgaagatcgtgatgtttccgtcgacggattcagcgctaagtccccaaacatcgaaagaaagcttcgaaggaacgatcgatctgtaggaactgatgttgaaagtcattacggaaacggatccgttggagtgtttaacggcgatgagagattgagctccgaccatgccggttccggtcggatttatagcccaggctacccaaccgttaggttttgaaggaggagcggtgaatgcgatggcgagagatgagtttgaagcgtcgtaagtccaatggagggaagcggataagactgggaggtcggagcagttggagaaggacttctttccggtgaattactgagatttgcaggtcgtactggaatgtgcaggtgagattagcataacgcatagtgctaaccctaggatcagaatttgaagagttgaagacgccattgtagagagagaaaccaagctttttttttgttagagagagagagagagttgtgaaggctgttgtagttgtactgaggattatatataatggaggagagagaagaggaaatgggcttattgacattctgtggcgtacgaacaccacgggcctttctcaacagtgaataagaaaatgacacgtggaatcacgacacgcggcagtgtatgattggagtatagattttgtttgacttaattactctattatatagttgaccatgaggtttagtcgaggattgcggggtgtatcacgctcattaaatgaatttgaattttaaaaattggattaaaattaggggaacatgtggggaagactttctacttacacattttattttattttatttttttctaaaaataaaaatgaaaatccgtttaataggcactaaattaaaataataatgcttttaagaaagtaaaaataattaacaataattctcaagtgaaattttcttactctcatttcaaaagaaaaaaact

SEQ ID NO: 227034 - DNA, 761 bp, Cannabis indica
ttatctagaaagtttgctagtgaaaaatataaatatgagatgagactaattctagttcacaagaatgaaagaattgagtaagctttacaactaggcatcctagtggataatccttgatgacgtggatccatgtgggccatacactctctcttatcattcatttttttttatcatcacaaaaagtcattctttatcatcatctaatcatctatcatgagtggctattttaataaactcttcactaataaaaaattatagtattattaaagtatatttaataatagcatcaaaatggtagattcctttgttatttcttgaaattaccacctaactaagctacctttctttctttggaaccccacttgcccctcttcaaacatctttttaatataaaattatactacatgaaaatgaaaattatgttgaagatttcttaaatgattatttcagtagatttttttttttttgtcaattttggcattcagaaatattttttggtctatttatttttataattacgtacgttgtagttatttaaaattacttataaattttttaaattttaaatagtttataataccgaaaataaaatttaaatagatacctaccatgtatataagaaaaaacatatgtttaactaaatcttattttcgacattataaattatttgattttttaaaaaaataattacagatagtcttaaataactataacatacacgattataaaaaattaaactaattttttttttcttaaatatc

SEQ ID NO: 227035 - DNA, 955 bp, Cannabis indica
gacccgctcgacccaatcggagatggagaattcttccctactgggcttcgcggtccatcagttagctcggttgcaatccgagcttggccccgtaagatcaaatcaagcttctccctaattaccgcgattccttggtcatgggcagtgatcttctccttcattgaattccattcctctgaagctggtgcttgcgattcctcatcccctgctaccgattgaacctgctccatcactttctttgagcttcgcgtgttcgtcattcaccaagattacccgctctgataccagttgatgtaccctgctgctatgaattaataataaattgcagtaacaatggaagatgaagagagaaaattacttcagtgagtgttatttaatctcagaaaaacagaggattacaatttagagccctataggacccctgctgtaaagagaaagtctcaatacatgcataaaccccttaaacctcccaaaccagcatataaccaattacaactcactcaacaattacaataataccctcataaagtaaaagaccacattacccttgagcaatagcgttcttacctctcctaacataggtaaaacgtaccttagtcctaacaaattgggatttattttctttaatgtgtaatgtgaattctatatatgctagatatactagctgaaacaacagcttagtgttatcgagaggtactgtagtgtttttgttttggaaagaattgtgttcaccattttttccttgcaagtgtaggtcctatttgggctggaatatgcacatttgatacagaacatcaaagaggaagtgatggaagcttgtgagtctagatcccagttagaaatccaatttgcagacattatgtgttcagaaatcttaccatctgataatctaaacctatgcaatcatggagtgctaccaactgaggaattgactgataataaaagttttggggtg

SEQ ID NO: 227036 - DNA, 1098 bp, Cannabis indica
aatactcactgcttgatcgaccccatcacactccttcctttcttgtttttttttccttataattcagagaaaagatttattaaattattaaattaataatataataaagacaggcaatatgagatcccatgctattcatgcaaacaatatccatgcagatcaaattgcctcaaaccctgaaatttcttaaccaccacacaaaacatatatacatatataaataattataatattctctaacagtagtgtcttataataatttagctgttttaggcaataaatataaaaacaaacatatatacaaacaatatctttgttttatagttgatactaatcaatttgtttttgttattttcatagaagttaattagaggtactttatcagtttttgcgatatttgttggattaaaatggactcgaaatatatcaaaccaaaacattattctctaattccttgtctttgatgttagctctaaatatttactttgtgtatatcttataatgagctaggtattctttttttagacattaaagttttgttgttgttttttttttttaagtatctctcgtctactatattaatcgtaactttaatattatagttcatgaattggcaataattaaatattctttacagataaaagataataagcttggatagcaaaccctcttctcttcctatatatatattaatcgtaactttaatattacagttcatgaattggctacaattaaagagcacttgacaaaaatgtacgtatatattattattagaattagattgcttatatatatacgaaatgaatacttcaactgctcttttgtcaagtttttgtgtatggctttcaatctcttatttcatatatatatatataatatatagatacataatatactatattatatataaaataaaaggtagagagaaatagagaaaaacacatggagtgatggcatatgtctcatatatatctatatatttttatatatatatatatatatgcacccactaaactccaaaagatttgcccattccttgttctttgataattatattcttcttatattattattaggtctcttcttcttcttcttctt

SEQ ID NO: 227037 - DNA, 647 bp, Cannabis indica
tgttctatgttatatacaaatagatcttgggtatattattaattttctaacactatctacttagttaaagcagaatatttacagagaaaatattacggtttttgctcatattagttaaatgcaaaattgattgcctttttagaaattaatttattttcttttagaatttggtttaatttgtgattatttttgtaaatttaaatggcaggatgccttaaattaataattcaataaattactaattgagtagagaagtagaacatataaattgcttagctagtattctattatttgagataagctatataagataaccatttattaatttattaaattaaatacataaaattttatattaaattgcatctattactgtataacatctgtacgtggtgttagaactcttatttgagattccgaatctgccaccctatcaatattttcccagctcatatttcatgctaatgattgaccttcctaatacatgattctgaaatatatgttttgttttatgttttcgattcagccgcaagttatatatccgatagagaaatttatcctaaaagttcaaaaataaaattaaatgggtgatataatcaaaattctcatttacctttttccttcttgtgatttacctaagctatata

SEQ ID NO: 227038 - DNA, 1092 bp, Cannabis indica
aaaaaaaaaaactattttagaaaatataaaaataaaaaaaacttccaaaaaataaataaaaaacacgacaaaaaaaacaaaataccgaatttacaaactgtgccaacttaataaaattgttgggacatgtatttacagatatccctatccatgagtttagcaacttcaaagatcattacaaattattatacaagaataaatcttttgtatgaaaacaagaagaagatttgtatattatttattatgatacaaaaatgtcactactttgatttctaaccgatattgaatccctattatgaggtttagaagatagaacttgatggtctgaacccaaagggataataggtcgaatgctacctggattaagtggaaaaagtgttccatagtaaccatccataattgctggaaagttacaagtttcacccaccttaggaatctgttccaataatcaaatcaaacattatttttattcaattcaatcagaaataaaaagttagaaagtaaaggaatgaagatgtaataaatagtagttgtacctgataaatgtcacacataaagccatatagatttgggtactcaatgatcttctttttggtgcacttaaacaaaccattgtagacaagatcaaatcgaatcaaagtagtgaacaaacaaacatcagttagagtaagtttatgtccacataggtatctcgaactacttaaatgattatctaacatgtctaatgtattaaacaactccttcactgctttatcgtatgcttcttgactctgagcaaatccacatctgtataatcaacataaacaatctctattctcaacccccaaaaaaagcaagaatgagtgtgtgtgtgtgtttgccttaagaataccacattggtagtgtttcacactactaagttgtgtccttatgtggcctaacactaaaaactaaaatttagtaatattttttactaaaaataattgaacagaacactaaaaatttaaatttaatattgtttcttactaaaattgatccaaccaatgaaccaaacattaaaagctatcttatatataaaattggctacagtacactataaactacattaaaatt

SEQ ID NO: 227039 - DNA, 1091 bp, Cannabis indica
tagaggtgaacagtgattcgtaactggtggtcaattaggtgtcaagagaatatcgaacccggggagaatatcaattgttagggaattgctgcaagaattaaggaatataaagtggagtaaattccacgagaaaaaaaatgcccatgcagactacctagccaagccagcctcaaatagtgcgataaagaagcaggggtggtacctgttgaacaccttacggaacctagcattagggccaaagaaacagtggctactaatgggcaagggtcggattggatggaccctatcattaagtacataacaacaggataactacctcaggaaagaaccatgtctagaaagctacagtaccaagctcgccagtatttaatgatcgacggtattctctatcgaagggggctcagcatgccacatttaaggtgtgtgtcagatcctgaagctagacaaatcatgcaagaagtccatgagagattttgtggagaccacatcggaggcccaagcctctcaaacaaaatattaagacaagggtatttttggcccacaatgaagaaagattgtatagactacgtccttaagtgtgatccatgccagaggtttgcaaatatcccaagggccccacccaatgaatttactttgatgaatagtccctggccctttacggtatggggaatagatctcattggctccctaaccacgggaaagggtggggtaaaatatgccatagtggcggtggattattacacaaagtggaaggaggccgaacccatcataactgccaagaaagccttggactttgtcataaagaacatcatatgtcgatattggttgcctcacaaaatagtctcagataatggaaagcaattcgactgtgacaaattcacagactcctgcgatcaatacagagtcatcaaaagtttctctacggttgcgaggccacaaacaaatggataggcataagctgtcaataaaatactcaaggtcaccctaaagaaaaaacttttggcctgcaaaaataattggcctgaagaacggccacgcgtgttatgggcctactggaccactacaaggaccacaaccggacactccccatt

SEQ ID NO: 227040 - DNA, 1393 bp, Cannabis indica
tggtctgcaatctaacaagtaaaatctgctttgtattgctctagtatggaggaaagagaaattcagagggtgttagatatgtctggttccactagataaaaagatctattcaaatacctttgggtgcccatattgctaggagacttgctgcttctgattgtagcagtctagccctaaaagtgactgctaaaatcaagatttggggcactagtaacctctcttttgcaagcaggttcgtgcttgtaaactcggttctacttaccatccacatttattggagcaaaatgatgattctaccaaaaaaatcataaaggaaattaaagctatttgtagaagttttttatagacaggtaaggataagatgacaggggctggaagcatttcttgggagaagatttgtaatccaaaaaaagctggtggccttggacttatgaatattgctcgatggaacattgcagtaatggttaaacatgtgtgggcagtggccaataaaaaagataatgtgtgggttaagtgggtgcattgtgtgtacatcaagcaccatgattggtgggactataaagctcccataaacagcagttgttattcgaggaaaatggtggagattaaagataaaattcgacaatctaacagccaactgtgttgtctattactgaatataagattaatatgggatgttgctagtttagcaatgaaaatgacagggttgctttgtgtaatgaggtctaatgcatactaaattcacctaagcatagtttcttgacttggcttcctgtccaaaacaggttgaagactcggggaagacttttcaaatacaagatcatagactcccgtgaatgcatattctccagcaacgacaatgagactgtggagcacctgttcttcaagtgtgaaactgctcttgactgcttgaatcaactgaaagcttggttgaattggcaagtgaatactaattctctgcaaggaatcctaaaatggattaggaaggcaaagaattccaagtttcagtttcagaagaatgttaaaatggctactgttgcagctcttgtttattcgatttggagggctagaaatgaattgtactggaattcaaataggtagcagattgctgagattgtgcagcaaattatatgggttgttaaaaatagaataatgtttgtaatgccaaaaaaagtaaagcaaaaagataaagattggttccagttactgtaaataatgttgtatagataaaattaaagccttttaaggtgcttttaggttgtaaaaaaataagttttggagcaatgaatacactgatttatcaaaaaaaaaatattactcatctttcaaaaaaataaaatcaccatattactcagactcctaaagaaaattctggtaaactaatatttttcat

SEQ ID NO: 227041 - DNA, 1942 bp, Cannabis indica
ctctcctctagattcctagtcataatcacagccgtccattcctcatcaaagatccacacgagtggtaaaacacacgtgtctaactctaacggacctcatcaaacattccaaacattggtttggtttggacccatttcaatgttctttctcaacggttttcacgacccgaattttagatactgtcacggttttgggctctttaggcgcaatgggctggtcaaaccctaaatctcaaaactaaaaaaaaaactagtttttctttaaatatttagtaaaatgaccaaactgttaaaaatttgaacaagtacaattataatcttgtaaagatttaccttaactttctacctcttctcggtcttttgtctcgtttgtggtatattgatttatttgctatacatataggaaagagaaaagaaaaaataagaacgttaaaattaatttgtttttagttatattaattttttactatgatagatttgtggtatattaagtttgcactatggtatgtctatttatgtttgtagtatatgaatttttgtatgctatgttatatattgtggaattttttttaatagaatattagtttatttttgccgatccacgtgctttaagatcaagggttaagatctctccagaaaaagcacaaatcgcgatccaacggatgaggaaccgaggggacgacattaaatgcttttgctaagatcgaggtatttttctatcatttatattcaccttagagcccacgctgatagtaaatggctgtcattactgttttgcacaaaaagcgtcttcccaaagcgcgtagcactcacgaacctaagaaagtggagacacgtatgagatgccagttgtcctccacaccaattcctaactcttcaactgtcgagtgccggaaagagaaatgtacttttgttacttacagatttacccacgtgtctgatgactctaagattatatgggaggaagactgcaagcttctatcactcttaagtcacaaaagcacggagataaatattatttgtgttttggagaagagacatgtggcgaaataggagggtaatcatcatccaacaatgagcctaaaccttctcgtttgcggaataccaagtcaaatttaggacagacccaagcctagtgacaactcagaagctttgcctccggggcatagggttctttcgagacccggaggtctccctagtctttcgagattggaagtaatgaagaccttcgaatgaggataagggagcacttagaagcagaccgcacgggaaactcttggacgcctactataggatgacaaccgaatgcttaccgtgagaggggaggcaaaatactaccttaaaaatgatgttatcacctttttgacacaggatcaaatattgttctctgtgtcagatcatggtagtgcacgcaccaccactgtctacactcctctttgtccgacgactcctctaatacttttgttttccaggcgtaatctccgtgtaacacgtgttttgcacaaaacagtcccctcattcgtacaaaaccatcacccccacgagctggatatctcttaatgggcatcaaagtcatgcattttgtgtattttaccccattagtgggcttgcttttacataaaaacccgaacgtatcacaggtatgtcgaaatccaaactctagaatatataaaccataatatcccttcttgcaaagagggagaaaaaacttaaaattgaaactctgctagtttttattctgaattttcttcttcttttccaagaaaaaccaagagagatcactttgtggcaagaattaggttcttcattgtaaaacttacttgtaatacactttgaagctaaaaaaagactaatatataaactcacaaatttaggatcattaacgcccgaaccacataaaaatcttacatctaatcatttacttaaacactacttaatttttt

SEQ ID NO: 227042 - DNA, 668 bp, Cannabis indica
tttttttaaaaaaaaatatattagcaaaagagaacaagtctagaaagtgggtcccaatccaggtaggtagctttgcaaagtgtcaaagatgatgggaacataaataaagggataaagctcaatgtctataaaagattgttccttgtgtacatatcctattactaaaagatagaaaaaaagagtaataataaaaaataaagttgaaaaaagagagaataaaatataaagagaaagaaagctgagaagtaaaatggtcttaaatttgtaaattaaagtcttgtttggtaatatttttgttttttaatttttttaaacactaaatgaattttttttttttttaaaaagaattgtttttgaaaaataaaaatacattttgtaactacttttgttttttaattttaaaaatagaaaataaatgtgtgttctataaagtttatttttattttttattttataattttatttaagtcgagtctagctccggagtcgaattcgagtttgggtgaaaggccaggttcggcgccagggcggtggggaatttgggtccgggtttggtcggagtccaaaatattaattaggaaaaaacaaactgtttgaaaaaatattgaaattgatttttttttttttaaaaaaaaaaatttaaattctcatttaaaaaattaaaaagt

SEQ ID NO: 227043 - DNA, 1066 bp, Cannabis indica
tagatcacaatcaaaagacaggtcgtggcacacataaaaaaaaagtcatattcggaaatggaatgcatgctgcatagtaattcaaaatcaaaacccagaggttgattttaactccaaatatgcagaaatcaaagctatacatactagccaaatcataatcccatttaagatcaatacagcaatttcaaaaatccaaatctgtatgtatcagtattaaagagaaactcattatagcccaatcagagatcaaagagaataagccatcaaaacccaatttgagatcattacaaacacttaacacaaaatgaaccctttttctttcaaatttcagaggcaatgatgataataatattgaattttatacctccaacgtaatccatagcagtggactggggaacatcgcgagctctcttactgatcacgactgcgagctctacctcatgatgaagcgactccaagggatgaggtatttcaatggtgcctccggcttccaaatatgacgaagtcggttttagaaacaacacaggctccttcaaaatatttgaatataatttaagttaagaagacaaagaaatctagaaaaaagtttccttgactttcccaatatccaaacaaaatccaaatagctagagaaagtagaaccttgggaacggcgttgcctagttctttggcatgagcaacgtagtttctcccgacgccgacgatcttcgtacccacttgcaaaagattctgaaatgccgccgttgccattttcgaaatttgcacgaaaactcgacaggctccgtccgagtagtatattaaaatggctgtaaatagtttgtgagatttagtaatactaattttaataattagataaatattactttttttgagaataaaatttggtgttataaattaagatggtaaattatttacaacaacaaaggtgaagggatacaattcaatcaaaagcaagcttcatcgactcctaaagtaaattttgttaacctgtgagagcatctccaaggagctcatcaaatttggtgtcacactattaaaaaatttgatgttaaaaactatcttcact

SEQ ID NO: 227044 - DNA, 4179 bp, Cannabis indica
aaataatcttacctggtgtcttcttctttctgcaaccaatcacagggaatccttgcattcgtctttctgcacagacttcccttgatgaccaagactcctatacaaagcaaaattttggctccaaagatggattcgcttccttaaagcggcctaaacaggaggaagaaagctatttttctcaatataaagcctcaacagaagaagaaacatctaccacaatctctgaactcttccatggatttctcagcataggaacccttggctctgaagcaaacataaatgagccagagactccaacatttgctacaccagcattggagaacatagctgacaccccaacatttgctacacctctggagaacatagctgaaggaagagtactaaaagtgacagagaatgacttgaagatcataaattatgagctagaaaagtttcttgaagctgaaagtaaagaagaagtgtttgatgaatcctcagctaggatgagcagtgttagcaccatcacactcggtggaaagcaattagagggagttgaagatgaagattattggaaaacaatggtgtgtccactccaaggatatctatttgggtcttcaattgaactaccggaaacaagagaagaattaaagaaagaaaaagcatcactggcggagctatttcatagaacaaagataactgagaactgcactgagaaatatgttagtgaggaaataccagataagcataaacataagtctgctacacatttcatgaagaagatgattaaaaagcttcacctttcttcaaaaatctccctccattctgcttgtggtgacttaccagattctgtttcggcaaagaaagaaattggcaatgcaactgattcagtttcaagcaaaaagaaacttcacaaggttggcctcacacctcactagctagatagatctctcaaccacattaacagcatatcaaatgactcctctcctcacaaaaacactaccaaaagaacagctacaacaacttaatcttgatgttatagttaaaaaagttttcgtatgtccctctgtctacacaaactaccatccaactatatctatatctatacatatacaagaacaggatggtctttacatttgattgtaaggattttcatttttgatacctaggactccactccaatgttgatttatagttgtttgtaccacaaagactaccaacactatatattattctttttagcataaataacatatgaaaatggttggatcacaaactaaaattttaagtcatattatgttaggatccacattgaccaagtataggattcgttagtagtatataactacttgaacactctcctctcttaggctagtttttgggagcaagttatacttggttgtatcaagtggtatcaaaaccacgcaccctcaagtgggactgacaacatcgtgaacatcagctccaaaagggggtggattatcaggatcccacattgtcatgttctttgatgatcttgatatccaactagaatgcttaaactaaccaaatcagtataggcatatgaactaacttttccttgaacagtactgattatatttttcgtgttagttcgaattttcagtttgttagcatgtggcatgcaggttatgcgtatgttccacaggaaaatccatcctgaaaactctgcagatgctagagaattcatcaggtccaaatgtaatcctaagatcactcccaatgaaggtggctatactcatggaaatctgatacaaaagggtggagacaacagaggatatcgtcgagggcccccatcgatgagggaaacccaatccagaatgagcaaactgaacttgtcccaacaaagcagtctgagttgcaacaacgttaggggaaagggagagcactggatcaacatagatgacgactgtaagtaaaccttcggactttacttggtagaaatgaacttaggttgtgtttggttgttggaaattaatttttataaaaatttctatgcaattttctatgaaaatttctatgaaaatttctttaagagtcatttccttaaagttattggaaattaaaaattttctataaatcaaaaccattggttcataaaagttcccaaaagatatattatatataaaatcttcttcatatttatttttcttaaattcttctttcttattcaaatgatccaaatgtcctattctaagttcatatcaagatcaaaagcataaaaaatttctattagtatttatttactttataaggtaccctcttgaactgtgtgcttaaaaactacagaaatcttccaacatagcattcaaatagtgtccagaaatcatcaacacaatcttaaagatttattattgactatgagtaaaccaaatctatataaattgttatacattttctttcaacatccaataataacacattcagtttataatgctcttccaacaatatatattttatataatatatataaacatattacagaagatatacccagccataataattaaatcattagatgttataattctagcccatctctcttgttgggattgcagatttggtgttggagctccagcaatagaagctgtaagaaagtggttctcttctcagccatcatccttaatagttacagcttgtcagtgtggtgttcaatcttgttatgttcttatatctaaggaattttagtgatgatggattaaactgaatcttaaacaccagtatataaccttgtattcctagtgtgatggaaaactatatcttaaacacggtgtattagtcttgtattcccagtgtgatggtaaattgtgactaagttcaagttttctaatcaataaatatgatattgattatctgctattgttacttgaatgcttgagattcaacctttgtgttagaaggaattcttctaccaggaaaaaaaaaaagagataaaaactgctaataagatacatcccagatttcatctaagaaagtttgtccctattgcctatgttgttactcaagtgccttacagcttttattgaacagaaaagtttcaataattcaagcatttatcaaaaaacaataaattggttactgggtatagctacattgagaaatattaacacattcaggttcatgaagctacacttcattaacatgaaattgatgtgaaacaacacaatgggccttttatgcactacatagtttcaatagtgattcaagtagatagctgtaagcctcaaataacaatattacaagttacattatatgagaaattatcatgacaaatatatattaaaagttagtagcatctggatcaaacctcacagcaaagtgggttgatgaggaagagggtcttgatattatataggtagctgctcttcccttagattcccgcccatttccatcacccacgatcgatcaactagaccagctaactctctgaaaatcacagtagaagttgcataagtagaactgtgtaaaacagaatacatagaaccaggcaaaacatgagaaggagatgattgtaattgtgatgtagcctcttataccaattgattaagaaggtaaacttaaacccaatttcaatctagaaaatattttttaagcatttcaaatagaaataattacactacaactaattcattctgatgataactgaaaattagttctgtacattttgtgaattatagaaattcattccaataaatgaattaatttgacaacactcatgtaattttttatttttttttatctgtaatgataaatcataaaaaagaaaaagaaaaagaaagatagagatagtaagagcagacttgaggtcatggctgacaacaagtatggtttaattctttcttcagatgctttaaaaagttttgacaacatctgacacgtgctttccaatctgatcaataaaacagcactagaaaaagtttagaaacaataaatctaatttggacagggaaaagaaaaataggaaaatatgtaagagtaaatcaaaataattgaaataactttccaaaaaaaaaaaacgaatcctgtacaacagtataagtagcaaacttcaactttatcattcttaaatcaaagttgtttccaatgattacaattattgaacatgatttctggactaaaaaggtgagagcctttccaaacagagtataggagagatcccaaatgtcaaattgcagacttgtttat

SEQ ID NO: 227045 - DNA, 1714 bp, Cannabis indica
catagctaggtacgagacctaaatctctatgatatttaaaaagtctcaattggtgttgctttcttattttttattttaatttttattttaaggaaatagtgcccctattattagtaagtgaaaactatcgttacatcttctacaatgatgatatattcttaaccaatgcaataatacaaatatattttaaaaaagactaactaaaacatgtccatatattttatatttttcctttaccattatttatttatacaactaatatatatcacaatgtgtgttttttttgcttccccttttttctggttggtgcagatcaatctgaatatgctgaatgtgattgttagtgaatcatatataaacccactagcaagatgcaagtctctctctctttctttctttctttcttttatttatttattattatttatttttttgatgaattattattttatattatttatagttaaatgatgggtcgtacgtacatctttcatcatcaatctataagtgcgtaaattattcaattaatttcacaaaatctcaccatattagtctgggccccttaaatatctctaggttgttctttgcctggaatctgtattagcttctttatgtcctcgtgctctgaaccaatttaataaggaattatttttcattttgtcaatatatatatagaaatataaatataaatttatatattgtatcaatttattcccaagcagaaaaaatattgtatccatttataaagaatatgtactcctagtcctagcaaatatagctgtctttcttcgtttcgtcaatattctatttagttgatatcaaataattctgggaaaaaaatatatacaaataatacaatgttttgtttggtccatatacaatgttttttttttttttgaaaggtaaacgaaaaatatcaaatgtaatatcgctcaatgttaacttatattaatgtactaaataaaagtttctttattaatgtcactttactatttcttgtaatattaattccttttattttaacttttattattctaatttactataactaagaatggctaagtttgaggaatatttttctttttgtatttattaataaaaaatatttttatattttattttattaaaatatacacacttttataagagagttgtcaaatatactcaatgagtataatagaggcatcacctataaaagtggccaatatctaaataatatagaaagaaaaggtaaatattaaaataaataaagtaaattggatatacaatgtaattttctcaactaagaatgtgctacttaagggtaatatttctcttttaaattttcttctctttaaattaagagaaaatttaaaagagaaacttacaaaaatattgtaaaatgaagaaaagtttacaaaaatagtatgatatagaattttttacatttttactgtaccaattttataaatatattgtgtttaaagttttaaaattataaaaaatatcgtgtttcagtaaaataactaaaaaataacctaagaacaacttagcgaacaatatgaaaacatctataaaacaacaaatataactacaaaacaatagaaaaatatcaaaatattgacctaattacaataagcaaaataatatcaactcctcaatatttaatatatttttgtattacgattcttttacttagttttgacaaaatatgatttattttttgtactattac

SEQ ID NO: 227046 - DNA, 990 bp, Cannabis indica
tttgaacagtgctattattgatggtctagcaagaagagttctaataattatgttggactttatcaaagggagagaccccttccagtggttcccatcatttttccttagtttttgatgaacatgtttgttccaaccaaaacaaaaggcacaatcacagatctgataactctatattggagccatactcttaacaatcttagaggaattcataagagtgcagcaacaaaatcaatcaaaattgaacatgaaattctagcaatagaaatcttacctatattattacagtctagctaacttcagcctctgtttgaatcaatgagaacacctcgcccttgaataaaccatattgctttggttcctcctgtttgtactgtgtgcgactccgtgctagtgtccttcttgcccgcacaggaagcaagcaatggtataaacccagcactcacccatatgagccctactacatttgacaccatagaaattctgttctggattctttgtagttgatgtttgcacgtttgaaccttttattttgaaccgaattatcgaagttatcgtgtcacttcccctcattagagttgtcataaacctgtgagcgtttcagctgcctctggtttttcctaggcagcctcctatttctatttttgttcatatcctttgaacacttgaatggaccaagaatctcatcaagaaaaacatctgaaatctttgagaaatcaccatcatcaacattaacaaacttctcctaaaaaaactgctcaaattgatcgcatttcatgttccccacgtcatgatcatcttttgtcaagtcccaccactcctcagcattcccctcaaaaaaaaacatggcgaattgcattctataatttggaggcacatccaagatatcaaatttctccttaattaacttaagccacatctctgcaattgatggatcatggcttccctcaaaatttgagggttttaactatagaaatttctccataatagcca

SEQ ID NO: 227047 - DNA, 1076 bp, Cannabis indica
tttgacctgtttcaaaatccacaaatttcccgacgtgtacacccacaaatttcctgatatttggctttgtgggattctttcaaatgtcacgttcggtcctgtggtctcttaaaggtcgttcgttatacccacactttccaggcccaaacgtgaagagggtgtattaagagttagtcccacattgctaatgtgtggaaataaattgtgatatataagatgaaagggctactcctcccattgccaattggttttgggatggaacctcattcatcttatcctcaaattctaacaaataattaagttaaatattaaaaaaaacatttattaattattaaaaataaaaatacattaaaatatttaatttaaatatagatatataaatatttaatttaaatataaatatataaatatttaatttgatttatgtcaaaaagaaaaataataataaaaatttgatggtaaataaggtaatttgtttcatctcataaaccttttgttgttggtgtagtggcctatataattaaaaagtaaaacaaataaagaagatggctttggttcaatctttttgtcttcttttgttagaaaaatctcataggtatagtttgattcttttatattatcttcttagtgcaaaccccaattgcctaccataaatttttcatttcttttttattttttcaaaaagaaaaaaataaatatataaataaaaaaataaaaatgaaaaatacctttgtaaaagattttgacatcatcacaatcatgtctgatgtgtcaccaaagatccacaagacacgccattatctttttatgtaataaaataaaataattaattatattgagatttacgttaaatagggttctcaagtgtgctattcccaaaaagagtgataattgtataaacacaaatgctaaaaggtataagtgggctgtttagtacatttctacgtgtaactataaatttttttacttttagtcataataaaatttgtaattgaaagtgaaaaaattataactaattataaatttttattcttatttgtgactaaaaagtctgttgcaaaatgtattagtcataa

SEQ ID NO: 227048 - DNA, 1086 bp, Cannabis indica
cttaaattgtagtattttaatctttacttacttttactttcttctccacaaaattggacatagactaaatatgacttttgtgaaattgatgatcaaatttttatgttattaatttaattatttcttttcttgtgtgatatgtatgtttttatattttgagcatagctataaatatatgcgtgttgtcagagaaatttagacaacactaaatttgtgagaatactcgaagaaaattagaataccctaattgtagatgtgggagcactcacttagaatagtgagtactcaaactattggttactaaatcgacaaaatgaaagcaaaaataaaaagaaaacaagataattatagtgtaatcagagctcagtttgcttatccactatcgcaataattttaatctggtttatttgattcggatcacttctttatatagaaagtaagtgtcctttaaaattacataattgatcggtttagaatcgtttttactataaattacagtattgaatcaaaataaatgcttaaagaataaatgaataacagtttaatctattcttatattaagtgcagcaacgtatgccgcttgataagctgtgagttgcgtgttcatattccaacacatgagcttgcaggctctatggtgcagtgctcgcaagatggccttcaggccaatcattcggatgaatgcgttcatattagacattccatctattgacaacgtgggatcatgcgagttcctaacgagctatcgaacacattagtcatttggactaaacttatgtaatgaaatgatctttactagtcgcaggagaagtctacttggtcatcgcatgtactcggtatatgtgtgactagtattaaatcttatcagtcttgcttattcttttgactatgtgatagtatgcgactaccctatctcggtcacatcttctcgcaagttcacatcaagcaaggctaactatattagagttatctactaacacgttatccttttcatcgggaactgggtccacgtgtcaatttcatacgaggttgtactcgtacttctaggcaaaaaattcgcacaaattttgaatatacaactgtaat

SEQ ID NO: 227049 - DNA, 1981 bp, Cannabis indica
agcctgggatcagtggtgagagaaatagaagccaatcctgaagcatagctccactgcaccagagcttcatccactgccccataagccctcagcttatggcttatccacaacagctcctccaccagcttctcagccaccacctctcctccttcctcttcctcccaaacaacccttcctccatctccaatgccgccaccaattcccgtcaaccgttttgtccccctcgagcggacccacgaacgcaccaccccaacacagatgctcatcccattgatgtaaggcgccacgtaggaaccgaacggcagtgccctgaccgcgcgtgctgcccacgctccggatcccgagtactcatcgtttttgtcgcggtggcgcttctctagggagcggtggagaagggttgaggtgcgctcgaaggcggaggagagcgccattcggttgacctcgagcatttccgtgtgtcccgatgcagcgttgccgtccatcacacgctccgccatcgccatggcgaactggtacttccttgaggtggcggggatgtcgttgagcagggccaggatctgcgcatgaataaggtgaccagtcagaataggacacgtggtatacggtgagattgtttgtttgatggtgacgtggctgaaagggtgtaaatgtgtacgaaggttttaaagtttttcctcccttgagaacacttgtctatatgatggaaaaatcggctatgacgtggggtatctttgcacaaaaaaaaataaactttttatacttgaaatataaggaattaaaatgaatctaaaataatacatttatcttccagaaaaaaaaaatacaattacttcactgcaagagattgggaatcttactgtttgtaatattatattcggagagtactaaaaaaaattcgttaattgaaaaattagactatatattttttttagtatggagtataatcattttcttttggattatatgaatataaatttataactatatgaaatatcaattaatataatttgtacagcattctctgtaataattaaactttcattagctaatttctctcccctccaaattctaatttcctttgctaaaacgcaagtgacataaaaggagcaaaagccattaaacacgtgaaatcttaatattattatcatgcatcatttccacagttatgaaattcctttaaattataaaattgaatgggccccctattctacaaaagtatatacacttttttaccctattacctgagatagggctcttccaagagcttgaacaggcacagcctcaacaccctcgttcagaatcatctgcaaagaagaaacggacaaagaagccgaggaagatgatgtcggtgatgatccagctgatcgcgggaaatcgattaatccgaaaggtgaaaaagcttgaagaagattgaaaggcatagatgaataagaagaatatcccattaatgagagagaacaagaaggtatgttatccatcaaaaccctaagaacccacaaggttagccatgtcatcagcatcatcatgaaccggaagtgatctcgaggcttccacttcccaacctggttatgaataccgccttttgtcaccgacacaagagtcttggccgccgaattcaccgtcgacataaacattgagttgagaaacgacgacgacgacgaccttgttttgtgatcatattttactagactcaactcagaagacatgatgatatattagcttagcagctaggtataatagagatctaataaatttgataatatgcaaagattagtggactttattttctctgaatatatataaatgttattccttttcttagtattgaaggagatggcgaaatgagtttgaaagttctggattatcatgaggtgtaagcgtgttaagataagaggtgtgatagttttaagggtgagtttggccaagtgtttgtattctggagagacatgtaaaagtttttcagaagcgaatattgtcgttt

SEQ ID NO: 227050 - DNA, 985 bp, Cannabis indica
attggctcctcggacattccaacaaagtagtttatccatttccaagagaagggtactccccccctcttgttttgttctctttccccatggtctcatctgtctcattctcatcttccagtatctgatcgaaattatttcccatattgcccatgttctcattgtcttccaacacctgaaaagtattactaacagcagtccctaccttccccacattcaggggttcattctgccttcctggaccacttttattcttcatcaccttcacaaatccctctccatctgtctcagcttgctttctatgatcctgtttcacaacccactgtggcttcccatttgaatgcttcctacagtcagcagccaagtgtcctaaaccagagcagtgggagcaaacatttggtttccactcatatttcacacctactgtggtaactgaaccatattcattctcaaattccagaatttctggaaaattctggtccatctgcacctctaccataactctagcatagctcaatcgttctctgtccttggttacagaatccaacataatcggcttgcctaattgactcacaattttgaacaatgtcccttgtccccaatatttcaactccaattcttccaggtgaatccaaattggcacagtcttaatgttttctttcctgaaattctcatgaggatcccatggcttcatgatgaccggtcgcctgttaaaaaacacatatccaccatttaaaatctggtctctatgttccagtgagctaaatctgattatgaagacaccatacgacagtaatttcaccatatccaccttatcagaccaaagtcttttaacaaatccctcaataatatgtacaggagggtttgcccccaatacataacacactattgaaggtgtccaaaaagagacttcctcctcaatatcttcaaacgatatcttcactttgctgctactagattcagagtttctaaaagatttatcaaggtt

SEQ ID NO: 227051 - DNA, 807 bp, Cannabis indica
ctaaggaaaagctcaaagtgataaactaaattaagaaacaaaacaatattcctcggatcagagcctgacacactatggctttcgatccacacataaccagataaatgattaactaggctaaacttagaattgtacaaaatataaaccaaagtataaagatcaaggaataatgaaatgacaattgcataatatcaaaatagaaacagcaagattaacacttgattaccaaagaagaaactaaagattccgagcaaccgtttctatcaagatagattcacattttggtaagttttactcaataacctactttaactaccaacacagcaaaaatagaaactcaactaaggaagctaaaccattccaattaaccgaatatcgatatcaaaattgagtgcaattacaatgaaaatgaatgtagataatgagaaaatgcaaaagcagaatgcttaccaaacccttgttctcataatagtcatccaatgcccactgatactttgattgatttaatccaaaccagcgagctaaatggtcatctagactagaatgtgctgcaaattaaaccagcaaatcaaaattttaatgtcaaatacatattataataacataataattgagcaataccagaatagaaataacatactatctctaaatcccaattttctcagcaaccaaacaagaataagtctaagctttcctcacaaaacattaaactttaaataacgctttcaactttcccaaaatctcaacttgaaatgttagatttcagttaatgaaaatgaaaagcaaagtgaacataacattgtacct

SEQ ID NO: 227052 - DNA, 1403 bp, Cannabis indica
aaagtatagttaaaaaatatataatggaggggaatatttataaaccatgtgtaatattttagcgtaaaatatcaaatttccctaacaaatttacttagtagctagtcttttcctgaaccttctctaaatttaatcattattcaaataaaaatataaagtacaaagttttagttaattaagttggattttctctttattaggctttgtgccaatattgttgtgcttacatgacttgaatattgaaatttttatttgggataattacttaaagcactattttggtaaaaaaaaatattatatttttacatttaatttatttatttatttattattttacatttttatgattttcatgaaaacaacaagagaactacataaaagtaacataaaaataacatctaaataacatcaaaacaacaacaaaaaatagcatacatataacaaaaaatcaacaacaaattaacaagagtacaaaataaaagactgtattttctataaataaaataaaaaaaatcgtaaaaatatttcaaattctgtgaaaccgtatttttataattttttagttgtttttctctatttgtgaaataattcatttttgtttttatatataggctttgaatagtggcatgtccttacttttgatgaaaggtttactggtgggccccgttgattatattatttattttttatttgcaactggttgtgttaggtaagagaaatcggttatttttcttttaaaacattaaaattatacaagttttacattttttgacagtaatatgtttagaaatgtcagatcttgaggggtcctcacgagagagaagggttatttatgtaaaattatacgtgaaataataagcgaaaaagtcgtttgagagcttgtgagtcaaacaatatcacttgaacgttatacaataaaattgcacactcaacgatccaagttgcacatgaaatatgaagagccctatgatcatgcaataatttagttatatcattaattgtaagtgagcgactgttctattactaataaatgtattattagattcttaatgcatacctacgaaatatgaagtgccctatgatcatgtaacaatttagtgatatcattaatttaaagagagacagctcttctattgctacaatatatgtattattagattctcaatgcatttatgattacaataattcaattatttcattgtaagggaggtgaatgttccattgcttatgaagagccctatatattgagttaatttcccaaacaacatcctcatttgatattttactcaatatacactactctatatgtatattagtttttaataagcatgcatcatgtctagcaatatttactttgtagtttttaaaggtgaaggagctggtgtgtacaaatcataccatag

SEQ ID NO: 227053 - DNA, 1297 bp, Cannabis indica
ataaattagtcaaacttaaaattgtcatattttataacttttaaaattctatagaaagtataatatttcttctattttatatcctttttctaattcaaaaagaataaaaaaatatctaggcttcctccctatctataagagatatgctcttctaattacctttttttttttagaattagttaccccttaaatttaggagttatgtatttgttaactaattaatcataataaatgtttaaatttcgaattaatagtagtgatgattgctttttgtcaatttatagtagaaaataataaagattgagagaaaaccattaaatacatgagctagtataattttatttcaaagatctgcattgaaaaatgtaaatttcaaaaaaaaaaaaaactaatatagaaataatattctaatattactttgaatattaataaaagactaattaaaatatttgcctctaaaaatttttctgaatgttaaaattttttattaaacaattgagattgttggatttaaaatcttttatgtaattttttcggtgattgtttgtgtgttaaatcatgcttcccaaactttaatatgtatcaagttatagattaaaattttcttactaaaattgaaaaaaaattcttaaattcaacaatctcaataattatatgatttaagttcaagatgtaaaaatcttaatttacattaataaaaatataacattaaaataatttagagaaaattataaaataaataacttgaatgatgtatataaaagtatgaaatttattaaactaacaatttaaaatattaaaatttaagtttttttttaattgatgtattttaaaagataaaaaatcttttttacatgtacatgtaaaatttattgctagtacgagacagaagtggtatagcaaggtaaggttaaatcaattttcttgtttggcaagaaagattagagaagggagagaaaaaaaaaaattgaaagaaatagaatatacaaatcctttatttaagtacaaatataatataaccttctcaaaaaattattaaaaaataattacaaaattaaatttaatagttttattaatagataatactctatcattctactcttcaatctccatcttcttctcctctcctctcatttaaaatatcaatattttgactatttactcaatcttcttctatcctatcaaacatagtgattttgagtttgaatctattataagaaatttataataaaccatattacaaaaaacaattaccttcccaacataattttttttttattaaatgtgacttttagtc

SEQ ID NO: 227054 - DNA, 697 bp, Cannabis indica
caatgcacctagactcattttttggaaagtacattaattgtcatgaaaattaattattacaggaaaccaatggaaagtaatacaaaaacgcaaattaaatcatcaaatagctataacaaagtcataatgtcttatacacatatagatatataagtggatcatataaatgctcctattctgtaagggagtgtcctataaatatatatacataaagctagtttttatacacagtgttcctgaattaaattttgaatagctaattagggagctaagaatacatgattcatatttctatatcagaggtaccctgtttctcgcacctgttataattaatggtgtacacaaggtacattatatacttgtcactataggcaatctaccatacgttttcaaaaataataaaaaagaaacgaattttatgaatcattatgactttgggaaaatatataggtttgagaaaaatatacgaaaaacataacaagtttaccaagtaacgttgataatatatataatagatataatagacttgatccagatatcaagtgtaataatattaaatatatatcacttacattacataatctatatatattgcatccacctaattaaactaaaagcggtagcttataatttattcattgttaatttaagtttggttcttggttttgtgcatataaaggtaaaaatcacaatgaca

SEQ ID NO: 227055 - DNA, 1186 bp, Cannabis indica
attttgtagtagtgagacttataacaatttacatatcaaaacttgtcaaagagtcaacaatgatttttggggtgcaatatcaaatttttctttaggaatgtgtatgtatcactacaagaaatgatatttttgtagttaagaaaatgcactgacaaaagtaggttttatcgatgtgttatattgaaaagcgcaggcaaaagtaccttgttgaaaaattagtccccacgaaggttttgccggtgtggaacgacgccaaaaaaactaactttttatcgacgatttatgtattttgcacaaaagaaagtggttttactggcgcattacagagaacacgccgataaagcttattgggaaatctaattgatcccgcgtgaatttttggcatgaaaatttacgttttgtcagcgtcgcttgcgtctgtaaaacctccattgtggcgataaaaactttttccaggaaaacccactgtaaaacctcctgcggtttgaaataatggggaaaaaaacggcgggaaaacttttgtcgacgttatttttctcaggtaaaggttgataaattaatttttaagttttattgaaacgacactgtattatttttgctagcatgttgtattacggatgtaaatgggacggggcgggtgcggggattgctcccccacccccgcacccgctttttaaattcaccccatacccgccccaatacccgtttaaattaaagttggggcggggtgaggattacccgacgggggaaggattcccatccggtactcattacataaatatttttgaaaaaaaaatgatgttcaaaagagaattaaaaaataaataatcataaaaacttaataaaacaataaacttaagtggaccagtgtgtacagtaaaaaaagagtataatcaataaaaagccaaaatcatgaagttattttaattgtagtagttatgatattaaaacttaaatatatacatatatcatatcggggcgggtatctattcccctgccccatcccgtttccgactcgggtatgaatctttaaactcatacccacccccgcccccgaaagtcaactaatggggcgggtacccgcgggtataattgccatccctatgttgtatggtttttctggggccatgtaacatgtaacgcggcggcaaaggctgaccgaaataaaataaaaagccaacctttt

SEQ ID NO: 227056 - DNA, 2707 bp, Cannabis indica
ttatacaaccatcaaataagtggcatgtggtaagaatctctatgagctcaatgaccttattctaattaagatggaacatatagtcatttggcattgcatctaataatcttccttcttatcttggcagcgtgtaccattagagtttgctgacaaacacatcattaaagaaggtgatatggttctagcaattccaaatggtggacaatggcctgctcaattcaagaggaggacaagctatgcaactggaaaatctgcagctgtaatctatgatggttggaatgaattcatgacagaaaacgatttggaagtgggtgatgtctgtatattcgagcttcttaacagagcagaaattgtactttatgtttcgattgtccgggtttctgattttttaaaacaagaaaggtctcaaggtcagttatgaaattgtgtttagtttttgtgtgctattattaattgtagtactaaaccattgaacttctactttgtgttcagtcaataactctacagaaggtgagaagaagccaaagggagatgtgagggtgaaaattgaaacagattcatgagatgccaatatgtaaagaaactagaccctttgaatgtatgtgtaagcttggttagttgtaaataagacttgttatctaatatttgaagacttctttcctatataagatgtgtaattgttgttttcaagtatatttgtcgcatgtaaagttatataaaatcattttgtagtatgtgttggtttttttgaaaacccctaaaacttctcttccataaaaaaattgtttgattgttactatactttcatttttctgtgttttctagattttgcagagcattagtatgtataaaattattttacacaacaatgcttcaaacgtgagaaacaacacaacaatattaaccagccaccactaattaattaccaatacactaaggatttgtttgatacccttttttacactgtattatattgtatagtattatattgaattgtattttaatgtaagtggtattaattttgatgagcatgtaaatatataatcttttaatataaattaaaatttgatataatatcaaaaaaccccccacatttatatttgaatttgtatgagtgtgggacattattttagtctactgactctacccacataaagtccaattgacaaagacacattctgactggttcttttaccaaaggccagttgtcaagcattggatagaaaagcttaaccaaaaatgttctcttttctattaaatgaaactgctgttttctagttccttttgaatgtagcttaattgttagcattaaagaatattctgatctatatttttcatttttctttttatatgtatagctttgattatgggccatttttgtatgaaatgggttacctgcaacagcatgaccttagctcaagccatatcccatatgcaactttagtgaagctttccattttctttctttctttctttctttagatatgtgatagtgcttattactgaaatgagcttggtgatctgtccctctctatattgatgaagtaaagtatatgctattttcagaattaactctttttcttgctgaataaagtttgtttctttttttgttgaagcatgaggtccttttactttgacttgcattttctcttagccactcggcccactactcattttctaatctttttgaggcttatcaagtaatacaagtcacgtggacctgtaggagaaactaggcagcaaccattttcatctgggacttcttactttctgaagataactccttaagacttcttcaacttgtaagcatgcatctctctttttctcttaaccaagaagaaaaagaaaatacatgtgttatcacttgatgtttcaatgcttcttcctctacttctactttggctttttttaacatgttatttttctttaaagtggaaatggggtattagaattcagtgaaaaaagaaaacaaaaaagtgaagaagaagaaaaaaaaaaaactacatatatagataaaaaaaaaaatggatgtagatttgaaagtggcaatgtcatttctttctatttgtattttccttggattcactagtccttcctttgctttcctcttatacttcatgttttgaacaatcatacagatttcacattcaaagatttgtttttcaaatgtcatttttgtttgtttgtttgttttttttcaatggaattagcggccttttgtggttcaaagccacaggaatagtcaagaaatctttctttaagcttcactatcattttaatttggtttttgggtgcgtttttaaacctgaaaatctcactcatatagtttgtttatgcacacttcttgacctactgattttaactttatttgtaacaaaaacatcctatattactaagtagttgggcctgtgtatcattagtctatagattagaagttctttttatgtattatacaatatattggattctcaagtatgttatatcctcatggcttggtttaaagatttgaaaagcaaaagtatatatgatctttgtatattgaaatcgtactcataaaataatattgtattttttgtgatcatactaagaaatcacaaactacttcgatcttcagcttatataatctttacatatattattcctattatctttgggaaatttaaattttcatgcttaataaattcataaattggtctcttaaactaat

SEQ ID NO: 227057 - DNA, 905 bp, Cannabis indica
tcactattattttgcttataatagtgagtattgttttgaaccagtttgaccgaggttatcttgcctattttattgcaaaaaattattggcatttaaattctagtaataaaaaaattatgttacttgagattatatgtattttattaatataatttaacattacataccataaaatgcttaaaattacattttacatatgaaataaactattgataataaggtcttaggtgttcactgttctaaatgttctttatgagtgataaataacaaaccttttcaatacattgtattctgttatttcttgcagttgtacaggttgttagtttgtttttccacttatactctcccttaacagagtttgttatgttctgttatcagccttttctttgtaatctttctctatataaatgaaaggttcagctcataaagttttagagcttttacaattctttgtgtccaattctatattgttccaggtagaaattgtattgataagcatctctttcatggtatcaggaagcccttgacttgtgtcatctatggatcctcgacacccagagcacacttcagcaacaccttccgccactccaccaccacctgcaactcttcatcaatggaatccattccaaaattccctcaattcatcctttactgttcgccttgatcgcacgaactatcttgcgtggaaatcttaggtgattcccacggtcatcgagcatggacttgatgacatactcctcactggtgtggctcctgtttagcgcctcatcaatggagaaatcaacccagaattcacgccatggaaaagaaaggatcaattccttctcagttggctccgctcctcaatgacagaaaccattcttggttccctcgcacagcatgaatcgtcttttgatgtttggcgt

SEQ ID NO: 227058 - DNA, 3097 bp, Cannabis indica
tataaagcaagaaaccaactgtcttgaaagcctaagcacccttgtaagaaaagattcggatcttccttcatctcttcggaacattccaaactaaatgcggatctcaaacccatgcatatgtaaaatttatacatatacacaacacatatatttttatatgcaaatcttaactcatcatatatatattcaaatgccataattccataattttctattctattttccaggcacccaaacaccttatttagcctctccctctcctccctccacgttcttgccaactcagactacttcaagctaaagaatttcagccattagcgccatatttctctctgtcccacacaacccaatattaaaatttcaatctttctctcttgtctctctgacgccggaaaatcccatttccggcggccgggaggagggccggccggtgattcacccatctgggatttctcaaaaaaacttcaaaagcttatttcagctgctactttgagttttttctttgtttctggcttctgggttcaggtaggtcggagactttaccgacgaccgtccatggcgatgtctgtggcgccatcgccgagagaatcgatagctgagaaggtgtttaagagtgttggaagaggtgggtattcctattatcttggaggaaggagtagtaatagtagaagcaataatagcggtaacaacaagaggatatgtgggaatgatgagatggaatttgattatgacgaagatgatgatggtgctacgatggagctggcccagattggagccgagagaactaagaacgtgttgattctcatgagcgacaccggcggtggtcatcgggcttccgccgaggctattcgagatgcctttaaaatggagtttggagatgaatacagggtctgtttgttcattcattcaattctctctttgcttgagattttcttccataacttttcttatttatatttttgctctggtttcagttttctaatgtttatgattggattatgatattttcctcttctacctaccaaattttatcgtcttgattccatttgtgatatctttaatttatttattttttattttccttgatgggttttccaaaacattctcaccccctctttcctttttgttgaattcttaatcaatcaccttgaaaaagaaagaaaatgaaaacttgtgagacaacaaactaataagaagtttcttgctcttacggatggtgatttttattcttttgtattttatagatatttgtaaaagacgtatggaaagagtacaccggttggcccctaaacgacatggaaagatcgtacaagttcatggtgaaacatgtacaactatggaaagttgcgtttcatagcacctctcctcgttggatacactcttgttatcttgctgccattgctgcctactatgccaagtaagtaaagtacatcatccttattacatccacttttcttggcttcaagttaggttgtaaatttcactacacaatttggttaagattttgtggttttggttaaatttgcattgttatgtgtttgaagggaggtggagactggtctaatggagtacaaaccggatattatcattagtgtgcatccattgatgcagcatattcctttgtgggtactcaaatggcaggggcttcagaagaaagtggtttttgtaacagttattacagaccttaactcttgccatcctacatggtcagtttgtgttgataaaaaccaagttacaatcatttcaagcttaaagaaaatttgaattaaccattctaattttgatgctattgtatctaggtttcaccctggggtgaacaggtgctactgcccatcacaagaagttgctaaaagggctttattagacggcctagacgaatctcaaactcgagtttttggattgccaatccggccatcttttgctagagcagttctttccaaggtggatggctaaaatttcacttttttatgtctctagctttctgttatgaatgttcttatctaaaagttttgttccttttggtccaggatcaattgagacaagaactcgaaatggatcctgacttgcctgctgttttggtaatgggaggtggtgaaggaatgggacctgtaaagaagactgcaatggctcttcgtgaatcactttatcacaaagaagctggcaaaccaattggacagttaattatcatatgtggccgaaataaaacacttctatccacacttgaatctgaagaatgaaagatttcagtcaaggtgagtagttgactatattagctttttattttttcttaccataactgagattaaactcgaaaacagtactaatatttctttgtcaccttttttagattagaggtttcgaaaaccaaatggagaaatggatgggagcttgtgattgcataataacaaaggtgacctacttagaaagacactctatatagatatatattgtcatgaacatttcactgatcattttattattgtttttcataggctggacctggtacaattgctgaggccttgattagggggcttcccattatcttaaatgactacattccaggacaagtaagtgatcattttcttctcagtttttctgtttttttgttaaatccatttacttttagatcttttattgaccctttttcatttggggacaataatttcaggaaaagggaaatgtgccttatgttgttgataatggagctggtgtcttcacaagaagtcctaaggagacagccagactagtagctgaatggtttagtaccaaagctgatgaactcaagagaatgtctgagaatgcacttaaactagctcaaccagaggctgttttcgacattgttagagacattcatgaactcgccgagcaacgcggccctctagcacgcattccctacatgctgacttcgtcattcacaagcttaatttaagttgattcattgtgtctttcctccaatgtttacagggaaattcactaatagaatattgcatgtacaggttgttattagttccaaggttattatcattctttggtctttagaagcttgttttgttttctttaaaaaagaatgctagaacaagctctgatgtttgtaagg

SEQ ID NO: 227059 - DNA, 1300 bp, Cannabis indica
aattaaacacataagggtttagagaatcttacattggttgcaacagaatattatgactccttccgctcagatctctaacccttgttcctttctattacagagtattatcaagatttgagcttggatctctttctctccttcaggttagttaccaccgtcttccgcactatgattgagtacttgacttgttatgtatgggcatggcactctatcactaatggcgaattggatgaagaacaattaaggaggttttgaagactgtatagaaggtgtctctcttctactagttgtctgacagagttagaaactagatttggcaggttgaaaaagttggatgagatgagagcatcatgaactccacgattgtcctggagtttgaggttactcccccttctcttggtgtgagaaacgagaaacatgatgagtatccccaggggttcaagcacattcaaacagatgcttcagtttctggatttgaggcaggtcttgctgctgtgatagttgatgataatgagggacaagattcatatgttgcagtcgagtttgcgagggtggatagtgtgttagaagctgaactggctgggatatcgatggctttgtctcttgcaagaaataggggttatgatcatgttattttggaatctgactgtgcagtggcaatggtcggtctgaatgagagaaagctccctgttcaatggggctcttatcctatgtttactgaatgtttaattaaaacttttgatttccagtcagttgttttttctgctattaaccgttcggttaattgtgttgcggatcacctggccatgtgggctcgtgtttctaagatccaaacacagggttgtttaagggatgtggcccccttttgtggtcactagcttgtgttgtgtgttcaataaagaatccagatattaaaaaaaaaactagcacttaggtttgcattatatggattaaaaaagaataaaatattgggcaaaaatcacacactaaggccggccactaaaagaccactttctagttacaattttgccactttatttcaaccagttattcttcgttcaataatactatattttccaattcaatcttataaatgccaaaactatttatttaatcattataattaattatcaaataaaattgccatttatattatttattaattagaccatacaaagtctcttaattaataaattaactctaaaacctcttttcatcacaactaagcccttgcttggtgaaaattcataaataagacatagtctaattttagaattataattgattaatttaaactaat

SEQ ID NO: 227060 - DNA, 1288 bp, Cannabis indica
aaatgagtattctgagggtgaggattccatgtacaactatggtacagatgatgaggataaatctggatacaattaccagaggaacgagctttataggcaggaagcaaaaatgaagaatgaaaatccattgcaaattaactcatctgtagcctttggttctgatgattgggatgattttgtgcaagaaagtggggaaactcagaaggcttcagatcttttcaccatgagtgcttcccaaaacctggcagaaaacaatattgaatccaaaagggaacttttggattatagtcctgcgacctctgttgggttttcaattgatcgtcaaacagagaaaggaaaaaatctaacagagatgcccgtccccagcaatcaagctgaaggtgactatacattggatgatattgtaaataattctgagggcccagctcattctctaaattttagtgaactagaagatgtgaaggatatttctgtagctagttgtcaagttcaaggtagtcatgatttgtttgaagtttccaaaagttcgtttaccacaccaccttctctctcaaagagtcatgaaacagagcaagaaaaagcaagtcttgtttcttgcaccatcgatcaagttcgaggtgttgatgaaatgccaaacgaacctaagaattctgggcttgatcctctagaggaaaatcttgctgtgaaaacttgttttagcaatatgaatgatgatatgtcacagaagaaccaaaatgctaatattgtggagagcataaacattaatgatagtcgaattttagaaaatcaagctctcgggatctcaaaaataaaattggaccatcttgatgacaaatcagctaaactaagttctctttcaaccgtgccatcgagaaatatgaagtcagattttttcaaagattataagccaaagacagacctatcaagtttcggtaacgatgcaaggaagagttttcctgttttgaaatctgttggaactcatcctgcagtggtaaaggtcagtcattcctttagtgctactttattctcacgagtaaattgcaaaattggactttggtttcatctaggtcttaattttgacaaagctttttgtataacttcaatttgttaaccctccgaatctgaaataattcttgtgctgtaattttttgtaattttttcttacacttctaattattgcagacaaatgatatagagctcaaggattcttatgatgatgttgtccttgaaatggaggaaattttactggactctagcgagtctccaggggcttggtttcctcatagta

SEQ ID NO: 227061 - DNA, 1266 bp, Cannabis indica
tgtcttgttaagtttgacacgtttatataaacatttacaaagattattaaactgtacatttatataaatttgtatgagacaggcataattcattcaataaaattatcacacttagttgtttgttttgtggcaccataacttaatatacctatatatatgtattaattaaaaaattctagtgcagattattgagggagtaatgtcgtgccattaagtcagatttcataaagctcttatcatagttccaattactttctgttctacctcccttggtattggtgttcctcaattcatcaaaggtatttatgtctttactgttttatctttatgagtatgtttttcaattgtaaataaaaactgtttggatttcgatgatagtatatgtcatccactcatattattatagtacataattgtcaccattacacgtattcctctaatcagatcaccacttatgatatcactgttttctttattttgcttgtcataattgatatcaacaagtattgtgtaatgcatgtgaaaacttaactaataaatggtaaaaaaaaaatatacatggtcaacaatataaatcatgtaaataaacataaaaacaattaaaactcaaatatggtaggcatacactatggaataaagtgaatttattagttggaaagtttgttctattttttagttttaaaagtttcgtagaagctcaaaatttatcattaaacaacttattgcataatgcttcaactgtaatcaacatgttcatattctaacatattattgtcttttctagtttattgttgcatctcattgttttattaatttattttaggaaagagcactaaaaaatactaataatcggtctaaaaggaagtgggaatcaaaaaatggatcagtctctacaccacgacatcacattcgacgtggaatgaacttagcttcttccacaggtcaaattgagaaatggcgtctgaaacattatgatacggagaaacgatggactggaccagattttgaggcattatatgtaaataatttatctattaaagttacagttctcataagttttatattattcaaatactaaataataaaaatacataattagaatgaaatgaaagctttaagggatcaacacactcctgaagagttgtctgataaaaatattatggaacatattcttgggcgtcattctgtatacttgcgagggttgggggcggtcttttagtggtacaagttctacttcagagcgtgatactactcatcccgatcgtc

SEQ ID NO: 227062 - DNA, 659 bp, Cannabis indica
aaaaaaaaaaaaaatttattttactttaaaatctatctactgctacgttcactcttctcattattgtataattaaattaataatgatatatatgtatcatcattggttgcgtaacaaactagatatgttacgtgtgtaatttgtctctacaatgtcttgaaataccatattattttcatgttttcctgagagagcaaattgagcagtaaaataatatatactgttaattagaatcttttattacaattttttagtcaatttctatgttcaaaattatatgtcgaaatattttaattttttttttcatagcgatatttgttatagttaaaatatcatcctgtaaatttttgaaaaattccgaatagtttacagtgccgaaaacagagttcctgatattccagtttaccaagactagagtgttcaaaaaacttcaaacgtattttcggtagtgtaaactatttaaaatttttcaaaaagttatagagatgatattgtaagcataacgaacaccatcgtgaaaaaaaaatgaaaaaaaaaatatttcgacatgtatttttgagtgtggaggttgactaaaagattgtaataagaggttagcactcctcgtatatatattttacaaattaacaaaatatatcaaaagtaactatatatgcacc

SEQ ID NO: 227063 - DNA, 1728 bp, Cannabis indica
catcgaagttcattagtgaggagatgacgatattttctcttgtgtttactgggttactataaggaaacaaataaaataatgaagttattctcgaaccgtgtgttggaaaataagaagagtattgaaaagaataatatggaataggctatatttataactcaatctgtgtgattttttacttgatacaaaatggtaggtttacatatctatttataagactctatggattattctagaaatattattaaatgactaacttctatatttttctacataattcccactactaacacaagtgaaggagatttctagaaaatacttcttcactcgaggaaaccattcaagaaagcatactttacattcatttggtggatcttccatttattttagactgctaaagaaattattaatctaatagctttaagatgagaaactgaagtaaatatctcatcatagttgatgccttctctttaaatgtagcatttgtctaccaatcttgttttttattattcttctttttcttatacacccactttactccaattagcttgtatccttgtggaagaatagttggctcccatgtgttattttttataatttaattaatttcttcatccatcgcatctctatatttcttgcttcccactgcttcttggtagcttagaggtttgcaattaccaaatagacacataagagaaatattattttgattttcagttacctcataaagttcttgcaagcttctaaagcatgacgtctttttatttgagctttcacttgaatcttctagtaagtttctagttggcgagattgctggagtagtaggctcttgaagttcttcttccatccttagttgctccactacatcttcctcttaaaagtaaaaaataaattcatactcgtcttcttctatgttccaatcccaagaatcttctttatcaaactctacatctcggttgatgatagtcttgccgataattggattgtacaacttatggcctttggatagatgtacttctcacttttgtcatcaagcttggttctcttttgatcaggaacatgaacataagtaatacgtccaaagactttgaggtgagaaattctaagttttaccaagtaaactgcataagcttctagaggtgtcttctcatgtacacttcttgttggagagcgatttaccaagtaaactgcataagctatcgcttcagcctaaaactcttttggcattattttactttttagcatgctgcaagccatgctgagtatgcttcgattcttcctctctgccactctattttgttggggggatctcgacactattaagggatgacgaattccatgatcttcacagtacttgttgaactcatttgatgtgaactctcctcctcggtcagatctcatggacttaatcggaagaccactttcttttttaacccgagctttgaatttcttgaagttcttgaacacttctgacttctccttcaagaaacaagtccatactttttttgaaaaatcatcaataaaaatgaggaaatatttactcttaccaaatgagtttggtttaattggtccacaaacgtcggtgtgtatgagctcaagagactttgtggctcttgataacgactcctttgaaaaacttctccgggattgatttccaagcaaacatccttcacaaagttgatttagttggttgatgcatggaagacctctcaccatctccttcttctc

SEQ ID NO: 227064 - DNA, 1116 bp, Cannabis indica
aaaaacgttggacaagagagctgaaagcatgctcaatcaattcaagtacgtttatgaacgttttcatcggtaaccaggagaatgatttacttttagctcgtgttattaaaaatcaacgtttaggtaatggaagaggttcaacatcgcgtcgtacttttattcctcatcatatattcattcgaagaaactctcttgagggtcaccttaacattcgagatcaagaatttcatttttcaacatcaatcggatcttgtcgaacatttatgggaaatatatagttaatcttaagcacctgtattttacattttactataaatatatatatatatatatatatataaatatatttaggctagggttatattttgaattaggaaaaaagtaatgttaatgtgtctttttgagtaaatttaaaatttcttactttcccaattaatttatagtttagtttactttatgaattgtaattaatttatttaaaactataacataattttgtaaaaaaggttaatgatacaactatatggtattatatatgacttgtatattgtaaatactaagggtcaatttggcttagttgtactgtgaagaaaagtaattgtagttgtgctgtaagaaaaaacaagttgtagtaaaactatagaaaaaaattgagctgagtgtttggtaaattataaattttaaagtgttgagagttattaagattctattataataataataatattttaatctatttcattaaaatcacaaatatatatataaaaaaaatgttatataaaattttcattttctatatattttcaattattttttctatagtataaatttctatgtattcgataaaaataatttttaatattattaaattatatttttatcaattataaaagaaaattgtagtttataagaaacttaggttgatattgtttgttcaaaaatataaataaaaaatataaaatattttaaaaaaaaataaaaaattagaaatttaaatattattttctcaaaaaaatatttttattttttgtaatatataataaataattaaataaatttttagtaaaaataatttattatagccttttaatcaaaatagttttttctaaaagttgg

SEQ ID NO: 227065 - DNA, 3174 bp, Cannabis indica
gaagatggatgccttcaggtaatggcatataatctactacacttctgttaacatcttttgctttgcttatattcctttgctgcattctcatttttgacttctttttataaagcatttaaccccataagttccaagcatgattaagaatttttcactgtacatcatgttgtttcaaattctatctttagtatcatgttaaaattagcaaaaaatctctgaagtgagtgcaacagaagattttaagtaatttccgattcgtacattgtgttttgagagactgtatcggtcatactcatttcgtcagtgtttatttcatgtatgatcatatcgaagataggaatgaattgaagtttatatttttttcctttttatgtttctgtttgagaagatttacacgaagtgtgggagacgtgctatgccaaccatgatgatgggatccgcggcaacatttatagattgcgatgagtgctggaagctgctattggtcacaaagaaaggttccatgtttgtatgggacttattcaaccggaaatgtcttcttcaagattcgttggcatctttgtttgttgctaacacaagtgcatctgcgaaagacgcaggtaacaaacaacttttgttatggaatttaaagatctgatttttacggggatgaagttttgtattctgcttcttgctaattttcttgtattttttgcacccttttcagggtcaatcaaagttatatcagcaaagttgtcgagatctggatcaccgcttgttgttcttgccactcgccatgccttccttttcgacatgagcctcatgtgttggttgagagttgcagatgattgtttccctgcttcaaatttcgctagctcgtggaatctaagttcagttcagagtggcgagttggctgccttgcaggttgatgttagaaaatatttggcccggaagcctggttggagcaggtatgtcaccaatttatttcagttctacgttatctgtttcggctcaatttcaaggcatagaatattctcactcgaatctgttagctaatgaggtcttcactgtcacttgttatctttttatgagaatttatcgggttaaatgttggtgcagggtgactgacgatggagtgcagacacgagctcatttagaatctcagttggcttcttcattggctttgaagtctcctaaggaatatcgtcaatgtctactgtcgtatgtacgctttttggcaaggtgatcttctaatttaattattgatgatagttcgttattactcgccgtttagctcgttgggaaagtatgttcaatgggccacgtgcgaacaagacaacaattttatgttgatgaattattgtcatttgcagagaagcagatgagtctcgcctacgagaagtttgtgagagttttctcggacctccaactgggatggctgaatccacgtctttagatccgaagaacttggcttgggatccttttgtgcttgtgagttgacatgacatacttcctttacatctggctcccgaaacattggatttgatcggttttcttttgaactctgcagggaataaggaaacataaactcttaagggaagatattctaccggcgatggcaacaaatagaaaagttcagcgtttgctcaatgaatttatggacattctctcggagtatgaaagtgttgaagctgacacacaacgaaaaactcagattgctgctccaccatgtacaacagccgatccaatggactatgtaccatcatcagcaacgaatcgaatagattctactcctgcaacaacagttggagtcgagattcagactcttcctactaccataacaaaagaaaacgacaatacaacagagcaagaaaattatgctcgaaaaacagatcgagttgatctaaactccccattgatagacgaaatggatgcttgttcttgaactctgcaatgggatttcatgttcgaaaacagaacatacaaacatattggtggtggggcataacattttacaatgcaatgataacaacaaccggtatcgagttcagttttcccgaagtggtgaaaaagcttaagattttttacaaggctccaccaaagttgcaacataatctctctttcggctcggcggatcttacttctcacacgattcgtgtaatagcgtaatcattactattaagatccaaagctgatttagatttgtttctcttcttttatgggaaatcccatcataaattgatagattaggagttaatgtataattgtgtttataagttttgttaaaatcttatgctttatgttctaaatatttactactaatgtgctcttaattttttttcactaatattacttttgatttggtcataccattttggagatttgttgtgataacaattggtagttgaaatgaatgaatgggcataaagtgagtgtgggaacatgttctttctttctagtgtttgaagatgattcataatgtgataaaacttgatgatcaattatattagtacatttgattaaattggtttttagagttgaaattgatgatattttcttatctaagttattgtacacaacaataatgatgagttggtgaagcgcgactcctttttaggatcgagtgccatgggaccgttttttgtgtcaatttgctgggtgggtgcgggtgggggagtcgggggggtcggggtggggtgtggagtcgagggggtcggggtgggggtgtggagtcgaggggtcggggtgggggtgtggagtcggggggtcggggtgggggtcaagggaggctgttaggagtaaggagacactctaataggggaagaagaaaaagcgggtgatcatgtgtttataggtgagacgagaagagtgcgatgccttgccctaactaataattagggcgtcccaggtttgaaaacatagctttttatgttttatttttttaaataaaaaaatgcactaaattctatagactagggttgaaccctaaatatcttacacttcacaaatttctccactcacctaatttatataaatatatatttttatttttggctgcagaaaacagataggggatctaccgaaacagatagggatatttttatggggtttttgaaatttctaagttttttacttttttattatggggcggaattttttttcaaaaatatctgtattttttttcaaaaatactgt

SEQ ID NO: 227066 - DNA, 1389 bp, Cannabis indica
  modified_base (75)..(75): a, c, t, g, unknown or other
agttgtgaaagagcgttgtgaaagctaatgacagcttttaggagggggtgtgcaaaattgaactgatggtaaaanatttgggaagaccactggatcacacatggtaaagatttcctccttcaaggatctattaacccttctcattcatacacgttagtgtctgagcttctgactaagtcaggtacctgtgacacaactaacttgcataacctatttaatcgtgagacagttgctactattttgaaagggcgtaacccgttaggacaatgtaaagaccattggattttgaccaaggaaggaaatggatgtttctcttgcaaatcggcctacttaatccacgcctttcagcggttcccccactgtgaggttgccctagctctttggaataagctctggaattgcaaaattctttaaccccataaagttttgtggtgcagcatcctttcaaatgcgctccttgtaagggctactttatacaaacgctttcatattgctgatagcacttgctcgatctgtgacgttgaagaggaatccacagagcacctgttcctctagtgtaatatggctttccacttatgacgctcatctccctgcattattttccccgttacgagaacagggattcgtatgtgggactaggtgaagtttttatggagccttaaaagtagggacataaatacagatgaggtgttcctttatgcctctattgtaattgacacgatttggcgggtccaaaacgacaaggtacataataatggttcaaataatgtgaatcaatgtatggactttatttctcactcttaagcatattacagagattctcttattcctacattatccccgacccccttgttgcttggaaacctcccctcaagactagatcaaattaaattgtgatgttaaagttggaggggagcaaatgtgcatatttgttgttgctagagactacctgagcaaggtgatttgggtttttacgaccaaaatagagttttctgatgctctttgtggggaagttgttgcgatttccttggtgcttgaggtagcaaaggacaaaggtcatcagtttatcctagtcgaaagcaattctaagatagtgatcaatactctcaacggcattgaaccccgatagaaaattgaaaactattctcttttctgtgacagaatcgttccttctttcatttactaattattatgttttatgactagatcttgtaactttttggctcataacgtatagtttaatggacttttacccacaaccactatgggtgttattacgttactactattcttatgaacatttgttgtaacaaccgtgaggtctattgttttatttaggcttgaatgtatatcttttcaaaaaaaaaataattttgaggcattgtatag

SEQ ID NO: 227067 - DNA, 4011 bp, Cannabis indica
ttttttttcctttttttctttctaatatatgaactttgcacttagaactattaaaaaagtgtgatccctatttgagtttttatgtaagcatttggtgatatgttctagtctgcttatctctaatttgtgaacttagcccatacaaagctatatgatagtagtaccaagtacttcttggtgagctctaatataatctgatttataagttagcaccttgtacaataatgggagcaggtttgaaaaaggatcttagaataaactgtagttgtaaaacatatttcaaattttcttgtcttaacgctttgcattttaagctcttgagaacaatttggtagaattcattttgcgaaatgccttgtaatttctatgtttttctttgtattttatactgcttttgagactttggttgttggatttgatgtcttgcagttggggtggatcaagcaggcctgactttacatgcaaaagtaccgaaggtagtttcatctacaatatatgtaggctttattactgtatgctagatgttgtaacataatcagaaaacaatatattatattcatgctgtaaacttgcaattaaatgtcagaaaccgaggcatggttcattgattcccttgaagaatggagaaaagccaagaacctaagcaactttattttacttggacattcatttggaggatatgttgctgctaagtatgctctcaaggtaaattctttcttctatcaactttgaagtctgcgtatgctgatgtcatttatcacatcactgatgtcttgttcatcttcgtaaagcatccagagcacgttaagcacttgattttggtaggatctgctggcttttcctctgaggcagatggcatgtctgagcggcttactcgtttcagagcaacatggaaaggagctctcttaaaccatttgtgggaatctaattttacccctcaaaagattatcaggtgtctatttcttttcctttgtagttttaactgcattatttgcatgaacctaatgataggtcaattgatcaagtcttcaatttctgatgggacagtttcctccctcctaaagattgtagggttcagtgtgaggatagttttattttcagttttgaatacattatttgcattttcaggaattaaaattgaataaactctatgtttccattatttcaatctatctttgatgtcttccttttattttgttgttggacggttacatacatggatgtgacaccaaatacgactgtgctgcgggaatagaattgtaccagcgtgttaatcttgtgttttttggtactttgtagaggcttaggtccgtggggtccaaatcttgtgcagaaatacacaactgctagattcagttcgtactctacagggaatgtgctgactgaagaggagtctaaactgctaactggtaaataatattcactttatggtttaatacttatcatgtaattaactgtccctaataatttattttccaattgaagattatgtataccataccttagcagccaaagctagtggggagctgtgcttgaaatatattttttcttttggagcatttgcaaggatgcccctacttcacaggtgtgatgatcccgtttctctcaaaaatttctttgttgcttgttttcgtcaaatttaacccgagaaaaagtaataacagagataagtgaagtaaaattggtatccttttgtgcttgtaattatgtcgtttgaaatgtcctttgggctctagaatgtttttttttcttgcagaagtgcttataattcaaccaaatgttgaatcaaataagtttatgctgtgtttctattctacaacttgtgtggggcaatagagttttaaaaatgataatctttctctacaaacagtgcctcagagtggaaggtgccaactacattcatatacggatatgaagactggatgaactatcaaggagcccaagaagctcgcaagaatatgaaggtcccctgtgagatcatcagggttcctcaggtcctctctccctctttcattctttctatatatatgtatatattattgttataggacatgcccaacaccaccttatgtacggtgtaatttggtattggccccacataccaatgacggttggtcgtgtaaggtgatgttggacattattggtgcccctttagcaatattgtgtgcaaccgacggtcgttgaattgaatgattttgtgaattcaattgcaggcggggcactttgtgttcatagacaaccctaacgacttccattcagctgttttttatgcttgccgaagatttctctctcccaactccgataaagaatctcttccggagggtttgatacctgcctgaccagagtctggtataatttttttactaccattttttcttcatttcatttctatgtatgacaattacttaagttaatcacacaaatagtgactcgtgaatataaatatcattcatatcgacttgtatatttttttcaactttatcttgatgatgttgtaaacccgaataaattgatactctgtttataagcacattgttaatagcacaagttttaagattatatagtttattattgtttccattaaagtagctgaacccttatttattactacttttaacgttcaatagatttgagttcgtaggagttaattgagtgtttcggcttcaacaatggtgtcgaaacacaagcacattgtcttagatgatgactgtctgtggtgccttgagcatgtattaaatagcttggttttgcttgagcatgtggtggcttgagcatgtgttaaatagctttctagtttggtcatggacattttctttgttttctaaaatgtaataagatttttttagcatatgttttgttgtctaaaatttgtagggcttcactttccttgctagccatggatttaggatgcttttgactaaatgataaacttatttagatggaagatttttttaatgcatatttagctaaaaggtatttgcggtataaatacttcatgtttctttgttttatatatttatatactacttgttttgttttttatcgattcattacccaatgttacatttctggtacatttgtcaatgtctgcatcgttaacttaaatgttgaattggcaaatagatgatatttgtcagtataatattggtttacattattgatttttattttttaaatcattatgttgaagcggttttttgttactgaaactaagaagatcgtaattgagcaagatgaacacaagcaatagttaatcaaagcaaataggtttgtgaaagaaaatttgacaaagatgaacacgaggattttatagcggtttaccccctttcggtggtaatagactagttcacttggagtgttattgatcttgatgtttgaggagagtcttcgagagttatgttcttcaagaattcaatcttcaagtgagtttttaaaatgaaagagtgggggattaagagaatgattttgtgagaatcaaaattggggtcccctctacaagtgatttcactccccttataagtttttatataggatttaaatttttttatctacttcccgtaactacggttgggttaggtttaaaatacaaaaatcacatttcaaaataaatatctaaaaattaataaaagattaaaatatcttataacttcacgtgttgacagatttccatcacgaggaacacatgctaaggccatgttgttagtaggttgcaagaagaaccgagatactcctcattttgggctgagataacaagcacgctgaggctcatcttaggctgaggtgatgagagtgtgaggccctatttaggtcgagatgatgatgaggccaagatgaccattttggtctgagggtttggggtctgagttcggggttgggattcgggtctcggtccaatcccggtctaaggttgagggtcaggtccgggtttgggttcgagttcgggacaaggtccaggctcgggtccaggtacgagtcggggcctagatttgattggagtctaaaatattgatt

SEQ ID NO: 227068 - DNA, 1218 bp, Cannabis indica
ctggctcgtgaagtgaaagtatccatacaaatggggaccatgcggtctgggacagatgtcctgcgagtgttgcacctatgtaatgtggtgtcagatgcgtgctgttggatgaaagggaggttttccctttagtagtgtgtgcactaccatgttatgatatatgagacaagatttgatacagtgggactaggtgtcatcactctacaaagggcttcatttattccgtcttgagaaggctagggaccttccaggtctagatgagcctcacctttggaggtgagcctttttgggcttcagaagggttcataccaatctttcgtttggactggctcttccctcgtggaaagactttaatccaagccatgatggattaatcatactttggaaatgtcgcgtttcccccttccggaaacacgaataataataacatttatttaaaaaataaagtgatatagtagggtttttcgttcctaaatttatagccacaggggttttttttttctttggccaaacccgccagtcttccttgagcataggtccagcttggtcggggttgtatttgttggtgattattttaccaagatttagatttactaaaatatatgttgtttaacaccctaaatatgaattctctaaaataatagaattaaacacatataaagttaatgaaaccttatattagtggcagcagaataatatgtcttcttccactcaaatctctaaccattattcctttctatcgcagagtattatcaagatttgagcccgattctcctttaggtgttggattcttcacagtcttccgcgctatgattgagtacttgacttgctatgggtgggcatgtactctttcactatagggctaaaaattatgaaaagaacgagagggagattcaattctatagaaggaggctctcaagtttctagttgtctgacaaagaatgaaaactaggttaacttaggttggatgagaacgagagccatcttattccttatataggatttctcctaggattagatttaaattatatggaattgaataaagaaaaaaaaaattagctaaacttttccttaagtggccccactagataaaattttgccattttattcaacaagttatcttcctttcacaaataccatatttttcaatttcaatcctttaaatgtcaaacttatttatttaataattaaaaattaattatcaaataaattgtcatt

SEQ ID NO: 227069 - DNA, 1297 bp, Cannabis indica
tcttctcttttttttaaaaaaaaagagacatggtggtatcaattttgaacttaggaaagaagaaattagggtttaaagaagagaaagggttgtgcaattaggaagggatgaaggaggtaaggtgcgataggtagggctggaaatcatgtgattaggtttttgagaaaagttgcattaagctctgatattagtagatgaagaaaacataggtagttgggtattctagaggagacccagtgctttcctatgaacttctccccctctatccttcactactcactcatgtacataataccaataccccattaaaattactcttataccctttctatttattatcctaaggcctaacactatgctagcagaaaaatgtcattagatcactaaattatgttttggttttattttatcttccatttaccttgtgctagtatataacttgctattcttggacttgaaatcatcggcatcagccacttttcatgctttttcttgtcttgttagagaatatttagagaagtttctttgccttaaactgtcatcagttcaacatttttcttatccaatgtcaagattttattaaggaaatgtttaattgtatgacctctatctaaatttgtgtttattttagtaaaatgtagttgtataaaattttgaaggaagagaatggttggccagaacagtataggcagtgatcgttccaggacatattggacaccaataatggaaagatacttcattgatctaatgttagaacagatgcatagaggagctaggattggccatactttcaacaagcaggcgtggaccgaaatgctcaccatgttcaatgcaaaatttggttctcaatatgacaaggatgttctaaaaagccgttatacaaatttgtggaagcaattcaatgatgtaaagaatcttctgggccagaatggatttgcttgggacgaaaatcttcaaatggtggtggctgatgattatgtgtgggatgcttacattaaggtgcatattttctgtaagggtttagtgttgttgatgtaaaacttccctaaattaatgtgatatagagttacatgtttgcaggctcatcctgatgcacggtcctataaaactaaagcagttctgaacttcaatgatttgtgcctgatatatggatatacaactgctgatggaagatatagtcgatcaagtcatgacatggatcttgatgatgaagtgttaggtgtaaatataggtgtgttgtctttccttgattttgtgttggttaaacttcggaaatcagcttaatttatactaaaaa

SEQ ID NO: 227070 - DNA, 1102 bp, Cannabis indica
ttagaaaatacagagtccattttgtcatttaacaaaacatagggtccaatctgtaacgtttgcaaaatataaggtccaaaatggtatttaacccaaaaaaaaaaaaaaaaagtaatatatatgcacatgaagatggagtgagctaccttaggtgttaatagttaaaatatatatataacttggagtagaagaatatttgaatactagcttgtagtattcatcattatcttcgtctcatctttatgtaccattataagtagcagtagtactaatgtcctacacacgtgccctcatctgttttcctctttccctttcctttggcataaagacagatttatgaattaagcaattcttttatatctaaccatgtcctaacgttgtcctggcgtatggcatccgtatcatattatatctaaccatgcctttgcatttactgcaattatctattctacatataataggtctagataatctaaataagataaaaataaacaaacaaaaagcatagtattcttattattgcttacatttgtatgactgtataattattaagtaatcttatagtattttttttgtattatttttttttgtaagaaaacgtatccctgtattgataatcagaattagtggtccaagatacaatgtaagaggtaaggatcatctcctatccaaatttcctctccatcaaaccccaaggcacacttagctaagttatggacaagtatgttggttggccttggaacaaaacttatagaaaggggtattttactaagcatgttaaaaaatgggtctattatcaaattttagaccctaaaatttataccgggatatagaaaatatagaaaatatagaggtagaaatttataccgggatggataaccacagggacccgcccttaatggggtggggattcctttcttggtggttagtggagcaatggtaggagaaaatttcaatactcgaattgatggggcgagagtaggaataatttatccgcactatatctgaccctgatataaatatgatataaatagatagatatatatatattttttttttaaaggaaaacactttattcaacaaacaagaaactacaaatggt

SEQ ID NO: 227071 - DNA, 732 bp, Cannabis indica
agtgaagtcgtgtttggtaaactgtataatggaaccaatgaaaacaacagcatatatattattaactgttgtaatgaccctttatttattacgtgctccattttacagcattctactcctacatatttataggttttgtttttaacaaaattgattgtatgctaatgaggtaggcctttaatcttgtttgctatttaagagaattattttttttttctacattgtatttatttagtataacttgtcaattttcaaaaacttttgaatacttaactatgttgaaaataatgctcaaatattttttctacccatctttaaaaatttacatgtaatttgaaataaatacaacatacacaaaaaaaaaaaaaattaaaccaaaaacccttataaatgtcccaaataaataaggactacctaaacatccctatagaaagtgtattataaatttttcggaaaaaaacaggaaaattccaaaaagagaaaaatattataatattactatggaccggcccattcaacatttatacagcccacaatgaaaaaaattacaaaaataccacctggtctataccttaagccgcacgtaacgaacggagaagatgaagaaacctccatcgatccaatctgcaacgcaaccagaatgaaaccagaacgagggtaaaacaaccataaattccggcgaaaattgactggaaaagaagaactacaatgatctaaacagaaaattacgaa

SEQ ID NO: 227072 - DNA, 558 bp, Cannabis indica
cgaataggttttgcaaaagcagcaatgacagaaccagtagaatctctcaaaactgcacccatacctacaactccattagacttgtcaaaggctgcatcagtattaagtttcagtttgcctgatggtggagccaaccaattttgtgtggctttcggaggctgagaaattgaagttgatggcgaggacgagacagaggcaaggtgagcagattcatcattcttgttggcagtttggtaatccctcaagtatgcactagctataaaatatatattttttaatctttgctaacttcttttatttattttttttccatctcatattcataaataatatattttaaatattcatacaacaaaaattaaaataaaaaactatattaaatttattagaataaaataaaataaaattatacatcattcaaacatatatataaaagtaaaagtaaaataaaaataattagcaatcttttgatactttctgattttgtctcttaaaatatacggcttgttaaaaattttttatgaacttttacatttacagaaatttagtccttctatt

SEQ ID NO: 227073 - DNA, 1031 bp, Cannabis indica
cgtttttagagctaaatagctttttggcttttcttattcctgacttggaacgagtctgcatgttgtcagagttgataacatttggaatatcagtcgttgtggcagcagttgtattggtcttcattaggcacagaagcagtattttcattgtttgactgctgagcatttgtgatctcaacagtgttaggaaatgaagaggaggctatatgagtagtggtaatgttggatactccagatataggcaattgtggagtatgagctgctgtagcagtggtatttgctggtgctgtactgtagggatagcagagatgttacaaggtgttgctggtatcaattgtggtgcctgcacagggttagaagaactagagatagcatgtgtatgaggtaaaatagatgcagcatgttgagataaaccagatgaggagtttgtaatagtgggaatagcaacagatgggtaaaaagaggcaaccatttctggtattatatgagattgttgatgtgaagcataaggaaattgagattcattaaaaatgacatctcttgagatgtacacacggccagaagtgtcaagacacttataacctttgtggttaatgctatatccaataaaagtccatggagtagatctaaattgcattttgtgcttattatatggtcttatattgggatagcaggaacaaccaaaggtttttaagctagtgtaatcaggtgggatttttttgtttagaacaggtgtaggaaaactattatgaatatagacagctgttctaaaggcctcatcccaaaattttaagggcattgatgcttgagcaagaagagtgagaccattttcaacaatatgtctatgtttgcgctcaactagaccattttgctcatgtgtagtgggacatggatgtctatgaatgatccagcctcttttaagtattagtgaaagacctatactcacccctccaatctgtttgtagaactttgattttggtgccaagttgtaactcagctttagctttgaagtgctgaaatgtttttaatgc

SEQ ID NO: 227074 - DNA, 917 bp, Cannabis indica
taatttatatatatatatatatattgcaataaagaaacataatgatacaataaatatatttataacataataagttgcagaaggtgcttcattatatgttgattgaatcaaatattcctactacatagaaaggcaacatttttaggtgaatcataatcactacaccttacatattgttacccaacatttatggaagaaaagaaaactaaaagaaaaacattaattgattcaattttttgtttttttttttgtttgtttggtatttgtaataatattgtttttctaatgagatttggtgagaatggatggtgatgatgaaacaggtgttaagccatgtttaagtgcagcattccaaacaaggtcaattctgtccacatctaaggctccaacttcatgatgagtccatccttcaagtgaatgaaccactccacctgcatggcatgcatgtactactcctctttccatagtatactgcatctcatcatatatatcattacaacaatataacacatctatactacccaattacccaaaagaaaaaaaaaaaaatctttttcaaatatataattttttttgataatttttaaaaataccacctattttaataagggtccaaaatattttattttttctaaggcccaacaaatttctaagatctaaaaattttgacacattatcttaggttttaacaccaaaaaattcatcgaaatttttttcaaaaatactttgtactgtgttaaattttcactgttgtttaacatttattttttggttgttccactgttgttttagttattctattttattattttacggttgttttataaaaagacaataattttgtaaaaaaaattcgtgtaacagtaaaattgtaaacttttgccaaaaatcaaatatttttgtaaaaacctttaact

SEQ ID NO: 227075 - DNA, 807 bp, Cannabis indica
aaaaaactgagaataggttgatatatcaaaaaaaaaaaacccaaatgaataactgaaataaaaaaaataaacgaaactataaaaagcgacctgtttaacagcaagaagttctccagaatctagatttatgcccatatatacgcgtccaaaggcgccgcaaccaatcaactcgcccttgcgccatctgatcgcaggcgcagcattttctatggtgatcgacgccggttgtgacgggggaggaggaggcggagagggttttgaaaagactctggattttcgaatgcaggaattgattttgtccaccaaagttgggactcctactcctcctcctccgattggggaagtggacgattcttcattctccggcggagtacgaaacaccaatgatcgacgaactgatccaaatatatcctgcattttttagtgagagaaagagcggaggggatagagagagagagagagagaaagacagaaagcgcgtcggagaatgagaaagttgggactctactggggtttcatttggtcggcaaaagagtgaaaaagaaattgagagagagagttcgggggagggaaaaggtgacccgtattatatttttcaaatatataataataaatggaatcaaataatgtacaaacactaatttttcttaccaattaaagattctttaaaataatttttgtacactatagtaagttttttttatttatttatttttttgataatattttttttaagttaattaggtatttttttcttcacaattttacatgtaacaaatcattacacttgaacttttaaaatttttt

SEQ ID NO: 227076 - DNA, 750 bp, Cannabis indica
ataatttgttatttttttatttaaaaaaaataatttaataatttctgaattctcttatatagccacattttatatagaatagacatatttatgactatgatataacttattgaaattttttgcctcacttttcactctatatatacatatactgtatacacatgacatcttccacatctatatattgcttgaaaaccctggataaattttcaacacgtacattagcgtttaagaattatcattacttcaattaattctattgctagctagctagatatgcagggaattctcacccatatattgctttatgtggaaatacacaataaagcaattaatagatagcggcttgtatttgtttactctgacctatatttctctatgctgataaaaatgtataaaatgcattctgtttcttattccttttgtatttttttttctacccttacaatatataatataccaaaaaaataaaatgtcaactccttcctcgttcctttcttccaataaacttacaagttgtctttgatattagaatattttctattttaataatagaatgaattaataattttaacacaaataaatatttttatatttattagtcattattaattggttgtatattttatacctagctaataagattatgatttctaaatatttgatttctcgatttaatttctatgaattaattgtctaaaatattctgacattagtacttgtggtcagagactttgatggaaatgtctc

SEQ ID NO: 227077 - DNA, 960 bp, Cannabis indica
tgttcttattaggccacgcttaaggcagtttatggattagagctagtagttatctttgctttttgcagccaacatgatgtactttcttatatctattaacataaaagtgttgtgtggcgactttatcaaattaggacatgtatttcaattttctggtatctaagctaagatccttgtattactagtattcattgcccccttttcttcaataatataaaatatgtcatttggtgtgctagggattatattcattcaatctcaagctttaagttttctgaattggtttgtgacatgaaatttcatgcatgattttgactacgtaaacacatgcaacctcatttaatttgctcaacaaagttattattgccttatcattaaattctctgagcaataataagtacattatttctgtaaggaagaaaatagctaagaaacaatcttgtgtttagccaactccatatcttcctacagatgtgatcatttcactttctcatgtcattatcagaataccctctattgttaccaggttgaaagttgataatatacttattatcaggtatttttgcagggctagcattgcccttgaaagttgttactttaaacttgtattgtattttcatgtgactgaacgttaaattaggaggcaggaatcatagcccatgtgcttgagaaaagaaaagaaagagtgttcatttcatctatcagttggaatattggtctaattcagagttgattttagtctggatggaatactagagcattgttagaaggcacccaatagtgagttaaaatatgtaagagcatctttgacggattcaatatttttttacctaacttaagtaactaataagaaaactaaaaatagggagccactttttctcatctcacccatttatgctttaattatttaataatttttttatgggattatttcacaaaaacataaacacaacaaaaaaa

SEQ ID NO: 227078 - DNA, 1533 bp, Cannabis indica
gtactcgtaggatcttgaatggtgtgcattccatccagatcaattattgattattgcacaagatcaattagttaaattgctgattagacatgatgaaatctccacaacaagacaaatatactcaaaattagaaaaagaaaagtagatctcattaaattgaatggtggacgataagctgaacataaccactaaattattctggtactagtgttcagagaaggttcttaccagttaccactacatttcacccaaggatccatagaaaataaatattcttacttggatattcacaaaagtagatcaggtgcattaaggtctttacgatttgtaagtatacaaggtttcaaacttttaaatttctgtaactgtggaaaacattccagaaagggtgcaatgcaaagaatgtggattcaattaacggcacggaagcatgtatcgaacagatatgacattggaaaaagtaaagaactttcacgaaaaacaaaacaaggttaagaaaaaaggcacttacttcttcaggtcccaatggtggctgccgtggtttaccccatattagtgctgcttcatcaaactgacaagcaaacaaaaaaaaaattataacaattgaattggattcaatgtagcctcacaaatagttctgaaaatgaaggatattaaattacaacttcaaattaaatatgtcaaaatgtgctgttataaataaatgaacaaaagaagaaaaaaaaataacaactatattggatccatacataagacgaacatttaacataaatataaccatgcaaacaatcaagtgacgcagaatgtaaaaagaaaattataacaaggcaatttattcatcacttggcactgtttttcaaaacagcagggtccaatttatatgagtatgatttcttctttttcttttttttttttttttttgttctaaagaaagacccaggttaatccagagatggtcttaactgtagaacttaaaaattaaatttccaaaccagataatatgttagaagcatccgttgaagcgcttattcaattgtcttcttctgcatttgccaaccccgtgtccaactccaaacaacaaacggaggataaagttgaattgtaacacaagtcatttactccaagtactataaataagggtatggatagaagataatgaacttgggaagtgattgaataatgtatatatctaacaaacaactgtgggcctcgataacatatttacactaaacttaaaggaatatttgatagtgcggacagaagatcacccaaaaaggaaagaaaaaaataggatgtaaagatgacactctttacaatacctcctcacatttgattagctcaaaacatcccacacctgtatcagcttcatcaccagggttgtgtttcgtacatgaaattttctgtttaacaagttaaggggatactctatatcagctaagagaaaaaaggcttcagttataaacccaactactaaaccagtcctccttgtgtgatttaagaaaataatgcagcactgccgcaaagttttaaaat

SEQ ID NO: 227079 - DNA, 956 bp, Cannabis indica
tactcacctcccatctcaaagaatcactatgattctccaatgcaagctttgtcaacaagtttgcactgcttcgagcataagccactagcctcttaagttcctttaattcgatcaaatccatatgtaaatatagtgtacataaacaagtagaatgttaaaacagccttaaatcttcatcgcagcatatttggagcaaggactaggctgctgtctgaaaatttaaattttccagagtgccgaaagaacaactttattccacgaggagatttctatagctttatcagtaattttttttaatctaaacgtctatatgttcagtgggtttgagtgacatctactaagaaactttgtagctcgatagcaaaagatagaacaacataaaaggtcaatgagagacgagaggaaaaaaacaaacacaagaaaagaaaggtgaatattgaaaatttttaacacttgaaaaacatacgactgcaatagaattgaacataaaaacaagatcactaaccgacgagtttggtgagaatctggtccaggcctcagacgacctgtcataacctgtagctacaaacattgcatgtttgatatcttgtgcatttgactcgtaagcttttctggccaacataaagttttcctggaaaattgttcacagccaagctaagaagaatatcaaaacaagaagggaccaactacaatacaagaatcctcaatgatttatggacaagaaaactaaccgttatctctttctctccatcagtacccaaatcttcattaatgtcaataattagtggagcaaaggtccagtcataatctgatagtagtagtagaaacctatacacaaaatgtcccacagaacacaaaacagagttagttaggatacaaatttaaattatttctagctgcaagtctaattgctaaagatttaacttgagctgaataaagaaactttaacctcaaaa

SEQ ID NO: 227080 - DNA, 1850 bp, Cannabis indica
atatatattcttcatatttaaaattaagtatatgtatattcaggtggctagagcattggattgcgaaggagaaatgtctgatctgtctaatggagtaaagtatggacaaagcactatatacgagtcaggacaatacaaccaagacattatgaggtttagaaaaatggcacttggtggtggagacagttcagaatatgacacatacagtggagagtttaactctaaagaattttctggtcaacaaaagtcaacatggagagatgggtccagtggagagtctgaaactagagccttcactgaacaaagatatagtgctccaccaaccaactttggcaaccgtcagtactaaatagttattcaaatttaccacattatttttaatgtttgatttatatcattttgtcactttaatctcttttttttttggggtacataactcttttgaagaagtttggttgcccataaaatattatacatgcatacatgcatgatgcatatttgagagaaagtattgccacatatggactaatctgacctattattgtaagctttttgttttgcttaatgttattcttattgtcatctatgttattctgtgttggagaaacttgtaaatgctaggcattcttaagggacacctaatactctattttgttcaagcactttctctaacctgttagctcaatcattgaatatatcatatcaattttgaaataaattattattatttaaacaaaaagaaatagattcaaatcaatgagataaaatggaattattatatctctgtttttctttcaattaaaataaaacaaaaattatcagattcttgttaggtctcataaaaatattgtaagccagttttagagaatatcatttagtaaattcacattagcatcttataataatgtctttttactaaacatttatgttatttcaatatctttgtggttcacgaaaacatttcgttaacaattgatacttacatagcaagtttagtttcaatctaaaaatacacaagtgaacttcaaaagaccatatatatgtaaaagaaaattaagaataataaaataaaaaagaataaaagacaaggattttgagatattaatccagccagctaatcctaaagagttgatcaatatggtgcatatatatatatgatttatgggcccatgtgccctccatgaccatgaccatgaccatggtacttcacttccccatgttcgtacggcttgtggcctctgctactgtctctgttaccattttgttttccatggtttggatttttcttatcgaacccaaactcgaagtccccatctttggaccgagtgctacggttcccaaacgtttcaacataaccttctctgggcccaagtgcaggcccaggcccaggcccatagctattcttcataaactcagtctctccttgtttgggctgaaaatgtggattcccaaactcgggatctctgtctccatctttggacctaaagctacggtttccgaacgattcgacgtatccttctttgggcccaaagctacttttaccaaactcaatatcaccttgtttgggctgaaaatgtggatctccatctttgggccgaaagttccgattcctggagtcaggctccccacctttgggccgagacttttgagacttatggggctttgttgggctatgtttatgggctttacgattgcaaagcctgccaagacagcaagcaatacctgatatgacaacaatcacggctaagacaatgaagactgtcccaaatgacccacttgaatggtgagtggactcaggcacaggttgctttgtgactggataaaccaaaactggttgttgttgttgttgt

SEQ ID NO: 227081 - DNA, 2680 bp, Cannabis indica
cttaccataaaaaaacccaaggtttccccacagattcaccataaagttctctaattgtttagtttacataaggaaaactacatttgggtttttactctgaatcaccgtacggagagccttgactgtagcatgcttccccaagcctctgtagttccaagacaggatcctcatggaaacttgggggcatgattaggcccgcctcctcggtcacaataaaatcctgatctttgttgggggtcttcgagcttccttcctcactccccaaagacgtcttaacagtctgtaactctatatcattcctcattcctgtatccccgacacatggcctcttcctacactcttgacaacctccctcttcttgtgcttcaaaattatttcccctgtctctggactctcctccatgtgtcatgttactcttcggaccactactttcatgactagttttcttcctttttgcccccaccctttgggagtctccctcatccttccccccaaaaattggggttttaggaatccctttaggtccaacctgcttcaaattcgttcttctagtttttactttccttttggtatcccttcggaatagaccctttagtgctcccaaaaatagtgtctccaaaagctttcttgaaaattttggccatatgtgcaacactttccgtgtgtgctctttcctttggagcctcaacatagtcattcagcctcactgagaaattattgtcactattctaaataaccactccaactccgatggggcagtaagtctgtgtcacctcctcctcttcctctgcaacctcgttgctccctttcttatccaggggctcacctttcccatctaagtttttagtcacgtactctgcttcttcctcctcaagtcttttcctctcttgaatatcttctttatcaagcaaggcaaagctattctctatgcaagatccttcaccgtataaaggaatactcctcccatcatcaaggatcaccatccttttcctccctgagcatcctgaatcttcatggccaataacaccacttttgtaacacaaagaaagaagtttatcatacttcaagtagctccaaactttcttttccccctcccctaaaagagtgaaccctgctaggatcggtttttgcagagagacacgaacctagaaatgtaagaagtggtttagaagaatacccctccgtcttactttgttttcctgaatgaaagttcccaccctattcgccatgctcaatactgcatcatcgttcaaaaacttggtagggacatccatcagccgcacccaaatcaaaaaactggttaaatctgcatcagcccacttcccactcatcgacatcggagttactaacatgaatcctttatagggattccaagtttggaatccataacaaacttcgcttccttttcgaagtggaaacagaaaacaaaggtccttgtttttctttccactaactggaacctccaaccacccttcaacttccacatcctagtcaaaaccttacagagcagcccatttgataccatttcttttgagaagaaccgacccaccaccgagcttgcaatcatcgcctgggctgcgtcacagtcagccgctaaatccagagagaatcatccagggaaaatttctccacctcctccactgtctcctccaaattcactgagttaacgacctccttgtcagatagacgaatcgccattgtttgaaactataaaaccttatccccatttggaaaaaagcttagaccaagattctcaaccgccaaatcgagcaaatagcaaggaatattggggaataaagccctgtcgtgaaaagatgtaggccctaataccaaaaacgacactcttttgtaggaaacagggttttcaaaaccctgagacaccagaaaagggtcccatgagctgtacaacagccttgccagccaccataccgtggtgggcacaccaccacccgtcctggcaaaaggttgtttcactatcctcattctctaaattgtagggagagcatattcaaaagttgtacgaaacatattcaaatgtgtttttttggggactcataatttccgaatgggtagattttattttattacttgatcgtgttgttttgcttattcaaacttatagttgcatcaaatttataaggataataactttatggagtattaaactaaaatgaaaggtgctatttaggtttatatgcatttttcattatggttttaagttaatattaaaaatcaatagtgtaattggatatcgaattgaaaaactgatccaatccaattgaaaaatcaatggcaattggatatccaattaaaaatttgatccaatccaattgaaaatcattggtatcattggattggattttgaggtatagttggattggatcgaatgatgattttgtaaatctaattactaattggattggatcaaattaagagaaaaatattggatagaatcggatgtccaaccctacagtggcggacccataattttagttgagaagggcgtattttttactaaatgaggggggcatactttattttctacatgatataacatgttaaaaattgatactatatttttatagtattaaatatagttttttttttaaaaaaaaataataacaataaaaatgttggcttagaaaagattagtagaggttcaagaaggtaaactttaaat

SEQ ID NO: 227082 - DNA, 1193 bp, Cannabis indica
ttgatcatatgtatagttttttttttatgtatagcaatgtataatgtatgtaagctctaaaaatacgtactgcagtactgtatatgtaccttatatttcatgtgatcatgatgacttggcatagaggagatatagtaatcgacaaaaaattcgtaaatagcaagaaagtgtcaagcagaagcggacaactaccatttttcgagccaaaataaaatattatggcatcctaaaaacataatagtatggcgccacataatagatcgattactcacatcccccaaatattgaaaaataatatatggtacaaaacaaattgagtgtctacctccacatcttacaataactttcttaagccaaataaatataaacaagtgatttaacacaaattcaattttaatctaaaataaaatcaaataaccaaacacaacaaaataatccctatacaacaagcagaccaaaaccaactaattacatgtgagtaagggtatattgtgtaatttaaagctcactttgaggtagcttcttaattatattgcaaaacactctctactcttcacttcagcgtatttttaatttctataaaagctataaaggataacctattgtaaacacaattgtgtttctactccttcaaacactgtacacaatagcaacaacaacatggtcgcaaaatatcagtgagaatgctcctctttctgctgttaatccaaggaccaagtacaccagccaccaaaatcaagatgccaaacagaggttccaagccgaagccaagaaaaagaactttgagtctattaagaaagttattgggtcaaactcaccttaacaaaactggcttgttaaaagagaatttctctcactttattaaatagatcgagtatatatcaccagtaaatgtggactctaatacgttccctcccgcacaacatgaaccatattgtcaaacaattatgaataaatcgacattggcgacatccaacattaccaaataatgccctctctgataccatgttagaaaagttattaggtgtaactctccttaacaaaactagtttattaagagaagattatcctcactttattaagtgaattatgtatatatcaccaattggattctaatagaatcacccagaaagggccactcaaagaataaatagtagtgttagatatttatttgtatagactaaaacatacat

SEQ ID NO: 227083 - DNA, 5402 bp, Cannabis indica
actaacatgctaaagttaattattatgttatatttatcacttttaattataaatatgtattgtaattaattaaaatttatatatcatttttttgatttttttaaaagggcgactgctccctctcgcctttatgaagatctgtccatattttcaatcaaattattatgtagtaattaaagaaattaggattacacaatatttgaaaatataatatatttttagatataaaataataattatatttaaattagtaattatacataaaaaaatatagtaattattatttaaaataaaaagttctttttggtaattacaattcttttttttaaaaaaaaaattggtaattacagttatacctataaactagtaaattgtgtaaataagtccaataaaatccagttccaccatagtttttcaatcaccttattttttttaatcaaatttatatttcatttttttgaaagcaaatttatattattttgataatattgtccctgtaaaaggaaaaaaggaaaagtatgtccaaaaatagaaataggaaaatattaaaaaataataaaaagaaaaagaaaagaaaaaaagaaaagaggagtttggaatggaggcataattctccattgatgtgcatgtgaggagtgagagactattttgaagtcgctcccacgtttgagaagtaccatcatcaccattctccatgttccgccaatgaagctaacttttacagacaaacactcctaatccttcttccatcactatcttccattctttagacattacaattcattcattcctttctgggtaggtaagaattttttggtagttttttcagttttgagttttttttttggggttttacattttctgatttttcttttttgagatttgcatcataatacattacattaccatcaaaatttgaatttgcgtcaacattacagttccaagtgggtggttgtcaaatctggtgatcaagtcattagataaagttggcatattctgggttccatttctctgatttttttttttttggggggggcacaatttcatccattctagctttattcccaggcgagtttcgtgaattgggtcttgaagttttttgggttttaggatctgaagaattttcttttttggtcaagagaatttcttggtctttgccgtgaagaagacgagtttgatttttagggttgccatttttgtaatggaggtctcttggtagtaatagtagtattagcagactaaaataagtagtggaattgaagtgaaagacttaaaaagtagaaagaaatggcttcaacttcaccatctccgaactcttcgccgccttctgcggcggttcccccaacttccacttcttcaccggtgactccatcaacgacgtctccgcctccttcttcttcatctcaacccgatcagacttcagatactcccattgctcccactaactcggcaacgcctcctcctcaatctcctcctccggtagttcccgccgctcctcctccctcaccgccgcaatcaccaccaccggcttcgccaccgccatccccacctgccgccccgccaccttcaactccagctttgccgaccccttcacctcccgtgtcaacggcgcctccacctgctacaccgtcggcttcgccaccaccttcaacccctgctcctcctccagctgttgtcgcttcaccgccacctccaattgattcatcgccgccacctccatcaactgattcttctcctcctccacctcctcctgaagattctccaactcctccggctccgaccgcgcctactcgtccagctgtttcaccttccccacctcctccggcaactgtcccggatcctccttcatcggattcgcctccaccgccagttgccaagacaccggagaagtctcctccgtcgtctcctgatgttccttctcgaagtcctccacccaccccagagaccacattgccatcacctcctccttcatctccttcagccccttcagttccatcatcctcatcgccctccccaacatcccatgctgctttgcctaataacactgcctcgccattgcctgctctcccaacacagaagcctactgcaaaaccaactaatggcaatgtcaatgcaaatgccacgtctagtaatggagggattaaaactggtggagctgttgctattggtattatagttgggtttgtgatgctcagttttcttgccatggctgtgtggtttgtaaggaagaagaagaagagagaaagaataaatgttaattacgccacaccttctccatttgcctcctcccaaaattcaggtaatgtatataattacttctcaaattcaagtacatttatcttcattttcttgttgcttatatatggtggtaaaagtccattgaacatgaaattattgatgacattaacagtttgttattgggaggttaattatgagttttgtggtttttggaaaacctattgtttgatgctaaacttagaattttctactaaataaattttactaggctagtcttaagcttgcaagttattgacttgattttacttacgagtatgacccctttgaaatgattttaatgacttgtatttccttggcagattcattatttctaaggccgtattctccagctcctcttatgggaactaactctaatagtgagtataggtatgctccttcggaaggtgggacaaatagttcaaaatcattcttcaggtatgaagaattaatccaggctacaaatggcttttctgcacaaaatcttttaggcgaaggtggatttggttgtgtatacaaaggtgtcttggttgatggaagagaagttgctgtgaaacaactgaagattggtggtggacaaggagagcgtgagttcagagcagaagttgaaattattagccgagtacatcatcgccatttggtttctcttgttggttattgtatatctgatcatcaaagactgctagtctatgactatgttccaaacgatacacttcattataatcttcatggtgagtgagacatacctcaaactttggtttgaagactttaattgttaactgttatcctctgctgatgcaccatattttaactgagatacatagagtacatatgagccataactctcacttttgttctttctgtccatttatccgtttaatacaaatactctgctgtgatccttgacactaaagaaaaaatctaactttttgcatggcttgcatgttttcaggtgaggggaggcctgttatgtcttgggaaatgagagtcaaggttgcggctggttctgcccgaggaattgcttacctacatgaagattgtaagtttcttattttttttttctaataagaaactaaaattgtattagaaatagaggaagctgaaaggattgcaatagaaaaaggaaacttacaactacaattacaattacaccaaaaggatccaatctctaataatctgttcaagccccaagtaattccacatttctattcaactcatttgtaaaacacatatcgtgaatgtttttttttcctggccttctgtttatatatagtcatgtctggttaattttccttttcaataaagtattaatatataagcaccctaaccccaaaaggccttttgttgctctacattttctatatatataaaaaaaaaatagtatcatatagctcttgaattttaaattgccatagcctttcattacaattctctgaaagctgacattatcatgttaaaactcgatctccccctccttttctattagcatgcttttaaagatacaaccttatattatggttgacctgttcttaggagtaaacatagtcacctgaaactcacagacaaacacctatactgaaatattgcattttgattatatttgttcatatttatgtaatgtgttataatgtctctctctcttttcctcttatcaatttaattttgttgttcaggccatcctcgcattattcacagagatattaagtcatcaaacatccttctggataacaattatgaagctcaggtatattatttgtaagctttaatgttatgattcaaactgcaactataaatgtgccatggcagataaaacggaagttatatatttgttagtgaagattcttcttttggcatattacttttcttggaattggttagatgttttaggattacttacccttgttactgcatatgttttcttggctctttgataaatacattataagatgacaatgtccttttctaaatcatacgaacaggttgcagattttgggcttgcaaagttagcactggattcaaatacacatgtaacaacacgtgtaatgggaacctttgggtaggtgtccaagatattttcaccaaatgattatattgatattgaacatgcttctatgattattatgttcttattcatttcaagaaattgaccaagcaaattatatattgctggttgcaatttccttttctatgttttaatgaatgttattgtgagactttccagatatatggctccagagtatgccacaagtggcaagttgactgaaaagtcagatgtttattcttttggtgttgttctattagagctaatcaccggccgcaaacctgtggatgggtctcagccattaggtgatgagagcttagtagaatgggtaagtaacaagttcgtgaacatataataatatcatctcgtgtcatatggacatagttggtattatcacttttgcaaattgtcaatttatagtttctagttttaatttgttacggtgatttctgattaagtgaatctagttttagaagttcacacttctggtactcttgtctcttctagaaaaaccaattgagaaagaattgatagttgttttttgcattcagcacttgatgtgcctttaatgttgttttgatattacacttctgattttactgatttttgcattcaaactctctcaggcccggccactgcttacccaggcacttgataacaataactttgacgagttagtagatccaaggctggggcgaaattacaaggacaccgagatgtttcgcatggttgaggcagctgctgcttgtgtgcgtcattcagctacaaaaagaccacggatgggacaggtacttccattgaatgatccccgtgtataaattgcctactacattgtgtttcttttacatagagagttgatgactcttttcttgtcccgggttcaggtggtgagagccttagattcaatggatgagttctcggacctcagcaatggagttaaaccaggccaaagtgaagtttatgattcagcgcaacaatctgctcaaattcgaatgtttcagaggatggcatttggcagtcaagattacagtactgatttctttgatcgaagtcatagtagctgggggagtagagagcacagagaccg

SEQ ID NO: 227084 - DNA, 747 bp, Cannabis indica
catctctcttgaactttgaaatatctacacctttttatccactttaagctggtgtttagccttggatttttgaccatgattccttcctgtccattcaaacaactcttggttgacttctttactataccaacaaccaaaaaaattgacaagagacaagtatcatcagaaatgatactaaattaggagaattatatctatttcatataaagtaattaattgttataaattaagataatgcataatcatttatctttattttcttttttgtagatattaggagtctttgattggattggttgcaacccaatgccaccagaattttggattctcccatccttttctcctatacatccatgtttgtatatttatatatttcaataaactttaaatacctatattttgtttgacatatttgtgttaattgatagttttttgttttcttacaaaattgtagctaaaatatggtgttattgtcgattggtttatatgcctatgtcatatttatatggaaaaagatttgttggtcccatcacaccacttattctacaattgagagatgagctttatgctcaaccttataatcaaatcaattggaagaatgtacgtcatcaatgttctaaggtatgtaattcattaacatgcagatataatattttagattctgtgttttgtaaaaagttatttgttagactttgttcaaaatacgtatttttcaaaatagtatcatgaattgattttttgttcaaa

SEQ ID NO: 227085 - DNA, 833 bp, Cannabis indica
attcaaacacaaagattaattgacatatatatataggtggctccttgttatgtaattataccaaagtattaactattattaccttattattagtagtagtacatgatgaccatgcccttttatcacccataaattccttcagtttaggacacttcttgatttccaatccagacaacaatggacattcaatacaataatctccttcacaaaaccttataaggtttggaagactccaaagttgaatagattcaagtttttcaaatggtaatattgctttaatattgctgccacctgataatgataatgatgaatattcctcatcactcactattaccttttctatcttctcacattctcctacatgtaatatctcaagttgtcgagccatgtgagatgataacagagacttcattttgttacatctccaaacatcaacacatttaagttgggaaatgaagtctgaaacataaaagaatgctaattatattactcactttcactataagaataaccaatgaaatcatgaaatcaaccaatgtcttacttcttttgaatatatatatatatatgtataaatatgtttagattttgagttttgattatacacattagtggattatatataaataatcttctatatgatgattgggctcctagatttaaacaccataaaaaacaataatactgtcatatgtatacacaatataataacatcactcgtgtatttgtattattccagttcactatgtaaagttttccattgccattaatcagctctaaaatatcttttccatcgtcatttttctatataatgcttcagttaaaactattac

SEQ ID NO: 227086 - DNA, 943 bp, Cannabis indica
taaaatatttatatatttttattgagaaatttgcgaaaaaagtttccaaaaattcagtttgatacaaataaattctcaatctctcttaagtagattaaacatattttttggatgttgatgataccctggctagaccatcgacttgagaggaattatctgtatcaaactaaattttctagagacttttgccgcaaatttcagaataaaaatatatattaatttgatatttgaatttactgcaacatacaccaaaacattaataaagatgacatggcttcccgcaacacattgcacaaattatctcaacagttagttccaatatcaaaacaacccaaaggcttgcatttactgaatttgttgtacttttaggaaaaattattgatcaaacaattagttcaattgttcacaacaataaaaactgtcaatgtaccagattgtgtgacaatcttaatcaagtaaatcgtttcttaattcttcagctgtattctacggaaagtaaaatttaattttcattaaaaaaagtatagggtaaaaaaggaaacttccaatatttaggccatgatcagagtctaaagagcaaacttaatggtattcaaaatcttttaaacaacagaaaagggaaacaaaaattcatgtaagtcttcaaaacaaaaatactgaatatgcaaactggcagccttcacttgagaggaatgaacctagatgaatgggtagcaccaatacctggtctaccgtgcttgacaggcttgtacgagatagaaaactcagcaaggtagtgtccaatcatctcaggcttgatctcgacctggttgaaggtcttgccattgtacacaccgatgatgcttccgatcattctctggtacataatcatgttacggaggtgagttctaactggttctggcttctcaccagcttgggggcttccctttttctgcattacaga

SEQ ID NO: 227087 - DNA, 932 bp, Cannabis indica
gaatataaattggaataaaaattaaaaattttagtataactaaaatatgaattttaaaattcaccttttaaaaatataaaaataataaaacttaggaagaaggagttgaggttatttttttgcggaaggtaaaaaggggttgaggttttcagaattgaccgataaagattgaagatgtgtggttatttgttgtttagttcttgacgtctttatcctaacagggaatgatgattgagtgcacgtgtggtaggtctgtccacgtgcatctgttttattcactcaattgattgatttgtctcttttcttttctctttctctctctttatttatttatttatttattttccattctcatgaaatttcttctcttttctcctctttcaccaatcaaccaaaccaaaccaaacacccctacccctattctctctttctctctacagaaactgatagcctacaaagctaaaagtaaggtaacttttaaattttttgaaccttagtttgtcgttaactgtggtaaaatattagtggtgagactactgagaattgaattgacaagtgaactgagaattaattagtaaatctctaacaattttaccaagggtggtcacaactaccattcctctataaatgcctctttttctgtttttagtatatgatcgaaatgcgtgacctccttccattaattcttctttcatccaccttttgttttctttctcttaactcatttcaagaatatgcatttattagaaattttaaattaaattaaatatttactttctacaataataataataataataataataataatggtaatagttaattatcatatttaataattcgcggcaaaaaataattaaacttttcagtttgtagcacaaaaatacttaagtcttttttttagtagtaaaaatataggcttttttattttt

SEQ ID NO: 227088 - DNA, 829 bp, Cannabis indica
tcattcaaattttactgtttcactgattgtttatgtactaaaccatgcttccaagactttgatatctaccaaatcatgccccttgacctttgatatgtactaaatcatgcctcgtgaactttcatccatgttagaatttttttactaaaattagataaaagtctttaaattcaacaatctcaattcagggggcatttttagcgaccttaaaagttcaggaggtatgatttggtacatgtcaaaatttaggagaaaaatcctaattaggcttatttgtatagtaacatatgtttaaaactctaactgattatttaaagtacatctcaagcactaagtgcaaaatatctttgaaaaataggtcatttgctgaaaaatcattaagaattaaaattttattcttaaaagctaatttgagagagacatttcgatgccaatctaacttatttgtgacaaaaattatgggattttatctcgaatgttcagaagagatataattctgatatactataataaaattataaaatttaatcttaaaaccaattaataataggagaatttacaattttatatacattatagtacttaattatattatatgtgcaaaaaaaattatttacaatttatcattaattttattaactatgagaaacatattcttaatttttatatacaaactatatatggtaaaaataaataataaacatacatattttatttaaaaatttgtgtttgaattttaataaacacattatattaacatatctaaaaaatatatcatcacaaacattatcataataaatatattctattaataattaataaacattat

SEQ ID NO: 227089 - DNA, 1948 bp, Cannabis indica
aggacatttactaacatagttctatgatttagggtgatcatttgctataattttttaaaatgaggacatatactaacatagtcttataatttggggtcattaatttactataatttcccttacaaattttgtttgtaattacttctctagtgggcctcctaatattattcttccgtaaaatataaagggataacttgaaaaatacttatttttcgtgttagttaaccaaaactaccagcaaattatatttatttatattatacccacttttataggaagattgcccaatatctccccacattagcattaaagactgaaaattaagtcctactgttttggattgaagaaagggtattataaggacattaactacaaaagtaggtagaaaatataaaatattaaaattaaaatggctaacttaaagtgggtaccccacttaatttcctcaaatataaacacaatccaaatggagattccaacctcatgcctttgagaagcttacaataaatgagaatacagattagatgatatcaatatgagaagtttataatacgacaatacatgtgaaaaaaattgaaatatctctggtcattaattttttgagcttcaatccaacataagttttgaatctacaaaagaaaaaagaaaatgaattagtgtaagtaatcgaatttccaagctctctcactaactttcactgatggtcgtttatggaagaattaatatgaacagtgaacttagggacgaataccctatattaatatagatgaaacttttctaactagaattaattttcagaatattaataatcaattagaatatgcaatttggatatgtaatttgggaaaattggtaaattaataatactaaccatatttaaatattgagtgagttaacaaactattaactaagaatacaaatcaattataattaattaatatatttatttattataatattcgtacacaaacactgaaatatgcaataaagaaactatataaagcttataaggcatgactacactaagttttgttattaattattattgtatttgtaagtaagttctaaccaattatagttagagtttatgagttttactgtcaatatacatatgtttcgtggtgtgcccggccgtcttcgatcaagctggaatttttactttgatgataaaactgaaatgggctcctatttcatatatacgtattactttgtttttcggagacattctatttgatatgtgtgccttaattattctaattgtgtagtgtaataatcttaattagttgatcatgaatattgtattcttcttcttcctcgtatgtagttccaaaacaattttaatatggtgataagtaatatatataaatcctaaaaaaaatggagaaagaaaaactcatatggaaggataatatttccatatatattttttatttaaaaattaaaatcgtatttatgtattagcccgttacggattcaaaaaaattgttctgtgaaacttgattgttataaaaatattaacattgcctttaataggtctgtcacacatcattgttatttgcaccctttacttgtataattgtaatttgcaattaattaagtagcactatgaaaattaaacacatgcatagaatgaattaataaacacaactatatatattgataaagttaatttttttttctattgttgcaattaatataggaatatgaatgtattgtcataatatataataatataaaaattatgaaaaccacgtacctgctaactaattccaaccgaataatttctttggaattagctagttaattccatgctgcttgcctggattaaatgagcaaataataataataattacaggtatatatattagaaagaagtaaaggctagagaggggcaaaagccagaagtatgatataacagaattacataaatatctgaaaataatggaaa

SEQ ID NO: 227090 - DNA, 937 bp, Cannabis indica
aaaaaaaaaaaattaattaagatcaaattgtgattacaaccattgagaagagaaatttcaagaaacaataagccaaggtgtatcacatcttcaacaatagcccaacacccacatcttacaagtttctttcttttcatccaacatttcacgtcgtatttcaaatcggttagaaaatgaacggtaaagccaggatttaagttgaggatatgttaaaaattaatacttagtattttataataataaatataatataaagtaaaaacaaataacattaaaaaaatgattaattaggatttttactcccgaattttgacatgaccaaatcatgccccttgaacttctaaggtcattaaaaaatgcccctgaactattgagattgttgaatttaaggacttttatctaattttagtaaaaaaaaagtctaacatggataaaagttcagggggcatgatttagtttatgttaaagttcaaggggcataatttggtagatatcaaagtctggggagcatgatttagtacataaacaattactgaaacagtataatggaatgaaattaaacaaaaatccttaaatctaacaatcacaatagttcatggggaattttttaatggccaaaaaagtttaggggcatgatttggtacatattaaagtttgggggttaaaaatcctaattaaccacactacaacatttttggtcattagcggcggaccctatccgccgctaataacagtggtattattagcggcggaccccaatgtctgctgctaatggtggtcgtttctttttttttaaaaaaattatattattagcggcgagcagtccgccgctaatgcccgctgcaattgttccgccgctaatgatattaatagcgacggactccattttggccgctaatactgttagtagcagccacgcattagccgcgaaccaata

SEQ ID NO: 227091 - DNA, 988 bp, Cannabis indica
  modified_base (30)..(30): a, c, t, g, unknown or other
ctctctctctctctctctctctctctctcnctctctctctctctctctctctctctctctctctctctctctctctctggtggacattgaacaatcggcccacacctgaatccctcaagaattatccaccattaaaaatgggtaaattgtgttttaactatttccttagacattaggaatagtgtgtagtttgttttcgttatatgtgtgtggtgtttgtttgaactggtattattttgctattttttggtctgaaatgctaaatctgttttctctcaaaatctgggttttttttactgtttatcgatagaatatcgatataaaaggtaccattattgacaagatgtcgattatttgtcaatatattattgacaatctagctaaaatatgatttaagcatcgtttgtcgacagtatgtcgaccttatgtcgataatatttgaaaaataaatatacacacaaattgtcgatgatttgtcgatagtttatcgatactttctcgatgattagtaaaaattttaatttctcattgtaattgttgtttgtcgacatattgtcgatagaatgtcaacaatattataaaaaaaaaaagtggctgaaacaagtaaaaagtataagtaaaaatgaaacaatcaggataacgattgcgaactttaaaactaacccataaacgttaaatttaaaagtcttgatagttgggtgattcatgcaatacaagcttaaccacccaggcatgactggtttgcctttaaccacatatagtttgcaatgatgccacccttcggggaaccccgatagataaaagagaacaccatccctttgaatgtgttcgaacctcctctagttcgctaccttttcatgttaaaatagtttcatacattccctttgctctctttacaaaaagtgacggtattcttaactccattttgctctcaattggatgacttgacattcaacatcaacaataacacgaagggggatgttttgtc

SEQ ID NO: 227092 - DNA, 6428 bp, Cannabis indica
ataatttatttatataaaaaaatgagaaaaaaaaaaagaatctagggtttttagagatttttatttacttcacataacatataaaattaaaaatacttatacttatttatacgtgttatagtcatattatttcaagttaagtgtgtcgagctaaaaaccacatgtttaataaatgtgttaaacatatgtcaacacgattttgacatgaatattgaaagggcattcagtaatacttttattttttaatttttaatcacaaacatgaaagtaaaatttgtatttttaaaaaataaaaatgtgttttataaccacttttgtttcctaattttaaaaatagaaaacaaaaaatatattttattgcttttatttttatttttattcttttattttatttaagtcggatctaagttcgggtctggagttggggctggggccgtggttcaagttcggggctggggtcggggccagagtctgagtcctaaggtccaggttagggtcggagtccaaaatattgattaagaaaagaaaaaaactgtttaaaaaaattttgaaattaaattttttttttctgttttcaaaatttttaaaattttgattctcaattaaaaattaaaaaatgaaaacagttttataaaacatatttttgtaaaatatttttacttttctaattaaaaaaaaaaactaattaaaaaagtgttatcaatcaatttatcccttattgttcaaaaaaaaaaattatcccttaaactcatttattttgtgtcacttatatcacaaatatgagcctctcctttcatatgcaagaaataaaaagatgagaataaattaaaagaataaaaaaggcagctgttattgctattgctattttgattttttttaataaatcaatataggctgagaagttttccatataatcatatatattaacctttactacttccttacttcacgttctttcatattttttttttcttataattagttgacttttacctttgtattctcaatcattaaagtctattaatctatatttggcttccactgtaatcgattttacttggtcatcctacaatatttgctaagtcttctaaaaaatttgttaaacctctaagaaagattgttagcactatttataagtgacaatgtctagtaatcaattatttcctacatcaattttacattttatatttaatacatatacatttaaaaagcattatcattgagtacgaagatcacaatttattatgaatttttcttaagaaattaaattctcataatctttgttgaaaggtattttctttttctagcatcctttcattttgtattttgtgttatttttgtatccatttactgtagttgttttgatttcagtttatgatttatcattgcccattagatattttaataatttctttagacaaaatgaaataatgtgtgggtttagtttccttagctagatatgataaacttatttacatccaatatatgttagatttacattgaaatttaagaggaaaagtttttagatcttcttagattacattattacttctaatgttttgatgatgatgtgcataattttctctctttaatataaatataaaatgggttaatgatgcttgatctcttcttctttttttttttttaatattataatatatgattatcttctataaaattattttaaaaaggatattttagttgctgagatgatcactaaacatagtttttttttcttttaaagaaaggtgatagaaaatggcagaaagtgaggatattcaacctcttgtttgtgacaatggaaccggaatggtgaaggtattgattcaaaacctattattttgttatcttttttagagcattgacgaattcccttgagatgcatttttaagttcaattatactattggtattgatattgaaattttaggctggttttgctggtgatgatgctccaagagctgtatttcccagtattgttggtcgccctcgacatacaggtgtgatggttggtatgggccaaaaggatgcatatgtaggagatgaggctcaatctaagagaggtattttgactctaaagtatccaattgagcatggtattgtgagcaattgggatgatatggaaaagatttggcatcacactttctacaatgagcttcgtgttgccccagaggagcatccaattctccttacagaagcaccactcaaccctaaggccaatcgtgagaagatgactcaaattatgtttgagacattcaatactccagctatgtatgtagctatccaagcggtcctttcgctttatgcaagtggtcgtacaactggtaagcaatcaatagatcctttgcctggtttttttttttcaactaatgttctcttttatgttttgttgttcttcaggtattgttcttgattcgggtgatggtgtgagtcacacagttcccatctatgagggttatgcccttccacatgccatcttgcgtttggatcttgcaggtcgtgatctcacagatgcctttatgaaaattttgaccgaacgcggttactctttcacaactacagcagaacgagaaatagtgagggacatgaaggagaaactggcctatattgctcttgattatgagcaggaactagagacatcaaagaccaactcatctgttgagaagagctatgagctacctgatggccaagtaatcaccattggcgctgaacgatttcggtgccctgaagttctcttccagccctccatgatcggaatggaagctgctggtattcatgaaaccacatacaactctatcatgaagtgtgatgtggatattaggaaggacctctatggcaacatcgtccttagtggtggttcaaccatgttccctggcattgctgatcgaatgagcaaggagattacgctttggctccaagcagcatgaagattaaagtgttgctccaccagaaagaaagtacagtgtttggattggaggttctattttggcatccctaagtactttccaacaggtaattaatgtgtcatcacagagatgtatataataaaaaaatttgacatgtgtattgaaaaattatctatactaatatttgttgattttttgagtgtagatgtggattgcaaaggcagaatatgatgagtctggaccgtcaattgttcacaggaaatgcttctaatcatgaaaatcaaaagttggattaaaactaacactactacacacattttgtattacagagataaatgcttttaattaagtggctatatatagcctctttgtctattttattttaattttttcattcatgtttcctacttttattttgaacaatctttcattttttattttttttcttcacatgtgaaaaagttgtgtattgtatggtattcatatggtataattgcaaattcttttttttttttttttaacatacttgtatcttaattctaagtgtgttttattgcatgttaaaaatttaagcattatttttaattactcatttagtttaatttgaataaaaattatttattttattgctagcattataatgcccaaatctttaaaagacataaaatattgtgattggtgtaattttagacttgtaattaaagagcaagtctttcatgctttaaattatctaagtaatagatctatgcgaagagcaattactttgtttattttttaaaatataatataaatatcaaataaaattataaagtgaaaacaaaaaatcaaatttgtaaatagttcaagaaatatcattattttgtgtaggttccatacaatgtgcatcacgaaaattaattattattttatataaatatttagtatttttaattttgcttagtttcaagtcctcaaaattaatacatttttagtttatatgggaattgcatgatataaatcattatcttttaagaagaacttaaaaactttcaataaaacagaaaatacagagtttgggtacaaagtaatcaggccaagacagaaggtaaagaaccatttcatgtacactcattgtctaatcctaactttgtcttcgcatgatggtgggctagcttattgctatctctcggtacatgaactctaagcaagttgggattgaacaacaatgagttcttaatacaattaacaacatcactaagaacagaattattacaataaaagttgtttattttattcaccacacttttgcaatctgaagcaataatcgacaccggcaacttaactgcttgaatctaggttagagccgttaggattgatttaccctctgccacttcaggaggggtcaagcctgtacaaggagtcacgaaacctgccttgatatgatcatcaacgtctagccacaactccataattgtgcttcttggagacataatcaatggctgcaatagtatggactatccattgcccaggaggaatccgagtcacttgcttattcttacttttcgtgtgtgttgacaatttaagttgttcacaatgggcattgacatagtcatataggtaattggcagcataatcaaaaagttgcatgggagaaaaacctcttttattatgaaatatattattacgttgattccatattgcccaaatgaaaaaaaaaaaatagaagggccaagttatatttgtcatatagatcaaaagcaccagaaataaacaagttaatatccctgcctttatgcatattataataactgaaaaacatggagtgcttccaagcttttttggcatgacgacactcaaggatagcatgttccacagtctccatttttagttggcaaatggggcaaaccggggagggaatgatatgtcgaaaaaataaagaagaggaaacaagtatggaatgagagtgagcacgccagatcagatgtttaaccttaggtggcgcaccaaaagaccagattttagaccaaaaatacttactagtatcaatagaggaagaagtgggcatatctctagatttaagagctaaatggtgagcaattttgacattgaaaatccctgtagggtcaaggcccaaaatcaaaatatcattgcagttatggccagaatttggagcacgaagaatttcatcaatgaacgtgctatcaaaatattcctgtagcttaccccgatcccaatcaccagaaagggaaatgaaaaaagacaagttaggatcaggaggggaagaagaggattaagatttaagccaaaagccagggagccaacgatcctctacagtactgatatccatactattttccactttccaaattaaccccagttttagtaagtcacgtccccataaaatgcttctccaagaaaaagagggcctatgaatagaaacagcctcaaggatggaggagttagggaaataacgagctttaaggatacaactcaataaagaatcaaggtactcgagaactctccaagcttgcttagcaagtatggcctgattaaaatgagttaaagactgaaagtccaaacctcccacaaatttagattgacaaacacttggccagtttttctaatggattttacgagactcctcaatggatctccactagaacttagagatcatagattcaatttccttacaaatcttagtaggaatatgataacaggccatggcatatgaggggatagcttgaagaacttgcaatcaacatcaagctaaatgcaatctgaataattacatagcatgtactaaaaacaagatcccttagtgagtcttgttaaatagtacgcaagctaaaatgtgaatagaggataaactattcacatgagcaatttaaaaatatttaaaatagttatactgttcaaagtgctcaagtttgctcttcattaaatatacaaacgaatataaactactcgcacacatgcaatcaaaagtgtttagaaacaattaattgtacaaggacatttaagttcgctacttactcgaggcttaatttgagaaaaaatgttttgtcaaagttatgtagataaagcttattcatgaacaaaaatacataacatcttcaaaatattcataactcaaataaaaaaaaaatcataaaaaaagaggaaatatattgattaaactggtataaaaattataagtgtaattaaagtgaagttggccatctaacaacgcaaaataaaaataattacattcataataagtgcaacaaagggccaaatattgtctagaccaaaagaccattgttcaaaaattattaaaactaagtctccatggtgggagacttaggtggaagatcttattcttcttcctcagggacctcaacctcattagagagagctccttcttcttccttagtttgtttaaaatacgctagcatcgccttggctgcctcacccaaaaagttgagatccatgtctagattcaccatccaagctttgtgaatagaacgcttggccaccaagttaacccttgttggaaattatttta

SEQ ID NO: 227093 - DNA, 572 bp, Cannabis indica
acctttatgtccttttctccatgtctaaagctgtccacgtacgtgcttacaagttcacaaaaaagaaagagatctccaaattcgtttaatgtatggtctttctctaatggaactttaattaatattacttataaaaatttcataatgcaccccatcaaataaaaatatggatgcatttctatttactctagcatttagaataatttttttttatagttgtctatgttgtaattattttggatattttataaaattttaaaaaaattaaaataatttaatacaccaaaaaaaaaatcaaacattatatttcacacgtatataaaataaaagagtttgtaacagattgtttaaatttgttttaaatttttttaaatcttttaaaattttacagaatgtcttaaataaatacaatattaatgactataaaaatttgaatttaaaacttttctaagatgtttggaaagtaatgcatgggtaaagtattttaaagagcgaattgtagaagtggcctaatacttattatcttaatcccaaagacattctatttcattaatttttcttttttggtgatg

SEQ ID NO: 227094 - DNA, 1384 bp, Cannabis indica
gtatttttgtaaaattccctatgcaaattaggaacacataatgacttttgttgagaaattaaataagcccatacctatcttatatgtacagtaaaacctttactatctttacatataattggggctaaattaattgtattgtttgttaattgagaggatataattgaatagagatatttggtaaaaaaatttctaatttctaaaaatattaattttaattatataataaattctataataattatgtcaaaaaaaaatctgtaataattattattcaaaaaatatttgtataactacatgtatatagagtgaatagggacaaaaatgacacttgaaaaaaatataacaatgtatattttctcaataggaaacttaaaaaatttataactaattaaaatcgagatataattttcatcaataattacctcatattggactaaagtatctaataacttttattatatactatatatgttatacaaattttttaaaatggccgggccgctctattgaatttgaatgaagtttctttaaaggaaaagaaaaaaaaatcttgtaagacttataatcaagttgtggagagaactttctttattacacacaaagtcttctaaagcatacattgcttttattgtcaagtgggaattcattaaaaaataatttgtccataatgtgaacaagttgcactatgtcttgtcccaaatgaaaatttgagataaatgtatatgtatatcctcaccatcaaatcaaatgaaaaggcaaacaatagtgtaactgtaatacttaaatcttgaccgttgttcaaattttaaccaaaaaccccatatagtatttggttatttggaatggattgtgttaaatactagtcaactatcatcaagagtcttttttatatatagtttgtagataaaaatagtacttataaaagatcatgatgaaaatgagatcatgagacaagtggcatacaaatcaactagtgatgaaataaaaatagtacatgtgggtgcacctaccaactttgattcaattgctgtaaaatgggggtatggcctatggccaccacatataagctcatgtaccaactgttatgacactattatcataattaactttttcttttcatttataatacaattcaaagaaaagagattaaagaataattaaatagttaactagattacagaaacaggtggcttaatctgaatgggtcaaatcataggattactccacgtgtaccataccttgtttttctacttttaatttgatcacgtttgttttcctatgatccattgaatcaaaaccctttatcttctactgattatagttagcttaacgtttcaactattttgctatatttttttattaaaagaaaagataaatagtt

SEQ ID NO: 227095 - DNA, 1176 bp, Cannabis indica
tatgtaaactctgacctttggggcctaagaaggtcagtttacatggggattgtgtctatttcttattcgtagtagatgattaatctaggaaggtttagatatatctactaaaacataaaataacgctcttcaaggtttgtcttagatttctatgaaaatcaaactaataggaggattaaggtgcttaaaattgacaatgagtttggagtcttgtaatgatttgtttgattattactacagaaaaaatgggatattaaggcataggacaattggattgataccccaatagaatgggttgctgaaaggatgaataagactttacttgacaagtctagatgtataatgtttaataatggattagctatggggttttggggtgaagctgttacaattgcttatttagtgaatcgatatccctttagtgccacagaacttaagacaccagaagaaaaatggccaggcaaaccacctaactatctaaccctaatctattttggctgtgcagcttatgcacactaaagtgggtacaggttgtgggtgagagaacaaggtggatataaaatcatagacaacagagaggtgatatttagagaggattgtttctcttgtattactaatgaaagtttaagtgtaggtactttagactctaacaatgcatgaacacaataattataccaccataaactatttaggtggaacaaccaagaacaagacctgatattggtcaggtggaactagcacaagctgaagctgatcagagaatgacacaacctgacagaggttaggtaaaaaataaaagtgaatcaacctggaaacaacccagaagacatcattgaataccagctcattggagagagtaaagagggttcccaaacctactcaaatgttcagttttaatctctggaatgaagtgatggcttatgcttttctgactgttatggaactgaacaacacagagccttactgttatgaaggagccaccaagtccaaagatgtagcaaaatggaacagtattatgggtgaagatatgactttacttaaaaagagcagaacttggatactggtgagaagacaagagggcaagaatattgttgtatgaaagtggttattcaagcataaagaaggggtcaaatatggagatccaattagatataaggcaaggcttgtagctaaagg

SEQ ID NO: 227096 - DNA, 1641 bp, Cannabis indica
aaaaaaataaaatgggctgtaattagtatttaccttatatgtttgtgcttatttttagttttatttttaattttaccactaagaggagaaggttaaaaaatattagaatatgaaaatattattggtgcttattagtaatttgcaaagaatgtgaaagtctataaatatatagttgtgtagctattattagatatgaaatgagataatagaacttttttcaattagaagattaatgtacattttactattaataacatacattattataacacaactatattttacttactaaatatactgacacatattttatttttataaaacaaatcgttcaaataattatactattttaattattaattcaaataaaaactaaaatattaaataaaactaacactacgtggcttggcacgtaacaatcacctagtatatatatatatgtggagctccatgctgcataaacatcttaaaacttttcatgtacattccaagaccttttatatccacacatttgagtatgttgggaaaattgaggggcttttaaagcctctctcaacaattctcctctctcaataattctcataccataatcattatggtcactagtttggtgcttaaattaggaattgcccatttttgaattgattgaagttgttctatttatggattgtagacttcccatttgaagatccccatgaagctttaatgtcatttgaaaacaataaataaacaaagaggttattgtataacacctatataaatgacaatataatgccctttgatttgataggaaaaaaaaatgtaagggctctcatgagctttgaattatttcttaccattaaaacttatgggtgttaactaaaatatttaattaatcacacttatttaggaaaaataaaattttatataaaaatttaaaaagaaaaaccaatttaatttacataaaagcctttacgagtatttaaaaatttatacaattaaatattaacatttatattgtttttaatgtaattatttatcaaaataggatttacaggttagaaaagcattcaaaagtttgtcatgttggcctatttataggattttttactttttcaattgtcaagtatatatttgagtctttatttattgaaaaaaaaattattcaaaaaaagaagaaatatttgattatttattttttttaaaaaaaagagacaatgagagacttgtaaaggtgatacggaggacctaattaagactgactgaggtataagatcttgtaactgacacgtgatcgccgagattgtaaaaaaaaattaagagtaggaaaatcatttgcaccaagtaattccctttcagttaataaaaaaaatacataatatgaaaaaaaatctgccagaaataaaaaccattattgaaaaaaataaataataaaaacttgtaactttctcaaaattaaacacatttcattctccaaaagagttgtaagataatgggctgggcttgagcccagtcaaccactcatttgggtttgggccgagaaagggcccaaatagcaggctcccttctcctctctgaaacacaagaaaaccctccgtctctctctttcgggggttttagctattttctctctctctctctctctctctctctctacgtacg

SEQ ID NO: 227097 - DNA, 2501 bp, Cannabis indica
atatatttatatatatatatctcctgataaccttcagaaatagtttaccaaaaaccttcataaaaactcaacatctcaaatagtatatctatataaatttttttcactttttttaaatataactaattaattaactgttaaaacaattcctttttatgtattacataagttttaattgttaaattttattcaatgattgtgttcaatttaataatttactgtaactctttccctattacatgataggttataataatacttgttagatattattcaatgattgaaatcagttgaataatttaatttactaataaacgtatttattaattaaatatgacactcaagtactcaaccacaatataacaatatagttttattttattttttaaatgtaactaccatatatattcattttttttttgtagggaccatatagctgatatattcatccttaaatgtaagactatatataaggccttttctatatacaccattatagctttatatatacaaaatatatattgaagaaaccatgtggagttgtggtgaataataaaaaatatatataaataataagaacctttcttcctttcaaataattatattataatttaaattttcagaggtgagatatgacatgttccacatgtggccaacaacctagtactccttttaagattttatgatataaagatctatttattaagatttaagaaactccagctcctccaacttttccttcccattttaatcctaagatcataattcattacaaaacccttttaattggctcttcatctaacactttacatctcataatgttttttctttttttctcagtatttaaaaatatcatatcgtacagaaaaaagggaaaaaaaaatataaagaaaaaaatagataagactaataacatgatttattatattctgcgtatcttccggacattggagcgcattttaatatttaagtgtagtttatagggaagtttaatattatttctaaagtatgtatgacattaattataacttaattcattaattactagttatctataattaattaattaaaaaaaaaaaaaaaaaagaggacgagagtagtagtagaactatgatcattaagttatgtttaaaatttagattttggtgaaaaaaaatgagaaaaatgttgaataacaaaaaccaagttttttaatattgggctggtatgaaaatttttgttggatcaaccctttttctataccaaatgtaagatttttttttttttctcgcacttttattttcttcacattcaatttccaaacatagtcttaaagaatatataatgtaaaaaattaatgaatatatataacttataacttattaatcatatctttgaaaataaagaatgagagtgtaatataaaaaaaaatgccgattaaactagttttagtggtcgttttttattttttaataatatttgtagtgccaattaaattgaatatttgttgttagaaaaaaaatctaataaactccatttttttttagaaaacaaatacctaattttagatttttatcatcatccaatcttattttaatttttcaacaaaaaaacttttgaagttctttgcaccaaaaaaaaaatggttcaattgtaaatttgtgttcatttcttcaagttaacttgacaagtctcgatgtgacatattcagtggcggaactatgttgcttcctgctggggccatggcccctccttacatttggaatttttaaatatatatatatataaatattcacgagttccctatattaattgctttcttttttttgttgaatatatatttcttgataaaaattaactatttcaaactagaaactcatgtatgggccaatgagcgtttatacttttatactaaaactattttgtttagaattgtatctctatcatttgcatcctatacattttatagttcactttttttttttattattattattatttcttttgaaagttctttttctaatttttaaaaatttatttctcaataaaaaatatcaaagtatgctctagaaaatttacgtagtacaacccttaagggatcgttctaatagacacactatctattttggcatctaaaaaagttttggaaaattctacaatacacccactttaaatagatatattgatgtactcctatctgttttagaatccgaaataattttttaatcaaattttttcttatggtcgtgtacgttattgctatttaagacatcctgcaaaattttaagaaatttaaaaaactttaacaagccggaaataggattcaaaaagtgtattgcacgcgtgactattttattttatacgagtgtgaaatagattgtttgaacaccactttctatattgtaaattattccgaatttctcaaaattttgtaggatatcttaaataactataacataaacgaatatgaaaataaattagactaaaaaaaatttctagatgccgaaataggtaagggtgca

SEQ ID NO: 227098 - DNA, 1005 bp, Cannabis indica
ttttttttttctttccttttattctatttttcctcctttgtttgggtctccacttcaatggcttccggatcaatggggctttggatcctctgcttcgcggttcatgagaaatcttttgtaggtgtaatttgactttgaatggctcattagtcaatgatatggacggctatgattacaacttctttttttccgtcttcttcatcatcaaacgaaagttacgaaactggagtgcctcaccaacctgattaaggtaacatttttgtttttaatttttcaatcataaaaataaaagttaaattttttgtttttaaaattttatttttgaaaaataaaaatatgttctatatccacttttgtttttcaattttgaaaaaaaaaaaaaaatttattctgtaaattattagaaatttatatctataaaatgaaacatatataattattgtattaaatacgtaatttatgacaagattcttaaggaaatcaactcaactgtgattacactagtgctcaaggtaaaatgcctttgtcatttataagattgtaactaagcttttgagttctagaatcaaattagttttacttgatattatctctcattcacaaggagacttcatcaaaagcagatttattgggcacaacattatgatctgttaagatttgatcaagcattatggtaggaaatccaacaaaccagggtgtgtgattaagttggatattcaaaaggcatatgatacagtggagtggcaatttataaaggagatgctttatggacttcagtttctaattccatttgtcaaactgatcatgcaatgtatctcaactacctaggttctctctgatgttcaatggaactctccatggtttctttgaatctaagagaggcttaagacaaggagatcctatatttccattactatttgtaataagaatggagcatctatctagactgatggggaaagttggggacaaggaagacttttgttttcatgatagatgtactgagct

SEQ ID NO: 227099 - DNA, 1049 bp, Cannabis indica
aaagcgattccagggacgaatttgagccaaacagggaatcctctgaatttcaaaaaacagagtacaaattatttcatatttatattttttcccaataaattatttaattttaattttaaatttttttacccaaagttccattcggcacaaacatagggaccaattcggagatgaacatataggccagcttgatgcaccagcttaatgaacttaaccaaatcataattatcttggaaattaaactgcaaattgaaaaagaaaaaaacaaaaaccatttgaaaattttcattagtgtaaattcaaagcatagaaaaaacaaatacaaaacaagagaaaaaaaggcattaatatttacttttccttgagtaggttcatgcccattccagaaaacataggtttgaataacatccaaacctccatctttggctttctgtataagatcaggccacatctgcaaccccaaaaaaacccacaaaaagaataaaactttattcttaattaatgcaagaaaaaggcaaaaactccaccccacaagtcaaaaagtgatgaagaaaaaataatattggcaataagacccgtgaaccacattggatcattggcattatttggtacaagaagtacctcaggagtgcttctggggtaatgaatagagccagaaatgagaatccttctcttcccattaatcactatagctttgtggtcataacccacagaagcatttgccgaagaacaaagccatgaaaatgccaccaaccaaatgaacaacaagatgttgcccatttgacctctaagaaaacccatctttttttctttcatttttgccttaaagctctacccttttatctcatttatatatgataatatatgagaaagaatagaataaaatttagatagggacctctgtttttaggcactcttcctattttccctcaagtttgatgctttttataacaaatagatatcatgaagaggagaggaaattatggtactttgattttgggacttgggaggtttctccaaagccaactctgctttataaacatttgaag

SEQ ID NO: 227100 - DNA, 802 bp, Cannabis indica
tcatttaacaaaacacagagtccagttggtaacttttgtaaaacagagggtccaaaatggtatttacccgacaaattcactcataaaaaaaaatagaattaacatatgacaaattgaccatatcaatcttttgtagggactaatctctatcataagtatttcaattatttattttcatacatgaataaattataatgttattttttaataatattgtataatgtaattataaagaacctcctaatatattagaattttcgaataaattttagacaagtatttgtttcaattatgttgtagcttatattttttgaaatatttttagttttattattagattaagatagaattgttagattagagtgttccaataataaaattaaaatatagtgtatttatgcgggcatggaacatgtaatttgaattgtaattgctgaatttttttttatctcggggtagtatcttcttctttttttatagaatttttgttattaggttagccatacattatacatgtttttagcgattcacataatatcatcaaatgatacaagtcctggataagaatctacaacatatagaacacccttgttgatgatcctataatctaacaacatctaaggttcctcacaatgtgatatctcacaccgagtaaatctttttattttaaaagagagttttatttacacctcataaaattttaaataccctattattaaaaaaaaatataaacttaaataattttaaaattactcttaattttttttaaaaaaagattcctcacattattttatgtcaattt

SEQ ID NO: 227101 - DNA, 801 bp, Cannabis indica
tttattttattaatttatttatataattgtattacagttgtttatttataatatatttgtaacttgtttaattaaatagaaaaatgctaacacattataacgtattgttatggtgtatacgatggtttggaatattgatagttccattaattaggtatgaaataaaaataataaagtagactaattaataaactttgtacttactcttgagaacttatgtcatcacgatcagggttggttctatgttaatttgagtcttagataaaaataaaaaattaaagcccaagtgaaaaaataaggttgttgaaattttaactctaaacctcttaattattaaactaattaaattactactgagttgcaatacatataagtattattatttattttatcattaactatattttaatttttttataaatggagaccccgagcagtgggggcctaaggcggccacctctagtttcgtctcatggccagccctgataatgatgtcgttgatttaatttctatatccaagcattgcttgcagaatttaaataattagaggtggtgctttgtgaaaatgacaattagtgatattctaatagttatattaaattaaattatgtatttctcaatatttaattacactagattcaatattatatatatatatatatatatataacacatatagagtggtgttaggcattacttgtgtcctttttagttatttttcttttttactaaacttaactataatattttagaagttattatttaattctctaattttgacttcagttatatatatgttta

SEQ ID NO: 227102 - DNA, 1124 bp, Cannabis indica
tagatttctaataattgactgtctataatcgaaatttcaaaacttcagaaaatagaaccaattttgaacaatttgatcaaggaatggagacaatttggtcaatacatattttggtgaacattacaataataagccaaagcacagtaataagaatttgaagatacaaaattgcaataccaatttttagatacaatattattaatacgattaagatatcatatttgataggtttgctacaatattatttaatttttattctttaatcagattgcactataaccaattgtctaatcgattagaaaataatattttgtatcttatttgtgtcacttgcttgcatgtagtgttaccgtttgtttatagttgttacataaaaatattagaaattatttaaagcaattggtttactaaacaaaaataacctacaaactctacaattcatttgtttatcagtttaataatagttcattaaatattttcttagcaatattcaaatacattgttcagacattaaggtttgcaatgatagtgtaagtgcaagtacatgcgaccttcgatttatagttatcgtattcaaggtacttgtatttctattcttagaaaaaaaagaggtcaaagtgaaagttaatggttcctagggacgccacgtgtgtgcttttacaaattagtttatactaataaactaacggtttaagtaaaattgtgatttaatttaaatctttctgtctaattttgaaatattaaatttcttgatataacacttttaagatggagactccccttttaaaatattacaaaagatgcaattacattatttttaaaaaaacacataaaagtactgaacatcgtaaaatatgaatcttgacaacttggctccacttgtcggataagctggtatgtacatttgttggagaagattcttgactcatggcttcccaaacattttctaacccttacctgcacaacatagcacccgtgagtcacaaagacttagtaaaaaaaaataacataatatctcaaattagatgacaaataatatcaattcaaactcaaataatcacaatcagatatttacaaatatataaacatttaataatacacaagtacttgtctaatataacaag

SEQ ID NO: 227103 - DNA, 669 bp, Cannabis indica
gattggatgactttttgcacacctataatcactattaataatcatgacaatgctacgttagcatttgattattgaaaatggagttggaagcattaatttggttagcatccaattggtgaatggaagaatgataatgtccatgaaattatgcatgcatgtactggtcagagagactcagatcagtcaactgctagggacgcggcagggttctcctccaactaccaatagtaatagtagtcccatgcattaataacgcatccatcctaataatataataaataaaataaaaatgataaatgacttttttatttgatttgattttttttattatttaagaggaataacatccgacggtttatttccttcaaaaaaaaaaaaaaaaacaatccgacggtttataggtagggtattaagtccaaaagatcaggcaaaactaaagttgcccaattctcataatgtgatgaccaaaaacaagcaagtcgatttaggattaggcatcggtcagtttggtcagttttttctatataaaattccagaattcagttttcagtctggattagtacaatccgaaaaccgaccgaccaatccaaaacttatcttaaaaccgactgttttgaaccacagtttgttcggtttaaactgcccaaaccgaacttttttttaaaaaaa

SEQ ID NO: 227104 - DNA, 1160 bp, Cannabis indica
aataagaagtggaagataaaaactcttaaaaagttcaaagaaatagattgtacacaaaccaaataatgtggaacaaagagatcaaactaccatttcacagttaagagaaggggaaaaaaaaatctctattttaaggtctataaaatatcaaacatagattacaaaacttctcctcaagtattcttcagataaatgagaattataaaaaaaaaaaaaaaaaaaatcaaacttctcttatctgctgtcagcaactcccaaccccaaaaaatgtaatttgaacgcaatgaactgtaaaattgcaatttcgtcgccaattcattagctaatagtaatctagaagtttaaaaaaaaaaaaacgtagcaactttacttgaatggaaaagtttacattaagggccaatttggcacagttgtactgtggggaaaaacagttgtagttgtactatggaaaaaacacttaattaagtatttgataaattataaattttaaagtgttgtgagttattaagattctattataattatgataatattataacctagttcattataatcacaaaattataatatataaaatttttattttctatattacatttaattattttttttgtaggtataaatttatacgcatttgataaaaataatttataatatttttatcacttgtaaaaaaaattgcagtttataagaaactctaagttacatagtttgtttataataaaaataaaaatattttttaaaacaaaataaaaaatttaaatattatttattttaaatatttttccttcaaaaaatattttatttttgtaatatataattaaatatatttatagtacaaaataatttattagtcttttaattaaaataactttttttaaaagttgagttgtaccagctttagcttttagctgtagcttttccataaattttataataagttgttttttaaccgcttgccaaacacctttttatcacactttttttaaaaaacagttttaacttttccaaaagctgtgccaaacagaccctaaatgtagtcattaaaactgaagttatttaagaaaacataacactataacgtaagaaaactaaacctttccaacgttttgtgtatccagcttcatgaagatattgaggtatttgtgtggtctttcctg

SEQ ID NO: 227105 - DNA, 1102 bp, Cannabis indica
tgtgattattagtaagtaattaaaaatacttttctttctgaacaaattaaaatgaaactttttctgcatttctacacaatgcaacttttttatcaagtgctactttaattgcttgagaggttcgacatgcatctatctcttggagctagctgatgagaaaataacaaagcaatgtcttgtcaagttgggccggcccgtgagtaggcccatcacccaagtaaaatttggaaaatttataacattactggaatttgagtgagtttttacaaaaatactgtcacacagaaattttttcaaaaatacaatgtttttataaaacaccagtaaaacacaaagcagagcaactcaaaacaacagtagaacaactaaaaaacaccagtaaaacaccagtgaaacttaacacagtatactgcagtatgaaatttataaaaaaatacaagtaaaaagtaaaaaaaaaaaccaacctgatagtaatttttgtaaaaaaaatggcaaaagttagtataccatgtaaatttccctaaaattttagtatttttataatatttatatgtatttgaggaaaatgtacttataatatagagcttttaagttaatatttcataaatatatacatatttaaatagaccttttatggtatttttttctttttaatagcattttttttataattttttttaaaagtgtttagtttgcatattttaataatacatagtttaaaatcaacctcatattatatgtgttgaatttcaataaaaataaataaataaataaataaatgcttttgagggatatatttattattgtatgctaaaattaatttcaaagggaattttataataaccgaagatgaaaatgttctgtgtcttctattattccataatattcaaagatataggttcttgtatcttcacttattattatacctttatcttcatttgaatagtttttgatttcgagttttttaataattaaagaccttccgacataaacaccaaatataagagttcgtgttatttttctcaaataatttttttatgtggtcacaaactactcgtataattatagtacggggacatatttaactaacttaaattagcta

SEQ ID NO: 227106 - DNA, 8698 bp, Cannabis indica
agcgtttaaactgtttttatgtttttagtctagctaaatattagttagatcatttatagcttttataatttataaatgtacgtactacgacacatatagactaataaatgaataatattttaattatcattctaattgtgtctattttatcttatttgtatagcaagttatgtagttaccaaaaaaatgtagtacaaagggtttgcctaaaccttagtagccagagaaacaaaattgagcttgtgaaaatacaagtgacgaatagtcataaatctgctcgtttccttaggggcaactatatacctgtacaaagcaataggggtaaataacaaaacaaaaaaaaaaataatatacatatgcaatcatttgaacttaagagaaaatattcattttaagatagcaaagcatgataataccaagattaaaagctacttggccagccagttatcataaaataaaatgtaattttccaagattaaaagccacttgatcggccatgttgtacttgaaaataggcctgtcagctgaattggtgaaaaatgttttaaaacatcaaacttctggagtcctaggttccttacactggttggttgagtctttagcaatgaggttttcagtcttggtcagtggaaaggttgttgttagctgcttcagcatctttttttagccttctaggcctcgcaaaaaccaagataagcctaccttgttctcattgaggtaatcaaagttagcatctagattggccttccagaactcatagaagatgtccaaagcagctgactagaaactatccacccccttttgaagaatcattggttcaacactagaagatatttgctcagaatcaagggactcctacaagcccctcttctccccaatcagatcgttgaccatagtctctagaattctgagaagagtgtgtgggttttccctctcatatttaagagagttcccttccttttctaaagcctcattgtgtgcctcaagttgagctgtgggtggcatgtgactgatctccttcctcaagtcttcaataagcttgttatcagcaaggagttgcttataaacttttctaattgaagactctttagctcgtttcccttcttggcctcctccatctctttcttcaaattgttggtggtagttgtaattttcaaggctacaaatatggcatgtgagtaagtgtatgccatcttcagattgagctatacaattgaataagattaaagcctaaatggtttaaaggctatgtgaggaaacaaaaggaaagatacttactcaggtgacctccttcagtaagccacccatgatcagctccacacacatatcttctcccctaaccaattaatcatttaattcaggcaacacaatgtcttagtagaatgtgagcatctcatttcccttcatcgtctctggattttgtatgggaggagtggcttaaggcttgggtagtttgggcccttcaatggtcatccctttagaacccttggatggagcagttgcagcttgatgttttgtagtttttcttggccaaatggatagaatgaaggactgctacctcaggagcatccaaggaagtagaagtataagtcctctaaacagtcgctcgaggcatcttagttcttgaaacaatgctttttaatagtgtgtagtccaccttaggactctttgttagagacttctaactggaggtatcacctgacctcttcttcagtgcgcacaacatcattttagacataattgcacacaaacaaaggaagtatatgttagaaaagcataaatcaactaaggataaataaagctaagaaaaaatgatctaccctgtacatgtacaggatcaccctcccaaacaagtaaagaaggagattcctcatcagaagagtcctcttctttctactcgaccacaacagcctttcccttttcctccaccttgacagaaggatgagtagcctctttaggaccatctctaatcttgataggccactcaataggtacttggtcaccttggggagccttcttctgtttcttcgtccatggtgtgttttgcttgggtacaacctccccatcctgatcggacacaaccacatctattacttgatccatcccttaaacatcatcagattggtaaagctcatacttaataaaattggcctcagtagccaaaagtgagatatttttagccttggaagaaagttagagtatctttagagctctctccataagttccaaggtaaaaggacgtcgacagaatgaagggatgtgttgaaaactggtatgattggtccccatgcccttgacaaagtaatagtcctcaacgtagccatgaattttggacacgtcagtatccatggtgccactcaaccatttttcttcgatctaggagaagtagaaataccgaaaactatttttcttgggactggacttcaagtcaaatagccagttggtgtcgtgggtgaatgactgaccccatccttaggaagcatacaacacgaatagggcaaacaaatactttatgcccttgggagtgagctgggtcagaataatgtgatagtatgtttcaatttccttaaaattatggatgtaactgtagcattgtaccctacttaatatgaggtcccaaccacacacaaaagccatctctaagatctgtggccagctgcctgggagaagggaggaaagcctcaacctttcctagaagaccctcttctttgagattagtcaatctcttaactatcaagacagatggcgagacccactgagcacttcttttactactattgtttataggacgggcttctatgtattcattctcaatgtagtccctactagcttccaagggtgcctcttcctcttcctcttccttttctccctcgacctcaggaggagtagcaggacagagctctccctggtccttaacttcttggacttcaaagtcaccttcaagaatctctcatgcttcgatcgcatgtagggcgtgttccactccaattgtaacaaacaaccttgtaaagtgtgggtatctctttgaagctttcctcatagtttgctttgtctgtgccatcattctatgatttggtggagatttaagtttagttgtatgccaagcaacgattacaacaaattcaataatggcagttcccttagtagatgcggttgggcgggctttaggcagagtgtcaacaacctcgtgctagactatgtgcatccaataagcaggcaagtaatgcctccaacctttcttcaacttccagatgaagtgtccgtacccttctccatgtatttggtcgggggtaccagtgatgttgcatctcgagtttcggagacaatgtgtgttcactacttatctcccaatcttcaaaattaaaatttgagagattgtcactagacaaatataaacttgcacggagtcgaggatgatcttcgtataagagttggagtaaatcctgatcaatgttgtattttcctccctagaaatcaccagggttcatcttcaaaatatgggagacaagaaaatgagagttggaagaaggaaaagatgaaaaacattttttgtatgcagaccaggccagattaaggacaaaaataaagggtttcactcaaaaatgcaattcccaaacccaaaagttcaaaacctcgagagggagctaaaaatacttataatctcgtgaacgagttgaaatgaatgatttcaggtcaaaatcaatatgcaattagagaattagaagtctcagttaaatgttatttaaagttacaagccctaataacatctattctacgatcagtcaagaacacttcaagaacggataaacttgtggcaagaaatatagaaaatgatgcatatattaaaggaaattgtatgaattaaagggataagtaacttactcgctgtttgtagctttctcgattttcttagagggtagtgtcaatggattccccaacaaccttctttgaatatttgagagagaatatgaagattttttttctctgattctttgagaatcaaaatggctaaaaaaggttcccacaaaggatgaaaccgcttttataggcacctaaaagagtaatgtaattccaaatttgggttttccccacaaaaactgtacattaaaagtactcattatgaaggatagacatcacacatgctgcactccttaaccgtcacagcgtgatttgaagaacaactgcatcgcccatcaggacaagtttccaagctgaatgaaaagtccacgtgtaaccaagatggttttgcacagacttgggggaaaatgttatcctatttttgcactatgatatggcatctagctggacaacgtggcctacaacatgggcggatggtttcactcttagcagccgacaaggattgatatgaaggttcaagttttacatacattgcaggatgtctggtcaaagtcactgaaggacatccgactagctcgatcgtgtgatcaactcgcatgaacctgccaggttatgtgagttggcaattttagcagtgattgatgatatatccatgcttacatgacacaaaataatccctacttttgtgggattgactcatatcttcaaagaataagggtaatcagcttgaacttgcccaattcctgtgttgtaattatggaaacatattagtttcctacttttttgtgttatagattaagggaaactattcatatgtaatgagcccctaaaactggtggtctcatctcactgttgggggagacaaattgaattagagagaacactcaagaagaaatagtgatctatgagagaattactcaaagatccattgtaagagctttagagagagaatactttgttctttgtgtcataagttaatacaacctaaaggtgagtaggctattaccattatcaaggaatcaaacctctagaaactctggtgttttctttatttactgtctttgtgttttataaattattttatctattcactttaatttagactcactgtcattggatagaagtgaggtcaacacaaaaaaatagtttactttaaacagtatactaggggcatattacttgcaggttattttgggttttgttggaaaggaatttttcaatccttacattttgcttatagaaaggctccttgtatatgtgctctcactctagtttagcgtcggctcaaatcaatccattttctcagtgtttttttgaggtacaaagaatgcacaataacgatctctgattagaagacttcttaagacatctatgatttctaaatgatccctggtaagctttgatcgagctggcctccctgtgattacatggaaaaggtcagaatcctaaagattaaaacaaaaaaataataaaagtattaaaatatacgacgtatgagggcggtagttaacgtctatccttattacgagcagtgtaaacacgaaaaagcaattcgacttccaatctcccatatttgaaactatacctttaagttcgttgacctccaagttgacccacttgcaaacgcagcagaagcaattttcgtagccaacattcttgatatcatagaagtagcatatgtcctcaatagtaggttccccttgcgtgtactccatatactttgcatagaattcgaggatgattctacagctgtcaaggattagctggaacggagaaatttcataatttgtcaaaatatttttgaaaaaaggatggaatagaacagtgactccacaacatataacgggatttgaaataacagtgatgttagtcgggataatcgctgggtttgtgaaagaaaagtgtggtcgctacctcatcattggctttgtacaactagttttcataaattttaacctctagaatgtcatcagatcaagatccttgtaggcaaatggctcatctaaaggtgcgtcctcaatggaaacctcagcctcgtcatcatcttctttatcatcttcgtgagcatgtaactcaaagtcttgccccattttctcgactacattgtttggaaaaacccttaaattagtaaagctcccttgagcaaacacacggaactcgctcccccgcacttccacagctactggttcttctagttctttaaccatgcaagctatattgctagtagaccaagaagcttatgagtccacttcagttggaacttcatcatttaaaaattacgttggaatgaagttcttgctcttttgaggatcatccgcaacactcctccatcacgctcaaaaatttggttgtccgaaagatcgctcatctaaaagatagaagatcttttaaatgtattgtgcgtgtaatttcaagaggagtgtccttacacatataatccaataatcgtaaattaggaaaataagatatcaagaaaatcgtgagtattcgtactgttcttcatgttccatgtgaaaacctacatacatgtgcgagcattcaatgtattgtagctgaaagatgcgaatattcaagatttgtggtgggagggattgtaagcttttgaactggaagaaaaattttgattctttaaaagtgcgagtattgaatccttaggcaaaaaaaaaaaaccctttctggcctatttttctagaatcttactatccagaacctagcctatcgtcttcatatatatatttaccctaaaaaccttgaaggtaagcgaatattcacaattaaacctcaaattaaccaagattctctcaaaaagaataacctttagtttttgagggagattatagacatgattccaaaaaattaaatagagaaatgttctttgtgctaacttccaatagattgcaagcttctgaactggaagaaaaattttgattctttaaaagaaaaggagattaaagagcttgagaatgagagggaagatgaaagatttttcatttcatacaaaaagggggttaaatagtggtcaaagtcacccgttgagatcatgacatgtgtttatcaaagataaatggtcctttaatctgaccgttgccctaagccatacctgcacaaaccctgaagggttttgtgatgtggcatctagtagaatggaagacaataattatgaatgtccattcaaaaccatcgacaagacaaccaagagtcactgcagtgtgacaaagcaagtcacctgttcattaagaataactttgctatttcaaaaacatttgtcatcgtgaaactagggacatgggttatagtgtaaattttttacctagaaaacgagtccagtctcatgaatagttgacacatgcacctatttcccataggaaaataaagacatgtcaataatattattctcatagaatcatcctcgcataagtcaaacttgcaagagggtgcaaccgtgatagggtctagctgcatactatgcccaacatagtaaaaggataagcatgataaggagaaattaatactggtcgtgcatataataattatatgcgattatcaagtatatctctcatgcgataaggaacggtcgcttctttacttaggttcagtctaaatgactattgtgatggacaacttgctgagaactcagatgttctataagttgtcaatgcatagaatgaatgaatacgcgatcaagggactgtagacatccaacaaaaataggctcaaaggtttattttgctcatataacactatagagcttgtgagatcatgtgtttggaatacgaatggacaatcggcgacttctcaagtcgcatgtgttgctacaattaaacaaagaacagacgaaattgttcttcatttatttttttaaatgtttctcttaattcaattctctaatttattataatagtggtcctatctaataagttatgaaatccgaaagggcacctgctttctataaaaagaggtgatctacattaaataaattaagctaaaaataattaccaatagtggactaagaaaatcgaggtctgattgaactactataattctcttctcttctttatttttctattttgtagcccaagctttgagtacttgcataaccgctggtgaattttcttgattttcacgaataattacattatttggtgttgcctaaattcctccgataataattactgattgttttattcatgactaagtgatcttaattttttatacaatacatgttacaacctcatgtataaatatatattttttttatttatatattaattattaaatattaaataataataattaacattcaagtatatatgtaattgttcaatctttatttattttaccggcgtatcaggacataagtccaagcaactccaactttaatatgagttttataggctataggaataaattaggtagttaaagtctttgttgtcagttgtcatcttttttcttgatgtaatctgtaattttggtaaaagattggaacttatttctattttgagtctttgtttattagagtctcttttttgtttagcccgatcgaagggtatgtaatttttgtttttgtatataattgagattatatagaggtttgtttaacaatttgaatatttgaatgtttgattcttataagcaattattgattataacaacaagattaatgtgaatttaattcacaatatatatattttaaattatttagaaaaacgtacttagtaaaaagttcccacgcttacaaactaaaggtctcatttttttcttgtgtgcatgaccgatatgacattctatttgtattaaatactattttagattttatgttttgcaaaagttattaattaaa

SEQ ID NO: 227107 - DNA, 3056 bp, Cannabis indica
ctgaattccaccgtcccgtcttctactttttttttttctttttttttttttttgaaaaaggccgtcttgtactttagagcaatgtacttgaaccaacaaataactttcattaaatacaggtcagtctgtctaatttcttggcttgaaatttaatgtgtcacacataccatttctatcacacacaactataaattttgtttgtttgcctgtccgctgtcgctcccttactggctggcatttcaataaagaataaaaaggaaaggaggcagcgcgtcacagatgaggcacaccgcgcgcgcacgcgttagatcggagaccgtgtgtgaaaccaaaagagaaaggacgtcatgaccatgcagagaaaagttccattgtaacatgtatacattcaacaactttatatgtatgtatatatataaatagacttataaaatgcatacaaattatacttatgagctttctttgattcttccttcgttttctgacattttattcgaagttgctgacttcattcactatgtaataatactaaaaacaagtcatgtactcaaatgtgaaaaagtcaaattctcctaccaccaaattaaaaataaaataaagaaacgattcaaagaaagacattatctaataatcaacgaacctaaaagcgaaaaagaaagaaaaaactaatataaactatataaggtctttagtcaaataactagtaaaaggtcccactaaacaaaactgctacaactcacaccgtcctcatcaattactatatcagcatacatatatatatatatatgtattggtagacctagcctttatatcaaacattagtgagagtcggaaaagggaaaataagaaaaccacagcaagaaagagatttaaacgagagaggtgaaggctaattaattaagatgatgtcaatgatgatgtacaactcgaaaagcagctcagtgaagaccctctgttctgttctgggattaatactgataattgtgattgcacagttaaatgaagctgattgcagagcacttcgatcgatggagaacactactactactactaccgccatcgctggatgtgatcaacaaaacgagggaggtgagatgatggccggaatggcttctttcgcagtttcttccaacaattccagcagcagtagtaatcgtccttcggccagaagcttggcctttagattggcttctgggccaagcaaaaaaggcccaggccattagctatacaagctagtactcctgatcatcctcatcattaattatgattcttttgttcctttttgtttttcttttcttttattggctaaaagagattgtgactcgagatctccaatttagctggtttagaattatagttcctttcattatttataaaagaggcatataaatatatatatgtatacttacacacatgtacgatctagctagttgatttcgttgttgtttgttacttatcatatctcaatatgagcaaatacgtgagatattaaggttaattagaattcgaggctttgaagaaaactcccatttgtataaattatacgtacatacatgcatattcatatatatgcgccatatattgtacgtgttgcatattgtatgttctctataaaatgtttgatagagatcatttctgttgtgtattggttatattattttggaagcattagtttcattgttacagcaatttcttttctcctctttttcttttctgagtttgtggagtaaggaataagaaaaggtaactggaaaaattgaatccactaaattcagcagttttttcctcgttggagtcaaaagtgaaaagatcacaaaagggcgaggaaaaatataccccacttcatgttaaaatctttgaccagaattttgtgtatattcttacgcaacaattcagttaattaattattcaaaaaaaaatcagttaattaattgcttattataatttaaatgttatttttattatgaattcttaaacacactcttagagaatatgacttaaaaaaaataagatcagaacaataaaatagattatgaataggggctcctctaaattcttttaattatagtattttaattaagtacattaatactgttttattagtttttttaaattaatgtatatttaataaattcattataaaaatattattaaaataataaatctttagtaatttagaaagcatgaataaagtaaaattaagaaaaatagttctctacttcaatatattaattattttaactaaaatttgaataaaaaataaagagtgcatagttacgtactcttatgagtaccaaaaataaattataaaactaagcaaaagagggtaaatggaaagacaatggtcccccaattttctaattacattgaatgagaatggaagcacaactactcgatctgatttacttttcattttcacctagtctcacctattactatttttatttttttatgtataaaatattcgatcgcttagttcattaaatatgatttctcaatcagtagctgtgtgacatttactagctaatgaaaatcataacaacctgtaccttaaatttccaaagatcaaatctttttttaatttaaaacatgtgccagtcggcgttgaatctttaacagtatatggtcaatgagaacgagccttgtgtttaaagttggcctcaatataacaataatataagtattacctctttcaaattactgcctcagtatgtatgcgtcctctagtcctatcctaagtgtacgtaaatcgtttcaaagaaaagtgggattaattggtgtaatacttgaataatactacgacaaccatcaccgacttaccaacgggataaagacaaggcttcttaagtttgaaagtcacataataggggctcttaattctcctttatcagctatacttatttatttaatttccccatatttgcgcagtcgaagaactacatatataaagagtaagagcatcaccaacgagccatggtgtgtgaataactctccaatgtaacgacaaactcaccgtcaaattgtcgtgcatactacaatataccgtttatatatat

SEQ ID NO: 227108 - DNA, 7159 bp, Cannabis indica
ttgaaaaactaacactaaatagtaaatatatagtgtaccacaagccaataaaagtgttgaaaagtttaagtttaaaatttgagttttatccatgtttttatatatactttatactttatattttcatagtagactcatagtatatatcatgttaatctcattctcaatacaatataccatatgagaatcactgtattaatatggtaaaaagaaagaaaaagagaacattccttaaatggaatgatttctttcctttttctttgtataagtcttggaatattttgttttccttatgagattaaggtagaaggatttcaatttccaacttagaatatttttttgtgaggaaaattataacattactaaactataattgtgtctctagaagaaaaaaaaataataactatgatcacaaacaattatagaaagagtaattacgatgcacttaaattaaatatgttttatatataataataattttaattgatttcgatcacaaattaagattgatatatattttaaattctgatatacatgattgttcatgataagtatgttgaatttgtaaattttagcattaagatgtgagtttaattagttttcttattttttttcttcttaaacatcatccaaagaaattgaagtagtgtcctatcatgaaggccaaattaatttacccatagaccctaaaagaataattacaaccattattactaaaggaaaatatagctaatcttaaaataagttattcattatataaagtggtcacacatctaagttctctagtaataagttattcattataattgacaaaattttattaatattaagatatagatcattatagagttggaaatggaatcagtttcttctctgtattttattaaaaataaaagaacccattatttatttatttttaattatagtgggcccaatccaaaacctttccagctacacgcaccccaattcctgattcagatttcaatttttgttttaattaatgttaaaaaaacttaattccacttaacagaaattttaaaataatattttaaaaagggaaaatttgaatccacaatgtgccaagaaaaactttgagacgaaactgaagaaaattcatcaaagaacaaaacagaaaagtccacgcgtaaacggcagtcctacgcgtcgaatcgaacggtcaagagcgcgagtagagaatcaacgcagtcacaaggcgagtgagatggtagtcgagatcacatggtgccatatattttgttaatgttaatataaatattactatggtttatgctttctcatgttacatatttatatatatatacatacatagcacactttgggggtaacgttctttgttaacctcgctctctctcttactccctactccgtcaactctagagagagagacacatatatatatatatatttatatttgtatttacagatacgtatagatatagagattaaggagaggaagaagaaggtatagccattgtttcaattcagagacagtgagtagagttggaatcccattccatatgagataaaatttgaaaagaattaaattaaaattaataatattattataaataaaacaataaagagtgaaaaatggtggcggtgacccagaacgccacgtgtacctgaggcagaggttttagttcgttggggggagagagagactagagaggaggagaggggagggggggttcgaaaagggtgtgttgtaacgggtcttttgtgattggttcgatttgatttagattgattggtgagatgggctcgagcccaattgtgggtgggccgggcggttgcggaggcggctgtgctggtaacggtgtgggtgtgggtgggagcggaggtggcggcggaggcggcggagggggtgggagtaatggttcaagcggtgggagttgctgccatatgagccttaagtgctggtgtagatggagatgggaacagcagcagagatggtggctgttctcctcatcgggatttatcttcttcatcggttgcttggtcttgttcggatcgtttgctacactttatgcccggttcgcattcacgccgggattccgtaccggcatggctaccgcctcgctagggtgtcaggaggacaatgagggttcatggtccgttggtgtcttttacggtgactcacccttttctctcaagccaatcgaggctgtaagttttttttgttttttttcttggattgggtccatatgggtactttcataattaaaaaagaaaaaggaaggtgaatatttggattttggcatatggggttttctggattttgtttgaatttgtggtttttggtttgattttgatgtttggggttttggattctttttcttattcacagatgaatgtagggaacgatgaaagtgccgcttggccggttgccaaccctgtcgtgacgtgtgcttcagtttctgatgctggttttcctagtaatttcgttgctgatccttttctttatattcaggtgcatacataaataaatgtttgttcaaatccttattttgtttccaagttaattggtgaagtgggtagttggaacagttctttaaaatgattaaatagtcttcatttcatttgctttgttcttgagccccaaaatgaaaagtgaaaaaaagggtttttgttgttgttttctttgtatttgtcactgttcaagccaagttgttgatagactaatgattaaataagttataatcaatgactggtgggagaagtaatatttttataatctaggttggttttcaatgaattattgattcaaactctcaaggggagactttttgtaattgattggtgaaactaaatagaagttaaggaaggagaattgtgaatgtttgttaaacctgtgttggggtgaaaaaaagaaagaaagaaaaaacagggatcggttcattcgaggaagaatttagtttctgtggctgcacatgataggaaactatttcttctttgctttgatgttttttgtgattgctacttgaaggatatggtttcacgtcgttgctatgagataataacaagtatctgtgtcctgaaatatacagtttcgcaactgtcccaagtagctttgttttcagttttgccataaccaagtgttgggataataatattcaattgtcaagaatactttaaatctgttttgtatttacgcgtatgcataaaagtatttcttccaaggtgagtcttctagaatcctgtctttttggaaaaggaactttcagttttacactttaccttgggatgaattagtgaagaagatggcattaaggaagtttgtatatgatataatgcaaggatgccccattgaactgcctgtagttagtgctctgagattataggaattctggttcattgctagtgattaggaatcaggatgtgctatgtcatacgttcctttttatttcttagctagaattatctatgctataaaggatcatattcaacatttaagaatgcccaaattgttcgtctttaacccacacatcatatatggctcatgcacaaaatattttaaaagatatttgatacgggaacaaatctataaattgatatgaaaatttaaatttggatatacattttttttggtattgaataaactgtaagatgtttttgttttatgactagattttaatctgtagaaagcctttttttttgttcttgttgacaagttcgttttgggagtgacattgcaacttatggaggcttagtctagacaattacttgtttactatattgttgatgaattagattgataaagaggcttatgtatgtatttactagattattgtatgtgaatgcttgattatcatatgcttatgtgaaatgctttccacttgatcatgattcaatttatgatgcatagttattaaggacgacaagcttagtaattatttagggttatagtcataggaatagtataaaccttgttcatctgtctatctctctatatctatataagtaccttttatggtcttgtgttggaaaataacttgaaatcatccatactaatgtgtggtattttttttttaccaggatgataccttttatctgttttttgagaccaagaactcaataactatgcaaggggacattggcgttgcaaaaagcactgatgggggagcaacatggcagcaaatgggtatagctttggatgaagaatggcatctttcatatccctatgtctttgaagagcttggcgaggtaagacccaatttcttttaacgcctgaatgccttttgattcactgaatataaaaaaatacacacacacataataatatgaaaatctaaaaaaaggaccttgaatgaacctggaaaacctgtttccaacataacccataataatttcatatatttcttcattcttctagatttatatggtgcctgaaagcagtgagaaaggagaacttcgtctgtatcgtgcactcaaatttcctctgcaatggaaactggaaaaagtcatattgaagaaacctcttgttgattcatttatcatcaagcatgatgaaatgtattggctctttggttctgatcacagcggttttggaaccacaaagaatggagagttagaaatttggtatagtagctcacttcttggtccttggaaaccacacaggaaggaaaaatcctatatataactctgatgcaagctatggggctcgcaatggagggagaccgtttttgtacgatggaaacctttatcgtgttggtcaagactgtggtgaaacatatggaagacgagttcgtgtcttcagggtggatgttcttacaaaagatgattataaagaagttgaagttcctttaggcatctctgagtcaagcaagggtcggaatgcttggaatggtgctcgataccatcaacttgatgttcaaaagctaagtaatggaaagtggattgcagtaatggatggggatcgagttccttctggagatgcagttcggcggtttattgttggttgtaattcagtggcacttgctctcctactcattgcattgctgggtttgttgactggagctgtgaaatgtatcattcctctaaactggtgtactcacaattcaggaaagagaagtgatgcattattgtcctgggaaaggtcttatttgttttcttcgaaagtgagacggttttgcagccgcttgaacagagcagcttcatacctcagatgtaggattaaacttaatacatgtactggaagactagttctggcagtaatttttgtagttggaattgtactgatgtgcacggggttaaatatatatatgggggaagtggtgcagaagaagcttacccgtggaaaggtcagtactcacagttcactatgttaacaatgacctatgaagctcggctttggaatttaaaattgtatgtgaagcactattccagatgctcttcggtcaaagagattgttgttgtatggaacaagggagtaccccctaaagtcagtgattttgactcaacagtacctgttaggatcagagttgagaaagagaactcgctgaataatcgattcaagatggatccactgataaataccagagctgttcttgagcttgatgatgacattatgatgagctgcgatgatatcgaacgtggattcaatgtatggcgtcaacacccagatcgcatcgtggggttctaccctcgacttgttaatggaagcccattgaaatataggggtgaacgttatgcgagaactcataaagggtacaacatgatccttacaggggcagctttcattgatagtaaaatagcttttaggagatactggagtgaagaagctagggaaggtagagaagtggtagacagatacttcaactgtgaagatgtgctattgaatttcttgtatgtaaatgcaacttcgggtaggacagtagattacgtgaaaccagcttgggctatagatacatccaagttgtctggtgctgcaattagccgaaacacgaaggtgcactaccagaaaagaagcgactgcttgctcaaattttcagagatgtacggtaatttggctgcacataagtgggaatttgatggcaggaaggatggttgggatgtatagtgataacattactacttcactcacaatcttcttgtttatccttctatacttctggtaaggttttagtcttcttttttcttttttccccctttgtctatacacttattttttctttctttctttccctcacttgtgaatttgagttggggattttggttttaatagtttttggtcgttgagatgtacattggtgttgttcaacttcaaggtttcctcttttaactttttttaatggaaattaattctagcgtggctgttaaaatctctatctgaatgatatgctcaatttttattgtgacttgtgatatcttttgaatctgggcacaagaattaatcaatgggttttaatacaaagaggagtagaaaggtggaaagtccaacactctgcaactctagcatgaagatgtatataattcactaacatggctatcaagttttatgatgtcaaatgaaatggctgtgtggttaaaacttacaagttgaactcttatttataattttgcataatttatatcaatactagccatgtgtgatccataggttgattacaagtttggacccgccatagggggtgagattttaataaaataacaatgaaaatatttaaatagtctgacaatgaggatatagttagtactcaatgaaacatgaagaaattatattttacatccattttatttattttaattttatttttatattttttaagatgtatttacttttataaataatgtttctattatactttttagattgacgtaaattatgtgctaaatttaagtagaggatgagggtatattggacaaccaattcacaaaagtgggtattttttaatgaaatataatatgaatgtatttttggttaatgaatagaaaaaggagaccctccacttatcccatgaaatataaattgcactctatactacttttatattgtactcttttatttttaccttcttttttaaagtgtatcatttttacttttttttttaaaaaaattaattgtaccaattttgtctctgtcacttcaagatactctccatgagactcttatgtcggagtattttgggtacaatacata

SEQ ID NO: 227109 - DNA, 1902 bp, Cannabis indica
tgaaagagtttagaagtatttattaacctaaaaataaaatagtatcaaatatttaaattctaaatttatattagtgtataaattattcagtaaagtttttaattaatatttattatgaatttaaattatacatatatgttttttaattaatatttattatggatttaaattatatatcttttttaattaaaaatcatgatttgtggtaaagttgttgttattgtcggatctcacttgtaaattgccactatattcaaagtcattgtcatcgtcatattttacttgtaatcactgttacactcaaagtcattatgattactgtagctaactttcaattgtatttgtcgctacattcgaagttgttgtcatcattacatttcacttgtaattatcataaaattcaaaacttgtattaccatattgaaacttgaccaaacattacgaaaatcaataaaaacattaatataattgttcaaatcaatttttttaattacataacaatgttaaaataaagtagatttttgatttcgaactatggttattgtaccttcatcctgccccaattatattaaactcattataattgtttatttagttacacatatgattcataatacacaaatatattatctacaatatactaagagaaactactttttttaggtgaaaaaattggttggatgatgtcatccctttcagaggttgcaacataaactccttgtgccttgccaatcactactctcaaactatcatcgtgatgatgagagtgatcagagttgtatataccctcctcaataggggtcactgtcccgaactccaactcttggagggtacgagttggagttcgggacagtgacccctatcgtgatgattatggttgtaattatggcgagttggttttggaactgagttgcctagagtacgagttgaggatgattggttgaagatcaagagaaggatcatgcaagctaaggttatgcaagaaagcttagacatatcttttctcatcttattattattgaggatgagtttgtgttgagcttttatttatgaaataaggggtaaatttgaataataagcttagaaagttggttacccaagctttggcaaagtattcatgtgctttcggactcaaagttggttacccaagctttgaaccaaaggagacgcattcctaattagcattttattaatctttccttttctattttagacttaattaagaattttattagttgtagtttcttttatattaagcgaagtgacttgatgtttgtcgatggtttggcaaaatctgctagagtttctagcgatactgctattgtagtccaaggggagggaactccccctgcggtttccatctatctttcagcttaatgaacttgatgttctttcaaaaaaaaaaaaaaaaaaagcttagaaagatttgaaattagatgtagtggttcagtggaaataagtagttgattaggtggtattagttggttcttgtgtattttagtatgccaaccacaggtgaataggactataaaaattgtacatgtgtgatatatttagttgaaaggtatgtatataaatatttaaaaataataaataaattaagattagtgttttgaaatgtcataaattaggattagtaattttggattaattttatgtattaagttttaccaaataatatattctatgaaatagatttgctggttttggacaaggtccatttattattcttggagctctaaggtttctttttttttcattccattcttaatctatatacaaatctaaatctgtgtggatttcaatatattatacattaagaagctaatacaataggtattgtaatttttacctatcaatatggatttaatcaaatgggtcaaattaaccattgaaaactaa

SEQ ID NO: 227110 - DNA, 2747 bp, Cannabis indica
gactcatctattattattagaatgagataagcatcaaagatacaacactgtcttaattatcattcattttaacaccaggaaacaggatggatgccgtgtcatatcattgctaaggatgaatctgataatattgtaggtgctgttccactccaccttaaaggtttgtcttctccttatctatacgaaaagcaaatttcagttttcgcatccatttaatatttatttatattttgctttaatcttaatttgttttcttgggtgtgcagccactcttatggtgaatttgtttttgatcattcttgggctgatgcttaccgtagttttgggtcaagatactatcctaaactgcaatgttgtgtaccatttactccagttactggtccaaggattttagtctgtaatacctcgttcaaagatcaagtgtttgaaattttgatctctgctttgaaggatctgacagccaaggtattggtttttttttttttgacaataggtattgggttaattaatagctgatgcattaaatcccattttatatagtttttaattactgaatagtttctgtttctctcgctttcaccatctggttcttccagatatttgtcagaacagtgacaattgtaacaatagcatggatctactctagagcagtttcttgtgattgcagtaaaattgataatgcaatatggccaataatcatcattgatttatataagttgtttcatatcacaccatttaattacatagcaagcttctatcttcttagttcacaaatagattacatatcgactaatataattttttggtccccaaatattatagggttaagcaaaaaaaaaaaaaagaaagattacaagttatgcatgtagataggttaccatgcatgaataaaaattcctgtattcattgccgtgacaagaatttaactcttgctagttcatcaaaccattcttattagaacactcttttgacagttccaaatttcttcattgcacattactttcccatcggaaagtgaatggtgtaaattgagtgaacaaggttttctgcaaaggattggaatgcaatatcactggaagaaccttaactataagaggtgagttgttccaaacagatttgtttatagtattgtgtttatttctggccaatatagatattggggcttatttcacttgcagattcattttataccatttttaattaatatgaaatggtaaattacatcatttttctttttaaaaacattggctggctgtttggactctcataacaaggaatttaagaaactcgttctcagtgcttctgtgtgactggtatttgtggcattatagtgtgtcagcttcaagagatggtcagtagaggagcaaaatagggacataaaagttgaatgccgtggttcttggattggtgtcaaaggcttacctttgaatatatggaacatggagttatttcgaaagattggagctttgtgcgggggattgttagatgttgagaaagatacagcagaaatgaattttctccatcatttgagggtcaaacttgagggggacaacaatggttttgtaccagaatccttgacagtagagtctgaaaaatctgtttataagctagaactctttaagcttaatgatttgggatacaagttcagtggtttctttaatacatgttggcatcaagattttgaactaggaaggaggattgaagatgagagggaccttggacatcatgaagaagtcggagaaggaaagaggaatcaagagttaggaaaggtgtcaggtttcgagaagggtgaagccgcttgctcgctggaagtcgaaccagaaccagtggagttggacggcagcgatggggcttctggaggagtcgaccgcgagactgttggctgggacacgatcgacgtcgacagtaacaaagaagctgaaacgaatctccccgagaagtttctggtggcgaaatcggtggctatggtgaccggagttggtgtggagaactctgtcattccaggaagtatggtgatcggtgctctgacagggaaggtctcaacgggcagagaggattttgtggttatcgatactgatgtacacgcgcaaattaatggtatggaggcggttggaatttccaaaatgaaatctcagaaatctagggatgtgatatttattcaaaaagtgtttaggcggctgatgagggatctagaagggccacgtgtgagatcatctttaatacctagtacctttatcaacttaaagtacatgtggcagagttttgaagaaaatattgttaataaaatgggccaggaaagtaattttttaaaggtgggccgagtttatgaaggggagaggcccaaaattaattacttggagtgtgaggggtcaaaagtcaagttggaccagaatttaagtgggccggttgtgaaatttggctcttcagtgggtgtggagatgctgagaagtgacatgggccatcttaagtataaacatgtgggcccatatactattttattggaccaaaaggctgatcgggtaccctcattctgtcaaacaacagctgccctgaataaaataaatttaatttttgaaggcatcctcaaggcagtcagaccgaagagaagagaagaatttaaaaatgcagctattagtttgtgggaggacttcaatattaaagataaaattattgcaaactcagtattacaagcaacggaacaaggccttcttgggaggaaacagttagtaaaagaagctgaaagttta

SEQ ID NO: 227111 - DNA, 3959 bp, Cannabis indica
ttggtccaaccccatatgtgatctcctcatccattgaaacatagacaaagcttctctagatttcccattttgggcacaccccagccaccatggtcgtccatgagacaacatttctctccggcatttctatcgaaaactctcctttctctatcaatatcgtctacacttcacataacccttaagcaaggaattccagctcacaacattcctctcatgcatatcatcaaacactcggcgtgcattttcaacacgattagctccttcgccaaccgcataaaagttcaccaaatttgtttgaaccaatatattagagcagtacccatttgcgaaaactctcccgtgaacttgttccccttctctaaacattctcgacttcacacatgcattaagaagaaacgaatatgtatacccctctggcttaacttccgtctccaccattcgattgtataattcaactaattttctaggggttttacttcgaccatgtcctctgattatttggttccaaagagcagtgcttggcttcccaacattttcaaaaacagttaaggcaagctcaagataaccagaataaacgtagtaaaatagtagcttaataataaggaaatttttttgggtaaacccattaacgagtaactgattatgaatctgtttaagttttctaatggagttacaactctcgagtagattgaatagattttttagatgtgaatgactaaatactttggccatatcatttacttgaactaacatttgaatgctttggaaactcagtcaactatctcattgttgtatttgaaaaggtgaaagagtgaatagaaaagccatattcaaaaaaaaaaaaaattaaataaataaaagcttcttttcttattcttattttatcgtggaacctcttaaaatcaattttctcttttctatttgtcggtggttgagtgaaaatccccaccaaaaaagtgggtatgggttaattttcactttcttatgtgaatgtgttatctagattgacaatgactttggaatttatttttctagtcatttggttggtcgtattgccatagatgatgagattcctaaataagtttccttgtgtccaaaaaatggaaataacaaacctatttgccttttatcatcttcctataacccagctccatactcaccttaaaccaccaaaagcaaaccaaaaactcaacagttatcttaaatccctgtatcccacaaaagttcttttattgtttaaagagctcttgagaaaaaacctctcaacaattgatagctattcttttttgtttgttctcaaggcttgcacccaaaagtcttcctcaattgaaggaaaacagtttcattcccttgtcataaaatttgagtttgaacccaacattcatcttcaaacatctcttctcaatgtgtattcttcagcatgtaatcttgtggacgcacaccaagtatttgatgaaatgcaatcaaaaaatatagtatgctggacagccttgatttctgcttatgttgataatgacaagcctaacaaggctcttcaactattcaggcagatgtagatggagaatttcaaacccgatgaagttactataaccgttgctctctcgacatgtgctgatcttggagaactagaaactagagaatggatccaggcttgtgttcgtcaccaaaagggcttgtatacagatttatgcttgagaaatgctctcatcaacgtgtatgcaaagtgtggggatgtcaaagctgcacggagattgttcgacagcctccaagaaaaggatgtgacgacttggacgtccatgattgctggacacgcattacacgaacaagcaaatgaagctctcaatctctttacaaagatgaaagaagcaagaaaatactctaaaagttctatgattgttcctaatgatgttactttcataggagtcctaatgtcatgtagccatgccagtttggtagaacaaggaaagcatcattttagaagcatgatggaggattacggtttaaaaccaagagatcctcactttggatgcatggtggaccttctttgtcgagccaatctcgtcaaagaagcatttgattttgtgtcaaagatgcccatatgcacaaatccggtggtttggaggacactactaagtgcatgtggcatcgatggaaatgttgaacttggcacacaaattaggcaaaagttgatggaactggagcctgctcatgttggagatagtgtttctttgtccaatatttatgcaaccaaaggaatgtgggacaaaaaaatgagtgttagagaacaaataaagcagagaagggcacctggttgcagctcaattgaggtgagtggaagtgggattagtgaatttgtggctacagatgatgatcatcctctaaggtttgaaatatacaaggtccttgagagtttggttgtgtgcatgaagggttcttatggatattctctcaagatttcatgcctagaagattgctagaaacattggggaaaataggtgatgtaaagtaagaagtgttgtaaattgtctttattcaaaagtaatacatagttcgataatgatcttaggtttttctctgcataaaaattggatgcaccagtagtagatttttggtctggttatggagactgcaacattcgaagacgaaagctttcttcaatgtattacccgcttattggtgtttggaattacttgggttctactttctttcttttctcttggtagttccaactttttccctttgtttttctcattattttcttaatagacatttaagtatttcgtcattgatttgttgtgaatttttgatgattagaccatttgggttatgtgttttgctgaaatttctgatacccttataaaaggaaaattgccttgctatatatgagcaattttttttttcaattttctacattagaaggaagaactataagatgaattagctgagtaacaaatcacgttcatgagttgcttatggatttattagttataaggaaaataaaatctctttttccatgctcaaatgtattaaattattaattgtattgatttaatcttttttttttttcattgatcttgaagtttggagacatgacaaggagtctacctcaatgtggtcacacgtcagacatggttcttgccccatttgtaagctagatatcaaatgaaatgtataaaagccctagaggcctcaaaccggtaagactaatgtatgttttgtagtgattatctatatatataatgttgttgttagagatggtgatgtggcaagttaccatgttaggaacctaattttcttaatttttcctaatttctagctaaaaatatattatttgtgtattaatatttatttattttaaaaaaatactaatttattcaaattccattttttcagtctctcctaacctaattgtcgcccatccttttcttctcttctcttccttatccttgcttcctctttcctattattctctcttctctattccctcttctctatgatctaaggcttcaggttaatttcaagtaaagatctttggcaaccaaagaccaagaagaagaagatgtttgccaaccccaagacaaagaaattgaagaagacgtttggtaaccaaagattgagaagaagaagaagagcacaatctttcgcatgaggaaaatcaagatgaccagatcaaacacccaacagaaaatagtgagaaacaaacacccaacagaaaatagtgagaaattataatctctatccccttttgtttttttcattttttattcttcatttggtgaaatgtgtgtttcttattgtctaatctctatttatgatttaattttaatttctatgtctgattttattttttggattttgattgtctgatttgtaattgtgatttaaatttcatttctacttgtctgattttgaaaatgtatatgttaaaaaaaaataataatgaataaatggtagtattt

SEQ ID NO: 227112 - DNA, 2120 bp, Cannabis indica
tggaaaaaaaaaaaaagttaatttattgacaggcaataaatagaagaaaattttattttaagccaaaataatcatgaaacttatgaaaagtaattatataaaattgggtgaaaactatgcatttgcctaaaaaaggcatgaaaatatattgacaattaatatttagaaagtaagtagtgcctttcacactataatatccataaacgtattgaataaggcaaattattataaaataatagagatctttttatatgtataattttgttaatgcttcttgagtactaattaaaaacataaaaacaaatataatttgtggaaaaagtaagactaaaaggtgtaaaataggattagcaactagaataataattggcaagaaaaacaagaacaaacagagtacaagaaatcagaaatgataaatgtagaaaataaagaaaataacaccaagatatatactaattcaaaatcgatagattaatgtgatctatgactctacttcagtttcgaaacaccaccgtaaaacttctttattgattgatcaagaatatgtacaatacagtcgagacaagattctctgttgagcactcacaaagtgtttcaacactcatacttttatccaagaattttcttcatctatatctcttttttctctgcacctctcaatcttttctttctctctcaaaatctcaatctcatctgtacagagttctccaactcttaattttcagtcatatttcaaaagtgagtcaaggtggtatatatagccttaggatcaagatctcaaagtcggtggctgcaagaaacgagattcttaagttagttagaaacaactaacttaaccaactcctcatttagcgaagactccacgtcagcgttagatctagggcttccgagaacataaacgagcttccagacacgaggaccacaaactttactgaagacgctttcggacaggataaaagtctgttgaagtagactatccgaaactgtcattccaggaggaataactagccagctggaactcctttccaaaaaagggctagctatcttgaagaatggacccggaatggacatgatagacatccaaaaactctcttccggacttgactatcatacttcaagactctttctaacaccgcaaacgaaagcaaacacctttttaaatatcaaattattgcattaatgcctctcagttcataattctcaaattctcaaatatatgaatatttttttaatcatgtatagcagaattttcctatataatacataagaaaaatcataagtttaaattgattcttgtcatcttcatcatgtgttttaggcatttcattatcattagctaccataattgatgaagttgatttggaccactttactctctaaattgttctcacatggctttatcactcaaggtgtagcatcacacatgggctatataataataaatacataaagctttctatatgtgtcaagaaaatagttgtgatgacaaggacattattaattttggctatcttgaacttgtgaaataatgtgatgacttattaacataaattataagatatttgtggtaaaagtgtttaaatttttatgtttagtagtgtactttatttattttttttaatgagaagaatatttagatttttatttaagttttaagcaaatttgaaatcacgtagaaaaatgataaatggcatatgtggtgtttaatactacaataaagtatcatgttagttttgatgtaattaaatattaaattttacatattttaatttaataattataataaaaaattactaatataatactgctgaaatgtctataaaaaaaatactaaagtattgaaaaacataataatttaaatacttttgttgccatagaaataaattaagtattattttacctactaaaaactgaatgccaatttggttaatgtttatttggcagttaaactctttaaattatcattttaattgtatttaattttttaaattcaaattttggcattaccatcttttaaactactgatctggtaacaaattttaaaatatttaacttttttttgaaaatttacaactggcctcaaaacatacataattatatgtatgaaatacttcttaatg

SEQ ID NO: 227113 - DNA, 1650 bp, Cannabis indica
agcaagaaaaatgtctaaaaaatgttcctcaggttcattttatctatttttttttatttgcgcacatgttagttttatgatgttatttagttactaattaagagaaaatttggtgatttgaggtcgatgttcaaccaaaaaaaggaggaccaccatttaacaacccaactgatcaagaccaaaaagaggaaagagagattgaggaagcaaaaggccgagggagaaaaccgagggagtggaagatgcaaatatataacaatttagtggagatgataaaatattttgattaactaaattgttagatattttgtatgtaaatcggaacttaattggagtcgacatccttttgattaacttaacttttccaacttttgatgcaactagaaattaaattggagatgttatcctttttattaactgaacttttcatacttttggtaaatgatttaattaagtagtagatgtttatgacaattgtgtattgtagtgacgtagtgactaagtggatcattatatagtatttagacaatataacaattgtattttgtaaaggattttaatgcatttggtatgtagctaaagattattaattatcaatttcatcactgaagccaacgatacaacttattatcaatttttttaactttgaattttattaaatattttgtaggatttacactccacaaaacttgttatgaacaaaatatgttgtgataagacttaacaatttaatatattcataacctattctaattgatatgaactaatcttaataaagcttattgtgaaaatactccataaccatttaatgtattcataaattattcattaccatacaacttacaacttattttaaaatatttttcacatttttaaagaaaaaaataaaacaagtagaaccatcattaaaataacattttgaacacaaaaattacaataaaaaaccaaagcatacaattgcctttctttccttaatcacaaaggtagtttcatttttatctccaaaactgtcatttttgtgatggttgttgcattggctcctaaaaattgtagagggaaaaccaccatgactatcaccataactacaagatggagatctttattgctggcaagaacgatacccactcataaagctagcccactcaaacctccatgcaaggccgtccttaagattttggaggccatgttctaatcttataaattgggcccctaataaaattagtgatattgattaattacaattttcactatgtaatttctgatatcaaacagaatattcactattattacggtaattacatcactaaccaaatctacatttattagcagctatcgagaatatttctaatagaaagatgtgtgtgcatgtgtataaatgaatttttatggaatagttttttattaaaaaattgaaattattttttaagaattgtgtataattgtacagagaagtataataaatatgggcccttaattttttgggccctgtgctactgctctgcttgcacatcatttgagctaactgtgcctccataaatacaactcacccactcgaactgtgaggtttagaacacttagtcaaccaacttaactgccttgacagttggcagttatttcagttggcagtttatttcagttaaatggacatta

SEQ ID NO: 227114 - DNA, 4537 bp, Cannabis indica
gaaagaaataagaaaagtaagaaagaagaggagtttgattgtaaagaatattaaagttgttagttaattcacatataagatgagcttggagttagttaggttgttagaggtaaaaatgggcatgtgatttaggtgtcgggtgatacaacattcacattgtcttagaaaactaatatgactaaactaaggctattataaacaagacttaaacatttgaacgattaactatacactaatatagatgttatatcaaagtctacttctctaactaaaaaaaaataaataaataaattaagtttctacttccctaaatatactccaaactttgtgcttaaatatatatattcttaccattaagcacaaaagctaattggattagtcactaaaaagagatcaaatgagattatgtacgacttatttaatggtttaagagtaaagaaccaccaatgaaaactaacagaatatctttttgtataaatattttgatatagtcttatgccttatgaatacatttatatgttttaatataaattagtttgaagaataagttgtttgacgatgttcattggtgtaaacgaaaaaagtttgatgttgttaatttatttaaaaataatactttggttatatggcgaattatgctcttcttctttttaattaactaaatgatcatatgtttgaacttaacaggatatttcaaaagttcaatattatcgaactagaattccagctttaatgaatatatatctatctatctataccattaccaaccacataaaatgttattttcaaatgatatgattttaaaactgatgacaatcaccagtgataaaaaaaaatcagaatattcttcattcttaatactcttatgggtcctaccaattaaacatactgtaattttattcaaatgataatgtaataagaaaccgataacaacatgatttggtggaaagaataaggtgattacatttttttagtgtttaattatataattaattacaatgaaaatcttgtaaaacaaacagtatgtgcactaactaaaattttatgactgatcttaaatgtatggctctgaaatattcaccaatccaccaacaccttaagattatatattttacttacaccaaagaaaaattccaagatatataacatctatactatactatactaaccagaagagtgaaacaaaagaggttcttttagaaagcaaccagattctccaagacaattacaacatcatcaacttcttttagtctggctttttgactctacttcagcttcacaaaccactctaattggccacatctctttattctctcattttaactctctttctctctctctgtacacttattatttttttatttttttaattttaaattgggggtggtgtttttaattttatttttattgtatatgatgaatgatcagtctccatcgattctatccaaaatggataaaattgtctgccaaagaacactgttcccacccaatgtcacttgtcagcctctctcattttaagtgtatgcagctgcaacacccaagcttaggctaaatttatcaatacatgactatcatcagagccatggcatgggcacaatcttatcagttcaccaccaattaaaacaaaacaaatatctctatcaatttttcttttattaaagatttgggtccacatttttgcttccccagaatcttaaattgtttctttttaggcccccaatgctgctgtaatctctatccatcacgtttttatataactataactataactatgaatgatatgaacacatcattaattcctccccctttcatgtttggtttcaaaaaaataaaataaaattaaaagacacatcttcccctttttgctggactttggcgtttgtttggaaatgaaaatggtacaaaatattcaccaatattgtttttttagtgcctaaccatttctcattataatattatcaagtttcgcttaccttccacttagtataatcctttttattttactgtcggtttgtctatctaatatgatgataagaacaagcaacaaccattcaagttttttagtgattgacaagaaaataagaaaaaataaactcaccaaatattcaaggctcatcatggtcatcagatcatgatgagcaataatgttattgtgaattttaaaactataggttccaaaactatatatgtctttacttaatttttcactgttattaaacagacaaaccatagcagttgtctttagaaagagagaggtgataactataaatatcatgagcgcataattgcttgaatgtcaaaatttgaaatcattttgccttttatgaaagtgtgctacaattacaataatcagtcaacattacaatatcttacctgatactattggatttttttctttctttttcttttcttccctttgatgcacaagggggcatgaaaaataaaatgaaataagcaaaaaaaaaaattaaagagatcaaatgaaaattcaaaaggcaaattaaccaacacacctgctaacaacaacaaaggtttttttttttcttatttcttttttccgagtctcatgtgtttagtcctaatccatggttagctggatcatcctcaagggacaatcacttttaattcactctagtatccaaacccaaaaagaaagagacagaaaatgataggaaaccatcattttcatattgttttttttttaattattaaaataaaaaatgaaaataacttgttttattaatctctctgtatatatatatgcctgtcacatggcgtctatctattccactgtcattttttggaaccgatatctaaggttagatactacaagattttgagcatccaatttgaccattctccccctggtttatctctctttgtttttgccaagtggatatttttttgaccattatctatcatttatgttctgcccatcttttgattctgacataatctcttttaaaaagcataagttccaccccattattgcattctaatgcgaatttaaaacccttgtcttataaaatggtcatgtggtcaagctacaatattaatgggatttgaagattatgcttaaacaatgaatcatcttgataataatggaaggtaagatcttgtactattaggtatccaaaattggcaatttatgtaagatttcttagcatgaccatactaatgttttgtcttttcgggtgaattcttaactttcatacctgtgcccacatctgtcatccctggaaaaaaacgtggtttttctcttcccttttcgacttaaagtaaaccaagaagtaataatgaaattagtactagttttatgaattagtgatttgatagatcaatgatcttcaccctttgggcttacataaataaatagaaaagaagaatagaaatattggggaccgacctatcaaacttagattccaaatgtaacagagttaatgaggtaggattttgctcgtactagtatttttttgtctaatttttccactatcaaaggatggcattttatattatagcttgagggggaatcaaaaccattatcacccgaataagagaggggttgggatgcccaattgttgttggtggtgctatcgtctattaccatgtcaactcaactttttaatttcagtacttgaaaatcaaatgggtcaaataatggatattcaagagagttttaacaccaagtgggcattgggagactcttgcatacggaatttatcaaaagaaccaacctgcttcacactttgatgtttgtattttaaaggacttacacaagaagaatcaacaaaacccttttaaatcaatatcatttcccccaccatttccttggttatgcaatttactttgaagcccttgggtttcttttttcttttatttttttggtggtgggggagagagggaatctagatttttaagttggtagtactcgagtacaaaatattttgaatgatatccatccaatttgaagtaattgattggaccacaatcactgtatatggtatcacttctctttcgttctttcaacttcacacatttatttccaagatttcatcttcatttatagtatagctaatgccttacataacaaaattgctcagacatgtcacgcaagaacaataaacatgccacaaatagagcccagtaacatcaatccagatttcatcagcaaaaatatgatcttttggtgattccagattctccaattctgagtaggtgagatcaccttgtgcatattgttcaaggggattaagtaaaatcttcagttaattttctgtaaggataattttaccgtattagattgtattgtaatttattatattaaattgaattatatatatcatgttttaaaataataccagttaaatttcattttatactaaaatattgcatatttaagtatctataaaaatcaatagggaaatttgaattattatgcattttttaatacaaaattggtttggagaacacttagtgtaggtaatttttaaaataggacaaattttcaaaaaaaaccccaaaatagccttgtcaaaaa

SEQ ID NO: 227115 - DNA, 2384 bp, Cannabis indica
tgcacttgtcttaggttcaatttgagattttctatcattctattatcccccaagtcgacacgggattctccaatagaaggttgactagtcgtagtcccaatttctccagtgtattacttgttggtgttttcaaattcttggacactgagagtgactctagggatctcagtggtgatgactgtcgtgctcctggctcttgcccctattgaaattgaggtatcgacctgtattcgtattggggcattgttgtgaggtgggaggcacaaattggtgttatttgtgctaatgtccgcatatatttggacatttgggtcagtgaccatagggtcacatgatttagtggatgcgactctcttagtttgaaccattgctcttgaattaaagatgattcaaaaatagatgaaacacgaatattgtgttgagagcagatatttatcaagctctcaatgaaagcaccaaaatattgacctcatttttggtcaatgacgcggggtcaactaaacaacaatgaaattatttgataatgaaaaataagaaaaagtaatagacgacatacaatattaatagagattcgagcccatatttgataatgacctactcctcttatttagtatttctataaagatcacaagaacctggtcaagtgagtttcttgatgttcttttataaggaatatagatggtactttcacatcttaatttctctcttgagagttcagaatttggtcccctaagcagtgagaatgacccactatttataggattacaagtgagtaaataatattgattaccaaatatacaataaagaatgattgagtcattctcatgattttctcaatccaacgattcccccaatcctaccattctaggtattcaaagtgacatagttttcaggtattgggcagttaatgcgaatatggatttggtctttgtgatcatcttggtcagatggtctagtcaaaattaggttattcatttcgacaaatcaagttggtcggatacatggtcaatataccatgtagtatttccctatctcccaactgcttcgcccaacgttcagctctaggaacttgtaagcctcttttctcatcaccacgtgtcatcttattaatgccacgtcactcgataagttttgagaaaacaccttcgccttctgggccaaacaacatttccaggactaaagcgatctggcctcatcgcgtctttaagcttgatatacatacatgtttaaagtcgtagcttgactttgtaattaagttgacttgcaaacttgattaggcccaagaatgggcttgctttgactgatattgggcttttaaaattgcaagcgccatttatctggaaacatagacaacacgaatgttagaccatctcaagtggatggtgtaaatttttttgttaaattaggctcaataaatgagtcaatgatatatttggcctaaattttgaaatggtgctccaatgcactaggggtaaagtaaactttatttttatagaaagttgtaaaaaagtcaaaaaaatattaattttttattgaaagtacataaaaatctttttaaacaaataagaatataaaaatttataattgcattaatgagtggcaaaaaagtaaataaaaaaaataatatttattgtgacgtaaaattttgacctatattatattttatgtcaaaatttgacacaaattttagagtgtgccaaatttaaaccacattatacaccactatatttgaggtttatgacacattatacaatggtgtaagttcgagtctcatatattctcctagtcgaccctattaacatttataacataaaggttaattagaatttttatcccccaaatttttacacgtactaaatcatgttctttggacttttaagatcgttaaaaatttcttctgaactattgcgattgttggatttaaagactttcgtctaattttaataagaaaagtctaacatggatgacagtttagggggatgatttaatatatgtcaaagttcgaggggcatgattttgtagttatcaaagtttgggaaacatgatttagtacataaataatcatcgaattagtaaaattgattgaaattagacaaaagttctaaattcaacaatgttaatagtttaggggaatttttaatagccagaaaagttgaggcaacataatttaatacatgtcaaaatttaagagacaaaattttaatcagcctatcataaattaataataaaaccttccaacaatatttatttttttacattctcaatttatcatttttcaattttaaactccaccactaatattttacattttatattatttattgtatatatattttttttaaaaaaaaaataatatgcaagtcattttttttctcttttctttt

SEQ ID NO: 227116 - DNA, 2240 bp, Cannabis indica
tgggttcgatcgaactcaaaatctttaatctattaagctattaaaatgattataatactattaccctacactaaaagaaaaaataaaatctataataacattaaaatttgatgaaaatacaatatagtaaagcagacatgaaaatacaataatgggatgtattaaaaggaatggacaaaattcattatatatatagatgtggtccacatacttatttgttcatcggaaatggcacaagaaacaaagtaagataataattgggagaaaattacacgaaaccctattattttaatcatgtgtaatgaatatgccctatttagttgaaagttttacagccgaatgtgttaaaattggtgatattgctaaatacataatggctactgaattgacaaagtaaccatactatgtttacttgataatttatatatgctgtccccttcgaattgaaaatgatatctagactagagcggtagtaatgggtatttatattggtggttatgggttctcgtccaatatctaacaactgtaagatgtaatgcgtgtatgtgtgtgagtgagtgcatttccatttgattgtaaatgctattattgttatctgcctatgaataatgtgtcactcacagtcactcttccagttaggtaatggcacacgaaactaagtgggccacttaataattgtagtgggaagatcattttccacattaatatctttacttaaaacattgcatacttaccaattttttagtatcctaacccaaaaaaaaatgttattcaatatttataaaattgtatttttctttcctaatttcatgacacacataaagtccagatttcatatcattaaatttagatagaaacaagtagtatcagttactttttaatgtttttttaataatttcaaaatgaaatctgtactgacaaaattgaagaaaaattacaattttactgccgactaaaaataaacattaaatttatgccacttacaaacttaaaaatttggggtacttatattactatttacactaaagaaaaataataataaatattcaggatataatgtactcaaattctaaaattttattatatgtgagtaatatagctattagattatatgaaataatagagtataaaattactaaccaacatcacaactttccttaatatgtaattttgctaataatattaatattcacattaaaagaagtgtgcgtgatctctcttactcctctgtagtgaagaaaaagcgagtaattattctaaatctagccagattgactgatttagatcccccatcaatctaagactgtaatggtaggaagatcatagtgatgatgctgatactagtggccaagatctaataacagaagctctttaagctggggagattatttgtgaagatgtggcgatgaatgtagaagctaccagttctagactggaggagccttgtgtgacacctcacttctaattcgtaacagatttggaagtaatttatagcaagtaagcctttttacagtgatgttaaactgtcatattctaccaatcattaaagatggaaaaaaaattttctcaagttgatattgaggaatttaatctctaagaaatgaattggagttttgcaatcgtaatggatggtcagtagggctaatcccccctttactgtccttaaggattttatcaagcgtatctggaaaaactcaggcattgctcaaattatttgaatgaatggagactttacaatcgttaatattaatgatgatgcgactagtgatcatctgcttgagagtggagtcattaagtttgaacaaaaacttgacatcatctggttgtggactactaatttgtatttgatttgtctactcaaattagttccattgtgaattcacttacatgacgtagggttgtagtattatgaagtaagtgcttaagtgttcttgtaagtacaattagaataccaatcgtggttgataaagtcactaaggagagatatatggttaaatttgttagagtgcgtgtggaaatggacataacaaatactcagttattcatttccttaatgaacttggtgagcttgtagaatagggtgtgtgttggacttattttaccaggatctagatttactaacacgtatgtttgattatattatataatctaacatcctaaacataaattacgtaaaacaatgaaataaacacatataaagttttagaaaacctcacattagtggcagtggaatattatgt

SEQ ID NO: 227117 - DNA, 4354 bp, Cannabis indica
agggcctgccaacatgcgtggaggcatggcgcctttaggattggtccatggatgtatgggagtccttgggcgatgagggagactgttcggacagtatcgaatgggacatgatagaagcgttggcacatcagcttggtgttggcatcttgccacacatgcaaccttggtcacgagtgactaggtgagcgtcggtgttgggacttgccttatcatagtggaacctatggacagtgcgagtatcttggctagagagcctcgatgcatggatgcactcatagatgcttgcgagcatgactcggggggagttgttcgagagacggaagtgtgcacgaggcacacagtcacgcgaaaaatgagcccattattactcggatggttggaaggctgaccttggcttaaagaagtcaaggtgccactcggtgtttacgttgcctgaaaagatgagcccgtgacacccagctcggtcaagcagactttatccgtacagatgtataattgagctatgtttggaatatctctccagctaattatagaaaatagcagacacgtgttaccgatataggttgctatgttatagtacaaaaaatgagataacaatgaagtagataaaagtaattaagataactaatatatacatcacaatttacccagaaacttaacataaatacttatttaataaataattttaacgaattatattaaataaatatatatttaagatggtccacggtatcaaaatatcattactcattgaagaaagaaacccacatatgcgacatactgtgtgttaaacgacacgtatcacataccgagctggacgcaattgacgcgtgtgacttttgcttcccacacaaataaccaactcttaacagactctctgcaacttccaccaaagctatggctgtcaccaccacactcttctccaataccctcctcaaaaccaccaatcaaagcttcacacgtgttctctcaaacccatctccccttctcaacctcagcttctctcccactccgacccactgcaagaagctacgagtctcaccgccacgccaaacccatattatagcctctgcgctttctggctctccaggcaagctttttttttggtaataatctgtttggtttgctagaaaatctgcagaaaaataaaatgattatcatttgttcaatctatctattctattatctctgtttctctcagggattgaatctacagtgggtagtgaagaggatacgccaaatttgttggatagagtcgaagtatttgatttaaatggaaatggaatcccaatttctgatctatggaaagataggaaagctgtcattgcttttgctcgccattttgggtaaactaaaactttctaatatgtctttctattaatttgtaatgcttgttttgtgactttttctgtactctttcagatgtgttttctgccgcaaacgtgctgattatcttgcttctaagaaggtacttgtgttggtttattattagttaattcctgttcttcactaggttgagtttaattccttgttgggttcctaatctgaacttttggctgccaaaacccggtttcaaaatagtaacggcaaagtggaagaatttaaacattggtccgtcaaataaaatttgcttatctcctttagaggacgaccattatttttactgataagttagtggattacagtactcttaatctcacaacccgaactcccaactacactgccaaagtgtgtatctctctcccgaatcacacactgtgctaaaccgatcactcacttctcttttggactatctacttatcctcacaagaaactcactaagtagcaaagtgttgtaattatgcactaaaactttattgtgtcattacaaaacattgattcccatgcatgtggggatgggattccacatgtctttgttggttgcaaatgtactctgaatctctaagcacaatgcctttttcggtgtaattcagcatcgttttgagattgtggagaatagaatagtaagacctcatgtattgcaatctatttatgaatggcaggacatatttgatgcaaatggagtggcacttattctgataggacctggaaacattgaccaggtataacccaaaacagcatataggtattgtaagcatgcatagatgtatttgctaaagtgtgtgatcatatgagtgactgcttgattttgtgcatgtggatagtgaatgtagtccccatgttagagtttcaaaaaactcttgtaacacgcataatcaacataaatacaacatacaagtttagaacctaagcatgttactacaagtgcttgaaaatcaaaccctaagtcatgtttctaaagaacagaatcagaaacaatatctgaatctattgacggagattgtcttgaaggtattgatcttgcaataacacaagcttttcctctatgattttctctcttcatgggggagaaaaagaagtatttggttcttagggactgccaatttattctctaatattatatatagttttaggtatttatagtttgctcctcatcaacttagaataacacttaatacccaatgatactaattatgtaatgattactttatttgtatcaacattacaatagcatcatacattaatacatatgtgcctacattagaatttttaatgcaacatcctcgtcttatgaggttgttctcaatgaaattagatcttttgactgatactttcatagccagatcagttgtttgcaatttaaagttgtagaaattttaactaagctctaaaaagaattgtgagttgatataaatccataacaaccgtatctgtttcttctactcttaatcagcagcattacttcttttctgatttttggtgtaggcaaaagcattcactgaacaaacaaatttcaaaggaggtatgtttctacaatcagttttaaatcttctgtatgttggttgcatgaagcgctattgaactttgcatgtaaaagatcataataaaatgtttgctataacatttgtaagaatgataattgttattctttctggataatctatgtttatgccaatgacacaacaatagtgaaactcaatccgttctgtctacttcacctatctaccagatttaatagttctactagacttataggatttatgtattaaagtgttctctctctgaatattttgtatccctgaatagtgatatgaatccactatttattggtattaattacagtcaagagcctcttacattcactgatgaaggcgacggagaggcaagaatattgggaaataagggttctggtttgaaaaacacaagagggcttccaaaggttgaagatgatgaaaaaaagggagaaatgggctcttgatgcctatttataatctagtggcaatcctagcagtttgaaatgaacggtccaaattgcttcttctgaaaagcatcttttgatctgacaaatcggtacttgaatagaccgcatttaatgcacaacccaaacgattaatgttcatcattgcacgtcttttgtctcgtacgcattaaagcagagttcacctcaattgtcctaccgtcattacaactcatcccaagggacacctcgcacacgcgcgtgtcgccagcagatgcatcaaaaacgaaaaatgcgtgccatatcgaaggtccctacggttaatttccccaatacatgatgatagcttatggggcacatccgtgagtccaaccatcaccacttgtcaaggatttgtcacgcataagcgacgaagtactgcaagctcctggaccgcgttacgtcccgagagcttgggagtaaatgatatctgcgtttctacgaggtatgacctgtggcattttagaaagacaccaaattaatccttctttgatcgaaatcctttaatactgcgctatcgctgaaaggcttccccgaaccaagaaacctccagaacgaagggacacgtggaagcctactcaaacctgcctttgcttcccaaagaatgaaggagaaacgtatttcccagacccagaagggtctaacagggaagctcgtttgatttacctccaaacaggtactcgaggggcctaaagcggatgtcaaccctcactggatatcgcagatatcgactttctccacacgccaggtcaccaaagtgacggttatgcttttcctcacagaatcagatcttctcccctacatccgagcatggtagtgctcgcaccaccaccatctttttaccagacggatactacggacttctgcttttaaagaaacaagctttgagtgacatgtctcccctgcttttaaaggttaaacatttgcatgacacgtgtccaagtagtacaaagtagtcctcattatccagctgctaca

SEQ ID NO: 227118 - DNA, 2982 bp, Cannabis indica
ggatttaacgtttctttaaaaatgaagaaacatttgaaagagatgatagatggtgaattttagctattttaaatagccaatgggatgctcttaacaaaatcacaatattcaatttttttttataattctttcttctttaccattcaatcatcctatatacaaatcatagccattgataagagcttttgttgttgacctaatctactatcaacacttttatgctttcatgcttagtagagagtctcccattgtgaaatttaaataggtagcaacactaactaaagtctagaggaggctagtaatttgaatcttttttgttcttaggggaatttgattaaattctatacatcacattatttgttttattttttattttcaaaaatcttagaaccaagccaaaaacacactcctacccaagtccaaattggtccactcgatcaattatatatgtcggtaagattcaattctcaactacttatttggttgttgaggattaagaaatgaattcaaatactctgatatcaaaatctgagtcttacactgcatttcaatattatatgttagtgttacaattgagtgaaatgaaatacaagaaagaaaaataacacaactaatttatctcgagtagaagttttttccagggcttctgcagtgagagggatatacaaacagtcctgtccatcagaatgccttctagtcttgaccaactcatgatctttgaattctgtcaaatgggattaagagtaacttggctacttgctaggaaccgttctcgacatgtagcatacaaattatcgactggcatccctgaagttaaattttgtgacgaaaaatgtgagttcaagtggatggcaaacaaaaaacgaggaatgagatatgagatgaacgcttgggaaaattaccttcttcatcaggatgagacagctgatactctgcaaggactcgaaaaacactctgagcattgggtgtcaaactttgcaaaactagtgcagctgttttggcactctgaccagtatttccattcgccagaatcagtgggaaaaacattccttcaactttgtatggtgcaaaagtaggaacgtggtaccagcaccagttgaactgtgtgtggaccatcttcttgtcccacactaaagacaaacaaaagatagtgtcatttaatttcatccatgcttgtatggtgctagttttcatttggtgcagtttgtaatgaatttcgctgaagtacattaaaagatactgacactgtttccttcatcacccccaacattattcaacattcatagttacaatagcaagaaaatttgtatcctgaaaacagcctaagaattcaaacacttttcctattcagtccaaactatgcaatatgtcaatatctacaaatgatgatttctctaaactcaaagtgtaaatgtgaaaggcagatcatctccagctagttattaaactctacaatagaataagtttgaggacgaacttacaaagaggcgtgtttacatggtcaatggaggaaacaacacggatattggagcaagaagctaagcgtgcaagaatttgttgagtttcagagtctcttaatccaggcccatcgatattgtgaatgatgatgcatataaaactttccttctcctcgacttgtggttcatccaaaaactcaagaagatcgtctatggatctagaattgaaaggctgctggcctcctcttgatgaattacctgaataattctttcgtttggccttcaattgatcccacagaacttcagccaaggcaatcaagacctgcatttagagcatgtaatgtatgttagcaaagcaccattttgcctcaaaactcagttgcctgatcctattttataataactaataatgaattgaatcaatgaataatgttcttaatatatgaacctgttttatatttattgactgaagataaccgttgattacaaatacagaatgttcagtcaatgaagtcgaatcgaaatcttcaatcaaggctttcttagatccaaatccatacattagaaggttaaatccacacctaagaatattaaaaaagaatgataagaatgttgtcaagtgtgatgttccatcaaaatcaactaaatcctgtaaactaagagacattccaacatgctggaagtggttgggttgtggtcggatattattccctatctagactagcatatgatagaacattaaacacaaccaatattaagcaagtaatacttggactttaaataacagtaattatgaggaagaattgcagctataacctacaaatatatactagcccacgacctaaaaaaagcaatataacaaaataaagacgccactttttcgtaacaaaataaagttgtttcttgatcaatccccataacatgttatacctaagcttgaaaacccatctctggtacaaagtcctatagcttctcactagttcctcgacctctttctcatgtttgggctcaatgttagctgccgcagttctgagttcctgcaagtataatttgctcagaagaaaaaaaaaaacaattaaaaatcacaaggaaaaaattggaagcgagaataacctgttcctcaacaagatcaatgtccgagagcttatgattcgattttttttgtagaacccttaaactcctttgccagaaagtagtttcttgagaatccaaactcatcgtcatcgacttcattgacgtccatcgttactactttcaagatggaggattagactgaaatgaagatgggaaactggcaggaattaaagtaaccaaaggttaagcataataaaaatatataccaatttgaacctaaactcacgatggagcaaacaaatggttataataagggtaaaaaaaaaaggaaaatgagggaaaataaaatttaacaataaaaatattgttgaaagattacaatttttttcttgggcaaaaataaaaataatcataaatttacaaaaaagaatcaaattgtcccatccgggtt

SEQ ID NO: 227119 - DNA, 8067 bp, Cannabis indica
ttttttttcaaaccaactaaataaaaagagaactctacaacatttttctttgattaggggtcaaacttagagttaaacttgtctttttgtctttctattttattcactactattgttatatatataattttttttttgtatatatttataataaaagagagacttttatgttaggtgagtcaaaactctcacaacctcgaactcacatccttaccccattaatatttgattggtccttgatagggacttttatctccaatgtaaatttgtttcaccaaattttgcaaaattttatcctcacttccctaccccattaatgtttgattgatacttgatagcttaggcaaataggtttgggttgtgaaggagaaaatttgtgtgtgagtatattaactttgataggtgctaagaagaattaggctattggctcaaatagggtgactattgataagtaaatattctcgggttagcttgaaatattcaatcgttcaaaaatcgcctagatcatttctaagttgtaaaactagccaattttagaaacttaaactctctcaaggttttaatcattctaattaatcaaagcatagtaaaatagcacaagtacacatttatttaaaagaattacccctaaactagcatttagacaaaataacacttaactagacatttcaacacacaaaaaatcaaaacttatacaaatggcaggaaatggatgataataataatatttttttttcttttcgtcatcgagcggtatgctaacccaagctgaaaataaatgcactatctttctcaattacaagctaaaacagaacataacaaacattgccaaaataatatgattaatacaaatctaatccacataatgtttattacacacaatactaaagacaacatcaaaagtactcacaaaataaacaaacacaaacagtggcaacaattaactaacatcattagttcagcacacaccaacacaataacaattaaactagattaattaaactaaggaaaaagaaaaactctctcaataatcgagctctccaccaccggagtccctttctttgtcatcatctggacaccaaggttcaagaatttcctccgggaaagttgggaatgcagttgctgctctaggctggttgcggtgaagagctcgcgttatccacgtatctcgctccatctcgtagttccaatgggaatgcagccgctcacacatctgtgactgccgctggagcatttgttgttgcaaggcttcttgcttggccagccgctccatttttgggtcactcgaagtggaagcagaagcagtggatgtggtggcgcgtttcggggcacgaccagacccaaaactaaccactccttttcttgggacagggtcctcttcaggcatcattggcacacccgcgcatctacacaactctgtgattaggcatgggaagaacaacattcccttgactcagtgtgcacagtcaaaaatctctttagccaccaccttgtcgacgttgatttcccgactcaccgtggaattgtatgacaactaataattaggacttaccatgtgaaacatgaactctacaaaagttaaaatttgtcccaaaagaatggttcattaagtaatttcttgagaggtgttttatatcagtcgacatagtcttcattgaagagatatatttccaccgataacattttgtgataatcacatgaaatgccaaatgctgagtaagagagtgatgggttatgtagcagccaaaagaattgacttcttgagtgaagaactatgagatagagaattaagaagcaccattctctagtttgtaaccagtttcagtattgatgtcaagcttgttgaatacatcaccattggtattttggatagaacttcctctttcctccatagggaaatccacagtaatggaatcgaaactttctggaggtgttgttgtcaccctagcacgagcacgtcgtgaggggggtctcaactttaagttgtccccaagaaatgcatcctttgactttcgcttctgctttatgtccaaaaatccacaagcaaaagcttccagcaccctggtggtcagtggtcgatttcttgtgctttgtctacgtgaacctactactactttagcttcctgctcctcagagatagctacacattctgagaatttcactacatggggattgtccatttcatgatctttcccttctgctgtatccatcatttgagattcatcagtttcagcatctggagagataggtaagttcaagtcaatcaatgtacgggttggaggtttatcatgaggaaaatcagcatccatatgattactattagcaatgccttcagctctagtgattgggctgcctcctctagatgaactggtagatgacaaagtctcttgagattgatccacccgaaagagaatgttctcgctaaaatatgaattgtcgacacagctactggcttcttgttgcaatatggaatcaacactgctgctgttgattgtggtatcgctcatctccttagaaatatgaggtaatcttcgtcgtcgttttacaataggagctagatgattttcattttcagaaataattttctggatcaatttggactttttagcctctttcaactgttttctgttgttgagtaaatcagcctctttatccttatggattttttcagacatggtagccaaacctttatctgaaaagccctgttctaaagtgttgtaatcaaaatccttgccaccaaaaggtactgttttacaggtaagatcattagtctcaatcttctctgagcacaaggtatcagctgaactggatttacttaatgtctcctcaaaactgtcttcatcatccttttcagagtcactaagggaggtagaagtgtagattatttcagtaggtaagcttctaagttccctcaccttacgcgctttcccatttgccagacttgttgtatccacaacggtaaatttcatgtcatcagtagtagtatgattgggagtgcgtggcttgagataacaatggcgttcctgattagaaaaatcttcttggtctgattttgtttcatcaatccacacattttcttcattgattttgcaactttcaatctcaagaagactaggatctgaagcaactttactgaggacatcacttacagaatcataatagtgctctcccttcactagtttccttcttgagaactttttaatgccaggtattaggaagaccaaagaatgcttggaaacagcaacaacaccatgattattaggctcctcagagtgccaccctcttgcaagcaaacgaggccaaacagcttcccagaatagatcacttgatcgagctttactaagccggaagtctcctgttaaaaagttgacaatctctggggtggttaatgctgagcatgccttgccaatcggtatctctgggcgaacatgtgcaacttgattggaccttggcgtctccatggcgattcctgtaagatcttgcttccctttcccaattcccactgcctccacaagagcatttaaaccaaatgaagcctttaaagtgaacacatattcctgtagtgaaattttcccctccccatatgtcttagaggactgccaaaatggtgaaagaaaattatcaacaaaatgtaggaaactatatgttatgtgttatttcttataaaaatgtaatgttgagtatataattgaaagccagaaggttatacatacataaatctcaggtagtaatgatgactgcattacaaagccataaccataaatgaaaatctagtaaattgactttgatttaaagaaacaactattttgaaattactctccatttccatgtcctgaaaatctttatctttaaggtatttttacattgtttttacatgaattcacaacttcataatggaggaaataaactaattgatatgtgtgtgtgtgtgtaagcaagcatgcagaactttcccaacaaaaaataaatgcaaataaagcagaggaaactgtggtaatctgcataggaatgctgtagtttaacaaagaagcacaggatcataatgctcagtaggatttataactacctcaagtacagtgttttggcaatcctgtgacacatgaggaagcaaccgagacaacaattcttgatgcctcaatcctgtgaagattctttgtccataaatacactttctggtttttattttcctgcactcagaccatctacagtatctttcagacctgtagaatttcccatagtagaatgtcaatatgtctcccatttgcttactcccaatgaaattcttcaccaaaacaaggttcttcccaaagatatacaacccaagaagaaacccttcatcctcaatattactccaaatgtcactcaagcacccaggaactaggaagtggccttctcctccatgttttggttgcagttcagccattatcatatatttctccaaagctaacttctctggttcaacctcttttgtgtcatcccctgatgtaaaatctaaaggctcaactttaggtttcaaatcactccctccttgaactattcccccctcattgatgcattcaaattttaaagactcatttttgttgctgacatgaatagcttcctgttcttcatgtttcttgttctcactctcctcatttatccacattattggtattggcaaaccaatgagaacattatggcaaccatcattctccattttaacatcagtcagagtcttatagtcagatactgtaattggagaaggaattacaacttggtattgatcaccaactctaggatgtatttctgaatctccaaagatatcataaatgccacaaacttctgcactaacagagttcacagcagatatctctttacgtgtattcatatgttcaattacttcaccagaatccatctgccacagaaaaatggatatggggttactattattctatcaataaatttatttattctcatttttccctttcaaagtgatgagttgttatgcagtaatttggacttgacaatgagaaaaacaaaagttggataatatagcatgctaagcaaaaaaaatatatggaaagagtttgtttcatgaaaaatgaaattgcaggtcccatttaaacaagcaatacataacttcaaattaagtaacaaaaagaaagcatttttttacctttcttttttaaaagactggtcagtccatttttctgaatttaaacagaatgaaccaaaaagaaaaaagaatgagatggttaagcttcttcctgttagtattatgttaacaatattttgtttataagcatttgaaattttgaactacagaatatctatatttaatagattcagattaattgaataaaaaaacaccaaatagagaaattttctacagattcaacttgtaaaaagtcaatttgtttttttaaaaaatatatatcttacatatttttttttgaataaatatatatcccatatattatactttattaatttatttagaccaacttgttttcaaataataataataataataaatgaaaaaaggatgtgtccaaattagggaaagaagaagtattatcccgaaaatcacataagaattttcgcatcaaaaatgaattttcgtcctttctggccatacttgaaattttttgcttaattcgtatgtaaagatatttagaaaaaaaaaaaaaaagtttataacacttatagcatccaaaagaagacaataaatatacccagattcattttcgaaaccaaaactagaattcaaggcaaacaagttcgataaagaagaaacttttaacacaaaaacaccgaaaccccattaagaagatacatttatctaatgaaccaaatcaaaattataaactttaccagaaagcaacacattctaaacacaaaaataatattattattatcaataatatatttattttattatataatatctatacataccaaacaaacaaaaaccaccgttcacagtgagaattccaatatgatccatcaaattctaatcaattactcttcatggaaccgttaaaacaagcagaaaagtatttcaaatcgtacaaataagcagaaaaagcaaccccatttaaagaaagaaagaaataaagaaatataaaaatctcttctttaaactgtacctctccttaagatgaagaaaaaccaaaaaacaagtcgaaacccacgtcaaaactccaacctgagaaaatgggtcttcaaagttgagcatcgattagttacttaagagattaaaactatgatataaaacgtaaacaaacttatatatatacacacaacaatatatatatatatatatatatatttaaacaaacataataatatatattattagtattcgaacaagaaagaaagagaaaagaaaagcacagatatatttatataataagagaattactatagctagtcgtacctggatttttaagaaacctgagctttcatggctacgaagactgaaattcgaagagagactccaaaaataaaaaacaaagtcgttctgttttgtgcttagagagagaaaaaaaatatttatagagagagaatggagagaagaagcttgtgtttattgtggggttgtttataaaaagatttatagaatgagaaaatttacattatataaaaaatgatataatatattatattatcaaaaatgttttggtccgtttaaatagacgcgctttgatggtgcgtggatacactacgtgatttgactatcgacacgtgggttttaagattctctcgtacatgaattatcatttacgtgatttattctcagccagtaagattttgcgacgtgtccagatgagaaaaaaacatttgtcattttaatttgtattagagaaaacgacatcgtttcggtgagattaagggtaagagggtgatataagtgtcgttgcgcgtatctatacgcgtcaaagactaacagtttcagattggattaaattggctaaatgaccaaattagccttgaggtgttgaattttaaaaaaaaaaaaatagttgatttttcttttctttttttttatatataaaaaatttagttgatttttcgatttaataattaagaaatacaaggttgccatccacgtgaagattttggattgttctattattcttagactcgtggctttaataaagggattttttttacaagggtttgcaaattaaggggttggcttagctaaaagttttttgaaaattaagttctaattattatttatttaatttagtaaccttataataataattgacccaacaatgatttttattttgacaagagactaacattgatttcagtctagtagtgaatagagaaatgttaaatggtactggtgtctagcaccctcctatgcctaatagcaatgctagtagtgaatattaccttttccttgttttgtttcaaaaacataaatttacaccgttgagttaaaaactctttgttttaaaattcattattttgttgaattgttgcatatataaggcatctttgtgtgtgttttttttttatatattatgcttttaagatttttaggtctcacataaagtggatacatttattaccacataaataaattatttatttatattacaattattttttatatattattatcggagctattacagtaaaagtaagatgttgataataatttatagtctttgatttgatttaataatttaaattaattattaaaaactatactataattaatatatttatttataattaatttttaatattattttttaatggattaatttttaatattattaattatagatttaactaacaaaactccaaacctaattatggagacaccaaggtccaatcaagttgcacatgttcgcccagagataccgattggcaaagcatgctcagccctaaccacccagagattgtcaactttttaacacgagactttcggcttagtaaagctcgatcaagtgatctattctgggtaattgtttggcctagtctgcttgcaagagggtgacattctgaggagcctaataatcatggtgttgctgctgatataaagcacctctcaagaaattacttaat

SEQ ID NO: 227120 - DNA, 27112 bp, Cannabis indica
ttttttttttcaaaggcggtccccccggaccgatgactcgcttgttcagtactgctaaaacaattataggaggatgccgtcccctcgagactaccagtagtttcggttgttgaatctcgtgcaagttaggttgtggttgtattggctgcaagcggaacgtaggcgctttaggtgtgtgttgaccatgcactctcgcgtcatgtaatgtcgtatgtatgatagaggtggtgtggtgattgacctcaatgctaatggttatccccaagcttcaacgaatgaatgaagctatgatcgtacccggatagagatgatggtcttcctctgatgtctccaagccggccataatagaatagataggcgaagcagtctgttctcgcctatcgatagatagtaggttgcttccaagctcaaaccatttgaaactgaattgctacttaattcttgttattgatagagtggtattctccgcccctgtcaaataaagtagagggagagaactggaagagagaaggaaaaagagcaaaggatttacaagtctaatgggagaagaatggccgacacgttgactgccttcgagactctaataaaatataacccaagcggtctaacccccggggtggaccccaaccgaaagacgctagacggactaagggcaagcgagataaagaaagcagctggcccttagtgtaaaaccttgccgcgggatagtctttctccaatgagaataaattcagtttttgggcaagacaagaaaggaactcgccttttgacaccaagggataataacttttttctggcgatgacttggtgaagggaatctatgagagaaggttctcgaaccgggttccgaccgaatagagcgcggagccaacgagtttagtcgaacagcgtaacgagtctaagggcgggatcaagcttgaaaggaatggacgggcgtaggcttaatagtgaacgcggaccccccgcttatagatatgagatcaatgacttaaaagacagatgccgagagaaactgtttctttattgcgttgcgaaaagagatcgaagacgcagattttctgacgcagtgcgggcactggatggaaaagacagataagagaacaacccaccggaagggcatacctcaagagcgccaatctcccccggcaaacatctatctgcacgaagccgacctatggatagaaagaataaatgcaggaaaggaaaatgaaatatgaaataaaaaagatgctttgggagtgtgagatacgcggacggggagtacgcagccgaacaaccgcaggggcttccagcagtgatagcggaactaaccagatgggccgcccaaaacctggagctgacatttaaatcggaaatcaacgtcggatcccggctatccgaaaaacgcagactgaagctatggatcacaaaaataaatgcaacacaacaaggggcgaaccaagcgcttgcgcgaaggaagaagcgaatcaatcagaatggagacagggaggttttccacatcatatttgtgctccaagagctctaaaatttcctgcaagcagcaagcaacaacggctgaaagtggcgcgctagcttttaggtaggggtgcccctttctaaaacaactatttaatataaggtaagctttttatttttggaaccctagttttggagttttccccaacctataccttactaataaaaaggggcttacgtttttcagctgcatcgcactgccgcataaacaatggatccgctgggctggatgagcaaccttctctggaaaggaatagtgaaaagccatgtcacttggaatggttgcttatttacttttttttagtaagaccacttgactttggaaagcaaaattttcttatatgggcatggttgcttacaagacaaaagcgagcttctagatgttctttgcctgaacatatagaggaagcaaccttctatctggcctctgtaccagtagtggagtggcttgctactttcaatcagaaaaggtaaattgagcaaggcaagggagaaagaagttgtcccctcttctctggtaaccctagccggtcatatagagtgctccgcccgccaccgcatatgtagaaaaagagggagcggggaaggaagaacaaccgtttgactttggcacatgaggtggcgggtttggctaggtaacataatggaaatgtattggactgcaaatcctggaatgacggttcgaccccgtccttggcctcggggagtggcgagcagcacggaactttaattaatcaaatggggctttcctttgttataaatccacagacaacattctggaacttccaaaccaaagaaatgcaacatgagaaagaaggcgctttttacgcttcaatagaatgaattcggtaagggtagaatacgccctatggtcgatcgaaggtcctgtgccacttgaactcaaatctatcttaccttcaatccatctttgtccagccagcttataaaaaaatgttagaccgggctgacacaaccgaattggttgaggaaaaggaaaccccagcgaccacgcactcccgcccccaaaagcggagaccgaacaaccgccaggttgtcgaggacacgtctgaagaggaggcgggcgccctctaagtttaccaccctacccactaatggactatgggggggcaggcgaacgggaaccgaccgagaacccgaaccgcttgactgactgaccccttcatactcgattcattagggtcggggatggatggaaccaatcagaagtgcaagcgaagccgggaaacggaccgcagcgcaacgactaggactcgtgtcggaggagttttgagcgtgagctaccactcatgcagcggcaaggacccgcaactctcgagggagccaccaaccgcccgaatcactcctttactcaatggtttcactcctctttcaatcaacaaaatgagaaatggggaagaaagaaaagaaagagaaaaagaggtctttattgaagaggctttgcacctgaaataagactaatgaagatccagaagaatgggtctgggctttcgaaaagatgaagatgcaaacaacctgacataaggattctagctcgcccacttagagcagatggagattctcggacggggaaaaacggcactcgacatctattaaacaacaccaagaacaaagccataccatgccctcgggataaactagtgatgattgccatgaatgctgcgaggatctgaaagagaaggtctttgccgattcctatcaacatggtgcacctctcagtagagggtggagactttgaccgaatgaatagggatcaattgatagacattttgattgaggccaggatgaatgcttttttcgttcgctatgtgcttgctgactggatgcgtactcgcgtgatcgatcgatagacgggggaattgcgtgaatgacgagaccggcctaacctaaagtaaaggctcttgatggcgaatcttgattgactgaaactaggaaccgattcggagaaacaagaagcatggcatgagattcgcggcggataaatttccgatagcgaattacttgattcgatggatggtaataaaaaaccaactcaagcacgaaatcaatgttgagtcaacaatcatcgagagtggatggttgaccgccgcccccttgtcctggaggttctccggccggggaggggcttgctatcgtaaccttttctcccggtgtatgtgaaaaagagtgacgaacccatttttgttcggtcataggttggtccaaagaacgagagtcggcttccttaagtccgttgttcctcagtagctcagtggtagagcggtcggctgttaactgattggtcgtaggttcaaatcctacttggggagaatttatagttatcgcttttctgacctagcgacccctgtccttctccttagtttctaaactagcagaatcgtgggacatcaaaagtgggaagttgattgttggtttttattcctcactctcgtataggtgaacttggttcgttcaattcttagggagaagaaggatccactgggaatgaatgggaaggactggagtagtatcttcattagccggaaggaatttgtctccactagcgtcattcgaagaacgaacaaaaaaagggttactgtttaggtaggatagatggatgtagtccaatggctaaagctctgccagcttcttgtagactgaactctcttttctttaggctccgagttgtttttgggtaggatggtagaatttatcttcgccactagtggcaacgaagttcttggtaattaacaagcaagaaaacgtatgcgctaacaagcaacggctttcgcgctagggcgctcatccggaaggaagatctccactcatttcattcattcagtgcctgcggtgaggcgcgacccacaagaaataaagggggaaagcttgctgtagccctgccctattttagtaggctcgagaagggtaggctcgctgcttcgccagaagcgactagtcgcctcctttcctccgccgaaagatgcttagccagaagcgacgaagggggaagctgtcgtagaagctttgccccttgctttacagagattgttaggaactgactaaattactagattctcccggaacgctagctaagctaataaaaagtcttagttcccttcaatcaaatcaataagcttattgattcaggctcttcaagacctccttcttagaacccattgagggggcctcggcccgggaaggggagagtggccgagtggtcaaaagcggcagactgtaaatctgttgaagtttttctacgtaggttcgaatcctgcctctcccacttgtttgttgtagacttcagagaagagaaaggaggcattcgtcagcgtaggaaggcccaccgagcgaagctcttttttttggccgtgccgtgaagtgaaattgtatcgtatgttagttagagaggttggcgaacaactacgatctatagattccccatctatattcaatcccagcgagaatagaagcgactcgcttccggcttggcttgtagtcgtagtcttttagcttatgtagtggtcggccttcctacacgcacgcgcccgccagaatgcctccttggttctggacgaagccaagccgatacatacgataggcaaaggaaagacccccccatttcatagcgcctggggaacgcaagtttgatcgaggattggagaggtggaagaaaaggctcgggatggatttaggagtctttgtgcgagccgtatgcggtgagagtcgcacgtacggtaacgaggggggttcgcgtctatacgtgtagtgtggtggttgggcctacccaccctatttgttccatgatttatgggtctactggagctacccacttcgatcaattagccaagattttgaccggatacgaaatcactggtgctcgatctagtggtatttttatggggattctatctatcgctgtaggattcctattcaagatcactgcagttccttttcgggcggctgtaggacggacggccgcctataggtggtagggtagggtgggtggtaccgctcagattgcggccaatcttcctaaccgcgcgcgggccgggcttagagcgcgtgaaactcatcactacctcgtaagggcgttgagaccatagcatgttacacgaaagcgccgctttctctgtagtgttgtcacacagctgcccgcctagaagagccactcgctctgtagtgttgtcacacaagataagcacgccgcccgcctgctggccgggcgaatcgaagttctcttccggtcaactgtccacccagtcaagtgcaaaaaacacagtagaatcacgcaacgcacgctgctggtgtgcttcctgcccgcgaggaaagaaagaagagcgacaaggtttagttcagatttgactgtttgcagcatgggagcggattacccaataaatccctgggaacaatgaaaaaaaaagatatctcggtaacgaaaactatagggggctgtattggcgagatccaacggtgaacagctgcccaaaagaaaaaccgcctggaagtccgaggacctttagtaccgtaccctacccccgaaccagcagccttcgcgccaagcaagaccgcccttgtccctttcctttctccattccgcccccttctttctttgttccaatagagtctaaggcaaagcaaaagtggttcgtatgcctacttgacgaaaggaaacgaacttcgtttccgggtttatggattggattcagtcagcgtcacgacataatcaaaaggaaggagtgacgctttggttaccggcgaacgcttccaaaggcgaccctctcgagtttccgactgtttcctagattgaagtagcctttcgtcgccctaccaaacgaaagaagccaaacagctcgccctactgaagtaccaaaggtgcgctacgcccgtttcgaatgcttctccgatccggaagttctcgcgaagataataagatgctgctccccctccctctgtcttttctcgctttgctaattttcccctctaacgcgggccgggcggcggcgggcgcgggaggaagaaacctaagagaagacgctcttctcttaggtccttttttttttttcagtgcaacacaggaaagcgccctctttttgtcatccctgcaccagattttgtattgaacgcatggcgtagctaggaccttcaaatcatgtttgagcctatgttcaaaccaaccctccccccctctttgaataaggctggaaagagtgcccgccaagttcagataagggaatgctttccccaaccattaaaggaaaggctcgacgaagggagggagatgcagcgggggaaggaaaacgctttcggagatcgagattttatttgtttttcatcgaaaacgaagaaggccgaggagggcccacggtgcgtattatctgaagggaacacgcacgctttttcgaccgcggtagtatgattgccgggccctctcctcgttccgcccgctgacctattgggatagcagccttcgggctttgcctgccctttataataaaaaattccggctcggcccgggaaagcgctggcaacaacagaaaggaaggggtccatgtagctgctgcgcccgcccccttcttagtcaatggggcagcaggttcggcatccactagaaaagagagaatccacttcagataaccacgcctccgctaggcagcgtgtgaaatggccgagagcggacctttttggatatataatccaagtcgagagtggagttacgggaacagccgtctgatggaaaactactttcacgttcggttcagagagcacttttttcgttgagaattcctcgttccctttcgtgtgaattccccagcgacgaattaaaaacttgcggggccctatctattccatctctcgagccccgaagaaaaccccctccccttcggactccatatctcttttgactctatatatgtgggcacctgatatctatgagggttcacccaccccggttacagcattcctttctattgcgcctaaaatatctatttctgctaatatttcacgtgtttctatttatggttcctatggagctacattgcaacaaatcttctttttctgcagcattgcttctatgatcttaggagcactggccgccatggcccaaacgaaagtcaaaagacctctagctcatagttcaattggacatgtaggttatattcgtactggtttctcatgtggaaccatagaaggaattcaagcactactaattggtatctttatttatgcatcaatgacgatagatgcattcgccatagtttcagcattacggcaaacccgtgtcaaatatatagcggatttgggcgctctagccaaaacgaatcctatttcggctattaccttctccattactatgttctcatacgcaggaatacccccgttagccggcttttgtagcaaattctatttgttcttcgccgctttgggttgtggggcttactttctagccccagtgggagtagtgactagcgttataggtcgttgggcggccggaaggttgccacgagtaagtaagtttgggggaccgaagttctccgtgcaccggacacgtagcttatcgaatccagttgcgacacggatgggaatgcatgctacgcaagatagagtcgagtctgatacatcaaccgtctactcaatatccttgtatgagtccacaatcactacacgagatgaaccttggtttggtgaattgaagttggccttaggtgtaataggactcccagttactgcgcgcgatcgtatactgaggtgctccccgccggttgttggaacgacgcgagccgggccgggcctcgattcagaaagatgaagggccataaagtcaaaatagggggttccaaattccccatctcattggggggcggaaaacgaattgacatctcgatgtgatacagccttttctattttagttgggaaagaacggcgaagtccatccgaaccgtccaatgaagaataagaggagagcaaagcgccaatggcacgcgaagcgcatgcggaacgggcacggagaaaaaaaaagtgtggaggagaagcagccgagctcattcccttcgcttcctaggcccaaagcagtgcagtctttcctggccaaatcaaggatttggggccgcaaaaaaaaatccttttttttagtaatatatatgaatagaaagatagatccatccatctatcctatccgatttctatttttttattaaaaaagaaagaatcgatttcattcaacgtttgattcaaagaactgcgcttagcccccccgctcatgaaacggctctgctgcaatggatggcagagggtccgtagtacccaaagcactggagtgatccagtagccgggaaggggcctagaagtgcctactactacaccacactacacttggctctacacatttacagagctaacccctggcagagctaaggggcttcaatccttattccttatccccatcttcgcccaggctaacggggccttacttattcaggggggagagtggagcctcgagaagcactgttgagaggaagatccttgacccctcttcattctctacagggttccaaacctttcttcaacataggtgacaacgagcggggcagagatggaagagatcgaacacgggaataagaagcaagctcgccttcctttttgatcattttgatagagggggatggagaaagtggacaaaacagactcgcatttctcatcgaacaaataagggaaaagaatcctattgaaaacgttcctaacccaccaaccccttccttcgtagagccgtgtattgtaagtgatccgaacccgcccggagtgagtctcccatagaggcaagtgaagttggtgagccgtatgatgggcaactatctcctgcggttcggagaggactcagctgttagttagcacccccttggtttcggggtggaccctttcactctattttattatatacgcttagcgaaaagaatgttttttgatacacctaggacatggattctatatgaaccaatggatcgtgacaagtcgttactactagcaatgacttcctctttcattacttcatcctttccatatccctctcccttgttctcagttactcatcaaatggcactcagtttatatctttaagttcgatcattgacaaggttcaaagaaagggtgggccattgataaataatcgattccaaaccaccatgctagcggatggcgggccaaacaacttcatgagctctgactttgcttctgttggtgatagtgatggtgcggggtcggaggatggatactagtactgggagactgattccgatgcgagaaatgttcctaccagcgctgtctcctcatatacacggagtactcgaacatagtaatagagaggggtaacgactagggagttggaagacgaacatcttccgctttgcactgactccattcctaaagtccgtggtcttcgatcataaactatctctccctctcgataaagtaagatcctcgaacctaaaatccagggtagtcaaactccagctaaagcggaaaagaggataaaacgagcctgtcaatcctaagagtgtgcttcgaagcacaagctgagtttccaaattttgacttctaacataagatgcaaatcaaactcatcttccgacagtcaaataatctctttagcttggactggacagttgccaaaccgatttgcgcctccttcctttcaggggggcggttactgctcaaaagacagggcgtgaatcgtctacctcagcgtaccaagccaagggctagggctttatccgaacaaggactcccgcggggtagaagggagggcttccacagagtctgacggaggaaaaagagttgtagtaagctcggcagagcgaaggaaaagccttcagagagcgggggtaggccggaagaaagaagtcgggaagcgacattacgttgaaggatctcgaaggtggttgaagacacattccttattctctctttcttttaattactcgatcttattgccagccggaagagctgcgggatagatcgccaactctcttgcacctggattcaaggtccggatgctttgataacattaatcatagactaataatttcatttctacggatcaaggttcgagctcttcaaatcaatccaatcagttgtaagcgattagaaaagcttgcacgagggggcgcctcttatgtctggtaatcggctttgtttggcagtgggagagcgagacgtatcttgctaggcaaggaccggttcgaatgcgctaggacgggactcaacactcaatttttcatagaaggatatgaaataaagctagggtgtaattaattattctttcaagacgggggggtgctttggtggcaccgcaccggtatatacaaatattaagttttttccgttgaagtagttttttcctgtaccagatatttcatatcttcctgtagtgagtggactctcggggaagaaatgttcataatttcgccctggttgacaggctcaggaagcgagcaagaagttcaaagacagcgcaaagggcacataacttactcttccttagctgaagcgaaagcattggacagcaggtcttgcctgccccaatcaatacagacagagatctcattcgtcccacactacttcatctttcctttactaattccttttaggggtcagacgctaacgcgaccttagcctatacaaaatgagattctcctccccactagaacactcccttctgcttttggaatggattgaatcggttcactggatggaatcggaactttcacttctatgattgaaaagcatgacttttgcagcaagggttcatggagatattgagctttcctaaatataactatagagagccaatcttaaacctatctttctactttctttcctctaaaccgggtcgataaagcgtttatcctagctcatcctatcctataccaccagctgagctagatcttcctcttctaagaaattataggtaaagcgctctaaccgggggctacattttccttaaaacttactttgttgcagcctggttatttcaaccaaaatctgaggaattcggttcttgtgcacccgccggcggtgaggtagggagagttggtatggagatgaaagagacagaaaagctttccattatctggtttctatccattcaatgaagttgaatgcataccttatagactattcaactaacataaggagatgaaagatggaaacaaggtacatatccatcaatacattgaatgaatcccttattcactcttctgatacctttctttaggggacctgaagagaaagaaaaggtgactatcaactaaattaaagatctgcttcgttgcactaccttaactgaatcaagacaagcgctcatttcgttcttgcttgctttcattctgttatgagagagagcttctatacgtatattctctttagacaaatgactggtccgctggagcggctgccttcgttgattccccacgaaggaatcggaatatcgctacttccccttactgtcctaagcgggggagaaggctcgagagaccttgtgtgaaggaaaggctgtcaaagtcgttgaccggtcttcgaaatgtgaatgagtgagagaatacagaggaattcgatcttttggtgggtatcgtatataagaaagagaacggctgcttttaggactccggtggtcactttcgaaagagagtctcgaggtggcggtgtacatgtagctccgatagcatgcagctcctaatggaaacaggtatatagaaagtgtgcagtgggagatctttataggtagccaggctgctttacttaactcgactcaagctttacttagcccatcaactcccatgtctttcttggttggaccaacccaaccggcgatttccgacaagtctctcgatttgggagaagagtttttttaaaaagaataagcagaaatgaaacaatttttggttaaaactttcatactgatttgcagtatgagtcttatttatctctacacttccactgtccaagagggacgaatttttttttatcttttccttgtgaaaacactaatgtccctactacttgaagttattttttacttgtttccacacctcgaacagagaaggaacgagaaaaaccgcctccaaatttgtttaagcttcctaactccaatcggtctaaccgaatttcaagattcattgttgctgatggagtctggggaaggggggatttcgggttcatcttctgcacatagggggagcattgatctcaacagtagtccgaccataacggaggaggacgaagaagagattcaggagaactctgaaaagtccgttcgacagcgacaagtcgaagcggagttgcaccatcgacgccaactcgaaatcgctgaaaaacgggcgtcgatcaaagaatgggtcgatttcagaatccgttctgaaatcgcgaaacaaggaggtcctccgcttgtcgatccgatcgataacttagaggagcaagcctctattatcgaacaaatcggacccaaatccaaggatcccaccgacctcatcaatgtacgtcggtgcctttccactttggaaaaccgactgaagtcggacatcctcgacaaaggagaaagcagaagaggccataaggagggccgttcgacgttttttatccgaatcccaagattgaggaacaagatcggacgttattccggttcgtctccatttttgtgaaactattcctcaagcaaggcagccgataagtcatcgaagggtttgtgtgaataatggaatggtaagcataactcatttgaaagtttcccacggtgatctaatatcttttcaagaaaatgacgtgagagtgtatactcttgaactcagggagcgagaccctaaaataagttcaagaagctatgaagagtggtaaactctgaaaggaaagatggaaagaggggagttggctgataaagatggacagtaacgatcgcgtaatatcaatttttcggcctcgtcatcgaaagcggcttccaattgttcggaaattctcagctatatggggggcttggatggtgagcaaaaacaattgatcaagaagttggtcaactttcgcatgaaagaaggtaaaagaacgagagttcgtgctattgtttatcaaacttttcatcgcccagctcaaactgaacgcgatgtaatcaaacttatggttgacgccgtagagaatataaagcccatatgcgaagtggaaaaagtaggagtcgctggtactatttatgatgtccctgggattgtagccagggatcgtcaacaaaccttagctattcgttggatccttgaagcagctttcaaacgacgtataagctacaggataagcttagagaaatgttcatttgctgagatactggatgcttaccgaaagaggggaattgcacgtaagaaaagggagaatcttcatagactggcttccaccaatcgaaggttcgcgcatttcagatggtggtaaagtgaaaccacataaagagctcttcctcattcagtcagattattcagtaagatatggtttgaccctttttctttttgtttgaatcttcatatagaataaattcctcatactcctcccttcattcattgagttggaggaatccataggaggcccgcccgttatgcattgcatgaaagaacctttcttcgtatgacttctcttttgcctcaggtcgaatggggagatcaatcaaaaaaatgggccatgaatgaagaagtagtggcctttcaccctctttctagtgactcggggagcggatctgataaatgcacttcaaagggagggaagctaggtttcccatgttggtatggccgggcataaaagattttgaagttaggtaaaaaagaagaggtagagagagagaacagaacggaaccgatagccccgaattatgtcagggcaagagaaagaaaagtaaggactctcgttttccgcatacgcatataggctgtgaaaaagaagtccacttttctaataaagaaagagagtgattcgtctactttgttaataaggtaacggaacgaacttcaattcgtaggacgccgccgtttgctaagatgtgcttccacatcgtgagcagtaggaggagaatcccttgtttggggcaggagtatcgacgacaagtcgtgcctgaagttattcatgcacatcttgaggagctcttgctgagtaaacttctggggacaggcaaaagtaggggctcgccaccttgcaatgaactccgtgacaggttcattatccctttgcttggtcttgagttgttcgggcactccaacccttctttgtgtgttgctgaactgcttcctgaactccgagacccttgcttcccaagtcgggatcgactcttcagagaggtgggcgtaccatgtaaaggcgggcccctccaatgattgaagagcctaaggcacagtgccccattctgcgctaccggcccacatcttaccagggaatgcgcattgactcattctatcttgatagagatatttcgaattcgacgaaatgaagcacggagtgcccgctactcgttcatcattcagacagatgcgcctctctcccagtcgtccgggttcatcgttcaatcaatcattcgtacggggaatagaaaggggccggagtggcttttatgggtagaatgctcctccaactctcctgatatggctggtttttccgtttgactgctgccaaatctttctttaatggaggatcttcatcccgaccaccagatccttcttcttctaagtcttacgcagctatagtgaaaaaaaactctcgtctgccacctttacaacataggccaggccccttccctttaaaaagcccgatctctcatcaaggagagccgggtgtgtggtgtgcttcacttatgatgagatttacagatcagtagatccattacgcttttctttgatagaaagttatcctcaggccgtccctctgtagatgagattagacctcatgttcgcactcactggatgatgaacagcgaagttcatattgaattactcgatccaagacatgttattatgaggttctcatcacaagaaaatttcattcaagcttggaccagggaatctctcgtcattaaggcttattttttcaagtttatcctggtctccttggtttgatccgcggtttgaatcttctattgcaccgcttttgatctctctcccaaaccttccccttaatttcttcaatccagactaccaacaatctattgcaggggtgatatgataggtagggttctgagatttgatggcccggagcttacaacatcttatgagaagggcatgtagctcgatacaatctaaagccagccagttgcttacttgcgtacgaagaaaggggcagacggattcagccattcccatccctcatcagggtccagcttgacaaagattttgatgcgcatgacagaagagagagagcaattagatgagaagagacttcgcgccatggaacatgtcctggtctacctgaaaattcccgtgcattccaaaataaggtaatgtaatatagagaaagttcaacataggggagaaagtcttgaaaaagattctttcctgacgtgaacctaatccaagagggaaactccattttgtgctctctctcttctgtcatgcgcatcatggctgggtgagttggcccattgcgaattaacctcagtgcttccaatctggtcatgcacttttttaagatgcggaacccgcctcttcaaaataggggtcaatttttcgtaggggggtaaggaaggtgccgaggtcaacatagaaaggggttgatagtcccgtctgctaggcttttccgaacttcccttcgcctttctgcccgtgaaatccttttcttctgctttttcccaacgatatatccccattctttagtattgaagcatatattagttccagataatcatccgaacattctgggatacggttgtcaaatgggggaagaggaacgagaggcgtccctaagctttccggctcactagtaggtgacgaggggatttctaaaaaaggggtaatttcatctgccgatgcattcgttcggatacattcttccttcttcaccttttcaacccacccaacctaaaaaagcgaatttgcctcttcctggtaatgaattgagcggcagcgagggggtccggttccatagtgatttcgtctgcttttggaacttcgattcctggggacaaagaaagtgacttcggagttttgaattctcagaacctccttcttccaacagatgggggtaggcatctctcttcgagcggcagtgcaagctcggacggtgttagcactggcagaaggtcctggattagtttgtaccggtgtaggttcctgagtagtgacttgtcccccttgatgttgtggcattggattagtatagatccccatattagtagcttcagtaacattggcggctttaattaaggtatgccttaacttcgttccaattgatacgattttaatcattcatgtcatagatgacagcaaagtaggacactcttcgatggtatggcccgcgtatcggtgaaatggacagattttgaaatagtcgagaccaggaggccaggggagtggtttctctctgggcagagaaatggctttccaggccagaaggatggagaatagggtaggaatggatagggggtaatggcgggtagtgagctctattgggtccccagggtcgcttgggagcaccttgttgctactgaggatcataattggccggaggcgctgcgttgttataagcgggtctgggcggagcttgcgctgggttttgcggttgcgattggataaggaggtttttgagtgggttgggggccggggccggccccctggatggcttgctgattccgggtgctctgttgtctctgtgcattctgctgtgcttgaactgcatgaatttgatccggaggtaacctcttgagttggctgctgggttcttagggtattcttcggcttgccttctcccccattagaacagttcctgaggaaagtgatagacccgtcttttatactcctctgcatgcgggcagctcgttcaaacagttgagggaatgttcggaaatctcctagcactatcgcttccttgatgggcccatgcaggttatcgataaccatctgtactgcatcttcctcttttatgttccattttgtttgctttagctgctaaactcctccatcagttaacaaaggtaatgaattcaaaaccgggctgcattttttcattcaccagatcacagagattggtcttcaagcctggtgcagctactggctggtgaatctgtcaatcacatcgtcaaaactacgtagagcatgttgggggagagatgagttccacttgagtgcttccccttctaatgacttctgaaaaaggtgtttcaataacccagacaaagcctcggcaatccccacagaaggacagcaagtgatgatatgggtcgccgaccccattgtatttactaaacttcggtatcttgaacccttccggcagagctacatctggatgtcggaaaaaatcctggaataatcgtttacatccgtattggtctgctctactgcagcttgtattattgcctcaatctccatctttccgagaggcttctccatggggaccacagagcgatcatagtataactcttcactaggagatttataagcgctttcgaggcctccctctcggattgcccattcatgaaataaggtgcaggagttctttgcatccgtagaggaggctcatccatgattgggaatcggaatgtgggtctttgactggatgcccctccattgatcttggcttgcttcattgcattcatgaattctttgtttgattcttcgggcttcttccgatccgcttgacatcatttccctctactccaagtattccgaagtatgttcctcctttcgtggttcttcaggtgcattattaaccgagctcgagggcaatgcgtcttccccattgatcaccatgacttgtcctatcgcttcggagatttttagataatcccccagccacttccaacatggggcccattctgaacttcgttcctcttccgcttttccccatcttactaatcataatggcaatcggtcaaaggtatccccaccccaagtcggaattccggcaaacaccaagaagtatccattcttaacacaaagaaaccgccggcttttagaaaatcttttctcttaaattatgcacgatttactggggttgtcttcctttcttgggagttaagcgatgagttgggtaagcttcctaagggtatggcttctccggggcgactaaggacacacccaaccaaacgatcggtaaacgggtctcctttggtacaatctcctccgccgggtctagtctatcccgtacggttggttgttttcaaaaagtagtgcaatcaaaaagcattctatgaacgaattccttcatagtcttcatagagtaagtagagtagagagaaatgggagtaagcctttggtattctgttcttattacttagttcctgtctatctctatctagaataatggatcctctgtgaagcggagaaagatcagtccagtatttagaactagattcggaaaattcacatacagaaaaaaaaaggtgaggcttgagtctactttcgattagagtttcgattacaaaaaagtagagtagaaagaagactcactactcaattcgaaggcgacaccccttgcagcctttacgaagatttcccttctttgcttcttttttttgtttgaaataggaccgggacgggtataatccggttgtaaagaaagaaaccgccagagtgggggattgtcctgtcctcctcactgaccccaaagaagatggctctgtcgctaagcaggccggcagagaggacaccaaatgcctaaacaagacaaaaacctactaatatgcttaacacaaactttccggtccccctctagcacacgggaatcgaccctacgcaccggggacgaagcgtagaggtcactttagtttgttgtaccggagtggttcatcgtcaaaagaacaacaatgggttgtagcatttcctattaatttgtctaggggatgtaaaagagggctttctcgtctaaaggcaggggcgagctttctcactatacaatgaccactacgaacgaaggaccaacgacgagctatatagaggataagagaaggaatcccaactatattaaaaaaagaaacttaacggatactttttttttcgtctgaatatgaaggagctaagaccattccaatgctttctttcgccatgcataaactgcaccggataagctaatacgaaaataatgtatataaatagggaacggatacgcccaatacattagaaagtcattgcccatggataacgacatcaaaaaagaaaattactgtaatagtggattcgtaattgtgtaacttcccattgctctatcggagatagcatgcagccgcaaatggagacagatatatagaaagtgtgcagtgagggtggttgtaaatcactaggtagtcagtctttacttaactcggcccaagcaatgcccaaagactcccatgcctttcttggttggaccaacccaaccggcgatttccgacaagtctttcttcatttttagagcaagaacaagtctctcttcttttttgggggggagcagtcaaaaagtaaaccacacaaaatgattgttctagaatggctattcctcacgatttctccttgtgatgcagcggaaccgtggcaattaggatttcaagacgcagcaacacctatgatgcaaggaataatagacttacatcacgatatctttttcttcctcattctgattttggttttcgtatcacggatcttggttcgcgctttatggcatttccactatcaaaaaaatccaatcccgcaaagaattgttcatggaactactatcgagattctttggactatatttcctagtatcatcctgatgttcattgctataccctcatttgctctgttatactcaatggacgaggtagtagtagatccagccattactatcaaagctattggacatcaatggtattggacttatgaatattcagactataacagttccgatgaagagtcactcacttttgacagttatatgattccagaagatgatctagaattgggtcaattacgtttattagaagttgacaatagagtggttgtaccagccaaaactcatctacgtattattgtaacatctgctgatgtacttcatagttgggctgtaccttctttaggtgtcaaatgtgatgcagtacctggtcgtttaaatcagatctctattttggtacaacgagaaggagtttactatggtcagtgcagtgagatttgtggaactaatcatgcctttatgcgtgcgcccggaaacataggccgagtgctgagcccactctggctcagccgcaccacccggggtgcgagccacccgagaagcaagctattacagcgagcggctggagctgtagggagccgaggagcaaggcagtggataagatagaagaagggtccaggctcccggtggagcagaggagacggttaggataacgaacttgaaacgcggagcccgagcggccggcgagcgagtggttagtggccaatagcgccctagttgaaggcattcctctctacggctggcactcgaggaaccacggggcactccatacagagcaagcaagtcttaggggtgagacgcccgcgcaaggacctcaattctcattaggaggtcgaaccaaggacctatggaagtcggggctaccccgtccccatgggcaacgcaacagtgtcctgagggaggagtttagaggccttatagtagcacggacttctttttctttctaggtcatgcgaagggggccagtccaagatcgtactgttcctctacaaagacaacagacgctctcaacggctaggcgccactctctttctgagttattccagcttcttcatgatttcgtgccgcggtgaacaaacaaaacaaaaaaaagagggccgtctcagcggaaggagaaggacctgcaacggcagagactactgaccctcttcttgttttgttcctagccgtctgttctgttatgagtctgggaagccttgaatcctaaataatatgagggatccctcaaaatagagtaagggcgggcagggcttccgcaagggcctcccccctcttcccggtcaagatagatgggaaggagccctatcaagtaaaggccataaccagccttcttatttatgtacgtacacctttgtttcaggctcttcaagaccttcctcctgctaatccggccattttcgaacctgtctttcccacccggaggacttctcaattcttgcgattcccagcttattcttattataataagaataagctcccctttctctaataataaggtcaggcgctaacgcgaccttccttcagctggttttggctttccccttgtctaggttggagctatgaagcttaccttatttatattatgaaaaggggccacggagtggaatggcctctctttttaagtaaaaaagggttgcggatttttcttcttgatttttttccggtatgccgctccgcgagcaaggagcgaaagaaccaagtaggctgtgttaatggcaagtttttaaaagtcgagaatcaaaggactcgcagggggcgctaactgttttagttttgtttttttatcttctttgtagttatctaaacgccatttggtatttttattgggtgatgatgaagagtatagtcgtcgcagtaacaaaactgacattctccgggagcggggagggttttttaggcaggcgatggcggctctttaacagaggcatagaaacgcttataaacctagcgctaggcgagaacgagccgctgcatatggatttcgggggtgaagggagtactgatccaggaaccaatcttccatcttcggcctcttcttcccaaagtggaggtggacttccagatctgaatgaatccccgtctcccgcttccgtcattaaacacattagagaggaggtcttttcctctcaaaagaaagtacctgatctcaacgaatccccggaagacgaagaaaagaaagaagtggttcgaacccggattcgccacttggtagatcagttacaaaacgaacttcagcaaagaaaataagtagtagagagtctcgaaccgaagaactttgttgaacaattataggttttaccgcaatttgccaaaatatttgggggataaggagaaacggagaggtgggcaaccatagttttcttttttcgtggtgttgttgacgttggttggtgaaagctaatttttaagtaggcctcgcttttcggagcagctcccagctctccactatggtggaggaggtgccgtgaagatctaagagtgtgagcagtacgagctgaaaggctcccatactgtttggagggcagggggcatagatgccaaacaaacctgacccctatctatcgtcgtagaagctgttcctaggaaagattatggttctcgggtatccaatcaattaatcccccaaaccggggaagcttaagcagaaatgaaagagtagggtgagggacactaaattgaaggcttcgctcgctcgctctaacgctcgtttagtaaacagcgagtgcataagcccctttagagataggggcgagtactacacgagctcgtcagtcaagtacggaacgagccttgtctacgaagcagagcgacctcgtcttgcttctggcgaagcttctagcactagataataggcattcttgtatggtaggaatactactttttaggccgacggagcgatagcaaagccaagccgtataaaggcgagcagcccttatagcaatagcaaacggcctacttatagccctttatccccctttattcggggacttcaacgggccttacaagctcataaaatggcaagtcttcacgttttcctcagacagtgggaatgaattctattacttgattgacattgaaagatatgtgtaccacaccgaacaagcaatatgccgatatgcttgatgtaccagccaagccagctcgaccgtatacagtagttgggattcgcctttgcctcagacagaagaacaacggatttcacagtacaaccgggaaggaaagccttacatagtcgatattgatttgaacaaaggaactgaaaccggtaccagaaaccaaacaagagatggaattcaaaatggaacagatgaccgacctacaataagacgaaaatagaattcctaattccattctctaagacgaactaaaggaatgtctctaagcagctaagggatgagaaaaggaggaggtggaatttctttcaactataacatttattacaacacttaatattacagaaaatgacagagaattcggtaaggggatagaagcacatcctgcacccgatatgtcaaagcagcttgaagccctgcaactcgcgcatactgatgaaagggaaaaagcaggccaattcacgcatcttccgcagagtaccgccctatgagctaactttccatttgacggaaaagagcaagcggacctgtgaaagtcacatctttgactaatataacaggcttctgagaggattctttaatcaaccaaaacctgcaagtccaacatttctaccacttacaagttgagatatgttccattcccaatggcagaagaaggatgcaagctggaaggacttggacaagatattcttcacttggacaggagatgcagcgcgcttagcgtcggaaagatccctctacatgggtgtgctataaaactaggagaagaacagaactaaacggatcaattcctttgaccggtcgtttcgagcttccagtttttctggattgctaacgtggttcgatgacgccgacgaagggaaccagcggaaaggctctcaaaggcaggcgcgtagcataggcggactcataggataaggctgtgcgtgtgaatcccaactagagagctcctttctataaagggctactcgacccatttggaaagagcgactctaaggcctattctattggtaacttttcagtcgaaaggctttcagttagtttcagagatcacttttctcaggccaagaccgtaggaataaaaaaaaccacttctcattcaggagcgggaaacattgaaattccatttcatttagaaatcgcaacaacaactctcgttcggttacaaatccgagattttgactggggagatcatagcagacgagagccgatcccaggtttctctccttcgcctggtagttctatgttccgtatccaatagtccacccagctactatcatcgagggaggggtgcaaggcttcgttcgaataggtacgtttaatgatccacgccttctggttccggttgaatagttgttgcctcatcgaatagctggttttcctgatcaaactagaggttaccaagctcgaaaaaagccgaggtctatcagaagtcaaatcaaagaggccactagcttaagcttattccccttcactaatgcctctgactgaatagaaccccgttgaagctttagctcttctcgtcagaacacgcgcctgcccgaacagcgtaatcgcgcttctttgtcggcacattgaccggaccacagtgtgttactgaaactacttatgcttttgcccggtcaacacctagctctgggtctgtagactctggaacttaaacagcaacccgtgtctctgtcccgccggtgattatgccaatcatttgcatatgttggtatagtccaatacagaatcattgggcccactataactagttggaacagtaaaaatcaggtatgccttaacgtggtaggtgatccgcaacaaactatgaaactacgcccgcggactctagatcccgatcgctatccgctggatcttctaatggataaactttcacttatgcttgctccggaacgggctgggctatagtagaacggatgccggaatattggtttactgggccaatgacgctctttccttaaactcccttaatccaccttagaccccctccctttgccgagaggaaggactagggttaggcattcaatggctttcgatgtatgattgatgatgggcgtgctgaaagcagtgattcatgggagggagcagcttcaatagctttggctgtgaaaactcttggtcttggagcatcagttcacccaagatcggcaggacaaataactactaggttagtgccagaaaagcgtcttgcgtgacgtggaaagagtttcaaaagaaagagattcatcagctatggaatctgacaggtatcggtattgaacagagggggcagctcatataacagcagctggaatctatctaactgctccatgggcttctatactccctcgagtgatgcccgctcaagccctatccgaattatagaggaggagctaacgtgatgaatatcagacgctcaattagactcgcaatccatccaatgctacgtgttggttaataaccttatcagttaggtttatatgcgctcttccttatgtacatgataggctgaggtgaaactatatagccgttattcacatgaggagtagatccattcatagcagcttcattggtaacagctattgggtaggtaacgatagatgccgtctacatgtggaccctttcaacaactctgtaagcgatctgcacatctcgagaacccctgatgaaagtgctagcaccaatggtagtttctataccttggagcgaaaaatacctgcgtttcgtgcccccaatccgagttcgagctattagtagtgcaagtagcagcgtcagccgtaatagcagcgccagtctaatgtgaccccgaggtcagaccaagggaacttccgtgggcggtatgacgaggcacttccaggtaacgagtcatagtgccagtcgtagtagtgctagccgcctgtccaattagggacccataatcggtcaatccacatctatcgaatagagctgctaaagactagtggttcgggataagatagggcctgaaagaaaggtaatagtgagctcgagctggagctgctgctcagccagcgcttttctccttggtgagtgttttgtttttaacttgttcccttggcccattggtcacttcctcccttagtgtcaacccgaggatcccaccatttataactaagcattggggcctttaatcaaataggcttgttaacaaattacttattattatggaaagtggattgacgatcggaatcataaatatctatctctttttttattacatttggaacattaaaactatattaaataaacaattggatcgtgacaagtcgttactaccagccagccgttacctctttatgacctccttctctctttttcctagttatccatcaaatggcactatctttctatctgtgagcatggttgagcaaggtgaaaagagaagtagagattatagcgggctcccacccggtatctcttgtagacacttcttccttccccaagattaagccggtcaacacaagaggattcatatcatgtggctcacattccgtggtcgacttcccggcggaatgctttcactgctttctcggaccgtgccatttacctgacatattacccggtgcaacctagaccacaggctc

SEQ ID NO: 227121 - DNA, 10360 bp, Cannabis indica
tttaaaaaagtaatgttaaaaaaattaaaaaaaaattacaatatactatactgtttttttttttctagacgtgacatttttgttatactcgtgtgacataagactctctaaactctaattttagtataataaattattcttaattttttgaaaattaaaaaatttataataactacactatatattgtcacataaaaaatagaaatgaaattttcacatgctaaaaactgatttttaattgaagaattttcctgtagttttaattatcattcttagttgaatattgttttccctcttaggagaggttggtttgatttgactgctgtctcaactcaaataataacaaaagaaagtcatgtatattattatgatataataaatactttaagctcttacactatgttaggcttacactaactaaaacaaaagtttaagctcttacatagacaaaataaaaagtttaaacaagacaagggtatggttgttgtagggatggtaatttgtgttcacagatcgtggtcgtgtcaagacttaagtattataagcaaatgctaaattcaaacccagtacatttattaatcgtattgaaaactaaaactcaaaacgggttgacctaacatgacttgcttattaaatgtgttatttttgatttgacattaacccaaaaataacataataataacctatttaaaaatatacactcgtaactatattatatttattacatgtaatttatattatttaattaaatagtacataaacatgttaaattgataataaatgtatcataaaaagattataaatatgttaataagttgatcgtgaactaaaattaaacatgaatttttatataaacaagtcatctgtgtcaacccaaaaataatataaactcatttaaaacaaacctaaattcatttatttcatgtagattttgagtcatattattgtcactcctaagttattgttgtgaaattatcttgacataaaaatagtaatatttattttagtggaagcgagaattaagagcgaaatttaaaataatgaaagtttttaatttaccctttatatttctcatattacacaattagattatgtttattaaatgttaatttgtgctttgtattttctaaaataaatcaaaattatacccttgttcaattttaatcaaactactctttaatataagtaaaatgcttttattttttataaattatgtaattactcaaagggaaaatactaagttggcccttgtggcccctgtaatttatcaaataacaattcaaacttgtgtttttgtcaaagtgaatcacaattctcttgggttttttttttctacatcattattttctagcctaaaaggataagagagagattaaaacaactaatcttttgtaagaagatgtgtaaaattactagactaatcttagaatcacttctttgtactcttcttatctttgtttctacttttgctcatatataaagtaaagatcttgatttttttttataattaaagaactattattatattaagatcttgtatcttgttttactgaaaagttcttttcaaaatgattagataggatattttgtgagtaaattaaaaattatataaattattccaattctaaatataaaattctcaaaagtacttttcaaaaaaactcaaaataataaacttttgtaataacaaaaagaagaaaataatttttattttttattcaaaaacccctaaaataacctttttaatcttaaaaaccaaaaataaaaatttgtagaaacttaatcaaacattgtttatcctcccatcaattttagatttgatttgctcaaagttggtttgatatttttttatataaattttgatagaatatactattatttaaaaaaataaaaatatttttttctaataaataaatactatttaaatttgtttctttttttagtgtaacgtactagtattacatatttttaataatttatgggtgttgaattcaaattcatatcctctcttttttccacctttccctcgaaagtctcagtggcaatatttttttcaatattggggaaaaaatttcaaacttaaaaccttctctttataaagaaaaatgtgaaacttctaaactatgtctaaccgcaattcattaacaatatttaagtattttattcataacttttaatttcaaatttattttaatgacttgaataaaaaccaataaatttgtatgagctcaagcaagcaaccaccatcattacaagaaccaatgaaaccaaccaccatcaccatctcaccaaagctcacgcatgtggcagttggcacgtgctgggaactctccctctcttctatctcaataatagataaaataatgtattttatttatttttaattcagtggataatttattgctaaaatatatatattcagtggataattttggtaccaaataaatgcatgtttcacaagtgaatatgtactataattgcaagtgatatcacttgcatttaataagactcccatcttggtcttctactactaatcccaaaaaaaaagaaacaaatcacacattacaataccaccatttcatatagttagtagatttttactacccatacccccagagaaaaaaataataataacaattaaaaagccaaaaatattagtgcgttacagggtttttttgaacagtttttcaaagccataagagataagagaactcattatcaaaaagaaagaacactataatgccatatgggggtcctccatagccttgctgacatttttcagttgggctataatactacagagggaattattccactcccaaacaaaactcatctacatgtgaaaaatgggggaatcaaaaattacttcctagtcccacaacactgtgaatttcccatactgtaactgagaatattgttgatacttttatgggatttgggtagtatggtatttttggatgattcaatgagtacaaaataatccaatgaaaggtctctatagtaaatactttcttctgggaaagaacattgcattacagaattggaatgtgtcaaaaccaccaccacttattttcataccaacaccaacaaaattgtaatcctttttctttcaaatcaataatataataaacaatttatcaactcatttaatgataaactaatagtaaaagataagggtttgacaatatgtggcactagatttagaatcacccttctaaaaagttatagaatgaaatgaaaccaactttgccaaaaatagtcctagaagataagagaaagtttatcattttggagccgtaagatttgaccttgttagaatttggaaagttttaatcaaatataaacagtcaaatgataaaatcttgctttgaaattagcctgatccaaatataaacagtcaatcccctaccctcaatgtgccaaaataagtatcatttattgaaaaaaagaaaagcaaaattttactatttcaacaaaagataaattcaatttcaaacaaaaataaataaagataaaattcaggcattaattttcatacagatactgacaatctcatactttggactaccccagagatcaaatggcaactgaattgtttagcactcaaacttgtggatgtggtgataagacaaagaagagtatctaggcaattttttcttattttaaataaaaaaagtgtcaagagagtcactttcttaaaatgagtgttaataaaaagaagaggctagaaaggggcagacttccattaatgcatatacacactttatttaataatgcaaaacaagaaaaaagacaaaagaatcaagaaaatcttctgttttgatgaacattctatgaaatcctgttctaaaaggaaataagatgacaagaacagctaatagtgtatggtaatgggaccaatatgtattggttagcttatggtaatgatataagaacttgatatcatatcacagatcaaaatggacttttgatcatatatacaagagttcagtcataaggggtttaccttgaaccataaccaatcagctgatatacaagaaaaaatgccatctaagcccaaacagtagtacacataaaatcaaaagagtacttggaaggactaatttaccttcctatagtaacaattgaattctcatgcagcttgagaattccttatcgtcatcaatcttggttaatagtttgtaatgtttctcttggttagcaaaagaaaataaatcttgcttactcaaattactcttaatcatcttcggggtcagaatttccatacacaacagaaagatagaatccgattgtcttcagtgtgaggccaggaaacctttcggtgcaacctggccgtggatcaattttaataaatggccattgcataatttctgcagcttcacactcttcccacccatcaccgattacacaaaaacggacacttgagctgttaaaacgttctttgatccattgaaaacattgaggtttacccacatcccatgaactatagactgaaaagtttagaatttgtcaggacatgtacaaggaacttatcaaatctctctaacctattagagtagaatgacaattgtggtgcatataaatatccaacatgcaccattaggtccatcctcttcaactactttcacaaaaaatagcttatttacaaactaagaaaagaataggctgagttgttagccacattaacattctcgtaaaaatagtaatctaattccttcactaggtgaatgcaaaatttcatgatagcagttaataatcttacatatatacttattcatgacaagttaaactaagaattccacaaattactaagattgccactgaaagataaaatatttttccttgttcgttgtttaatttttattgaatgatgcaccagtagtatgagcatcaacgctccagaaaaaacaataggactcgacagttcaagtgcacaatcagtataattctcggaaggtctgccacaaactgggtactgtacattggttattggatgatatgaattaagctacaagttgtcaagtacaatagatctggctaaactattcattgttcttgtgtatcttcattatagttctatagatatctaagcattgttcatttaagaaatttggtagttcaaaattgactgtctacaataagtatcccagaaaataaatagcgtaggcagtaacttcacaatcattcaacaatatcagactatcatgcaacatatcatctcaaggttactgctaacttttatagtctaataggcatatgcaaaatcaatgcttagcaagaacacataaaatgacattacaaaatgaaaagcacagatatcttcactgaatttgaacacacgcagtaataatcaccaccccagattatttagattccagttagttacaaagttgagccacatagtatcaattactggtatctgagatagtaccacattgccacttcaattggcataaaaattaggttctgttaacctatttcaaattccaaaaatgcagacaaattttgaccatttttaacaaaaaagcagaacaggattaatatgagcacaaacaacaaaacgttagtattagatggaaaggaatgtaccattttcatgtgttatgatattgtcgaaccgaaagagcaagcattttacaaggctgggaatcaatgatccagatgtcactaaaacattaacatgctgagattttgaagcagcagagtcggttatcccatcagcagtggcaacagatgtttcttccttcccagcagaacactcctccaagaaggtacgagcttacattaagacattgcacagtaaaggttaagaagaaaaaaatcattaagcaacaaatacagtaaaaccattatgtcaatgaattagaaccccactgtgcttatcttcttcctactcaaaattttctccgcacaaaccattaggggtcaagactcaagatgtttaatcaggtcctttgaaatataaacataagagaaacagggggtgtaagaagaaatatcacttttctatatttttgtgtaagcatacagtttattgtttcatgagtgcattgttagaaccatgatcaaataaaattagattaaatagagactcatttcccttaagaggaaattctatcttttggtagttacatcataaacaaaatctttttgcagcatagttaaaagtcttacatcagttatttagctcataaattagaatttggaaggatcttaattatcacatgcatgtggccgaatatgtgcattcaaactgcatatccctaaactctccaagctttggaaacttaagtttgaaactgggttattttcttgaaccctataatttttgggactcaagaaactcaagcatattgctataaaaattcccatgaggaagagaatcgtagaccttatgtgtgattagtaacgagtgcctggccaccataaattactttaattgaaatttaaagaattctccttttctatgttaacatgtgattgacattgtggctttaatggggctgctttgttgctgtattatatttaagagtactgtaatataagtttcttcattgtggagttttataatggcattatagaatgtgacttagatgatctcctattgatgcatcacaatcagatgttgaaccaggatatcattccagcaggggcacaatttagtaaatgccatataatggcacaaaaattacatcatgcataatatttgggttttgagctggtaatatgttttgaatatatattatattggacgttggagagagagagatggcaaagccttaatttttttaatttcatgttaaaagattgtgtaggattgaaaacacttatttaatgtatttatgtgaatgaaaaagaaaaagaaataaaccatgtccataataggatataatacctgaagacagccatccatctgtatatttgtcagtcatattgtacaattcatcccactgtttcatcaactcttgatcaagaacaccattcaaaccctgaaatgaaattttatagcttttatgaaggataggtataaattgtactgcatatttggatcctttatagcaataatgtaggcttttgctacacaaaatcaatggaatattaaggtatatggttattaagctctcacctttttatagttttcggcaatgattcgatgccgataagctagttttcttttgtttgcatcatcatcaagagaaccaaaaccatcttggttaaaatcatagcctaaaagatcccgtccatcgtcatattcactcaacaaactaagaaatggcttattgtagtcttcaatctgcatcaccaatacagaaaaaaggaagaattgaaatcctttgcagacaagagtaatatctgatattagctgactgataaatgtcatagaagttgaagctaagcttacctgttcataaaagaaatagttatcacacaagtcaaggatatgtttctcccacatctttcctatctccacaccctcttgtacattctttacaccattgaaagcctcagcataggttccattcaacaaagacttaagaagtataagtgtctcatccatatcccaaatatatacagtcagtttcccttttgcactctggtcagtaatacttgcagctgtactctcagccatatcttaatataaatatataaataagtattatgctggtgtcaactatagaagttaaagctgttctccaacctgatgcatacaagaaccactttccagatttcatcaatcaaatatatatatatatatgcatatatatagaaaccgcattacaatttgcatcatcagttcatcaaatgcaatcataaaatacagattcaatacaaattacacaactttataaaagaatatgcccattttggctcaaacaattgcaatttgcatgtgcaatttgtatatattttatacatatatatattatgcatactgatacatattcatataagagaatcgaagtagcggaagaaggaaagaatcgtaccagtagattagcagaggcagcagcgaaagaatccatgaaagaatctctttgggtgtgtgccattggcataggatgaaatgaacagaactgaaagaaccgaaaggggtaatgactactgagtaaaggaactgaactgggccgaccccattatcatccttaatcaagcccatcaaatgttgtggcccattggccttttgtacttaaattaagtaagagatttttacttcatcaattttttttctaatttttttcaaaaatattatatatttataataatatgtactgtgttaagtttcatatcttgtttccattattatttttggttgtttcagtattatttttaattgttctatttagtattttacggttgttttataaaaaaaatactatttttataaaagattttgtgtgctagtaaaattataaacttttacttaaaatctagtatttttgtaaaaattccattaaatctggttgggaatccttgaactccattgttaagacctccgaaaaccaaaaatacgattttcatgtgagtcgttaagctaaggactaactttccgataaggtgcagtccaactagttttgtcttagcatatcttcaactgagatgaagggagcagttttgagctaaattgattcagctagtccaagttgagcgacttaagttgagaacaaaaatgcctcatatgaatagaactataagaaatcatgatgagtaatgagtatgaccctcatattgcccaatatatccgtgtacagcttacgatgccatgtccaagaacttagacaaggcatgcagtggaaaagtgataacaattgacttaccgactgctgccaccaatagtgagaacccaagagaccatggctttgttcttaagcctcttattttcagcactattactgaacaccaagttcagttgatcagatacgagtactccttgcttgaaaaaggggggaagaaaccgagaattggatgtcccactacttttcgaaacccttgttgtagtgcttggctgagattttatatgaatgcaagtgcattcttaccttttcacccttggttcatatcaattgctgactactttggagtttgctcttatcaattgaatcccaacaattatcaaattttatcgacgttctgttacaactaaaaatttgaatttagccctaattaattcatgagaatcaacaatagaattaaggaatagcgaaagcgtaccagagtccattgaatcgtcttttgaatagtatgatcttctaatttttgcatcaaagattttttttctctgaaaccttagtctcctggtgatagggatacaagagaaaataatacgatatgaagcgatgcaaaaatggggaccaatacctgtttattaataactgaaaaaacaacaattaattctttttgactatttctaatttggcccctcattaaactataaattgtccttatggtatcaacatattaaaatcatgacaatcatacccttaagtcataaactttattctaaaatagaccacataaatttgacttatttatttgatgaccaacacacattttatatatacaattgtaaccttaataaatttctaacaatctctcactgagccacatatgtatacatatatgcgttaaccttattgagctcataactttgtcatcataaccataggcatgtacaatctcgtccattgactagtcaacataggatcaaagcagtttttgttgtatcaatcacaactaaactcatcaatggtcacatatatcgacatagttaaatgacatagatcaatcatgataatgtggtatgaaaattacatgcatggtgatctattcatgtcaatttttaattggtcatactttacttcatagagatctaaaccttaacttaatttacaaagtgaaataaactaaataacataatttccgataaaaaaaatatccaaatacacatatttcatgaaaaaaataaaacacactaaggataataaagacaaactcccactgaatttagatatcctcatgatctaaaacaccaatgcgagcaatgtgctcatgaaagaccttgggtggcaaacccttagtaaagggatcgataatcatggagtttgtacctaagtgttatatacaaatctatccactttgtaccctttctttttcaacaaggaacttggtgtcaatatgttttgacttcgtcgagctcttgttgttgttagaatacattacagctgacttactgtcacaatacaacttagtaatctttcaattctattcacaatgcgcaggccggtaacaaaatttctcagccatattccatggttggatgccttataacatgcaacaaactctgctgccatggtagatgaag

SEQ ID NO: 227122 - DNA, 2851 bp, Cannabis indica
taacattacttggtgtgggattatgatcgataaaaatattcttctttacaaaagtcatagacaaaggagtaaattcatctggcttcgttgcaagcatagacaaaaagaaccttatacgcttatcatttccaataattttagggcgatacattaagcctttcatgtacttctaattgacttccaattttaagtcatactgcactttatcaacatcgagttctttgtacaaaaaaaccaaaagtgagtaactttcgttcgtatcaatctcaaatgtcaaaatttggcccaattataaacacaatctctaccctcaagctcctaaacaccattatacataacgaatgcattaatagttgaacttgtcacatacattaaaaaacacaattacaaatttagaacaaaaatctaacaaaaacgtgttaaaaaaagtcttaagagccataaatctgtaaaccatcgggcccaaagatctaagagaacaatcggactggcatcgggcctatatcgaatacaccatcagactcatttagcattgaactagcatcaaacttatatcaggcttacatcaggccaatcggccctgccctaaggtcgaagttgaccatcaaactcccatcggacccctattgggcccaattgggccatcctttctaatcttagttcttacaaaactatcagactaccatcaggcacctatcaggcttactcaggccatcatccccggccttagatctaagaatcccatcgggctagtatcgggccccattaaactagacgaaaaaaatacaaccatttaaacacaaaacaatagaaaaatagcaacaatccacagatcaatcatgaaaataacattcctaaaaataagaaaaaaaaaatcacttacctattgatttttgctgaaaattgtttggtacctaaaaaatggagtctcacaccaaactctttaacttctagcactttgtagtagcttagagagattaattgtatactaattaaaaataaaatttagtttgaattgttagagaggaggaaagaaatgaggttgagagaaagagagtgaagagagaaagagtaagatgggttaagtgtgtgtgtataagaggcattttatattcaatatatttgtatatctatttttttttaatattgacaaacctaagtttagagaattaattttttcgtaatatatgcataattagtaaaaatttcctttattagttcctctccttaatctactggtttcatttttaaggagaaaaaaattattcacagaaagctttattattacgtataataggttgtgattaaataaaactctagagctattaacaaagtcacgataatttatgtatttctagtgagtagtgaccaaaagtaatatctattaacaaattaaaaatttatgctatgagtacgaagtttataatagatttttctatgtacgttgacatttgaatataaattttaagaatttgtttttgaatttttaagaatatataattttagtcaaaattgttaatttcagggccaaataatcttaaattctttaaacacttgaattaagattcttttaattttttattcaaaaataaagaagattcttttagttaaagttttgtcaactaacaccaaacacttgtttttaatacgaacttgaataatacttgttgactaattaatattaaattaattatttattggtggtaattgttgttaaacggtgtgtatagatgtcctaatgggacgggtttcgtgtatatattaagttataataacttatgcaaagcgattaatacaacttgtcatctctatttctatctaatattaacaactaattaagtcatcatacataaataatatcaaaagcagttagtcctgaaattgaacaaatctgtactaattaaatcacctaattatcatgttcaaaaaaatcacctaatcatcactatatatatatatatatatgataatataatactccaccagaattatatcttttatatatatttatatgataatataatatagtcctactccaccagaaatcgatcaacttataaaatgaaattgtgttctcctgcaaggggactaataagatgaaatatagaatcacatccggtagatttacacctaactgattcaatctaattatttattggatattaaattttttgttttccgatctaattcaattagaatcacccgatttaatctaatagatgtattagattaattaaattggtttcaaccattaaatacattaattagttttttattaaattagattggatccttccaatctattttaactgtcaattaagtttattttattaaaataaaaatgtatataaaaaatataatttaaaacataataatctaatatacataataaacagcttagtccaacctaattctcacgatctcataatgaaaccgctaacaaataaaacttatttaatatacattaatattttaaatctaatgttttttttctttattatgtgttaaatatatattaaatcaattaatatattttaataaaaatataatatataaatataaatatattttaaaaatatataaatataattagatgaccattcaattataattttattggtttggttcagttatctattggatcggatgtcccatccaacaaccgatccgatccgattggattttcaaaatttacttctgatcctatctaattttgattggatatccaattctattggatcggttggaattgaatcagtcggttgtaattagattggatgactttctgcacacccctaaatgtagtcatatatatatatgggtgcactcttaatggatattacccatgaat

SEQ ID NO: 227123 - DNA, 2075 bp, Cannabis indica
gggatatgtattactatgcaaatgcaaaatgcaataataattatgcaaagactacggttttcttgaacttgaaatgcacttaaaggcaggcaagcataggatctctaaataaatcccctaaagatggcctaaaccttagcaacttctttaattctcattcaaagtaaagtcatatggcatgtgattttaagctaagcccagcacaaaacccaatacaactcccttcattttaattatatatccctccatttcaaaaatatatatatatctctttccttttcttgtcttctctcttcatctaattaattccccatgtgtaaacatgcgataattttgcagctattaaataattatatactgtctacatgatttatcatatatatatataaattatttccattacaagtactcttaaatgtctactttacttacggggggttttattataattatcaaattagattgtattaatagttaattttgtgttcatcttaatttaattatcaggcagtactattacacaaatatttagtaaaaaaatttactatcaaaaaacttaattatgcatgtattacctttaaaaaaatttgtaactaatagtattagtgagacgctacaaaaaattatattttgtttgcacatttagaaaggacctctttttatttgaccagatatattattagtattagtaacagtaaactaaaactatagcagtgataaaattaaaatatgttacttattatattttttttttatcaaaactcaaagtaattactttttatttagtaaatttttgttgttgtaattagagatgaactttactcaaaaaaggattatgtttttaaaaaaatttatactaaatgataacctttttttgttgtgatctttacacgttacattcggataatattatttttattttaaaaaaattaaaaaaactgacgtgaaagagtattctgtacggccaacaatcttttaattttgatttggttttaacattattattgtaatgttagtttagtttagtgacaactttcatttttaccctaaacttttaaaggaaaagtagaagattggattacctagaaaagaaaaagaagcttataaatacattcagttaatacatattttgcatttatgttattatattattatattatatggtccggacccaattatgaacattcccataattgaggcttgacattaggtactgtggttagtttttgtaagcaaccaaatccctgcaaatctccatccccaagacgtattgtaatatgccattttttgtgccaatcactcataaacccaagaaatgtgtttttcgttttatataataaaatttttagtttaaatgtatttttaaaatcttttatattaactttaatataatatactattatttaacagaatatttaagtaaataatatttttgctctcttaaattttaccctttaaaaatacacagattgttaaaaattctctatcaaatataatatttacgtaattatgtccattctgttaggttctgtttcttttatcgttaaaagttagcatttttactacctgaactttgaccaatacaacatttttctcatttttattaaaaaaattaattttaaaaattataatattctattatttctaaaaaacttaataaattgttcaaaaaaaaaaaatacctataacattaaatttacttaaaaaatatctaaattattttaaaaaaaatattttcaaactttatattatttatgaactcgtatcttaaaaaatcaaaccaaaattattaaaaaattaataaataatttaatcaaagtaagattttttgaactaaattttaaactaaaaaaatgttatgtttacttaaacaaatctaaatttttagagaaaaatagactcaaacgtattcatgttaaatttagtttttacaaaaattaactttttaatatatatatatatatatatttttaatctaaatggattttttaacaaaacataaataatttttttaaatcgctttaattagttcaaaaaatttaatttgttttttaattttctcaatcattcaaaat

SEQ ID NO: 227124 - DNA, 14040 bp, Cannabis indica
taatttatttatttattttcaagcaaggaactttcttaacctcatgatctaatattgtagtttcatggacttagttgctcttcaaataaaaaatggtgctaattctagtcctctgcccacctaactccatgctttgcccacaaatagtatgccccaattgggcctctgccccctaattcatacagctctggtactatattgttcttgtctatctcctggaggactggacttaaaatattccatgcagcttcaacctcgtcgcttctcataaacagatggctatcaccgtcgatggcatcgagaagaagatgctcgtatgagtcgggcacctcaacattgtacctgcatagttgatgaagtaaaagcacctaaatgaggctaagtagaaagaaagagaaaacaaaatgcattggcattgttgtgtagacatcattttttatggatgagcttacttgtccttgtatagcaaattcaactctggagaatccaagtgcaaccccagtcctgggatcttattattgaccctgatgaggatggcttcatctggagcaactcttaatatcagctcgttggtaacaaggtcgatgttatgccccattcgctctcgataaatgtttcctgggacatgatgaaactgtatacgtatctccaccctacatagtatatagacaaagttatgagaagatttggtattgttttaaatgaaatactgaatgaatccttaagtcctttggcctaatggcttgtaactagtacacacattgactagtgaaagaagtaattcaagctaagcattgtcaattcaatttgatccaagttccaatcctcgaattcatatgagcccatttgggatccaatttcttatgtagactacctagcaaattcattctatatttgttgagccactaggaacgttctaaaacaaaggcagcataaaattgaagctcaattcctacaaaattaaaattctacagcagttcaaactacccgaaaagtactagtgtgttcattcgaaaaatatgtcagcacaaaaggaccatagaacatatccaacctgtgttcaatgagtcctactccagttttaaccaaaaaaggcacaccatcccagcgcgcattgtcaatatacattgcagcagcaaaatatgtgggtgtcagattgtctgtatacacatcaactttctcttctgtgcctgctttgtattgcccaagtataacatcacttggttccaatttacggattgacctcagaaccttgacctggaaaagagccattaagcagagtaactatagttctaaaatttcttttgttatactttaacattttgaaaaactttgatcattgtagtccaaagggaggggccccctcctgtcgttcccatcttttcttcctagtctaatgaacaagttgctcctgcaaataaaaaaaatatataccttttcgtttcgaatgtcttcaccatcaaggcttataggcggttccatagcaagcagtgctactgtttggagtatatgactatgtactatgtctcgaattatcccataaccctcaaaatacctgtgtaaaacaaaaacacatagagcatagattattttattgattctctgctatgcagcaaccacaacacggcacataattaccttgttggttgtgcactcaggtcttcagataagacaatctgaaaaatgttccaatgatccagcatatattgtataaggcaaagtagattgtaacattagataacaataaataaagaaaacagaagtacctgcacatttcttatgtatttataactccacaatggctcaaaaactagattggaaaatcttagaactgtgagattttcgataaggttccttcctaggagatgatcaatcctgaaataagattgatcagacaattacttcttttcacaaatttacattataacagataattcagttgcactgtgctgtgcctaaacacctgtatatttgtttctccttaaacttggaaagaagagactgtgtcaaccgaagagatgatagtaaattgagaccaaatggtttctcggttattatacggttccagcccttagaggtttgagcataatcagcaagagaagatgcaacatctataagtgcttcttgtggcacagaaaggtaaaatattctgttcgcttcagatcccccctgcggtaagtcaatcgcttctaatcaagtatcacaagtagaaaaaaaacctttttttgatagttttgaatgtttatttttacctcaacatgctccattaaggcattaagctttaacatgccttctctgttatcataaccgccatgtatataatatgtcctactcagaaaagcatccatcttgtctccacagtcgtttctgaaattggttgttagtaatttggaggttaattcaaaattcaatattttgattacatgaaaatctgcttcaaaaatgtactcataaaagttcaaagtgtctctttatcaaacccttagtaacctgcttctgtaaatggggagattgtactataaaataaataactatcagaggtaataaaagattcatactgatgatcaacacggcacgtcagagttgaagctattattgatcttagttcttcatctgtcaaattctttctcgaataaccgaaaattccaatattctgcacccaaggacagacatttaagagataggtgttgaatcaaattttgtagacaccaaatggcccaaatccattgtaaaaagttaccaaacttactagattatcaatttaattgagattgctgcttatttttcacaaattagcatataggaatatagcaagaaattcactaaaaactcactgagaatgatgtaaatttagccttacctcaggaagaaatccagtgtaatacatagcaaacaatgctggaaagatctttctccttgccaactcacctgttgctcctatgacagctatgcacagtgacggtcctccggcgacattatctgaggaattggaggaatgtatttgtggcaaagatgtaggggattgcttagaagtggaaacttcacataaacaccagatcagatgttaggcaaagaactttcttcaagtttgtgaagttaatgtctcataatctcagagtctaacatgccaccattttgaattctaaacacacatttgacatttagggtatgtttggttggggataatgaaatgaaatggaatataaatgaatcaaatttcatcccattctaacttttctacaattttggttgaatgattaatgtcttacaaactaataatttttcttttatcaattttgttttattctcatttctacaaccttaatcagaatgaaaggaaaaattaaaatataataaatcaactaaaaggaatccataggcaaataagtttcaaccaagatatagttaatgctaaccatgccccaactcaattgtggttccatcagaggcttgttcttgaaatgatgaagttgtttcaatgtgatttgatgagtgatctttgtcttgatttttgataatcttcaattcatgtttaagaccaaattttctgttaggctgccttagtttaaagccacaaaatccatgacagaagctggctcctccataaaaaccacttgatccatgatgagatttgtttgttgaagcctaaatttcatgaacacaaattaaatactaactactttcattttttaaacattttgatcagttgagagaaagaccctttgaataagctcaagttaaacaatcgatacacataaaatagtgataaaagacttacagtgaagctgcgaacatgagagttagagagagaaaacactggtggtggtgaagttgagtactcggaaaagggtaccaagaaagctgaagacgccattgacatcttcgaagagcttagttagagttgcaggtaaggatccacgagtttaaggtcggtgtcaactggtattgagttggttgtctgccagtatgatcgagtactgatcgtgtcgactgtagtgtaggggattggattaagaagacgagtgcagcaaataatggtgagtttgagcacaggtgataaaatccatgggagtcgtgtgtgtgtgtgtgataggatttcctatcaatttaattaaactagcagcactaaagtaagagtagaagagaagaaggaaaagagaaatggtattctgtattgataatcaccccaggaattcgagagccttacaaaatccttcacaaaaacccacataagacaattaactcttatttatagctagactccaagaggcttaacatacacctcaaccacacccaaacaattctcccataacagaaattacatattagaagcagagttattccctactgcctccccacctttaggctttctagaccttttcctagcatacacaaaagtaagtggaggcctatcaatacccccggcttgaagtttcaccttgtcctcaaggtggaaatctggaaactgagctcgaatgacagcaaagtcttcccatgtagcctcatactcaggaaggtttttccacttgatgagagcttgcgggttaaccttgtgggtacctgggcgaatggccagcagtgattcgggttccaacatccattccaggtcagcagtaaggcccgcaggaaggggtgatggttgctgattggggcccaaggcagctcgcagaagagagacatgaaagacaggatgaatggtggcgtcgggaggaagttgaagacgatatgcagcagggccaacccgtgccacgatgggaaaagggccaaagaagcgtggagatagcttctcgttgggtcgtctggcaacagtgcgttgtcggtaaggacggagcttcacatacactcgatccccaacttgaaattggacatctcgacgattacgatcagcttgagacttcatcttttgttgggcgcggagcaaattctgtttgagcagatccaaaacggcgtcacgatcatggagaacattttcaacagcggaggctcttgtggtagtagctgcaaaacgcagcagtggtgggggatctcggttgtacagggcacgaaaaggagtcatcccggaagaagtgtgatgcgatgtattgtaccaatactcagcccatggaagccatttcacccactgattgggtttaaagctgacaaaacatcgaagatacgtctcaaggcagcggttaacaacttccgtttgaccatcagattgagggtgatatgcagtgctatgcttaagcaccgttccttgaaggcggaagagctctttccaaaagaggctgaggaaaattttatctcgatctgaaacaattgatcggggaatgccatgaagcttgactatctctttgataaaaatggcagcaactgttggggcagaaaaagggtggcgaagagcgacaaaatgtccatacttggtgaggcgatcaaccaccactagaatggagtcaaaaccattggaatttgggagaccctcgataaaatccattgaaatatcttcccaaacttgctcgggaattggtaaaggttgtaagaggccagcaggggactgtgccaaatacttgttctgttggcatatcgaacactccgccacaaattgttgaaccgcttttcgcatcccttgccaatagaactcggcagctagtcgttggaaagttttgaatacccccgagtgacctccgatattgctgctgtgatactcatgtaaaagcaagggaatgaatgaagatgatgcaggtaacaccaagcgtcctctaaacttgagacaaccatgagttaaagaaaaacccccacaatcttgaccttgaccgagatctttaataactttggacagcagcgggtcgttggctatttgagcttgcaaatcaggaattgataacacattcggcactgtaatggcagccagagaagcgtctccattgatgcgagatagggcatcagctgctccattttcagacccgggcttgtattggatatcaaagtcataacccaagagcttagtgagccatttttggtgttccatggacactaggcgttgttccagcaagtatttcagacttctttagtcagtgcggaccaagaattttcgacccaaaagataggggcgccatttttgaaccgcaaagacaatggccattaactcgcgttcatacaccgacttcaaacgagccctcgtagataacactttgctaaagaaagcgaggggtcgaccatgttgcattaagacagccccgagccccatgccggaagcatctgtttccaacacaaagggagcactaaaatctggcagcgctaacaccggaacggtgctcatggcctttttgagttgatcaaaggtgtcttgggcttcttgagaccaacagaaggcgtccttttttaactgatcggtgagtggtctagcgatgtttccatacccttgcacaaactttcggtaatacccagtgagccccaaaaaacctcgaagttccttgatgtttgtcggtcgcggccaggtgttcatggcctcaattttactaggatcagccgcaacaccctcagcagagattatgtggcccaagtactccacttgaggctgtgcaaaagtacacttcttccggttcgcgtataattggtggtcttttaaacgagctaatacgagcttgaggtggatcaaatgggcttcaaaggtgggactgtacacaagaatatcgtcaaagaaaactaacaactccacgaaaatcacggaatacctcgttcatcaaggcttggaaagtagccggtgcatttgtcaagccgaaaggcatgaccaagaactcataatgtccctcatgagtgcgaaatgccgtcttctccacatcttgagaagccattcgtatttggtggtatcccgatttaaggtcgatctttgaaaatattgtcgcaccatggagctcatcaagtaattcatcaatcaccggaatgggaaatctatcagccacagtttctctatttagagctcgataatccacgcaaaaacgccagctgccatcttttttttttactaagagaacaggactcgagaagggactcgtgcttgattgaatgattccggtttgagacatttcacgaaccatcttttctatctcttttttctgtatctgagcatatcggtagggtcgaactgatatcggttccgtgcctggtttcagcgtgatgaaatgctcacgggagcgattgggtggaagccctggaggcatctcgaagaccgagtcataccggtcgagtaaccggccaatggactttggtagtggcagttggttttgtgtcaccacaggagatatttcattgagttgaacccaatacccttcagcccctttttccactgctaaaatcatagccttcaaggagattggtgacttacataagctagggtctccttgcaaggttatccaatttcccgccaattcaaacttcatcaccattgttttccaattcacttgcatattaccaagagtttcaagccacttgatacccaagatgacatccgccccacccaattcgagaggaaggaaatcagtgatcacccttaaagctcctaagtccaactcgacttgagcacaaatgccttcagttcgaacctttcctcccgttcccaaaagaataccataacatgtagtggctgtgatgggcaagccaacatcagtcacaacctccattgacacaaaattatgtgtagcgccactgtcgattagcacagtcacgggttgttggccaatataaccagcaagcttcatagtgtgggctgtggatattccaattaaggaattgagggacaaagttgcaagtgtctcttcggtcacttcagtattgccagagtctggcgaaaggggagtattgtcttcactaggttcgacttcctcatcatcagtggtcaaaacgatttggagaagcttgtgctcacactcatggcctgggtgaaacttcttgtcacacttgaaacacagccccctatttcgtttttcttgatattctgcctctgtaagtctcttgtacgtattggggttggatgaacggctactgcttgcctttgatgccatggaagtgaagttttggggtctagtttggcccgctgattgaagaagacgagatgggaagggctgaaagttgggtcgggtgggtgtaattgggctgggaagtggtttagtggtagtggcttttgaaacagggcccattaaatgatggccttcctcaattctctgggccgtttccattatttgggccagccctttaggttgtagcatgtgtaaagtggccctgatttcttccttaaggcccttagtgaagcttccctctaaaatgtgttctggtacgtccggtacacgcgaagcaagaacttcccaacgaacccggtactccttaacggtgccgaactgaaccaaggacaatagttcttctgaaagagagcccaccggcactgaacgaaaacgatgaagcaccatttgtttaagcatcacccaagatgtgatgggtcgtctttggttttcccattgaaaccaagaaagagcgtctccgtcgaggccaacgatggctatatccaacttcatggattcggtcattttcgtgagtaagaagtatcgctcggcgcgataaatccagccgtccggattatctccgttgaacaacggtatctccatccgaaggggtcgaaaatcggggctctgcgtttgacccggattgaacgatccgatctgaatcggagttagtgggggtgcagcattaggatgacttgtcggtgatggttgaagcgtttgtggcaggtgagtcgaatgaattccagcggagttgagctcccccgtcgatgagccgtccccctctgtcgcacgccgaagtcgatcggcactcgctgctgcaggttccggcgtcatccttccaggcggtgcgagtagctgagttagttgggatatttgatttagcaccggttccagttgtttggcgacaatttgtgcgacggagccctgaaatccctcctgcatcctagccaatccctgcgtaactttttggacatctgaacggaggtccgagacctcttcacccaccttctcctcgatgagttctgccattgaatccttcttgggtcccatggaaagttgctctgataccaacttgataggatttcctatcaatttaattaaactagcagcactaaagtaagagtagaagagaagaaggaaaagagaaatggtattctgtattgataatcaccccaggaattcgagagcctgggctctcctctttctgttacaaaatccttcacaaaaacccacataagacaattaactcttatttatagctagactccaagaggcttaacatacacctcaaccacacccaaacaattcccccataacagaaattacatattagaagcagagttattccctactgcctccccacctttaggctttctagacctttttctagcatacacaaaagtaagtagaggcctatcatgacgaagtccttagtaattcttaaacttttatttttgcttattaagtcggtaaactttctatgatcaaaactattctgaactgtgtacgttaaacttttacatttgctttgcaggacatgcacatgttgctgaagctctcggtgtgcctcttcacatcttcttcacaatgccttggacgtgagttccatgaaaactttttgtccgtctttatttttctattttttacttttagtcgggggagggggggagtctattatggtacttagctttaattctattaaatttatgggtcgaaatctcacatctatttcaataggcaggccaacgtatgaatttcctcatccactagctcgtgtacctcagagtgctggctactgggtatgttctcaattagtcttacgcttattctagtattctttttatatgatattactctgatgccataattaactttctgaattgcttttgccttgtacagctttcgtatattgttgtggatttactaatatggtggagcattaggggatacattaatgacttcagaaaaagaaagttgaagcttgctccaattgcctactttagtacttaccatggatcaatatcccatttgccaacaggctatatgtggagtccccatgttgtaccaaagcctagtggtaagaccttccttatagtttctctcttgcttttgagaaccggtctctataattatcataaccatattctaccaattggagtttccatatgtgtatcaactgttgcgaaatagaaagctgacagaagcattcagttggttgcttgaaatgcgcccaatatgttttgtgtttgtgcatgcgcgttgttgtttccccaactcgactattgctagcaaacagagataatgatgttttccttctcagaaacgtttatttcagtatgaaattgctggagagtaacacaagcatcaatacttgtagttttttttttctttcaactctgaaaatccgttttacactgtttatctgatatgtgcagatgtatatatacattatgcttatggttataagatctttcaatggtcatgtatttgtttttgactttatttcaaccatgtgcagactggggatctttagttgatgtcgtcggatattgttttttgaatcttgggtcgaagtatcaaccaccagagaagtttgtccagtggattaaaaaggggcccaaacctgtatatattgggtttggaagtatggtacgattaattactaaatataatgttgaagttaataactaggctctatttatttgttctctatgcacaaaaaactatttacaaacaccaatccatatccaatttactgacttttttactaccaacatccctttttatatccttaattacattcatgaccactggagttttggaactccataaaacttcattccgagccctccaaatatgatacacactagcacataaagccctcacgtaaatgcttcttctacatcttgagtgcccacaccgcctaacccaattcaaaattccatgaaggttataagaatgagagccaatgcccaaccaatgaagtacctcttccatgcaccgagtactaacattgcatccgaaaaacaaatgctcatgtgtttcattaagctggccacacgaaagacagcaagaatcaataaattgttaattttctcgttattagtttcttccataattgtagaagttcataccataccatgatttttgtttagaagttttctatttatgcgaggacttctcaagcattcaaaatgaagaatgtgagactagaaatatttatccttttattcgaatattaacacattttggtgacaaagaacaacactgcatgtgacataaagatccatgtttgagaatataaacaaagttagctctcatcataaaggaaaatgattttggagtgacattgaagctaagtggaggcattaaaatcaaatcctttcaatcaccctccttaagatttctgagagtttatatttttaccaattgtaatccatgtatcattagctaagatattctttctagtcatgggcacattataagacaaatatcttttgagtacatgaatgatgatatatacttttatgtatattgattaagatcaaatgtattgtgtttgttcttcatttagaaagactaatttatcatatgcttcttgttaagcctctggacgattctcttcaaacaacggatatcatattggaggcattgaaggacacaggacagagaggcattatcgatcgtggttggggggatcttggcaattgtaagtctttttttcattataactttgtgttttttccatcttggatttgattatccatttgtttttcacaaaaataaaaagaaagaactgaaaatactgtgaaaatgccctttggttttaccaatcttttccatcgagaagccatttagccatggaaaatatgtttcatataactaagataatgcacaacataacttatttgatatgctgtgtatttcatatataattgaattaaccttgtgatggatatataggtgatataatgtttaaatatttttagagacaatctcgtaacgattattcttttaagcgagccctgctgctgtagactgcgtttagtaactagaacttatttttacctttcagtaaaagatgttccggttgatgtttaccgtttggaggattgccctcatgattggctgtttcctcaatgttcagcagtggtaagtttcataatctgttttttcatggaaactggattaagaaagaaatggaaatggaagtacatgccattaaacaactgggaattatggattgttactttcttgagacttgttgaatcgcaaagctttttaccgaggaaggagtacaggataatttgtaaagacttacgctgtgtgaattttatgttgtgtacatgtaggttcatcatggcggtgcagggaccacagctacaggactaaaagccggggtaataatcttttcactcgattatttttctctcctttgattattttgagtgtggctatgttcttgtacatgggatattgaatttgttaaagaaattgtttatccattttcacttttgttcttaagtttaattcttttgtttatacagtgtccaaccaccatagtcccattttttggagatcaattcttttggggtgataggatacatcaaaaaggattggggcctgcacctataccgatatctcagctcaatgtcgagaacctttcgaatgctattcggtttatgctccagccagaggtaggttcaatatatcttataccatttgaaggctatgaatttgtggcaacctacaatgatatgacatgttttattattcattatggctaggatgaatcacttgtttaaaatcttatagcagaaaggatgatttgagaatttttcttcgaatttgatgggattcgtgtttgccaactaaactcggttattctttatttcttagattaaagctcaggcactagagctagcaaagctgttagagaatgaagatggtgttgcagctgcggtcgatgcatttcatcgacatttaccacccgagttaccgataccgtcttcatcatcagacgacgaggaatatcccaaccctttggattggctcttcgctaaaattggaaagttgtgctgccgaccatgtggtggttcgggttcgtagggttactccatgcatgtcatggttgtacattagttttttttattttccctttgatttatttatttatttattatcattttgatctcgtatttcattcattctattagagggcctttcatgtttgtggttggtaggtttttttttagcatttacatttttctctttttactcaaaaaataaatgaattaggttgcatagaactatagtgcatttttttattgaagaaaacatagtgaattgtttcaaataaatatttggattaataattatcattacattttctttgtaatgatttatggcttctttttttgctcaatttttcttttctatagcaccatataatcaaagggttatattagtatgttttcaagtaaaacatgggtatggttataatttctattctataatttactacaatagggtatgagaaaacttgtttaaatcattatgattatacttcgaaataattttactaaataatatattacttgaatatgatatttttctattaatttattgtttagaaaacatgtacaaatcatatactataataaccaaagaaaatacaaatattagtaataacattacaaggaaacattttcaaactaatctactttttgtaaagcttgacatctttccacttagattccatgtaaccacttgaatcataggtagcatagacaccaaatttgaagtagatgtcgccctgacaggctgaccatgaccattgacgatgaacttgttggcaccgtcgataaagacgctatcttgcctttgtcgacgttgtggattatgttgactcgaaaccacctgccgtatagatcggcagctactacttgtagtattttttgttgccatcatactctttagttgcaaagtggtagctccctcataccct

SEQ ID NO: 227125 - DNA, 2409 bp, Cannabis indica
aaagatagcagatattgctcctgttaattgagctgctgcataaactggcacctgcaactctatcaaacttttacaccgtttttctatttgttctttgtaaaatgctctgctcatgtatttccgaaaatatgactaacttcgtaaaaaaaaataaaaaagagaaaagaagaatgatataggtagtttgcttcccttctataagtaaagactcctgatactgaaatttttgaagtgaaatgcatgtgattttcttcatcaagataccaaatttttgagtaataatatgtgcactcattcttgtaacactttttttttaaaaaaaaggtccatgtgattggttaaaaaaccatgtctgtaattttctggtgtatattttgagaagtctctctctgtttaatcaaggactaggtgaagttggatcagttggacctaagaatgtggtcatgtcatgggatgttgggcatgtggtcatgtcaagtgggattgtgttgctattgttaagagtcaccattacaaattaaactaaaccaaatcaagtcatgtgtatttaatttgaacctgtttccatggaaaatgcctaacagctgcaaaagctaaagtgacagccgggttcatgtgtgcaccggagatatggcctacggcatagatcatcacggtcactatgagtccgcccgcaactgaggcaccaagctttgaaactttgtgctcttcactcatgctcagtgcagccgtaccacatgtaacaaacactaatagatatgttgctacaatctctgctaccacctgtgcagtcaccaaataatttaatacatagaagaagtattaagtagcataaaagatctttcatctagctaattacatagattaatacctttttaagaaatccaggtggataatgttgctcaagagatttccagaaaacataactggaccttgaattttgctctgaaactggctcaattatgtcatccattaaactaatattaatttggaaactattctcttggtgtttctatttctctttgcctcccttttgtttggggttgcttattatatatatttatatttatattgctttgaaaagctagtacaacttctgttatgatagtgcaataatagaaggtaaagttgagaaagttgtagggtggggggaagaaggcacaagtaaaatcaaagaaaaaaggaaagaatgagaaagtaatagtacaaataatagtaactacttttgattaatatgtgtagttaagtaggttttggtcaaaggatatttacatgatttaggaggagaccttcctatcaagatatattttgtactagtcttctccaatataattatgtgtgtaattttttttcctttgttatgggatctgttgtcattctccttgtttatatttctggtacaatttctttaactaccactacaacaaattttttaattgaaatatctacttattattatgttccttattatcataatcaatctttacaaatttcacctttagttaggtaactttaggcttaggccctttggtatgtctctctttaatctttctagtcatttgatcaatatcataaccattcgtgtctttttcattattatgattatgattattattattattttaaaatttttatggttaactttggtcaccatctattatttggagattcttattgtttgatttggttaatgagaagtacaaaaatgtcaattttattggaggctatactaagggatttagctatagtagtctatgatttctaaacatacattttaatgaaagatagagggataaccacatattttaatgaaagatagagatgataaaacgattatcaagactcaattaaagtagtaaatgcataacttttggatttccatgctttataattgagtttgagacattaaaattacaagaaaagcaatgtttttgtctaacaccaactgatgtatcattccatgttgcagtgattgaaatcactatcaagaataagatcaagtaaacataacaacaataacatacatacaaaattaaccaaacaatttgtaaactaaactgtgatgagagcagaataaaacaaatgtaaaaccatattgaattgattaaaaatgagaaataacattgacaatacttttattgataattgaaaacagttaagtgcggatgttcgcactatccgcacttatcctcctcagctctaataccacttgttctttggtacctttccaaaagacttcataccaatggagacatgtccatcgttatatacccataatcattcccatttctagtcaatgtgggactttggttagacacccaacaatcttcccctcaaacacatgaccatatagcctctcctcaacaatcttccatcttgcactacagctatcatcaaacagaacacgct

SEQ ID NO: 227126 - DNA, 2440 bp, Cannabis indica
tacaggtgtgctgtggttctgcgagatttaatcatgccttatctccttcggcgcatgaaggcagatgtgaatgcccatcttcctaagaagaccgaacatgtcctcttttgcagtctcactaccgagcagcgatctgtttaccgagcatttcttgctagctctgaggtggaacaaatatttgatgggaacagaaactctctttctggaattgacgtgatgcgcaagatttgcaaccaccctgatctgcttgagcgggaacattcctgccggaatccagattatggaaatccagaacgaagtggaaaaatgaaagtagttggccaagtgctcaaagtttggaaagagcaaggtcaccgtgttcttcttttcacccagactcaacaaatgctggacatacttgaaaactttttgatttctaatagttatcaataccggagaatggatggacttactcctgtaaaacagagaatggccttgatagatgattttaacaactcagatgatttgtttattttcatcctaaccacgaaggttggtgggttgggaacgaatctgactggtgcaaatagggttatcattttcgatcctgattggaacccttctaccgacatgcaggtattgtgcttgactcgattctttctttctttgtagatacataaaacctgctagagcataccaatttacaacttgtttaactgtgaacaggcaagagaacgggcttggcgtattggtcagaagcgagatgtaactatatatagactcatcacccgtggaactatcgaggagaaggtatatcatcgacaaatttacaaacattttcttaccaataaaatattgaaaaacccacaacagaaacggtttttcaaagctcgagatatgaaggatctgttcaccctaaatgatgatggacagtctgggactactgagacttctaatatatttggccaattagctgaggatgttaatgttgttggctcaagtaaagatgaacaggataagcagaaatctgtcaaattcgatgaggctttagccgatcaaggaaacaacatagaaacttcacctaaagggaaaaaagggaaaggaaaagctgatcttagtgatggtgatgaagatggtgaaaaaaaggatgaagaagcaaacattttaaagtctcttttcgcccatgggatacacgtaagaatttatgctgttttcatcaatctgatcacgacgttcgttgtttcattttcaaagctccattccccttaccatcttttgttttctcttacagagtgcagtgaaccatgatgcgattatgaacgcccatgatgtagaaaagatgaggttagaggaggaagcttctcgagttgctcaaagagctgctgaagcattgcgccaatcaagaatgcttagaagccgtgaaaacatctcggtcccaacatggactgggaaatcaggaactgctggtgcaccctcatcagctcggaataaatttggctcaactgtgaattccaagctgatcagtagctccaaaccatcagctaatggaatttctgctggtgcatctggtggaaaggcattatcttcagccgaattactagcaagaattcgaggaaaccaagctagtgccgctggtgctggaatcgagcaacagttgtccactgcttctaatgttaacagaggaaatgttggaacctcgagatcaactaaaaacttgtctagagttcaacccgaagtactaattcgtcaaatctgtactttcataacgcaaaaaggtggaagtacagattcgggcagcatagtgcagcattttcgggacagaataccatctgaggatcttcccttgtttaaaaatcttttgaaggaaatagctaatctcgagaaaacatcaaacggttcggtttggattctaaagccagattatcaacactaaaatatttgatccttgttactcaattttgtttcttcctaggatcttattagccttaggagacagagtagtaaggatatgattgttcttcatttttggtgctttctagcacatcttgtttaaattaacagagccaagttaaacaattgtctttctcttgtacagatttttctatgtatttcaactcttaatatcgaaaaaccgtcttgtatagaaaattttagaccctattggttttagaaactgagagaatttgaagtgaaacatatagttgtagactttgtagatgtcgtttaaagcataaacttgtcgtatttgatactattaagatacgttgctgtgttgttaaaaagggcttattggcccaaattactgaatttgtgaagtattgtaatgtttccaaactctaataagggtgcgatcataccagcactaatgcaccggatcccattagaattccgcagttaagcgtgcttgagcgagagtagtactaggatgggtgacctcctaggaagtcctcgtgttgcaccc

SEQ ID NO: 227127 - DNA, 2862 bp, Cannabis indica
  modified_base (2311)..(2311): a, c, t, g, unknown or other
tttactagtgttctactgttgttttgagttgttatgctttgtgttttactggtgttttataaaaatacagtatttttgaaaaaatttccgtgtgacagtatttttgtaaaagttaacccaaattccagtatttttgtaaatttctcattttctatccatgcgctattgaatagtggtagcgggcagcattaatgggccggtcatagtaagatccagaaagcccaatattgaatcttagagcccaccaagcctattaactatataaacgaacaaacgaagcactccttcaaattagggtttgtaaattggaggcttcttcactatcttaacgcaccgagacgagtagcagcttcagatccgaaaccctagccatggtgagcaaccttactttctttatttcttcctctacttctctatctctttcttctattttagtttttactttttattgctattaattcgtactctggtttgtgggcatgtagtcgcttgttgcgaacgaagagtttcaacacattcttcgtgttctgaacaccaacgtcgatggaaaacagaagattatgtttgctctgacctccattaaaggtattggccgccgtttcgccaatctcgtttgcaagaaagctgatgtcgacatgaacaagaggtaaagcttatttctttccccctagttgttcctcacttgtgtttggttttacccatttttctgtagggtttcatggattttattatgttgttttataatatgttattgtattatattttgtttaaaatcgaagaactttacggtatttttactgcaattttcagttttcaagtgcctttagatgcttgcctttttttttattatgaactttcgatgatattgtttatttttaatgttgaccctttgctaatgcccgacttttttcattttgctcattcatttgatttgaattggcacgttaaactgatttagcaaataaactaacagtaagttagagatgatatgtttttctgttgtgttggcgatttgtttttgttaatgtagtacttgtggatttcactttgtaaattgtttttgcagagctggtgagttatctgctgctgagcttgataccttgatgaccattgtcgccaatcctcgccagttcaaaatcccagactggtttctgaacagaaagaaggattacaaggatggaagatattcccaagttgtttccaatgcattggacatgaagcttagggacgatcttgagcgtttgaagaagatcaggtttgctttttcatatgttgttctatgctatactgtgttcttgtcttttatttgtttgtaatgtgtaatttatgatgaatgtacctataggaaccaccgagggcttcgtcactactggggtcttcgtgttcgtggacagcacactaagaccactggccgcagaggaaagactgttggtgtctccaagaagcgatagattggttattcacttctcttttcatttgggttgttttgtttcaatgttaccagcattactagtttagcgtccaggaatatttttggatatcccgtaattttgacttcagatatttcctttgcttctctcataaaattttaatggattttctatttcttttagtgtcatttagttttacctgtttggaaggaagtatgtagagaacaagcaaacgcagttgctcgttatctttttgaatgttatttaagaaatctgagaacggtcaatggttttctgtgagttatatttcattggctccaactggtttaatttttttagattcttttgcaattctgtggattttttgtggatgattcataaccttttcttatcatgattgttgaatttgaatctttctgttttgatgttttgcttgcaactttatttgaatcttgtgggtttagttttttcttatttgtgataatggctctatagaacaaaatcctatggttaagattcttattttgttttgctaaatcatggttcagattcaagaaaactaatctagttactttgtgtacagtagtgtgttcattgattggtttggttaggttaaagagattttttctcgtccattcaaacaaaaattagtaccaagttaacctaattaacttgttttcttactacatctaaaaccgtaataaattgaaaattttacattatagatatatgataaaaattacaaaaatattatggatttattttttatattgttttttaattttttggcaaagtgtattttttattttttattttgaaggagaattttacaataatttccatctgtctttttatatatatgtactgttgtttttttttanatatatatttcaaaaatattatactacttgttttagtagaatagaaaaataacttaaaaataaatttaagataatttaacaaacaacataaaaataattataaaataaaaaaatataattacattgggaaattttattttctatacttaaaaaattaatttttttttaaactaatatatatatttttttaaaaagaaattccaaaaatatcctcctcataactcaaactctttctctctcctccctcaaactctctgcatctctctctcgcacactctcggcatctcttcgaccgcaccaccagccccctctctcggaccaccacggctaacctccaccacctccgaccacctcggacccagctccctctctcgaacccagccccaccctctcttttcctctctctaaaatcgaatgaaaaaaaaaggtccaggtccgatggtcggaccatggggtccgagagaggagggctgggttcgagagaggggggctgggtcggaggtggtggtggtgagccgtggtggtccgagagagggggctggtggtgcggt

SEQ ID NO: 227128 - DNA, 2852 bp, Cannabis indica
aaaaaaaaaataaaaagcaacaagtgttgccttcttagtcttagagtttaagataagtaaattaagtatgttcaactcatgaaaactaaacttcataaatgcactactttctttaaaagaaagttttgcataaaaaatttaggggaagtcaatgagaatttgggggaacatgctccaattttattttccttgtcacaataaaaagtcttggctcaaaaggcaagataaattacgatggttgttaccagttaccactacaatcttaattagttaaaaacattatgttggagttcacacttaacagaacatgctatactaatttatgctatattatacaatttggtacacgttcaaattcaaagtgaaaactgtatcacccccacgatgatcttaattgcaagggaaattaaaattgggtttcttattcttatttctaacgccaaatcctttacttcaatactatatacaactatgaaaagttactacttccaataagcaaaacgacagacaatagcactttgtcctattcacaaaatccatatcagatatcaaggaaaaaagacaagagcattaaaagcatatttttaaagaacgtgatcagtaaaaccactacagtctcatcttttcaggataaaactttcatcttctttcattcacttcatatccattttccgttaacacaacttcaaaaaagtacaatgaattgttaacaaattacagcattattagacaaccttgctggtattactgtatacttctggataaaatatttttcttgacatgaaaaccgagcagcttgcccagataattaagctgaactcaattcaataataggccactaaaaaaatacatatttttgcaaattttcttagttcaagcccatttacacttgaagactaacaaaatataaatatactaggcaattaatacaatcatgcagtcttcttcagcaacaaatacagaaacagtactaattaattaactggaagcatatatacacactatatatataaatatatgtaaaagtgtggaaagagagaagagcctaccaatagtaggtgaaaggtcatgatgaacacagttggagatgaaactgagcaaaatactactctttcccacaccagaatcaccaatcaaaagtatcttaaacgagtaatcgaaatttccattcccaacttttgttaacgatcccatatatgatcacttttctataccaaccgaaaaaagaagatatatatatatatccaaaatccttactcactcttcatttatgcaaagttggtggtgattttttttttctctgtctttcatgaattaaaagaagaagaacccagaaaaataaatggcttcagagtcacaaaactaatacgagaaatttcccaaagttgtacaagggagagggtgaggttttggcgggtaggatatggaggtggtgagtacgtaagatagagactgaatcagattttatgtaaactaaattaatatgagtaaaagaaatgaaaaaaaaaatcattatttgggttttagttttaaaaaattaataaattaaaagggaatgtggaaaatatttggacaaatgtcctcttttcttggactttttctaagacgtccttgttacagctccacgcgcttttgcaggcggggactgtactctctctggacttaaatttgtcctttaatcctttgtccctttgctttgtgacaatatattatatgaacattttccacatcaagtaaacaagataattaattttactataaagtagaaaataattttagatgagtccaaacaaaatattaataaatctgtggtgtattttttttcttttacgaaatatgctttaggggtaaataatttatgttttaaatttagttatttccaaggattacatattatacaatatatacattaacaatgacccttgaattaaatggcatattaaagattcataaattccctggttttggtttgggtgcgagagtgtcgttttacttgttattaagtagtaatctctctatcaatactttggtgctgtgtcgtttgaattaattttgttcataagaattgtcaacgtactacgccgttttgaaaagggagtctctctcatttaaaagctttggtttaattaaggtccccctgttcttgtgtttaagggaggtccctatacgatgaccattatttctttttagtattaagttcatcgatcgaataatatatattgtttgcattgatgtactctaaatataatcatcaagctgtataattaaccattattaatatgaattagtattgaggtaggtggctcagtgactaagggagtacttattagtttaattaatcaaacgataatttgttaagaagttggtagactttgataaatcactcctaaacacgctatacctagcatgatagcatttatatacctaaaataactaattttaattataaaactatttcattatttaattattcaaagggaaatcgtcatagttcacccaactaaaagtttttttttttttgacaaacacccaacataaagttagataagggaaacatggagaaaaatacagggttccatattagaaaaagcattattaatattatgtggagttttaattaattttagatgagattttggcggttaaattctcttaattatttttttatttaaacttgattttttaagtttaaattttagtagtaaaatctttaaaatcactgaactgttactatatttaaagtgtcattcaattaactgtcatgactgcttatatgtacactcttgtacatgtgacacgtttatattagtacacttaatattattattcaaaattattttaaaatttatttt

SEQ ID NO: 227129 - DNA, 5280 bp, Cannabis indica
ccttcagtgtcaccccaccagaagtcgcgaaggagcttatcgatcttggtggccgtggtaatagggataacatccgaagaggctacatagttggagagactcgaaccaacagctttgatcaagcaagtcttgccagcagcagagagcattttcattttccatccttgaatgcgcttgagaacccgctctaccagaaactgagtatcctccgttcgtctaattgatctgaacagaggcagccccaaataagttgcctgcctattcattctcttcatcccaagtatgtctgaaattgcttgggccgttctactcggaacccttttagagaagaacaccgtcgatttttggagattaatggattgcccagagcagttacaataaaggttgaggcagtccataaatccctgcgcctctcgaaccgtagcttgaccaaagaggatgacatcgtccgcaaacattaggtgtgtgatgggggagccactacgagccaacttgaaacctttaatgagcccctggttctccttttcaaaaagtaaccgcgataacacttcagctgcgatgatatagagggatggggacaacggatcaccttgtcgcaatcctcgttccgatctgaatttccctactattgacccattaagcagcaatttgatttcctcgaccttagtacaagctttaatccactccgtaaatgggcttttgaacccgtattgggttagaaccgtttgaatgaagtcccaatcaagcttatcataagccttctcgaggtctagcttgattagcatggccccccgtttacctcgtctcttgttgagggagtgtacaatctctcttgcaatcatggtgttttcagcaatatgcctgcctttgacgaacgcagcttggtttggagaaattagtttaggcagcaacggtctgagtctggaagcaatgatctttgagataatcttgtacgccacattgcagagagcaatgggacggtaatcagtaactagagagggagagtctttcttcgggatcaatacaatggaagtgtcattaacgaacctcggcagttcaaaatgtgtgaagaagtgggtgaccatatcaaccacatctgcattgaccgtcccccaatggtgaatgtagaagctcgtgggaagcccgtcgggacctggcgctttgtctcgccccatatcccatattgccttttgaatttcctcagccgctgggattgcgtttaactcggcattgtcatactcagaaataagtttctgcatagtgccttccttaagcggagtgggggtggggatactcttcttgaagatttcttgatacttgcggaggaagcattcagctatgcgattaggttccgtaatccactcacttcccggggtatctttgatacactggatgtagtttcttcttcgacggattatagtagaggccatgaaaaatttagtgctcttatccccttcttgaagccattggactcgggacttttgtttccaatgtagttcctcccttaacaacgcctctgtgagcttatattgggctctatcaacctccacaaagttgtcatggttccgctcttcagcctcccgaagttgatcacgagcatgttggacttggtgagataggtgaaggaaatgtgtcttgttccaggactggagttttttactggttgccttaactttgcggtgaaagttgatcataggattcgagtgcaaccttcctttccacgcctctttcacaacccaaaagcagcgagggtctcttgcccacatgttttcatacttaaactgccgccttttacaattcgcaccgcccagagtatcaagaagcagcggtctgtggtctgattgggaggccgagaggtggttgacaatggcattgggaaaaaggattcgccaatcagtagaactaagtccacgatcgagtcttgccctcttcattttgcttaccccattggagcttgacccccctttcgcccatgtgtataccggtccttggaaaccaagatcgattagacccgatctatgcaccattcttctaagatcaaacgcatatcgtgccatatttccattgtaattatagcattcattgtcacttagagttccattcaagtctcccaacataagaaccggatccgtggcattaaggactaaatcccccacctgatgccagaatctttctttctctgatttattaggagggccatatgttcccattagcctccaagatatccctggagggtccgatgttatcactccagtaattaaattcctatcggactgttgtatagtgcatttgactcctttcatccaacacattcccaaacctccggagagccccacaggtgggacataatggctatgctcaaagtgaagtcgtaagcaagtactagtgaatttatctgaggggaggcgaatttcagagagaattagtagctcgggtttgtagtgacgcaccaggtgcgctagttgtcgaactgtcgcggcattcccgagaccacgacagttccacgctaatattctcatggcgacattggagacttttccgggcaagtctccgaagccccaaaccgaaaatccacattattcttccctttgttttcgcgcaggcagtcattgatctcagtgatggtacaattggtattgggtttatggtgttgctcaattatgacaaaatggttatccaggtttaccttgagatcgaagtctcttccttcccaatgattgattgttgaactttgccctctcaatctggatttacccgattttcctcctttaaacgatttgggcgtggccgcaagaggcggttgatgtttcggaggcctccctcttcttttcggtgtgtccagattcttggaggtaccttgaatgccgcctctcccttttcctctgcgtctcgatggagttggttcttcgttagagccaggggagaaactcgtagctatctcttgagtagtctcttcggcagcaacatcttctttggggatcgaactgttggatccagtgggtgtcttaagattgtccaagttcaggttgttatgagccttagttgtattagttctttcatttgggctgaaagggaagtacttgggttgagaagatggaccaattacaattccatcagaggccttccttttcctaggcccatggagatgttcctcaactctaaaatcctctatgtcaaggatggggttaaatagagttggttctctaaaaaacttatcaattgttaaggcccctttcatcatctcacgggcctttggttgagcccagcactccttggatggccaatcaaggtattgggcctgtggtccaagaatagaattgttgcaaaatgggtcggtcctcctttttcgcacgtggtccgtttcgtcgaccccaccatcaacagaggtggtccctttcaactcctcaatcgagttagtactttggttgatattattgttcccctcatttgtctccctacttacagaaagattgcctcccgtccctttctcctccgaacctccaatctcagagcattcagcttggaggctttgggttaaggcgtgaatagcagcttttttggcagagtaacgttcagcggcttcttgcaggtcttgaacggagaccatttttgaattattaccaaaaggggctatctccccaatacccggcagataaactaggggcatctgggtaataaccatcccaggtggggaatcgccaacggagtcatcgtcctcagagacgattctcttcttccctggaagctgccgacggttctccctcatttcgtcagaatctccgttttgaatagccctctgaattttcaccaagtttcgggttgtaggatctatggatagctttttttgcatcacccagtcctgaaaccattttgcaagaggagtagagaatgttgatttttcaggagcttctttcttcaaccaaaccccatacatggggaaaaaattgccctcggcatctttaatcacggtgggtggcttaaagcaagtgctttgatcatgggtaagaataccacatttaaagcataatttagggagtctttcgtacttatactgtatccacaggtccggcagtcgttgtcttcttagataaaaaccagagaaaattggtttgttaagctctatagtagccctgaaacgcaaagaactcattcccaccacgtcttcgattccaagcgggaggtcaaacacaggtgaggctttggtagcaagctcctttaaattggataagttccaatagaaaggggggatgcggtcaatggtaacccacagtggggttttatcaaacttcacttccgagggggataaccaagcaggccaaggcataatgacaagtaatgcaccacacacaaaccatggcctacgggataagacattcagggcgtcctctctccgggcaaaggtgaactgtagaacaccatcctcaatctctttccacttccacccctttatagcgttccacgacagttttagggaaccttggatggctgattttcctagtctatgacggttgaaaatcttccccagtaatacttgattagcctcctgaggttcatctacctctccagggtttaaggagaaggtaaggtcattgtgggaaatttgtactgaatcttcaaagagccggcaaaccgttgcaggatccatctcgagctggtgacttttgttgagtgaattagttataacaacagatacttactggtctaaaaccgaacgaacaagagcgaacctctaacacacttccatgaagttagctcctatagagcattgattaaacagttatagttattctgcttatccattctaccaaattcaaccgttaccgaacgctttcctttcacaaaccccataagttgggaagctcatctttgagaatctatacattatttttcattgttattattaaagaaaaggtctcaaattcaatcagcctatcctggccactggataatagagtttgtcatagcaaaaactactctgtattgagtctattagtgttattacacttaaagaacgacttacatggtcaatctttaggcagtgaaaattattatactaagaaatataattgttaaaaaaaaaaaatagagaaatgctgaaagtactagtggtgccaaacactctcttatgtgttaatatcgctataggtctaattaaatatcgggttcatataatttaatataataatttttagaaagtatcgctagtcaatcacaagacgatacgatttaagggtgctaggcacccgaatagcaatactcaaaaaaataataaaaaaatat

SEQ ID NO: 227130 - DNA, 3470 bp, Cannabis indica
tgtctatcattgattttggagtcaggatgtgttccttagtttttgtgaaacgttctgctaacatggttgctcatttttttgctagagcttcttattttcctgcagattgtagttttactgagctttatatttgctcggagtttgagaatgtattgtcgaatgaaaaggacgtctttttcgttttgaatttcactttcgaagtatttgttgacaggaggatgaaaataccgatcgttagagaggattatctggttaattgctttggaaaacagaagaaactcccatttgatctttacaaagttgaagccatcggcgagacctctagcatggtaactgtcaaagttaaagggagaagtgcagtgcatgaatcctccggtctgcaagacaccggacacattctcgaggttggaaaaagcatttataacacaactcttaacatgtctgacttatcaaccggtgtcaacaggtgcattagcgatgttctttctttagatgtcatatttggattattaagtgtcatataaattaaccgcattttcccttttatttctatcttaagttactatatcctccaaattatccaagatgataaggatttggattgctgcaatgtattccgaaaatggggtcgagtgggcaccaaaatcggaagtgagaaaatggacgagatgtcaaaagcagatgcaatctctgactttaaacgtatttttcgtgagaagactggcaattcgtgggaagcatggcttgaaaaacaaaattttcagaagctacccgggaaatttttccccttagatattgtatggtcttattactttttctcatttatttttctagcttaattgctcataatttcagaaagttatttattcttttcgatgatgggaatcttaggattatggtgttaacaaaaagtatcgacgaaaaatctccaaaaagaggatagcaaacttgctccaccattagccgaactgatgaggatgcttttcaatgtcgaaacatacagagctgccatgatggaatttgaaatcaatatgtctgaaatgccacttgggaaactgagcaaacataatattcaaaagggtaaggcatcaaatcacaacaatgtattatatttcggtgtgttagtgttcgcgatagaaaaattcatcctttttgtatcaaaatgatgtattataagctataatgccctttggattttctttatttatccaggatttgaggcattgaccgaactacagaatctgttaaagaacagtaatcataataatgattcaatgttagaaagtttgattgttgatgctagcaaccggtttttcactgtgatcccgtctattcatcctcatgttattcgggatgaagatgattttaagtcaaaggtgcaagtttctgacttttcttatcttcaatacatctttattattaatttaattttgttataaagactaaaatttccatccttttttcggtggcagttgaaaatgttagaagctcttcaggacattgaaattgcttccagattagtggttttgatgttgatgatgatgaatctcttgatgacaagtacaagaagcttaggtgtgacatcgatccgattcctcgtgacagtgcagattacagtttgattgagaaatatctcctcaacactcatgcccctactcacacagtaggctctatctatttacaatgctgggtttttattcatatacatagatatgtacatattgaactgtttttaaaaacctcaggattggagtcttgaactcgaagaagtcttctcactcgaaagggaaggggagcgtgataagtttgctccttacagggaaaagcttggcaataaaatgcttctttggcacggtaagttgctcttcacctaaacgaaatttacaagtttaaagaatgatgctcggaagtaaaatcaacaataaatgctcctttttctcaggttctcggttgacaaacttcgtaggcatacttagccaaggactgagaatagctccacccgaagctccagctaccggttacatggtctcttgtctcattcttattcactctcttatcctcgttgctcatgtgtgttgcctaatatgccttttcagaatactcaaatttacctttttgtctttttctcggaatacagtttgggaagggtgtttattttgctgatctcgtgagtaagagcgctcaatactgctataccgatagaaaaaagtcctgtcggtctgatgcttctaagtgaagtcgctcttggagaggtctacgagctcaagaaagctaaggtgaacttctaactcgcttgttataacgaattttttaactcgttttattaacttcgtgtcatgttatcatttcattcagtatatggataagcctcctcaaggaaagcactctacgaaaggactcgggaagaaggtacctcaacaatcggaatatgtgaaatggaaggatgatgtcgttgtgccttgtggaaaacccgtgccttcgaatgtcaaagcctctgagctcatgtacaacgagtacatagtttataatactgctcaagtaagtagaaatctatattcaaaccgataaatcattgacataatcgttatggttgtgctcatactcgtcgattgtttatacgaacaggtgaagatgcagtacttattgaaggtaaggtttcatcacaagaggtaaaaacaaaatcggttggtcataatatcgttcatagtgtacagaaacagtttcgatgaattgcagtcttcgtcttaatcgtgatttagatctcattttgggggtttgttcgagatctaccggcttttgttttcggtactaatatgtaaagggggtgttaagtactgcttttgatgaacaaaaagtgtcgaattttcagcatttccttccccgaccgcacggggttgaattatgcatttttaatgaacactttggttctgggtgtttttttttccactgtgattgcaatgaaaaaacacaagtattaaatttcatgtcttccttacaaagtacggacttgccgtgatctacaagttacctctctttgtttatctttgattatttcaatccctaatatcttctttgcagtttcaacatctttcatctcaagatccttgatgttagacaaaactaataaaaatctaataaaaacttgaattttaatttacaagctgaaaaatacaaataaccctataaataactacaacagtgtacaatattaaagaaaaaaaagtctaccaaaattaacacctctttaggatgtgtactacaaacttttccatttatttaaacatacatagtttttgatattttccacttttaatccccattttggggagagctcatcatgtgggcaacaaacaatatactagtcaaagtgaccgtttttggtctttgaaacttttccttttcaaaatcgatttcactttaggtatttaataagaagagagttgaatagagattttgtacttatcccaaat

SEQ ID NO: 227131 - DNA, 1952 bp, Cannabis indica
atattaaataaaactaacactacgtgacttggcacgtaacaatcacctagtgtatataagtatatatacatgtatatataggggaagcaaatgtgtagacgtaacttatgaaagataatgacaagtcattgatatataaattaatgcatagacatatataaacctacatgtgtgagtgagatgtatacacatatgattttaaaatctctaacttaattaaactcttaagatatatagaatatatatatatatagatacatcaatatatagatatatatatgtatgatgaatattataaatcaatctctttctccacatgacattcattcctttattggtctgttatttttcctagctttcggtgctgccgtgttgcctatcctaaaacgatggatccaattaattaattaaagaatttacagatattcttattcaaattcttttcattttcttactatatattaaaataagaattatttcataattacataaaaataaccaacaaaaaaaattacaaaaatacaaatagtataaaattttaaatattttttgtaatttatataattttattacaaaaaaatataatattttaataacatatggtattttataaaaataaaataccctaaaatgtaaaaaaaaaaaaaaaaatactttaaatataaaaatataatttttttactttatataattatatatatattaattaattattccatatgtgttgtaatattcatgacattgtatattcatttttgtatatgtatacatgcataggtatatattctatcaaatattagttgaactaaaagtactacatactacttttctatatagttatgattttttggttatatataaagatgccaaaagctttgtgaatgtatagagataataattaagatgcaatttttgacttgtcggcacagcttaaatattatctttagatttagattcatgtcggttcaattcaagcaatattaattaataatattaacatttgctacttattataatgtaaaaggaacccttttttaaaggaataatatgttagcctttgaaagaaaaaattaggacttttttgtttggtcccatattgatccaatttgatgggtggtaagcttataccttatctatattagttataggaagactataaaaaataattactttgttataatataattttttgtggttaaatgtgatttttagtcacaataaaaatttacttgtgatttagatacaagttattactaatttaaagtacgtttgatattactttttcaattagatttttgttttcaaaattagaaaaataaaaatattttccaaaattatgttctatataaaattgttttcacttttcaacttttttgagaatcaaaaaatttcgaaaaaaaaaagtcactttcaaaatgtttttaaacaattttttttccttaataaatattttggactctgactccaacttagaccttgaaacgcgcagcctgacctcgtacccaaaccctaacctggattcaaaccacgaacttggaccccaacccaaacccgaacctcgaacgtcagacctagaacctgaacctagatcccaaccctaaacccggacccaaacctggacccggaccctgaatccactcccagacacagaccctgacccaaacccaaaacttggccccgaaccagactgtaacgtccccgcttcaagcctccattgggtgcttacactcacggaatgaatggctcttatacacaagtacgccactctggctgcttcatggactgatgactgaccctacaaaccaacacgagtgtttccagtgtgctttgtcctcacttgcacacttcctgggaagttttcccaggaggtcacccatcctgaaattgctccaggccaagcacgcttaattgtggagttccttcgagatgggctaccgaaaaacaagatgcac

SEQ ID NO: 227132 - DNA, 1895 bp, Cannabis indica
tgataccatgtagaagctcaaaggcagaaagaagaagaaaaaggcagagccaagaacagagagaaccagaatgaaatgccaaaagagcttaaccattatggttagctgattcattatttatatagttcagaaaaatacaaagtcattacaattaactaactcatttaacagaaaaacaaacataacaactaatctttaacagaacacctaactaacattggtattgacacacgtgttctggtttacatgtgccagtatgattatggttggcttgccttcccaattgggtatttccagtgaggacaatgcgtcgaagttgaggtcgcatttgcggacctgttatggtgtagaagttcctattcattaccaggctccagaagatgatgctgcaactgaaactagggataataagaatgggctaatcagtggttatgctcggatatctcaccaagtttataacacggttgaggattatcacaagttcagagacgccatcaatcaacttgttcaggacggaaaagtttgcaaaatgctatgatggaaatggaatagaaaagaaaaggtatggttgttagcctttcgttcaactttggaattgcttgtagtttgtgttgctaagcttaagtagtacaacgagtagcatatccgtatgtgttagtaatgtagttgccaaattaccgtatgtgttagtaatgtgttagtaatgtagttgccaaattaccaattgaatgttttatctatttttggaagttgtgaagggtacacatgaattgactatggaactcttaaggcggccttctaatttgatatgagatactaacatggctttaactggtgagggagagtagaaccagtagtctaataagaatttaatggttgaaaagattgtactatggctcaaatatgaagactaacttagaagaagggaagctttcttttaaggttttgatttcacaatcaagtgaaccacttgaggctagctcaagtgaaaagaaaatcacaatcaagtgtccttttggggcagcatgctaagtttggtgttcgttttgacactcttaggctaatcaagagctctgagctcgctctgactaaagtagaaactcactcttaacttcttttttgtttttcttttctttacaggcacaaccatttgacagagtagttaaatgaaggaaatctactttgattatggtcatactctgctgaaacgctaaagaaaccgatttgtttttaaattagttaacatctggagagagaaacaagtcaaatcgagaccttgatgtgttctgctgtagttggttatttatacaatttgtgtgaagagaatgagtagcttattaccatggtctctagtgggaaatccttatgggaaaagaacgtgtcaacaaaagtagagtaggagagtaggataggatggtagtaagttgatgtaattgaaaggcttgatgggctgatagttgctagaaaagcgttgttaagtataaatttatgtgtatataattcacattctgtaaatgtaatcaagtgctccaatgccagcttacttttagcagcttagtcacttagcacaaactaaacttcatttttgatacatgagatttggagagttactacacgcatattctcatatttttatgtaatgttcttttaaaaaggcaatactttatgagcaaacgcggtagtttgctactacaaaatatgatattcgaattcaagtctccttggtaagtttcagacaaagagcaatgtaatatggataattggacatattagagtagtatcaatatttttttgattcaagcgtttatatattactcaatacataacctgcgactcgaacccaggacttctaacacatcctcctatggccgcttgaggctaggagtatcaatatt

SEQ ID NO: 227133 - DNA, 6161 bp, Cannabis indica
tatgtatgtgtatgtgtatatatttctgtagcactataatacttgcaatatcagcattttctgtaagctgatcaactgtttcatcatttacaaccaaccactgccaatagctatattcctatactatgatcaaaaagaaatttaagtaaaagaacgaaattgaaaactgtggtatctttgcaaaattaatgggagaaaaaaaaaatagcaacctaagatggatggataaggagatgacttgcattgcaatagatttgaaatacattatgaattcatggagaaccacctctttccattcttagctgtctttagcttcatcaccagttcctcgcgctgagattcaacctcggcgtatttaaggctcatttccaaatagcgctcacgaatgtctcttaattctgcctctagatttgactttatgagttcatacttgtctttgggaactacttccccttctggtgtggactttttaggagcatcttggttctctgacaaaagcctgtgaagtaatagaaacttttattgagaatttgtacacaaaatcttcagaaataagtaaaattttgcatgctttagaagccatcagaccctagaaaaccagttttagagaatcaagtaaaaagaaagagaaaagaaatgacattgcccatttgtctttttcaatattcatagaaacactatcaagcaatgaaagaacgaaagtagaccatgtgtagattaacataaggtccctatttttattttttatttttggtattactcacctatcaagctgagatttttgcctgttactttcttctaacgccttagcaagctgatcctcaagtaactgaatctttgagccaaggtcagctccattactttgatggcttccattaggaatttcacatccaccaccgttctacaatgatagttgagacaagataagatagaagtttataaagctagattaaatcattcacaattattccccaaatggtttcacaaatgaatgaaagaaaagaaagcctaacgttgtaaaaccaccaccaagcttttggcttcaggctacactcattgagaagtgcaggttgcaggagactcatagggtattagactaatgattttgactctctaatgtaatgccatatctagagtgatacaaatgcaggtataagtgaagactctagtttgttatgtagcagactattttgcaacatcagttattgaatcaatgtagaattttcagatgtcctaacctctctttgaacttgtgcgcggtgagaatcctttttaacttcatgtaccaggccattccttctactatcacgacgttggttcccactctttgtcatctcgttctgttaagttcaaacattccaacaagttaatttctataggcttatcatcaaatgtcaaatcttaaacatgaaaataagagtagatgagtacatacctttgagatctttgcagtttcatggactgtattcactttggcatttgtcctggaaacattttgagacttgcgactgctgtgctccctctgataatgtttttcttctttcataaatttaatttcttcttcaagggcttcatattttctttgggactcatctctctcttcctgatattgcctgttttcatgactgatttgatcgagctcttttttcatcccagcatgtaattcctcatgttctaataaagcactttgcatcagcgaaatcttttcctccaatattgagatcttctcaagtaaatcattcttctctgccttcagattcttgcattcctcagatattgtatttacggatgcctcaagtttctctttctcaaacttggttgcatcaagttcaatcttgaaagcttcaagttcaccctcgagatgagataacttctgcaactgaaccttcagacaggaagattcgtctgccagtttttgtcgttcatgttcagtaactgtaagcctcttttcaagatcatttacattggccttcagttttccttcacctgatttatagtactctaatagctttgatgttttttcatggtcttccatcagcaactcctggttttctttcgaagcagctagctcactagagagacattttaacttcaattcataatcattttgcttgatgctgagctcattctcattttgtttatatttagactgaatttcatggacttcagattccagttttgtgttctcagcgcgtaatctggatagttcccgcatagaatcagaagctatcatttctctttccccgtgaattgcagaaagtttctttaccagatgttccacctcttgctgaagattctctgcttcatttaccttctccatatacatctcatttaacaagctctgttcatgattaaatttctctttgtgcctcaagttttcatcaagaagtgcatctatttctgaagttacgctcttctctttagaggaaatctctaccagcaatgaagacaaatattgttccaattcatccacttttctggagcaatttgttaagcttttatgtgattcctccaactttgcctccaaaagggaacaatagtcctgcaactccattttttgcttcctcagttctccatttgattttctaaaggaattgcactcttcagtaagtctctcaacagtagaatttgactttgaattttctcttttcagatattcacattcttcaagagtttcagtcatctgattttgcattcttttaatttcatcttggagtgtcataacatgagatttggaactctgtaaatccaatttactggattcttgctcacctgccaaatactttagttgagtttccagactagttacaagtactgacagctgcacattttctccttcaagctctgataaatgaagctcaatttcttgattaccagtttgaagctctgaagacattctttctagtattttattagcagaagcttgggaatccacactgctggtaattaccaccaaatcatgttgcaaatcattaaaactcttagaggtgacatcactttcttgtagcctgacttccatgtgttcctgtagctggatgttttctttttgaagttcacaaaccttagcctctaattcactttggcaatttctgagaatcaaaatttccttttctctagacagcaagttcatctgaagtttctccattccagacttctttgcagccaattccatatccatttctgtcaatttagtttctaggtccatatccgagcacttaggtacatgaaatgaaaaaccgtcatccttcgctgtctcttcagcatggtttgttttcaattttgggttactcagttggaattcaaatctggtggaaggattagcaaaacactcattgtgttcaaaatcattagaagtacttctcctattcaaatcattctttgattccttgagcttgaacaagagttccaagttttcttcagtcagctcgttgcagtccctctctaactcctgcacctttcccttcaagacttcaatctcactaatcagatcttcatcacaatcatttgctgatcccatttttgtggaatgtgtgagattgagagactctgataactttgctttcaaactaacaatttcttcttctttatcaagtaacttacattcatattcagcctcaatatccgtacaggtttcatcgttgagattccttcccttctctatctcttgatttttctcctccaacgcctgttctagcagtttgactttaatgatcaaattcttttcagactcctgcaactggtggagctcatatgttacttttctattttcctctatagcttcttcaatggttttctcagcatcactaaacattgattgtgctgctaggagattttccatctctattttctgcttttcaattgtatcttccagctcctggagaatagaaacgagctcaatgtttgattcatgacttttcttcagctgaagagccagattagcattggattctttttgaaacttcagttcttcttttatttctttttgagtatgaggcaagccttcgtactgaggcaacgaatcctctggcgacatttgtttttccgtcgatctatcaaatgacaatttcagttgctcaacttctttcttcaaatcatcacgttctgcacaggctgctgagagctccatgttcaaattagactgaagttttgattgctcagtaaattctgtcttcaatatatcatagtcaagcattagttttcgggcattcctctcccacatcttagcttctgcacgcagctcctcggttgtatcttctgcactagttgtcaaagaatatgctggaaactcttgccttgaattcacagagtgatttcccgactccatgatctgtgaattaaaagatgactgcttcaaatggtgactatcagaaggataactgccatgggaaacagagttttcagaactaattgaatcttctctccttatgctgcgcacttcgctatgatctctaagggatatattttcctcatctatggaaccttcaactgagtcatagctttgatgcgactctgatatagaaaaacttgtttcctgcaagccataagcaaatgttgtcatccatggacatgggtttcattattcaaatcatggatgtctacacaactctatattctcaaccaaactaatagatactgcactataaggcattgcttgttgttttaagaatgtaattttaattctcataggtcaataccaatgtctttaatattttaatgatcgaattgaatttctcatagatagtaagcttttataggtgtctccttttccaatgacatacaataaaatctcacgagtttgtttaaaaatagcacaacataaacagaaagttgttgtgtttctttctcttgtgagatcataggaaaactgctcatgagataaccaggctatgagaaaacaagctaggcacaatattttataggcatgcaatgcgaagaaatatatcggtggtttatatttacgcaaaattgtacctaccatatacatttttaaatatatatatttataaaacacccaaaagctcaaagttatgatgaaatgaaaatacaggcaattacgagagttaaatgttatgataccctgctctcaggttctcctggatgagatattaagcggtaatctttggtggaggagctaaaactccttgcatcagatccagatccatccgacttaatgtccacatcatgacaatttccatttgatttctccaaatcaaggtttttctcttttgaataatcatccctggaaagacatatacataaaaaaaaaatcataatcacacaaaaagatcagttatcggattaagatctgaggaataccacgaaataatagtaatactagcctggatttaattcgtggtgttaagcactgaatttgtccctgcaaatcagagcaacaaccaaaagaatgatatttctaaatagctgctttatgaatttcttgtgtaatcagagaaacggaacatgaaaaaaaaaatagtaatattactaacaataatagcaataacacatatgacattatgatgatatcattttcacacttgacaaacaccttagaataaatttcatatacatgtaaatattgcagtgctgtttcttaaagtattcataattgaacttgaaagtgaacaaataaatcgagatgggatagttcatcctaacaagaacaaatagaccaaaatgaacagaattttggtgataaggaaatatggtggtttaagccagacatctttcaatatgtgaactcgaattcatatcttgagaacagtgttcgcaataacactttctcaattttgtataagacaacttgagaatctatgggtgtggtcttatttctaaatgaagcataacatgtaaacagtcacaataagaaaacgacagagcaaaatgttttcagagtctagcattttcccagaagcttcttagttgattgtatttgatcaaaggtctttccaagctaccaaaagaatataaactcgatttttttaatgcaaatccaatttggagcagcgtgttggtgtaaacttacttgtaaaattgttccataactgcactttttgagtaaagagagactggtacagaagcagttgtactagtataatttgtcatattaagtgtagcctcaccaaggattccagatctagccgatccctgtttaaacattc

SEQ ID NO: 227134 - DNA, 7691 bp, Cannabis indica
cgttcttctctctctctctctctctctctctctctctctctctctctctagatttatcatccaatcaaatcacaggaaaaagctgcgattctctctgtttctctgactactttctctctctaaaacctcttttgtcctccggaggggattactgagcaatctgtggagcttaatctgcaatggagttgagtctgatacctttgagaacgaattgtttgtagatgggttcaatgtacgctcctttatgctcgatctgtcactgactcgctttgttcatctgtgagttttagggtttctgaactttttgctcgaaaacgaactaattttgtggaaggaaaaacttcgttattatcgcaaatgtctgcattttcttgatctatttttatatattgttttactgggttagggtttttagggaacctattgtacgcacattttgttgtttatttcactgataatgggtgtttgtttttggttttggattagattagcgaatttaggatttgttctccaaaaatagaataggtggttatcaacaaacatatctttaaatttagattagtgggttacaattttgtgtgaagtttcattgatttgaaacgcagacatgcatgatttattctcagttgcagaagaaaaaaatcaatttttaatggttttttttcttagctattatttgctgtactattcgacttatctgcatgaataaaaaattagtttaattggctggcatatagatatgaactgctttgttctacacatagctgtgaaaaagctttcgtttcatttatctgggtgtgaatgttgtggtgacaggttctaagaaatgttggaatatagtacaaaatgagccagacagaaatatcaaggatgaagccttcccttgtcccacttgcaactttgcttggtcgggagcttaggggcgagaaggatgagaaaccatttgtgaagtatggccaagctgctttggccaagaaaggagaggattactttctgatcaaacctgattgccagaggattcctggaaatcccctgacatcattctctgttttcgcggtatagtttcattctttatagctctttatgtattaaatgtgaagacatccactcattttttaatgcttcggttcggtgtgaggagaaagaaaattatcctaaaaaattgcttaacagctgaatacagctgactttgataagcgcttggttctgatgaggaggccaactaagatgttataactgaacagtgaaatgaattgcttaatttatttatttttcttgtattttgtttatgataccaattaggaattcttaaattagcagatatttgatgggcataatggtatatcagctgcaatctttgccaaagagaatttgttggataacatcctgagtgcaattccccaaggagccagtagggaagaatggcttcaagcacttcctcgagcattggttgctgggtttgtgaaaactgacatagaatttcaacagaaaggtatgtattaaaatttctttattaaacttctgttgcatttccttttcgacaacttctcacattgtaatatcaacaacaggagaaacttccgggacaactgtgacatttgtagtgattgatggctggactgtgactgttgcatctgttggggattctcgatgcatattggacactcaaggaggtgtagtttctctcttgactgttgaccacagactggaagaaaatgtcgaagagagggagcgtgtaactgcaagtgggggtgaagtaggaagactcaatgtttttggtggcaatgaggtatataatgccttttttgtgtacatttatttttttgcaccagaaagaaaagttatagaggacaatttctctggtttagtcccaaacatttaaataggtttatatggttcacaggttggcccacttcgctgctggcctggtggattgtgcctttcaaggtctattggtgacacagatgtaggagaatacattgttcccattccacatgttaagcaagtgaaggtaaattcatattctcttgttgacaatggtgtcatttactgtggtaaagcattatggtgcatgagaacccttctttattttatacttttcaattatgcagctctcagatgcgggaggaagactaataattgcttctgatggaatttgggatgcactatcttctgatattgcagcgaaatcttgtcggggactgcctgctgagcttgctgcaaagttggtggttaaggtgatgtttggtactcactttttctcaagatacgtcctatttatttatatttcctaagatggtactgttacatatttcaggaggctctaagatcaaggggtttgaaagacgatacaacttgtctggttgttgatataatcccatcagaccaacctattttacctccaactccaaggaagaaacaaaatgtgctttcttcgtttatctttggcaagaaatcccaaaatcctgttaacaaagctaagctttctgctgttggagttgtggaggagttatttgaagagggttctgcaatgcttgctgaaaggtattaaagacatatttaattcatctattgtatggactacactggtctgtgttgagttggatatattagccatgttaattcctgtaacttctttgcgaaaatacaggcttggtaaggatatttctctggatgcaaattctggaatcttcagatgtgcagtgtgccaagtggatcaaccaccagctgatggtttatctgtaaactcgggccctttcttttcacctgcatccaagccctgggaaggaccgtttctctgtacaacttgtcggaaaaagaaagatgccatggaaggaaaagggcgcagacctacagtaatctcatagtaataatcccccctcccttgattgcatgcatcatatatatatatatatatatttcttttctccctggcagtgtgagcatacttagttgttagtttttggtttgaaagatggtgattaatattattatagatgttttgtaagaaaatgaggttgggataacgaagggccagtagctgtttttcccttgttaagagtttgtgttggattctggtatgtggtctcagctgttggactgactaacgaagaacagaagtggtgtctaaagtggttgataaagatatctatggtgatatggtggtggtgtttttgatagctaacagcttgtatttgtaagtaaattgaagaatccatagtgatatgttttgatacaccaacacagtagctcttctactactatatatatatatatatatcccaactttaagctaacacctaattgcgcttattttgttggaactaagaatatataatattcatttgatttgattgataagtttttgcaattgtccacaaaacccatctcacttacatttatatttatatatccttgttattctgatcccatgtaataggcgttttaagtgtatagtatatttaatgactttatgactttggttcccattgtttcttttttgttgcgtttttgcaattgtgtttgttatgctcctatcattttcttttaagggtaacccataatgtaaagatcaatcaataaatatcgtgtttgtggttctatcatttattttatgtggtgtctcttgtcagcagtatcttttgactgtgagttgtgacaaatcacaaatacacacacaagtggaattcattgtttgtgtgaaagaaaccaatcaatgtggctgcttaaaagaaaaaggttctgtgtttatgaggacccattctcagcactctacatttaacaacattcttcatcttaaaaacgttattacttctagccgaacaacaaagagaatgaaaaacacacttgctccaaaaacacacttgctcctgttctttaaacaaaatacaaagttgcagataaaacaacatttctaatttgattcttcaaatcactagtagagttcaaataccattgctgaagctccgagaaggaatttggccactaatgaatacccagccagctgctaattttcctaaagactttcttggaaaagatacaattcatgaaaagctggttgtgagtttcattttcagtgtcgcagacagggcataaaacaaaagggatagtcattataggctcaaatgatctttggtaagtagatgagagttaaaaacttgccaatatacaaatttatgtttggacactaggagtttgttccacacagcttcaacataaacaactttttgagcaacaacaagagaggtataaaactgcttaatccaaaatctacctcactttttagcttgcctaaacgaagttttatcgtaatttgtctgagtttcagcagcttcttaaaataccaactcactcattgcttgataggaatgctccaaatgttttgcttcttaagatagatggagttgatccatctcacccaaaggcagtcttgtttattggagatcaaaaacttcgccatcaacgctatattttattgcatgccttctcgaaaccaataccacctaacttttttggaaggcaaaccttctcccaagaagggagatgaagcttactcctattccccttagcaccccagaggaagtcacggcagcttttatctatgacagctgtaattttataaggaagaatgaatatactcatctagaaatttctgattccaagcaaaatcgagtggattaattgagcacgaccaacaaaagataaattcctactcgtccaataattgagattcttgttcagcttgttcaagatcaccccacagtctgaagctttctattttgtagaacgaagatgaacccctaagtattttaaaggaaaagatccttcttttatttgcatcatatcaataatcttaatatagatgtcctctttaactcctctaaagtagatatgagatttattttgttcgcaaatagacctgtagaatcacaatacttcttgaaatcttcttgaactcctctcattgaattggtgttgcccttacaaaagataaccaagtcatctgcaaagcataggttagttaaccttaggatgtttacactgaggatggaacccaaactctttttttactgaaactttgggccaataatttggtaagatactccattattagcacaaacaggaggggagacatgaggtctcctttacgaagacatttttcccctttgaaagtaccctaaattcttctattcataaggagattgtagctcattcctttcaaatagattataatccaattaatatatatcaaggggaaataaagatgtttaagcagctcctccacaaagtgacaatctactgtgtcgtaagctttgctcaggttgattttcattatacatctcgctgaaatattcttcctagtgtatcctttgaggagatcctggaaaatcaaaatattatgagcaagaagtctattctttatgaaagccccttggttactgtgatcaagaaagggaagctcttttgaaagccttgtatagagcaccttcgaaatacacttataaagtgtattacaacatgctgtagttataggcctgtaatcactagctgttttcgggtcatcaaccttaggaagaagggagattaccgtttcattcaaagacttaggcaaaaacccatcctggaaaaactctaacacagaatgagagattttatttacaatgttttcccataactctttgaaagaaccagatccaaatccatccaacctaagacttttagaagagtgaatgctgaaaagggtattcttcacatcattcttactaaaaggccttaataaactgacttgttactccaaaattagatgattaccctgattcaaacactccagattaatctccttagtagtcgagctttttgttaatgattttctaacatgcaacatgtaatagactcacaagagtgaggtcgatcccataaggactatagttaattaccaaatatttaaattcctaattctatttggtggcaataaaaataagaaaatatgtttaatttctactaaaaacataaagaaacaaataattaaggtaaaattaacaataattaaagattagggtgattaattttaattgtatctactttatatggtttaacataatttaattctcaaattctaatttttatgtgatagcgaatttactaaagaaatttatattcgggctaggacctataaatctcaacatatatgtaaattttctactctcgtgataaattaaacacattggaggctttaagcataaaattttaaatgctacataaactatatactcgtcttatatcgaaacattgaaaattgggaaagaattaaatcacattaaaactaaaataaagtatcaaacaatctccattaacaccctaataaaaaagtctagatactcataatcattgtaaataactaaaaacaattaattaagaatatttttttaaaaaaaagtagaagagaagaacttgtcgagaaatattgataaatgtctgcagggctgcttctcgcttctaattttcgtactcccaaagtcgtttgttgaaaagtgttgaaaaatggcttttatatagctaaaaaaaataaaaaatctaatttttcgcagtttagaataggtgggccttaagcttgatttttggcagcaagcttcttggttccacgactaataatattttgaccataactctttcaatatttctcgaaattagacgatttaaaatatattgaaaagctgaaagagagatctagaacttttattcacattatttttcctcaaaatgaatgcatcatagtcaaaaattggcttgaagcttcagacttaaattttcgatcacaaacggaacatgttaagcatccaaaacttagaattttttaccacttatataatagaactccaaattccttgataatttgtcatattcatatcatttaacacgcttcttctcatttttaattcatattatgaattttaccattcaaacctgaaacaaatagaaaacaagcgtaattttgcacaaaattaagataatcaattaaaacacacctctaaaatactttataaaatgcatctaaaactagtctatcaaactcctcaaaacttaacatttactcgccctcgagtaaaaatcaacactaaactaaaaacaaacgaacacaaagcaagccttacttcaatttacaccacaccaccaatactcacatgattcaattgttataagaccaaattttcaatctgattactcccaatactcaactttagtattcaaactcgaaaagaaaaatataacttgcaaatgacaaaaactattgaaacttaatacacatgctcgaaatcaatccatcatgtccagtgtctacaacccgattatcaataaacttgcaatacttagtcttatccactaatgtcaacaacatgtatgttaaaatcaaaaggacttattaattgggttataatgtaagggtatatgaaaaatgtcatttaggtaatgatcattatgtttggtggtctggccactcagattgtattagtgctgttttgcaaaaaaactcttatgattaatgatattatctcacactcttttccctcttgaggttttaatgtcaattatcttgaatatattaactatttctttatttttcgatcgcctggaagggacaaaagaaacatcttgttctttcttcaacaatttctgatctctagtggacctct

SEQ ID NO: 227135 - DNA, 1755 bp, Cannabis indica
attttatttaatataagtatttactaaagaaaaatatcttataacacactacaaaatatttcatttttagtcacaacaaaataatttataatatactcggctggatatggaacaacaattaatacttctcaaacccttcaccaagaaagaataaagaaggctctatttagtatacctgaaactaaatctcctagcacagataggtttgagtctggttttttttatagttgtttggtcgaaaattggtgatgaactctgctatggtatcactgagtttttatgctcaagaaatttcattcaactcaaatttctctcataccaaagcacgataacccgtctagagttgtggactttaggcctattgcttgttgcacaacaatttacaaatttgtttccaagctattgtgctctcgtcttgctaaagtgctacctctgttggtgaatgagaatcaaggagcgtttgttcacgggagatctttagcatataatgtgatgatattgcaagattttttaaagaactacagaaggaaaaatatctctcctaggtgtgccatcaagttagacataagcaagacttatgatacggtgaattgggacttctttgattgaagtaattctaaatgcttataatctgccacagagatttgtgtcatggattatgaagtgtcttcgatctacttgctactcgatcatgttgaatgggagaattcaagggagcttcaagggtgagaaggggcttagacaaggagaccctctctcaccattgttgtttgtgctagtgatggaatatctcactcaatgtttacaagtagcagcaactaggaacactaattataggttccatcctatgtgcaaaagcttaaagcttatcaacctctatttcgctgacgacttgatattgtttagcaaagggtcaaaacaatctattcatgttctggaaaaggttcttgaagaattcaacagtgtttcgggtcttaacataaatactgccaaatctcatatttattttggcagtattgatcatgctgaaaaaaaattgatttgtgcaacactatccagctaactgaatgcaactatcctctaacctacctggggatccctttgagaccaacgaagtggaaggctgaggattgtggaattgtactcaataaaatcaagcaacggattcaaacttggactagtagacacctatcatttgctgggagagtctttgtcttaagaattattggatgatattcattctcccccaaagtgtgactaaagagattgaaagactatgcaggggctttctttggggattgaatggtaaaaagagcaaaattcatgtcgcctcttgggagaaaatttgtctcctaaaggcttatggagggctccggtttaaaagatagtgttagatagaaccatgctaatatagcaaagtacatatgggctatcaacaccaagagggacttgctttggatcaaatggataaatgcaatctacttgaagaacgtccccttttggtcctatgagctcaaacaagacactagtacgttggtattagcttaaaatttgcaacttgaggaaaagatttttgcttgctgaaattatagcaacaggaagcaccgacaagttcaaaactaggcagctctacaactattgaacttactacagattcaagtaacctatcacagagttatctagaactctttaattcttcttaaatatcattttatgctatggcaagtaatatataatcagcttcttaccagagat

SEQ ID NO: 227136 - DNA, 8253 bp, Cannabis indica
ctttaatcatgtagtctatttttgtatttttttatttctcaatatttcactttattttctctcactccacttatataaaaacaaaaataaaaataatcaaaagagttttattattaaaattttaaatacaaattgtatttttgtgtttttttttaatgaacgcacgcttatacatttctggtgaggtgaccagcggcactcactacaagtaacaactatatgaatttgtgtttttgggccccttctaatcaactccaatatacaagtcatgataaatgtctttgatgacacctgacagacttaaaaaaaaactacaatgaattaatacaataatgtgaagataaagaaagtaataagtaggagcacatggccaagcaaaaaaagagtgtcctatccttgtgttaatgcagctaattatgaggttaatgatataatcatgtgattgaagggtagtaaattacatataattgaatgaaaacttggttttcatcactagtaaacttgaatggacagacagacagttcggtcccatgccaataatatcattcattcattactctatgatccttaatatatgaccatcattacttcataatggatagggatattacttttttgtttatttaaataaattttttggtgttcaccgaaagatacccaaaaatctctatggcattatcaatctctatacttatatattcatttttccacagctaagctaagctaattaatatacattttctattattttaaaatattagctctaccactttaattaagaattaaacgtagaattttcttttacatgttaatatataacaattcatctaattttaactctgatacggctaaaacagaaaaaaaattattgtaaacaattttttttttttaaaacaattgcaaaactgttcacctaattttccaacttttacatgaacaactcatgttttatcaataattattttttgcattgagttagtttgtgatttttttggttatattacaagaagtggtaaatagctataatcataattgccaattttaagaggaatcttaaagtttagttctgtaattttactcttccttttctattggtaaaaactaaaaagttgaggagggtaacaagattagcatcaattaaagttaaggcattcctttgccttgtcattcattcggttagttttgattactacataacatgaaaattttcccaatcaacttccaatttgaagcttttcttttagaacaaaataaatcaaccatgaaaaccatggatcaaagttactaaaacaaccagaatctcccacctcattcaggggcattttcgttatttcagagcccaccttccgaaacctaaagccactgaaagtgaaaccaccaccaccgtttgccaactacccaaaattatataaagatataaaacggtcgcaataaatgcaatgtcattttcccttgcaattaactccaaaaaatccattaattttttcttgagtaaaattaaataaataaataattatttctcacatttcccggaattgcttctactacactcccagttctggtctcaccaaaaacctaaccccaaatctataatcccatttaaattagtttgatcatctatctcactatatatacacacccacataattaattactcagctgcaacttacatggttttctggctctagggcttttgcatttttcctgttaatctcatcgttcacatttcatcactgggtattggttgggcatggaattggagcggccgaggtcggtcaatccggccatgaccttcgacgaggtctccatggagcggagcaagaacttcgtcaaggctttacaggttcaaaaaaatttcttgaagaaacttctattttccgtgactcacacgcccgcacgcgcgcatgcgcatactgtttttgtgtctaggagtttcggggatcggatctgattgatataaatttcttgttttttttttttgagcttttggatctttcgtgcatggtattgaagtcaacttttcttattttgtttttgctgttattggttgacttaatgttgtggactgcattaatgaattggttttggaagaatgaaaatgtgagaaatagttgtattgattctttgaactaacttgttctgatgtctatgagaggatgaagattgagaagagaatttttgaaagtgtcttaaaagttacccttggaacatttattcaagattagtgagttggttgctaaaagtttagcatttaattgcttttgatgtttggttgaggttctttatgttatgtctctgatggatatgtatagagttggttgttaggaattaagaatatattattgctgttggagttttggtattctggaaagaattggagaaacagaaaattgttgtatcctacctttttcttccaccctagttataaaacttctgttggtattctcctgttaaatttcctttctgcaacatggttactctgtttgaaaagcaaagtcggattatttcaggaactcaagaacttaaggccccagctttattcagctgcagaatattgtgagaagtcttatcttcacagtgagcagaaacaaatgtatgattatcttcttattgtttaatattttcttgcaagctgtaatacaattccattttgtctctctttttttttcttatctttgttcgaatgtcatgggatgtgcaagctgatcatacttaacttaagatttatacaaaaactgaaaaacatgagtgactacatttatagtaaattattcaatgctcttgtaagacagaaatctcaattggctgcttggatttgtagtgaactagtgataatatttggatacatgcattgcaatcattgtttgatgaaagttactttaaaattacgtaatagggtactggacaacctgaaagattatgctgtacgggcccttgttaacgctgttgatcatcttggcactgtggcttacaagttaactgaccttctcgaacagcaaacattagacgtctcaaccatggatctaaaagttaactgtataaatcaggtgagtacgtgatgtggttctttgttaccatagtaacaatgtcaaatggatggacatatggcatgtctgaacaagtttaaactttgaatgttagcaacttcttacttgcaaaacgtacacggataaagaaggtcttaggaagcagcagttgttggcattcattccaaggcatcacaagcactatgttttaccaagtaagtttacttgccatagcatcctataaaatttgattttggtgcaatatctgacttttttctgtcgcttgtattcatataaaccagattctgcaaataagaaggtccattttggtccacttatacagacagatgctaggcaacataattttcaagctagagctcgtctgcagccttcaagtatgtagattccggttgattcagctgtctgcattccagttctaagctactataatttttgtttctgttattcacttctttttttcccataaggttctcctgcatcaaaaacactttcctggcatttagcctcctcagaaacgaagactactttaaaagggaccttacaaactccaacaaagtgagtgcaaattttgctatgagaaaatagttaaagcttcagtagtttttgacgtttgtttttttttttaatgctccctcttcaatgggggttgttttcttatttgcagcactgaggatacaaagaattctggaaaatcttctggggcatttcgtcttttaggtatgtagaataatcaaagcattgccagttaaatgacctatcgctataattgagctttggttgtataatttaatgcctgatttgacaacctcatttgtttctttctcagatgatgaaaatggtctggcaacaaatggaggtccaggttccaagcaaatattgggtgctactcgcagggtatatacatgcttgcctttttgaaaatgaatgattagtataattagtttgcaaaatagcatagttttcagttgatatgcatatttttaggtatctcttgtttgaaatttgagatacgtacatggttgcttatccttaaattagaagatattgcttggcgtattatttttcttccaaatttccttattcctgttttacttctcaaaacagagaacatcaaatgattagtatgatgtctctttttgcaggatgcattagagggatcaaaacctttgactgctttcaggtcttttgacaaccaaaatcgacaaattgtccgtgcccctgcacgcagtaaaagtgtactatcagctttctttgtcaaacataaaacatcaaaactgaaagctggttctgtatcgtgatacctctagtgaaacaagttgaaggatcgaccctgcaaagtctctgacctctgtgggtcgagtaatgagtttctcacactgccacactctatctttttgcggatcagagattcttacatggctaattatcatatcaacaccttggaaatcaattttacccttctttcctcctaccctctttttgctgcttaacaataataaaattgtgcatataagtcctgtaatgttgatattctagtacactcgttggtggatatcttgttaatgattaaagtaatgtctttgtgcagattactgcatcttttaaaaccgtcgtttatgtacttctctgtataaatgtcttgtcttcattaaaagaaaatttatattgattatgctcttttattattattattggctcaaattttatgttgattatgcttggttacgttggttgacacataaaaatgagagtaggattgcagtaaaaattaataagagtagcaggggatctttgtcattaccattctactgccacaaacctagagttttatttacttcgttagagttgatgaaaagttgtaaaaaatccatctggaattatatccttgtaagaagttgaggtcaataatataattacacgtagaagcatgtatttgctcctcaaatttaacaattttttttctccttgcaaactagttttaagttaaatccacataaatattggcttgaaccgaattaataacaatcttcaccaaatatgggagcgtaatactagtattattttctgaatggtttttaacttttaaacttggcattcattcattcaatgtgaacatgcatagattttaattccaatccagctctcacttcagcaccgactaaacccaaaaaactgtaaaatagtcgaatccccaagaaacgaaaaaagaagatgaaaaagttctcatcgtgtagcatgaaccgtccgatgtactgactgggaattagtttgacttgacagatccgatctaatctaaattcagaagctccatcatcaaactcatatttttcaattctaattctatagctcaattgcagtgacttgcttatcaaatagaaaggagaaagctcttcgcgcgaatttggctcattttagtccatgctagcttcaaatgtcggcaaattctgagtgacccatctcgaatttgagccattatatactaaagattacaacgtttttttttgagcgctatgtcgttcttgcaccagagatcgattcacaacccactttcgaatccatatccactttcccctcgttcctcatcgtcttcgaacagatccttctcccttttcagccgcattacccttttggtcctcttatctctcctggtgatcctcggtgtctttttgccatgggcggacatgcctgagggattcttttcaacggttaggccatcaataaccaagtggcacagctacacactggctcaagcggcgtcgtttgttgcgaagaatgggactgtgatcgtctgcgcagtgagccagccttacttgcctttcctcaacaactggctcattagtatttctcggcagaagcatcaggacaaggtgcttgtgatagccgaggactatgccacgctctataaggtgaatgagcggtggcctggccatgccgtgctcgtccctcctgcaccagattcccaaactgctcacaaatttggttctcaggtatggccatggccatttttctgattatgaactttgttttgatgttttatgcttttctttacaaaatattatggacgtgatcataggcttgctattgaattgtgaattattagtattgggtcatcctatagtcatatttatgcataccattgttggaacaatagggggtagacatcctatgatcttctgctgtccattttttatgttagcaccaacagtacaaggaagaaggaatgagagttttaatgatctcagttctagtaattttgagtatctagtttgttccctatatcattcttagatttgagtagagaacggagaacttaagtactgtaaagttttggggtcctgtttctgtttttgttgctggtttttagcgtgtttctgctaaatttcatgtaacggttttcctccgccacaagtaaggcttttttcaatatataacagataggggccattttaagacaagtggcccttgtctctctttcaaaaagtttgttccctatctgtacttggttcgactctggcaatgttaacagaacttatagttcatttggcttctctactcttgctcctcaaaatttacacaaatcttgtaccctttcatgtagggatttttcaactttacttcccgaaggccgcgacatttgctgcatattttggagcttggttacaacgttatgtacaatgatgttgatatggtgtggttggctgacccgttcccttatttggaagggaaccacgatgtttactttacggatgacatgcctcaagtaagtccacaaattttgctctgagaatttgatgtctgctagtttcaggtgttagtatgatcatttgagaacctgttatgtcttctatatgaactctagccattgactcattagggagatgatgctcatgtgctcttactgctcatcagtgtgaaagctttgatacctttagctgttgatcaacttgatctcttgtgtccaactgattaggaagtcttatcagatacttactcattgttgtattccaggtgaaacctctgatgcattctcatgctttgcctcctccagggaagaaaggacgcacttacatatgcagctgcatgattttcctccgctccacaaatggagcaaagttagtcatgaagaaatggattgatgaacttcaagaacagccttggtccaaggcaaagaaagctaatgatcagcctgctttcaactgggcattaaacaaaactgccggagaggtttatatttttatttgccttcctaatttaatttacctaatttttctcaaatacacagtatatctttatcccaggactttgaaggttctttcttcagttcctttcttccttcaattctgaatttacttgtctattttcagatttatatcacatagaaaactatgtggtatatttaaatgtatcaggttgtgaaaaggttcttataatcagatgtagtggggttttgtcttaggtggtgccctgcataaagttaaaaaccttctcaaacttgcgaagttttgccttgatagtgatagactctttgatgtggtgttcaactgtgcgtaattatgacaatgtatattgataattaatacaggtggatctgtacctgcttccccagacagcatttccaacaggaggactatatttcaagaaccaaacttgggtacaagaaactaaaagcaagcatgtcattatacataacaattacatcacgggttttgagaagaagataaagcgattccgcgactttggtctatggttggtagacgatcatgcggatgagtctccactgggtagattatgagattacaaatacgtgttgttctattatcaatgcctttctgttcaagcaatcaaaccccttactgtcccataccaacatctatgatctatctactggttttgaaggactccctttgattgacatgagtgacactagtggcatattggcaaattgaaacggtgcagcctttaattttcttttcttcgtttaagttacatttgagaaaattttgtaggggataaaacatcctcctcgatgaattatgccaagtggctgtaccccgtaaatgtagtcatattgattctttgtagtaattattttcttcaactttgtcttggtttccctcaaggcgtacttgccctctttttttgttcacaacactctcttattcgctgttttgatcgttgtatcaccatataaaaaccattgcataaa

SEQ ID NO: 227137 - DNA, 3693 bp, Cannabis indica
ctattagaaatgtgagatttacactatttcgataaaaataattgttagtgcttagtgatggacaacaatcttggcttttctaccctgtgaaatttttacgatttttcgatatgtgtagagtgagattttaagagaacactaacgaaaataaaaataaagaaaaaacttgttaaaacgacaagaatattattactttattttattatagatgaaaacaacatcattgtttaacaaataacaatactttaatgaataatttataaaacaacaacatttttttaaaaacaacagtaatttagaaaaataactaaaatataacataaaaagaaaaacgacaataaaatcataactgaagatttttttttctttttcgaaaatccatttttagaatccaataataagtgtcccaaaatatgtttttgtcattagttatattgtgggtattgtcccaaatagaataaatagtagagtattgaactatatataagaatataagctactccattcatgaccaattaattttgagatggaaccacctgattctcaacaaacaacatttttgacaaactgcaataatataattttttttttttttggtaagaacagctagttcattaaacaacgaaacggatgggaaccacagggggctccctccccatggattacagaagcactatcgccagaaactctagcagattttgctaaaccatcgacaaaactcagatcaccacgcttaacataaagaaaattacaataactaaacatctgaattaaatctaaaactgaaaaagaaagattaaggaaaatgccaatccgggatacaccttctaccattcaaggcttgagtagccacctttgaatccgacaccacataacatttgtgccatccttctttgtacgcccaatctagagcaagccaaatagcttttgtttcagcctccaaagcagagtatgccgaagcctttgttaccttgtaagcccacataccagtcgaaacattaaccatcaccacagcaagacctgctacaccttccttccacgaagcatctgtcattaatacaatgttagcagtcgactgattgcctttgatcctcaaaggaaccacctctgaactctcggatgctctcattgagtcacagtaacccgaccactgctttgaaatctgatgcagaagagacgggattaaaaccttacttccattgaaataatataataaaaaacgacaatttcaaaacaccagcaatacataaaaaacgaaaaagctactgaaaacgacattaatatatagaaaacgacaataaaatcataaacgacagtttaaaactacaagaaagaatatgaaacaaaaaaatacgtttttgtcgttagaaacatatgaaaaaacctcagaagagtcaaaggtcaacaacttcatacttaaaacttcatacagatctctcttctctgtaatgaatttctattaaaaacaagaaagagagagaaatgggtgttgaagaagaagaagaagaagagctatcaccatttgtaaaaacattttcttcatttgacaatgaatctgtatctgaatctgaatcaaaccaccctacaatcagaaatggtaacataaaaatctcatttttattcttgtcatctaattcttctaaagttttgatttttattgtgaataagggactacatggactgctgtggctcatatcataacaggggttattggagctggagtattatcactctcatggagtatagctcaattgggttggattgcagggcctttcttaatcttaatctttgctctaatcaccattgtttcagcaaatcttttatctgattgttacagatactcaaatcctcatttgggttttgaccaatatcgttgttcttcatatatagaagctgttaggttatacttaggtgagtgagattaccacttgttttgaattaaagtttgaatttttactcattgtcatttgattttatgatatgggtttcacttagtttcattgaatttttttaggggaaaaatcccaatatgtgtgtggagtgtttttgcaccaaggcttgtatggatgtgggattgcttataccattacagctgccaccagcatcaggtttgtatggatgctattgtatatgagattggttatggaacaatgagaccagcccagaccagactagaccccaaatacatgttaatatgttatttacaaagaagagtcatatttatactagtaatttgtggcataaataactaaatttaattcctgattgcaaataattaataggtacctaatcgttaagtgccaagttaatgaccacagggataatgactcgacacttaacggtcaggtacttacgtaagtttcagaaatatactctcaaaaattaaacttagatttttatctgcaaccgagagttaaacttagatatttaggccgcagattactctatttacacattaccaaaaacttttctagtgtgtggtctatcaccaacaagaactagtcttaacaagataatacaagaatgtgttgcagcagaaattgtagtattagaagtttagaacttaaaaatgccattgatgactagtacttatcttattattcaagcttgatattataatggtaatgtgttcaagtgattggaccacatttcaacacaatacacaatcatgtcactcagtttaattagttattatttgaatggatacttaagaaatcacatcagcaattcatgcttgaatggctttgtgtttattgttatatcagcaataaacaaatttttgaactttaataagttattggattcttacaacaaacttgttaaaccaagcctgaatggcttttatacaaatgttattgtctttgattttcaacatttgctccgttctaatgcagagcgatccagagatcaaactgctaccacgaaaaggggcatgaagctacatgttcatatggagatgttcagcacatgcttgtatttggagctattcagattgtaatgtctcagataccagattttcataacatgacatggctttctgttatggctgcagttatgtctttcatctacagcttcattggattcggacttggtttcgctaaagtcataggtaagccaatgagtagtttttaagctagttgcatgaacttcaagaattcgaaacttgttgttcggtgacttaattggtaattgcagagaatggtacaattcaagggagcataacaggagttccagcctcaaatatcgctaacaaattatggtcagtcttccaagcacttggggatatcgctttcgcctatccatactcggttattcttcttgagattcaggtttgatgtttaatcttaatctaaagcataaaaagataaacaaaagggtcttagaaatctttctaaggttgcgttcggttggaagtaatcaaatggaaaagaaaggaattaattttgattccattcttttatttggttgcattttaaagtattagagtgaatgacttttctactaattcagtggaatgattattccaatttaaaatgaaaagaaagaccattccaatgcaaaatgacaaaaatttaataattttttttctattccattcttattcttgtattttcaatctgcccaaccaaacataccgctaaattttggaatatggttttgtaatgaatgaatatgaaggatacattgaaagtc

SEQ ID NO: 227138 - DNA, 2106 bp, Cannabis indica
agaacaaaaagtttgcttttacaatacaaaatatacatatatattgcttcacttatttttttataataattaaaaagtataatttcagagtgtatgagaatattatttttatttacaatgaatttgttcgtttcaaaacaatatatatttttgataattagcttaaaaatgaatttgtttgtaatgttgtaaaattgaatcttttggaacaaataagaatccctaaataaaaaaagcatattaactttcaaattctaacgcatatttaaaagactttgaacctcaccatcatccatacttgaaacaataaatggctgatttattctcatttagttcttaagacccaagtttcggaaaaccttttaaaatcccttaagtaaagatacattgatttaaaattattttcacaagataaaataaggtcatctgcaaagcaaagatgagtaactaaaataatacacgtcgattatgaaaatgaaaatcaagaagctaagccgcatcaaaagatactccatttcccaagggaccttccatagcaacatacttcaaaaaagtagattcatatttccataattcttgcaagtaagtaatgataaaagatcagaaaagcttggctaatagtattaaatggttgtgtccatccaaactcctctaccatctcgaatggcataaactctattcttcactttcctcgccttaatactttgataaaaagaaatggtgttctcatctccctctttgaacagattcaccttagccttttgacttagaattatttacatgagcagatctataatgctctttggctacacattttttatcaacgagtaccaattatgctagtctttatgaagaacttcctcacaatgaataatttcttgcatatatagcctcccaatcatcaaatattgagaccaataacaattgaagtcgactagcctattacagacggaagagggtgaatcactataaaatcatcctgttcatttttatcaaatttcattttcaataaactggtttactttacgatattcttagtttacgatattcctagtttcattgacaaaaaatcgcgtcaacaattcagtgctttcattgtgaacagtgagcacgagagtgttaatcaccacttgccaccatggtgagtatgagacagatgaactatgaggaggaagacactgacatccccatgaatgaagaaaataatatggaccacctggaggaattttaacttgctgaacccgctaacgaagggacctctcagcgcccaggcaaacaactcatgcctcacgacaaaggtcaagtttaaggtgttggaaatttttcatcaccatcccatggtgtgcgatgaaccactaatgttcatgaggcgttcatggaaaacaaagtgttgcgccatgcctagatgagactctcagactcaatagagagtgaaaaaagagaaataatgcctaagaggccacaaggccacatcaatgtggatcccgtgggagtcttggtatggtgagaagaagatggccccatggaagtcgcttaacacgtcatcctaccaaaagttatgagaggtttaggtcacaaacaatgacaacacaaagctgggataccacccgtaatactgtgcctcaacaaccttctcgtgagaatgataccatgacaagaggaatgaccgccctccaccacaacaacggtaacgagtaaccaccttaggtcatgagaatgaaagggatttagcacctcctcctatgcaacatcagacctggagggatgtgtaagaacctattgcccctcataacaacgttccacatcccccacaaaagggctcccatgaggaatgggacacaacacgtaataatgtagtcctgccttctcatctgtctcctattcctagggatattggtattgatgagggaggaagagatcgtgtctggaactctccttcgccaattaggtttcccccatcaccaataaggaatcctgagcctcctcatactaatgcaccaccaccatatcaaccagcccagagacagagatgacgacttagggaggcacctcccaagtcaagacttacctctacctccttgagacaggcgagaggactcacgagat

SEQ ID NO: 227139 - DNA, 1869 bp, Cannabis indica
atatatatatatatatcaatttgatgaattaagcagcttttttgcattggattttcgaagcctcctttcctccgaaagtagctttgcaaacctgtgtaataattaccatattatattattatatatatatgtacaatataatctaattaataatacaataataatgattggtaaatgaaaaccttttgagttcatcctcattggtaatggtggagtttggaattggttcgtaaagacccgtgactaagttaatgcgagaaagtggttttttgagtagcttcttccccacttccaccagattgttcaagttcgattttgttgctatgtccaccgaagataactcccctgtcaacgtgtcatcctatatatatatacatacattttgatcacgtcaagtgtaattatatggaaaacattataaatatatcaagctagctagttaaagttaattatactactttagttagctacaatctgcttaagtaattatagctagatctgaaatgatccataataattaatgcttttacatatttatagatatatattccaaatgtatatagtaagtctctgaatgatgttttgatcaaatatatatgaatattccaaatattattaattagctagagcaatattataagtttgttgatcaggtgagagccctattattagatagaattgttacatattaataaattaggtaggtaggtaggtaggtagggtggcattatatatatatatatgtataaacttacatcaattcggagatggttagcatcggagcctaaggcattgaaaaagacacagttatggtaatcgaccatagtgacacttgcattagagaaaacatcaattataggagtggagccatggtgataaatccaagataaaggcccccacgtggcacacgcattagcattgtatttctgttcagtcttgttggaacccgttcccagtgatatcactagaaaacgagtgaaatccaacggcttagaattccactcgaagctgatcatattgttttttgctatttgtttcgtaatttcactgatcgtaaggaaagactgaccatgaccatgcatgcatcaaaacaagaaaatgtaaattattatcaccacatgcatgttttaattaataataatatacatgcagttgaattattaataatattaccggattattaacagccacaccaccatcaatgagatgaaattcttcagtgtttccatccttatcttggttggtgaaatagtgagaaggaaggtatgttggagctgctgatgtggatatagcaatgtccgccagacgagcatctagggctgaattcgctggagcctatacatatatacatttataattattgaactaataatcaacatttcattctcgttaattggtagaaatacatatttttataagtaatttacagccaaatttttttatgttttaatttttatacacttaattttcttattttaatggatatgtctgagaaattacatgcactgtgacttggagtgtcaaggatgatcggtaatggttgtttgtaaaaattacaatgctaatttacgattcaaggcgatatatattcaacaaccatacatttgatgcaaaggttgattttttttgtatcttgctcatacatccattctttctatatgctcgacccattctcattattgctcaagctattaattctgagagtgaagactaattaaaaatttaataatgacagaaatatataagagagataggagtttctacagaatggtgagaaatctttttgtaaaaaggtggtgagattaccacactagctagctagtgaaaaataaaattactgatgtcatatgcctatcaaaagactatttt

SEQ ID NO: 227140 - DNA, 3024 bp, Cannabis indica
tggtagttcacaaaccggctatattattcctagtgagtatggtttatgtgctactggatatatgataatatgcatgtatctaactatgtcagtcacagttttcgtttagtaagtgacagtaaagaataaaaaacttgtgacagtgaagaagaaaaaaactgctttaagtaagagatgttaacgaaacaaaactgtttctgatgtttgtttcaggtcatggtggtgctcgtgcagctgaatacgtgaagcagaatctttttagtaatttgatcagccatccaaagtttatttccgacacaaaatctgctataggtttgtcattctatatctgtagtaatggttctaactcaacatgctattcaaaagggaaaagaaaagggctaaaaggaattctgtttgtatttctgcagctgatgcatacaaccataccgactctgaatttctgaagtcagaaaataatcagaacagagatgctggatcaactgcttccactgccatcctagttggtgaccgtttgcttgttgcaaatgttggggattcgagagctgtaatctgcaggggtggtaatggtaagactttgacattatatattctttttcgtgctaccttagctatgttattttatccataacacgaacttaaatcttttgcttctaaaaatttcatgttttaactttatttttctcctttttcattgttgccttttactttttatctgtcatagcaattgctgtttcaagggatcacaagccagaccagactgatgagaggcaaagaattgaggaagcaggaggatttgtcatgtgggctggtaagatttcagactatagatcttaaagttttctaatgttgtagcaaattgcttgtccattactgatggatttcatattgacaggaacctggagagtcggaggtgttcttgctgtttctcgtgcctttggtgacaggctattgaagcaatatgttgttgctgatccagaaattcaggttcatttcctaccactggtgcagtttattaacatgtaactgtatatgcactctataattccttatcatctaatataacgtaaaaacactgactttttcaccacaggaagaaaagatcgatagttcactcgagttccttattcttgctagtgatggattatgggatgttgtcacaaatgaggtttgccatggttttctaatcatgtctctgctcaattaccgagcacgttgagcttttcaactcaatttgattatttaacatttttcttttcttatcattaggaggctgttgcaatgattaaaccaatccaagatccaaagcaagctgctgagagactgatgcaagaagcataccaaagaggtagtgccgataacatcacctgcgttgttgttcgtttctttaccaataataaccaagaaggttcgtcttgaagtagtagtagtagtactaccgaccgagtgagagagtgagagcaccccttttctttgctgcaaagcatatttgatttcctgctaagattgttagaatgggtgcgctttgctgctaataaaattcattgctagaaaagttttagcaaaaatctatgtgatgatagaatagtatttgtataaggatagaggctcgatcgaaaaacaaaaaacaaaccaaaaaaaaacactaaacaatttactactactagtaagtactaccctgctaatgtgtatttacgcttctttcaaattcactttaagtccctctagcaatagagaattaattgtatttttagtctactttcattctgtatttgggtttctttctactaagtgtagctgaaatatatatatgtatttgtttgttttgtaaagaggcttacgtatgactaaaattcccagttctcattgttattacttgtgtaaatttggatttttctctctttataagcacatttaatttcaaaattgatctgattttagtgttttgatactcaattttactattatttagagatgggactagtcaatagtgtcatgttttggtgtttagctcttcaaaattttaagttcaatattgattgtgagaatttatatatttttcttggaaggaaaaattgtcatcttatgctatcttaagagtattatacaacattaccaatataatattatttctaaattacttaaatattaatttatggatcaaaaaccacttcatttagggcttattctatgtcctaaatgtaaaatttataaatggatttactttgtcaattgtgttttgctttcttttcaaatacaagataaactaaaagacttgattaataacaatatacaacattaaattaaaaatatatctaattattttttaccaaatacacgctacattagtaaagtactccaataacaaaacaaattgatatgatcttgatttgtttgcatttttattattaatattattattttagatgattcatcatttcttaatctatacatcttactatatgtgcttcaatactccaaaatgaacttgaaaaggaggagctcaatctcattttcacacaatattacattggatttacttgaatttgaatgtcctttcctaattgcatgtaaaagtattcaagaattaatagtatgcaacaatgatatacaagctttcgctctacggaaaacacattctgattgagtaatgcttggatttttcgaggatgaaataactttcactataaatcataaacaattataaaaacgagttggaaatatatttgtaacaaatagtaaattgaaatttgattcatgcaagtattttacccttaacgatcttgaaaacacaattaagatcaaatatcaaagtaccccatacgaaacaagaagtcaagattcccttgcttctcttctaccaaaatcccttcaacacaaaatttaaactcccttcaggtccaaatctaactttaactcttaaagtattcattaatataaaacttgccgcactaagaaaatagaaaaaatgttttgtcctaacaaagtaagaatctactagaagattctattgaagaaggtagt

SEQ ID NO: 227141 - DNA, 1688 bp, Cannabis indica
aaaaataatataaaaatatttttaattaatggaaaaaaaataataaaagtattgttagtaatcgagtgaattgtcctgagtctaatattatgtttaaacttattattgatgagattaatattatttctcttttagttgaagttgatagtggttcttgttgtgccatttcgcgtattgcgaatgatgtaacatacgaactaattaagtctgttactagttcgataggagtttgtatttagacttatgcttgtcttaaattcttaattgctcctattgatttattgtaatacattttcatgcttttcttaaaaaaaaaaagaaacttttccaatccaaatcaaattatatatatatataatggaatatacgtggaattatgctttggatatatcactattacacgtaacagtttcttctcataaatgaataaactttgttccgtaacaagtaccattatttaattgatcgaatacttatgggaccattgatatctcatctcatgtacggttaacttatatactaagattaaagtttaagatttcaataattaacaataattcgatcaatttaactattactttaatatatatatatatatatttaaggtgttatacttacaaattttacctatgaaaatcacaattttcattttctgcataattgttttgatgaattatatatgtatatatgtaaaagggtaggaattaagaaccaaaagaaagaagtgtctttattaattttcttatgtatatatatgtgacgtatcaatctagctagctaactactattcgtttgtgtgaccccattaatattagtacaccactattttgacaatagatgattcaaatactataagataagcttaaatattagtgaactttttaattaatgctaattattaatactttaatcctatacagacatatctttactatatacaaataattcagcttattaattactagtacggttcatatactatttgatgatatagagacaattaaccctgcaataagtcaatttaacttaattcaagatggtgacaaatatatctcatgaattaatatacatttattatggttatgctttcatatatatatatatatatgagcattatatatatctaccagtccaaactacgacggtttctgaatattattttctctacaaacagtacttctaattatgaataaaaataaaaatataagcaagaggaactaatatcaaaattcaaattaaaacatcttatgaaagacgagtattgtttagaaattaatgaattactgttatatagaataattaggaaatatatattaatcaaaatataaaaattattatatttatagaattaaattaaattaaattaattaattacctgatgagcgagttgagactggttgtagaagcctcgtcttccccagtctccgaccaccaaaaaattgagcgacctatcaggcttttgccacgtggtgtacacgttgaagttcaccaccattgatcacactaattagtaaactaaacaaaccgaccataattataatcatcttattattacaataaccacccatcgctatggattatatatatgtatatatatttatataatatggagagagagagagagagagagagagagagagagagagagagagagagagagagagagagagagagagagagagagagag

SEQ ID NO: 227142 - DNA, 3907 bp, Cannabis indica
tttttttaatttttttcatagtattatttattataattacaatattatttttataaatttttaaaaaattttaaatagtttacaaatattttaacatacattttcggatacagaaattgatagtgttatatgaaaaaaaataaaaagttaccgcataaaacagaaaagaaaaaatattacttttacattcatctacaataaacttacacagaagactattgtgctcattagatattaaaccagaaactgagccagagagcctttcacagcatggtcagctacaatagcattggttttctctgttgggtggaaagaatcccaaaatacatatttatttgcatctttacatgtaaaatggttcatcatatcacacaaatatcccatttcaaagaatcctgtcccacaacatgctactgctacatcttcaaatcctgcaatagtctacacttcatcagcaaaattcacagcatagtacaaaataatcgcccttcttatttattttaagtactaaaaggacttaccataagtagacggattctgaatcatgtcatagagaagaccatatggatctgaatacacaaaagaacttccaacaagtttcatattgagctctttaaccaaaccaattaacttctgattaaattgcttagctacatcattatacttttctatacattcacccccagataagaaatttgtagctctctccaatggtaaacagcccattggaggaagcccaccaatagatatcttcctacctccaaggctataaagctgtgtaacaaaatttctagcaatcccaacaagaaactcttggtactcctcaatggaaaattgagaagatcttccatttgggaataagaagtaattctctaaaaaatcatttgtccctatacttagcaagtatagtgcttctcttataacctcattagctttctcattgcctagatagcttctcaagtctttctggtattgcttgtaatactccaactccttccaaaatggtatcacagactacaaaacatattgagaatcaataaataaagctaataatttataataaatgtaacactattaattgttgaggtataattattttatactcactaagacttttgaagtggcattgtcataaccagttccagcagaagcaaagcagactccagtagcaaaatcctcaatggtataagttggatccaaataagctggtataattggtttgataccaaaagcttcagagatgaagtctgttggaatccgaccattagaaaaccttcctgtagccttgccaccaaagaagtcccggccatatggctcaaaattgctcttcaagagggtcgaaatcgcgttattgttacctgcatcgacagaagagtctccaaacacaattatggctggaacttttgcatgtattttaagaaattggaataaaatatgtactaagaagaaccagttaatagccttctctgccttcattgattttctctgttttttttaattttttctttcccttagtactttaacactaaattctaatgtttgaacgaaatggttggtggtttatggttggtttagctggcaagaaggatttgatataaatagaggtcgataaagttggttgggacttaaatttctcaagaacaataatggtttttcatttgtctttcctttctagagtaaaaatggattacaagttaagtgaggatggttagtggttggctcacccttttaagtataaccctcatagactaacatgaacttaactaaatcagtctacaactcttcatttaaagattaaaaagaaaaaaaacaaacaaacaaaaaaacggtgaaaagaagattgtttctcaatttgagaaacttctcctttttccactgctgtcctttcttttgtcattttttctccacggttgagctgtagttatccatatcacatgttcttcttagtagagaaccacctctggacttgctccagtcctgacctaaaatgtaagaaaagtaccaaaatgaaaaaaaaagtaaaattctgaaaaggggtacttttatatatgtctatatatatatggtgttctgtaacggttaagaggaagttagggttaagaagtgtgaccttttgagttagagcaggcgatttagatgatcaaccggggtagtgtgactgcacgttattgtgtctactgtctaaaaagtctctatagaaaaagaaaggaatctataatgagttataggatttaatcttttactaattcgatgacagagatagatatataaaaagaattacttataataataataattaatgacgttgagaaaattaggtaacattagattttttttttttgtaggaatcaaagctataaccgctacgcatttcagattcagaagctgggaaaagcaaatgaaagcacaaccgtttccaataaatgttttgtttgttcaattggtagtttcacgttgatttctataggagcaaaacaaattacattttcttagaaagctaggggtgttttgctatagttttttttaatcaataaaaaaaaattagactaactaaaaatgtgttcaaaaaaatatgttgtataaaatcgtattcacttttttaataaataaataaaaactttaaaaacaaaaacaattcactttcaaaatttatttaaataatagtttttttttacttaattataatatatttgtattatttttcattaatatattggaccccaactcagaccaggactcccgatttagacctagatccggactagacccgacctagacctagaactagaccctggaccagacccgaaccccgacctaaacctagacctagacccgaaccccttacccgactcggacctggacttggacccagaccatggctcgaccctcaaacccggaactgagcctcgacactagacctagatccaagacccagacttggatcccgacccgaacctagacccaaataattaaccaaaatctagaccccagcctggacccaaactctgggccttggaccataaccaaaatcctagcccagccctcagacccggatgagtctcaatgcttatcttataacatcagggccataactcatactatcctatggacgagtcaaaagggctcctttttctttgatttttacaatctacttggaaaaggtactggaggagtgacataagttggtacaactggtttgtacgactttttctgtgatggtggaccaactaaagtatgagattcaacctttggtagagatgagctttcaagggataaattgttgacttctttagttggaatcaaatcattaacttcttggtgtggtggtaattcaagttgtgtaccactttgtggcatggcgttgacattctccattgggctactctccacttgtgaaggaaaagtatttaaactttgaatttcatacccactcatatatgtttccattgactccggaagattctccaacttttgcagagatcgttgaaggctctgcataatttcatgacagctttgctaaaattgcaaggtattagctgctaacatttcaatcagctcagcagtagttggttttcactatatggtgcaacatgaataggttgttgaaattgtgcattatagtaagaagttggttaaacatattgattgacccaccgtaagaagtggtagaataatttccccatttttgattgtatgtcaccatgtttctaaaggaagatctagaaattaaaactacaactagaagaacaagttagtaaagctaaaactaactatgaataataaaataaaacagtagtccccagcaacggcgtcaaaaatttgatgcatgtcataagtcacaacaactttactaatatttatttccaatacctccaattatctttatgaatgtaatttcagtttccaa

SEQ ID NO: 227143 - DNA, 2182 bp, Cannabis indica
agagatttttagacccaccacgtcatcgcatcatacttttttttatatatatatagttttttttccttatggttaccaattttggttaggaattggttcaaagatactttgtaaaaaatagaaatatagtaaattattgattgtaatgacggatttgagattgtaatgattttgaaacaataaaattaagctatcttattcaaaaaaatctcatacataattactaatatttaaaaaaatcaaaaaaaaaaagttacaactttcaataaagcagcgaagaataagaagaataaaacctaaattttggttgaagaagaaggtagtcggagggacgacactgaatagaagagaatctcggtgatgtcaaatggtggtggagccagagggactacactgattagaattccccaaatcataacagtgagaagataaatgtgattatcttattttcaactttcaagaaaaagttgaagaaaggaaggccaaacagtgaagccaaacattaaagccatgagttggctagaattttcgactgtgagtagcaaaataatcatggtgtgaaggtgattattttagagaaagcaaagacgcagtcaaaaatagtcacaataagaaaaataataataagttattttacaagaagcaaatagacacagtcaacactcaacaatgttcattaatttactcaagtggcatgcataccttctttcctacaccaaaaatgggggttctggtccacccaaattggttttgtggtgattttcttcctcaatttacagccttttcaactaagttttctatgtgtttcttctctcagttcattaactcccacattaattgctctgtgtcttatgctgagtgtccatcccatctcaaaatctctctttagagcattaaatgtgggtatcttctctgcctttgccttaatacttccatctggcctttctctctatctctctcatccttccacccccaaatttcattattacttccgtctgtttcttcgattttggaaaaatggaggcggagctatggcacaatgataaattgaagcacaaattcatcatttttcctacttggcctacgatattggatatgactggtagatcctccaggagatctcaaggagcattttgggtttacctatataaaggaagttccaggtatcgtcttcctcacttccatccactttttcattttgtagccaaatatttttctttgtgtttcgtgtctttcaatatggatgagttctttgttaatgtctcgaattctctaattctaaattctgaagaaaatattgtttttacttatgaggtgggttctgttgagtctctggttaccataagtcttcttctttgtcttcacaccatctgtcattataattgtccttcccttatgaaaactctttctgaaatctggtcatcacaatgtcgattcccagttgttgtctctgaacatgttgatggtttatttcttgttacttttgggtgtgagggtgataaaggtaggatcttagagggacaaccatggcactttgctcaaagtctcacggtttttgctgctcctgatagtgcttttcctattcttctggagcaactccattatgttcctttctgggttcaagtttatgggattccttttatgtgtaaatctcatgaacttgctaagttcattgcttctgagattggtgatctggttgaggttgatcaatccactgtcagggagggtactgggccatatcttaggattcgtgtttttcttgatgttaacttacccattaggagaggtctgaatgttagatttatgaggatggggagagagatcatcaagttgatcgattttaaatatgaaagattgcttgacttttgctacttttgtggaaaacttgatcatactaggaagtattgtcatgctttcctccagaagtgtgattaaagtcctattcctcctccttgtccttttaatattctccttcgtggcaaagaaaaaccagctgatcaatctcaaccattccaatatccacacccaccttctatctctgtggttcaaatgcctcggggaggtttctcccttccacctgttaccaactatcctaccattcagttctcctctctatttccaaattatttatctgctgaaaatcagcttgctaatgcttctgcgactgctggcattatgattc

SEQ ID NO: 227144 - DNA, 1174 bp, Cannabis indica
ttactctcttttatatatttattacatcaccacctactattacattatagtattttatatcgtttgtggcaataaaaaagtaacgtaaaatattagttataagctatagagtttattatatatatatatatatatttcttaagtgtggttattcttttgactttcgaaccaacacatttgtatatccaattaataaagacttcctagcttaggagcaagtcttttacattttatataaatcccactttattattcaattctagttgaagattttaatatattatatagtgctgacaataattttgcttacgataaattttggttagtagttgtggtattaatctagatttattggtttattctgtgtgttagttttgcttcatcatcacatctcccactataattattcaatatatttgtagttttttctcagaagactttacaacccagaaaccttctaacgatgatgagcacaaaattatctttcatttctcataacatagtttttctatctgttagggaaaaatcactacaaaaaattgggtctataacgaggatattttatcattacaagtttaaatgtcctcggtacagccttataacaacgacatgtccacattagaaaaaactttctatcgatgacattaatgaaattctcaataaagactataccgagagcaagtgttgtcggtaaaagttagaaattttctcgatagtttcttttcatttggcccaactgactcgtttatactgcggacattgttcttgatatagaactttttatcgcgaacagatgctattttttttaaaaaccattttattttttattcattattgtttagcaaaacttttaaaaaccaataaaatatgataagctaaggaaatctgataaatgaagaatcaaaatagagttttatgtggttggggcgttaaagatcccacaagtcaatattattgtgtttggactggaaaagccttaagatttacataagtgttcgaaccctagattttgtctgagcactcaagcaatgagattccaaccctttgcatccctttgcatgaatgagttttcatatatttataatgctagggttctttcccactgatggggcgaatacaaatagtataatgaaatttgggttgatttggtaaggcccagcccgtgaggctttga

SEQ ID NO: 227145 - DNA, 3308 bp, Cannabis indica
aaagaggagtctggtctcgagtttctaggtgagagaaatctcactataacaacaatcaccagtgagccaccaacaattacagccacaccaacctcgaactatggcccccctaaaacccactctctacacatttaaccatataactatatcacccattgcaaatgaagttgaaaacaaaaaaaccatagaacccttcgaacttctacctcaactgactggacgctcgctcctatttctttaagtttttgtgaagtttttccatgtaggatagtactgtgggaactaaagatttgttaatactatagtagctcgggaggttcccccaacgaaggttaagtataccaatttcaatgatgctttcatcaattttagaactcagatggaaaatgagcttagctgagtttcaagtatttcattcatactttctcagtgttggtattaaaataattttaaaattcctgtttagcctttagataatgggatgaggcatttcgtgagtcaatcttcattattaaaaaaccttccttcatcagttctctagggttttaccacactccaaactctcttcaacaaaaaatcgtattataaagtaattacaattttagtatatttatattcaagtttttagcaataattaacttaataattttaataaaattggaacggaatccgatagttgtttaactggtttaccgaattctatatttttggatcgaaaaagggcaaatcgtctgaagcaaattgctactagcccaaattcacaacaaaattgacttccaaatgcagtgttttcaaaggttttatttaaaaaaaatggaaaaacagacaacagaagagtacgtgcttcttcatctagaatctcacctcacttcaggacaagtttattatctaagtcatagttaataagctcaatagtgcagctcaagcaatactggcagtccatgttttatcccccatcgaatagtaagatgaaacttccaaacaatttcaatgtttagcttagagcatagcagccaattcataatgaagtagtatacgaaatttaagatggatggtaagccattgttgtaagaagcaagaagatacattcaaataagttatcccaagatatatttacatatttttgaactcctacttatatacaagatacaaatggtaaaaagaactaataattacatggagaatatttttgcatcacattgtttgcaatcaaggacttgtgaaaagcgagttatccgacttgatctgatctgaatgttggtttttccatgaacttgttatgtctggctaaatttgtgattttcatccaaaggaaaaaaaaaaaaaggagaagattttcaagtcttgatagcaaatctttacaagaataaaaataaaaagttctgcaatgaggatccatctatatatatacatatatataaatatataattccaacacaaatatacgggcttattaaacttcttcctcacttgaatacgttggcttgtagcctgtaggagaagcttcgtgcttacataaggcataaaaatgcaaactaaacttacaacgaacaaagtttgtccatcatgcatatatgagtaactgcatcccaaataaatccaaatagaaacgcctatctccactcttaagttaatttcttcttatatatatatatatatatatatatatataatcaaagggtattacctattaatacaacccattcatacctaatacctatacatatattcctgagacaaatatatatcgtagtatcatgctttctcatccaagcatgctattaccaaatccttgtgtgcaatcaaattacagaaaacttgatacctgatcacaaggaaaccccagtgcaatggacaatggacgacccaaaggggacagaaagaaccttttctgaccaatgaatcttcccgtactgatccctatccccatttttcttcacttcaatctcagcacaccatatatcaatatctttccttctcacgttcctattctcattcctatcaaccttctcttcccacagcacaatcagcctaccacccacattcgccattgttgccccacataagaacttaggcaactctttatccacccccttgagctctttccattccccattcctaaaatcaaaccccttaatcttccccaggtaatcgtagctatacaacacctcatccacaacgcaagccctccctctccaacccatgtccaaatcaacgcccactccctcccattccttcctcatcgggctgtacacaacccctcctcggtccgccatagcgtagattctcccacccaccacggcgctcgcgtgcatccacttgtcccggacctcaatcgggctcggaacggcctcccagcgcccgatgacaggatcgaacacctcagcccagtgagctgacctggccgaagagtccaccgcacaacctcccatcacgtagatcttaccgtcgacaacacccgcggcggcgaactcccgacccacacgcatgctggggccgggctcccacgtgtggaagcggcagtcaaggacccacacgtgggaggtggggacgtcgttgactgagccgccgagaacgtagatcttgggacccaatgtggcgtaggcggagccgaccgatggggaggggattgggggaacagggacgatgagggcctggaaatgggtgtggtctgggagtgaattgtgctgtggtttgtaaaaagtgagccatgagaaaggattttggagggtgtgagagcgaagggtgaggtagaggaagtgttgggtggagttgaggagagagcgagcgttgaagaggagtggggaagagaggagggaacgaaaggttttggagacaagggagagggttgggtggtggcaccttgggattcgagccagacagttcaaggcgacgtcgtctgagagagaggggatgagcaccgccgattcaggagccgactgcgatgatgattcggtggtggacatggaagaaggtaggtgagatcaatgatcatcgttgcatctgagttacggggttatatgtattgctatgaaagtaattggcatgttaggtttgttggaatcattgtaatggaatcataattacaattcttggtttgtcttaaaaaaaagtggggataattttataaaattactatctattctaatattaattctaacaaactaaacataacaatcaatttctattacaattcttgttctattacactactattactattacaattaccattttattctaccaaactaaatcaaacaccacctaactaattcgagctcccaagaaggccgggtgagacaccataa

SEQ ID NO: 227146 - DNA, 6257 bp, Cannabis indica
ccggttttgcctaattgtaatgcccatctccaacgtctaccttcggaaactccgctaacctaaacacccccggcgcacattataatcctccaccactccactctcattcatttcatatatatgcaagctcgtctctttcaccatcaccaatattaccaccaccctcttatcctgcgcactctctcggttgccaccatttccaacaccatgaactcttctctcactcttccctcagtttctctcactctctccggttcgtcgaggagaagcttcaattgctcctcattttctagtttcggaaatggaattcgaagcttcggtcccaggaatctcaatcgatcgagggtcttcatgagcgtttcggttggatcgcagactgtggttaacgatggcttgttttctgattataaacctgcactcgctttcctcttcccaggccaagtgagtagttgacgtaccacattcattctttcttgctcaatttgtaattgattgagaattttgtttcattactattattatcatttctttttaatttgaaaatcttatatatcatgcaaaatgtttaattgttgatctagtttaagctataactaatcggcattttggtttcaatgatattgagaaactgtgaatccggattgatattaactgggtcgaagtttaagctccaaaatgtacgaaaaaactgtctcgaggtatattgtggctctacaatgtctaaatccgcaacagtggtttcggaaagtaacgagaagaaatccactgatgtgatattccttttcgtagtgacaatcatatcagatacgaacttgttctacgttgtcttttatttgcttaagcaaacacaagaatgaatcatggggttaactcttgtatggttttgttagttatcagcaattgttttctcctctaaacttatcaggggttgctttatgtatatttgtggatttgacataagagtaaaattagtcggagacataattcttgaatccttttgtagtgtgcgttggattgtgtttgttgtatgttgattcggtatagttatattgagctatattttgtgtcctgtctgtttcttatttcagggtgctcaagcagttggaatgggaaaggaggcacaaaatctacctgcagctttagagctttacaagatagcaaatgatattttagggtattgttcgtataattttattcactatattgatgccttatcagggaaacttttggttctgagtggtatatcttctttacatgcaggtttgatcttctagatgtttgcgtcaatggaccaaaagagaagctaaattcaactattataagccaggtaatgcaatcatcagattagtcacttatgaacattcttttcccacttcaagatgtaggatgtttaagtgagtgtgtgagtgaggtgaaatgcacatttgtgtattctgacgaggcattgttacagatcagtagtagtgggttgtttaggtacatggtagtaggtattgaatctcctgcgaataacaaattggttccacaaggtgaaaaactcctgtagaagctttagttggagtatcattctccttatgtttgtatctctgttatacttctatggactatagaaaggcaattcgcatatgcattgcagatacatgagatagaagaacaattggctttctggctaatagacgcctgctgccaggatttttgtttcatgactgattttgaaaaacaattttgtcaaagtttctataaatatatcttttttttctttgaaaggatgattattagttctttttaatgagacatgctaaattttttcagtaattccccatggagccctgttgagtaatctctccttacctaaagagttttcttttagggtggaaatggcattatatgttttaaattatataaattataatttttcaaatatacttcccactgattggcattggtttgcatttaattctgcatctttgcagcctgctatctatgtcacaagcctggctgccgtagagctactacgtgcacgtgagggaggccagcaaatcattgattctgttgacgttgcatgtggtcttagcttgggagaatatactgctctagctttttcagaggcttttaggtgagttgatcaacaaataaacatgactttcacagctgcgtctatgtttcaatatatggtatcaaagctagaaagtttctgaatttacactaaggcagaattgaatgtgtgtacaaccatacatgtatgggcatctccagtaagtaaagaaaaggtacaaccatacctttgtttgattaccgggggacctcatcagtgctcatggaagtgatgacacagctttattcatcaaaatgttgctcttcgaattttttttaagtgctttatgttttttttaggaaactaattcactggtatacaaactgtcaacaaaactacttagtggttcttatatcccttcttttcttttctcttctcgatttgattcaatatggaagttttgaggatgggctcaagctggtcaaactacgaggagaagccatgcaggtatttatagtttgactagtagcagtctaaacatttgtactctttgcatgcttgagtttttaatttaccctagacactgaaattctttattcccaactttctcaaaggaagctgcagatgctgcgaaaagtgctatggtcagtatcataggactggactcagaaaaggttcaacaattgtgtgatgcagctaatcaggaagtcgatgataaagacaaagttcaaattgcaaactacctatgtcctgtaaggactttctatccaccataataaagccaataggttgttaaatgatcactttaagtattcaaccacaatagtaaatgcatctacactactcatgtcagggaaattatgctgtgtctggaggtttgaaaggggtggaagcagtagaggccaaggcaaagtcatttaaagctcgcatgacagtatggacatttccactgcagcttacatcttttttctgttcttcatattaaatggcgtaagtcatctccctttcttgccccttctgtgctcaggtacgtctagccgttgctggtgctttccacactagtttcatggaacctgctgtatcgagattagaagctgcattagcagcaactgaaatcagaactccaaaaatgccagtcatctccaatgtggatgcacagccacatgcagatcctgagacaattaagaagatattggctcgtcaggtaagatactcataatttcatttcacccaaatcgttggcaggaatattgatctccgcctattcaattccacaggtgacatctcctgttctatgggaaacaacagtgaagactcttatggacaagggactggagaagagttacgaattaggacctggaaaggtaagagggcttggtctgagacacatttagatactaatacttcttgaacgcaaattaacattagtacaatgtaagaaattcaaaagtttttatggtgtatcaggttattgcgggcattgtcaagagaattaacaaaggtgcagacattgagaatgtggctgcttgagaatgcgatcaccgccatgacactgagatacttgtatttgaatgtctgtctagatgagaattttcttgttcggccaaccaacgaaggcatttcgaatgaattattttctttctttcggatagtgagactaatatttaatgtattgtaatcattttgtagaataaagtagtttaaagaatctatataatgtcatatttacgagtgataagaaaagtttttacaaaatgagttttgaatttagtttgggcgatcacagaacaattgattacttttacttgagcaaatagtttgattctacttgaagatcatgtcataaaaaaagaaaaaaaagtaatcaaatcatatgagctctaacatacaacacattacattgtagacataattaatcacctagccaacttcaaacacacacatacaaattgagaacccgaatatcgaactacaaggaatatggtctaagcactaagtttgcggtggtggctgcctgagtctgcgaaggtggtcgatcaagtggttcccagagacgctgtccgcccaatctggagccacaccactgaacgaaataccgcgcatagcctccataaccctcgtagcattctcagtcgtcaatggcgcgtttctccgaatctcgtcctctctgaaagctctcatcgctgctgagtcatcatcttctcctatgctctcctcttcttcatcttcgccttcgctactgctcttgctaagttctaaatcgtcgttattcagattgagggacgacactccattctcaaattgcctcgcgtaataatcaccattagagtgaaatccagttgtatcgtctacgtgtccgttctctctggttcgagtacgatcttcttcttcatcgtcgttgtcatcatcagcgacggcggaaatcggctcgtagtattcgggagcgtcgtcctcatcgagattagtgtcggaatcgctaccgtcgatttggtctgcaacagccaaactcattaaggggagatttttcggcggagaaaaatatgtatacgattgtgatttaaaatctgaacgaagtaaaatgcaattatcttggtctcatacagaagaaaagagtaatgatgaagtttaagaagaagaaaaggaaaaaccttgtagtagatcagctggagaaatgggcacggcgttcatggctggggatcaccaaaggaagttaagaacaaagaaatcacaaaattattaaatatgaatttccaatggtcattgctcaccagagagaaaatagatagcactagggtccctattcctattaatttatcttttaggtgcccaaattaatttctccagcatatacggaatagatagcaccagggtccctattcctattaatttatcttttaggtacccaaattaatttatcttgtcaatggagcttggctcgagttatttcctaaagctatcctttgttcctctcagactagcaccgcggatcatagacctttatgtctactctctgaagggcaggaggtcaagtttaagagatgtttcaagtttgaagagaactggacgagggatgatagaagcaatttggtggttgccaatgcttggggctccgttgatcatccttgggccccttctagaatcttcaagaaacttggtgcgactcgagtggccctactgcattggaatagaactcaatttggtaagttagattgggccattaaggagctggagactaagcttgacaatatacagaagctacctgctggtgtccgagattggaacgtggaatgtgatattcgtcgtttcctaaatgaaaatttggccaggaaagcgatttattggaaacaacgggctagaatctcctgcctgaaggatggtgataaatgctctaaaattttttttctctcggctgcaataagaggaaaaagaaatgtcattgaaagtattttgagcaaagataacgcctgggttaatgatagagaattaattggtcttgaattcttagacttttccaagagtacatttacaggttttgattgtgaaagggcaattgattgcacccagttgttccataagaggatctctcaggaggattatgagggggtcattttatgcccctctcgagacgaaatcagatccactctttttttccatgaataatcataaggctcctggaccggatggaatgtcagtgctctttttcaagcactattgggagtctgttggagatgacttttgtgatgcaatgtctgatttttttgttcaaggcaatatgcacaagggtataaacactacgaacattgtactaatccctaaaggccagaacccgaaaagacctaataacttcaggcccatttctctctgcaatgtgatgtataaagtcatctctaaaatagtggcaaatagaattaaacccatcctcccctctcttatttgccctacgcaggctgcatttatcctgggtaagaatatccaagataataatgtgattgtgcaagagattatccactctttcaactggaaaaaagggaaggaggggtactttgccattaaaattgatctcgtcaaagcttatgatagattgagttggaaattcatagatcatgttcttgactgttttggattcccatagaagttctgccattgggtttctcagtgcatctccaccaccactctcaacatttgcctaaatgggggtcaggttggtaagattatgccttct

SEQ ID NO: 227147 - DNA, 4957 bp, Cannabis indica
tatcagagcgggacactaaactcttagtgtggtccttttaacagtttcgtgtgtttttttgtgtaaaatatcattttttgcagatggaagttcgatttctaaaccacctttacttaatgatggtcaggcgacgagtttcgttggtgataacagcaacacaagattgtttcgttagaggggaagacgagtacgtggaatttggttgaggagagaattgtttgggttatcaaccaatgttccatatcaaaaatagacaagagttgcctaaaatataagtgttctaactattctattagtatgagatctttgggaggtacataaaaataaaactatgaaagcttaaactcaaagcagaccatatcatactaatgtgggaattaagatggtggcggcccaacaatatggaagaacggcgcataacagtgcaagagttcttaaagcaagctactttccacatggtaacatccataaagctaaaaacgggtctaaggcttttagtgtttggaaaagcttggtatgagaaaaaaaattcttcttcaggggtataaatggaagattaatgatggtaatgaggttagtaccctggaagatccttgaatttcaagaccaacatctatcaaagtctatgataaaccggttttaccaagcaattaatctcaaagttattgatttgaagcttaacaatgtggtcagtggagtgaggatttcatcaatgttgtttttaacaaggaagatgttgtcttattcccttgtgagcacactccgttaaaggacaacattatttggcactataccctatttggagtattaaaaaaaattgaaccttatatgtggttttgatggtttttcatttgtttttagaaaggcaaattgctttgctcaaagtctagctaagtacacacttgataatgatatggtggtgttagtgctatttgaaatgggattataatcttttttgtttgttaatgaagatattcccttttaaaaaaaatcacatgtaagaactggaagaaaagccataatttattaaattttcaaaatctactatttattgttttatttttgttttgcaaatatctactatttatttattttaattgaacaaaagatgaccataacaaaaaggtccgaactccaaaaacaccaattcaggcttacccttactgggcttgaaggccacctcaccctttcacgtgattctgagcttgcagtccgacaattgatatatacttgcttttgtcaaatatatgctataccctacaactattactgtctcttagcacttttctttctctaccacttttttcttctctgttattttgattagtttactcattaaatttacgccaactcttttctttttcgacagcattaaatgcacaatttttatttaattacttgtctttgaactagcagctaagaaatagtcaataacaaagcaaccttcacattgttttcctctgtctatttctttccaacaatgcggaagaaatggcaaccctttcttcctcatctgttgctttgttttgcccatatctttgtcttgccatcctatgtttcctcttcctcttcctctaagtttgtactctctcagccttcggcttcagtgaactcatcattgccctctgatgctcttgggctactcgccttcaaatctaaagcagatttgaaaaacaagctatctttctcttcaaacagtagtttctgcaaatgggtaggggtggaatgtgctcagttcaaagtggtgcgccttataatccaagggatagatcttgggggtgtttttgctcccaacacattgactcgccttgaccagcttcgagtcttgagtttgcagaagagctcactcaccggacccattcctgacctctcgggcctcaaaaatcttaaaagtctctttcttgaccaaaataacttcacgggctctttcccacctgttttatcccttcatagacttcgaaacttggatttatcccataacaatctcgccggtccactacccaactggctaccgaagctcgaccgcctcaactatctccgcctagagtggaaccacttaaatggatcggtccctcctctgaaccagtcctctctccgaaacttcaatgtctccggtaacaatttctccggtgctgtaccagtcaccccaaccctacttcgcttcgaaccgtccgcgttctcgtggaacccgaacctgtgcggcgagattatccacaaggagtgcaatccaagcccaccctttttcggcccaatgtcgtcggtgactgcttcacccccgccaacaaaagcgcttgaacagggcgcagaagtcaacagcatggacttgacggagccttacgacaagaagcaccgcagaacggcggtgatcattgggttctcagctgggatcttagtcttaatatgctctctgctttgtttcgttatggccctgaaaaaacagaggggacagaagggtgatcgaagcatggacccaataatggctgctgaggtggctgcgagtgcacaggcggcggtggtaatggagttagagcaagagaaagagttagagcagaaggtaaaaagggctcagggaatgcaagtggctaagagtggcagcttggcattctgtgcaggcgaagcccaattatactcgttggagcagcttatgaaggcctccgctgaacttttgggaagaggtacagttggtaccacttataaagccgttttggataatcgtttgattgtgagcgtcaaaaggctggactctgttaaactcagcggaacaactagggaggcgttcgagcagcacatggaatcggtcggtggtttgaggcatccgaatctagtgccgctcagagcttattttcaagccaaggaagaaaggctcctggtttatgattaccagcccaatggcagtctcttctctctcattcacggtaagtcttcatcttccttcttcttacttggtcttagtgtgtcttgactggtcactggtggtgagaggtgagtcttgtttttaggtaattgactcggactgcaggtccttcgtccacgtgacgcgacagttaggagatgctattataaaatgttttttctttttccttttcatattatcattagatttggaattggattatttagattataataggatgactggactaggtatgatattttgattctattggttaatttggtttggctgcactcatgccgagtagtaatttattattctccaccgagaatcctgcttgtgattaagactaacaaggcgaagttgggaattgactatgattatgatgactcggataaaataattattaattaattgtaacctgtgtgttagattaagagtccaaaagcaagtatgatggggcacaggacgaagtggggagccaggtccccacatgctaaatctaactctatattgaaagctgtagctaataaatatacttgctctttccgtacgtttggctaagtgtaagccaagccatatatatgccacacccacacacgcgaaagaccatttatttgaactactatgatcacactacttttcactatctacaagtgtataatagaaatcttcttttaattacgtactacatttttacaggttcaaaatccacgagggcaaagccactccactggacatcatgcttgaaaatagcggaggacgtggcccaaggcctttcctacatccaccaagcgtggaggctcgttcacggcaatctcaagtccaccaacgttctccttggccctgactttgaggcctgcgtcaccgactattgcctctctgtcctcgtcaacccttcatccactgatgacgagcaggttatggcagcctgcaaagcacccgaaatcctcaactcgaacgggcaaattacatcaaagtccgacgtctatgcttatgggattttattgatggagcttctcaccggaaagttgccatcggagcagccatatttggcgccaaacgagatgatggagtgggtgaagtcaacgagggaggtcgaggagggagtggaaaacaacaaaatggaaatgcttcttgaagtggccatagcttgtagtttaacatcgccagagcagaggcccactatgtggcaggtgatgaagatgttacaagagattaaagagacggtattaaaggaagacagtgatccagacccgcttcctgccatgtcctagtccttattcatcacctcactatttctaccatgttttggcataaaaattagattaaaacagaccaagtgttaccctttttttccatatataaatatgttttatcttttctaactattatttttctttctccctttcaatatgtatcatcgtagtgtacatatatttttctaggttcactcccccacccaaaaaataaaatagaatttatcatcactacatttagttttcttttttactttcacaataaacagcgtcactaccagcgtcagtttagaactgaaactaaatcattggtcttttctttaattatcatcaattttaaattgaattgctaattataatatttttttttcttaactttcatatctgaaagtacatagtacatgttagaatataatttttttttaattttttttatttgacagtatttgttataattataacattattactgtaaatttttgaaaaatttcgaatagtttacaatactaaaaataaagtttggaaattttttaacacacatggtaagctagaatatatcacgaattctgaatctatatcgtaaactatttagattttttttaaaaattttaactaagtttaatattgtatctataacgaacattcttataaaaaaattaaaaaaaaataaaatcctatatgtatttttagtacacaagattaaagacgttgatagtaggactcaatttttttttttttttgtaactaattgaacaattattgaaaataatttgtagtttaatacatcatcatcagaaaaaagatg

SEQ ID NO: 227148 - DNA, 2848 bp, Cannabis indica
cctgaaagatgagaatctaaacttccattggccatatactcataaataagagccatattggacccttcgttgcaatacccaacaaggctagtcaagtttctatgatgaactctcataagaagtttaacctgtactttcaaagtggtatatatacattaattatagcttattaatacatgtacaaatatatatatatatgcagtacaactacaaaaaaaaattatatagaaaaaatgaataatacctctgcttgaaattgttgatatccttgaactgatgaatgagaaagcatcttaacagctacttgagtaccatcatctatcaagccatgaaatacagttccaaatccacctttaccaagaattttttcaaagttgtttgtcattttgatcacctcagaatatgtgaactgtctttttttagattcgtcaattaataatgaatcagtctgcaaattggatggtgccacaatccctgttgcgacggcataacctaatgataaattacgtacttaactatcaattcaaggaactcaatcgtaatgataactaaaattgatcgctaaagaagttaccattgttattttgtttctttctattcttgagggtgtagaaaataattgcggctattattaacaacaataccactccaccaactgatgctactattggaatgagtatactgttcttcttcttgttcttcttattattcgttacgcatggagtagatgagtcacataataaatcttgattttctccgaaactatcatattattatatccacgttggtagagtttggtgaaaaattataaagttaataagggcttcttctgaaaattaagattgaataataatatatatgttctttcataaagactcaaaagcaacatacttagctgatagtaaaccattctttgatctctcaagaagtgaagttggaactgagcctgtgagttggtttctttccaagttcctgtaataaaatcaagattaaaatctaatcaatgtagtattaattaattaataaattaaatattatagtaatgtatgtgttttcttattataataacttacaacactctcaagttcggtaatgaagacaaaaaatctggcaccggcccagttaaattgttgtctgacaagtccctgaaataagtaatatatatatgaaattttcatattaatataaagtaaccaattagtttgaacttttcttgagagctgtacgtattttatacttacagagattctagcatagcgagttcagagaagtatagacttatattgccacttaatccactcgaagacaagtccctgattattgtgcaaataattaaaatataaaccaccaaattattacagggtagtacatatataaaaaaaaaatacaaattctaaaatttaaggtacgctatatattaaagaatcagattgagattgacttacaaggatataattctaggagaaataacaatatcattggtgcaatttagaccagcccataagtattttatgggaacacaaggatctccatttccagtttttcttcatatcatatgttgactttatgccagtgattgcatccactaataataaaagttataaataatcaatatttgatgatataagaactatagatacacaaaatatataataatcactactagcatatattttaaaaataaaaataaaataagggaagatcgactacatatattaaaatagagctagtacgcaaagaaaaatataattaataaatattaccatcatcttggtgtgtttctgattgggaaaagtcaagcaaggaatagaactcaatagcgttaagaatgggtggcaaagttgaatttttaagtttggttattgaaaaactataattgagttttccagttatgggtttggtgctgtagacggtctttgtggacaagtaattagggacaactggtccgtacaagagatcaccattgatattgatgtcaaatgctctggtctcatttgatttgagctcttggagttccgcaaagtgtgcatagagataatagctggtagttgcatccagcgattccagatagaaatcgatcggaccgtcctcgtctataggtgtggcggcgttgttcattatgacagacggtggaaaatagtcaatatgagtggtgttgtcaacgttaagcgatgtcgatgtcgtcatttgtctccatgaaaggtcgttaaatggaacccagatgcgatccaacacatcgaatggatacctaattaacacgtacatttacatatatatatcaacaaaaataaataaataatgtatgtacgtacgtataggtaccgtatgtatattattattggaaaatactaggaggcaccttaagcatgcattattggcgcatttatccccgtaaattttgatttaataaataaaatgtaaaactttattggagcctcaaataacaattctcattaatatttaatcaatcaatttcttatttaattaaggtgaaatgcttaactacttttttccgttatcatataatataagtagtattatataatttaatataataaattcttaaaaaatattattaattaatcattgagggtccatctctaaaaggtaaaaggtggtaagtaacacatcatgtcacttaatcaactagctattttctaggaacttttaaccagattatcatatttaattatttctgcctatagctaggtactcaattaaatgtcaaaatggtgctgatgagtatgtgaaaataaaattacaaattgaaattctttaatatatctacaagtgtatgtatgaaagcaatggattcatatataaaaaatctaattagaccaatgatatt

SEQ ID NO: 227149 - DNA, 15609 bp, Cannabis indica
atggggaatttttaacggctaaaaaggtttagagggtataatttagtatatgtcaaagtttgggagaaaaaattgctaattaaccatataaaaattactaactaattacaagacatgttttgtagtgctacatatttatccaaaccaaatgcaacaaactcaattagattacacaacaccaaattaaagaccaaactcctaaaaactccataactattattattattatgtaagattgtgttcttaatattatgaaataaatagatgaatatttaaaagtcaaccaaatgttttgttaataatctaaacctttcttctccttctgttacgcctaaacaaagctctgctctttcttctataacctcaacaatggcaacctctgaagaaaacgacaaacccatatccttatacgacgacacgtcatcaccgtctcaacctctcctctccaaacccactgaagacccacctccccggttacagccatctcttctcagtaactcacctgattctgacacctctcagtaccttcagatctcatacaactacggtcccagacacttcaaggaccttcctttcctcataatcttcctcatcttcgttctctccactttcagtttcggaatcttctcaatctttcatcggaataccaattactctaatctctcttccttcacttacaactccaattcaacttcttgtgtgaaagactctgtttctgagaattgggttttcttcaattcttcatcttcttcgcttgttttgaaagatttgatatggacacttgtaattacgttgattttgagtgtacccatttgcttagctttgcttttttcactcaaacattacaccaaacacattgtctacgccactcttcccttcttcattgtcatacccattttcttcgacgtttactggttcgttgcctgcactcttagctcctcttgcagtgtctcttttccattagtttacagattttagttttgggttttgttcttttgatcgttggggtcattgtgtggatctttgtggttaattggcatagaatagagttgactgttagcataattggggtagcttctgatgctctttcgaggaatttagctttgtttggggtcttgccgtgtatgacattaggattggtgatttactatgttcctattgtagttttcttggtgtttgcaaggctgaatgggaaaattataccaaaggaatctaatggggaatacacttgtgtgtggaagcaagatggttgggttcctgcttactatgctttagcaattctaacaatgttgtggtctttggctgcattggttgaagctcatgtgtttgtgattagtgggactgttgcacagtggtacttttgtaaggaagagtcaactctcaaacgtactataagaagctctttgaggtgaatttactctgttaaactctttgtttatatgtgtttataatttatggttgtgttcatacatagctgcaattgttttgatcatgtttgtcaaagttgacatgacatgtgtttcactatcaaattactatagggacttattagcaattttatggtagtatgaaatacctataaatatgtaatgtcatttcataaatggattatcaaggaaatgaatgaaaattaggagtgagtctattggagtttgacactgactcgaagagtccaaattggagtttggcactgactcgaagagtgtgttccgatacaattgatattgtatcaacatgtgattttagttgtgaaatgtctaaatcttattgacaataattgaaataaatgggatctggtatcttaaggagtgaattaatttagtacaactgtttgcataccttcaatctagaccatgaaggctttagtttctcatgtttatagatattgtggtatgaagagtggttttagtttctcacgtttataaaacttatcgcagaaatgcctttggcacctcctctggtactatctgtctctcgggtttacttatagttgttgttcgagtggtacgagccattgttgatagtgcaagtcaagaggacgttcctgggttcgtgaaccttgtattacgttgctgcgttaatatgttcttgtctgctatcgattttcttaacaagttcactatcaactttgctgcaatcactggagaagcttattgctcatctgcaaggatgacatacgagcttcttcgacgtaatcttctttctgctgttttcgtggaaactatctcctctcgtttactagttggaattgtcttcgtgctctcagcaatatatgcaattgtggtgcgtattctattccctttttatttactatccataattgcttgttaagacgaaaattcttcagagtataatgagtaaatcataatgtttcactcgtaatgcatccttgtattaaaccctttcactaggatagttatgataaccatttcattgtcattttctttttggtattctttggagagaatttagagaaaggatcatgagggtgaagagatactctcatactgtaaagtttggttcataattataatatatgccaaatcatttaagtctgacgagaactattttaatataaaacacagctttaacttatcattccacggtattgatttgaccaacaatcataagcaaccaaaatgtgtcaaaagttttaccttttgtatcttgttgcctgaattttgtttcgattttctgctgtcatccatgttatcatattggctttcattgataacttcgggggtgaactatctatctagagcgctaacatatgagaattaggaacatgacttattgaagaggtttcaacaaattgtatttgctttttgaactgtattttttggtttcttctctaatatactctgttaatatttcttcgattatggtgtgcataagcagacttgggctatcttaaagggtgtaagcgatttaggggataactcgtacattgtggctgcactggcctggctgctgctaatattggtattgggttactttgttcatgtgctggataacgtgattgaaaccgtctacatctgctacgccatcgatagagacagaggagaagtgtgtaaacaggaagtccatgaggtttatgttcatcttcccattagcagaaaccacagaccatctctaattaatgtttagataaactaatcgttgatttgcaaaccccatttgttgtttgttgtcatgtgtttgtttttactccttgtttaaagtaaagttatgtttttttgaccattttgcatagcctttgttgtaaagtttgaaattttgaagttctaataaaaagtaaatcttttgctcaggttttcagtttctttggtataaagagttttttaatttttgtttatgaaaggcatttgaagaacaaactgaaatcagtactctttttttaatttgtttcaaatgttagagtgtttagttactaagttcaattactgattatacttgattcattccttcaaattgtttcaaatgttaagactgggaattgatgaagctaaatgaagaacacaatcaatttacaagcttcctctctgatatcggtaacaaattccagtcgagtattgtttgggttccctgaactaggataagtaatctcactatatgatttgtaaatttacaaacactagttttgtactaattgccaaattccttactgtaatgaaattacctcaaatgccaactctcttggcaaactctgaaagatttgtaactctagatccgaatacctgcaaatctacttgcgaagatgtgattgaactcctttcaattcacactaattgactatcggtctagttcagaaacttttaatcgccattaacaaagctctgagctttgaactacaagaacacacgaacaaaagagtggaaaagataaaatgtgatcttaatcaccgatcaaaagtgttaacttgtgatactgatatgacatattgttacatacttgatttgacaatgttagaacatcttcaatggttaaattttggagaatgtttgttgagatggacaatttaattgacaaaatatgagggtgctatactattagagagaaaaagatgcaacacaataacatcgatgctatcttgtttttttaatagaaaattaaagtaaataaagttatacaatttgtaattaaaacaaataatatatttataatgacattcttgaaatgtgctataccaataaagtgttttaagatgtaagagtgtcaaaaatgatgtacaaagaaaactatcatttgagatggtcttatataattgataccggtatctatattattatacggcaatgatactttaaattattattacatatataattttaggtaagtctatagtacactctctaaagtggtgtaagtggtgtttcaatagacccctatctgtttcggcattcgggagaattttttagttcaattttattttatgatcatgtatttatagttatttaggactacatgtaaatttttagaaaaatttgagtagtttacaatatcaaaaaataagatttacatattttggtgcaccacgactattttttcttacgtagtttaaaccttattttcagcactgtaaattattttagaattttttaaaaatttacaagtggtcctaaatagctacaacgtacctgattatgaaaaaaaaaactaaaaaatatttttaaatgccaaaatagataataaatctaccaaaacaacctttggagatccactacagaaaatttctacattttttgccaagtatatatgatttaagttttagttatgatccttctcaatttgaaggagtaactatgaccggacatgaccatttaagcattctagtacaaacaacttcaatactacacttaaatacagtattagggtttattgaattgtggaattaataatagttaagttagacatttttgctagtataaaagctcaggatttgactgaagcaatttgtataaagaaagcgctaagctggattaaaactcagctatagtagaaagtggagttggagttagattgcttggtagcagtacgagttattcaaaattcattacctatactttcttcttttagagttattatagaaaattattattgcatctttaaacaatattttcttattttttattaaacgatatgctaacatggttactcatagtcttgctatagcatcttgttttttttttttttctagattgaatattcaataaagggtgatattcttattgaagtgcaatcttatttttgactgatttaataaattaataaaaattatatatttgcttaaaaaaaaatcgagtttagtttttttttctcaattctaacatattttggtgttcaaatttttatttttgtaggttgagaatcttatgcttgaaatgggagaaaacaaaaagtatttctaaaattgtttgctgacttcaattattgatttataccatatttactatttaaaatgaaagtaaatatttctttatatatataattttttttttcttttgaatttgttatttgttattttatttattttgatgtatggttggggacataaactaattataatttgttttattttgttgctaactatgtgaagaaaaatattttttttcataaatattaaaaagtaatcaatttaaaataatcgatttaatctgcacttttgcggattggattggatttgaactattgtgcagattggattggatttaaaaaatgaaattcgcacttagtgcggatcaaatgcactatgagcaaaatagtggattaaattggatgaacaccccaacataaaatagtattaaacacgatcccaacaactacaaataatataactttgaattttaaatttaattttgtgtaacaacaccctttattacacaaatactttgtgatagaaaaagatacaaatttataactagatttgtttacactttttaaaatgttacaacattgacttaaattaaattaagttgtataccataattttgcaaaattcgttttcttatatcacatcattttatcctaaaattaacattatttgtgtgtaaaacatttgattagaatgtagtataaattaaaatgtaccaacgataaaaatataagagtttttttatttttatactttaaaagtagttttttatttcttttttcataaaaatttacaaagtaatcaacgaaacaatttaaattgtaattaaaatctacataacaacccacatagaaatcatcagagcaacctaaactaataaaaataaaaatagaatataaagtaattctcgaaaaatataagcatatacaaactatttttttatatattttctatataaacaaatatattttgatttttttcctttttgtagaaataatattaattattattaattatatttagttaatttttattattcaataaccacagtagagaaaagtttatacgcacaatatattatctggtcgttaaaatttttaaaattattaaataattttattaatttggtgattatgtatttactaaattatactccgtagactttgatatctattaaatcatgcacctcgaattttttacatgtatcaaaagatgccctctaaatttttatcgattttcttactaagattagataaaagtccttatattcaatattcttaatattttttattcaaaaaaaaaattctcaataattttaatttatttttaatgaccttaaaaatttaaagatataatttaatacatatgaaaatttaattagcctatactatatattatattttgtttgacgtgctatatattatattcatataaatacaaatgtagaaagtttgggacaaattaactttaggcaattctatttaatatttgccatgttctccttccttctcctttctctactctccataggaaagtcttcacatacccactctgatcacgccacgtgtacacagctgtaagcaacggtagcgatcaaactcgctaaaataaagcgatctactggatgacgtggttgcatctgattggctatagtagtatagaagacactcggtcagagcgaggggagttttattttgaggagggcatgcaaattacgaaaatgcacgtgaccgcactgtaacacaacccggacgtgtctccgtcgaaaaaccggattgaataatcggcgataggtccgaacattgtaaatggagggatttggttctggttggagtctcggtcaaaaaagatacgcagcaaaggcgtgagaacagggacgagttagatagatagatagagagagagagagtaagatactagaaagtcggcgtgaagagacagataatcgaaaccctagttcacttcacaccggttcttgattccgcatgtgagttgtcctaatttttttattttgttttatgtttatcgatttctattgtcttttttattagggttttgatttggtacgatttattggttctatgttttttaatggttttgtttttgttgtgattagtttgattctgatcgatccttgtttggagaagaaggctatgtgttgggtttatcattggtttggtgtttgattattgggtgccctttcagctgaggatatttctttatgcaatttgggcatttaagttttggggtcaagaaatggatttggttgccagttgtaaggtaattattgtatttttcttagcgtgatcaatttttttttggtgggtttgtgagatgtacatgcatgatttactgggtttgtgatgtttatattctctgcaaatgtacttgtttagttagaatgaaagctcagcaaagcaattatagaggatgaagtttgatatttggttgaaattagcttttttagtatgctatttgaatattaacatctctttttttgtttgtagcaatgaaaatcaacttaaacaagtagctttggttgtgaaagcactgcactagatagttttattgtgttttttattggatgaagtgggattattgatcatagattatgcagttgttgtgcatatgcctaaattttagtatcttaatttcagtgtcatgaatttatattaataatatgtatccggctccagttacgtgtaagatgcaaatacaagaaggaacatttttgtgtatgttaaacgggtgtgttttggattcttgtgctacaatcttattgtcaaggtagttggcattgattttggtaggcatcaatgaggggatgagtagtttttctcttgccgatgatcagaatggggtactgtttctgcatttattggtgtttgagatccattttgtcacatgtatttaaagtggcaacattggcatgtttccatgcgagaagccttctcattagttgatgtttgtttggtgggaaatttagtgtatatgttatgattgaagttttggggcaagccttttgcatttgctgagaagttataaaaaactgatggtgttaataattaagatgcatgagctgctttcattgttttcccacaaagcaaatcaacttaatggggtattgttattggttgaagacattgtattatgctaatgttgtctaatttagctgtgataggtgatctcaaatgaaatattgaagttacaactatatttaagccttcactatttggctggctatctaattcttttggaaattggacccattaaacgagttaaaataatatttggggatagaattgccaattcatggtttttgaatgaaaaataatgtagatagagagtgataagaagagttattgaaatatcatttacctaactctacatagatccaaacttgtctagtaaagaggatagcaatggcaatgctcttcttttgttaatcttgtccttgtttcttgtgacaattttattttaaagtattgcattcatggtttgatgttgcattctaggtttattgatatatgtgtttatgctgcaggaaaaattggcatattttagaataaaagagctcaaggatgttctcactcacttaggtctttcaaagcaggggaagaagcaggtgagatgctaaagaaattatttattctgggtgttgcctgcatgtggatttggcaatttatcacactttggcttcagcgttcgaaaattacttgttgctcctttttttgttgatttggggttgctcttttttttttccgtatgcataatccaataacttctttatgatgttagctttgtaaaggttttactgagaaagtgctagttagtttaattggtaattgtttgtcatttggtgtcatatcatagaacctctagtcaaattttgcctttcttatgggaaggaaggaattatgggcaagggagagggttacctcctattgtgtaacccactagtaagaaagaggctgtactggtatgttttgatattcagttaatacagaattcatatgcagttcgttttgtattggcatgtatttttctcaataaatgtcaagattttcttatttatatgcctctccctttaatatgtgagaaaggcatacagtttgtcagttggggaagggatttcattacataacttgatgactaaaagtaattattatacaataacatcaagatcttgtaacagttgctcatctgaaaataattttctgtgattggcgccatacttgaattgaagtctaaataatgtctatttatgctattactagaagaatgtatgttttaaggattcatttttagcatcttgttaatttatttggattggtgttttatgatgtctttatgtttgttgtatttaatgcaggaccttgttgatcggatattggttgttttatctgatgatcaaggtatggatgctgttattcttccttccctacctgaaaatggccaaattcctttcatttgcatctgcgtttctcggttttgttttatttctttttatttcccatgacatttatatatttgtaccttggcggtgtagttgatgtttgtctggaggtataaatgctaaaccagtgactgttgattaccttcagttcagattgtcaatgtagtctgctacgtagcacatctttgttattatgaacattttattattatgtttttataggttagtttcaatttcgaatttatgtttctggcagaggtttcttgcttattcattgttctggctgcggtttcaattctcttattttgagtgaaattaattgtggctgaatatttgttctcgtttgcagtttctaaattgtgggcaaagaagaatgctgtggggaaggaacaggtggcacagcttgtagatgacatttataggtttgtcttatgtttctctatatctggtttattaagtcactggattattctctttttgctaccgtctgttttttcctctatttcaatgcgagttccggtttgcagaaaaatgcaagtgtctacagcccctgatttagcgactaaggggcagggtgtgtcagatagcagtactgtgaaagttaaaggggaaatcgatgatctctcttttcagtcagaaacaaaggttcggtgcctctgtggaatttcatcagaaaaggagtcaatgatcaaggtatttgtgtcacgcactttgtttctgttcctctgaatgttgctaatgttttcttttatatgcaaataaattttgctcttcattttcgttatatatcgcagtgtgaagataggagatgcaatgtgtggcagcacattagctgcgttataattccggagaagcctatggaaagccatccaccttatcctgacccattttattgtgaaatctgtcgactaactcgagctgatccgtatgtaccactgttttttttaataactttgtagatagtgtaaattttttctttatagctgtttctgttatctataagaaatagtcccgcatttaacacagattggttttaagttggaatcgccaatcctattcctgaatagccttccctctcaattgtaatactatttaaactgtgcagcacatattatatgttgcattctgtttgatacctgatctccatagcaactgttctagcatttagagttgtctttgaagtagtaatttagtttttaaagtgtgaattgctgaagttgatgtattgtgatatttgtttgctgcttggaatgctaaagtgtacatgtcagttttttgttctatttttcctctcctttttcataatcaccttgctatatctgtttgcttcctgaactgagtatcttgaattgtgtgttatttatgctagctaggctgtttcctagtttgatttgctgtgttgctgtactatcttttcatctttgctgctgttattgtatctttgttattttatttatagtacaagtttttcattttgactatgcagcttctggttatccattgcacatcctttgtatcctgtgaagctgagcactacaaatattccagcagatgggtaggtgcataattattttgataatttttagttttcactatgctcaactcaattatacaaaacatacacccgctctacttattcgtgattaatgcttaataatttggaccaacttgcagctggaaatgtaagcagtagtggtttttgtgtgtgtgtgtgtgttcgcgtttttgtgtgcaaatgcctgcgtgcttatgtttagtgatagattaaatgcttaggcatatttgtatttgatgctttctttttagaaaaccatgaatgctcttaaagtttgttttttgatagtgatgtgatcattaaaggtagtgatagatttcagtaatagtaagtatatacttcagaagcattgtactgtttctcacaatttgcaaaatcacttacatgaggtttaattaaagcatgtgcgtggaaagttgttcttctctatattgtttttagaatgtaagctatgtttttgaaatattatttactgctttagaacattgttttagtatttccaattaggctaactaatgcataaattgtcttgtataatatggtcttttggaaatgttataactaaaactattgattttatttttatttaatataaaacatgtccacagaggaacttgtggtgaaggctttatacagacatgaggaaacagtcttccaatccgtgcatgtctgccttttcacatgctgcttcatatttagattttggggtttttactttcctttctctaacccgcttcgttttgcaaattgttcagtagcaatccagtacagagtgtggagagaacatttcaactaacaagggcggacaaagatttaacattaaaacaagaatatgatgttcaggtcggtttgtctattatgtgatgattaacgaatgttatccatttggtaaacaatactattggtttgctcattgtgacattattttcaggtttggtgtatgcttctgaatgacaaagtatcattcaggatgcagtggccacagtatgcagatctacaagttaacggtatggtgattactgactaactaatgtttgggggggtctatagtttttagcaagaaaaatagttctgtttgtttattataatttatatgaacccaatgtcatcaattattgatctttttgcattactgaggaagttccttctcttttttctgctaatatggcttagatggtcccatttttatttctttctgcaagtatttattgccttttaccttgcaggtatgcctgttcgtgcaattaatagaccaggctctcaacttcttgggactaatggtcgtgatgacggtccaattgtgagtttctgttcccatataaaagcaagctcctttattacatttatcttttcaggtcccatgccatgtttctacaaatctttgtataaaaggtttttattctgattgcaatttaatttgttagtttgtttctgttttgtcagattacaacatttacaaaagacgggcttaataaggtttccttaactggatgtgatgctcgcattttctgtttaggggttcgcattgtgaagcgacgaacagttcctcaggtatgtctttgtgtgtgtgtgagggctgttagttggtagtttttatgttattacaaatctctgaataactataggacaattgttggttctggtggaatatttaatatatattgatccaatgttaggcgtaatttcttaaaataaaagcaaagtattatgcgcctttagttgactacaagtgttctgttcgattgtacatttatgtatgtatatatgttctgtagatccttagcttgattcccaaggagtctgatggtgagccatttgaagaagctcttgctcgtgttcggcgatgtgttggtggtggagctacaaaagatgatgctgatagtgacagtgatattgaagttgttgcagattctttttctgtcaatcttcgttgtcctgtaagttgtatatctctttatatgtaaaatgcacatgtagttaaatttcattaaacatagatagttaaccggtatattatattcatctgtagttttgttgcgtacacttcttctggcatgtttgtggctaccttttggaaaaacacccgcgaaatatttttttgatgttcattgggacaatctctgatagaagcaagtgtatagatatacattatctaaatatatatatatgtttatgaaaagtatttgtataagtatcatttgtgaagttatgattggttctaaggttttgtttataaaatattattcattttttaaacctttgttttttcatgtgctaacttgtgcatataaaattatagatgagtggttcaagaatgaaggttgctggaaggttcaaaccttgtgctcacatgggctgttttgatcttgacgtttttgtggagttgaatcaacgttcaaggaaggcaagctcaccttgaaaattcgccttctgctttcataattttctccttgtgctttagtaaccttttgattttctctgcagtggcagtgccctatttgtctcaagaactattccctggaatatgtcattgtggatccatattttaatattattacaaagctggtaatttctttactgaataatttgaatgaacacttttccctaatgtatttttttactcaggttgtattgtttttccattatgcgattgttgcagatgaggcactgtggagaagatgtagcagagattgaggttaagcctgatgggtcttggcgagtcaagactaaaagtgaaagtgaacgtagagatctcggcgatctttgtcagtggcactttcctgatggtactctctgtcttccccctgatggagaaaaagctaaaacagaaatgctgaagcagatcaaacaggaaggtatgtcagaaaatcatcatggtttgaggcttggaatcagaaagaatagcaatggtttttgggaagtcagcaaacctgaagatacaaacacctccgctggcaataatagattacaagatggatttggaaactatgagcaaaaagttatcccaatgagcagcagtgcaactgaaagtggtcgggatggtgaagatccaagtgtgaatcaagatggtggtggaaattttgacttcaccaacaatggagttgttgagatggattctatctctcttaatgttgattccatatatggtattcctgatcaaatgccttctgctccaactggggatgcagaagttattgtactcagcgattcagatgatgacaatgacatgtttgtacactctggatccatgtacgaaaatcatcgaacagatgctgggattagtttttccatgcctcctcctgtaattactgatccttatcatgaagatccaacccttgtgactagtggcagtgcatgtttgggtctttttaatggaactgatgatgagtttgtaatgccaactcaatggcatttacctactggaaatcaagcaggaccaggttttcagttatttggttcagatgcagatgtgactgatgctttagttgatctacagcatggttccatcaactgttcttcagctatgaacggttatagtttggcctcagagagtgccttggggtctgcagcactagtctctaattctgctattggtcgatcagataatgatatgaatgatagtttagttgataatccattggcatttgctggtggtgatgacccacctcttcagttatttcttccatccaagccttctgattcctcattgcagcccgattttagagatcatccagatgtgtcaaatggcgtcggtggggaggattggatatctcttaggcttggagacggtcccagtggaaataatggtgaattggcaactcaaagtggactcaatccaaagcaacaagtacaatctaaggacggtccggtgaattctttgactgaccatggttcgtactttcctcactctgaaaaactagattttggcttttttaagatcatatgatgatcatggctatttattttggaatggatactccattttcttaattaaaaatcttctaaaaaagaaatcacccaattactgttgtccaaactccaaaagctctaatctttttatgaaaattctaaaaaattacctcatctcggatccatgaggtattcttcaaataggaaaatcgtatggtggatatgattataaacattaagggctctgctattttaatattttcatttttacttccgcattttctttttaaaatttccccttttggttttgaaattatt

SEQ ID NO: 227150 - DNA, 5180 bp, Cannabis indica
ggccaatgtaatatatacttttaccggcgcagtgaaatccgccgataaaagtggttcatttatcctaaatcaaaacgaaccgttttgattattaatttgctggcacaataatacgccggtaaaagttgttcatttactctaaatcaaaacaaaccgttttgattattatttttgccggcccaataatgcgccggcaaaagtacctccacctaccaacaaattcaatgcggaattttccctccaaatttttttccaggcggttaagattgcccccaatttttggatagacttttaccggcgcatttgtacaccgtaaaaagccaaagggatgtgggaacattctcgcaccttttggcagttcattttagatctttcaccgacgaatttttaataatacgctggtattaacaacttttaatggcgcaataatgcgccgacaaaaattatggttgagtcaaagtagaaattcagcatttcatttatgctgtcaacttttataccggcgcatttgaccaaatgcgccagcaaaagtattttttcttgtagtgaaaatagatggtccaattatagtaacttttgcctaacacaagttccaaaataatttttaaccattacttatttacccaaaattatgatgtatgttgtaatggaacaaaaacgtaagccttcacgttaatttataatgtattaattattacatttagaggaaaatggaatttaaccaaattaattgtaatcaactatagaaaatgcaaatgtaacacatctagaccgatataaaaagctatgagcactggaacagacaccatcgtcccaaagataaccctgcaataataaagaagtactgttttagtatatttttaataatcttatttatttatttatttcttatttaaaattgggaataaattatattctcttcagaagttttttaagctaacttacgctgtgctgagtacttcagcatgcaatccgtattctttggcaaagataaaagatgcaatcgcttgtggtagtgctgactgaaaagaaaaataataaataaataagttcatatatatatatatattaatatatcaatatacaccgcacaataaaaaattaggatttgtgtccttccaaattttaacatatataaaagtgcctagaatcatttcttttaggatgtctgagaaaacttacaatcaaaagtaagatgtctgaggtggacacaaattcgggttaaatgtatgacataatgaaagctaatatatttacttattctattaccaccaaattaaaatcaactaattgaccatctttattttaaagtagtcccatctatttcaatgtaatttatatgtacacatctttactatattaaaaaacacacactgctcctagttgacttgagatctagtcagtatatacgaaagaagtaatatgtatgagtatgagccgtgcaaacccatcgaaataagaatctactaactttattttgcatattaattcaaaacctcttttttatattcttttattattggacagtaatctacaaaagctgttttggcagctgctattaattattctcaattactttccacacaagaataaaaaagtcaagccactaatactcgtattactaaactttatttgaatgtaatagtaatagtgctgatattaattaattatagaaaattgctaaatgcatattaaaatgacataagtgattagcgatgacgtacacaaagtcaaaaaattcaattccaaaataatacattttaaaaattcttacatttaatcacaacaaaatttataatgtaaaaaaattataattaattataaataatatattattactaaataaaataaagactattagtcacaaaaattaaaatttattgtgaataaatgtgttttcaattcatgtttattctgactaaaattaaataattagtaacaacttgtaataattttttattctgacttaaaattagatttagttacgaaaaaatttatattattactcaaactatatattattactcaaactatttgttttagtgatatataaatagccagatgatatgacattttccacaaataaaatcagtagagagaattttataatgttttaaacaaagatcacccttaataaattcaaataatgctctcaagaccttaatggtgatctaattaatatttcttcttcttagattaaagcattaatatattaatatagtttaattaatttagtacctgaacgatagctacacgtagaacatcaccatgcaagccggcggcaatacatccgatagccatagcggcgggtccggcaataaacctcaataccatcccaaacactgttaatctcaacccacatgcaattatctttttttgtagcgccatgaagatccctacatgttatacgtattagccattaatgtatattaattaattaattaattattataacatgacgtataattatataagtacgtacccatactaaacatggcagtgcctgccccagcttttgacatgatcgatatggacccttcaattatgcttggcatcttaatatgacacctgtacaacgttccaaacaaaaaatattaatatgtagacattataaaattaagctatatatttaccaaaaatattatttaattttacatatataataatatatattttaatagttcattgtgaaaaccatacaaaaaagtaaataatttgttgtaataaaataatattctagatacatttcgcacgccaatgttaaacatactccaataataaataaataaataaattatagagatatgattttgtccctgatgtactttcgcggaatgtattccgtggtacattagatggacctcagggtacattaaataagtgtgagggtacttttttactttttaacccttaattacccctacatcaatctcaaccgtcagatcaaataactccttcatctgatggctgccgtacatcacggattaccatccgtgaaagtacaataacggaacaaaatcatatccctaaaattatatatctatttttgttcacattatttctaaagaaaaaaaggttgcactacaccatttcaaagtttgagagggcctataaaaccatacgcactagacacatgcatttggaaaagaatagaaaaatatattgagaaaagaatatatatatgtgatcaccaattattttactcttgtaaagatattatatcttatattatacctgctggcgatgatagcccaaataaggccaatgaataccgcataagagttggggttcatagccactttaaaccccacaaccttaatcaacgaccagtaagactgtggagtatcactactactacttttatcaccaacacactcttccaccgcgtttatttccaaatccttatctttcaaatcaccaacgacactaatttttttgtcgtttgacgaaatatcaatcccggccgtacggtaacactcgagcacaatcaaaagcagggtcatccaaatgatggcttgtacgacagaagactgaacgacaatatcaacacctatttgaccgtacatggctttcattagaggcactccaacgacaagagaatttgtcaaagtgcacaaagaaaagcttgttatggaccaagcatagctgcctttgttactcaacttggcccaaaaggccaagatcacaacaatgatcaccttcgatatagcatcggctgctatgaaccgatagttccacttgaaagggtcaacgtgggctgtgaaatcgaatgtgtagaggggaagagtgaagaaacaaacaaaacgatttatagcaccacactggtcaggagtgaaaattttccaccatttcactgacccataacctaatattaaggccacgtagagtggagccgtggcttccaccaccttgtaaacatcttcccactttatcatgagtttttggctatgctaccgattaaaattagtatatatgataggtagtaacaaaaaggaagaagaaaagaagaaaagaagaaaagaagaagaagcgaaaaggtttttttctttctttttttttttacgtacgtttgagaaatattgtcgagcaaacgagaaaatgtagtttgttgtgatatatttagctctatttatacttgcttgaatttgaattaatggtatgatttaaatcagaatggggcactcaagtcaagtgggctaatcccttttgactggaggtttcgttaaataatagattaattagtaaaatttataaatgactatataaaattattattgaggatattaaataaattagttaatggttacgtacgtgtacgattttatgcgtacttggttgggttgttgaaaccggacatgtgtaatatatataagttaatttggatttggctttgtattgttattgccgatcactattattttcctagcacctttagatatgtaggcttgtaattgtttagtaatattttttaaatgttgttatattaaactatatgggaccttcttcaaaaaaaaaaataaataaataaaaaaaataaactatatgggactcgataattagttagaccaacaattatattaacatatatatagaatggtactaaatgcttggtgaggtggacatattatattgtaaaatattgatatgttatatcattggaaagaaagaatgtcattctagaaatttgcatggatgctatgttgtggcattgatgctattcattttttaataaaaaattgaaactaaaaagttattgtagctaaaaattaggatataatgtgtgatatcataattatagcatttttaaaaagtgtaatacattgaagtgtttttagaagtaagagtgccaaaaatgatgtgaaagagagataaaataaaatattatatttttagatgatgtgtaaatttttatcatccttaaaagatgctaccattgcatctctagtgacaatattttggagaatgcttgatgtggtggaaaacttaggtggcaaattatagggacgctatactattggagataaaagaatactattcttgaaatttgtattgatgctacacaatggtattcatgctatgtttttttttttacttaataaaaaattaaaaagtagtaacatatattatagtttaataaagaaaaaaaattaatatatataataatgtgtgatatcataatt

SEQ ID NO: 227151 - DNA, 1712 bp, Cannabis indica
agaatgtttgtggattattaattatatatgttttaataatttctctaattccataatcatattgacttaatttcttaccaattaaaagaagcttccgtgaaggaagccaatgccactccacctacaattggtacaagagaagaaaccacccacacacttggtatctgctcaagtacaccagaaattatatgcttaaaatgattagagagaatgaaaaagaaagtaactaccatgcatccttcttataacctgttaatccatatgcaatttctaacatcgtgtgtatcataagcttattcttattaatggaaaaaggaaaaaaaaaacagctttacatcaaccaaagaacactgtaaaagggggattttacatgaaggaaatgcatacctctggatccacatctaggttaatccagagtaggacaattaaccttctttctagcaattcttgcagcagctactatattgtctaagtcaaattcactatcaatattaacaaagacaccttcttgtgcagctaaaaccaaatcgtctaacaacttgccattcccattaaagatacatctgcacaacatcagatgaagcttatactaaagagagttgcagtagaatttctaatacacataaaagaacaagaaatgatgacacaataaatggggccaagattattggcaaaggagatgatccttcctcggatatttgacttaaaacttcattaacagcacacgccggtactggaggttcataactttgcataagaaaaaaggaaacctgaaaatcaagaaagatatttttttttactaaagtaatctcatttatttcatgataatatacttccaacataagtataatgctacataatattgcagcagtcctctccttacccagccttccataaattactctttagcaaacaaaattacatcttcttcagagccaagcacttgatcaagctcttattcaaaaatcatttcatctaagttggtttattaatgtctgcgtcgttcatgattcaacatatctagcttgtatactacaacacaagtactaatcctataagatctccgtttcaggatgggtttaaatgtaataagtctaagaaacgaatcaaaaactataaataacacattaacaagtaaaatacacactttcatgagagggtgaccttaaaagtccaagataaagatgaccctttaaccataaaactagcaaagttacatgttaaaattggcaagagagacatgcatatataaatatgttatagttaaaactataaaaatttattctccccttttcaatgaatctgaattgttacatattcttaacagatcaatagcccttcagattaattgttttttcctttgttgcagagttgtgctttacaattgcttggctcagctgaggaacataatgtcctaatacatagatgtccatgaataaaaccaacaattcaaacaaagtattatgatacatgaatgtaagtgtgcataagatatgtggttagcatgaagaaattggagaactggttggttcaaacatgaatttagcaattgaatttagagatgtttggtacttaattaattttattaaatcagcagaaaatgagttaggaggctaatcacctgcataactctttcctgaaatacaaaagtcccttcctttgtacctcattcccatcatagttgcaaatcgtagattcgtagtattggtcac

SEQ ID NO: 227152 - DNA, 3373 bp, Cannabis indica
aagcttctgattaagtagttccctgaaaaactgatccaaataccttgatgtccagtagtagaatgaccagaacaccgcggtctatttgatactgcttgtaattctctgctctccaactcttcatcatccacgagcattgaaatctgatttaaactttcttgagaatgtcctccctccaaagcaagttcacattttgttttgcccgtcggcttctgatttgcatctttgtaagatttcacctggaatgtaacaacatgttatgtatagaatatctaagagattgtgaacgcacagatcgcatttctataacaaataggtacttacctctcttcttttaacaaaatgtttcttcttcttcttctcttgtaatttgtcccttagccttccctgtatctaaataagcaaccaacctttcagcctaccagtaaacttttttcaaattagaattcaaataaattttgaaaatattcaatccataaaccctcaatcaagcttataaggaaatagaaaagtatgcaacactgtctaaatgacttacagtaagaattttttggttttttggttttctagcttgaatgtgtggatttcgtgcaacagattttgaaattgatggcccagtttcttcattggtaaaatcgatgctggtaggataatctccagcatgaggattaattacccgccatgctgtcattaaacctttacccataccatgcttctttgatggtgcattcttgccactacaaatcgtatttatgaaagcatgcttggaaacctaattgagatcatactgttagttaaaaaattggaaaatggtgccaagtaaaggaagaagaaagaagcccgtatgaatatcaaaggttcaagaaagaggttcatttactcccaacagaaaatctgtggcctaagccaaatataaaaaataactaaaagaagaagcttttctaaaatttcgtttcaggtaccttcgtccttttagccgctctctggctctctttgcaagaagaataacaaatttcggaatctaagagaagtagagaacagcaacaaaaaatcaagaagtgtgtgaaaacacatccaaaatctaaagtcataatgaaaaacaaagtaaaaagagcagattggcagaaaaagaacacagcaataagaataatcattaaaccacataaagacgtggactaaaaaattatccaggaaaatactctcactgtgttactattcacaagcagactggtttttattacagtacagctgtcaaacaacacattctatagatataaaaaacggatacaaagccaaaatgttttaggcaagaactagacaagtagcaagtagctaagcaccagttaacaatacattaataaagttttttaaacagaggctcaaatgctcaaagaaagaccatcaacaataattaatgctaagatgaagaaggatttagaaaagctaagtttataaaaccttcaatacacattcaaaagccctagtaattttttgatttgagtaagctcacagaacaaaagaaaatcacatttccaaacattaagacaaaagccttaaattatatttctataaagtagtgaatcaatcctactgcgtacctttgcaatggagaaggtctcctgaagaaggagaatcaaattccacaccaaggggaggaccatccttccgaaagacccttctgagaatgtagtctggggtaaacaaatcctgggaaattatgttcttagtagtagatgccttttggcgtttggaagataaagaacgtgcaaccacctttctagcagcatgtttctcctttgaagttgaatttgatgatatagttattacattttctcttttctcctttcttcttttctcaacaaaccaacactgaatctgcttggaagtcaatccggcagtagcggcatagttttcaatgtccatttgtgtaggatatttgttttctgactcagtaatcataatattagatactccaaccatttggggtaaacatcaaaatagattcttgtggcataagcttaaataagtgtatatgaaccatataatgtcttctaaactacatatcattgttatgtaagctattgcacaaaaaacagaggttcaatgagtgcttttcggttttggcaatcctctatacctcttgtccttttaggcttcatatcgttgttttcttaattattgtcaaacaagttacattcgttcctttaaaattaataataaaaataaaatataattatcattttgaaagaagaaaaaaataaggcttgtagtgggggtttaattgcaaaggaaagagagaaatataagagcaacagaaagtatatgaaatgtctactgttgcttcacaacatcatatcatgggttcttggaataattgggcttcctgtattgttgagcatgaagttgtaagtatagcatataggttgggtaattgagcttcctcttggatagcataacttcaaaattggttctatttgtattcaatactttatttctttcttaatttttttttttttttaaaaaaaaaaaagtaagagatagagaaagaggttacgcttgttacctaagtacatggtgtcaagaccttcaagttgtacaggtgttttcctcttaatctccatgattttttcccttgtgggtattttccgcttccggtatctgcaactccccataaaaaataaataaataaaccttcatttcctcatgtaattgcactaaacttcagtatctagaagtatagaaagaaggaaaccatttctcttactctctttcttttccattcggtttgaaaacgaaaagtatacataaataaacaaataggattaacatcaacgaatgttaaattttcaatcaagtgcaaattattcaattatattctgaattaagcccaaaaccacttggagtagcgaaaacaaagaaagccataagaattttgcagaaaatagaagaagagcagggaaatgaaaagagaaaacaaaaacaaagaagtttgggttgggttgggtctacagaatggagagaatagaattgagaaacttacacagagagtctctctgtctgggtcggtgtctcagtgagctgccatggaagacgtgaggttgattgaggatgagctcgagaggaaaagcagagcagtgagctgagaagggtttagaggcatgtgaagataaattatcaacacgtagggttttgggtgtgggttttaccataaaattatttttaatttttattacaaaattaaataaataaatatctacatatctttttctcctcatttacgtgccactgccaccaaaatattttcttttcttttttaatatctgttaatttcatatatttagacattactagatgagagttacatattagtttt

SEQ ID NO: 227153 - DNA, 2648 bp, Cannabis indica
ttttcagcactcataccctcacacttcagctcaaaatagaagagctgaaaggaagcacaagcacattgtagaaatggggttgacccttttagctcaagctaggatgcctctctaataaaggattgatgcatttcaaacttcattatatctcataaacagacttgcaacacccattctacatgacaaatctccatttgaaatactgtattgtagaaaaccatattataagcaagtcaaaatatttggtgttgcatgctatccttgcataagaccattccaaaattataaatttcagttttattcattaaggtgtgtgaatttgggttataatgattcctataagagttataaatatctaagcaccacatgcagaatgtatatctctcaaaatattgtatttaatgaaaaagaattcccatttcaaattcgttttttaaacactcatgcacctaaaaaaatagattttcatccaaaatgagtcctggtcacaactaccaaatgtccactttagaaaattcagtacaatgtcacaaaacactgctaatcttatgccatctcaagcacctcctaactcatcaccagcgacaacatcttcataatattaggtaagtgatcaaaatccctcatcctcaaactttgacactcttgatcctgaagtaacatctaatgttcaatacattgctaagcaacaaataccataagaacctccaagtgagaacatggcagatcatgatagcaataataattgtaaatacaacagaacatgcaactactactcatgcctcaagtatagctccatttcatcccatgatcaccagggaaaggattggtattttaaaaccaaaaacttatttcagtaatgcaagatggaaaccagtgtgtgaagaaccaagcaaggttacagattctctgaaacacaatggatggaatcaagttatgggtgaagaaattacagctctcaaagacaacaaaaacctacacccatggttccaaaagttgatgactacaatctaattggttgtaaatgggtgtccagagtaaaaagaaatgcagatggttcctttcaaaggtacaaggcttgattagtagcaaaagattttcatcaaaaagtctgtctagattatggtgaaaccttcagtccagttgttaaagctttgactatgagaattgttttgagtattgcaatttctagaaattgagaaataaaaaatttgacataaataacgctttcctaaatggtcatatagaggaggatttttacatgtgtcaacctgaagggtttaagaatctaacaaaaccagatcatgtgtgtaaactgcacaagtttacttgaatgatattattgttacatgaaacaacaatctcagtctaaacaagtttattgaaagttaacatgcatttcactctcaaagatcttggagagcttcacttcttccttgggattgaagttttacaatatgaaaaaggcttgtatttcaccccaaacaaattatattgaagacttgctaaagagaaataatatgttgcatctaaaatcttgtccaactcctacaactgttggtaaatctctgccaatctctgatggaaaagagatggagaatcccacagtctacataaattttattggagctctgcaatatatatgccacacacaacgtgacatcaattatgttgttaaatgtctcagtcagcttctaaaagctccaacaatactcattggaatgcagccaaaaagatcttaaggtacttaaaggaagatagtactcaagttcttcacatatgttgtagtgacaaaatgtacatcattagcttctcagatacagattgggatgttgatgatatgagatctattggaggttatgtgtgtatttcggtgatactcttgtgtctttgtcatcaaagaaacaagttttcgtttctagatcaaacacaaagtctgaatacagagctcttgctcatgttagtattgaaataacatggattgaatccttacttaaagaaatcaaattcccttagactgctcaaccaatcacttagtgtgataatatgagtgctagtgctcttgcttcaaactttatctatcatgctcgtactaggcatatcgagctagacatttactttgtccaagacaaagttctaagcaagacattgaaggttagatacattccctcaacatatcagattgcaaattgtgacaaagggtttactcactccaaatttcagtacctgatttctaaactcagtgtgaagatctaaccctctcgtttgaggggtagtgttaagaattagtttatgttcttattaattgattaagttgttattatgttggttgtaatcaagttgttacattattttcaatattttacctttttgttgttaatggtctctcttttaccagcattagggtcacttgtcaagtttctattaatgcttctaaattttactcgatgtataaatacaaattgtttcccttattagccttcattgagctaagaattacaatatcaaaatagtgaaatttaacttgtgctgggtttgggttcgtgtcgaaatgtgggttattagagtttttttttcttagtaaaagaaatataaaaaaaaaattagaaaacatcaaccaaacgcgtattgtattttgaaaactataa

SEQ ID NO: 227154 - DNA, 2869 bp, Cannabis indica
gataatactagtgctataaacatttctaaaaatatttttcaacacttccgtactacgaacttagacattcgttgtcactttattagggagctcgtaaaaaaaaatcttttcttagaatatgttgaaactagcaaacaaatagtagatatttttactaaagtttttgactatttctctaaggaaatacttacggttttgtactatttaattactgtgcacttcatggttcttgattttttgctttgactaaatgtacataagcttcgtctttctttttgctctagaaaaaagtttcaaacttgagagaattgcaatttattaattttattgataatgtttgtagtgtcatgtttttatacatttttagtttaagagaagttttttactcctcctaggaatatttgagttattaaaacagtgttatgtaagctaccatttttaaaagatgaaaaatctattaaaaattgtgtgttcaagctccattggaagaatagagctacctatctcaatgtgtgaaagtcgtctttaagtaagttggtactaggcaattaggagttatatagaggatatgctaccattgaggtagtgtgacagtgtctccattggttacatatactcagttaaagtctttttaacaatttgggcaatattctctgctttcactttcacgcacatattcttggcatatattttttaaaaaatatatatcataaaaattagaaaatggtcttataaagctgttatatactgtttgaattgcttataacatttttggtgactgagtaaattcttttcctatgtaacctatatgacttcattacactaatttattagtttggtaaaataatttatgtgttatttgtattttcggcaaaacacacgtgaattccaaataaatgcttaaggcccatcagtgggctcaaataacataaactgggtcgaatctaggatccatttagccttctgggagaacaacaacataactcgcctaggtaaggttccgtcaagcctaatcagcatcaggaagatttatcaccatatatttgacagaggtccccggtgtttatccaacatcccattatagtttcctgttttttgtctcgcagaagattaggaattactttcccaagatcttagacagagaacaatatcttgctaaaaagggaactgaataattggaaatcagtaattaatatgtcattaattacccacaaatataggacatggtatgaaaaaatagcattgtgataaggcctccacgtcagcatacacaaggtgccttatgggtcaggcttcaccaaatatgcccaaacttaatgtattatttgtaaactccctattaaagggaaaagggtaactagtaagacctttataacactataagtactcattgaatacttcatgcaaagggttagaaattcttgacttacttgcttaggcaaagaatagagcgctcatatttattgtaatcccaaaggcttttttagccaacctcataataatactgagtcgtggactaaggctcgttaacaccctaaccacgtaaaaatcctaagtgtcttcttcatatattttttcttgaattatattttctttagctcttatatttaataattagttttccgaaaactcgataaatatttttggtgctttcattaagagctgaataaagcagtgatacatcaaaaaattacgttcagtaattatggtactcacgcaaaataaagtctagtcttcactaccaagatacctcgaaggacgatgtcgaacctaatgccaaaaacaagatttgatgaagatcgcgctgatgtgactagtcgcccaaaagaggaaagattagcatgatgagacaaaccttcatgaagatcccattgatgaaggagacgaagaagaagaagacgagtttgaagatctagatcctatggatccagaagacaatgacgttaataaaggagatgagtgccatgagccaaatcttgaggttgttgagatggccaaaaaactagaagcaactgaacaaaagttggcggcacaaacagttttctcgattaatcctcaggttaataatgctgggaaaacaaatcctaaaaatcttgaccccgcaatcctcctaaggataaatagaaaggacagataggagaaacctacaaaaaagttgctccaaattatcagtaaaagagaacaaatcctgtcagtcagcctcctgagaaaaagaaaggggccaatgctttagggtaaggtcattggactgattctagaggcaaaattatgcataaggaaaagtctcatgctcaggcacgaaagtcttgaattctactagctagagtgatgatgtggatgaagtttatccaatatcagaagacagaagtggaagtctttcaacatacgatctctgggcacaactaaacgccaagagggaaaaggctagaaacaagaaagcctgacctcatggagatgacctaagaaaccacatcaatgactgaatttacataagagacccatgatgtaactactcaatgtctggaatgaaatattgaagagctgacaaacctcatggagcacatctccctgcagaaaaatggaactgtgtccgacttagaagacgaggacacaaaaccatgtgtaaaaagaatcatagaagcacaactaccagaacacttcagaatgctacaaatggatttgtatgaaagtagaacgggccccaggggccatctatccaaatatactagaatgatgcaagtggcctaggtaagtgatgatacaaaattccttttttctctttaactttatccaagtccgcaaaatattggtggaaaagatgttgggttttatgccctaaataaaactctttacaatctgattagttatc

SEQ ID NO: 227155 - DNA, 7609 bp, Cannabis indica
cggccaaaaaaattcaggggcatgatttagtacatgtcaaaatttttaaataatgttttaatgtgactataagttatcagtacaattttagtacaagaatttatttaataactttgaattacttaaaatacaatttattaacatttaatatgagttaattagaatttttataactattgaaattattagatttaataactttgtctaattttatttaattttactaatacaaaatcatacttcttgatttttaatatgtaccaaattatatcacctaaattttcattcatatcagaattttttaataaaattagacaaaaattattaaattcaaggaaaacttttaagggcaaaaaaaaactttacatattcatcttctttgattgagtatgaaatagctttctatatttatactaactatacaatttactattaaacccctataatctttcatgtaactgacgcttgtatttttgtaaataaacctcgacttatatagaaaatcattcccattctaacctgtaatggatcaaagtatttttttttttgttgaaaacaaactcaaagggagtttttcctacaatgaactgttttactttgaaggtaaattattgaaacttattaaatgagaagaagaaatggccatggctagtgacttctacaagtgttatttagtctgagtcagttctaatgccaaaatttacatcttacccaacagaagatagatgaagaagattacagtgaagcatgttctgaatatgaacacatttgtgttttttttacagttcatctttagcaacaccacttcttgcatgcccagtataagatgtgtaagctttgattatagattcatagacttcaattcctttcaagtattcagctatgttcaagaactgcaacaaagtttcaaacatgattcattattaaaagattggaatcgatttgagacgacacgttgaaacattccagcagggatgggattacactcacctcattgtggtcatggagaagaatgggagtgttggccataggagagaatccaattgctggcaaaccttggtcccggaaatagcgagcgtctgttgatgcaggaaagatttctggcttaccaagtttcccattagcttttttcacagcttcttctaataggttccaccaggggtttgaactgtcagttgatgtaatgagcggcttccctgacttatcaagtacagccattttctgtatgaactgaccaagctaacaaaagtatagttagagcaagtggaattgagctcattcaagccagttaaattcttggcaatcaagccaagtagacgagccattttttatgcttttactctgtctctgcttaatttaaagggggtattcaagtactcactgcatatagattatattaagttgcatgctaatttatgtaaataggctaattagaatttttgcctcctgaattttgacatgtaccaaatcatactctcggaacttttaaggtcatcaaaattccctctaaactaatgagatttgatagatttaaggatgtttgtccaattttagtaaagaaagtctaacatggatgaaagttcagtgggtatgatttggtacatgttaaagtttgagtgacatgatttggtagatatcaaagtctggggagcatgattagaacataaacaatcactgaattaataaaattgaatgaaattggacaagaatctttaaatccaacaatcttaatagttcaagagacatgaattggtacatgtcgaaatttaagacacaaaaatcctaattagccttttagatatgctcaataagattcacaaaacaagatcattaacattaacatacttcatatgcttacatgttatagcaaaaaggaaaatatattcccaaaaaaactaacagtgcaactatgtatagttcaagtagaaaagtaacgagtaattaccctaaatgtcatgttgcgtgaagcaggagcccattcctcggcgatccgtctctccaaagacttgcaatcagcagttggagggatcctgatatcaaaacctgcttctgcttcagatggctgcaagttcataacaaatccctgatagacaaaggaaatttgttagtgagtgtcactaacaaaattaaagaatattaaattttgtccattcttcctattttatcactaagtgctcaaacataagaatatgcttgtcaagcttagaacttatgccttgaacataaacaaactcaacttcataaacctctcatttagagatcaactgatatactcaaatgatgatggtagtgctctttaatttattaatcatgcaagtcacacattagctaggagaagtcattattcttaataagatttaataaacttttcaatcattgttgattgtcataagaatcagatttcatatcccacattcttgttgaaaaaattcgtaaaaatagtcaagtatcacattgagttgaaagtcaaatcaaactcgatcgagtgactaagtagcatcaaggttgtaaattaaatttgcttaagcttctcctatagacttctttaaataccattgatcatcctgctagaatcaaattaccagtagttgactcatagtagctttagtagatttcaactgcagtcacttcaaaaacagttcatatcaaattgggcatctccaaagcataggcccaaatgaagttttacttcaaaatggagtaaaaaaagctcctttaattgatatggcaaacactacaaattgagtagtaaacagtgcttgctccttcaaatatgaaatctataaatttccaacttctagcttattcatcttcattaacaacaacaaaaataaaggaattatgtccttaactagttaaactttgccttaacacttctttcaagtcttcatataaaattttaatacaataagataacaaaattcagtccaagcaagataatctaaggtgacaaactatataaatgaatcacttacagttggagatggggttccagatttcagaaaagccatgttaaccgagacaacttcaccttcttcctttaagcccgccttcaccaaatcgaactgtgaagcacgaaacttcctgatactctcaatactcttcatcaaattctccacagcagtgttgtcatatagtttggccccatggccaggtgctcctatggccttgatcaccagccaccaagggctcctctctgcataaaacgccctgtaattctcatttggcgacgccaaacctgttttccaaaaacaaaagttaatcattcccacaatgaagtagcaaatattcatataatacttttaaggctaatgaggatgcggggtcaagatatagtaaaatgttaaagtttgggagcacgatttgatatatgtcaaagtacagaaaacatgatttaatatagtgaaatttgccaaattaaccatttgaaatactaaaatttgtaaaaatgacctcacttgatttactctatgtgaccataatagttgtacagtagaaatctatggacgttttgcgatataataatcgtttatggtcgcacattataattcataatcatttttgcaactatagaaagttattttgataataaaatttaagaatttttttatttttacactttaaaatagtattttttatatttttacgaaaattcacataacaactaacagatcaacctaaattacaacaaaaatccacataacaacctacgtagaaactagcgaaaccaaaccgtaaattttaaaaaaaataatatacagagtaattcttttaaaaatttttgtaggattattaacaacaaaacacagtttaatatatgaacaatcagattgtcttctagtaaaattgaataaaattatacagaaataaaaaatttaacggtccaaaaaacttcaagtacatacatagcaaagtttaggaaaaataatcctaattagcctacttttaacaagtcatttacacaagattcaaagctatggcagagaatttcaccttcatcaagcacaatacccacgttcaattcctcaaaaacatcagactcagcaaacttctcagccccatcatggccaccaatctcctcatcaggaacaaaagaaaggtaaaccgaacgaaggggctgaaacccagaagccttcaatcgacgaatagcctccaaatactgcatacccacacacttcatatcctgagaccctctagcgaagacattgccctgggaatcgagataagccgataacggatgatgattccatttctcgtgctcggaagggactatatcagtgtgggagttgagaagtacggaggggagagaagggtcggaaccaggccatttgaggagaacaacgggcttgcccttaacaaactcgatggtttgggattctagagagatggaatttgcctgagatatgatgaaatcggcggcttcatagtagtgaggagtgggttgagctgtgtcgatttggaggtatgttggaaccttgatatgatcggttcagatgggtgttcttggattgaagctgttgatatggtaaacgagtatagaaagcatatactgagaattatatgacagttgtttttagccatgtttatggaacaaagcttcattttcatcttctccttactctctctctctgttttctgtaataagagagatatgataaaagatgctccaatcaagttttttagttttttttttttttggttaaatgtccaatcaatttttttagggggtgatatttatcaatctgaccaaaaattactaaataataaactattgtattattattagaataacacaatataaattatactatttaatagttactattaacttatattattatatttagaaatgatttagaatcaaccccagatccaaactttgaccctgaactctgaacttggacttggacacgggacccagacccggactaggacctaaacgaagacattgacccaaactcagaccccagacctagattagggactccgacctgaaccgaatttgggaccggacgtcggaccacggacttggacccgagaccacggacctgaaccctagacttagaccggacccgaactcagaaacagaatcgaacttcgaccgaacccgagcgcggacttcagacctggaactcagatcagacccgaaccacgaaccacagactcgaacaccgattcagaccccgaacctggacctagaccccaaccccgacctggacctagattcggaccggaccatggacttggacccgggatcacggacctggaccttggacccagaccggacccaaacccaaaaacggaattgaacctcgactgaacccgaacgcagacttcacacttggaaccctgatcggacccgaaccatggaccacaaaccatggactcggaccccaaatccaggtcggactcgagacccaggacctagacccgagactcgggactcgagacccgaccccgaccctaacccgaatctagacccagaccggatgctggaccgggacctaagtcgaaccctggacaaggacccgaatcccaaaccgggaccgagaccctagacccagaccggaccacaaacccgcaccagacaccggacgttggacacagacctagacctggacccaggacctgaatcagacccgaaacccagcatgtagtcggtgtttaggtcgagtttattcaaaatatattatctttacacaacctattaatacaagtcaataccaaaacatgatattgtattaaataatacaatataacgtaccaaacaagagtaatttgcggcgtaaatacttaagtttaactctcagttgcatataaatacctaaattatatttttaaaacttctgtaagtatctagcgttaagtgtcaagtcaatggcaacatgacaaccattgattggtccaactgattaaattttatttttatttaaaaattcatttaaatataccaataagaaaatgacacgtggatattgacttggcagttaatgttcatatacatattaaagttccataaatataacaagtattattaccgtcaaaaattaaaggataaatactattttggactcttttgtagtttgcattgcaaaagttaccaactggaccatttgttttgttaaatgacaaaattgaccttgtattttctaaaattgtaaaaataggaccctgagcttaatttttggcatttttttttaatatggccaactttaaaataattcctaacacgaacaacagatacagaaaatgtaaataattttgttataaaacttttagatcggattattattaaattttattttgaaaaaaaattagtttagggtcttatttgtaccattttggaaaatacagagtctattttttcatttaacaaaacagagggtccaattggtaagttttgcaaaacacatggtccaaaatagtatttatccaaaattaaacttacgtatttatctacaattaagagtcaaacttaaaaatttataccgcaaattactcaatactgaaatttataaaataacctcgcttcatttactctatacaattataatagtcacacaatataaatttatagtcgttttgcgaccataaatgatcattgtaattataaaataactataaatttacattgtgcgataaaaaattattttgtaaattttaatattttaaattattaatttaataaatttcacctaacaatatcaatttgctaataataaaaatatttaaaagtcagtttactaaaaacaattttcataaaagttactcctaagtggaaaaagtattcaattaaagcaataacataagacaaaaatggggtccactttgaattgtttaatacacatgagattgaataagatgaactagaatagcctatcctagctcttccacattttgaagaaacaaattgagaaagcattactaatttactacatatgccatagagagtagagacggtttgttgtgacatacctaatgagaagtggcctcaaatcttatcttaacaagattttgtatccattcaaccaaaaaaattaattatctatgggcattaacattaaagttgagaggttgacaccaaagatatatcccaagaaactacaaaataaaactttaaataagaaagaacactaacttatgttttttcatcccatcaataggatatttacaaaattaggggaataagtagattaatactaaatatttaataactatataaaattacattagaaaattttcatttgacataagatacttgcatatcataaactagcatagagattttagtagttaaaatattaaatatttaatggttacattaaaaatgtaatgatgatagttatattttattagaaattttattataatagaaaaaaaattaaaacattacaactttattgcaacacaatataaggaccaataaaaagattaaataaatgttacaacaatatatactacactatatatatgtatttatacgtatatttatatatataagaaaggtaagagaagaagaatatgtataggaaacactcactcacaatcttgaatgtagattagtggggatcaccataactcgaacaaggtattacacctttgtccaaaa

SEQ ID NO: 227156 - DNA, 7768 bp, Cannabis indica
tatatttttttttatcagagttcttcattataatatttttgtgtatcttctttaaatacttgatcccttatatcacttcttaattcacccaacaaagcaatatattcattcaaattaagaatcggttggaatttttgatcgatcaatggcttcagaggcgcgtccgttgccacggtttttggttctaaaatcatacgccaatttaaagtacttgagaaggataagcaaggaagaaagtatcgaaaataatctttcacaaacattcctgtatttcaaagaagacgatattacgagtcctttggtgaaattcgaaatggaaagagccaagaagaataaaagttatgtgcacttacgttgttgcaacaacaacaaatacttgtgcttaactgaggatttgtatatccaagcaagtgctgagaagcctatagaaaatgatggactatcaagtacaatgttcaagtatgaggcagctgatgttgatgctggatcggataaacacaatatccgaattcaccaccccaccactcgtcgttacgctattttgaaggttgatcctacgacgccttacgacaaagctttctacaccgataacaccttcccaatcgataaacgtgacacaagctctgtgttcactgttttggattgggatagatttgccatatttcccgaaaaagtttccttctccaaaaaggagaaggaaactaccaaatctattctcagctgtcgcaatagcgattcttacctagagtttgtggagggacagagcgtcggcgatctaagggtagtaaatgagatcttcacgaaacgtgatggttatatccgcataaagaacgcttccactggaaagttttggaagcgcgacgaagataactacatcttggccaactctagcgacgtcacctgggatgacaacaacaccatctttctaccgataaaactcggggaaaaacagacggttgccctcaaaaatatgggaaaccgaaagttctgcaacaaggaaaagggtagtggggtgtatttcaaagccgaaatggacaccatgatgaatgaaactaagttgtgggtgatggaaagtgtcatcttaagtactatgtacggcttcgatttccacataccggatggtagagtgtacaacgttcacattccaatcgacgacagtttagcagcgaaacgtcaaaacaacgaaagtaaggaaaccagtatggacatcatggtttcttacaagaaaacaaaatctcaatctgtccaaaccaacctttccctcagcttcgggttcgagcagaccttgacacttaccgtgattccggaaatccttagtgggacgattcaattgtctggtcagtatacatacgaaagagagagtaaggatgaatcgtcaaaagagattacagtggagactacttacaaagccaaagttcctggtaagacgatattaaaagtgtttcttgatgtgaacaatggaaagtgtgatgttcctttctcttactttaaacgggacacttactacgatgggaaaaccactgtgaagcaaatgcatgatgggatgtacactggcgttaatatgttcagcgcccactatcgtgtcacccatgaaaagttacctattaattaataaggcttaattgctataatttattttttataatggctcttgatcaaataagttcaacctatatatgtactattatgttgttttccctctttaatatatagaacttcttttgtgtgtattcaatgaattggggtaaatgatatatactcaattagttctgtttttgttttaatcaaaacactgtgtcctctccattactactctgtctacccaatcaaaaaatgccatattatttaatgaaacattgaattgaatcaaaatccactattaaaaactggtgtattaaaccaatataattctcacaggtcaattattttttatttattaaaaaattaatggttaacttacactaaccgataggggtgtttataaaatatttaatctgcacaatctaatccaattcaatctaaagcgaaaactaaagatatctatacttgtgctgattagatattgatcattgacgaaaatttctaggattcgaatctaatttggaatacatgtcaattttcttccaaagcggagaatctgctaaatgatgcaattttcgatccttaattctcttttctcctaaattaacatatcccaaaataaaaattttgaattcaaattatttcaaaataatacatatctcaaccaaacttttaattgaagcaaaataacattctaaccattattttacatatccctaaccaagcttttccattcaaaattaaacaaacattaaattaagattacaaactaaaagtttataaaacactcaatatacattctaaatttcttataaagcaaacttttcatacattctaattaaccactaattttcatatccttaaccaaaatttaaactcaaaattatataaaaaaaatatgttatatatccatatttcaagtagtaaataataggtttcgttgcatgacacatgcagaatgaaatgaataaattaactcagttaattatacagttgatgtgtaaatagcctcctcgcagcatgaagtccatacatgttcttctcggagtacgttggtacttgcaacattcaattcttaccacccctcgcaatatgaagtttatacaagcgctttttggcagaaactttttgaactgatgggaactaaattgaagatgagctcgcttaccaccctcaaacgggtggtcaaaccgaagtcactaatcgatacttggagtagtatttgtgagcttatatcgtggaataccgaaaataatggaacaagtttcaaacttgggtcgagtatcactataatactagccaccattacaccatcgacatgacccccttccaagcagtttattgctgcactcctccaactattcctttctacgcttgagaggctaccacaatccaagtagtggaagatgaattacatgcacaagacgaaattctacatcaattaaaataaaacttactgcgagcacaacaacgtatgagctagcaagcaaacaagaaacaaaaagacatcgagtacttcaacattacttggtgatctggttttcgtaacacttcagccatataggtagaccatagtggctcattggcttaattccaagctttgttgtcgttacttcaacccttttaaagttatagctcgagtgggaccaatcacctagacattgaaacttcctccaggtatccttatctgcccgacctttcatgtttcacagctaaaaccataccaaggtactccaccacaaactttcttccctcttttggagttgagcatcaccaaaaaacccgtcttgctttccttggccatacttcttgctcgaattcaaatggtaagctatcaacaaacaaagcaagttcttgtccagtgatcattgagcaaccttgaagctgtaacttaggagaatttagatgcctttattcgaatgtatgaattgcacaaccttgaggacaaggtcgttttcatgggggtgggggtagtgttatgtaggcctaaatgataggcccacttaaccttaacaaatcaaaggctcaagactaaatgaagagatgtgaagaagttgtatcccaactaaaagaaaagacactagccattggaggccaaaccagcaagccgagatttaaagagaaatagttggacgaaacataggaagaaggaatgtgtagcaagaggacttgcatgaaagccgactagctcaaacttcatgctcaagcttggacatgataagagagtgagatttttgtaacttaattttgttagggttgaaaaattttattgattaaattggggataatggctttgatttttttcatgaataatgaaataagcaattgatttgttgtgggagattagtcttgtcttgaagaaggcacttcactaacagtttcttgacttgttcttaagttcactttcatctagtgtaactggtactcttgtgtgatgctaaataatgttttttttttgagttttttagggtgcaagatgaggactttaaagaattttagccatttaagtactacacttgcccaagcacagttcactataaagttttaatgggagctgatacattagtggcactataattgcactttgttagattgcttgcacaactaggagtataaatgcgtcgggtcagatctaatccaactatgatccgacctgatcaagatcatgtaaggatccaccccgccatggctcgctagattagatactcagatcggatcatattcgacatggctttattttttaaaattttaattttatatctaaacttataattttatgtctatttttattttgtatttgtattatttaatactatactatgtttggtatggacttgtattaatagattgtgcaaagataatatattttcaataaacttaaccccaacatcaactatgggtcgtgttcgggtccagatctgggtctaggtctgggtatatgggttcgggtctggttttggatccgagttcgaaaccaggtttgagtttgggtttgggtttgggtccaagtcctagttcgggttcggatctaggtctcgggtttgggttcaatcccggatttaggcctcgagtccgggtcctgggtttagtttcgggctcgggtctcgcatctgtgtcccaagtctggtctcaggtttggatctcagatctcgggtccaggtcccgggcctagattcgggtctcgagtcttggatccaggtctgagtttgggtctgggtctgagtctgggtccgagtctaggtccgagtccgggttgtgggtctcgggtctgcgttcgagttcgggtcggagtccgagtcctgagtctaggtctgcatttgggtctgggtcctaggtctaggttcaagtcttgggtccaggtccaagtgtgggtccgaatatctcgagtctaggtccggctctcgagtttggatcccgagtctaggtccgggtcttagctccgagtttaggtttgggttcaagtgctaagtctgatctagtcctcggttcgggtctgatctgggtacggggtccgagtcttaaattaggtgggacatatcagaagtgatctgattcgagatccaataagtttctgaatgtttcaaattaaaagtgatctgtcagatcagggctctaaccccctccaactaaatgaatctttttgacatgcctatgcacaacgtgattaatcactaataaaaataaattaaaatatgtaagagattaatgttagtgaattgcacactctagtatgagcttattattatttgattgaaaacaggtagaacactttgaaattatatatcaatattacatggaaggattaatatatatatactctgttgatttgttgattaggtattttttcgagtttgtaattggcgtcaacatggaaggtgctaacccagtgtaaattccatcatgcatcctcactattttttcttccccatcgtaaagcttatcgaccctatcgagtataagagtacggaacatcacacgttctagtatgtattggaagttaaaatattaaacttgatttagtatagttaatttttagaattttcttgttgttgctagagtttatagagtattcctaatttactaaaatttctagaacattcttgtatttgctaatttgtttgagtactcttgatttttctataattctctttcacttgtgttagtattgagaattatgtagaaaaatatagaaggtggtcatttaatcatgtttctagaatagtccatagtgtcctataaatatttatagagatgtaatcccaccattttgtatcaagtaaaaaattacacaagttgagttataaaatatagcctcttccatatcattctctccaatactctttttatttcccaatatataatattagatccaagtaggggaatgatctccttccaagttccaatgctcaccaagagcaattacgactattaattgttgagaaaggtcataaagagtattaagaatatagaagggtgcactatatttatttactctgtatttttgttctgtttcccttctttctcttctaattccgcttcttgtttccgaagctttaagaacattgtcagagttagttagagtaggttagttagttaatgatgtttagtctttctttccttatgttttgtaaccgccctttgctgagtatttaaaggctctctctcctttctttttgtaacatagtattatttctaatacaaaataaactctttttctccttttctcaatatagtatcagagagggaaacttaggttttcccgtccgatccgttctcttccagcttgctgcgtcttcttctccggccaagctgtgtcttcatcttcttcttcgattcttcgttctccttgttcttttctttctggccatggcgatcaaaccgaagtccagaccaccatttctgatgttggaattaatcctggacagtctaatcgaggtcttcaagttgctcctgtcaagaatcctctcgaggatccagcaattccatattttcatcaccatggagataatccaggaaactcccttgtatctcaacctctcacagagcaagacaattatgtctcctggtgcagagcaatgcagctcgccatttctgtgaaaaacaagagcggttttcttgacggttctatttctaaaccctctacttctgattaaaatctttatattgcttggtataggaataacaatattgtgatttcttggattctaaactctgtgtcaaaggaaatttcctctagtattctatatgatgaatgtgcttctgctatatggaatgatttaaaggttaggtttcatcagaaaaatgggccacatatatacaatctaaggaaagatcttatgaaccttaagcaagaaaatcaaaccattagtatgcattttactaaactgaaaacgatttgggaagaactaacaaattacaggccatcatgcacttgtaatggatgtacatgtggtggagtcaagaagcttcaagaccattatcacatggagtacatcatgtctttcctaatgggactttcagactctttttctcaagttagagggagcatcttgtttataaatcatctacccaaagtcaatagagtatttcatctggttacttaagaagagcatcaaagaggtacttattaagcacctaattccaacaattccagccatgctatggctttttcctttcaaaatgacaagaaagggaatcaaaaggatgacactcaagcctctcggtcacatccctctaaaagaaatcatcccttttgcacccattgtaacattcttggacacacaatcaaaaagtgctacaaaattcatggttatccccctggtttcaacaagcaaaataaatccaaagaagctggtgcaaatcaggtacaatctggaaaagaagaagactctactgcctcagaaaatcatgctatgcttccgcagctaaccaatgttcaataccagcaattattgaacttactcgcttcacatcaaactggtaacaacatcaatgaacctggtacttcctctggaaatttaggtattatcttatcacataattctatacttccattacacaactcttggatcattgatatcggagcaacaagacatatttgctctaatatcaaacttttccaatgtatatgtaagatttccccaactaaactcatacttccctacaataatttccttatggttaatca

SEQ ID NO: 227157 - DNA, 4648 bp, Cannabis indica
  modified_base (14)..(14): a, c, t, g, unknown or other
aaaaaaaaaaaaanaaaaaaaaaaaaaaaccaggctaataaataaaaataacataatcaaagtaataataagcctaaacataatattactaaaatgattatttatccaaaaaaagaagattcttctcctgaaaaaaaacaagaaaataactaaaaaaaacttaggcaattaataataaattagccaaattccgaaattacccctaccctgcagattccattttgagtttcaatgggagtcagccagaaaaagtcgaaggtcgtcgagaatggtccggccatactcaactctgtcccccttcaacacatactttctcccctcaatctccgaatactcactcaaacccatttccccattttccttccacagctcattcccaaagcttcggtgcgcaaaataagcctcagccgaaaccacctccttctcaacatctcctcccaccacctgaatcgggagccgttcgtagtggccgatagcgacgccttcgagatcgtctaggagggcgagacccgaggccgtgacggaatagagctcgcccttgattcgttgacccgacccgggaaggttgattaggtaagggatgccgtagatgccgattacgaggggaatgggttggtaagtgaagaaatcgccgatgtaaacggcgtcgttttgggagattaggttttgagttagattgtagttctgaaaaccccgcttgagtgtgccgtaggagaaaataaaggttcgtttctcctcgtcgttgacgtttgacgtgtcagccattgattgggagagtatagagattcagatttgagagaaggctcagattttaaattgaatgaacgctcaccaatttctgttgatatatatatatatatataaatagatatcacccacaacaacaaattcagcttttaaatgaaaattaacaataaaaagattcctctttcatattaatttttcattaattaaaaaagaaaaaaatgttaaagaaatagaaagagtaaaaagaggtgggttgagaaatcttgggtttgatgatatcaaacaaatcgagtgagcaatgtctatcactatcagaagattattgctataagttataacaaccggagaaaaatagatgtgagtagttgtgtaaattacattagttgatttaaggattttttagttttacatttcaaaataattttttttatatatttttctaaaatttatataacaacttatataaaattgtcttaaatattttagaagtatgttctaatttttaaagttagattcctacaaaatactaaaaactctaattattttattaaaactgttattgattccaatgaaacaaaaaagaatagtagaaaaaaaaagaaaaacttacaaaaaatactggaatttaagttaatttttacaaaaatactgttacacggaaatattttcaaaaatactgtgtttttgtaaaacaccagtaaaacacaaagcacgacaactcaaaacaacagtagaacaccagtaaaacaccagtagagcaccagtgaaaacttaacacagtatactgcagtatgaaacttataaaaaaatacagtaaaaggtaaaaaataccttctgacagtatttttgtaaaaaaatagcaaaagttagtatatcatgtaaattttccaaaaaaaattaagaaatgtttttaaaaaataataaataacaataattaattttttgtttttaaaaaataataatagaattgaaaataggttttgggaattagaatagaatggtcaatcatgacaagttgttaaccctttgaaaagtttaatttattaaaaacaaaccctaaaaagcattaaaaaaaaagaataattatataaaacacaattctttgtaaaaaaaattacatttttacgttttaattttttttcttttacatttttataattttctataaaaacaacactaaaataacaagaaaattagataaaagtaacaggaaaataatatccaaaaaacatgaaaacaacaacaaaaaataacatacaataacaaaaaatcaacaacaaattaataaaagtacaacataaaaagactatattttctgtaaataaaatcaaaaaaatcgtaaaaaatatttaaaattccgtacaatagtatttttgtaatttttgtgtgtgtgtaataatctcttaaaaaaatatattagatcctttatttttttaggccttatggagtagcccaacttgcacaccataaagacatgccctgaacccacataacaaccatcggtgacctaaatcgcaacttaaattaacataacaactcaaactgtaaaaataaaatttaaaaaataatatgatgtaattcttttatattaaagagtaactctaacacaactcctaaacctaacagcctagtcgcacttcatcacattatcttattctatgcatatataatgattaaagaagcaaaacaaaatgtcaacttttatgggcggtttataactggaattcaattgcaactccataagaaacacaaggttgcaatctatatgtggttttatgatggtctttttaaatttatttatttattagtaattaaatgtattaaatatagtattattatgttatattaaatgtagttatatgataaaaatgttatttttttaaaacattataattaaaatttaaatttaaatttactgtacatatctcttttatttttgggctttttttatttttacacttctaaacattttttttttttacataattctatataacaacaaattttaaatattagaatgttttctttttataaataacacttaaattaaacactttttaataaaaaaaataattttatttatttagtaacatccacacacataaaaaaattaattatacaactaaaaatagacataactaaaaaaaaactacataatataactaagtatacgtggatccacgtaatattaacctagtatatatatatatatatataatatggtgtcggtgtggtctgaatcagactcaaaactggaaatcgtactgcataactgaccatgggctaaagtgcgtgtgctacgcttgcatctaggactcactcaactgagaggcgctaaaataatctttttaaaaatacacatatgttttagtaatttttaaaagtatcacatagtttttaaataaatgtccaatgtatatatatatatattaataaggctcaacatttctcttgggcaggcccagtcctgggcataggcgggctaggcctatgcttagggtccacttagcccacaggctcaaaaaattattcccttttaaaaatgcatattaagagttagtcccacattgctaatgtgtggaaataaattgtgatatatatgatgaaagggctactccttccattgccaattggttttgggatggaacctcattcatcttatcctcaaattctaacaatgcacattcgtttttacaaattttgaaaattattaaaaataaaaatcttaataagggtttaaaaatatttttttttcctatgatctactaaatttcaggaccgaccttgctcttgcggctagatcccacacatttaatgtgcttgtgcatcgatgatcactctcctttttccatttcttgttgatggtttgggggccatggtaatgcatgtaggaaatggcttttgcttcaccaataaaaaaagcatgaaaaaatttggatcagtttcataaccaataaagaattaatggaaattaaggtgggtggttacaagttcttaacttattctctcaatgtatatgtctctctttcaatgaagaaaaaacatctgcctacttaaatctaacatttggcatcaaattaagccacactatagctcattgaatgttatatttcaacatatatgctgattttcatatctatatttttcttgcttaaaattttggttgtctttctaatattttgaagccaattgagttatatgtgtttttgaaatggggacattgggtcagatttggaacagccagaataagaggggttccttcccaacaaagagtgatgtgaagagaacaagtggcccaaaattgaacccatcgatcttcaagccactgccagaaatgaataatttatcggggtttttacactacacgttgaaatttctattttatttacttttctactgtgaagcagaacttttttttaaaaatattatgtaagttttatactgcgtactgtgttaagttttcacggttgttttttagctgttccaatgttgttttaattattctattttgttattttacagtgttatataaaaagatagtatttttttaaaaaaattcgtgtaacaattaaattgtaaatttttactcaaaatccagtatttttgtaaaaatctctattttatcattgtttaaagatgacttcagtaagtgggagatgacttcaataagcccactttatcataaagttcataaattgggctttgacacaacttaggcctaatgtcagtaattggactaggcaagcaatatccaatcaaagggcatcacaaatagtaaaacaagaggaaattacattctatactctttttatattgttatattttatttttactttcttttttaaaatttatcatttttacctctttttttaaacattgaacaaattttgcccctgtcact

SEQ ID NO: 227158 - DNA, 4370 bp, Cannabis indica
tatttggttgaataaaaattaagtaaagattaaactagaaaataataaaaacagtgaaagagtaagcaattaaactaataagaaaattaatagttaataaaaactagggcttcgacttcaattatttttattgattatgcctaatatgattatctccctattatcaatttctatgcaatagcaggtttactaaggtaatttatagtcttctcaaatatataaatctcaatcacataaaggtcttgcccttgcttaagttcaaaatgccagtatggaagatgtatacagggcgagaagacccactactcacatcgaatacttcaagatgcaactcgatctccagaaggttactggtgatgcgcggtgccgcatattcccagccacattgtctgaggcagctcaataatggtactctaaactcaaccccaaaagattcaactcttgggctacgttctcacgagaattctacacagaattctcatcctcaagacttgtaccattgcagctagaagaccttgtcaaagtcaaacaacgataaggggaacctttaaaggattacatccagaggtttatggttggggctatcaaagtcaaaggccttacagaagaaggtcgatatacggccatactggggggcatactcacattgagtgacttctggaaagatatccaaagaatctttaccgacaacataaagaagttccttgatagagctgatgactttatcaaacttcaagaagccatacgataggcccaggcggggcatatcaacaattggtagtcacgaggcatccagcatcctcatggctcatcaggcgcacaggcagacaccagtaattctgcccagacttagtggaaaagccactagaaacaagcacaacaccaacaactctgggaggaatagtggcaaaaatggaaagttcaacacttctcccacaccacagaagaataaggaggagaagtttaacactgctcgttcattcatcattattttcttttttccctttttttttgacaaaggttgcgggttttcgtgaacaagtacgatcctgtgatgagaaatctctcgaaaaaaaaactaagttcccacagacggcgccaaattatttcgaccaaaaaatagtcaatattttttgtgtgggttctttttttttcagttcataatgtcaccgctttttttacatataaacttcttatttatgttctacgttcttttatatgcaagtgtgatctgtccttttttctggtgtttggttgacgcatgtccttttatttctttttaattctttctgccacgtgtcttgcctagtggggcagtatttgtttcgttcttacattttgcttctatttgattcgtcggtgcctcgccagagggcttctaatgttttagtctattaagaatgatttcttttcgacggggtatcttgttttagtcaggggctctggagtggccttagttttaatttgttgagttctttagttcttccgacaagaatctagttttatcctaacttggtttaggtattcttgctttatgaaattcatcttcgtgattcttgttggttctagtcacattttgcccgactgtgagttagatggaggatgtttttcgtttgtgcccatgtttatcctatttgacctacggcttttactcgtctcgagccttggttctttgatgtactctggggtgtgccgtcggtagccttttttggcaagttcaggcctatcgttattattactcggaatggtgggtccttgttttgaccattttctaagtttgttgcatttttatcggtatgctccttttgtctttttgctgctctatgggcttttatatatatttttatcattttacctcttcgctggctgttttataatattcagtctgttgggcgtttttgttgggaatatatttgattgggcttttatgtcattgatctttttcttttccttttttctcccccaaacaatgacgacttaaattttttttttttgtttcaatttacatagttaaaatatagtttttttgccttaaatatgttgtaatttttttattcacatgacatcaaattttatgttttgtagtgttggacacatttttaataaatcacatcaaagaatcgtgattttttgtaaatcatattcttgtttgtaaattaatataaaaaaataaaaaaaaaaattatcccaattaattaaatttaatagatattattaaaatatttatgatgtataaatttaatttcataacaaatatcaattaaaaatattcaagtcatttcataataaatattttaaaatttaaaatttagatttctatttttattttagattttaaaaatattttactcataaattataactcaaaaaatataaaatataattaataaataatttaaaaataaaatatctaaagtaactcataaaaataaatatttaaaagcaccacataagagcgactattgtacctaattttaaaataaaagaatttaaaacatctgttgtaacgtgtttttagtacgattttttaaatttttaaagtttctatattttaaaaaaaaaaaattattaagtgctctaaggatcattatgcattctagattttctttgaaaaaatcaatttttttgatctctaaatcatgtctatcttttttttttttttttttggaaaattaaatcatgtctctcctagtaaaactacagtgaaatagatcattactacttgcgaccacaccaccataaaatttctcgtgtcatttatttatttttatctttcattcttgctaatatttatttggattatgtaatttctccctatttataaagtaatgcattttttttttggctaaatataaactaacgcattaaaaaaaataatgcattatgtaattttctcaatttatttcattaacattctcgttgttgattattttcaaggtgaacataactcaatgtttactttcttatttaattaaccacttgaggctagctcaagtggtcatgggtgtgtgtcttggaggttctgaattcgagtcccaagtaaaaataaaaaaataaaaaaaaactttcttattaaattaatttgttttttaagggttcttattaaattattattatttattatttttatgatcatttattaattattttcattccacacttccagccaaataaatagtgtaaagagtgaatggggcgaataattttcttctttaaaaattgatgcgtttttattggttcgggtagtgggccccacggtattgtcggtagaaatacaaacaaccatataatgatttagacacgttttctttaattttcccaaactttcttttcttttttctctgaatcaatgaccacacgctccacggtcagagggagggactacgtgtacggctgagatgaggtctggagtgaattttagtgaaatctgtgctgtcggcacaacaatcctgaatccgtacatataagcttgggctacagttttcagtcattacttggcattatttatttacttaaatttacaatgagaaatgggtcccactctattcacgtggacactaatgtttcaatttttattttatttatacattaattatggaattggacattattgatccggtcaatatccgtacagcatgacgcacattgttcatctttctcgtttgatgacgtcagcctttcaaccccaacttcttttgactctattcaaattttttctattttaggccgaaagaaatgtaatatattttcctttttaggatagtaaaacatttttttaaaaatagcatctatactctaataggaaccattcaacaatttactataggtaggtccaaatttaaatgactaacttaagctaattcaaaacctacttaggcaattatttttctttttatgacatttattctaaaaaattacattatttattcataccaaaaccaaaaaaaaaaaaaaatacactatttataggtgtattaaatatgtgtaatggggtgttaaaaaaatgtgtaatacaaaaatttttattataaaatagaaaaaaaaataagagaagagaaaaccaaagagaagaagagaatgagagaataaataaaaaaattatcagttgtttattctaataggatgaatccttatttatatatataaaaaatatgactaaaagaataagaaaataaatatcaatataataaatgaaaatacaataaaatattaatagtgataattaatttactgatttggacatccatatataatattgggcattttacaaaaatactggatttggagtaatacttttcaattttactgccacacggcagaattaacatttatactgtcctcccctttttttttcttttatactgtcaata

SEQ ID NO: 227159 - DNA, 4119 bp, Cannabis indica
tgggatgaaattggagaaaggaaatacttcggtttggaatcagttcaacggaccaacgagactatagaaaagatcaaggccagaatgcttgcctctcagagtaggcagaagagttatgctgaccctaagcgcagatcccactcatgtgctgagctatgaaaacttagaacttcagccggatttgtcatacgaagaacaaccagttcagattcaagataaaaaagataaagtccttcggaataagaccatagcatttgtcaaggtgctctggagaaacaataaggtggaggaagccacctgggagttggagtccgacaagagggctcaatatctagagttgttcaggttagattttgaggatgaaatccttttaacgggggataattgtaaagaccactttaattttaatatgataaattcgcagataattagtgcttaattatgaaaattagagttctaaatatgatttatgaatttatggagatttattaaattctaagtgtgttatttatgctataattaaaattttatgtttttcatgttttatgcccaacaacattggaacgcggtgtttggccaatagaatcacattttagtatgttagtaatagcgcggtgacttagttatacattgggaatatcaagaatatttgaggtttttgaaatgaccaaattacctctaggtgacaagtatgctttttagtgtgcgcttgggcaaaatggtcgttttgccatttgactttctttgtcttttagtaagaataaattaagtagtgtatgcttattattccattatcttagttagataaacacaatcaatcaataattcattttattcaaattagaaaatcaaagaaaaagccattttctcttcaagctctctctctctcttcttgagctctctagaaccagcaagggtttaagaatttttagcttcatttcagagtatatagcaattatttggtgtatccaattgaaggtaaaccatttagcacctttcccctttgatttcctaagctttaagtttgttttccttgcatgattttaggattagggttctgtgttgctatatagtgtttgaatttgtattccgtagttaaattattattatttgagttgatttggagttatttgatggcttcgatatgtgtttggacaaggtttgagctttagagctcaaactttgatctttaatggtgatttgagtttctggaattgattctagtttttattgcttggagtatgtttgttgtgatctattttgcaggtctggaaggtttggtggcatttggaatcaatttgaggtgttggtggtgttttggatgtttctcgcactaaaccgatcgaccgattcagtgggacctataggaattgaaattttggttagtccttaggaaaccccacagaatggtcttctggttggggaatcggtctatcggttggggctttttagggaaccctagcttttcctgtttttgcaatatttaaggtattgccatattatccatcgataaggaaagttttagtttcgattttaagtccccgaaaagtgatttagcacttcactcattagttttacgaatattgtgatttaggagcctgtaaatcatcgagcagcacagttccactctggttgaccggcacacttgaatttggaaatgagataaggttagtatagtgatatgcatatgtgtttacatgtatagcgtacatgttattaaacctgttaaattacatcaatagtggtatcaacatacatagagttatattggataccgatagatgtatgtttggcataaatattgatctatgctatcatattggtacgactagagtatgactagagtatcgagtatagactgatattatggttgatagtattgtcgtacatatgttctagactcaatactgtgttaggcacggggatagggttatggttgggtgtatgggcacctaattataatccgggttatatttatgattatgattatacttttcttactgagtctgttgactcacagttattgtttgcatgtgtaggtaagagcaaggctaaggttgagcagccgtgtgaacgagcggatgaagattgtatatgtcggggtggttaggcctagtgcgtacaatctttgggacagttgattatattttgtatagtcgctaggtgacaagttttgtattaagtattttgaatcaattgtaaatattttaaactcgggattccgaatatatataaaagttagtatattttaatattatttagtaaagttttaattattcacgattttcaattaactcgctgattagtaacgagctggacaattaatataaaaccacggtaacacgcctaaattagtaagtgtaataataaatttgagataaaatagaagaaatgagatttcgataatgtattttagaaaatagagtaaaagagtgatggaatgctgtaaaaaatattgttttgtttgaagtcacaaagttaatttgacttgcaaaatgaaaggtcaattatgaccttagtattacacatgagaaatgagattagtttgttggtgtagggaactgtactctcctacactcgtgaatgagtttttaatttatcaactatttttttgtattctttttaatattttactttattaaataaattgttatatattttttatgaataagatcattgtattgttctatcaactaattataactattacatctcaagttcaaaaagtgtatactatacaccccctatacattaccccttaaaattatttacaaatttctataaaccaattcctatcctcgatagaaattttacaaggcaaaatacaatctaatctcatcttacaatcattttgaatccttcagactgtgtgattcacctgcctaagtttttgttcccacaaagcatcatttcttaccctccaaagattgtagaccacaattgccattattgcaataataatcctttttcgattgctggatatgtttttttaatttagataaccatttcagcagttgtgtaagggaccctgccttcacattccaattgagtcaaacttcagtagctttcaagtatctcttactatatgtacaatcaaagaacaagtgctctaagttttcattgtcttctccacacatcgaacaaagttgatccaaggatagatcatatttaccaattcgatcatttgtactaagtctcttccacataaccaaccacatgataaatctgtgtttcagggtgattaatctttcccaaacaaacttgctcctagaaaccttttcatcaggtttatatagtattcgatgatcaatttgaatattataattctgtgaaacaaagcaatcttgactaagcatagctttgaagttatttttcacagcaactaaacgcttccagtagcaactgcagtctctgggattatcacaatcccaccagttttggttcattagatacacactatgtattaattcgacaaacaagttatcctttttttttagcgattgcccacacatattttttcatggcaccacattccactcttttctaaatcccaaaatattatgttttattagtaaaaatatagtcatcgatcactgctccactatactctcttaatgcctattattattataaaaaatatgagtttttatgttatttatgcaaaagtatgattatttttttaaaaaaattattttatgaaaaaaaaaatgaaaaatgggaaaaccaagtaaagagtaactaaataggtaagcaattaccttatactattttccctatattttctttttttaaaaaaaaaaaaaaaaataacccaactaaataacttttagagaaaattatatttttacaaattataccttaaaagacataaaaaaataaaaatttgcctagttttttacttactaatactaagacacatttcccagttaattttttactaatcataataaaaaaaaaaaaactgcaagccatgttttcccctaattttggagattctgttctatgtttgatccaaattgtacataattactgtaaaatagttataataataaaaggaaacaaagaaagtatcggtaaaatgatctgggccttggtatagggcctctgggccttagaatt

SEQ ID NO: 227160 - DNA, 3197 bp, Cannabis indica
cgaacaccctatccaccaagtgtcatacaaaaacagtataagacaaatgacaaatctctattcctcgacgcacgttaataacaaagaaccctaattttcaatccatacccgaattcctcaaaaacacacccccaaagccaacacttacagctcccaagttcaccgtttgatatctaatcaaaataatttcaataaaaaaactcaaaatttatggtaagaaagaaagtaacaaaaagaagccgggcatcatctatttgaaaatggagttggggtggtgagctggtcaggcggctagatcgatggctactagcagcggggactgtcaacggcgccggagctgggttctgggcagcgctaaagttgtgagaagtggctatggaggttgagtcgtgggttacactaaaacgttcactttcaaataaaataatgattgcaatgttaattagtagacgtgcttctccatgtttaccagatgttgggctccttcaataaccaaagcatttatgtatcagattctctgcttggggagcatattagcgtagtggtgcagtgcaactagtatttgttggagtgtttgtacttcattttgtggcaaaagccattggacttataactaaaaacggaacaatgagtagagaattagaacggtcggataagcgcgtaacctggattcgattcagtataagttgtaaaatgagcatatttggttccctcatgttattgggtactcatatctcagtgattctcttgttgcttaatggaggtaggaaatattgcacatacaattctcaagttattgcctcagagactcttcaagttgtattttcggcagcatcatccattgcagtgtataatgtggtaaagaataatctgattaaattcccctggctactaagagcatggtggcttttgagtttcttcatgtccgtgatcaacgtggctattgatacccatttgagaatcatgtatcatggaaagctaagattgattgactatttcaatttctttggtttccttttaaacttttgcctatttggcatttcaatcagaggaaaaacaggcataggacataatatcccaagcaacatcaccgacccacttctaaaaggaaaaagtgataacaaaaacaccgagaacaaaaatgaatctctctatgccaagtccactattctgcagctcattactttctcttggcttaatcccttgtttgttattggatacaagaacccgcttgaacaagatgaaataccaaatgttgatatcaaagactctgctgccttcctcaccaactcttttgatgagagcctcaagtatcttaagaaaagagatgaaactgagaatccatgtatctactgggcaatctttacatttgtttggaggaaagcagtaataaatggatgttttgctgtagtaagcgcagcagcctcatatgttggtccatatcttataaatgactttgtaagttttttaagtgagaaggaaaccagaagtctggaaagtggatactttcttgcattggctttcctcggggccaagatcattgagacaacagcacaaagacaatggattttcggggctcgccaactaggcctacgtcttagagctgctctgatatctcacatatacaagaaaggtctggttctttcaagtcaatctcgccaaagtcgcagtaatggagagataatcaactatatgagtgtagacatccaaagaataacggactttatttggtacgtaaacatgatttggatgttgcctattcaaatttccttagctatctacgtgctccatgcaaatttagattttggttctctggctgcattattagcaactttgatggtgatggcttgcaatataccgctgactagagtccagaagaaatatcagtccaagatcatggatgcaaaagatgataggatgaaagcaacttcagaagttcttcgtaacatgaaactacttaaacttcaagcatgggacactcaattccttgaaatgttggaagcattgaggagactggaatacacttggctttggaagtcgataagattaggtgcagttactgctttcatcttctggggatctcctacgtttatctctgtggtcacttttggctcatgtgttctgatgggcattgaactcactgctgggagagtcttagcggctcttgctacttttaggatgttacaagaccctatattcaatctacctgatttgcttaatgtgattgctcaaggaaaagtttcagcagatagagtagcatccttcctccaagaacatgaaattcaacaagattccattcaatatgttccaaaagatcagacaaaggttgatattgaggttcaaaatgggaaattcagttgggatgctgagtcaataataccaactctggatggaataaacttggaagtgaatagaggaatgaaggttgcaatttgtgggactgtaggatctggaaagtctagcttgctttcaagtatacttggagaaatgcaaaagcagtctggaatagttaagattagtggtacaaaggcttttgtttctcagtctccttggatacttacaggaaatataagggaaaatatcttgtttggaaatgaatatgttaaagccaagtatgacaaaacaattcaagcatgtgctttgacaaaagattttgacttgttcccttgtggggatctaacagaaattggggagagagggataaacatgagtggtggtcaaaagcaaagaatacagattgcacgagctgtttaccaggatgctgacatatatctattcgatgatccattcagtgctgttgatgctcatacaggaacacaactctttaaggtgagtttttctttccttattatgtgtttaaaattacttatacttgctacttgtaaaatatggtgattgaattgtctattgtattacaaagaataatatatatttatatgtaaagttaagacactaaaataggaaactactaaatataatttatcttaatttatacaactaatatacaactaatattctcacactacctctcaagttggagcatagatgttaatcatgcccaacttgttacaaagataattaacccgtacccaattcaaagcctttgtaaaaatatctactaattgttcttcggtcttcacatatcctgtggagatcaggttttgttaaattttctcacgaacaaaatgaaaattaat

SEQ ID NO: 227161 - DNA, 2580 bp, Cannabis indica
aaaatctataaataaatttgtaataattctttcgttagagttcttattaaatttaaaatatatacaaaactaaaaataataaaaaaaaaaacaaaaaaaaaatctcacttttatgggattatttatcccacctgttagatgggataaataatcccaaacaaatgagattagttggatagttatccagacttccaacatgtccaaacactagactagacaaattagcatgtctaatccagtctaatcctgcgtacaaaacgagcactaggaaaatattatttggtgagtcttgtcatcctccaacatcacctagtcataaaaccaacaaatccactaacttttactcataaaattcaatttaccttcaaaccccaaaaaatttataaaacaatatgaaaaatatttaaaatgtcaagaaacaacaccctttaaatatggaaaatttaacaattttagaacctaaaatgctcttatcaaattcccccacacttagattttgctagtcccttaacaaaatactaattaaacttaacatacaaataaaccgaccaaacaaataaataatcaaataatatatagtttcgctgacaataattttagtcacaaaatttagttagtcaaataatactatgaagattcttaactctacaatctttagagttttaactcaacataataatttttcaagctcaattttttttttgtgtatgtgtgctcaatcaaattatcatattactaacattcaaatcaattcacgcatgccaacaatcaattaatgtttatctcaaaaaaaatgcgtatttcaataaaaatttacgccgtaagctagcttaattatggaatcatttttcactaatgtaattacacacaatctcaataacaatagactttataagcttataatgtaaaactagggtgaaaggtagagatgagaaggttaatttaggctcaaatcaaaccatagcatacatatacaatattctctcaaataatttttatttgtattccccaatcatttcccacaacaattcaaccttgtatttttcccatttcagaataaagtttactattcttccacacttaaatttttgcaagtattcatatatttctcaacatatttctcattctttttacaaaatacttgcaacttacaaatatttattttgagggaatagtattctttttcgctgcttatacatactcattaatatatttttctcaacaaaactctcacacctttagacaaacataaatatcaatatactattgtgtataaaaggaggaaaaaggatttatttatagctcaaaaggttattttataagatcaaaagaaaaataagatttcaatatttaggcttaaattgggtaaaactagagaattcacaaatagggtaggcttaaaaagctcaatcgatccaaaaaaattgcttacatcatatctcaaaatcatgtgtaatttatcaaattcgccttaaataatttttaaataaattctagagtgattgagatcaaatatcaacagtcaaatacatgcattcatctttcaaatactagaaaatatgatgatttaattaacgtgctaaattttaaaaatcaagcttaagcagtcattaatccaaagttaataagcacacaaatcatatagagttcatgatcaccttcatagcattatctccattacaattagaaatctcatcatctactcattgttgtcaacttattgcacatatctaaaatatatatttttattaattttttaacactgcattttaaatttaaacttattgcacatatctaaaatatatatttttattaatttttttacccgatcaacatatattaaaaaatatatctttattattttatttttaaacaataaaatagaaaaaatgtttatgttttttaaaaaatcactattgtaatgttacattttgcaattactaaaaaaatatctttttattatttaaaaaaagtgatatttctataaaaataaaaagtattataaaattaaaagcattatgattaaactataattataattaataataaattttaaatattattatattctttctcataaatatcacttaaattaaacatttttaataaaaatagtgttataaagatgtttattgatttaacattaaaaaaaaaaactaattatacaactaaaaacatacataattgaaataaaaattaagactacaattaacattgctcgtaatattaacttaatatatattagtatataatccttttactgcactatattattgagatgtttttgaaatagataatttgttatccgtgtcgaaaataggatgacatatcaatatttactcatcgtattttttatttttctgtgtgttgatgttgtttccccttctagccattaatacagagaagtaaagaaagagaacaaagagaagaaagagatgaagataaaagagagaggaaagataataagagaaagagttgttgtatagattgaatctgttgaaccaagtttatatacacaaggtaagtagtaaatcataacagaatcaataacaaactctaacaaccaagaagcagttacaa

SEQ ID NO: 227162 - DNA, 5115 bp, Cannabis indica
aaaacaaatggtactagcaggaataaacatcaagggcaagaatcgtatccaacctctttactcctgatggccatctgtcctggtggaggagcaggaagtgcttgtgaaggcaaagcaacagacttgccccatccaatcttcaactcatactcataaactaccacacctgcaaacaaatttgtatccttgataatgctattattgctaaaaagttgaaaaagacataattaaaaaataaaggaaaaaaaagccaccgctcccttgaaaagaaggaaaaaaaacaaaaaagagaagtaatgacagttcattctattgttggactgcagattcgccaatcatggttacacaatctaggatatctccctaagacaaatgaagatatctttaaccaaactagctagagttcacatactttgtacaacttttagtctttccaaaacatcaaactataatgttatgcaatgaaaaaataaataaataaataaacaattcattaagaatttatggaagaaataaaaaacttaaaagtttgataatgatatgtcaattccaatgagagaatatggtatcccaatcaagttcgtacacctagagaccaacttataaatggactcagcaagcaataaccttgcatttcatcctttgcagcctgcccatcggttctgttcatgaaagcaacaaaaccacaatttctttggcgcctcctctcctcttctgttctaggccacattatctttacactagcaataggtccaaatcttccaaatgttcgcaagagaaaattttcatcaacctagactcatcaaaaaccataaaaaattataatcataaattgaatgttttctaataaaataaatatgcaacggatcacgaataaatcctaccaggggcatatagctaggaatgtaagtaagtggggcaaatagaaaggaaaaagaaaaaaaaagacggggcatatatatagttaaaactattaatataagtaaaagtatactatattaactttaaatgtttatgaaaaataactgcagttggggcagcagcccacactcattcaagtgtggcaatgcccctgaatccaactgaagaaaaaataacctgcggtgagagatttccaacatatagatttgtagtctgtggatctccatcatcaaatgatccagccaatttgccacttggatcaaactcatcaggcagctcatcaaagcgactagatagctggaaaacaaaaaatcagctaaagggacttacaaatgaataggacctgaaagaaaaattcaataagattcttttttttaaaaaaaaaaagaagaagaagaagaagaaagaaagaaagaaatccaaactacatattttgattagtatatatcagatttgtgcttaaggaagtagacataaataagcactgaagaagtggcttccctgcttttataaatcaagatcaacttaccggaaatattgtaaaactaaaatatttatgtatatatatacataatgcatagaagtagaaagtcataaaacctaaattctatattgattgttctaagttcaaattcagcaactccacaaaaagataaaatcttttaaaaattctttctaaaagtccttcctggaaaacactcacagcagaattatcattatgacgccattgatcacgatcttgatttcgcctctccctcaactcttgctcatgcttcagttcctccataaaatgatctatgtttcgagacttccctttttctctctcccttggcttctcctcctccttctacaatgtgtaactgagcatattaagaacagaaaccatccaatatttcaaaatagtagtactatgactatgatacttactttcttctcagattcttttcccttggatgccataggaggtggtatgaaagatggaacatacctgcagaagagaaatgatcgccaaactttcttgttactgaaactcttccaatcagtaagtgaaaaagacaataatgtgaaaaagagaactagatcattaaactatagttcaatctaagtttgtccctttgagatgcctaacttggtacttctagtgttgccttgtaatctaatgaagacctttatgggaagccagacattcagtagactagcaccaggcataattcttctaaaatgtagatgtcatgtccatcagttttctaaaggaaacaaaaaaaaaatcctattaagagggagtaacaaattattgacacttttacccttctcaaattttccgtgaattgggaatatagttcttcaacttgtctcaaattagcatgcatacccctaaaaatgtgacgtccgtgcccaaacttaacacctgaactgaatcagtaatctatgtacattcaatgacacaacaaagtttgggcaacaatgtcaataactatcactggggagtatattgtgtttacaccataaatcattcgctaaaaccctcagtataagcattcaaaagtgcattcctaaacaaatccaaactttgaattatcatttacaaaaacaatgcatacgaagaaattaacaatgtatcttaattagatagccattctatcctatcttaaatcatcaagaaaacccaaaattaaatttctttttgatatccaactttgatcagtttgtgtcaaattcaattgatctccttcggctgtaatttttcttttcttactttattacaatagtaactatttcttgcccaaagacaaaacacatctttctgctacattctgtatgagataaaatgtaaataatagcaaggtaagaacacagcaatacttgacttcccacgtaataccgtacaatattttgatgcataacaaagcaagaagaaaatatcaagtgtatgatactctgatcctttaagatatggtaataaataaataaaaaatgaattttttagaaaacaaattactgtaattcacatatgttaaacccaataaatctcagagatacacgaagataaagatgattcaaagattgaattttaaagaaaatgtatgcacattcttcaacaatcttgccataattcatgttagaaacaaactcaataccaacacacgtacctaatatttcatgtgtgtctgcaaatatgtatatttcgtatgtgtgcgtgtgtgtgcatatatatatatattaatatatataataattaaagaaccatgacacatcaccataatttattgaaaaaaggttcaaaattttcagatggattgtatgaataaaaataattgaatcaccaaatccaactcttctacccgcacataaatttagttaaataataattaaaaaataatctacaaactaatgtagttcttcagtatctagatttaacttgtttgctttacgaacagcataaaaatgatgataaacaaaataagttgttgagaaatgatagcaataaaataagattgctcactaatctttgaatccactatacactttccaacatctaaatctttgttgcgtctgacatatacaaccacaatacaaagctccctacctatgatgtcttatcaaaataattttgcaacttggttaaatcagaatacatttctttacctacttcccttctttggaccagataccccatctttggacttttcacctgccatccgggaatgaataaaaaggtccatacttttattaatgtgttccggtcataaaataaaaatatctactaatccatagtgtgaagcataacaagtagaaaatgaaatcaagtgtaccatctttgcaacaaaagaaagcattagagctactttcttacactgaccttcattatcagcctttactttgtcattaggattgatcaatcctccacgaacaaaagctttcgacccaggtgtggtgtccccttgaaacgactccacaaactccgcatacaatcgagctgtttcatcctcagccctctacaacagagaagaacctttcatttttatttagacaaaaacattattaggaaaccaatagaatcaagaaaagaagaaccaaccccaccttcttctttgcttcttcctcctccctatgcttttgaaaaggtgtctttttccgtgtaatggaaaaagaactcatctcagcatcaagatctgtaagtggtgcaaaaaatgagtcgacaatagtgatatacaaattatggagaaagaatacacatatttgcactccataaatcataatcaaagctcaaaattgattccatccataaaaactacataataaattgtgccccagttcaaaccacatatgatcatagctaatcaaataagctgcccaagtgataaacaattaagctctttctggtgtctacaacaatgaaaaggaatactccaccgtccaaactaatgagccaaatacacacacctacataaatcttatcttacctatataataaatgcttatctaacaaaatttcttgtggcttaacacaataatttataaattctgttagttttcacataaacctgtcaaatactaacaacaatgctgaagagatgcaaatgaataaaccataattgttcacaacttctgtaaagaggttattagttggtacctattcaatgaagcattgtcaattttggttcatcattattccaggtaacttattttttaggtagttaaaaataattacaattcaaattgcctggaaacacttcatttggagagaagtttctcaatgtcaacatacagttcataaacaccgagatatagaattatcccaaacttaaacatagtactgaaataaaatatatgtaggaacaaataccatacaaataggattcacatgaaagaaacagaattttttataatgaactaaaatcagaaaattgtggaagcttctttggccgtggcccttacgtttcaaatggaaaaatatttgagaacaacatttcggattagacaaaatatcgtatgattattaacacttatggatattataacattccaaacgactataatatacacaatttctaaatcttagaactaaacattataaagtaattatgacaaacctgactaatatacaatagaagaaaaaaggaaaagataattggataatagctatatcattcactgtagaatggcgatgtagaatcacttgagaaaactcaa

SEQ ID NO: 227163 - DNA, 6456 bp, Cannabis indica
ttttctttctttctttctttccactttggttgtgttgctgatggaattaggctgataattgatgcaatttatgcagctgtgagtttttgtcgcattttgtttttttgtttgaatttaattaattgcgaaaagtttctgttttattggtttactattaggctaatcttttatagctcccgaaccgagaggagtgtgtgttaaatggacttcaaattcataatcatttgatttggatctattaaagtgatatcttaatgtatcatattttagatgatggcatgcataagtaataattacagtttttttaatgttaagtactcaagctattaaacagtaaaaatgtgacctggattttaatgtctttacttttgcacagaatttgtttttcttctcttcttcgaatttagtcactgaaaaattaatacctggatataagaaatattttgtggaaaagaagctatatacagacccttttatttgtttcttgtctgatgagattttgttatcacacgtttgcaacgagactttctctttgctctatatttgttgttgaatttaatattacggtgtcatttaactgttatgattttgttgtgtgtatgggcttattttttcatatttttttcattttagatacatatcctggaattgcaatgggaaaatcaccagggaaatggatcaagactgtactctttgggaagaagtcatcaaaaagtcaaatttcaaaaggaagagaagtaatactatattttcttttttttttttttagttaaatataattctagatgtaacgttaattcaatggaactacttcattctgatatttcttttaaaaatgatgtttagacaacttgagtgccatattcttcttttgtactagaacattgtaactggttttatatgctctcgatcatcatgtgtagaaaactacaaatgagagagaggtggtggttgcagccaaggcatctggagatgagtttacttcagttcctcctgtagtttctcatccattcgctagtaccactaccactaccactgaaagagcagaagtgaagttggacttggagaacagggaagctgatatttcatctggtgatggaggggtagtattgttaagcaatgaaaatgcagaaactcaagaatccatgccccaagaagtatcaactgatcctgagcaaattaagaaagagcaagctgcatcacttgtgcaagctactttcagaggttatttggtaatcacatgccccttttattttattttattttatttattttttgtttttgttatgctggtatttggtgtaaactgttggattccagaaacttagaattccagtagactgagggtcaggatctagatttttaagtaagtactagcactaatacaaaagtttaatagttgaggcctttatcatattcatatgcaacactttttgtttcttttgcttcattgatgtactcaagttttgggatggatttattccatcattgtgtttaaagccagtgcacctttgtcctccatttttatttcaatttgttcaatgtgtagtttattcctattattattgtctatttaatgatacatttgtttattattaagctgcatctttcttgcttgcttaaatgattattaaactagggattgagccccactttgagaggtttgactgtgtgctttagctttatagaaccaacaattcttataacgctcaatcatatccagtgggctattgcaccaagatgctgtctttgttactaaaattttctcttgtgtttgatggatataattagttgaagatttcactagcaacatttgtgaaatggtttgttttgaattatttgcaatatgatatcttgattataaaatgctgctcatgttgaaattacgattatacaaagcactgattcttgcatatcatgtgcaggctcggcgagccttttgggccctcaaaggcatcataaggttgcaggcacttatccgagggcacttggttaggagacaagctgttgctaccctgtccagtatgctgggaattgtcaagtttcaagcacttgttcgtggaagaagggtcagaagttctgatattgggcttgaagtggaaaggaaatgcaatgtagtgatgcctcaagtaagtatctcctcttaattgtccttgcttatttttgaaatatgttaaaaaatgtagccaagagggatagcacaaacaatagtgcttgtgtttcttccacaatgtctaaaatttgagtctctcctaggtacgtatatggaaattgttattatttcttgttttccatatattgtctggttagtcaaggtgtcacccaattttaccaaaaaagagtcagaaaatgtgacattgagggtgaatttatggattgtgttacactattattgtacaagagcattttatatgcattcttagtgcaagtcacttttatgggcttactattattatatggtaaaaaaagaattgggtttcatgggaatggagattttccacaaatatgatcactcatcacattaatacaatgacgtgacaaatcttttcaaaagaaaatgaaccactacagttcacacactttaacataatgcaacttacaaatatcaaatttcttatatggaaaagtcactattcctatgttatataaatcagtcattttgcgatttggccatccttttcgtatgtaatgtattgtggttataagaggtggctatgggtcatgctttcagatttccagaagtataatcttcaaagaaatgaattgagatttatatattgagatttaggtcttaaatctcaacttcatttatgtattgagatttaagaccttaagaggaggctttagtatgggcggatcatgctttcagttctaagctcatttgttggataatttgcttagtatcacagaaaaaaatatgagatcatgatttcagttcttagatcatttaatcgatgattggtttaatgtcacaaaaaaataaaataaaaataaaaatgaaagatgcatacacagttatatggaagtctttggtggcattctcttttttatgataagtaacaagtgttgaattacttggactattcagttaaacttctggagtaacttattgaactgtatcttaaaaacacacttaagccaggtcgatttaacttaacataattttctttccaatgtgaattagggaggaaagcctgtcgatccttttggagttcatttttctgtgcaaatggaaaaattgtcaacaaatgctttcattcgtaaggtatggccaagaactgtcaatgcttattgatactgttttgtacccattttgatgagtaactacttgtatattcttacctgcatgcattgattggcaatgagctatcagcccagctctctaattgaggttcatgttacagcattattattcacactgcatagttcttatgaatataatatattgcatgtaggttctccatgaatccatgttggaactttggagacttagagcatttaagtcactactttcttagatgaaataatggcatttaaagtttaaacttctcagattttatgaatttgatttccacatacacatcgatgttttaaaataaaatatcatttactgatcatgtagtaatatgtagttggaaaaacgaattgtagttttgttgctgacatgataaaatccttgggtctaagcctgctttcttttagttttattactgctgtttaagaaatatatatgcagttttactcaaaatctaacgtgatcttccatctattatatttgctattctttcataatctccatctgatggtccaatttgttgcttagcttcttgctacatcacccaatgtgatgcctttgtatgtacactatgaatctggtgaaccaaattccgtctccagctggttggaatgctggtcatcaacctacttttggaaaccggttcctcaaccaaagaaaattctggattcaaagtctcacaaaaagctgggtaatggtcagatggcagaaccccaagcaagcaggtcaaagagaacccgtagacctagtcctgcaaatgtagaaagtatatcagcacaagcaccttctgaagttgagaaacccaaacgtaactttaggaaggtttcaagccattcagcggagccagtgcaggaaaatccacaaattgagcttgaaaagatcaaacgaaacttgagaaaggttcataaccctatagtagagaactctgtcccatcagaagctgaaactgaacatgcaaaaccagttattgaaaaagaaattaccagttcaagtcatgatggtttggaacagtacatcagtaatagtaatgagaaggtaaagaaagaaacagcacccagtgagaaattaaaaaaagagacagcttctgagaaggcaaagaaagaaattgcatccagtgagaaggcaaagaaagaaactgcatctagtgagaaggcaaagaaagaaactgcattgagcgagaaggcaaagaaagagatagtatctagtgagaaggcaaagaaagagacaacattcaatgagaaggaaaagaaagagatattcattgagaaggaaatgaaagagacatccaagttgcctgatgttgaagcagtctctgatttatcatctggtgatcaacccatggttgacataaaacctcaaatggagagcactggtaaagaggaaaatttacatggcgatcaagcgatagataaatcaaatgttttaacagagagcaccaaaagaggagaattctattacagaaaatgggggattgagcttgaaggaggactcaggtggggagaatcagaagtctggcagaaaaagttcaactccagccaagcaagaacgtgtagagaatggggtacagaacagtcctacattgccaagctatatggctgccactgaatctgcaaaggcaaagctgagagcacaaggctcccctaggattggacaagagacaactgagaaaactagtgtcaatcgccgtcactctctgccatcttccactaataacaaaatcagctcacaatctccgagaacacagagattggtccaaactggaggcaagggagcaaataaaagtgatagatctctgccctccagagagggaaatggtatgatttcctttttccttgcacttgttagcatgaacttgcgataatgttgcttatagagctttcgtgatgagaaaggatcattataatgttgcgtgttcatccagattaattgctattttagccttgctattgatgttctagaggaacttgtctcccttcttgatgcatagatgtatctgaaagctaatttaaattgattttgtgtactaatattgtacctctgattttttttgcaggaaaggtatcccaaactgagtggaaaaggtgattctgaatggcactcgtttcttggagtttcaacacaaatgccaaattatgttcgttgggagtttttgattttatgtatttgtgatttcaagtgttgtgacttgtgtgactgtgtctatagttaagagggtggtgtgtggagccaaagagatatttttttcctttctaattttattgcactgtgggtgtttgcgagtgaatgtacatcataggtttctagttttattatgaaacaatctgcatcaattctaaaaccctttgtttggttttgacgttatttctggccgttcatggtacatcctgtatagtggttatcattctacaatgcatcttaattcgatgtttgtcatgatcttgtgactaacagcatatctgtgtgtgcacgttttcttagctgccctacattgaaatcgtgaacttgcataagaaaaatcattctctcaaaaaaagtaataaatagttttaagatttaagaagcatccttaaggttgatgaaccaaaaatactaatatttccttgagaacttttttgcgtggcagaaacttttcagaactacaacatcaacaatcattaaaaatgttcccttatatggcacctgtctattttctaatggaaaaagatgcattttcaattgttacttatttctttgaaattttcgccactcaaaaaatactattccggaaattaatttacaagagtcatagtttagtttggaacgtttataatttttctcaaaatcactgaagtatgctaactaattaagacattagttactatgtagtaatctgattgggatcaattacaactccacgaatagctcctgttgggtctgagggatttctgcttggagtcgcaaccaaaggagccattgattctacgttcaatggtattggaatttcgtcggagatttttgagacgcaaagagctcccagttcgtcttgcttccagtgcacttccaccattaggcctctgccattttcggccgattcagttccgggaattcccacatatttagctcccacaggtatctgagttagaataatcaaattatgaaagtgttctttgattgtagctgta

SEQ ID NO: 227164 - DNA, 5396 bp, Cannabis indica
aggcatttctttgtaattctgctgtgttgagttgtaatcttggggtcaatctattatgtactactgactattcctattcaataaagatccatcattcatccattattgagttaagtttcctttgtcttatttcaattaagttcaagttttggttttgtgattggttttagttttgatttgtgtttcttgaacattgttactgctgtaacaacttgttttgagggtgaggattcaccacatatagtttgtttaaaatacctcagcgtcagcaagtatgagatgttgatatttagaattagtgcctggagaaatccttggtttgaatttctcacatactcttactttggctgtccattttctgcttccctccttaatttgttttataggtgttattttcttctccatagttgtttcctgtgaaaatcataaattaagaaatttgtatgaaatagagtccacatgcaagactatttagatatgatataaatgaaaaaaaaatatatcaactttttacttaaaagaaaatactactgaagattaatcttaaaaaaataatagaatttgataagtatttacaggcagatgaaactcgagcaagcaagtagaagaatctagtagtagaacaatagagtagcaaaagaaacaatgtaagagaaaagagagaatgtaatttgaaagaaaaaaatacttataggaaaaaaaatattgaagcaaataataaaagacagatgttaactaagtgatgataatttgctaaagatgtcaattaagtaaatatttagaataacaaatgacaaccaaatgtcaaataaatgataatttacacagataaatcactacttagatatatatgtagtagaaaataatatatataatgtaattaaaaaagtatttagtaatcatataaattactgattatggaaaaactgatacaaataatactcctctttgcagcatcacttctagctccactcttttaagttaaaagaaactattgtacattataccaatcataggcagccaaaaaaggttagcatcgaaaaagcacatggaggtttacctccattctggcacctctctttgtaaatagcatctgagtaacatgatttcagttttccttttgtctgaaaaagtcataactcatcggttaagatcacaactggacagttaggatttattaaagaccagtccatttctcaccttctagtgtgaaaggaagaaaacactggtttggaatacggtacttgtcagaatctgatggaaaaactccagtccattttatctctgggaccctcaaattttttgaatcgtatgccatttgcttaaataacagaagggtgagtttagattggatgagaaaactaagaattatgtacaagcaagcatggaaaatagatcattcagtgtcaattttgcttgattaaaggtattatcaaaagaaaaataatgtgagaagagaaattgtacctttgttgaggcctatccactcatttttagttgctcctccttctttagttgatgtattgcagcaactactattcataatttccatacaacaatatgaataacatataaatacacatacacaacaattaaaaaagaaagatgaaaatcattaacaataaaagtgggtatttagtaattagtataattcattactttactacccatgtttactttattctactacccaagtgagaaaatcgaaaaagtattcaaagaccaaaaataaaaagtccatatgcatctattaaaacatacttgagaaaaaagtaattataaatcaatcaatctataccatttatacaaagttcaaaattataaaggtgatgaaagaggaccaagaagatcaagagctgataggcaacagataatgggcataataaaaggctactcagttttctttgggattgaacccttaaattctaaatggaaacaaaattaaatagagtaagatccactacaactctcaaatgtataatttttaaaaaaatcagacccttttcatcaaaaccctcaaaatctaattggaattataatatatagaaacaaaataaagaagaaatacctagagttttgagttttttcacaacgattgaacttgaggaaaagagaaagtgtagatgtgttattatcaatttagggttttataaaagggaacccaatatatttagtgggataaaactaaataagtgaggtgactaaaggcccatacgtgttggttcaatattatttctctactaagttagcaatttttttttaataataggaggtggcagaattttgaattgtttacccttgaaccattgaattttgtgtattttacttttaatcccaagatgatgtgtagaaaatatataataagttgataaaacaaattttaaaaaattaaaatacctcaatatgaacaggttggaattggtaggtgggtagatctttgatttgaagcttatatatgtagttgtgtttatccctcaaatattagtcctcgtaaatgattaggttaaaaattaaagatataatatttttatttataacattaatataaatttaaaataacatttaaaaatacctgattatgatccacaaatgttagtatttcattgtaaacaattattttttgtacgatcacaagaatcaatgttttcggaagatgtctccaaaagaatctttatagcattagtctttctaactctagataatgcaacatacaattgtccgtgtgaaaatactggttctagaagatataatccaacaaaatctaatgtttgagcttgagctttgtttattgtcattgcaaaacaaggacgaattgggaactgcgctcgtttgaaagcaaatggattgttattgctttctaagggtacaaactgtatacgtggtaagaaaattcttttgccataatattctccaacagcaatctcagcacaaataatatttcgttcaaagtggcgacaaattaatcttgttccattacataatccttcagcatagtttatatttcgtagcaatatcacaggacaattcaattttaacactaattcatgaggtggaaatccatttgggatcaaattgttaaaaaaatcttcttcaaatgtgttttcagtcttatccatgggctcatcaaaactataatacacgttagcatcaccgggaaatcagtctatcatcatattatttatttgatcaacataaatattttttggagttaaaataacacggttgaccattttatgaacatctttaaagtaaagattaacatcgggaaaaacaacatttaacaattttgttaatgatatatcatggtcttcaaaaggtagcataatctcacttgggagttgaaccctatcaaatgaatcagttttctcatcgccatttccaatgcgtaacaaatattttgagaaaactggatccaacattgctctcatattttgaaccaacttgatttttataaatgattgtcataaataggaatggagaagacttgctttaattacatcctccttccttccctttggtacaactggtaaaacttgacgaaagtcgcctccaagaacaactacttttcctccgaatggtaaattcgagtcattaatgtcttgtaacattttatccaaagatcaattgcatgtcggtgcaccattggagcttcatcccatattattaactttgttaattgtaaaagcgaagatagagaagattgcttacttacattacaagttgtaccctcatcaaatacaagagggatcttaaatctagaatgtgctatttggccacctggtaatataccagctgcaaccctagatgattctgttgaaagagcaacaaaatttttagatcttacagtagcaagcaaagctctatataaatatgttttacctgtacctccggggccatcaacaaagaatattccaccttcatgttttgatactttttcgaaaattaaatcaaatgcaattttttgttctttattcaatatttcaactaatagtagatcatcattagagactgatatatgtttttcttcattgatcatttttgtaatttgctcttgttgtcttaattttgcattagagtgaacaaaaccgtaatcgtacaaacattttccagctccctctagcaaaaaattaatttcttgtagtgctttcgattcagcagtaattaatggcatttttttaacaatataatcttcacacatggattctttatatttttctcaaagaagtaaatgattgttaggaacacaaaatatcaaaatagtagcaaatagttgacgcaattgataggacattcgatatgtagctgcttcttctaaacatagatgaatattattatcaccttctagtaaaccatttaaaagagctgattctcgtaatgaagagacaacaataccgttaacaatcttgagatcatcacatgatgtaggacttttgatatgactcaataataagcgcaaatagtaccgttcaccttcaataggatttgcggcaacaattctccctatcacacaaccattctttctaggagtctaaatcttattccgtctatccgaaacaaaatatttaggaaattctctatatagcattttttttagcttctttgtttgtagaattcattctaaaactctgtcagcattgatcttgtaaaaatatctttgtcaataattttggagagattgtctttttttctgtaagtaatcatttggctgtcttcaagatgcagttgcaatgatatcacagatggataaatctcactcaaaataaatccatatattctccatattgcttcaagaggagaaatccatctagcagactggtacattgtaatctcatcaataatttctaacttattattatgagcaacagaaaaattaactcgatcatgacctttgtaaacatatttatataaatatttcacatctttgattgttgagcaaatttccacattaatatgacaattaaatttagctagtaaataaggatcgtatggaacaacccatctattgtctaaccaatgacctcgcactttagcctttttaccatcatcttgtcgcttgtactttgggtaagaatcatcgccacattctgttttcatacgaaattgttttggataatggcttttacattttccatttggttgcatacaaatattcttatcattaagtttcctgcatggtccatgcatcatatgtttcacaactaatgaaaataaatatgcatgcttctcttgatcaggtagttcagctgacacaattttatcaaatgaatctgtgttaataatttttgaacctggtttcattataactaagaaatgtgcatgtggtaatcctctcgtttgaaattctattacataaacataaacaataacatgaccaaatatttgtttcttgaataaat

SEQ ID NO: 227165 - DNA, 1674 bp, Cannabis indica
caagaacaatcttcaccttcaagaagctctggaaccttctagcggactgagttccgtttcctctggatttccctcctgtttaattttcctctggatcaaatcctgtctaattttcaccttcttggtgtcgtttaatcttcttcaacctaagtgtatactcccagtgttgtcctttgatttgtcttgtgagtattttcctttgttttgagaatagtggaaggtttgacttttcaccccctgtgctgcatttattatccttcctttcaactgctcttcatttattgttttgatcctcttttattagtgtctagatctcatttcaggtgactctgttgttccttttttcttttttaagtttgtcttttgtttacattaaatggttgccgtcgttttgagacgtccaagagaggaggtgatcattgcccctatcgacatagggcttcagaagggatttgcagagcatctttgcaaatcttccatctgcaggctttgtatctccaggtatttgtttctttttctctatttaaggtattggtttctattgcgttcgtcacttttcctcttccatgcaaattatctcttccttgtcccttctttcccctgctgttcactgtgtttagccatggactccttagctcttaatgtttctgaaattttaaacctcactgataaagaggcggttgtgcatgatcttgaagaagagtctgggggtattaatctgaataacaaacccatctgtctagtctttagagtgctttcccctagaaccataaaaccagaatggttcgaagacgccatgaggaatgcttgggttactcgggcctctctgactttttctgattatggctctggcatgtttatggtggaattccagtgtgaaggagacatgagaagggtgcttgagggacagccttggcatttcgaccattgtttggttacctgcgctaacccagccggccttgacacactccttcctaatcagcttcgctattctcctttctggcttcaagttcactctatcccctttggtcaaaaatccttaaagcttgctaagctcattggggatgaggtgggtgacttcttagaagttgataagataactctctcaaaagtctctgggcttttcttgcgtatccgtgttcttattgatgtgtctaagccaattactcgtggtattctcgtggatttcaaaagtatccaccgtgagaagtggttgaacttcaaatatgaaaatttgcccaacatttgttatcattgtggactgttcgatcacacactcactaagtgtatcacttacctcaagaaatgcgatgatcatgcttttccacctcctctaccttacaaaatccctctcaaggcccctgctaaatccacattcaaaagaaatccttttgatttatccaattcatttcccattgatgaagctattcctaaccaagcaaacgtggaccaatcccttgctgctgctgtaagccagtttctcactactgaggagattggcactggttcctctgttgcttttggaaccatggctgatcctggttctttgggagccgatcacaggcctgcttctccctataccactcctttgtcctctcctcccgctcaggctggtttcactatgggtggtgaaaacccttcttcggttctatgtgatttgccttcctcattttc

SEQ ID NO: 227166 - DNA, 1934 bp, Cannabis indica
ccaaaatgaacgcccatcattagtcaaccaatctccattcacaacttggagcaacttataagcactattaacagtataatcaccactcctttctttagaccaagaccagcagtcatctctagaggagttaggaagctggattgagagaatcaaatcaccatcatgttgattaaatatatctctaatcatttcaacatcccattgtcttgatcccatctggaaaagacaatcaaccgaacgaccaatgagacttggatggttagttgtaataaatcgattgtcatcagtaggcagccatggatgttcaagcacagatgtagttttcccatcaccaatcgatctaatagcacccaacttgatgagatctttagcttctaaaatacttcgccaaataaagcttggattcggacccaactcagcttgaagaaaattgccttgtgggaaatatcttgctttgtaaacctgtgccaccaaagaattctcattattaagcaaacgccatccttgcttacccaaaaaagccaagttataatccctcaagttcctaaacccaagaccacccgtatccttatgtcggcaaagtttcctccaactcatccaagaaacaccttttgttgtatcttttgcttgtgatttccaccaaaatttagccattaacccctcaaggctagaacatatttcttttgtgagaagaaaaacattcatagcataactaggaagggattgagctactgactttatgaggacctcttttccagctttcgaaaggaaccttgtctcccaactttgaatcttcttgatcattttatccttgaggaaaccaaggatagcattcttacttcttcccattgtgcacggtaggcccagataagtgctatttacagaggcaggattcatgccaagtaacccgcacaagtaagttcgatcattttgttggacattattgctgaaaaaaactgaagatttgtcaaagtttattttctgtcctgaagcacgctcataaatagcaagaagccgaagtatactagccacctccctgtcatttgctttgcagaaaatataactatcatctgcaaataacatatgagaaataacaggagcatttctagctacacgacatcctgttaaccaatgctttcgcacaaataagttgaccagcgaggtgaaaccctcagcacaaataagaaacaagtagggagaaagtggatctccctgacgaattcctccacttggcacgattgggcccatcatccttccaccatgagaaatcttataagtcaccgaggacacacagtacatgatcaatgataccagcttacttgagaaacccatctgaatcatcatcgtctctaaaaaagcccattccaccctatcataggctttactcatgtccagctttagagccatagtcccagatttgcccattcgttttcgcttcaggtaatgcatgatctcaaaagaaatcatgatattgtcagaaattaatcttccttgaataaaggcactctgagtttcagaaataacacaaggcaagacaccttttaatctgttggcaataacttttgaaatgactttgtagataacattacacaaagatataggacggagatccatcatagacacaggttgtttctttttgggaattagaacaagacaagtttcattaagcgagggaaaaaagtaacctgtatcaaagaattgccgaacttgagagacaatatcaccacccaccacactccaatatttttggaagaaacccggagtcataccatccggaccaggagatttgtctggatgcatttggaaaagagctctacgaacttcatcatcagttataggctccaaaagggtcgcattttgcatatccgaaacaacacaaggaatagagtcagttacctcccgaatctccaaggaagaagaagaaaaaagcttac

SEQ ID NO: 227167 - DNA, 1714 bp, Cannabis indica
ctcaaattgaaagatgatgaatacacttgccttcagtcaaattacattattttagaacgtcatatttaagatgttaaataacatatattgtagtaaatctagaatcctagtaaaacataatccaacagctttgtgtttggaatgaggtatggagctcggcctccattagtgaccaccacctcgaggcaccctattaagggtcagggtgtgtaccccgaacacgcatccccatacggccttaataccccgaggtacccccattaggggtcggggtatgaaccttgagataccccctttgggggtcaaggtgtgtaccttttatgggggtaccgtcgatcagctctctcgacggaaggtttaagctcaagctagagtgaagatgctccctgcttgtcatgctcctcctgtaaagcgagaactctggatggaccataggaagtaattgtcacggactgtcacacgtcatgtcatctatgttagatgatggctaaagaaaaaaaattacaagtataaaaaacttacccttatcatttctcgacacccaagggcaataatctgagcagggagtgagacactcaagtcttgacatagtcttgtccatactatccaaaaggccttcagtatagttacgcgtcaccgacaagcccgcagacaaggccagacaacggccctccaaaggcagcactacaagtgagtctgcccccatggacgtcgagccaataaggatggtatcagtggcggccctagatgtggggtttgatggatgcgatcgagacgagttaggtgagccaacaccaggggtatgtatgtcaatagtcgaacgagaacttgtttttctaactttgttaggaggggccataggagaggtgttccaaggagaacccccgttttcctggtaagtcatttatcttaacaagctgcccatatctgtaaaaacacacaaaaacaattagtaaaatataatagcatgcaaattaatgaagcaatgtaataagaaggacgaataacaattatcaccaaaagagttgcattccttaaccggccttttctttgaaggcccaaacacagtgtctttcactatggcattcaaggctgacctccagaggcccaaaggtctcacgttttctcatacgctgatagaaggggtaataacaaagttatacccaaaggcctaggaaactagttcacatggtgatctgagacatttctctactccaactctatttgcgcatcacgaagttacgtcagcctcttacagagaatgtcctcaagttcatccttgtcacgcttatattttgcatccgaaagagcagagaactttttctactcctcaagggttgcttctgcggtagccagtttcttttgtaaatttgaagaattaaattgtatgcattgatgggtctttcttgaagactaggtatggtaggaaaatgttgtgtacagtggctctggatgtagggagtcatatcttttcgatagcttttgctatagttgacagtgaaaaccacaattcctggacctattttatgagaaaattgaaagaaacgattggtgatgttgagaaagcctttgtttcagataggaatcaaatcattgtccgtgctttggatatcgtgttccctgatgcacaccacggtgcatgctaccaccacattattatgaacgccaaccacaagttcaagactgacgtcttcacgaatcacatttacacgtg

SEQ ID NO: 227168 - DNA, 9237 bp, Cannabis indica
tggctggctagaccccaagactcatcttagagatcgtccaagaaccctagttctaggcataggccagccgacctacggacatagtccccatggacggccaaaccccatggaagccacccatagccggccaggtttcaaacaaagcctccttggctggtcaccatgtgcatggatcaaaaaatatgactttttaagaactcaaacatgttcttcgtgttcttcatgactcaaagggccaagaatcacaacgaaagtcatattctaatctttttcatctataaatcacactttgttcatcctaaggctatcatgcggatcaaaatatcaaatggactacaatatcacgtaagaatcaaggcatgttcaaaacaaggaataatgttcatgcatccatggctaaatgaatcaaatcatgtgaaagagagggaatagaaagcttacctgcaataagattctgatgtagacgaagatgggaagcttggatcgttcaaataacgaaaaaatgccaagaagattgaagcctacaggtttggccacctagagagaaagaggagctttttcaagagcaaaattttagtgagagaaagtaaaagttaaaaatgaaagtgaaaaaggggttccccccaaaactcacttatgtagatgtgggccctctttttctcacttacttcaccaactcaccataaaggcaaacaaatgagttatttttctattgcaacgagatcaaacaatcaagacaaaatgcttcaacacatgcaccactttttattaaacaaaggtaactacagttctgacaactttaatcttactagtaaagtccctatccgtacaaacatctgcacatagagttatcccaatttttgcctcatgagtgggatgctacgtggatagaacctgtgtcatgtggcagtgcaactcacaagaaggaaggctaagtcagcatctgagccaacgaagaccccaacattcaaacggggataaagtgacagacaagctcactctcaagagctggctagccacccctagctggccccatgcccagttaggccagggacagcatcatggtcggtcagccttgccagcacaaggcaatggtcggctaaggattgcactatcagtcccagaagactctcctacacgtgcaaatcaagaatgggctgggaactgggccccaaaagcccaacaaaatagctaagaaatatctagaatataagggcatttttgtcttttgcaaatatctagctaactaccctattttcaagagatttgagttgtaaatatagtatttaggcctcctatataaaggccttaacctctagctgaaaacctaagttacctaagcctcctctaagatagaaatctcaaactctctaactgtcagactctatctctcttcctcactctctcacatgcccaagcctaggttgcacaacaccctaggctgtccaacacttgagtccagccagacactaattcatacattgtaatcctaaggggagtaggttattacccactatcacaagggggccaaacctctataacaaatcctgttgtttagtactttttactcttatttgtgcacacacttggcatgcatcagatttgcatgaccccgatgttggctgatcactttttgaggtcaatatatactataggcgacaggtttaaactgtggtttatacatcacctatagtgttatttgcaatggtttttaagtgtgacttaaaaattacaatttttttaaaggggaattggtgatggttaaaaaccgtggcctatactataggccacagttttaaactgttgcatatagtataggccacgatttaaaaccgttatttatagtgttataggccataacatttaatcgtcggcaattagttcaaattttaaaattttcaaatagtgcatttttcctcgtttcaataaaatgcatgttagatcttaaatttttcaaatcaatatattttcaaaatgtcgctctctctctctagagttctccctctccctctttcatagatggcggtccacgagctccatcactcatctcttgtctctcgctctctgtttcttgctttctctttcatgatctccactatgagctcgaccatagacaaaagcacattcaagctccaccataagaaccaccaccactcatctctgtctctctcattcgaagacgattgtgcgaccacgagccaccacgagcaccggtcagccatctctctctcgtccactctttctcatgtatttttgagatttttgtatttaacagatcgtcagagatctagactatttgtagatcttaaggccaaacaaagctcctatcttggttttaaggagcatgaaggtgatgatttttatttggaaatccactataacgacggtttaaaccatcgactatactataggccactatttaaaaccatcacctatagtataggcaacagtttaaaaatttttcctacagtctcgactatagctgacgattttaaaatgtcgagaattcttttataccaacatttttccactatttctaattctacccagcattcgcgatgctcgtataggttacagttttatagattgtcagaaattctttgcatgatggtgtaaaactgttgggaattccaagttttttagtattgtttgtttgttgggaggacatggatctctttgctcatggagaaccttatagttgttcactgaacaattgcacctacatgcacatttcttagaacgtgttattgttttccatttgtactttatattttttttattagggttggtttgcttaccatttggttggtgtgtttgtagatactcccgaagcctagatgctaaagtctttaagtgaaaagtttctaagagcttggccaagctgaagggctcgaaaggaaaggggaagagctagaccaaggcccacaggtcttgcaatccaaagcctgcatctacctcatcctcatctgacatccgagagattcctcctcctatgagggttatcacacaagcttccgactccaatgctcccattggggtggacataacaccttctgccctcgaggagggttcaaaggagttgactgtgttcggaagttgcacagttcaaattggccatctcgagccaccaaccccggtagaagcttttccacctttggtcatagaggggaccgtccaggaggacttgacgagcattaatgtttttgatggactcatcttcccttggaaggatgcgtctgtgactccaaaatgcaagactcctcctcctccttctaacatggatgccaagaaggctaaagcaactctaattaggtatcttcaggaggggatgatgatctttggagagccaacaccccaacaccaccaaatctatcgtcgtccaacaaacaacaacaacacccacagcaacaacaacaagataacaaacaacaacgaatccaaaatcaacaaccatcaccaataaaacaacataaatccaacaacaataataacttcagcagcagcaacaacaacaaacaacaacttttgttaggagcccttactccttcgtggggtcaaaagtctacttcaaactagcaactaggggtttattacttctctgcccaggatcccaactttaggtctcaaattctggttgaagcctactcatctcaaccatgaaatcctgaagaaagtgtgggaggctaaaaacatattgatgaaatgccttgagaaggaaaagaatgttcttcaaaagaggactgacaacttttttagtagttaagagggctaagatttttgaaggcatctgcaccatggttgtgagggaagcggtgccctttgctacaaaacttttggaccaaatagtaggcggtgtgactgagctaaccttagagaagtgggccacctagagtagcagtgatgcatttaacttggctcatgctacccaacagcaagccttaagggtaagtctcaatttcttcacctttgtctttatttttacgttttattttctcatgttgtattgttgcaccagatggccttggcggcaaacagaactacaaatgaagtcggggctctgattgtacaacttgaggaggccaatgcaaggagtcaatctcaaaatactgacaatagggcctcccttgctaagattgagattcctatatcccaagccactactgaggttaaccaagccaagaaggatgcaaaggatgagataaagaaggttagagtcgattgcgaagctccagtcaaaagtgcaaaaaaagaccaatgccaagtactagaagttatactgggagcataaggcaaaagctgatcaagagaaaatggctgagttggattctcttttatcgaacttttcaaagtgacagcaaggacctcgcatgatctcacaaggtgaggctctgaagcctacactccaacgggtccacgatttacaaaataagattcgtgagaaagacctggtaaaccaaggcttgtcgaatgacaatgaaaatttgaaggaatagcttgagactctacaaaaggccaaagactctctaagcatcaaatatgagaaatggacttttgtcttccaggctacttgtgcaaccattaattcccgtcttggcacattaacgaagttgtagaagaaagtttcacaccaacctactaacaatattaaatatttcattgccttagaagccatggaaagagccaaggaaaatgtggcacaattttttttgggatgctatcaaggtagagaaagaggctggagctagggctaaaacgttctagctgcaatccatggaaatttcctactcactgctccttcacactctttcaaaaaaaggacccttctgtccttaagcatcttggagaagatgaggaagaatacacctggagtgagctcgccattgacgacgattcctttctcaaaaagtacattcctaggatgatggtgtggagtctagcaatgaatcagctaaagacttggagagtgaacgttccgtcaaagtggtagtttctttagggaagttatcaaggacttccaagaaccttctgaggacaaaaaagaagaccttttagatcaaactcaagatgcacctccaatttagctccaagagaaatccaacaatcgaatccaagaaaccccttcataataggcccatgatcagaccaaggagtaacttctatcttacatctttccttctttttaatattttagccttatttttgcagatacagtttaatcacaccttacctgcaaggatttatgtaatagctagataactactgctttaacttatatatgtttgccatatttaccatatgcttgtttttgctttctctttccactattttttgtttataggacacttgatagatttccttaggtgttttcaaagtttcaggttccaatagccaaaacttgatgcccctagactttcaaactttgaagtaacttattgaatctttgaagcatgcaaactgcaaattcttttgatgtcaacctttttcaaagtctttgttgtggcacttcccgaaatttggaaaattgatcttacatggatggattctaaacttgttcctagactctataggagtcactgagcttgactcctatctacgtgcttcctaattaactaccctaagtagaatatgagtaatttccctttctaggaaggagggttgaagatgtatcaaaatccaagcaatatttttgactattagtttgaaaatttaaaattagaatacgagtaagaaattaaatacaaataaagattgaatacaagtaataagtaaggaagttttcatatagctaagtatactacctcgcaagtgagttaggaagtttggacgtctccaaattcttggtcacttatttaaaacatagcttgtgtaggaggaaaaaatgggaactcttgtgtaaatttctactattttcatttcattatacctaaaggtttacattaagacagagaatttacaaaaaatttacatacaacttaagcagaatgtttacatttggatacccccagcctattgttaataatgacacaaatggttagtgttgacctcacttctagccaatgacagtgagtcaattataaagcgattaaatgagataaataaaagaaagcaaaaatagtaagaacaccagattttaaagaggttcgaccctgtaagtatagtaatagcatactccccttgtatttgtattaacttgagaaaagaaacaaagtgttcttccactcgaaagctcttacaatttgatcattattttctctcttgaatgtatttcagaagcaattctttcgaccccctgcatagtgagattaggccactatttatagggacataatacatgagggatggtttcctttttgcctataatgaatataataggaaactacataaattctacaattacaatgtgagaaataagaaactaggatgtgttgccgtcatcctctcacccaatcccataattacagggattgtcttcgcatctgaaaaaataagattaatctctggaatcatcatttctcatgcttcgctcagtatagataagtctacaccttggccagacatcttcttaatcatgctactcgaatgtctaaatgttacagatgctgggtagtcctttatgggttgctagggatattttcctccatccaggtatctataatatgggacacatgtaatccattcctattgacacgtcatggtacaaaaaataggacaacattttcccccaagtctgtagatgaccttcctgatcgcacgtggacttaactcagccttaagtcttgtttggatgggtgacgcgtgtccttgatgtcggatgactagctgatgtgaccttgataaggtgtctcttcaatttctgtccatttgatgctaattgacggttttacctcaaatcagggttcgatgcttgcgcgtgtttaacggttacactccctgcaatgagtacgtaatgtatacttttaaagggaaatttaagaaatttgaattttgaaatgattaattctcttttcacactgcttataaataggattaaggatctctacaaatccttttagccattttaactcttaaagaccggagtaaaagatatttagccaaatttcctctcaaattctttgagaatattcataggaaaacccttacgattccatccgatcacaacaataaagtttccaattagtgagtaagttcttcatttttttcttttacatatttgtaatgaaattcatgcctgatttctagatttttttgccatgaatctctcatgttcttgaactattctaggttaaccatataatacctaggtgtaggacttgaaaatctcattcatgcctaaccataacatctgattatctgactgcacttcaaatttaaccttacaatgttcatttccactcgtccatagggttttagtgaaactcaagttccaattcaaagttttgaacttatgggattgaaaattctatttctgggtgaaacctttgcgtttgaattctcaatcaaacctggttggtatatacaacctgtttttcatttgtgactccgaccaactctcactttcttgtctcctacctttcatagacaaaccctggtgagtttttgggaggcaaaaaccatatcaaccaagattcgctccaacttttatacgaggatcaccctcgtctctatgctatcccatcttcatccagtgatgatctttccaatctagatttgaagattgggaagtaagtagctaacatacaccttccctagagcttgaggtataacatcatttttatcatgaccagattcaaggtgaaggatatggtcatttcatctgggaactcaagaaaaattgaaggtgttaccttcctactaactagacgtatagagttcatctgaacgtggtcgacactctacccgagggttgcccaaccctggtgttgttggtaaacttattgccaatttcactgtgaccactacctgacacacttctaataaaattctgcccaagtatagtatgatggcacgaaccaaatagacgattagtaaatcttcattaaccgacccacacatttcctgcctagccactttggctagggcaaaatagatcagtccagccactgacgaggaagatactttcgaagacgtcaaagtccaagaagtggaggaccatggtgagatccgtcatgctactccttctgatggcgaaggcgataaggaagaaggggtagctcgggtgccaccattcagtggctataatgatgaaggataactcgtgtctaaagctggtgatgtcatggtggccagccaggaatacattgttgaggagtataccgaggctcgtcctttgtgaaagagaggtccactaagagatcaatggattctccaccatctgtggcgaccatgaagaagatgaccaatctgttcaaacgcggtctcttgggaatgtcaaatgcttcctttcctcccctggccaactggctactgaccctggagaaggttattgtgcttgtttaggagctcacaccaagcaaggtgtaatgctgcccttgcttcaatttttttaagaaaatggcccattactaccacataagtctgagccagttgactcccaagtgcctcaagtatctgtctgccctattcgtactctacgccttacaaggatggggtgagctgtccccctacgacaccaacttgttgtttgatctgaagtaaaaccccaagcagaacaggtcggggtacttctacttttctcaggtcgagaagtcgtggttcacgagcaccgaggtgatgaagataggaggctttgtagatgagcattactttgtcaagggcgtggacacaaaatataccagtctccagcagattgcatcctactatcatcctccgttcaccctggaactcaggaagagggcttagaaaattctacaactctcttttcatgaacgagacatttctctcctagccacgactgcaaagtttgtcaagtataagcatcatccagcggatttcatacgaaacgcagaggaggcagtagaagaagctatgcctcgacaagatgcttcgagcaagaagaagaagaagaaggctcctccaagtagcgaagtacctattaagcgatccatcaggatcagagatggccatgaaagggttgctcgaccatttgcccaagtgggtggaaagggaaaagccgtcctgatggagcaggaataagaggattcttcagacaatgatgctcctgttggaatatgttttacc

SEQ ID NO: 227169 - DNA, 3606 bp, Cannabis indica
tagtattttgtttttccttactgggctttgcagctcaccccttatttaccccctatgtgcagataagtaagcctgtaagctttcggtgacaagttgagtctgggcagcatggggtgtatctcgtgtgatcatgtaactgcgtgtggtcttggccatcttccgctgaaagtttttttttaaatttattaaacttatcgaggatgttgtcgtttaaattttctattacttttccctaagtggtaatactttattttcaactgggtacccatgttttgaaaagtgtttttttttttaaataaaggcaacattagtatcttaacgccagtttatttatggcatcttattttacgtaagtaagggcgttacaccgatcacccttggatcccttgtacgcagaatttaattattgtgcactagggattgaaagtatattccatacctctccttgctattggatctttggggaagaagatgtagccattggacctttggagaagaagatgtaatcactttatagccttcttggagcctgtatggctaaatcataatctgctaaactatactgagattttcaaattgctccttgacccttactacctgcctccagtactgattattgttacttggggcttcataagcccatcaattatcatctcctgagtatacaacatgtacccatttagcccatagtttgtatattttagtgttcactgctcaagcatatttaccgatggttgcctcagaccatctttgtgtgtttcaaaaaccaaatcccccccattcttcgatttacacatattatcctaagatatatgcccagaatagttagattctacaattcatttctaaagaaagctcttgcaaattgagttcattcttttcaacacttgcttagggattatcattatttgtgcccaatacaaatgaatataaagaaaactaaattatccaaagtcacccttcctacatatgacaaatgtcttgtactctaaactcgaatcctttaaaccatcttctctatcaacacatcacattattcagttgtagggagtcttctagtataaattagtattccaagatattgaaatggaaagagaccacttgaaaaccttgaagcttccactactatttgcgctttggtctcttccattttacaacaataaatctcttatttagcctcacttgcatgatcaaaacctgaagtttgagaaaaataacttgaggccttgtagcatataatagattgatttaaagtcaccattatagaataataagacgtcatctgcaaagcatgaatgattcatcttgggtggagcacatctttcatggaacttgaagccttccttattccccactttcattattattcgagacagatattaatatattccattaccatcgcgacacataaggagtgaattactacaaattctttgtgtttacttgaaaactttctctggtaacatggacatcaatgtttaacacatggcaggaaagaaaacatcccggagttgagtagtcctgagtcatagcagttgacttgggaggagtccctatccctgtgctgaggttgactggagaactccagaatgggtgtttgaatcttaccaagttgttttaaactcataatctttcagtattttgaaacaagacgacaagaagaaatcaaatctaaggcctaaaaattgaaaagagacgaaatagcaccctgaatcaaccggcgcctagggttttcacccagcgcccacgttgacattcaaactagggttctagatttatggtccatcttagtgcaaatggctcaaattttgtactttggcatgaataagacttgtcacaaacatgtttgaggcactaaaatcataatcgggacactttccattttgagtacctgaggtaccaggcgctgagggcacccaccaagtcccgggttgacatatcttccagccataatattaagaagtatcctgagaattttatggtctcataaaaaacgaggaatcaagtgctttcgagaaagaaacggatcaaccttgtggccaaaatcgggacccaacacccaagttgacattttatcaacttgggccatttccaatagcagttcagaaaaggttttctgggcatattctctttcatcaacaatcaagatttgggtatactttctgaatataaacagagtcatttgggagctagaactgggacccaacgcccaggttgacattggcattgggcccagcgcctaagttgacattttgtcagcctagaccacttccaatcagtttttccaagaattcttccaggcatattatctattttcttttataactgagatacgagtgcttatgagaaacatatataaccatttggtagcaaaaaactggactaagcacccaagttgacactggtgttgggcctagcgcctaagttgacattttgtgaagaacaaattgatagggctaaatatccttccaacaaatacaacaaatacatacttgattaagaaaggatatgctagtatttgtcatgagtttcctactgttaactggaaagataaattttggaagagattgttcgtaccaaaatatagattcatcatgtggcttgtggtattagatagattaagattattcaaatcaagattgttcaaatacaatatacacatagatagaagtgcccaatttgcagaatgagtaagaaaccagagattatttatttttcaattgcatgtcacttgagtttccaagtcttggttaaaataaaaagatggctgacttgggccgccgttgcggtatagattttagggctgctgcagtggcttaatagaacgaaactaaacagattttagcgtattttttttttcaacaacattaacgaacaattaatatatcacatatggtggtctaggaatgaaatttttagaatatgcaaattaatacaattggcagatctaaatgatgcttctaggatgtaaagatttagtttagaggaatatacttatttgaagaaaaaaaatgaccatacctgcattgtccaatagaaaaataaattctacatatctgattagtaattaaattataatatatatatatatatatacatatgtgacacgtgaaaacttatattaattaggaaacataattgtaaattgaaagatgacatgttaataaatttggggattattaattctcacgagttaattagaagagtaattgatatagaatgtaaagaaaagtcatgattttagtacatgataatcgaagttcaatgaatttaattactattattatcttaattaatagctgtaagattattattaattgcaatacagatcatgatgttttataaatcaacagaaatctaggttaattatcttcagttgattaatattaaaatatcatgtcaagacatattacataatagcaatctctaataataatttaatataactccaaaataataattaatctagaaagtttaatcataataaggttaaactaattataaacaatattagattagaaaaagatatgttattttttgtcaagtacgacctataagtacatggaaccaagctaagcatatatatatataaatatatatatatat

SEQ ID NO: 227170 - DNA, 5747 bp, Cannabis indica
aaaaaaaaaaaactaaaaaattggagcaaataaaagaagacagtaaggtgcgtgagggggcgacactgatgaacgacgatgacgacgacgacggcgatgaagaaaaagctcgaattggtggtgctccttgcttccatatctatatctatatctgtatgcttggccgcttcctcaccaatcctcgattccaaatccgacgcccgaggagaatggcaactcctcaccaagctcaatttctcttctcagatcagactccatccccatatcctcctcatcgtcactctcccctgtacctaatcactctctctctcttcccaattatcaattttctccaacttgtagaaaagcaatcaatcttaactgtttgttactcaaatacatgaattttgtctttgaatttcatttttttctttagtttttatttatcgataattttgaacgaaagggaacagattgaatcaatgctgatctcttgtcttatctgattttcgtggttgcattttcagtcgtttcatatattagtagttcactaaatgactttataagttcaatgttcaatcacactgtgtttatatgatgatatgaatttgtatttattcgtttagatttaagccattacagccattgtgttcgtgataattggctaggaaaactagtgtgtttcagagttcttttaggtggcattgccgagcttaacatgtctaaaaaattattttgattaccgtgcttgttattgcttccaaagatttttaagctttcagtgttctatctatgtcattaaagctttcagcttgttaaaaaactagggttgcgtttggttggaggtaatggaatggaaatgacattcctttgtttggttctattttgaaatggaagaccatcccaatgcaagagtaccaatttttgcattttaaattttattctatttcatatgtttttattcctatttccgagttttcattcctcccgaccaaatgtaccctaaggtgttattatatctctttttttttttttgtcttggtgggttctttgactcttgttttgttgctggttttgatttgcagggtctggtgagtttcgatcacttaagagagaagtatcaagtatggttactgacagacaagaagggtttaactccctaaagttgatgtttatgtacagaaatacagaaaagatgctagcagaggctattggtgccatggcggatgaaataacagttttatactatcacaattcagtatcctacaagtatcgaggaaggcttcgagcacagaacatattattttcaattaaccaatttgtctcagtttttcctgaagagattcctctcaaatccctgagtactccagtggaattgaagacattccttgattcaactgacaaagcattgcttctccttgaattttgtggatggactcctaagttgcttgccaaggggaggaagaatgttactgaaaatggttttggcagacaaggttggtagaaatttatatggaaaacgaagagttattaatcattctttctgtcaactcggccacgcatgttttgcttaatattagccatttccacgtacttggaaattttcccataattttgatcttcattaaaatatatgttagatttacaattggttaggacactctagagtgaatgtataaatttagtattatagattcacattggcgtaactcattttgcaaccacagcatgcctatgtgcagcttatgagaccctggaatttagttggcttatcatgaatttattgtcagtataaacatagacataattagtctttctagtaataacattgtataaattttgctatatgtagtttaaggttttgtggtgtttattttcaatctatgccagaggttagcattgatttttcatttgatatctatttttcagtaacacttttcaaccacataatttttcactggtttgtatttgtttatttacagttagaaagaatagttttccataagaaacattggggtttagattaggcttgaagatggtgactttatcactttaataaacaactaaattgacttttcagtacatattttcgaaacagagttcagaggagagacaaacagaaggcggacacctatgggaaagaatatacagaaggttgcgggtagtttatagctgctcatcattgtgagacacatttctcagttacaatagcataaatttcatggttataattttgttatgcattgttccttttacaaattgaaacaggagatggaaaatgcaaacatgatgtgcaatgtagatgatgagattaacagatttccttggcttgtggacttaagttcagtgaatgaaagtgctcctttcaaggagacaaataatactgtgcctggtgtcttatcatcctgtacacctgaaggatatcagctatttgaaacttttttcatgaagttcttgacaaaggcaaaagacttctttttaccttcagaaaggtatagatatggcctggtctcagaaagatctatgctttcaactctcggcattgaagaatctggttcatggttggcagtgcttcaccatgctggctgtccaagttgtatgaagatcattgagaaagaggatgaccttactgatgtttttcatatggatggtgctattgtttcagaggtgagtttataataccgaatttgttatgttatcttgtgtccccaatcctatattgttaaattcttgacatgtatgcatagctgctctaatggttttggcctataatggctcctttgacgtgtttaacaggactttgcttctattaaagaaaagtaacaatgattttggcgtagaatagttctgttagtttgtgcgttgtaataatcaaacagtttgcatttttatttgttggactagatgtgacattggttttaaattgtgtacttttgtcataaaggggaaactatatgcaataatatggttctctacccaatacgagtttatgattgtttcccgtctgctggtcctactttagagtttcgggtcaggactcaaggaccttctctaagtcaagtttaagcaggggagaaccttgacacaacttttatttattaagttattaacccgtaaaatcttttttgttactttaggcataatcgcatacacattttcttgaaatagtttccatgattttccactcttgccaaacagtaaattattcaacagctgtgaaaaaatttctatcatgggtgatgctaccgtcttaatgttaataggtctatttttctcctccatttcacattatcttggtattatcttggtgttagtttaagtaatttttaacccatttatatttgtcttcttgctatatagctggaaggtgatggccgcgcattggagcctgttttgcctgctaatggaccatctatactcttatttgtagatcgttcatgtaaatcattggaaactaggagcaaaagtaaggatgctcttgaggcttttcgagatctggcttttcaaattcatgaatcataccagttaagtggacaaaacggtgaaaagattgagactttagcccaagattatcaggcatctcggagtacatttggacctcctagattaaaattatcccgaactgctcagttgatgaagttcagggagaaaatgtccactattatggttgtaaatgaaggaaaacctgtcgctttggataatgtgaattcagatccccagggaagttccttgcgggagatcttgacacacattcttcagcaaaaaaaggaaggtaagttaagctcacttgcaaaagagttgggtttccaacttttatcagatgatattgacataaagctggtaaatacaaagccatcaataacagaaactgaggatgacccagcttcaccagaaaaggaaactgaagatcttgtatcaggtggtgttgattcagacaaagatcaatcagcccataccacaagtattgctaacgaggagctttcggtaacttccaaagtcactgatgctcacaactctcagtatgacaaagagaaaaaagcatatttggaacttaatgaacagctccctgtagagtctgagaaactcatcccagatcataaacttgatgttgatgaaggtgtaaacaatgcagatgccagttccttacaagtagacatgtcagagcaccaacagcctcaattttcaggcttcaaaggatcttttctcttttctgatggtaattataggctacttcaaactttgactggtgaatctaagattccaggcctggtaattgttgatccttctaaagaacagcattatgtctttccagaggagaacgatttaaactattcttcaatggctgattttctcactaggtttctcaatggaagtcttcttccatatagtcaatctgaatctgttctgcatagcccaagggaagccatgcaaccaccatttgtcaatacagatttccatgaggtggattctatacctcgagtaacaagcaatactttttctaagctggttcgtggatgtaatcaatctgactctgatgcttggaataaggatgtgttggtcctttttagcaataaatggtgtggtttttgccagagaatggaattgattgttcgtgaagtatatcgagctatgagcggttatgttaatacaatcaagaatggatctaggactgggaagacaatgctccatggtggtacgtacctatttccagtagtcaatgtttgcgttaaagtgttaaaacctttgcattactagttctattttacctcgtaaaaaacaatcttagggttgaaaaccactcatgattgcctaagctgctatttaggccaaagacatgttggagctttccgaaatgattttacgttttgtacatggaagataaaatgaaatgatgtacaaaaaagacactttttaacccattatattatcttttgcttgaacttctatgaatacaagtatcaaatattcatgttaaaagaaaaatgaaaaaattaaagtttactttacatcacctttatctagcatttcagggtagataattgcagaaattaataatatctccaactttatcctgtttctgatgtaagcatatgaggtattgctccttgtaattttatttctttgagaaatgcaggctttggttttgtgtattagtttgtatttttcctaattaattttatttctttgatgcttgttggtgtcatactgttatgccacatatttagataaaatttgttatccattgatatgtatgactatcacatatctaagatatggttgtgatatataagcctgcttgtcaaaggttatttattctgtaggaatgagcagtgtgataattaatgttgttattggcatttattagatttattaaccttttgtttttaagaactttacattcttgtcattgattattaatgtttgatttgtttacttcactttagagttttgcaaccaagaggtagtttcaattgaatgtttcaaatttgacaacatcaaacatcccaaaatatttcctctattaattgaaagtacaaaaagggactttctgctgcaatgatgcattaactatcaaaacttcctctccttgttgatcatgtttttactacgttgcacatgtgacagacagcttgaaggatgtagagctgaagtttcccttaatctacttggtggattgcacacaaaatgattgtagtttgatactaagatcattaaatcaggtgagtcttttggaatgcttgaatatttattgccttactatgttcatg

SEQ ID NO: 227171 - DNA, 5477 bp, Cannabis indica
gtttttttttttttgaaagacttaagttgctactttggaaggcatttaattagaaggtttaaacatagattcccagttatttagcttattattgtttctgggttagtattttaagttaagaaaatcaatgcagggatgaacaaagttcagatagttagaaaagtaaagtatgactaagccacctaacctctcactgttttaactagcgagtagcgaaaagtgaaaacaactgctctgattttctccaactctgcattgtgtgccattttattacaagttgctgtgtgttcagttcagactctcacttgcataatttctgttttgatggccctatgctatgctatggtatgccacaggagaaacgaagaggaagttcgagagcgtgtattctgggggcacaatggatactcccgactcaggccaggttttccaatattggcattgttgtggatctgaagatccctcaagccctggatgcacagctgctccccatgcctcctacgacgactgatgcactataaacaatcttacacaccaaattcacttcctcccttcccttaagggaactaatgatattttgttcattatgtgacattgtatattgaacaaacagtttcttattcaatctttaaactataatgaccaatatgagattgatgctgtaatttgaagacatgtttctaaaatctcctttgctcctctatttgtatgcaatataataaagaagttttgtaaaggagtctcattttggcctcactactttatctctattgttttttgtttttctacaactgattctagggactgaactagttctatcatgtttatgatgatcattgattttgtatatcaaagaatgatttattgtttcttgtttaataatattttggtgatcattgattcttgtctagagacttgtaagagaaaatgttaatttttttggtagaaataagaacaaagaacagcaaagttaataacaaaagcatcctaacttgattcttttgtttggttttgcatgtaaatggtgtattgataaaaatatccatagttcaaaataatagtaaaagagagcataaagccaagtagaagtcattttgaatttattttatcaaaaccataattataatgaggattcatataaggtacatgtacatgagtagtaatcacttctcaaaacaatgattacaatttaaagggaaatagaaatattttgccttttcttttgccactacattgtttcttaacaaaatacttgaatgcataccaaagtaacagtttcataaaataataaaaaggaagaaaaccagatcaaaaatgatacagtgtgctagagaatgaatgaattatgttttcttattatatttttggatgaagaaacttctttgtattattataaatatagagatgatctacaaaaaaacctcagaatagccagatacagctatgtacaaataaaacagcagaaatttaaaacacttcactacaaaaaacttaatctcttctcagatcaacgaaagataatcctttgcaacgcagaacttagcgttctcccacaaaacctctgctgcaacttccttatcctaaaaaattctgcgcaaagccacaagctaatcttattttttcatgaccctatttctttcgatatctgataaaacaatctcttgacagcgaacgattccagcagccccgccagagcacaaccatttctcactgcccttgttcatgttccatctcactctatgcatggcaacagctttcgaaggcataacctcagatttactaactttttcgatctcttttttctgtgagcttcttgcttcatcatctatagacaccaccgccagcttctcttctgcgtgttttgtaggtttcttcctcttgagcaaagctgatgtttcttcctcatgatcggattcgactctcaaatcattgcctaaacaaagtgctgaagtttggttttccatcttgtcatcatcttcttgctttgcttgattcgcccttgttaagacatctcgcaatgcgagtggattatccccgttgagtgacttcttcaaaagtacatggacaggattatcaggtaccacagtgttgattgtaacaatagattcaacctcagtcagtgaaccacacaggaaatgtggagcacggttacgagaatgatctctgtctaccgcttttgttgtaagctgaaaacaaataacatttccatctgcactgcaatatgcaacaatacttgtttctcttgaaacatgaacgctccaaatagcgaaggataaacaaaaataagcgtgcaacccttgctgtttcgtaccagtaaatggtttcccggtggcaggtacatcataagaagcttttgttaagctgagtgttctcattgttccatcatcagaggataaaataatacatcttggatcagcaagccaatccgcactatatatattctttggcgctggatgaatttcccacagaggacggaatggatcccgaatgtcccagaattttaagcctccatgtcccgcagttaatataacatttgaaccctctgaatcagtctccactggagcccagccaactgatctaataggagctgtatctgcactgaagcaaagcaaaggcctagtttctttggaggaaacattctctgagaatttccatatagcaaccgtcccatcgtggcaaccaacaagtaagtattcatgaggaggtgaagttgaccattccactgtaagaggaatgctttgtatgccaccagatttcaaaatcgagcccttgaatacgggtttcaattttacaaaacgaggatcactgccctccctgtgcaaagaagtatagagtactttaatagtattagggtgaggaacctcccacacttctaaagatccatttcctaataagacagcaagaaagcccattcgatacttgcaagagggatcatttgcgttagaaggccgccatttcaaatcccatacaacccttccattatgagctaggcagaacacaactctaggcagagcaacatcatttggaatagaaccactagtcgggctagtttcaaatttaccatcatttgaggcattactgcctctatgatcctctccagaattcccttgtatttgctgaacaatgttttctaatggagaaacttcttgagtatagctaggaaaaacttcactggcaagcaagttggaaggattttctaaactttcggtgcagatgggttcatttgaggcattactacctcgatgatcctctccagaattcccttgtatttgtttaccgatgttttctaatggagaaacttcttgattatagctaggaacaccttcaatggcgaacaagttggaagaattctctgaaacttgggtgcagaaaggttcaatatataggtctttgccatccatcccagcagttgtatgttctattcgtggggtcttcctaggtcttcctctaggcctctttattacatttggttctgtgttggtgacggcacttttcttacgccctcgttttggcttttccataggaggaatctctgcctctttctcacaaatatttaaaagagaccatatttgaacgagtccttttccagaaagtggggcacctatcttttgataagaagatccaggaggatgagcagcaatagcaatgaactcacatttaaaactagattcgggattctcatggactcttggacaccaatccaaaccccaaacagaccctccaacatataatataaagtctttaggctccctagatttaacattcccaggtagcctctcttgaggaactgttgctgaagaaaattgtggcaagttgattctactagcaacaccttcagcttcacatgcgaaatttacatctcttgcttcataattaaataccctcctccattcttttaagaaagtgattgaggacgataatcgctgagtttcgtactcatcaagtccactaccttccttcactacctctccacaaagctcagatattttatccatggcattcaaatgattctctactgagtaatcaaactttgaaatcctaatctttgggcgacagccattgaaattttcttccatgatagccgcctctacctctacctctaccttcctctttaatgttgttatttcctttctcacactttcgacagactgaacagaaattggaagctcaagatagcttcttcttcctccataacttctatgagaaatagggtgaaggatattaccacagaagcctatgtcttttctcttcagctccaaccaaaatatgaaattgtatgtttcactgtattgtatgtaacataaagaagagaatttgagcaacatgtggtcattagtgacacatcccatatcactaatttaacagcaatataacacattgtccttcaaaaagttactcattaaacaaaacaaaaatcattgttaattgttaaagttcagaatatttaaggttcaaaatccataaaagttcatagttaatcttctgaatagtagacattattaatcttctgcattgaatcacacacacaaagcagattccatcagatcattatctcattgtttaagcagattaccacaagttccttcatcaaaaattatattcagtaatcaaataaatctcatttcacaaatcattattgaagcccacttaccaaaattttcatacaaatgcttaattgtgtaaagaaaataaaaaacatgggcatgcaataatcgcttgcaaaaaactatgagattcagagattaaaactaatcattactccaagtgttccacaaagccatactgaagatgtttgccctactttctatcaaaaatactcaaaaggaaaccacaaaaaactacaacgaatttcatcaaacaggtggtgtgcaagagagttattaaagtgatgttgcattccatataatcattaattccaaataggcatttaatcaaacagttggtgactcttaatgggtccatggatagaaagacagagtagctctacaacagattaaatagaagagaagagaagagttgggtgaggcactgacctcctactgggtgtgtcgctttgctgatagtgagaatgaaagatgggtatgttggattggttgaggacgaggagaggagagtgagactctgagaataagcttgcttctgcagtttcaatggagtttctgtcgtcaatagggattttccagttttgtttttgaaaacaataaataaataataaaaaaaaatttaaaaaaattattattatttttttttgctgaatttttttattgttttgaaaaagtaaaaacttaaaatttaaaagagtaatttgtggcataaatacttaagtttaactctcgtaaataaatactaaagtttaatttttagtggtaatgatacttaagttataattttagaacttttgtaagtacgtgactgttaagtgttaagtaaattgttacgtgacaattgctgattggtcaaagttattaatttttttt

SEQ ID NO: 227172 - DNA, 3273 bp, Cannabis indica
tctctctctctcctctctctctctctctcattctactcacagagaccttaactacaaaaatcttaaatatgccactaattttacaaagattttgaaaaaaccatcttgaagtggaacttgaagccacagattatatatattttgaaaaatgccacaaagtttaatctcatgattttcctcattcataatcatatatgcataacttttcatccaaaattcaaaaacttctctgttcaatttccaaattagggtttcgaatttctctcagttcgttttgaggtatgcactgattcatctctcgctctttttttttttttttccttttctctgtttgtgtagtttatatgtatatatatagttatatactgtatttgattcttggttattatgtattcaaaatagtttagagacgtgatcccaatgtgggctgctactctacggtcttactctcctcaactccttcaaccatggaagctagggttttcaactttcaatcactctttatcttccatatctaaacacatgggtcttcttgagcttcaagaagtggagaagattttatctgatgttagggcagataatgtgaaggttatacctgcaaataagcagcatgattgggctgattttatggtcattgcaactgggaggtccacttggcatgttaggaacattgctcaagccctaatttaccaggcaggtttgtttgttgttgttgttttttaagtattcattaaccaaagcctccatttttgttccccctttgagcttagattgacattatttttttgttgtttgtaaatttatgaaatgaacaggttaagcagaagcaaaaaggagctcggcggttagtgcttcccagtgttgaagggcaagaaggaggaaagtggattgtgattgactctggtatgctattattaatatattgtgattaactttgttatgatcatgttttagtggtaattagtaatctgtacaacatatgtggagtctgatgggagaatcacaatataaatcaaactctcaacatatgtggagtctgatgggagttcaaaataaaattcatacaccacaagaacacaagcaattaatttctacccttattggtgtaggaagataaagaacaaaaacaacaagaaatggtcaaggaatatttaaagaaatcgctatagtttcttggtccccaaatattgttgattagggggagactagttaaaagaaaataaccaaacaatcacccaaagctttcattcatacaaaagttctctctagataaagctagaggcaaacaagcaacaacatcatcaagaaacacatcttggaaactaacaattatttcaagataatggagaaatcacaccagaatataaagttgattttatggacctaacttagaactcataaaccaataagccaaagtcgttctctatccttgagtttaataacctttgctttgtgtacctatctacaaaatttcagctcagttggagcacaagatgaaaactgttcaaagtggaattttgcataataaatttctctctcttttgcttttctgattagcaagtagctcttccactaaaaagaaaccctaaacatttgcatttactaaaatgttttcatctataggctaaacaaaaccaaccaaatgggactttctgcctcttccacccaaagggaaacccaataaatcttcccttcctcgaataggtggagggatcctcatcaaggaaatcaagcaacgaatttctagtttttctcttgataaagcttttgacatgattacatctgtgtgaattttctcaagttgaagaaacttgttaagagtatcacttatccaatgatacacaaatctgatatattctagccatgaatttaatgttaagttcttagcaacgtcaatagaacattgataattgaaagacaattctttaatgaaattgtgctctctcaagaaatgcttcatccatgacaattctttacaagcttccgttgctgcattgaactttgcctctgctatagaaagcgtaatactttgcaagacttccatgaaactactccaccagagaaatgattagatttactgaagtatatttttacaagaatcctcatctcacgccatatttgatccaactaatactagtgccaaaactaagttcaaatggaaatacctgtgtatctcatggataatgatcccttcttggactcaaaagaataccactaacaactccaattgaactagctacggccttctacacaccattgcggtcagagtttttgatttatattatgatttttccaacagggtcttcatgaaataccaaaaaaatttctttggtaattggtggatattagaaatttagaatttctatggtttttgtaatcaacaattgatatggtgaaagttccagactctatctttataattattgatggttgttttattcattgtgtaggaaaagtaataatacatgctcttgatgagaatgctagagagtactacaatttggaggatctttggacatcagaaacgtctgaacaggagccaatggtaaaattgggtggattttttaatgaaatgttgaaatgctcctcttatatttatttatgtgctgtcctaacagtacatactttatctgacttggtataaatgtttaaactattggtaaagtgaagttaagatgcttaaattttgaattcacttcctttgtgtgttgtactgttttaaagttgatttcttattatgattttgtgataaagttttcaagggaaaatgagaaaaatacttcccaatccttgtcacctatccatggcttgggcctctttgatgattttgagtttagatatttaacagtttattattggttgagttaaagatacttccatcatatctttcagtgccattccttgtatacgtttttggctaagcccctattgtatgagttgtgaaatgctttaaaggaggaaagggccatcttgtctcttaggggttagcgaatcgctgggctaacttgcattggctaatctatggagaacaactcaatgatttcttaattataattctatttctaggatctacgaagaagcatgtcagccaaaatcctttgttaattcattattattacttgctaattttcattgttactaattgcttgaatagttgtttggtgacaatgaattcttattgtgctcatctttgtttattgtttaggacttggaaaatgtcatggtgaaggttcgtcgaattaataactccaaaagaccacccccgaaagatgc

SEQ ID NO: 227173 - DNA, 2266 bp, Cannabis indica
ctttttttttttttgcatgttttgagaatcttttcggagtatttaagtaaatttgctctcatgtcagtaaagtttgacacaattttctaattttcagctttatttaatattgcatttcacatttcatgatcgatacaggaagcttcttcttcttcttttttttatttttttgtttttgtgagcttataacaatgttataggtccttgaatccttgatgtaaagattccagaagattcacaagggctattgaaactacaattgctctgcgtcaagaacaccctgatcagaccaaaaaaagaagttagtcttgtgatagaaaattcagttgcgtgaggaaatgaaatccattagtacttgagtatgaacctttatgatcataatggccgcctctttgtgaagaacttcattatactctttacaagcaaagctctgcaatgtgggaaggttgagaagctaaaattgaataaagcatattaaaacaggtagaggaattagaatgaagctaacttgaacacagtgcgggcaaccaaaatcaactgagcaatggcaagatatgagaagctccagagcagcggttaacagctccatgaaaaagggttgaacctattaatcataaatcacaggcagagttaaacaagttttgaataaggtattaaggcaatttgaactgtgttccatgattcacctgtacagagacaccagtgcctcccggatgtttatcatatattaaaattctctctggaaaataacgggtatcacgagggtttgcacattctggagccaagtctgacgagtcacatattacacgccttgatataaaatcatgacagtcaaagttagattcacaagtggtttagaatataaaagtaagaacatgaagcctgccttgaagactttttccatcctttttgaggtagaacttcaaattattaatataaaattgttgtgatagaagaatgataaagaatgaaacaaacccaagctttaaaacaatgtgaattcaacttgaacaaagattaaagtttatcatataaataagaataatttgaaacttacaaaggcaccacattcaaaagggcatgagaagcagcatgcaagcctgcacgaaagttcaagtttttcttcacaacatctaatttcgttgactgtggaaccggagcccaaactgcctgtgttattaatggaaaacaaaaatacgataacttttaaatagaacaaatgacatactaaagtacgtttaataaagccagcaatggtggtctatacttgaaatgtacctgtgacatgtatgaatacttaggaagtgagaagtcaactttatccaatatttctttagattttttgcacactctaaagaacccaaaccaagaagttgtcactttgcaaggatctgctcgggcagctgttcgtgaaaactggatgtgtgaagactgagccggatatgcctaacaaaagtagaaatcaaaaagatcatcatcctgaattcaaaggtggggagaggtatctgcaaatgctagcgtaagtagataatttaatatggataaatagctatttcgcttttcgcattatgtgtagtttattctagactttctcccaaatggatgatctccctcctcctttcgagaggttttggataagcataaaaaggaaaaaggaaaacatttacatcaatgcaacacaacaagggccaacatgaataagacaattaacattataagcctaacttacgatgttaccagcaacaacttcaatatctgtgcaatctcgaggttttgtgtaatagttcaagtcagcttcttcacacagagcagtcttactagataagttcaactgtctgaccaagtatgactttccttggtgtaaatatacaccaccttcgtatacctgaaggataagaaatttagaaaaaaaaaaaaggtagggtgctcaagatctgaagttctgaacagtatcatgcagctttaaaaagatttcaaaataatttgcaaatgtacataaaaatcactttgctacctgaaagaaagccttgctttcctcaatctcttcaagggtttttcctgtcttttggtctataacatcatacatttcagtttctattgctcggatactaactgaatgtgaaggcattttctgtatttataaatattcatttattgatatattggaagaaaacagaagaaaatatattaaaaacaaaaaattaacaagtaatgcagcatacgcatttaaataccaaaaaaaaccatagcctagtggactacttcc

SEQ ID NO: 227174 - DNA, 3486 bp, Cannabis indica
ctgttagaaaacacttggaaatgtataaactggtggactatttgatatgctataccggcctgaattgtttgcatctttaaatcattaagatgaataggcctcaattaaccatgatatcatattgcagattggtctctctgcctcaaccattgcttctagttttggcaaagctatttccgaaaataaggaacttgatgactacagacctgaagatatttccctttctcttttaaggatgatttcctacaatattggacaggtaacttgagcattgacaaagttgtcttatgctgcatcacaaaagctttaatcatgctatcatgaagtatctcaaataataccaatgtttattgaagatctttcatcatgttttgttggtacaattgtttatacttcctacattttgtgtcatagttttgcattttgtcaaggttatggtgtattcctactcagtcatcttctaagaaccaattaactaatccaatagatgggctggatgatgttaggtctgtctgataatcatttctgatttacagatagcatatttgaatgctctgagattcggtcttaagagaatattttttggaggatttttcataaggggtcatgcttataccatggataccatctcgtttgcagttcagttctggtgagtactacattatttagattgtatcatctagctatttctccttttctctaggccaatgacatctgatgtttttgttcattaacgtactatcacacatttttatatttaaattctatttatttgttaggtctcagggggaggcacaagccatgttcttaagacatgaagggtttctgggagcattaggtgcatttatgagctatgaaaagcatggccttgacgacttgatggttcatcagttagttgaaaggttcccaatgggtgcaccatatactggaggaaatattcacggtcctccccttggggatttaaatgagaaggcaagtacagtttgcaaacctaccctgatccctcttgtcaaatttttgcttgaccatgttactaagttgaagggggaaattattttatcctgcatttctgtgaattagtacaaggactaaatatacaagggagttaactgaaccaaagacaaatgtacaaaaatatacaggttctactcacataaacaaatatgcaaataacaagccctgttaattgtcaaatcttctgaactcactcaatcgggtgcaaagatgttacgtattctcatatataggatgagtcggtccaaagggtatatatcatgcattttagtttaagatttattgtgtatatgacttagtgtttatatctagtagaatgtagttgagggggtagttagcataggagaagaggtgcgccatagttccaaactcaaattctgcacttagtttggcaatattcaattgtagaatcttctgtgtactagatacgtgacagatttagattcttgaaacaagcagatagaatagaaatacatcccgttaaagtttgttttttaatatcaaattggctggttctaaagggcaagacaataagaagttgtactaaagaccgatctagtttatatcatgcatttgttctatttggctgaaggttcagcaatcaatttagtcacctttttagctgactaatgtttttatgcactcatttggagctgtttcgtctcctttcaaggactgaaacctagtttattcgttttccaaccctagatctataatatgtctttgtggagcatggcctcttccaagttctttgaaatttgagaactttttggatctgtattgattgaaaaagcaaaggagtggaagaggaataaattatcacatcaaatgttgggtttcttgtaaacctctgtttgattttgatcccgttgcactccttgtgcagatttcctggatggagaagtttgtgcagaagggaactgagattattgctccagtgccaatggctccacatggaactactggacttggaggctttgaagttccttcatccaaaggaggtactctgcgttctgatgccagcactttaaatattggggtacttcatcttgtgccaacgttggaggtgtttccattattggcggatgcaaaaacgtgagctgttaaactattgatgcgactttagtggattgataccatgctctttttgttatgataccagttctattaattctttctgacattcacatatatattgaattatatgcccgcagatatgagccaaacacgattgatctcacagatcccagtgaattggagtgagtatcatatttaaatagaaattgaaaatatttctgtttcttttaaaatattgaaaaaagaataacatattgcatctaagatttccatacatcattggttttccattttagcttactttggttattctttttgctttaggtattggattactgtgctatctgagcatcttccaaaccttgttgatattgtaagtaaatccattggtgtgaaacttcttaatccaagaacatttcttaatagtgtatttaacaaaatactcttgtagaaactaagtagagattctctattcgatgctttcatatgtaaattcacttgttttaaagcactgactctacgaatttattttccattccataagtcatgatgagtttgatcaatgctgtatacagaaagttcttttatggatttggttatgttaatctggatatattgaatgcatattgcagaactccacattagttttctttttaattacttttatttgtttatttgatctgtaaaaaaaagatccaaactgttgaatgattttgagaagttgatgtgtattatggtaggcagtggcaagcgaaggtggaactgatgatgctaaaagaaggggtgatgcctttgctcatgccttttcagctcacttggctcggtaactttactagtttgcatgattattattcttttatttgttggtttttcttttcagattgtattgtatgtgcttttatgtgctggttttgagacagttatgttcttatactcttccatttgtaattcatttttttgaaagttttgtttctttttttattattacaaatcaataaatttgttgcataactgttgttgttcagcttaatatcaaaggtagatatagttcccatttgtgatatcctctttcctgacaacattttataggttgattgaagaccctgctgcatatggaaagttggggttggccaatctattagaactaagggaggactgcttgagagagttccaatttgtcgatgcctataggagtataaaacaaaggtaaacaataagcctcttgtcttttttcattccctttccaattaaagttactgatttgcaaagcggtcatattgtgctacatgtatcacatttccacgaacaggtatagatcacttgcgagtgttcttttgaaattgtagtttctataaacaggtcttttgtggaaagtgaaataaaatatattttctt

SEQ ID NO: 227175 - DNA, 1775 bp, Cannabis indica
aagattggtttttattatatattctgtccatttactgtactcatttgtggacgctaaatgctttttacaaattttgaaccagttttgcttatggggtcttgaggagatttttgcctgaggagaaggtagaagccatcaagggtttgacgctgaccgctgatggtttgggcgcagtgtttgatgtagcagctgaagatttagatttatttcttgctggtactattctctagaacttaagtttttttgtcttttgattcttgatctgataattactctttgttgaatcttacctagtgccagtgctcatgtctgtggacttgaacattttaattatttcctattacattaataatttgtgtttgggtcagtacggtatataattttctggtctttcttgctggcattaaatttgcaggtcaagaaaatgctgctaatgtgaagttagaagtggtgacagcattgccacctttgcaagaaaaggtgcaaagagggtttggtggcggtggcggtggtggtagattctcttttggaagaggtggtaggaatggtggtttctcagatcgaagaaatgatagattttcaggacgtggccgaggtagcaaaaggtggtgaggtgtgtgagaccatagattatgtggcatgaaatgctagttttagcgggaggcagaagtgataatgaagatacaggggccttgtcaaaagaatcccttggcaagatccgatttatttttttggttctctttatagtttatttttattttaaatatgttttattttaattttttgattcaagtttgtcaatttatgaatattgatggggatttttgctggtgtccccattatctatcaactgttcactgaatttgaattcacactatattctatgtaatccgggcaagttaaaaaataggaggatttttgtgtatcgtttttatgtgcattcttatgtagtcgtgaaaagttataaagcagaagcattttcgtgttttatgttttatgtgcgttctcttagtttcaatatgattttggcctttcgtacatagatttctaatttatacagattaggggacttcatcaacttctctatttatttattttaaactaatatataaacacgtatacaaatttgtttaaattttagagaaactataatataaatttctgtaaaacagactgatttatttagtgataataattaagtcatatatatgttttaaataaattaaattgaaattaaatatatatatatgacaattaataaatctataaaaaattaattatatgattttaagactgttgttatcatcgtttttttttacacgttattattttcaaatttgatatcgccatcttacgtgtaattgttaatatcttacttgtaattgttaaataattctcaataaatttatttagtacataaaataaattaaataatgagttaaactattcacttttatacatgagtttcaagtttttttttttagaatttatctaattaactttttaatttttataattatttaactaaagagacaatttttacttcaagaatttagaagtccaatcttttcaaactgatttatcaatttttatagagaatatacttatttagtactctgttatttctcaaaaaacatatctggtaccatgtgttttcaataatacttatttgatactttgtattttgaaattgtacatatttagtactctaaaataaaatttaatcaatttgaccaaacggttcttaattacatgtaatcatataattaaatttg

SEQ ID NO: 227176 - DNA, 3407 bp, Cannabis indica
taatatatatatatataaaagtttaatcataacattattttaatattaaaaattttaaaaaaattagtatagtctatataatgtctcactattttagagttttattgtaataatttagtgtctaattatttttagaattttaatgtcccattaaaaaaatactaagtcccatataaatatgagtgggtggtggttccaatatatacaaaaataaagaaagcaataaatatttaattacttttttttttttgctgagaatgacttattattagtaattttttctagtttaagtaaaacaaaatctaaccatgttcccaaattcaatattgtatatgattttgttttagacaaattgtttttcaatgattattacatataatcagttgtaattgagaattgattatttttttttaaagaaaaacttaaagtgggttaggctcagtaaatattaataatgacttactctacttaacatttttagtacttgaagttagattagatgagcttgaacttgaagccaaaactataaacaagtgtttatataagcatcaatgtgtgagcttgaactctctatttctaggctctcgactctaaaaataagtaaaatgatcacatacctattcatatgcgaaatataataagttagatatttaaatttgaaactcaactttaaataatatatataagatattaattgcatattttggtcttgggagactctgttttattgttgccggcgacttttcgggcgacggagatgatggttcgaaggggctaccacccaacctgtctcgacgtccgagacatcttgtgaaagggacttctcaggcggctgatggtcttgggaagtcccaccgagcggtgtggttccccaagagtagtcctcatgctgtgaagagaacagttgccaaatctggctatggaggagagaaaggagttctgtctgggagaaaggctcctgataattttcctgttttgcttgatgccagccaggatattgatttaaatgctgaaaagggtttgaattttttgaccgttaaaggaaatattaaggaagctgggcctagtgttattgggccgtgtgggaagagctgcttacaggctgggcgaaatgagttgagtggaattgggcccaataataatgttaatagcaaaggtaatgctgatagtgggcttcatctaattactagtaaaactcaagtgggtgggcccgttctggagaagactcatgctgggtctaattttgaagacgggttggtgaacccgtgtgtcttgggcagtggctctaatcctaatgggccgacttcaatagacaaagaccaaggtgggctcgtgggtgttaactcttcattggcttccgatttccatgcagctcaagaacaattaaatgaggagaaagctctggctcaattttttcaagctcaagagagcttactgcatgacctcaagcactttgggaaacttgatttgtatgaaattcgaagcattggtggagacattggggttccggcgtcctctgaagttaatgagcgaaccactccctttaagaaacggaaatttgaaacgtctgcttcgctctgcttgaggcctcataaagttcctcgcaagtctcctgatgttgttcgtgattttccatgggacaccacgaataaagtttctaaccctgaggtggagattgaagacccttcggaggacagctctagttctccgagctgctcgggtatcttgaagaacccccttgtgggttcatttgtgattgatgagtctgattcgtgtgggtctgctagaacccccttgaagaacccccttattgtttggtttttttattataaattattttaaaaatttatgacaattgttatttgaaataaatttatgtagaatataatttagtagcttttaactattaaataataaaatattcttttaaataaccaatgaaattgattgttgtatttaattttgtttagacttaaattttgttaaaatggaaagaaacaaaaatgttacattacttagcaaaaaaaaattaaaggttacatttgattccagtcatcttttctcatgacggtgaaaaaaatatatactttttatatatcaaaatgatcacattgaagaataaatcgtaataatataattttgaaaccaaacgattattggcgtagctgaaaataattttaaaattattaaaaagaaaaattttgttattttaaaaaaaggaacttagaacctatatcaagaaagtgaagaagttagtatgcgattaacatattgttcaactaaaaaatgctctgtaggagctaacttcgtggaagtatacagaacctgctgttcttattcgttcttcatcgaactcttaacaatctaagctccatggaccccaagcaagttagtgatctcttccaggatgcagtccaaataaccagtgatgaaatcacattctccctcaacgcaggtgaagttgatgagcctcaagaatctaaccaggtcctcatagggaaaatcctcagccgatataagctagggaaagcagccatacaaggctctatgcggttatcctggagtgccatcaagggatggaagtggaaagaaatcgaagatgggctcatcaaattcacgtttgccaatagaaacgatgccatgaatgtcctggcacggaggccctggttcgtttgtgggtcactcatggttttaatgccttggccatcttggctaactccctctgaaatcagatttgacaaaacaccaatgtgggtgaggataaaaagcatcccacccttttattggaatctctctaacctcaaagagctagcttcaagggcatcaccagttcatgaattgccccaaggcattgaggatgctatcgggatgagcaatttaaagttcagagcgaccatcgaccttaataaaccagttttctctggttttttccttcggcggcaaagactcaaggatctatggatccaatacaagtatgaaaggctaccaaaaatgtgcttcaaatgtggtctcctcactcatgaccaaagcatttgcttcaaacctcccacagtagttgaacatgacaaaggtaacttctacccaatgtatgggatttggctcaaggctgatgctaaggagaagtcgacattcaccaccccccttgccaaatggtttcaagattgggtctttcaaaagaggttattcctagaccctacccttcgaaaccaactcaaagtgcaaaaggcactactccatggtgaaatggatgaactcagggagaaccgcaaacaacttccatccaagaaacgcatagtcgccaacgaagaacatgatcaacacggtgacgaatcttcacccgaagaagcggttattacccaaatccctctagtttacctaccgggcattggggaaattgccccttttgg

SEQ ID NO: 227177 - DNA, 8228 bp, Cannabis indica
ctttgagaagatattatttctccttgcttgctgtattgcttgctaatctgattcctagattttaatcttaggttcttgtactgggtatctaggttgctcagtgacatgtggaaatgtgccaacgtatcatgctgctatatatcattttgcttacgtggactttccgaagtcctatgtttgaatatggtgggcttatgagtcctaaagaaaatactcttttttgtagttattttttattcatgtgggaactgatcaaactatcacaggtgatggcagattttgaaggagaagatactgaatcagatttctgaaataaatcagtcacaagctccattttgtctgaaggtgattccaccggtaggttgggcacttgcaaatatcatatgccttgcaacagcgaatgagaatggttctcttgattctggatggtgcaaccaaggtttggactgtgtgttgtatgttcgtgcagttatcattcttgctgaagacttgttggctaggcttgataatgttggaagtataaaaaatgcgaaccaagaactcccaagtaataacgaagattcagttatgcccatcgatacaaattttggcatgagtgatgaaagacatggttccttgattgtctcatacatggatctctttaagcctgtttgtcaacagcagcatctcatggatcttttggcaatagttggaaaagatggttgtgctcaagggttggagactttttcgcataacaatttgcactctcagaagttgggatttcttgatgttgcatatttttattgttatcttcttagaattttttcattcttgaacccagcagttggacagtattatattctcaatatgctatctttcactcctggttttcttgtgagcctatggggaaccttggaaagtgcccttttccctgtagatggtccaaccactgaaaatcatgatctttcatctagtaaaacttcaaggaataaaaaggatggactttctgagagaaggcaaaaacatagtattaaggatgaaggcaataaatgggtgaccgtgctacataagtttactggaaagtcgcagttgggagctgatagtacgaatttggttgatgatccatcaagccatagccacattgtcgagggtcctcatgttgaatgggacgtagaacctttgaagcatggcccagaaggtatatctaaagatatctcttgtctgcttcatcttttctgtgctacctattcacatctgctgttgatattggatgatatagagttctacgagaaacaggtatgtatgatgtttgtgtatatattcatataatttcccctaaatgcaatatttttttgaaattatgaatactaacacgatcattttgcatgacctaggttccattcaggattgagcagcagcggagaattgcctcgatgcttaatactttcgtctataatggtttgtgccataatatggggcagcagactagatcccttatggattctgcaatcaaatgcttgcatttaatgtatgaaagagattgcagacaccaattctgtcccactgttctgtggctttcacctgcttccaagagccggccaccaattgctgtagctgccagaactcacgaggttttgtcagttaatcaagacagatgatgctccaactcttccaagtacgcggtctattataactactgtccgtcacgtatatccattttgaagaaaggtaatcccttatttcttgacatacccaaccgtcattattcctgtgtttcgcggctgtcgcggttcaatgcattttgtgtagatttgaaacaatgaatttagtacttttattggatgcttccaaaaatatttgttggtacttccacctcaatgatttcttaatgatttgtcacttggcagagttgagatgtttagagagttcattgagatggacaaaacctcgcgaaaaatggctggtgaagttgatggacctccttcacgatcagttgggatagtagttcgtcgaggtcatatagttgaagatggttatagacaattaaattcccttgggccaagattaaaatcatccatccatgtttcatttgtgagtgattctggtcttccagaggctggcctggattatggtggattatctaaagagtttttaactgatatatcaaaagcagcctttgcccctgagtatgttgtaatggtcttttactttctatttatgtcttgtcaaataatttggccgtttgttacatttcgaagttaatctcttctttaccttttcacatttggctatataccccacagtcagcccttcttacttttgcctttctttttggtaggtacgggctattctcccaaacttcagcttcagacagacttttaatccccaatgcatctgcaaaatatctcgggaatggagtccagatgattgaattccttggaagagttgttggaaaagctttatatgaaggaattttgctagattactccttttctcttgtatttgtacaaaaactactaggccgatatagctttcttgatgagctatcaactcttgatccagagctgtacaggaatcttatgtatgtcaaggtaaattatattgtggtgcctcgttttttgagagatcaattatatatatcattattaagataaagcatgaagttctaggttgcagtttctttctgaatgagatcaagggctaccttttgcatgagttggtgagagcaaaacagtgggataaagttagatattgagtaactatttggttattcaatatgaaagacttataacgcattttatttgctttatttagttagagagtggatgtttttttttgaaagataaaataaaaaaaatcactgcagtctgattttgtatcgatttgtatctttcatataataatgaaaaaagaaaaatagagaatctacattcatcatgccgtcagtgctctattgatccagctttgttatttattaaatttgatccatgcttttattacagactgaaattaatggttacatgcttgaaaagggtcctcacatattcgcttaaaatggaaaaaatttacattatgattttttatccttaactggtgcagcactatgacaacgatgtcaaggatctttttctggatttcacagtgattgaagaatcttttggtaagcagcatgttatcgagcttaaacctggtggcaaggatatttctgtgacaaatgagaacaaaatgcagtacattcatgctatggcagattacaaactaaaccgacaggtctgtaatgctgcaaaacttgctcaaaggaaacttcttggagatatatttaactgctctatcttttattgcagataattcccttttccaatgctttctacagaggattaacagatctcatatcaccattttggctgaaattattcaatgcacgcgaattcaatcaggtagattatgttttatacctgttgtctgtcagtgatatacctgtttgatacagaagcatttgtgtcttgctgcgtaaaaatgcaatagtcatgccgaatcagcactacaaagggaaaatgcttcaattttcaaatttacaagtcttcattcttttttttaaagttcgggtagtttgctgattaacatgatttacttttcattattgaacttgctgcctataaaatatttgggatgttgctgtgctctcatagatgaatggatatatggcatgaatgtatgtttatactatcagtctatcccttctaatgttaaaatcatatattttgactggggtaagatattgattaatgtaaaataggttctagaacctgctgaacacgttgagagctactttaactgtgagtttgattgggacatcagagaaggagccgtcttattctcaaatgtccaacttaatttatagttatattgttgattttctttcttgatgagttttactttttactgttccattctaatgttgttctggtcataatggtgtaaattatttggaaactttatccggcttttatttatttcttggtcatgtgctaatttaagatatactatgcagttgctttcaggtggagactacgatattgacattgatgatttaagaaaaaacacacgttacactggtggttattctgagggaagtcgaactatcaaaatcttctgggaggtattgatccgttctaagttactgaaccttttatgtggtttttacgggtatttcatggcagttaataattcttgtttctgtgcattgataagttttattctgttcatgtcacaggtacttaaaggttttgaaccaaatgatcgttgtatgcttcttaaatttgtaactagttgttctcgacctccattacttggattcaagcacctgcagcctaccttcactattcataaggtgtgatatttgattttacatgcatgcatggtttttatgtatttttgtagatacatgtctaccctccattatcttttatggtggcaaagcgggggaggaatgtttatggtttcaattggctgttaaatagacaaagtaaaaaattatcaactaaagaaataaaatcaacagaagaacaataattgaggaacttgcttagaactgaagtaacgatttgattgatgtcttataggttgtctgcaatgttcctatatgggcgtcaattggtggacaggatgtggatcggcttccttcagcctcaacatgttacaatactctcaaggtacgtgtagatttgtttccttatctctctttcccatttttaaagtatttgtactagtcttttatactgctgtgtagttattagggagctctattagtggcttaccatttaaaaatgtgtatgtttccttcctcttatatttcagcttccaacgtacaaacgtgctagcactttgagggagaaacttctgtattcaattaattcaaatgcaggatttgaactttcttaggtccacttcaggtgaaacctttgtcctttcaaattttgtccgcagcacagtttggattatcgttggtgtatccattctctgtcactttgtgttgcttaaaatatattctttgctattttcttccatttcatgttgtctttgcaatcttttaataattctgacactgataatgctaagaagatcttattaagcaaagatccataacgtgttaggtaccaaggcaagtacacacatcactgacagttttgtttcgtaacaagcttgcatacattacaccctatgtaaactaaactctgaaattacagcttgtaaatactgatatataactgcaaagcctttatataaatatcaatgagggcctagcagtgacaaattctttgagctctggaatagctttaagagatgagatcgaatccttgctgaagtagatcaccggccaagacctcatttgcagcttcagagggatgaaatccgtcccaaaatacatatccggtagcattagaacatgtccctatagacctggagttgcaaagcagtgaagtttctagagtacctgttccacagcaagctcttcttgattcaaagaaacctattacatgagtaccccaagagaaaaaatcagttaccctggaatgtttggcttagttaattagttaatgatgattgtctaaaccttgctctcttttatttacaatgaccgatttcttcggttcgctaactaattattccaaagcaggcgtggtaccatcttaccgttatccgagggctttgtgaccatatctaagagaggctgataaatttcgaagaccacaagcttgagaccaggaagcctacgcagactttcagatgtgctatttaactttctgttgaatgaaaaggcgtctctgtttaacctggcaacacactggttacttcctctgccaaatagagtgatggctgctggcaaacatccgagtggcggtaagtttgtgacaccaatcctccttgctcccaatccgtacagagtctgtcacaatgcttttcatgttatgaatgaatatgcttctgaacaaacaagttgagctaaatttgattcttattatcttgtttgtatttacttgattttacccatgtaactttgagatttattgattgattatatataaatatatgccatgccattggtaagtaaacttcgctaaattatgtacactgcttttgcttacaacatatttccaatcaaatatctacataaattcaaataatttaccaagtaatgtatcatgttgaacccagaaaaaaggtgtttagattattgatcatagtttcttcacaataaaataaaataaaataaaatggaattattatatgaagaagagacctgaatgaaagtggagtatgaactcattagcctatctgagaactgatcaggggtgtaagctccataaaaaatgggatcaatatagtagttttgtataaaatcactactccctgcactcaaaagatgtattgaaccagagaacaaggcattggctctcttttgtcctatcatattcaccactttcttctgatactccttgtagtaattcagttgctgggtcaatgaaatggcactctaaaaaacccaaagaaaaaaaaagactcaaatttttatacatatatgtatatttatagagagaaagagagagttttgtttcattagtgtttaacttacatataaatgggctgtttcatcataatagccagaagctcctgaggcaaagttggctccagtcaagaggttctttcccttggcttcttggctaaggtatgctggtggatatgaggtgaatccaagatactcagctgtgtgaaaatattcaaaaattattatcataacacctaacaaaagctcattacatagaaaataaatgaaatggtaccagtgaagtctgtggctaactttccattacagaaccttccagttggtttgtgagaaataaagtctctcccataaggaggaaagtttgctttgacaacagtataaaggttgttattgttcccaacatcaaccactgagtccccaaagatcatcaaaccaggaacaaaagggtctccattagtcactgagaaaaacaggacaacaatggccaaagaacccaagaacagtccacttaaaaatctcatttttttcctttcttcaaaagcacaacccaatagtaagatatagagagagaaaaatacaaagttgagtgaatgaatatgagaaaatgcaggtgggaaggagggaattatttaaggtggtagatttttacaaatgtatataaatggtcaaagttgaagatattattattatggttccaataaagctgtttagtttcaggcaatggggcatttttaacaccccaaaaaagaacttgtgatatttgtctttttttatcagtcttttgttaaccaagtgttaatataattttctttttaatgtcaatgcttgtgtttttgttattctgtttttaagaggtgggtgcatatatacaaacgatttttgttaaagcattagacctttaagaaagttggtgcttctcagtatcatctcacatctttggcatatatatcacaatctcatatagtctactctatgccgtgtcataagcaatttgttctctaatatgtatccaaatgaaatgtgcaatgcaaaaccatacaaacaaacaaaagttttacttggaattaagtaggaatttcccaaatttgaatgtgaaaaaattatgagatctaatgattcactattccactaatacaattagctatatagactatgttgtagacaatctatgtacttactatcctctttattagacattattataaacactattgaaaagttggggtttggtagactgaattaaactggcaaatcctttatgagaacagtgtcagtaagtggagtaaatggagctcctcgtagattgtattgaagaaaaaagaaaacctttttcagctttgggttgagagtgctaattacaaacaaggaagacccagttggacacgtgtccatcgtcttctttactcagcttgccttaatggggtatgatgaatttgcttggtggtttcacttattgttctatcttccactttggttttggtggtggggttcagaaattaatggcacttgaaaacccactggaatgattatgtttctagtttatgagtcgagaaatttctatttctaataaaataattgttataaaagtaaaaaaagtgttagagcattaggtagagagctggtaaatcaaaggattaatcacgttttctagttacttctgctttatgattagattagttatagt

SEQ ID NO: 227178 - DNA, 6196 bp, Cannabis indica
attatatataaaataaaaaatgattgaaataggacactatgtgcaaatatactatgtgcttagcttcttgtaaaaataggtttacgtccctaagcctaacccacattcaaaacccagtagccttattctctagcacatggttactgacagtacacactactgaaagcaaaatatcaaacccttccttctactttatcatcatgcatcatatatagctccaatcaatactttattgataaataaagagaaaaaaacttaatattttaaagtggtgaaaatcaaattaagtaattatttaaattttattttgatattataaacaatgattgtaagttacatgtacataattattaaaaaaaaaaatatcactctcttcatttagagaatgtactaatgatttttcccatagtttatttgtttatttattaatacagtataagaaaataatataatacccaacactcacttttattaaatagattaattagattcactctttgtcatagcaggttttgaatgtttccaagtttgttgtacacatgcaatgcaaacaagactattttctcttacaatatttatcaaatataaacagagcattgctattgggtacgagtggtgcttagtacctctagacatgtcgccttgcgattagttagcgatactctctaaaagttattacattaaactatatgcgacccgatagttagaccaacaataatgacacatagaaaagtgttaagcaccactagtgccttttaacatttctcgtataaatatagcaataggtgtatgagtactcgacaagacagtaacttcagattttgtacaaaaccaaaccctttgacctaccaatttgggtgcaaacacgactctttccaacactaaatgttactgagaaaccatcataaataaactaagatagccacttgattggtacacacaatcttacactgctatcttcaaaaaacactcatcattctccaaaaaaagaagcttagcatgttctttaaattacagccaaagaaacagtcggcatcaattagacccataatcataaatatagagatacagatataaactctcaatggatacattcattaaatgaagttttaatttcagttcatcaaaatgtgttggtgtggtaactatcataaaccgtggcaaatatacagacaaggggtaacattatacacacttcagagcaggtcaatgcaaaaattaaacgattgttttcaagaacaacatctgaccatgcacaaatttacctacaaagctggatggtaagcatgatccacgtttgtttccaccctttgtgcaactcttctcatactccactcatgacagaattccaaggcaagtcgcagcgcggttccaagaccaagcaccacgatgacaccttcacaatggtttcaagaaaatgttaaaactttaaacgctatcaagaattaactgaagttttcatttctatgttgcttttaaagtacaccactaagtctaaatgattgtacctataataatgttgacaggcagtgcagagacaccaagagtaattgatattaggacatcaagcattaagccaccaatgagaatggaaaaagccacccagagcgggctaaagcacccctgtttcatagatcattgaaattgaaattgagtgttgaataaaataccatatcttatgaattgaagacaagcttagaagatcaatcagtaacttttcttaccctatcttgattctgtgaccgagaggctggatcaatcctccatacccaataatttgtctgctccaacaaaatataaaggatcaaaatttcacatgccaagacattcattcagattaactgtaaaattttagcagttttcctaggcctttcattagtattagagtcaacatttcacaggccaatgaaatcaatatagtaaaattttagatattttccaaggcttttcatagcactttagtcatacagaacatcagttttcttttcaacttcatcatgtatctgtagtgatttcctctcgaaaaataaataaagctctaaaaatgaaaatgaaaatcagacagtacaagatcaaatatgaaatagctgactttatgcaagcaaaatatcaatcgccatattagcgaatcctatcttcatagacctatcacaagttgcacaaaaagttgcaaaatacatacgattggctgggactctggtggtgaaacatttgtagctacctctctgcataaaatgatttaatctagttactgtgtgcagcttcataactgatataacttagacgacaataaatttggtgaatgatttactggcatatctcgcatttgtttgatcctcttgtgcgaaaccaagtatctatgcatgatctgtgagccttagcaagggcccctcggcagtgacaaccaaggtctatgaggtgttcttctttctcctgctgacataccctgaagaacaatacaacaacaaatacatcttatgctatggatctactttccatagaaattttccatcttaacaaagcaaataaaggaaaacatagggaaagaagaaaggacgcgtatgtaaggtgggttttcaacaatagtcacaatcaataaagaaaagcatcaagatggaaaagcatcaagatgtgatcaactttcaaaaggaaaaaaaaatccaagtagtttatatattcctactttataatctctgcaaaagagtaatcaacttatattattcccttcaagtctttgtggcaacttactatagatcatttactcaactaaaaaacgtctttagccatgctttttataccattttgtcaggattctgaatagaataaaatcttatattaagaacgtcttagttacagcaccttacaaatttttacatcaatattccaataaacactaagccaaagaccaacatttggacttacattccaaagtaattggaattggaaaactacttatgggagcattttaagtactaataatcatctgagctcaatcagagcatggaaagacaccctggagcatcatacttgtaattgctacacattaaaccatatgtacaaggttattgtcctctttgtcatcttggaaccatagacaaagaaaaagttctagaactttttataatccattgctttgttcatatatacacctttttcaaatctactgaagcaatatcctatacggggttcagaaagtaactttatggaatcagcaaaaacaaggatctatatagaagcaattaaccaaattaaatagacaaacaagagacccacatcaagaatgctaagaacataaatattttatctttaattagtaaagtttttattgggtttacctgcattcttcatcataactatcactccttgataagaacccctttttaggtgagggcacatccttggataagtttgctatggactctccatcatcagagataacaatggtgacctgtccttgattgaactctatcccttgctgggctaaaacagtcgaattgctctgtttttctagatcatcaggttgatcactgctgttacccatctcaaactcacctgattcaccaattacaaaaaatttaataataaactctttaaatttaaaaccaaaaaaattgaagaaaacttttggttatagaaagacacaaaattgcaacttcaagaaaaacccgtttgacacaaacgtgaatcagtatcaatcactattccaattaccctaaaaagaacaaatcacatggtattataaattttacaaatacccatgtaaatttaaaccaatatacattcatttatacacacaattgaaaaaaacgtaccaaaggattcagcttcacagtgtagctactcagctgaaacagaaaaaaagcttgttgtttaaccccatgaaaagatgcttacttatggaaatcgagttaaaaacttattttccaaaatgagaataatttttcttggtgggtgagtttgatacaatttcagagtctatacaattgatgattgaaattggatcgataatataaatctatctgaaatgggcaaaagaatttattacatttataggtgttacctaatatttttttggagttcagctttatgggattgagtgaagcaatggtctattcatatttcagatatttctatgtttataataatggtaattaatgaataatatgtaaataaatcaagtaaataacaatccatctccacacccaagaactgaacttccaaccaaccatcatatctatcaatccacaattttctactatttagttgcctattatgtaacttcaattagattttttgtagctttgtgttgactgtttagggaattaaattatttgaatattggaaagataatagaaaatcagtttagcaaagataaaatagcattaaaaaaattaggaaaaacgacaaaaataataattaaatgagaatttttttttagtaaagattttattgcttgttttgatagaatgcaaactcccaaaaataaataaataagtaaaatttgaacatccatcattttttcattaagttttttttttttttggtataagtggagtttttattcgaaaacaaaacagaaaaccagtagccacaagggggggctacatcccttaaaagacccgaagtcttcaccctcgactctctagcccaacgagctaaagaatcggccaaaccattctccaaccggggaatgaaagaaacaacaacatcctcaaaggatttacacagttcaagacacaaatagaacaaaggataggtacctcaaccataaggaagagaaccagactcaaaagccaaaaccgccaccttagaatccgattctatcttgaccttgcgcactcgacgttcctttgcctccttcaaagctagctgaattcccagcaattccccttccaacacgcacgacaccatggagaagtcaacagcaatctatggatttgagagaatctcatcatacaagcacactaccgccactcctgcatcaacaccagacatagaggcatcgactttgcagcaccagtaatcgtcccacatggagtttggtgtaatgtccttcaaagtaacccgagtctcttggcgatcttcccaataatggcaagagaaaactcctgaaatctcgccatacaatcccgaaagacacgctccacatcacagccacattcttaaatatcatgtcattttgccatttccaaagagtgtcacacacgcaggccgtaaacaggataagtgcctcatccttaaggctcgtccaccatccaccaaaatccaattgactattccagccaagccgatcaatttgaatcccctaagaacttctgaaccatataccccgagtcactgaacaatgacaaaacaaatggagagtagattctgcttccagattgcaaaataaacacttcctatgctcaacctcccttagacctaatctggctgatgtggaaagactgtcagaaagaattttccaccctagaaactttaagcgaggatgcaggcgcgtcttccaccacttttcccaaagcttattaggcgtattgaaacggtgttgttggctagcctagtaagcacttttgacagaaaatttgtccgactttgcagcattccaaaatacaatgtccgtgccccccattaaaggcttgatgttgagaatatcattagcaattcctccattgaaacactcacggacaagttgctcattccacattctagtgccctccacaaacagatccttgacttgccaaggggctgattcttcttgatttcctcctccttcctaccagggatccaaggtctgtcccaaatttcacaattcccatccgcaatcataatgcccgcttcctccacacaaatatttcgcaccttcaaaagacttttccagcatctcgaatcaatcccttttttttccacagtccaaatcaaacagatatgacaatacttatctttaaacattttaacccagtcctttccttcatcttttagcatcatccaaaagagttttacaataagagcccgatttatatctgcaaagcgcctgaaacccaggcctccgcacctcttaggttggcaaagatcatgccagcttttaagcgcacaatactgcttcttttcaacattcccattccaccaaaatcttgcaaccaagtgatccaactcatcacaaagagccttagggattaaagcagtagacatgaaataattt

SEQ ID NO: 227179 - DNA, 9186 bp, Cannabis indica
tttaaagtgtaaataaaatttccgaatatataattgtttgaacctgaatttttccatcagatgaggctgcatataacatttccccaagtgtatctgaggtcaaagaagtaaatttggtatgtcctcctccacaactcattttaatggaagcaattcttgtatatctctctttaatccaaacatcaatgtttccacatttagaggctgtaaatataaaatcattgtttatggatattccttggatatcaaatccacttggaaatgatcctataattgcctttgatgacaacaagaatatctgagaaaaaagaaaaattgaaacattatcataaactcaattaaataattatatgagtaatttgtggtataaatacttaaatttaatttaaagttacagataaatatctaaatttaactctcagttacagataaatatctaagttttactcttggttacagatttatatctaagtttaatttttgacattaataatacttaagttatattttttgaattttcgtaagtaattgatcattaagtgctaaatcaatagccacgtgaccattcacatctaatttaaatttttaatttttttaaattaaaaattaattttaatatactgaataaaaatgacacgtgataataacttaacacttcacggccaagtacctacgaaagttgcagactgtacaaaattaaacttaggtatttatctgcaatcaaaaattaaacttaaatatttaagccgcaaattactcttaataacatctcggttaattgcaaaataatctctattcaatcaaatatttagagcatcggaagccattttataaagaattatcgaaactaagccaaaatatttacggccattattaaattatacttgttgagaattatggggtttcatctcaaaatcaattggcaataagtggagaagtctatattcttatatatggctcacttctctaccatttattccacgtgggataatgtctacaataatactttcttttttattctgaagaaattaatttacagagattttagttacctttcctgcagttccatcaactaatgaaccaccagcaaagagaacaccatcatgaatttgaagggaatatatgttttgtttccctaacaattttcttgtaccagaatagaatgtgtttgatgtatatgaacataaatccacctcctaatttccataaccaaaaacataaataaaattttacatttcaattggtaatgtaataagattgtgttaacataatttttgttaggttaattttcatttttatggttttaaaagtataaatttgtaaaagtatgattttgtttctcaaaaaggttattttatggaaaatttagaaaaaaattaaaaaatatattaaaaaaaacagcataaagtttacttacttataccataagagtacctaatcacccttacatgatttatttatatacaaaattatttatatacaaaatattttttaaaaaaaaaatcatatttttgtaaaaaaaaatacaaaaattcataaaatttataaattcatatttttatgcaaaattatttacctgaatgttgtaaccagaacaaccacaatatactttattccctatcattgcaaggcatttcacatacttgttaaagtttatatgctttggtgtcccagaccaatcataaacctgttaccacataactttgaatgttataaaaaagtacacaccttaaaagggtgtttcaatagactttcttctttgtttcggtattcacgaaggttttttagttgaatttttttcatgatcatgtatgttgtagttatttaagaccacctgataactttcaaacaactacttaccataagaaaaaacagtcacgagtacaacaaaatttacatgtagtcctaactaactataacatacacgatcatgaagaaatattaaacttaaaaattctcctaaatgtcgaactagataggagtctactggaatactcaggtgtactatagactctccctaaatgttttttcaaactctttttgagtaaattaaaattaacttgccttgactccactcccttgggaaatatagcacactagtttagtgttggctgttaagttatgtactgcttctttcatatcatgaacttgtatgcaatggatttcttctggctttactgtccatacctattgaacatagcccaaaatattttggttacattattgttcatgtttgaaacaacaatacaaaactagagaagaatagcaagcataatagtagggttggtttacccgaatcgttttgtctaaagaaccgctgtatagtttatcaccggaagatgaagcatagaggcatgtcaccgcctttgtgtgctcgcgaacctcttgaattagcctcattaccctcttcccaacatcccacacctagaaatgaaaacattttcattttcatttcattcatttgtttcgttgctatttaaagtattagaatactatttcaatcgaaatttattccattccattcctattcttacctttatagttccatcagaatgactgcttaaaactcggccttttagatgaatcaaggacaagacttctccatttgaacttgagtctaattcaaccagttcagtacaactccacaactctgtctaaaacataaaacattagaagaagttagcaaattatgtacttttcactttaatctgttttctctatgataatacttactgcatcaacagatgggagtttcatcaatgctttcattatatcatttaccaccatagaattcctcttaagctttctcaatgtcttgtagatggatttagcatacactcccaatgctctagttgcatctaaaaaacccgaaacatgaagttaaaacctctatcgaaatgtagacaagtttaaaaagtactaaacttacctggatcactaatgaaggttttcaaagctagtgtagccaaaatcttctcttccatattcttagatgattgaagaacatttatgaattcgtcgagcaaagcctttcgagcaatggttttcacaccggtttcagggattgaagagagcatgtatgtgagccatgtgacaatcacaagacatgactttgccatttctaaggagctactctttaaacattcttctaatgctttaaagattgaacctttctcatggttacaaagtacaaaagcaacccttttctcccaacaacttatagctttctcttcttcctatataaaagatttttaagattagtactaacacataactaaaaagaattaatagttaagtaaatgcataccattgtttccatgaaatctctctcattgtttttcatatgttctaatttcatcaaagcattacaaggttgatcaaatccagcaatttggagcaaccaagcttcaatatatgaatccccagatgatgtaattcgcccgataagagatgtcaaggcgtctatcgccatactttgagaattagagaactctttccttcttagtgcttcaatcaatacttctatagcttcttccctataaatgctcatctttcttggttcaacctagagaagttacaatgggaacaacttgtgattagtaaatctcaaaagcttaattgagccatatatattaacataggctacttcacttatcaccaaattggttttaaaatggaatcctataattctcaacatgatatcagagctataatataatacgggatactaaacagacccttaaggagaaacacacaaaccagaagatcaagctgaagtagaagactagctatggcaggttgattctccataggagccatttgaaggtaaacaagaaatgtatgcatggaactaaatgctcctgtatctttaattgtctgcaatacttgatttgataatgttctcctaaaaaaaacatggattagaacataagtaaacatgaacaaccaacttgtcaaacctcaaaattgtagtgttaaaatagtatgtacctattcaatttaacaagctcagagagaaatccaacacatatgcctttaacagaatcattcccaacatgaaataattcaagaacatgacacaattcaattctacttgctataaaactcctgcaactcttttcagcttgcatacaacacaagagtatcgatacaatcgatcttcttccttctaccttactcaaatatttaactaaggaaggaatcccatttgcagatataacactcaatgcattgatggacttgttgttttcatctcctccaaccaaaatctgttcaagaattgctatagcagcaactttggtgtccataatgaattgaagatcatcgtctaactcctcaattttgttgatgattatttgaacaatggaaggtacaagttcatgaattgaaagttgagatgaagttggcctaagttggtatatcaaaactgcagcctcagctaatccattctttaataaagaagctaagcaatcaagatcagaatcaacactagtaagaatttctccaacattttcattggaagatatcaactcagaaagaatgtagattgaaattctcaacacttctctgttaagagaagcagagagtatttcaacaaaaccgtttacaatagttggttcggataaacaagaatgaacttcaagatcaccctttgattctttccacaatcttgatattgctaacactgcagattcacactcttgtaagttttcactagtgcatagacacataacataaggttttaaaccatttataatcttttcaacttcggcttgagatatcacacttgttggcgatgctgcagcagccgtcgctgctgcagctcgtgtaaatcttctgtttctttggttaacaagctcatcaaatgctcctccaccgcgtggagtagaggctaatgaggtatctctcggggaaagaaattcgcgagggagtccttctttccaagaatttataagtctttttaagacatagttggttttaggcaatgtagttgcagacaaaggttgtcttgtaatgggacatgttgtgtttcctcttttaagccattcttgaattgcttttctctcatatgtttgacctgtttcgagtgtaaccgggtcacaaaatatttgacctgtgatgggacacacaaaatcctttggtggtcttggtgtagttggagttgatttctctgataatggaagtgaattgcagctttggcttgcctcattttcatcacttagtgagctgtggaattcaaataatgaagaatataacaaagaatatcaacttatatgtggtcactatttcaaggttaagtgcaaacaaaattcatataactctaaagaaaaagacaaagaaataaccttttttccccatttggtaagaaaagattattaaatcaaatgagatttctttaggcattctaagctaatacatggagagtgttttgtaaaattagtcattatgaaaccataaattatggtcgttttgcaaccataaatttacaactgtgtaaattcaatagggttatttattttacaaattttatactttcatgttgcttatttggcaaatttcacacacattggatcaaaatactaaaattacaacctaacataactcaaaagaaaaggcaagaaagtaaggggtatgtttgattgggacgaataaatgagaatggaaatagggatcgaatggaattatataaaatttaatatgtataaaaaaaatcgataaaaaattatggaatcttttcttattattggaatggtattttcttttatttcaaaatggaatgactattccaccaaaatccaactaaacaaagaaataacatgaaaattaattcctttgaattctatttcatttcctccaaccaaatgtaaactaacttttttctttctttctttttggttggaaaagtctattaaatcaagagagatttcttttggtattctaagtcaatacatggatcgcaacatgaaaaagagatacctcagaaggcagaatgtacagagacattatttcaaaaccaaagctaagaactatgaattagcttgaaaaaacaaaatcaaatgcaaagaaaattacctattcttgaacaattgattgttaagattttcgaaacttcgattttgactacacttttggtttgaaccttgtgaaagaacctcctgaattttgcaaaagagattcatttacaacccaatataacatttcaattctcaataataaaagtaagttagaatcattaaaactagagtaagacattttgttcataccattacttcaccatcagattctgagctaatgctataatcattacttataggtggagatatggctatgttcgaatcgatgaaacggcttgatttgaggcgcaacagagaagggaattcactcttcacatctggttttggagaagttttaggaggagaaaacactgttggagaatataatggagttttcatcttagatggttttgttttttgttcattttctttgttgttgctagtagaagcaaattttcgggttttgtcattagaatcaacattaacattaacaatttcatcttgctcataatcataatcatcttcattttcttcaggcaattcttcctgatataatcaccaacaacaacaatcaaaaatctataatgttactgcaaattatgacagcaataaagataatagaacagttttttgagatatacctttggaacccatctaagagactcctccaaattctgtgagacttttgatgtttcattcattatcattggacccctttccaattccacaaatgttagaaacattatattacatgttataatcacacagagatcattttaccaaaattatcagaaagaaagtcattttcactacaacattacgaggagtattaattacaactttcttaaatttcgtcaacagaaaaatatatgtaagagtaccatatcaaaatataaggaactctgttatcggtactgaaaactatttgggagatgttgtatatgaaaatactccaacatatgtttttggaagcgaagattcagaaagaagttgaaataggagattgatcatagcaataaaagactaaccttgttgagtttcttatagcattttttgatttaaggaatggagcaaaaccagcacttctaggcaagattggaccaaatttaacaaaatcaggaatggaatgactgagttcatgcaaaggagtcattggtggttcagcaataggaaacattggaatcattttcttgttatcatcatcatcataatcatcatcatcatctttaaacttcatacaatccttaaaatacttagcataaagtttagtactttcatccaatgactcaccgaaaacctcttccaatttcttcaatttctcaacttgatcaggcctcaaagaaccaatcaaagactcattaaacaactcttccaaatcaatagtgaaagacacattagaataatcattagggataacttccatgacaagtaatctctgcctctcctcacaataccaaccgaaaattgaccccatatgaggaagaaacaactccttccaaagctcgggagcaaaatcaattcgcgaaaagaatggatcaactataaacatctcaagaacatgaagaacacaattagtaacattgttgttactccttaatttccacaagtaagctaaatttagatgagaccaagcagagaggtaaaagttaggaacaccagcagttttttgatccgaattcaacatagcacacacgtgtaacatcttctcagcatagtccaaacgtgcaagctttgtttccatgttggatgtagctatggcttcttctaaggcctcaataccccaatccaaattcgccaaaacagcttgatcagagtacctaataacaacctcctctttgttttcgtccccgaaagagctaacatcttcagctgctaatctctctaaacaatcttccttgtgttgaattctctcttgtttgttgattaatctatctctaatgaaactatcaactgttgtactaattaatctaactatctcctttttgtccattgagtaatttttcttgtagtttccaaccatctttaacaaactatattcaaacaaagtttaacatgttatagtatcaacataacataacataacacaacacaacataacatagaatttaagagaagtacttactttattgaagagaaaaaaggcttaacatattggttttggtttcaaaggcagagagttcaaaaatggcttttttttttttatctaaagagagagagccggctatgatggatagtagtagctgtgccggccatttgattaattagctaatcattgtttatttgggcctaattaatttagtattaatattattaactatattattatattgatttgttttgttttgaatagtcttttagcttaatgacaagatcatatttggtttgatcacaacacaattgtaataaataactccaaacatttttgagtcatttcttgttgttttaatgaaacaatgaccattttttttttttggtattaatttctaagggagttggtaattttagtttactattaaaatttatttttggtataatttttccttctgcttttagtcttaatctctctcttaactatgtgtagaaggtgagtcatgagtgagatttcttattagttgatttagtttactgagttgcattattgggttgtttggtattctaaagaaagtggctatatatatatataaaaatattgctggtgattaatttaaatagttatattaatttattatgttattatatattaatgtagatcttataggagactgctagttgtataaatatataggttttaactactatttataggttcttttcttctgttttttcgttcaacaactcttattactactaaaaacaagttacataagtgataattttttagtcacaatataaattttttgtgactaaatgtttttttagtcacaacaaaaaattatatgactaaaacatgatatttacatacaagttattaatttagttttgatcacaataaatactgtgattaaaaatatatttagtcacattagtcacaacaaattattatatttgtgattaatacatttaattacaatttttttttgtgatttattactatatttttttatctacaacattagaatgataatttataatt

SEQ ID NO: 227180 - DNA, 4291 bp, Cannabis indica
agtgtttatccactgcataagaagaagatataagaaaagcaggcaggaaccaatgaataacaaaagacagagaaatgatatgaagaaaccttcaaatagatggcagcataaatgagcgcatccaatcgttcctcactttgagaattttcaagtaaaagatcacgtacaatttcaagcttcagcaaagaaagttatattagtgtctgaaactaaataagctactctaaagatcaccataaataaacctaagaagaggcattaaattcagcagttgtgaccaaaagattactaaattccctaatttcagaattttcatatactgaattcagtccattaaaccttagaggatgtgcactgtgcacatatgtttgtagttgtatgaatgagtggcggaatttatgtacacacatgtttttgaaaaacagtatgtaaggcctttcagcttgtactgcccacactcttagattagcaagactagctaaaataaacacttgtcactgtcgttaggacaacaagcctcatagataagcataaaactttatcagaaagagcctgtaatacctttctccaccaatttcttgcatttcgatcaccttcaacaaattttaaagccagtccttcaagacctgaggtgtcccaccttctttctgattcacggtcccgatgctcattcgagcgcatgaaggagatatcctttccttgccattgcccaacaaaaggacttgtctccacctctgaaagagaagcagaagcaccatcagcagttgtagacccattttcaattacagcctctccttcctccagcgccaataaattcatagcctctcctgttgcattccaatggcaaacaattccaaaactaccctgttttggaagcttcacaacccgattatctccaccttcccatttcttcttatcattattcacaataacaaacttaaactcaatgggctcaccccctttgaattccaaattgcacacccaaccactctctgtccacatcagaggcacctccttcttccaagagcccaattcttttgctgaccccaaaataacaacatgctctccaaattcaacttggtgatccaaccgtatatttagcagcactttatcacgccccagttttgatttcttcttagttttctcctctctatttaaataaaaatggaaatcattaactttttcaaaaatacagtaataataaagttatgccaccattttcattagctccaaataactaaaaatacacgatgctcagtggagaccgggtttctctaatacaaccaaatagatcaaatgtactttacgaaacaacacagacaatatgaaagcccatagatcacaatttccctaaaaaatacttgaatcaagatatgcaaaagccatttattcaaattcaatctccaattgtacataaacatgctaagtttaatttcttacacaaacatacacaccactaagagctatgttcggtaagagaaggaaaacggataacttacgcagtttcagtggaagaaacggcagcaacacgaacgacagggggaaaatggcggagatggagtggactagaaactctggttcgggtagagagagcaggaagaagacgagttgtatgagaagaacgattatcagcgaatctgaagtggttctggtgaagaattgagcttcgaaacaaacgcagagaatccattacctacttcagatcaatgcagaggaagagagagagaaattctgagtgagaattccaagaggattggagtgttgttgaagaagaagaagaagttagaagtccaacaatctgccacgtggattcggatttcgaggcaacgaatcaatcaatctactcatcactctctgctactgcgagtgtgagacgttttctttttttaatatatataactaatggaaaactaatatctattcacataaagaaagatcttgtaagtgagatattttcttccaaacagaaatttctgaaaataaacgtgcctcggttgggtataataatatttcataaaaattcttaaaaaaaaatgaggagcttacttgaataatggtatgattggacaatagatgcactccaaatgtaaggagcaaatttcgttcttacaaagaacgataatttctggccgtcaaaataaaaaatatgtcaccacatactccaaagagaaaagacaaacaggaaaattatagttgattttttttctaacaaaaatgatagattgaaaaattagacctcactgtcattacaaaggatagttttaggtatcgagaataactctacgaaacctgtaattttttgggacaaggcctatttagccaaattatggacagcgaaattacaaactctaaaaataaaagaaaaattacaagataaaaaacacttagagagttgattatagacagagacataattatcaagattccaaatatagtgaagccctttcagcgctttgataactgtttctgagtcactctccaccaagacatagttataatttctaatgcgagccgaatctaatgcaagatgacacgccgccgcctcaccaatcagcgggtctctgaagttgagcctggaaataacggcccaaaccaccgtcctggtgtgatctctcgccagggccgcaatgcacatggagtctccaccaaccttgacatcacagttgattttgatcagtcatctggcggaggggtccaaaccggagaagtcgcaggaaccgtcggagggaataagcaggaggcataatctatatagcagtgagagatagagtcaatggcagtcacaatattactctgaagagagttatgtaccttgttattacgggtagtccagattgtgtccactacggtagaagcataaaggaacagcttgtctaagtccaccccaaggaaaggatctccagagatggtaagcaaagttacaaaagaggaacaagtgttccattgactccgcagcctccccacacaaggggcaagtgtcgtcatcgattgggatcctcctagccaggaagccgcaggtcggtaaagcatcagagagaataccccaccaaaggaatttatgcctttcgagaattttggagttctaaagcttattccataaggtcggcgccaccacacaggcaggggctctctcctccgcctgaagcaaataagcagacttagtggagaatttttcgctactttccttagtccaaatccacctgtctctcccctggccacaaggcctccccacttttaggatattcgagatcgtgtcagagtcaaacaaggacttgagaatggagatattccactccccatgattcgtgagcagatccgccaccttaaccaccctctcatggcacgaagagatgggtttcgggtaaaaatcctttccatgaacgatccacagatcattccatacgttcgtatcttcaccatccgagacaaacttgcaagcgccctttctgatgataggaatagtcttgaccacatttttccagaaccaagagtctgaatttttataggtagcttccaaaaaaaggttttcttttcaggtatttagctctcaacaccctggagcaaagagtttgatccctcagtaaggagggcccatccccacttagccaggagagcctgattcaactccatagttttacgaaaaccaaggcctcctctagatttgggaagacaaatgtggtcccaggccttcaaatacaagccccgattttcttgctcacagccccaccaaaagtctctaattatcccatcaattctcgaagcaagtttcttagagagcttggtagtttgcatagtgtacaccagaagagccagacccacagatttaataagcatggcatgaccagctttagacaagaattttaatttccaaccatgcaacttcgacacaaggttgtcaataatgaaattgaaatccacatccttgcgattagatcgaaagagcgggagccccaagtaactaatattcgtggtagccaggttcaaccctagttcttgcatgatacccttttcatcccttcacttgtattattgctaaaaaagacagaggttttgagcttatttacacatttccccgaccaactacaaaatttatcaaggcagctccaaaagcccttagcctcctcaatagtcgctctgcccaccagaataaggttgtaaagaccgcttagtttgatttagaaattagcagttagttatggttaattatgaaaattatttatagatatttaaataattatttatgctgttattattgaattctgaaatgcattttatgtcatatagtgaattt

SEQ ID NO: 227181 - DNA, 5017 bp, Cannabis indica
ttttgcatttttataaaaattcacatacaatttaaatcataaccaaataaaaactaataaaccgtaaattaaaaaaataataaataaaataatttctttattaggacgtagttaagtaaaaaaaaaaaagaagaaaaacaaagtgggacgtgccactaatatgtagcttggcgtacaagctaagttggagtcagtaaataaacgacaaatattttagcagaaacgacaatcacattagctcttttcttctcttctctctcatttcatctctgaattgagtcctgaacctgagacctgagatgcactccaagcaattccttttctgcagacagtctcttatcatcttagcaatagccaatccagttatacgactacgacgttcgttttacttcacttcacaaccccataaccgaccccgaccagtactcttctccgcctctcttctcatccacccacattccatggttcatcacctcataatccggcgaacccgaatccatacattccgatcacacaatgcatatcactgttacagctctgtgcttcttccaacctcaaattgatgcaaatccacgccttttcagtcagacatggtgttctgttttccgacccggatgtggggaaacacctggtattcgccattgtatctgtctcggctccaatgtcgtatgctcataacgttttttcgcgaattgatagccctaacatatttacgtggaacaccatgattagagggtatgctgagagtgagaatcctaggtcagcgattgaactttatcgtcatatgcgtgttttttcttgtgttaaacctgatactcacagttacccctttcttctgaaggctgcagcgaagttagcggttgtttgggaaggtgaaatgattcattctttagttttgagaaatgggtttgagtctttgatctttgttcggaacggtttgcttcatatgtatggttgttatgggtgtgttgagagtgtacacaaagtgtttgtattaatgtctcaaagagatcttgttgcgtggaatactgtaattaatgggtttgctttgaatggaagacttaatgaggctcttgttcttttcagggacatgggttttgagggtgtagagccagatggttttacaatggtccgtttgttatctgtttgtggtgagcttggggctttggctttgggtaggagggctcatgtgtatatgttgaaagttggcttattgagttcgaacttgcactctaataattcacttctggacttttatgcaaagtgtgggagcattagagatgcccaaaaaatgtttactgaaatgaaggaaagaagtgtggtttcttggacttctttaattgtaggtttagctattcatgggtttggcaaagatgctcttgagctttttagaaaattagaaagggagggattggttcctactgagataacttttgtgggagtattgtatgcctgcagccactgtggaatggttaaagaagggttcacttactttaaaaaaatgcaagagaagtatgggattgtgcccagaatagaacattatggttgcatgattgatttgttgggcagagctggtcttgttaaggaagcatatgagtacatactaaacatgccattaaagcccaatgctgtcatttggaggaccttactaggagcatgtacaatacaaggaaatttggctcttggagagttagcaagaagtcatctccaaaaactagagcctggacatagtggggattatgttcttctctctaatctttatgcttccgagaatcgttggtcagatgtccaggaggtgagaaaggcaatgcttagccagggtgtgatgaagacaccaggttacagtcttgttgagttgagaaatcgtgtttatgagtttgttatgggtgatagatctcatccgtgtagtgaggagacatatgctaagttagcagagattacaagtttgttgaggttggaaggttatgtgcctcatacagaaaatgtgcttgcagacatagaagaggaggaaaaagagaatgctttgtcctatcacagtgagaaaattgcagttgcttttatgcttgttaatactggtccagggattccaattcggattttgaagaatttgagaatctgtgttgattgtcatgttgcttttaagctcatatccaagatttatgatagggagattgttgtgagggattgtactcgttttcaccattttggaaatgggtcttgttcttgtagtgattattggtagcatgtttggctctctaatagaaaacgaaaggtacaataattgagtaccaagacattaacctctggccttgtcacacttaaaaaaacattctaaaagttagaacaggctgttgaaaatgtggacaacaatgagaaggacaaggaattttgattcatatatagaaaagtggtggataggtgctcattacaattccaattcaaatttcatggttggttgttttggtcacacctccttgttggatatagaagtgtgcaatattaagcttccaaggactaaactcacccctattttcagcctcttgatttaatattagtgctttacaactttttctactatctggagactctagatggcagaagtaaacccatttcgattgatggcgatccactggtattttcgattgatggtagaattcggtcttttgtttgttttatctggctttgtttacttgtttggactgtgagaggttgaggttggtttgaatttggttttgattgaattgtgcgaaaagatgtctttagttatttatgggagaaaaatgattgttcttatttgaaaaaaaataataatttaaagttcaagtcaaaataaaattaaacttcacagttctacactatactcagtttaaacttttggtattggtgttgtttatagttggtttttatgactctttcaagtgcttaatatttttcaaatttaaacttcaatttgtttttcttcaaaactttttgatgaaatgtctctttttttaaactttggcctttttatttagttttgcagaatttattactagaaatctattttgacctaaagtgtttttgttgagtaaagaaataagccaaattaattcagactaagaaagatttccatgaatgttgcagggcctctaagccaaccaaagtggggacatttgaaagatctgcataaggttataaaacaagttgaaggagcattgctgggaattggcgcagcgattagagctcttggtaaacttagaggtaaccctttctaattctcttgctttctgtcaatctcaagtttgaaccaagagtgttcaaattttgctttaacttttgatagatttattccatggctatgattccaagcttcacaatctttgagagatcaagcatctatgatagatcaatattatggattatgaataaataaaaaggagtcgtaaatttatctatatcataacatatattaaaaacttttatagtctttccttattatgcttttaatttacttatcaatttggattttatatgtaagtaaatatatcttttgtttatcatatgcatacggagcacagctcgtgaagtgaaacgcttggattcctctgtttatgcacaatttggagaagtattaaatatgaattgtcaacaactcatgtgtacaaggcatatgattggatggctaacatgaaggggaagtctatgggcaataatatcagattcactcttgcaaacttcagttcaaatcgttggctttccataagattggaaacattaggaggtatcctgatctggttgacagcaaactttgttgttctgcagattgggagagcagaaaatcaagtagaatatgcataaataatgggtctacttctcagttacagtctaaatatcaccaatcttctcagtggcgcatgaaggcgagcaagtagagctgaaaatagtttaaatactgtggagcatgttagcgtgttggcacagcatttaaatcttgccagagaaactgttgccaaacgagaaagtgcattctctagaatggtgcaaagtaaaggacctgccaatgctgaccacttacgtagctttgaattaggaggaaacagaacatgacccgaatttagcacaaacagtcgatcaaccagaggtgactaacctcgccccaatggagtgctgctgctcagtactcctgtttctctttctgcttcacaaattgatgttcaacaatctgatattgaagatgagagcaatatcctcttgaaaacaaaggatgcagtcgtaacactggagggatttctggaggggaagtatgaccgagatagagatggaacactacacagttggaggtaccaagagataatgggtggacaactcttcacagaatagttggaggtacatatccaattacaatgcaaccacaatctatgaaacaatacacaacattcaatacaacaaaacattaatagaaaagcccacaatactttctagaatgccttcctacaattcattacactatcaaatgaattctctcttggtttttgttgtattctcataattttttttttctctttgatttcattacaaaatttgagtccatttaattgagatcaaataattcaaaaaaaaaaaaaaaaaaaaaattagtaaaacattattttccctttttagactttcttaatgaacttgtagattttatataaaaatatcatattaggagaataattgtgcttttgatccaactctttctcattgtagaaaatagtgattcgaattgtgtgttgatttcatagaataatacatatttatatacaaacttaagagactaaatatctactaaatatctaattcttttacagctaatatacatctaatatctaacactccccctcaagctggagcatagatgttaatcatgcccagcttgttacaaagataatcaacccgcaccccattcaaagcctttgtaataatatctcctagttgttctccggtcttcacatatcctgtggagatcagaccttgttgaattttctcacgaacaaaa

SEQ ID NO: 227182 - DNA, 3641 bp, Cannabis indica
tatccaataataattttaggagaatgcccttctaatggcctgatcccaataattctctccgtacaaatgaaattctctccgtacaaattttgaattcggtgtgatttcgtgtgctacgctggccatgtacggtgggccgttggccttgggtagtggcctgctgtccactgacaccgttcgtggtgtcatagggtactgtatccctttttcccaggttagggaaaacaaatcgtgcaaccctgagaccattgatcatagcctctcttattctctgaaacctaacccttcccacccagctttggaaccccaagcctgttatcttcctgttttgagtaaaaacctttttctgtggattctgattatggcctcttcggataatactctggtgaatgagatgattgctgaaacagagaactgttgtctggaggatttctctattcaggtggtgccggacctggaatctgctcaggatactatcgccaagacggtagtgggacgactattttccaagaaaactatctctcatggcactctgcgcaagaccctgactggtatgtggaaacttcggcctggatggcgttttcaagctccggagtctaaaacctttgtttttcgcctgaacagcccccgggaagttaagtatgtcttggaaaacggcccttggaatccttgtgggggatttctcctagttaccaacctccccgaggacggaagatgggagtcggccgatcttacgaagcttgatatttgggttaaagctaagggagtcccattaccttacttaactgatgattgccttgttcagatggctaaacggttgggtcctcttcttaacgcgaacaaggttaaaagaaacggtatagtggtcaacgattatcttcgtttccaagttagacttgatctcaatcggcccttactggctggtgtctctctccccgagcttggccaaaagaaagtctggagctacttcaaatatgaacgtcttccttcattctgctataaatgtggtgttataggacatcttgaggatgagtgctctggtttaaagaggatggtttctacacataatggacgctcgattccactgtttggcccttggttgaaagatggatctcggttggaaaatggatttgccttattagaggtggaagaaatccaagatattcagagattggaaaaggaagacaccttggatggtcagtcagccctccctggggctgtcccagccactctccctgttgaggcggcgaatcacctccctgagaaaagttctggagttcacggaaaccctggaggggatgacgtggatgcaatcccagctggacgaaccagagtggaacaggtgggtatggagggagttgtctctcagaaaggagataatgaattcaacgtggcatataatgattatgtggatatgtcccatttcccatctaaacatgtgatccatgtggcaaacctattcaaggagaaattaggcccaatcaagtttggggcgacccgtgaggaattgggccagagtgggtctaagtcgggccttcctaataagcttaagaaacctaggctaattgggccaagaggaatcccaaagccctctctctttggaagaaaacccaccctgttgggccagtctacaggagctaaaagaaaaaagatctcacatgtcataactaaaaacgacccttttgttgatgaaagtgatggtctgagttgtctggtgggagtggataaatctggaatcaaggatgtgtttgcagaagaaagtggtgttaatcatcttgaaccttctaatagcagcgatgggcacctggatcccaacaagaaatctcgtcttctcattaacagtctgcgatctaatgaaggttcctttgggtttattacggagcaaggcgaaggagctaatggtaaggccccaagtgatgaagccacgatggttaatccatccccagggcgtaagagcgggtcgatacaggttagtgataacagtgtgtctattgcttctgatgccagagtttgtgctgaatcctcgaatatgatggtcgacggagacaatgtgaatcgggattttttcaaggccgaggaggcgggccgaatcatgccccccaaggacccatgaaggtgctttcgtggaattgccgcggacttggaagtctagcggcaaaaaaaagctctcagagccttggttttgagagaagacccggatgtgttatttctaatggaaacgaaattaaataatagacgtatgaattctatttggcgtagcttgggatttggtggtgcatcttgtgttgaagcatcgggcagtgcgggaggtttgtgtctttgttggaaggcgggtgtcgatgttcttataagatcggctgagtcaggggtgatctctggggttttttccaatgtcctcaatggacctgattggacaggtctcttcatctatggtcctccggttcgttcggacagggcggtgttttgggaagctagaattatggaaatcctgtcgttaaaccacccgtgggttctggttggtgatttgaatatcatctctggccaagttgataagtttgggggtcgtgcggtcgaagcggaggagggccaccatctctctgaattgatgaatgttacgggtggagtagaccttgggtgtacggggaacttcttcacgtggtctaatggtcgaagacttccatctctggtcaaggagcggctggaccgagctatttgtgatcccgagtggatgatttagtatcctaaggctggagttaaatctctggctatcaaagagtcggatcacgccctgttcttttggatttgctctttgatcgtgagagattcaagaccccgtttcggtatctggatgcttggtctagagatgaaagttgcaaagtcataatcaaggaggcctgggatattgtggttcatgggatcaagagtttccaacttgtctctaaactggaaaatactcgaaaatgcttatctaaatggaatagaacgcattttggtatgtgtaaggagaaactaaaagctcttaaccgtctcttgatcgaagttcaacagcgtttaccctcggatgctaatcttaaacttgaagcggatattctcttggagatggaagaagttgagacccgacaatctgagatttggaaacagaagtctcgagaactttggtataaagatggtgataggaattctcgttttttccacggtgcgacggtcattagaagaaagcgaaacttcattgatgcggtctccccggatgggctgggatggatctccggtagaaacgcagtggggaattactttcgtgatatgtttatctcggtgctatcaagctcttctccccctcctccccaactacaatccatgatccagcctatgattttgaatgaaatcaacttggatcttattcgaattccctcggccactgagattagggaggttgtgtgggcgatgcatccgctaaaagctccgggcccagatggaatgccgggaaagttttataaggatcattgggagattgttggtcaggatgtcactgctgcagtttgtaaattctttgaagctggcgaattggataggaaaattaaccagacttttatggtgctaatccctaagaagcttggtgcaaattgctttgatgattttaggcc

SEQ ID NO: 227183 - DNA, 3480 bp, Cannabis indica
caaaattatgaaaactactaactaacataaaatgcatctcagaaatcaataataacagtataaataattatttaaatagcgataaataatttcataattaaacatgattaactgctaatttccaaattaaactaagcggtctttacagcagcggtggctgattctcagccccgcattcaaccatgaaagtccttagttggaatgcgcatggtttggggatccaagcgcatttcgtcatcttcgtttgcctatcaaagagcaaaccctacttgtactttttctaaagcaaacaaagttaggtctgaatgttatttcccgctttcgaaatgttttacattgtaataatggacttgaagtccctagaataggcttgggtggttgtttgatgtttctttggaaaatgatgttgatgtatttgttttaaattataatacaaatgtatttaactgttatattgcttctcctaatctaccaagacggcattttactgctttttatggagctccttacactcaactttgttctctctcttggactctcttggaaagacttaaagatgtttcacctttatctcattggcttgttatcgaaaattttaatgagatcctatctaatgataaccaattgggaggtgcacttcgaaatgaaactcaaatggattaatttgaaaatgtacttgattgttgccatttaaatgaagttccttttgatggtgacccatatacatggataaaaggtagacattctgtggatacagttaaagaaaggttggattggtgttttgtgaatgattgttggacgaccaaatttaacccaattgtgactcaacatttagactactataactctaaccattgagctatagcagtaactgttagcctaaacaacttggaccaacagcatcatcacggacgcaccaggttccgattcaagcaaattttgcttcaacatgacgaggcttcaaacattattgaacaacaatgattgtctccctcttcgggttctgcaatggataaaattctgcataatattgcagcttgtgcatattctcttcaacagtggcatgtctctacttttggcaacatgatgaaaaaaatctccaaagcacaacaacatgtgtcaagattgaataatcaacaagcaagaacaccttctttgattgatgatctaaaaaagttaaaaagcgttttggatgagttattgaaataagaagagcaatattggcgacaacggtcgcgtgtcgattggctacgtagtgttgaccaaaacacaaaattctttcatgcacatgcttcctctcaaaaagctgcaaatcgaattacctctctcttggacagccatggcacaaaaataacttcaaggatggaatgtccaacatcatcattgggtttttatgatctttttactggctactacagtagaccaatctgcaatagagcaagtcacggctacaattcccacctcgattacacctaaaataaatgactccctcacaactccttttactggagcagaggtaactgctactttagaaacaatgagctcggataaaagtccaggtagcaaaggcatgtccacaatgttctatcaaaactactggtacattgtcggaccttctgttactgaagtggttttaggagtgcttaatcatggtcatgacatggatttaattaataagataatcatcacccttgtcccaaaaactaattcacccactgtcatggcagattttcagccaattagtctatgcaatgtcatctagaagctcatctccaagatgattgtgttgcgttttaaagaagctctccctcttgtactctctgtgacaaaaagtgtgttgtactaaaagtttcttcgcactcaaattggatatgagtaaggctttttatcgagtttagtggactttcttaaaggctgtaatggaaaaagtgggatttgccaagtcatggattgatttaattcttaaatgcttatcatcctctagtctcactttttcaataaatggagatacaacggggcttgtaaagcctactagaggccttcgccaaagggatccactatcgccttacatgttcttaatcttttctgaaggactctcatgattgctgcagcacgaagaaacttttggtaaccttgaaggactaaggattactagacgagccccatccatttctcatctcgtttttgctgatgacagtctactattttgtgaagcaacaaactcatctgcattcgcaattaggagagctctagatatttatcatatagcttctggccaaatgctaaatcctcaaaagtcagttatgtcattctcccccaacactcatacagcagcacaactcttctttcaacaaactctaaacatgccaatcagtgcgtgtcataaaagatatcttggacttccctcttactttgaccgtgacaacaaggtaatctttagccatattaaggaatgtgtttggaagttgatgcatgcttcgattaacaaaaattttttgtcaacaattggaaagcatgatggcaaatatttggaggggttcaaataaagatggctcaaaaatacattggacaagatggaaattgctttgtaaatcaaaatttgaaggaagaatagggttccatttttttgtccattacaattaagcactacttggaaaacaagcctgtagaatatttgacatgcctaatgatggaatatattttacaaggatctagatttactaacaagtatgtttttaacatcctaaacatgaacttctaaaacgatataaaataaacacataaaaggtatgagaaaccatacattggtttcagtggaattaaatgactccttttgctcagatcactaacccttgtatcctttctgtagagtatcacctctgagcctgaaactccttctttatgttttgatttttcacagtcttacacactatgattgaggacttacttgatatgtgtgggcatgcacatcacgaaggcttgaaaattaattgtggagagaggctatagtattttgaaatagaagaagaagaagaaggaagaggtctcatgaacctagagagaatactaggtttttagcttaagaggcattagttggataatgagaccataaccttccttttatactaatttccactagggttagggttgaattttagaattaaaaatggataaaaatagagtaaaatacccatctagtggccggccacatagtgggccctacactagtttggtttttgccatttttctcaacaattttatctatttttcacaaataccactttttgcactttcaacactacaaatgccaaaactatttatttaatatttaaaataattatcatataaaattgtcatttataatatttattaattagactccataaagtctcttaattaacaaataaaccccaaagtactatttcatcacaattaagtcatatcttagtgaaaatttcataaactagacatagtctgatt

SEQ ID NO: 227184 - DNA, 1351 bp, Cannabis indica
tatataataaattgtataatatattttaggagatgtctacggtgcatacacaaaattgaaaatactaaaacttaagaaaaacgagaggagtgcactgttactctccaagaactaccctctattttaatataattaatagcaatatgttacgtttggtaataagttgtatatttttcttttcaccaattaattgtattgatttgcatcaacatatatacaaatacaatacaataatacagataagaaacgaaccctgtgtgttttggttattgcagggaaaggaagagttaaccgaaggaacaagagttgaaaaggtggagacatttgattaccaaacaccgccaggagaagaaggcaaagaacctactaagaaaggcgtacaggtgattcacctgactagaaaggaacccaatgctgcaagctgtgggggtggcgatggcatcttggctggggcagctgcagctgtttcaaagacccttgaatcagccaagggtatgatttccggaactggccaagataagacaacaaaatgactgcatcccactgaatgtatcaaccaagcttatatttcttatgcatggattgaaataaaatcaaaatcttgattgaattgcaactcttaattattaactcttaattatttcacttttcttgacgttagattggttataagactagtacgacagattagccaaaccactcaaccgactaactcaatccattttttataataaaaagttatgttaagagtaggctaggctgataggccataattttatgggttggacatattttaattttatataacctaaacgaatctatttcttaaaagatcttataaatttaagacaatttttatacacaaaatatattttacatttataaaatatattttatgttatcatatattatattgtgataaccttaagtttgaattaatcaaaacaatcattaattaaatatagtctatagttactttattatttctaccactaataaaaattaattactattattaattctcgcacaatactacttttttatatatatatatcattcttttttgtgtatgcactaaattaaataatttcatcttgtttataatataatgaatccaactcaacttacctcttatattattctaataagtagagttaagtcgtacaataaaaaaaattaaatggtatataacttatttatacgcaatcattaaattagcttattaaaacacctttaacctgcacccctaggacagatatggtactagcgaacgttaattaaagaaaataaagtactcacaacattgataaagtgcagcaatccttttcttatatatttatatacagtagtc

SEQ ID NO: 227185 - DNA, 7061 bp, Cannabis indica
cataaatatttgtataatctgcatgaattgcatctcaatcgtgataatctgaaattaaaatagcttgcctgctgtctcatggtagaaaattcaggatggctggcagcaatgacagatttgaacatacggggtggtattccttcctgtttctagaatttgaatgtggtggaaaaagcaacaaaatcataaaaacaagtcaaggagaataatcggagtgcaatgacaaaccatgcacatacataaacattgaaaacaatacaaatgcaaaataactcacttgtttgacaacaaaacaaaataaaaaataaaaacataagatggtgaactgcagagtaaacaaaaacatgaaccagtcaaatggaaatgctaagaaataactgaagaaaacttacagcagttgatgttggattttttacattataatcgtcacttccctggataattaataagatggtgtaaaacaacaagaagcagaaatcaatggtttaaagaaatatatttcgttagtatgcttacctcctgagagggaacagagtatttaccagatagtaaaccatgtcccagctttgtcctgccatacaatatgaaagcttaatcaatacacatcttgtgcataaaaaaggatgaaaagtactttacatatgtgccaactatctttgtttctcttttcttttcctttttttatattaatatatatacatatataaatatattgtaggacaaaaatcgtttgctacttacaactgcatattcaggtctacagtgggatcagcaggagccatcccaaatgccatttttaaactttggttcttgtagtatctgacaaaatcaaatttatgaaaccataattcagcacacatacatatataacaaaacagagcactaaaaataataatgataataaccaaccgtgtgtagaaagaatgtgtggagaacacaacttgcatagttgctgcgaggtaacagctgcaagaaaacaaaatgagtatgcattcaaacaaatacagtaaccccaacaagcagcactcaagtcaacaaaagatacctatttccaagattgacaaggccagtgtaaccaggtccacaaattggctccacttcctgtccattttcttggatccggttccaatcaaaatttgtattttggtcaagttctctttcagcggtagtcatttctgtctgagaaaaaaaaatgcacggcaattaatagttaatattcaataatcgaacaagaaaacaacctaaatgtttggtttgctaagccaatgcatttcatattatagacgtgtcctaaaatattcgttcaaaatgttagaagacacatcaaatatcataaagttagaaagtaagagttccatttattaatgtgacagcttcaaagcatagttcaatgatgagaagtacagggagcgttagcataccaaaatttaagaggtattaggtattacaaaattcaaatcattactgtataaagctttgaattgtcattttaattagttttgttgttctaaattctaagaactgagcacttgtatataaacatttaattccatctatgaaaaaaaaaactggaagtgcaaagtatttcgatcaatgatccacaagtcctctacccaccagtaagagaccatccttttgtgactcagtgacaataaggctgcccacagtactggcagcgtagttcaattcaatgaatttactaaccttctgtaatgatgaaaaatcaatgccaaaaaattgtagatgttgcgctaggagtggatccacaacactttcatcctctgggtatgagaaaacatctgagctgccacaatacgttactcatcatttgcttaaataaaaagaaccttcagaggtatatgtccatgacaaaccagcgacatattaaatatttgaccattaagctacagtggcaggttgctctagctttgctaataaatgcaggccatggtgcatgcaagacaaaaagaagcaaattataaatcttaattccaacactgaaatatacagtaatagaaagcctacagagaaaattgtaatgaacacaaaaatattataaatatgtatatagggagctagtaggggtcacttttggtgtctctgttttcggccaatctttttatatgatgatctacaatgtcgaaacagagttcaaaataattcattgcacaagtattttaaggaaaagaaaaagaaaaaaaacacacgtgtgcaagtgcaactaattatttggaactctgtttactccctagcaaattatttggaattttttgaaaactagtgagatgcgtacatttacaatgtacacaatcatataaaaaaaatgagttataatttctccacatattgaaaacaaaatcgtcaaggagaaaagtgacacaatccctagtatagttgatgcctaatatacatatgtatacacatatacaaaagttactagttttttgggtaggcacataatccttgtgaatttgaagaaaagtttaatattaatattgaaataaaaactatttaaaaaaaatatacaatgttattaaatgaagacacacgcttgcattcttaggactcactagacataagatgcctggcttaatgtttaacatggctggctgtattttagtgttttggtcatgcattctttatagtattatttttttttttaatcaattgcaatcgttaatcaaaaatggatccaaaacagaaaaatggcaaaagtaactcggtatctacaatagtgcctaattagcaaatgtgagcctaattattgaaaattttatttcttatttaattatttggtagtatcaaataatgatttactatgtattaaaaaagataatgatgttttactaataaactctctctctatctatatatattatattttttaatgatacaatatgacataatacatagagcaataatattaatttaaaatatactgtaataataataataatatttggcactacacttgtcgctgtatttaatcttttctggtaaattggtatatgaattagcaaaacaataatgaatgagacaaaatattgattagcataaagaaagtaggatgaagaagaaaataataaatgtaaaaccatcagtttaaaaacgacaaaatgaaaagtatgaacagtgaaaaataattatttaaatttgtatatatgcaataaatattttttcaaaaaaagtaaaataaataagacatcaaaatattgtataacagcactattcaactaaccttcttgcttctaaatataattgagctaatatttttttgtacacgctcggtctcattcagagttacaattgagctaatattactaagctactacacaaggaagaaaacaatacctgctccttctaagtcagctgtaatagtccccagtttcacagcaagaggatagtttgtttccttataatattcaactgcatggttgttgccacccgttccatcccaatttttccgcccgcaaagaatcacaccatcagtcaaatttagccaaagattctctgttttatcacactttgcacatttccaaccagatggaggaacaataacaccattgtcaatttgttgcaaattcgttgcgtaagcactaacttgctttttatccgctgtccaggctgcaacttgctctttccgctcagcaccctcagctaacaaaatagcatcaactgccaaccttacctgcagtatgataccaaaatgacattattgtttgatatagcacctttttttttagtttcttccatcaattatttttcaagtatttgaaccaaatagaaagtgcaccttctccggtaactccacagaaggaaatggaaggattgcataatcaggaagtacgactatgctgtaggtctcttcatattcaatttcattgttatcatagccaccatcaacccctacagacgatatcacaatgagcaaacaattctaccattatatataataagttgcacattcaaaacagtatttttaaaagcagcatgtttctgggtatctctgtacaagtctgtactaattcactatataatttaaagcaaaaattaaattaaattaaacaccatgcatgctgaagctacaaaaaaatcaaaggaaatgaccatctgcagcccatttcattaccccaagaaactcatcatgaatgttctcaactcatccagctcaaaacatttgaagattcttcctatggttatcatcaatttttaacaattatttgtaagtaataataatacagcactttcttatacatagtccatcataaaccttaaaatcaactcgttatttcagttttaagtttaacagcttgaagtctgaaaaacataagtgtaacttctcattaggtctcaatatcagaaaatttagattgtttcatcagctaagtgttcctacagcagaatcttgaaacaccaaggaatcaattctgacaaaaactaaaatataatgagtaaacttgtaaagtcataaggcaaacaacataaacagacctccatcatgaaacaaatttgggtctcttgacatacctatagccagtagagtaggttttttcagaggcctatcttcaggaaccaacttttttgtttgctttatgtgtaaatatactgcattcccagtcttctcatagttccaagcaacgcactcttttccaaaagcaaggaatgtattcatgtcaataaacaagccaccttctgacctctgaaactcataataagaacaattagaaaaatggcaaactccaaagagaaacaaaaattttcaataatacaagatgggattgcatctcaagctaaactacgcaccaatagcgttgagaaacacaaaatatcctagacctagagcttaaaatcagaatattacatgttcattcagtgataacggttttattcaagaccaccattgaaagaaaaaaaaacaaaaagaacttgtaattagtgttgtacattgattttactattacatagcaaggtccctaacacatcaccagctatcctcttctctcaaatttctgagcattcaaacaggttttactatcaaaagaaagtcaaaatgctcccaaaataacttccattgtttaaccagtgatgcaatacaggaaattgcaagggaaatactacagtaaagccacgaaactaaagctcaaaagtaacatgaatgcactgttcaaaattgggccaaaaattagctgaatatattactgacttcttagaattttctagcaacaaattcaaaaaataagtaaacaaaatcatcaaatgcactaattctcaacttaaccgcggagaaaactaagaatccaaaaaacaaataagaattagaattattattattattattattattattctttttcaacgaactatagcggcgaaacaaaagaagcttcccacactttctgagtaaccaaacaggtacggaaaatgagattaccggagtgtcgaacgataagcagcattcatgcttgtagatacggtttgtaggctcggggatccgaacccgggagagattggatcggagcaagtccatggggttaagcatcgggtctggagaagaagagggctccagaaatgaaagttatggaagaaaagagaatatgatactttgccctaagtgaatgcaaagttgtagttatgagaatatatgagaacgagagtcacgtttcttatgctttggtcttataactagaactagaggacgacgacgactactaagtactgttgaggtgtaagctttacacaagactacaatacaacgcagatgcagtgctacgtttggaaagacgcacctttattctgcacaacgacatattaaggcttcaaacgaccactctaactatgaacgtatttggttgggctggctcattttaatttgaattccaaatttacatacctatttgcagaagggaataagttgagaaatacttattttgtttattcattaattaaaaatatccttatattatattttattaaaatgtactcacttttgttagtgaattgaccaatgtactctcactcttaagttaattttaacatataatttacattagtctaagggttataacgggggtatcatctataaaagtaggcaatatcttaaataatataaaaataatggtaaaaaattaaaatatataaaataaagtaggtatacaatataatttcctcttggcaaagtcatgctacgattctggacatgagtccagctcactaacctaacaaggtcggacagcctcaatctaggagaggtcattcggcctagaagacaaagagtccatctgcaccattcggattcatggggctatccaaatacaagcaatcgaagaggcactcagaaggcttctagacgtcaccctacacaaaaccctccaaacacaaagccccacagtgccagagtttgtcccttacttcagacccgcggaatgcacacgctaccaaaaaaagatcacatttttgtccaacgccatattctctgacattctcggcacatacgtggttgcgtacgacacctagcatcctcaatggcccccgcttgtactgacaatattcacctcgtatattgggccaaactcaattggcccaaaattcaatatattgtattttaccacatcagagagactagttgacacctttaaatcctaccaagtccgagtatgcccatacctggttctaccctattaatagaacagtgccccttcatgaaaaaggtgggaaatggaattcttaggagaataactaaaaataatggttattcaactaggacaaaaatatttgtaagaaatactttgaaggatttttagatcaaatattgactcgtggactagagttcattcactcgaaccacgtaaacatcttagtctcttcttctttaatatacttcttccttaagcttatttattttataatcagtttccgaaaatctcagtaaaaattttggtattttcattgaaagttgagagaagagttaccaaagttgttatctacaaaatacttgcaacacaaaaagtagtggtcaagcttcttgctcaagaagatagagatgatgttgttggaaattattt

SEQ ID NO: 227186 - DNA, 2069 bp, Cannabis indica
ctagctttgatcgacaagatagagtgattcggaatttttttgataatgactgattttttgttaaggcttgttattggagctcaatttctaggcttggttgggataaacattctttttcttcagggccatcgaagtggtggaattttttttggaagttttctcttctccctaagatcaagaattttgtctgtaaagcaagtcttaattttgttccatcctatgccaacttgaatagacatggcataaaggcttctatggtatgtgctatttttcttcaaaataatgaaataacattacatgccttgtggttatgtccttctcttaaatccattcggttcagttggggtttgagaggtttggataatttatagatggcttccgatttaaatgaacttctggttggggtttgagaagttgaagaatttcttgtcctttgttggagaatatgacatcgtcgtaatacatttgtgcatgataataagcttctttctaatgatatagtcagtagctgagctcttagctatctgtggtgataccaggaagctcaaactcagattactccaccagctccattgagcttttcactaatttctcctagtcatattgggagtgcgattcctaagttaattttgggagagtataatctatttgttgatgctgatacttgctatgaaatgtggcaaattggtttaggggcgatggtgtctcagtaagatggtgacattttatgttcagctgctacccctatcttgggtttgcttgaacctcatgtggtggagacttctgcccttctttatgggctctcctttgtgtgccattaggatatgtatcaatatattctttgattgtttgcacttggtaaactttttttcaaacaagagaaatgattgcaatgagtgtgagttgtgacattgttcttactgggtatcctttacgttcagaaatcttttttccatatctctatttctcatgataaccaatctagtaatgcttttgctcatttttttttagctaaatttactctttcatttgaaagtgtggtagtaggatttttcgtccaacttctcacgttgtgcctttttaatgaatttatttatttctcaaaaaaaaaaattgtagtaaataaatcataaaaaaaaggaaaaactagaactaaagtataaaagaaaaattcgtaccaaaactaccattcaattcacaacccgaagtttcgtaaagaaacccccaccgcacccggccgccgtcacgctccaatctccgtcgccctcgacctccttcagctcgccccttcgcaattttgacctaactcaggtttgttcttcgtttccttttgtacgattgattttgacctaactcaggtttgtccttcatctctcatcaattactttcttcgaatacttgatttgcttactgaaagtctgaaactgtatctgaacttaacgagggaaggagtagagtaagagtattcatatctacatggacttgctttgcagggtcagggtggacattagaacagtgtgtttgagtttggagagatagtagtggagtgtggaggcaaatcctgaaaattattgaagaagaagaagaccacacaatgcaacagcaacagcagaagaagaagaattttagaaagagatgcgtttcccctgaacctgagaccgacgaaggccaagatgaacaagaaagaaggtttcttccctttctttgactgcagttttgaacagaaaacgcacaaactgtaatgcttttttgggtttaattttgggctttttttttttttcacagaatggctttggaagaggttgaaatttcttcagaagcagaggcaaaggaagtcggggattcctgcagttgtcgggggtgaaagtgcttttgatatcaaaaatggcattagtaagaaggcggtggacgacacccaatctcatcgccatcagtatcagtctaattctaaggcccctgccgatccctcagatgtcgacaaggacaaggatgacctcgttcttcaagacacttttgctcaagaaacagccgtcatggttgaagatcccaatatgtatctctctctctct

SEQ ID NO: 227187 - DNA, 2656 bp, Cannabis indica
tggtgctcgttcagagaaaggggtgggggttggggtggatgaaaaatgcttctttcacgttcctgtgaatatgatgtatgtacttgataatttttgaactacacaacaatctgatcatccattttctctgaaatgaatctggcaaatgactatgttggttaaaacaagaaggggccatactttataaaaaacgttattatgggaaagtaggcccagaaataccgcttttattttgtaagtagcaaacactcaatgggtcaaaaatgagttcataaggacaatttgttcgtttaatttcttagttgatttcaaaatttattctatgtttttcagtgatgactggtcttatgttggaagtagactccctcaatgataatagtgcgctaaagaaaattatttgcttaatagttagtgtcaaacaaatattctttgatttttcattgcgagtaaatcacaaactatatttctctttttctagccagcctggtttcacgtgttggacctaatatattaagcatcttctcattattctttaacctcccttctaggaatttgtttattttctgttccctttaactattctgttactgcaaatgtctgcatctgacactgtaacttcttgttttttccccctggaaaataattttaacaggatattgtaaactatatctgtgatgatgatgacataaaagcgatatcctttgttggttcaaatgcagtaagttctcatttagatttttattgctccaaaatttaaatatatttgttaagtctgttgacatgattccaagttcagaccactcatcttggctaccaactcgtgtataatcttattgcggcaggtctactaaatctctacactgaaaataacagtcctcatacatttaaataagtttatgtgttttaatgaaatttgctgtgagctaaaatttcatttcttttatttgctgactgggttttcatttggcctgtctgaatgatttatgttttggacttcaaatattttctaaagcttattgcattgctctggttacattcctgtcccactcttttcttttaattactcttcacttgctcaattactttttaggctgggatgcacgtatatgctagggcagcatctaggggaaagcgtgttcaggtgatttaactcctctccctctctctctcacacacacgcgtgtgcacacacaagtgggaaattagctattctaaactcaaggttggaataactgataactttgttgactctttagtccaatgtaggagggaagaatctcgcaatcatcatgcctgatgctagtgtggataccaccttaaatgctctagttgctgctggttttggtgatgcaggcgtggctaccagcacagctatttttgtcaggggttcaattccatggtattttgtgatttgcattaaccacctccccctcctctctctctccctctctctcttatgtgttaaatagttgactgcttattgatttttaagtagggggttgattatcaaatactcatcttgaatttaacttagtttatttaaggtaggtatacaaggactcaatgaacaaagttcaagtttctgaagagataaattccaaacaagacattagcgttaggataattgaattagtgtaggtagctgcatgtcagttattagatggaaaatattggaatggtgtgattaacctcgtgataaaacatgcatatttcacaaagcaaattgcatattggactttttctttcttttttcttttgctgacttaattctcttcactgaagactgaatgaaagaaaaccttcatgtatgatgtgcgtaatcagttcaacatcctaatattttttttattatttatttttttgtggagtataagttttagttttatattctgaagtcggtttaaatttttgtctcaagattttagaaatagcaagttccttaatttacgaaggctaacatacatgtgtatgcgcaacatgtgaccaagggagaggcaatttataaaattgtgtttgagatctttctaatgtcagtacattctattagtatacatattatagggttgttattcattttatcatgtatcacagaaactgttttgttgtagtttgttaacttagacttttgtccaaatgtacatctagttttgtttttgtaggcttgaatttcattttgtaattagtgtcagtccttatttgtctacctataagtttctttctctacttctttcttctggttgaatctaattatccatctttctatataagctgacattctagttattgagtattgttaggcctccgggagtcaaatagaaaaaaatcaagtagtggggagtgtaaacaagtgtgctggttgtcttgatgaagtgtaagactttctagaaccaatgatatatttaaatagtgtaagagagatggaatggggattatgaagttgtatgaatttggattaggagctatttgctattgcgagtggtttcttgaatactaccatttaactgttctgtgaatatattcggtcctaataaatatcttacactgtatctatttgtctatctaattttgatttgtctaatcaatagattagagcttgtatatcaagatgaaaacatactacaggaatgggagtacaagctacttactacacaaaaag

SEQ ID NO: 227188 - DNA, 1747 bp, Cannabis indica
tatggatcatcatatttgtttcccggaactttctcataataagttgacttttctaactctgccagttgtatatttgaagaaaaatctcctatatatgctttagtgccaaatttgcaaacaagggtcaatattttttcttaattattttccactccttagtttcattttgttccaacttaacttgtcatatgttgcatgttttgggggccaaatttatccttttcaagtgtggaatgcaccatttcattatgatctgactaggttagtgcactcataaaaatagagggtttcccaactttttttaacagtctggtatagtattgttatcggtctctaagatttacgtttatttgactgacgtaaaatttggtgaaataggcattggtagaaaaaccgttggttatagtatagttgatattttaaaattgtcgaggattcccaatttcaaaaaggtctcgtttcaattttgttagtgttttaaactgtcaggtattctcaacgactgtttaaaactaacgagtattctttattataactatcgcttttaaacactcacttaattttattaatgaacatacgctcgttgaatagaagaaaaccacgacattttttcaatagttgtagtagtaatggtgttaaagaaaccggtcgaaaaagttggccgtccaatttgtcaaaatcttgccctattcatataaaaactcactaacccatacaattttacagattttattactttggtaataatatagagagaaatgttaattacaatattctattattacacacttctttctcaatcaatacataccacaatattttttattttcataataattataacattatttctgtaattttttttaaaaatttcaaattacaatttacactatcaaaataaatttaaattttttaaatacacataataaactaaaataaaaattcccatatcaatactcatattattatcatcaattcctagagtatacttatacaaatataagaagtaaaattattagaggaaataagtacaccttaaatattaattactcatgatatctataaatgggttttggtttagtatcactaaaatatagaaccttatcaattagtgagtactaatcatcattattattcattagtacattaaaaaagttttaattaattctaaatatatatatatatatatttaaataaatcagtggcagacataatgctgtattgcaatggaactgtctcctattataagatatggaaatataataagttcagtcattttgaatttttgatttttttttattatgattatttatatgtataatttatcaatgtcatataatttcagaccacacacgtggtctctttcaactatttattattaataattatatatataacccattttagtatttaattcaactaataaccctacttataatttgtatcattctaatccaacacgtactatatatatatattatgtttgctttgttaggcagataattaatattgtgtagtgttgtaagtgtaacacttaatttcaaacttttgcaatattaaacaaccatatcttatagacttataattcaaccacataaatatatatatatatatatatatatatatattttatatatataatcaaaggtttcttaatataagggcacaaattttttgaaattaattaagattttttttctctgaactttgacatgtactaaagcatgttctttgaacttttttaccg

SEQ ID NO: 227189 - DNA, 5277 bp, Cannabis indica
tttttttttctagtgagtaaagtttttatcttcagtgttttggtaggttaggttccttatgatttggaggttatataactaggttcaagttcttgtatttcattggatttttctggttaactgctggaatgatttttttattttgaagattctagccttttttttcagcaattgattatctaatattcaagtaatgtttttgacttttgtgtttggttttgtttatgagaacaaagttatagacgaatattattcagggggaatatagataaagtgggttgcttaatgcgaggaagataatattaggggcttaatttcgaatataaatctcttttattttggaagagtaaagaaaagttgaaagtagagtacactaataataaataaagaaccaaccgtagttaaagctaaaagagaaagcaccacgttgtgcttcttgtatttccaactaaaatgattcttcctaattcattttaatgttataaaactactaactttggagccactctaagcatctttctcacttatcttttcattttttcagacaatctagtgtttgaacatttaatgatatttattttatttgaattgatagttgtggattaaaagctagtttttattgttttagattgatattgggatctatttattccatgttaattaccgaccaggtgatatgtttgttaagttagtggtcccttgacaatttgcaaaaggtaaaaactattgtagttactatgaagacttgtttgtgtccagggtgggacttttagtggcgaatctcagcttttgttttgtagcatatttggaaaggaaaccagtgatgtgagtcaatttcataaaaatttctgtggtaaagcactttgtggtgccttaagatacaatacaatacattggggttttcatgtaagaagggcaacaagtatgtcgacaatatttgttatacttcctaatcttgtctcatgtgaatctaggatctgtagtttttgatgattagtgccctttctttagacttctgtcgtagttgtttctgttcacttttgattgcttttcaattttcaagagtgaaagctggagtgtgcgtcttttctgttcacttttgatgaactctttactccatttcgtacttctcaactgcgatcttttttagttttacttttacatgtatattatggctcttttatcactcaatttctttgaatacctgaatcaaaactatttttcctttttagatgccttagttcttgacaatgttcactattattgtctgcttaaagggttcataatttgaagtcttatttgtaataatgttactatacaatctttagttatatttacttgtctacagtctacttgtatttgatagcctataaggaataacattctctatggtgtgtttgtttttgtacttttgaataataacttacttatagaaaattgaatcggtttatagtacaatgatccatggacacatgaaaagaacagagtgcttagcagggacttttgaagtagatagttgaactaaactatttaaaatcagactttcacagaagtgtcattaatctagtgaaataagcttcatttcttcacttagagcatattctgttttttctagggtagaggactatatcaatctgaaatgcagaacagttgcatcaaatatatcgcttgtgaatcgtctatgaccggaaagaagtgacctacgggtgtagggcacaaaggaataagataaaaggttgctgttaccttgtctttcagatcctctcttcaaataagaataagagcctttcaagatcaagaaagtaaaaaaaggaaagaaagaaaaaaaaaggaaaggaaaaaaaagaaaagaaaagaaaagataggaaaaataagagaaagagtgggcatacaagtaattaaaacactagataggaaaggccctaacaatataggaatttacctgtagaaaagtggaaagagaacccgatagaagtagctataatttataaatataaatatttcgaggtctttaccttacatgattacattaccttttaacccaattcttcaaatttgagaaaatgaaagtaggaaaaataagattgaggacttgaagattaaaaattagaccccacttgctattcttatacatgtttatcagttattaagtgtgagtaggtaaaagaatagtaatgttaattcccagtggagacaagaaaaagagaattgaggggagatagtcaattaaattagtttgataatctattgagaaaattaagactaatggtggaatcagttgtgattcgtgaagtgaaccttctttattcttctgtattggagaacattgtcgcacatggattaatgtaaaaatattgagtcatatattagtatatgagctactctactcatataatcaattggtttctcaacaacaatatgggcaaccccattttctcatgaccaattgattttgagatggaatctcatatatatttttcttttgctttggtattaggctaccattatattctttgatatcctgggcttttcacttgtaaagacatgaaaatgttttccgttaaatccttattccttgatttgttacaatttgatatggtcaaaagtatgaatctggctggatgtgaaactttcaggtgtatcccactattgctattagtttcatatcataaatgaacattttactcattgagagttgcaactatgtaatatgaacataaagttgccaagtaaagggttttattgattgaaactatgacttgttcttacatcaaccctttaattcgaacaagaaaatgagaatcccgactttaaacttgtttacctaagattgattcttgttcctcttttctcctatttgacatttccatgctgatcttgtttataaattacatgaacacagaacatgtgaaatttgtggatcaactgcaatcaatgtatctggtgttagtgaagctgagatgatggaacaatggaacgactcgaatgatactgcaacaacaacgcctgcagctgcccccatccacccagcagagacacgaaacttctggcagggtcatcggttcctaaacttcttgttagcttgtatggtctttgcttttgtcatctcttggctattccacttcaatgtaccctcataaagcctgacgagaagccatttttccgagtgtttatgttttcaaaagaacaagctccgttggaggtactgtctttgtacatcttcccaatattacaagcttgttagttagttatttttcaacaaaacggcaaattgtttatataatataatcctcattattctcaggacaaatgtttgtgtaatataatatgtttttgaagttttgacaagcaaaaattaatcgggctggtgtgttatgttgtaacttttatgttataattttgtggtaagacatacgcctatgagtgttgaattttgaagacttcaaaatgtgcatcatgttatattggtacatgccaaattgagcacaactcttggcacactattttagtaatacatcactatttttgcaaactatcgaaaatgctcacattcaattatgttttatttttgtttgaaaattatgtgaacttccaatacaaattacaaattatcatatgttattttatgttatataaatactattttggattctattttttaaaaaaaatattaatcaacctctttattttgttaaataataatttaaattttttattataaaaaactgaatataataatactatgagttcgattttggtcaaacatttttaagaattaggtttagattgaaaataggccacactagttagagttagagacaaaaatttagggttagtaagatgatgttttaggtttatcattaaaaacatttagaggaaaatctagttatgattgtattattatgtttgattatataaaattacaaagtttaaaattgtcatttaccaaaataaatatacatgttagcaatttttgcaaaacataagattaaaaatactataggatagtatactccttaaaagggtgtttcgataaacttcatctctatttcgacattgaagttttttagtctattttttatatgatcgtggatattataattacttagaaaaacttgtaaatttttaaaaattttcgaataatttacaatcttaataataaagtttaaatattttgttgcatgcgcactatttgaacattaatttcaacattgggaactatttagatttttttaaaaaaatttacaaatggttctagatagctacagagtacgcaatcaggaaaagaaaaattaagcgaaaaaacttttctagacgccacatcccttcaagagggtgtactatgaactttcaatacaaccattcgtttttttagtttgtttaaaatctataacatactttattactatacaagtctacttacgaaaataaaataggattacgaaattgtatgtagactattttgtattgattctttatgcatatgattagagttgtatatttgggttggattttttagttgtgcacaaaattgatacgaactcgagaggcataagcacgagcacaaaacgaaaagatatgggcttatgactagaatatgacacaaaaaatataagcatggacacgacacgaaagcgtgaatatataaacactcaagcacatatatagaaaataccaattacctctttactataattttgtatattttaattatttatttgtatagttaaaaaacaattaaatctattttttaattatttttaaatatatactgtgttatcctgaaattcacacaaggtgacatggtgttcatttggacgacacgtggatcactctttagacttggacgaaggcaaatctcgtcagtataccgtctagagttgaattatccatcagatgttgcttatttcgaaatatgacgatggtatcgtgcatggttaatgatttcctccaaccagatttgttttcataactaatatgtatatgccacccaaaataaatgcagcagtgaaagccttaacatttacttttttttatttatcaattaaatctttattttcatgggacttttgcaggcaattgttgtattatgaaagtaattagttttcctttttatttcttatctgatttgggaaactaaattgatgttattacatcctataactagtaaaattatttcactactcaaaaatccaaaattattcattcaatagagtactcacgctgctaaaatatttgtaaaagttttcgaggaagatcaagaacttattgcttctt

SEQ ID NO: 227190 - DNA, 3974 bp, Cannabis indica
tatatatatatatacatatgaatgagtaattgatcaaataattattagagttatgcttggaaataaattatcattcgatatgaatgagctacttttttattgtgaattggtttgagagcccaaagtattgcgggtctaaaaagacgagccaaacttaaaaactttctcggtcttgtgccagtttctagtggtagggcctttgacctgttttaaaattcataaatttccgacgtgtacacttacaaatttttcaatttgaccttgcccaaatgtactaatgtatggaaataatactatatatgtaagatcaatggactattcctctcaatgccaattgcaacaataattttgttttcttattaatgcctttttgaaaaaataattttttttatatatgtagctttattttgtaaaatagttctctagacagaatatgaaaaaaagaattcttgtgtaaagtaagtggtaaaaagtgaaggaaataaaaggagtttaattcttacataataggccacaactgtgccagctgaatggcctggtacgagctttatttgcatgtcaacttgtccaaacaaaaacatttgatttgaggcaaaaccagctcctatttatttatatgcacaaaaaaaaatgagaatgttttaagacagaaaatcaatttctttaggttttttttttcataccggattcttggtcaagtttcaagcttctttggtggccatcagctgaggtatttacatggttaggagaccatgttacaaagaaatccttattgaaatcgccagtagaagacagaagcttctgcaattaatatttgagtaaatctcatgcaaagaaggctgataaagatggtaaaaatcttgtaatattggtcattattattattcatggtgtacaactcttactttgtcaatggcatgagatgtataaataggtattgtatggcaaaggataatgaaaatgtgagcaaaacattctctcaacaaagagaaaatgtgatgttgaagtaaaggttttggttaaggaggaatatctttaggttgaagtaaaattaattagcatttcctacatagtttcttttagattatgtatgttatactatactactcactagtaatgatggtagtttagttcaaataattggtctaaatattttaatcttttttttttttttttaatgatattcattgatatagagatacatgtaaaatataccaagctttgagaacacacataggctttttgattaagagtctttctatctgtcagtaagatgaagaaagtgaaggacttagtaggttgctttcctttcctataatatatattatcatatatatgtatacatgatcatatttgatcatattatgcttttcttttcaaaataacttagccgttgatcaataagtttgttcactcatatgctctttgtttatggagtctgttcaagtttattccttccctcttttaaaaggaaaatgatcacattaattatttatttttcttaggtacactaagctacgactcaccacataatgttgtgtaaatcttcctgttagacagagttatgtttcattcattgtaatcataaggatatgcgccttggtatctttaaaaacaaattttggtatgcttaatttcatagtagcattgctagctaaaagtctaaaagtctaaaagtaacattttaatattaaaaaaaatgtggaaaataagcttgattaaatatcaatattaccattggtggtggctataaatagtaataaaaagcccagagcatgttataaataaagctaagtagctaatcaaaaattagcccataacttgctgtgtacatgaagtatattgttgaaaggaagtgtcttttgtaatatattggacttcctgatagttccatttgcttttaacaaaacatatattcaactatacctcctttgctacctaacatatattagctaatttgtgttaaaatgaaaaatatgcatattcacttgtaaataatatagtactgtttacatacattattcttggtaataaaaagtcttgtcaattgaacaaataagagtttattgcttgcttctacaaaatggaaaccttataatatatatttaatattgataactcagtgaagcataataaaacaaataagtaactggtaaaataatttaatttattagtattaaatctaataatttatggagaatttactatttagaaatatcgacctaaaatgtaacccaggtccatagaacaagacacataaaaatgcaaacaaagctacactctgctatcttttctgatgacatatggtcgaataaataaataatatactgaacacactgcgtagtaaaggcacatatgcaagtgaaagtagcgtatcgaaccataaaaggtcagagaacaaattggcaatctgattattcacttgtctggaacatcaacactaaataataggcataaagaagcagagtacaaatttagaagaactgaaattgtaacttggcgacaactgagatttgagatggccacttttctgcaacatcttcaccctggttccattcaatgacaaaactatataagaatgtaattctttcaaagatcaggcatgcctcgtccttttttgcatcataagtcttctccatcacaacatccattggggtatccttgggaccagctgaaaaacagttaaagaaattgtcaaaagcaggatatgaattggtgtctcagaaacaatcatagaattactaactggcaatgtcaactggaatgataaataactacatgatcacagggagccaagcagacacctttaactcagctcttgattacaggatacaatagttcaatacttattatatatttgtatgtatacaaagattgggacaagtactttggctaacttactccgagttaaagccaaattgcagtgttaaacatcagccctaattctattccttgggcaaataagatggtgtttatcataatcctagtatgcaacatcttagccattgcattaagtgaaacatgcccctatgcctcagaaaacatcatgcagacagggaaaaagaaaaagaagagtgttaaagatttgagtaagtaccaactgtaggccttggcgtagtccttattttcaatatctcaggtcgaggaataatggatcctgatgcacccaggcctctagatactcttactttggttccatcttcaagatacttaatcccaactttacaaggcttcctgcaaagaaatcactaatgtccacttacaaacatgggagagtgaaaactgaaggattcttcaaccagaattgaaggcagtcacataccctgtgactggatccataacttgaacatttgaaacatgaagaggagcttcaaccgtaaagatcccaccttcatgaccctgaccttgcttgatatgcttcttaacctgcagacaagaaacaagttcataacataatcaaatactgtagtcttgtgcacacaaacaagcgttaagtactaacaattaacatttcatactatgcagcatcatcttcaaccaaggaatgtgattggtttgcattatttcataaattcctacatcatattataaagaatttcacggttatgtcaaatataaaatgaatggtggctcactttaaagtttcaaatattaatgaatacatgaaacacaaataaacaatcaaacttcttccgttagctacacatttattttgaggattgataaataattgacgattaattggggattgaaaagtagaaatccaacaaacttatcttccaggccattcatttaaaatccaatgaacagccaaagaaaaacaatgccaggtatatccaacacaagtacactaagaattggcctgtattaactcaaagattaattcaaaccgtaatcgaactattttctggttaaaaaataaccctttattaaaaaaaatgctgaccgacgaaagaaaactataagaacaagca

SEQ ID NO: 227191 - DNA, 4173 bp, Cannabis indica
attttgatcttggatgggagagacaaatgccaaaaagttttccaccatgaactatgaagatccgagggtgtggattgatctcgttcatccaaagttgcagataagtagaatcctaactttacattatatatgcccgaagtggtatgatgccataacaagcctatcatttgttggaaaaaatgataatggaataggacaaaattctttcaacatcaagtgggccaaaatgttcatttaggagctcaatattccactccctactatcagtaatcaaggaagaaacagtcattgtgggttgtccagtatagtggatcggtgtgaattctgtatgtccgggtatccacttgtctaaaccacatcgaatatgatatccattcccaaccttgtatcgaagacccttaagaagcaattctcgtccccagtgaatgctttgccatgtaagagagggcgtgttgccaagtctagcttccaagaagttattattgaaaaaatatctactcttaaggagtcgattgagaaaagatgtaggcatgtcaaaaatcctccaagcttgttttgcgagtaaagcttgattgtaatgtataaatgaacgaaatcccatgccacctcaaatttagatttacaaagtaaattccatcgcttccaatgaatttttgatccatctttagaggtaccccaccagaagttagccatcatactctccaattgttatgttttcgttaagcggaaacaactcatgacgtaggtaggtatggactgaacaaccgcctttagtaagacctccttcccaccaactgaaaacaacttctcattccatgcattcatcaacttccatactctctctttaatatggctaaagagagcctttttgtcacgaccagggtaagagtgtagcccaagatattgctcatggcactcacttatcggcatgttcaatgtttgctgaaaaaattgttgagccggtattggtgtgttaggagagaaagacataactgacttttggtaatttagcagttgtcccgaggcattgtggtagatactcaaagctcttctaatggccaatgcagatgatttagttgcttcacaaaataacaaactatcatcagcgaaaagtaggtgtgagattgatggagcattcctagtgattctcagcccttgaagattattactagcctcctcatgttgcaacaatcttgaaagaccctccgaacatatcaagaacaagtaaggcgagagggggtccccttgacggagtcctctaattagcttaacatgtcccatgatatcaccgttgatagaaaaagttaaactacatgaagataggcagcaatagattagttcaatccattcctttgcaaatcccattttggccataacagccataaaaaaggtccatttgactcgatcaaacgccttgctcatatccaattttagcgctaaaaaacatttggctccacgttttcggtgatgaatattatgtacaagctcaaaagcaacaagtatgttatcagtaatcaacctattagagaggaatgcactttgtgtttcagatatcacaagagggagggcttctttaaatcgcagcacaatcatcttagaaataagtttgtagattacgttgcataagcttataggacgaaaatcagccattacatgtggagaactgatttttggtgcaagagtgatgatagcctgattgatttgttccatatatggttcagtacactcaacacaacttcagttaccgaatttccaacaatattccaatagttttggtagaacattgcagacataccatcgctaccggagtattcaaggctgtctaagcctctgctgctgtaaagggggcaatgagagaagcgttcatttggtgaaatgctatttggaattgtatcaacaacttgatctattgctctctgatttactgcagtagcagtaaacaactcagcaaagtaattggtaatgatatttgctagaccgtccttggatgatgtccaatgaaaattaataaaaaacccaagtaaaaataataaagtgaagcccaaataaaatttaaaaccctaattctatattcttcccctttctcttctactacaccttctacttttcaaatagcaacgaaaaaacaaagaaaaaaaattgtttatccttaggggctcaaaaatattatttcaattaatttttgaggcttacgcctcgcctcacaaaaaaaaatctcaagggttatttgtgttattttaaacattgcataaaagaaattaaaaataataattttaatataaaaatgaaacaaaataaattataaaaatggaaaagaaaaatacaaattataaaattagaaaaaaaaaaaagtataaatgtacatatatggatgattcccctaaaaaaaaatatataaatacacattatagcaaaaaagataaaagaaaaaagctcgtttaacacaaaagatactaaacagaccaaaaaaagtatagaagaaagcaccaaatctaaaaggtcacttttttatcgaattcttgttgtagaggatgaagcactgacataatttctcaagaaagtccaccaaatacccttttcatcagtctgcattaaagaggaataaatatacagaaacatgggaactgtatgatgtaccattgtcctttctaacttgtaaaggccaaaaagcagtgaaaaagtaaggtcaaccacatagcctatattgaaaaataaccattttatgtgaagagttcacaagtgaactttttcccaaatagtttcttcagtttctatattctttatagcccaacaagggcctcctaaacctttttaacaatcaacattataccaacaatccaagttctattaaaaaaaaaatggaaggtgaagcaggggcttagctttacagagaacaggatctaaatggtgcaatagacactacagcttgaattcaattgggtaaaatcaacaagcacatccgcctgactgttgttgagattgcaatgtatttgcattggaaggcttgagattgacgtcgaccatgtcctcttgtttcgttgaggagagtgtttccatccctggtaaggcagcagcaatcttacggaataatgcctgttgtagagattgagaaattaggtctcagcaaacctctctttagaggttcttgaaagcagcatggatcatgtaatttaccaacaacaatttggaaacacacaacatagcttcaagtctttatattgattgaagaattctagctcctcgaccacaattatgtgaaaacaacatccaagaacgtttatatgacattattcttgatcttttgaaaacagttgcttaatctcacaataaaataaaaaaaaaataattctttcacagatagtattagtaggaaagacccagcaaacattaaatttaaatctagtatttaatcaacagcattgtcatgttctcagatagtattactaggaaagaccccgacaaaaattaaatctagtatctaatcaatggcgttgtcatgttcaaacaatctcacatcaggaagcaaattttttttaccttgatgttaaaaccagccttggcactagtttcaataaacataacattgagttcactcgatttggcttctccttcctctattgaaacttgcctgtgcaacaatgcacaaactgttaaatatttgagtacaaccacataactaaagacaccattgaatcaacagcagagaatagcaacttgaaaaaaatataagtagaactttgttaccttttctctacaagatccgttttgtttccaacaagtacaatgataacatcactccctcgttcagtacgaacctcctcgacccacttggcagtatttagaaatgattgtctgcctaaagagccagcataattggtaaagttattcaaatataatataaagcttaaatatttatgtggtgactaaatttcaagatcatttttgcatttgggagagttgaaacatacaaaatctccttcactaatttttggttttttgaaaagaagcccaataattattggtactcaatggcaagtggaaaccaatgccaagcctctttttttacttatttgtttctcatggtttgtgaaatgtttgcatacgaattcgtatgtttgtattccaactgaagccacaacgtttttttaacatattgctgttgctgatttcaat

SEQ ID NO: 227192 - DNA, 3329 bp, Cannabis indica
ttttagttaaaagagtggtttctaattcggaaataatgaactaaaagtaatggcaatctgaaaaaacgagtcaaaaaaaattatttgtgatccgtaccactagtaattgagccgtctaaaataataagtaaaaattgaccattttaaaagaatattagagtcccaactaaagaaatattacaccatatttagatacactttaatcccaaattctaacgctcaagagactcaaagtgagagatgcattacctaatgacaccgtggaaaacacagccattgatttatctttttttcttttttttttttttaagtttagacctgaataattattaaaactaaataggattttttcccatgtaagtctttggaattttattgcatgcaggtgggaaccactgttcgcttggagcaacgatgtggtcgctacatttataatttcagctcaggccatagctgagcaacatccacagagtacatacaaatacaacttcttttctattcaattcaatacaacttcaattattaaattcaatttcttcaattttcatttcagctactttctcaaggctgaatattcagttatctttcttaccacagggaggagttttgtcttgacctcgtggaaaagtaacacctatccatcactacagaatctcttataaattttctcaacaggctccaccccaaacctgatcaactccctactggagaagtggaccttgggataaatccaagttcctcacatggattcatcatactctggtgactgtcatctcctggaacatcttaacaataacatgggacaacttatttgcgcataatcaataaattcaaaccaaatttaatgaagttaagagtgtctccaatacaataccaaatttttgtggtaaagaaaaaaaaaatcttatttaaaaagcaacaacgctaatacattacttcttttattattccaaaaactccactttttattccttgtgcaaaatcttcttcaacctgttaatatgaaagtgaaaagaaaatgttaaatctccttagacattatcttgaacatcgttaacaaaggctatatagatagtatgtgaaagagagtgctcacagatttagattttcaacaaagctaagtatctccaagtcttgttaaagaataatgttccacaaaatccccaaagtccaacaagaaatccgagtcccaaactaacataaaagccagtggttaccaacttgtcctgatcctcatcatttttaactgcaggagctttagaagtaattgttggttcatcaccaggacaactctttggaagaggagctccacagagttgagaattccctgcatatgaactgacatcaaagctctgtagttgagtactgattggaatttttccagacaagttgttgtttgacaaatccaatctgcctagacgatccacttgagaaaggcttaagggaacttgacctgaaaggcgattattcgataggtcaagattatccaacagcttcaaccttccaatctttgagggtatttctccacttaaactatttcttgagaagttgagagaaactagctcaacaagttcagtgatttctgttggtattttacctgtgagcttattgtttgatagatcaatactccttacaagtcccaatgtattgcgaaacacagaaagtgttcctttccataccagttgtacttgatcatcataagatgtgtatgtagcagatccttcagtaccatatgaatattcatggtcaatggctgtgaaaaagctcacattccgtgccttcattgcagtcaaattattgagacatttcggaatacttcctgagatgttgtttgaggacaagtccaatagattaagatgtgacatttggcatagatttgagggaatgctaccaaagaagtggttggatcttagggtaagaataacaacattcggtagaccctctccaatccatgttggcattaattggtccaaataatctattttcttccacattcaatgccaccaagtttgtgcacctcttcaaggatgagggtagttcttggcttaaactattgcttcctaaattcagtgctgtaatctgagttaaggaaccgatagagattggtatttttcctgataacttattgttggccaatacaagaatgcttaattctttgaaataagaccaacaatcaggtagatccccagacaactgattgatcgaaatatcgagcagcattaagttggtatcattagtgatatggcatatggaatctagttttgagaatctgttcatggaaagatctagtgcacccactgtgaacatgaaatggggtattgaaccttctaactcatttgaactaagatttacttcaggataatacatgaattcaaatgaggaatctgttatttttccatggagttggttgtcagaaagatccatggaataacaactactagagatgtcccaaaaccaattaggaatagaatctgatatccatgcattagacatactcagcatggaataatctttttgagtttgaagccattttgggaaccgaggacccaacttgcaagactcaagtcctataaaatccaacttgaaaggaggaagccaataataagtgatgttccaaattagtgagttctgggaaaaactcaaatgcgatagctttgagagttttgaaagatgagcttctgaaattacaccctttaaagagtttgaagaaagatccaattcctccaactgtgttaatcgtccaaaactttcaggtacagttccactgaattgatttaaataaagtgttattactttcaatgatgaaaataaagtaagattaggcaatggccctatgattcggttccaaccgaaatccaaatactctagagagtgatattgtgggcacctagacagtaattgattctgctcaggaatcattactctacgaagattgttttctcttgctcttaatgtatgcaacttacataaattccaaagggattttgggaattcaccttctaattgattactgccaacatcaaggtatgtgagattagtcaagttccccaaagcttcaggaatagagcctttaaactcattcaaactgagacccaagtgtgtcaaggtactcatctttcctaaagcctctggtatgaaaccttctaattcattagctccaagttcaaggtattcaagggcactcatgttttgaaaagcttttggtatgaaaccgtttatttggttctcccagaggttaagatgaacaaggctacgactgaagttgaatatcatttgatacactgaaccagcagagagccgattataggaaagatcaaggatggcaagtg

SEQ ID NO: 227193 - DNA, 3187 bp, Cannabis indica
ttaaaaaattaaaaagtgaaaagttttataaaacatatttttaaaaaatatttttacttttttaattaaaaaataaaaaatggattaaaaaatactaccaaacttacccttaattactcataaaataaaatggctaacaataaagtgagaaatttgttaaaaaagtccatcttcaccatccacaaattcaaataattatttaaaaaaatcattttgtatgagtgaaaaggaataaagggtattttagtaatttcatccaacagacatttgaaggtgtttttctgcaaagtgtagaaaaaatgggagtcacaaaagggatgtcagggccccatgaagtctcaaaaaagctttttccttcttccatgtgtaaaaaatgaataaataaataaataaattgtataccttattttaattatttcattttaatatattattacttggttagaaatggcccccacataatgaaaaatgaatagaagaaactcatcatagaccaagctgaaaatatattttgaatgattgaattgacaaccaaacataccaccacacttagggaattttcatcaatcttgattcatttttatttatttatttataaataattttcattcatttcttatgtagttgaaaattgaaatagtttatatgactaaaattttcatgagtttcaaaacaactctcactttaactcaagttccaaagagcttacctttatcatctttttctatattatttattggttttgatttgattttttcaattgaatcaaagagaatcacatgattttcaagacaaatgggtaagtgtaagtataaagactcaacctttattattattattattattggattatttaatagtatcttcatagaatttagcatttgtgaatatatgtttcttttttccttcttctttgattgatctacaaaaccccttttgatttatctggatttttagatcaaatttcattaattttcttaattatgtggtccaatgactaactttattcaactacttcagcataataaaactccaaaacccaatatcagatcttcattctgagtctcagatcaccaatggctaagaagaagagttggtttagtttagtgaaaagattcttctcttcagattcacaatcaaagcaagaaaaggttagaccttttatatctttcttcttcttattatctaaatctgatttttactatatttttttgattagaaggaaaagagaagaaaatggatatttggaaggcttaagatcaaaagattagcttcaataacagcaccaccacccccaccaattgaatcaacacaaaccgaaaccgaagaaagtgtagtacagagcggagaaaacaacaatttctccgctctgtctccacccaatgcagcctcgactgcatctgatgcagccgaggctgctaaactaaccgaaatagtggaaatcgaatctcgggaaatccaagaattcgctgccactaagattcaaactgctttcaggggttaccttgtaagttttttctttcaaattctattagatctctctataagtggttcaagattgaatttttatgcataaagttttgatttttaacaatttataatgaacacatttttttgtaggccaaaaaggctttaagggcacttaagggaatagtgacacttcaagctattattagaggcagagcagtgagacgccaagctgttacaactctaaaacgtttgcaatctattattaatattcagtcacaagtttgtgctaacagatttcaaaccactgaagccactgctacttatgattatgatgatgatgatgatgttgaagatggtgatgatcaacttcagaatttaaggaacaaaatactaagagtaagtactaagtactatgaatgttacttttagtagatatatatagtaattgttgaaaatggcagttttttttagctttctaaacacattgacaatgtaaatgtgtcactcttttatattgtatacttagcaaattgagtttccatgtgattttgattttgtaaacaagtattaaaaagagattattgaaagtaaggacttttctcacttaattaatgttttttcagatggattgttacaatcaaagaagatgggatgatagtcttctatcaaaggaaaatgcagatgcattgttcatgagcaaaagagaggctatgcttaagagagaaagaatcaaagaatattggtatgcacatagggtaagtttctttactaacacatcattttggttaccaaatttagttggtttttttcctttcatttgaatggtaaccgtaataggttaaaaaaaaaaaaaaatcatattgaaaggcaaaatctaaaaaatttcatcgtctgtcttaagggatgccaaccaaagaaaatcccctaagttgtgtttttcagttacaaattttttatgggtaaatagtagtataagtaaccaaaattttaagtttgtaaatgacataaatttaatatttattttgagtggtataagtactaaatatttgtaaaactgtaattttctctaatttcatcagtacagattctgttattgtattaaacaaagtacatgtatggtccagattctaaatcattgagtctagacatgtagaatcaattatttttaaaatgttcttctaataaattcaaaacggaatctgtactgacgaaattggaagaaaattacagttttacaaatattagatacttatactgctaaaaataaatattgagtttatgtcacttacaaacttaaaactttgagtacttataccactatttacctattttttttatgggtaacagaattcagcaggatcttagggtaagtttctttactaagagatcattttggttaccaaatttagctgtttttttcatttgaatggtagccgtactaggttagaaaaaaaaataatgggatgccttcgaaagaaaatcccccgagttgtgctttttttagttactgattttagttactatttttaaatgggtaacaaaattcagaagtttctttactaaaagatcattttggttacaaaatttagttgttttttctttcatttgaatggtaaccgtaacaggttaaaaaagtagagagatttcttccatctaaaaaaattcattctgtctcgagggatgccttcaaaagaaaatcccccgagttatgtttttt

SEQ ID NO: 227194 - DNA, 2066 bp, Cannabis indica
tttttaacttaccccataaaaaataaaaaatagtataaagtgtaattttctcgtttacatatgtccatttcacttgagatgctactacagtagaacctctatttaagaatactctattcaagaataacttttaatttgttataaaaaaattaagtcccaatttgggctagttataaataagaataatctctaaattgtaattagttatacatttttcaagtcccgtattaacaaagtatacctctatataagaataattacatcttaataaaatatatacatatgttttgtaaatttatttacataaaattaatggaggttctactgtactattgtggaatataatttgcttagtcccaagtctattcttaaatagaagttctactgtactattgtagaagcgggcttagacgtgaatttaggcccaataaaaatgggcttagaagccgaattactggctaagcccaaactggcttccttccaccggctcgtcgtctgaaactgtaaagtaagttctcaaccaccattgtccattggagcaagtcaaagaagataagaaaatggcgggtctactagcatgggcggcagacgtcgtcggaggcggtggtactggacaaggaaacgcagaaggtggggctgatttgatcccaatcgttttcaatgcagagcagcaaaagtacgttcaggaattggatcaaaaagcggcttctttgagccgctcgattcaagatctacgcttgagactccctcctcctgacatatcccaacgcctccctcacctccatgcccactcattagcttctaatgccgatcttgctctgcaattgaattcccactccgctactcgcgaacaggttaacttcgttttcttcttattcaaatgtttgtttcaaccaaattttgatgtgtatttttcatcatctgggtcgttacaaatgtgcattgtttttgctcaaatcaagtgatttcatcccctttttttagggtttgaatgaaattatagtttttgtatattgctaatgcttcctatgtagttaataatgaaattcattatggtcaggctcaattgagagaggtaactctacaagaagaaaatgctgcttttgagaatgcaatatcaacttgtgagaataagatacaggagaaacggcaggaagccgaattacttaggagaaagttagcggtgagcatgaaaactttcaattgagaaatgttatttttactatatttttgtatagttagccatatatattgaatgtccttatgttagtgacattgccttttgttgggactcttttagtcctaaagaataaattttctatgccctgttctgttattataaatatactacaatgaatatagtttacttgatagttctcatgtgtttgagtaagccatttgaagttcttttgatcaattgatcattttaggagatggaggagactgagaagaatttgagagtagaacttgaaaatgcacaaactgaattgagtgccagtcaatctggtggaacagaagtatcaagtgagtgaatcctcagcttttgaaactggacaagatacagtagccccaaagtcctccactatagaggagttagagaacaagaagaaggagctggtctgctttctttttgaatttttattttatatgatgtattcttcttcttattgcattttacttattacaaacattatccttcttgtagagtttattggaggataaagttcatgtcttagaaaagacttggttagaagtacaagagaatgcactgaagcaacccaccccaggtattttgatttatcaatttgtatgtcgtccttcttagcctaataaatatgtagtgtggagttgtaaaaatcttttattctgcagcacaaagagagaagatattggataagcagcttcacagcctcattgagcaactggcttcgaaacaggtaattgtggatttcaaaaattataaccccttcgagccaaaagattaaaatttaagattttcttgttttgaaagtattagttttatatgttatccatttcatttataggcacaagcagaaggcttggta

SEQ ID NO: 227195 - DNA, 3220 bp, Cannabis indica
tccaggccaacatatttcactttcaaaaagagacaccactatagagacaaacttctcaaacctaataaatccaaacccctaaacccaccaacccttgcctcaaactggcaactctctcataattaaaaactatacacacacacgaaccaaacacaacgctctctttaattaaaaactatacacacacgaacacgaaccaattaacatgtacaacgctctctttaattaaacccatatggaattagtcctactactactgcgctacttcaactatattatgctatacagaataatgtatgagctttttcagctttattaaaagaagagaacgtttcatttataacacggcctctttctctttttcttttttattttttttgggacaattatatgggcattaaaaaaagtgaaatatatatttatatcctaataatttgttcaaaatatagttggactattattaatcgctgtaattttctagctagcatttaaaaaaatagtcggcaacaccataaaattagtaaaacaaaagtgacatatatatatatgtaattaataattaggaaatttacatgaccatatatatataaatacatatacatatatagtgaaattaagaagttttatatggccccaaaaaagcaaactacatataatataacatattcatcatcatcatcatcatcaaaaccatgtatgaatcttactccaggtcgatggacgcctttttagctatatactgagtgtaacaaactaattcatttatatatcacaacccttctggaaaaaaagaagagattaaaaaaaaagttgaaggagaaaatcaaaaagccaccattggtcaaattaattcacactactcatgttctttttttttcctttgcaaaaacgtacatgtacgtattaattaatatatattattaattaaggatgatttatatatatcaaccgtagacctgagatcgagccggggtgctctgcatcttaagattcttataaaaccttttaatgaaatcgtcagccttagaatccacctgagtgtcacctccctcgtaatttaacggaaaaggcgagtccgttattctcaactgcctcatccccaaaggactctttccaaacccgggtaacgtcactaacggcgacgcctgatcaatattattattattattatgattcatgttgtacatctcaagtagaaccttttggacggcgttaacggtgttcgaaacgtcgtcgtaatcgaattttgtactggcagacgaagatgatgacttggcgaagtagtgtttgttactactacgcttgttgaagtgaccgagacttttgtacaagttgttaaaggctggggcagctgggctgttgctgcagctgaattcgtactctcttggagacacgaacgaaactgcgtcgctcgagcggcacccgaaccctcctcctccgccaatagaagaagcagaggaggatgtgaaggcgccgtggttgagaatgaagttgtgagctaaggcctttccggctagcttacctctcttcatgagcatgtgaaactcaaccatgattttgctctttgataatcctttcctcatcattataaacactactcttactatgttccatagcttctttgccaccactgaagtacttgcttctatttgatccatttctgatcactcttctttctttattttcaataagattgtttgtttgtttgtgtagagagagagagagagagagggtaattagagcttcttatggtttttgatcaatggaatgagaagaagagagaggtgccaaggggtatataaaggggtggaaaataattaattattaattaaagatttaagatgaattatatatctaagtaagggaaattgtacgaactcgatatgcttgcgcgtgtgtatggttacaatctttgtcaaaaaagtagagtaaagcaataaaggagaaggaagttgtacacttgtaaacaatagaagcatcacgcgcgcgttttgaaagcaagtggtgataaagtttataataaatcaattgatgaattttttttaatatagttttgtttgtgatagttgtgtagattgtgtggaagtggaagaggaattgtggagactggaaattactagaaggtccctgtgatagatatgggaggagtataattatttgacgttagggggttcaatgattaggaggagaagtagatatttggagtatagtatagcatattttaattaaattaaatttcaaattttgccctttttgccgtagagactaaggtactcatcatcacagactattacttacatttttggagctccaactactccaattacaactacaactccaatccttaattcttgatttcttaaatgttaagttcaataaaataaaataataaaattctattattctttactttcatgtatgtaagcacgaataaaagagatatttcccagcaagtcaaggaaaagaagtaaattcttcaacagggcatatagaggtgtgaattagtcaataaaagttagactttgattgtttagattaatcttgatatattctatacattgattgacaatattagtgtgggattaatgctagctgcatatgtatgtaattttcagtgatttagatagtacttacttttttttaatgggattaagatatatagtactacttatttgatcatttattaattaaaactacttatttgatcatttatatataaataacaaatatgagaatttaattatgtataaacatcgagatatgatatatggattgataactaataaagattagttagctttgttagttaatattttctttgtgtgtcagattgtaactaattctgttgtaacagaattttgttgtattttgttaattctcaaactctatataataaatcgttccttactaagaactactaagctagcattcttagtctgaggcttttcattcattttctctgttctcttttactctgtttcaagatcaagtgtttcatggtatcggagcttctctgactcacgtccatggcctcctccggcgacaactcgtctccagtaggtgtcactgatcctcgacctcaggcgcctccccctgctgctgcccctgctacaatttcctggaatcctttttcgaattcccttacttcttctctcaccatcaagctcgatcgagctaattttcttgcttagaaatcccaagtcgttcccacggtcattgg

SEQ ID NO: 227196 - DNA, 3821 bp, Cannabis indica
aaaatggcatctttgttcagcaaaagcaagatttatagctgcttgagtatcttgttaattgtaatgaagagtgttattatggccttgtatttgctctaatgtagcttgagaattctggagtttggtgtcatcaccaattgacttttgagtatttttagcagacgggattctagtactaggagcagtctgctcggtccaagtactagtggtttcagtttcttgcacgcccgaagtgaaactagccagaggggtagtcactccttgccctactatttgtggacctgtgggtgcctaaggattagtcggattggagtccgtcctaacttgatctctgggatcggcatgtgtctgtacgtttaaatctgtaaccattggattcgtagtgtcattttgatttcccctccgtgtttctacaaccatcttgtgtcctgaaaaagacttaaaacaaagacttgtatttctttgctttcaatgaatattgacctcacttttagccaacgacagtgagtcaaattaaagtgattaaagcataattgatataacaaatatgaataatatagagtaaagaaaataccaaaattatagaggtttgatcccttgatgatggtaatagcctactcccatttagttgtattaacttgtgagtagatgaacaagaaagccttgatctctctctaaagttcttaatgatctctgagtatttcactcttgaatctagatttttcttgtgtgttttctcagaatgaatttcgtatccctgaacagtgagatgagtgcactatttataggaattgattgcattaaattggtttctcaaaatcaataaagaacaaaatgagaaatctaattactttctataattacaataattagaataggaaactaggtaggtttcctttctacttcaatactaggaatttatctcatggatttagggatagtgtcgtgccttacaaacttgaggataaatctctaaaattgtctaactcgcattccctagtttagatatgcaagtttccttcttgatggaagctggtcgggtgtccttgcatgctctgctcgaatattccaacttctttctatgacttcaagtattaaatcttcctacacagtttatcaggagaagaatcttctacccaggtgataaattctgtcacgtgtcacctaagtggatgccacgtcaataaaaatttgaataacaaactattataattaatttgcaccttatgttttagagcacaaatacaaaaactagattaatttaagctcaaataatacatttgttgaatctacataacaatgtgaggtagtaaaattttcctaaaattcagatccataaagaacgaaaatccactaaaaatgaagttactataaatgttgaattttagaaagaggtaaaaatgaaaagtttagccaaagagtatcaaatttgctaccgtagtttatctttaaatctagccattaaaataaaatttaatattattggacaaagtgccaacatcttccataccctaggcggtatgacaacaaagagtggcaccaatagccttttatcaactctcttttatttttagttataattgtacctaagaaactatactagcaattttattatttttatttcatataaaatatatatttttaatttatattaatttttaatagtatttaaagaaagactaattagaattttttctcctgaacatgtatcaaatcataccccttaaattttttctgccgttaaaaattctcctaaattattaaaattgttagatttaattttgtctaattttaataaaaaaattctaatatggataaaagttcataggcatgatttaatacatattaaaatttgagaaacatgatttggtatatatcaaagtttggagagcataatttagtatataaataatcactaaaacagtatattgaatgaaattagacaaaacaatctcaatagtaagaaatttttaatagcaaaaaaaattcaaaagacataatttaatacatatcaaaatttgaaaagaaaaaattataattaaatagaaggaaatatataaaattatattgaaataaaaataagaaacatatagaaaaaaagattacattattaaaataaagtttatttatatttttattgttttttaacattagcatgtacatataatgctttgagctttctttcacccaaattcgaatcataagttaccaaaaaaaaaaaaaagttattacctatggcagtgtgaaaaattcaggaccactggatgaattagtcacatcacagaggcatgaaaaacaaagacaaataaaaggcagtagaataaagtttaatgtttcattccctcacattaaagtagtctggtcttttcacccattacatgatataaaagaataacacaagaattctgatacagaacggtatatatttgtgaaattctgcaatgaagaaatcttcatatacaaataaaaaaaaactacaaaatcaactcagcttagatataccataattgaattcaactctcctgtctttcaagatttgaataattcacccagtaagccgagaaaagtaaccaacacctccaaagagttcacttatcccaactaaccaactaagactatcagaaattccataagtaacaactaccaaagcacaaaaagattcaaacaaatgacaataataagttcaaacaggttatttcatctgacaaacacattagccagccaaaccaattttgacatgcttgtatcatggcaaagcaattttttttctaatacaatttgaaatggaatctatgcaaatgaaacaaatgaaatgcacatcaacactataatagtaaaaataaaaatattaataataacataataataatagtcagttcttgttagcacaaccttcagacatatatcagtcaacataatggtacagccttgtatactctttggtcttaccagaaacaatgtgatattttttcctgcttttccatgtcttccttttttctctttgttttttaaaaccttttcctactagattgagagtaagagggtttataagatggattgactcattcttaaacagttagaaaatttgaggagatagcatgaacaatgcaaggatgcaaggaagcaagaaaattgcttctaattaaagtaaaactgagcttttttttactccaccaattgataagggtaactaaactagcaacatgaacacctaatgaagcaatccagtaaacctcaggacatatatattctttgatcaactgcaaccaaagcaaacttagcaatatcattcaccacacagcatcatggatatgaatctaaatgaactatgaagcactgagatgttgccgaagatgatatgcacgtgaataatatgaatgaggtgaaccaaaaataaagagtaagctaaccaaaatagtagctaaaattgacacaacttgtcctactgttaatttctgaatttctgatattcttaatagattgcaagataagctaactttatgtaggtgttactaaattcaagacctcactgggtaaaagtgacaggcatattcaactgagagaaaactcctactgcggccgagatcctgttaaatttactttggtgaaggtatccaacaacggaaaggctgcacatgagtatccatataacgggaagcagacaagacacatagtaaaacgagaaaaaaatgagggaatccagactgttaaggacctagacctgtcataaagaacaaaattaataaacaaagctgataaaatccagttacatacgtagtgacaataagattagataacccatagactagggtcactaaact

SEQ ID NO: 227197 - DNA, 3421 bp, Cannabis indica
agccgagctcttgtcagaatgaaattatcggcaaggttggtgctcacaatgtcactgagttccgcgagccctgccttaattttatagcatgctcccgcgatgcgtaccaggattcacgttgcgactacacttgagtgtcataaggatactgtggcacaccatgagcgacacacaattcagttataactcatgctaggccaattctggcatgtgtagatcattatacccccaactggcatagtaattcccttcataattgcgtaaacaaaattgagcctatccaatagaacatttgaaaaaatgtttactaggcacaatcctagcacgcacgaaaaacatccaagcacgagccacttggttcaattcacagcgatagaatagttggggctcatcatccacctcatgcaatctcaatctcgaaaaaccaactatttctgctaactccacaaggtcaaactttttgtccataaacattttatagtgttggctattcaccattcgtatcccaagcagcgtatggatggatgcaatatttataggcacaactgttttgtgcactcttacttttttcgtttctctgctagggccaatttgccaaaaattcaagagccaaagattaatggactcgctcttggacattcaaaaatttttcccactggtagtcttgaatttgttgcctcatactctcgaacagtggttgattcgttatgggattttcatcatattcgatacctcgatctataatgaaagctttcttttccaattcagagtatctctattgtgacttttgattgacaaatctatgttttacaaaatttaacttcgaagtcgacattggaggatttaatgatgaaggacccgatgtcctgatttagtacgcttggaacccattaagaacttcaaaattatcactcaaaaattcttgggaaattttggcaacacctccccttaatttcttcacttcccaaaatttcaattgttcaccaaaatcacaccacaatattccaatatcaataataatccacaacattcaaaaatttctcaaaataaatccacaaacccccaaatactatagcaaactattcaaacttgcaaaaaattcgctcaattaatcaaaatcttgaaaagaaggagacttactaagtgagaatgctgtcaatccacctccattgttgaataaccatgaaaagcttgaggttgaagatgatgaatagtggtattttcggatttgggtgtgaagtggtaatttttggggtgttttttgaaggaaagggagattgatgagaaaaatttgaagaaagaatgaagaaatttgagcttttatggtaggaaaggggttggatcgctgagagagaagaagaactcgggtggggtttgaatttttagggtttaagtgatttttgacgaagtggtttttttattgtggcagaacagggcttcgccgcggtgaaggatgcgagcccaaatgtgaaaatcttctgccatattctgccgcagcgagcaatgggcttcgtcgcgactactggagggagccaaaaagtgtcgatttattttttttcattttctttgggtcccgttgcgacgggcaatacctccgtcgcgactactttagcggaccacaatcttttttcttcacgtactcatgattctaattacaactcaaattgtacaaatctaaccaaaatgcaatgaaacaaattaaaatgctacaaaacacttgcaattgtctttaaaaatttcaaaagagtaagtaaaatttattgggttgcctctcaatagcgctgtctttatcgtcatatagccggacgttgattgttttcttcaaagaggcaccagaattatggcagacttggcttggtcaatatgaccacccaagtagagcttcaatcattgaccactgactttgaaagtttctgggctctcacctttcagttcaacatcctcatatggaaataccttgaccaccgtaaatggtctagaccatcttgacttcaatttgcaaggaaaaagtttcaacgttgaattaaaaagtaagacttgctacccgagttgaaattctttcctgactaaatttttgtcgtgccatttccttgtcctctctttataaatcttcgcattctcataggccctgttcctgaattcctcaagctcatttaactgtagcaatctttattctcatgcagctgctaaatccatgttcaaagttttcattgcccaaaatgccttatgctctaattccacctgtagatgacaagcttttccgtacaccaacctatatggtgacatccaaataggtcttttgaatgtagttctgtaagcccacaattcatcaactagtttccttgaccaatactttctagattgttgaactgttttctccaatatcagcttaatttcccacttggaaatctcagcttgatcatttctttgcagatggtaaggtaaagctatcctatggcggactccatatcttgctagcaatgcctcaaactgtttattacaaaaattactcccttcatcgctgatgatttctcggggagttccaaattgagtgaagatgtatttttgaaggaaagacaagactgttttaccgtcatcagcatgtgttgcagctgcttccacccactttgataagtagtccatagcccacatgatatagagattgttaaaggaggatggaaatggtcccatgaaatctataccccatacatcaaacaactgtacctccaaaataccaataaaaggcatttcgtttctccttgaaatgttccatgttccctgacaacgatcacatgccttcacaaagtcattagcatccttgaaaagagtaggccagtaaaacccgctttgaagaaccttgacagcagttcttgtgcctctaaaatgcccctacattgtaaggcatgaaagttgttcaaaatagaatatatctcctcttcacgcacgcatcttcttattacttgatcagcacagtgcttgtagaggattggctttttccagtagtagtgcttcacctctaaaaagaacttttttagttgttgacgagacatcttaggaggtgtaacatttgcagccaagaaattcacatagtctacgaaccaaagtaccatcaagctttcccttaaactaaagagttgctcatcacgaaactcttcatttatctgcacctcttttgcaatttgactctcttccaattcaagccttgacaagtgatcaacaactaggtttttagtccccttcttgtcttttatctcaatgtcgaactcttgaagaagaagtacccaccgaatcaatcttggctttgcatccctcttggtcatgaggtagtttattgcagaatgattcatatgaactatcaccttattcccaattagatttgtccaaaacttgtcacacgtgaacacaatagctagcatttctt

SEQ ID NO: 227198 - DNA, 3834 bp, Cannabis indica
gagtaatttgaaaaaatttagattttttttacttttgtccacaaagacgtggacaatagtcttgaattgatctctctcaaaaaaaaaaaaaactcttgaattgaattatttttagtataatgttttaaaaaagaagacgtgatagattgaattattgatttgcaaactatttgaatatttagaaacatcaaaagaaaggaagataggagatgttgcttgttgacgatatgtaaacaccagtaaaggaggtcaacaaagattggaaacaaatctaactagtagggttgtttatttatatcaaatcctttaaacaattggaattgcaactacaagtaatgaggtttagaattttgtgaggtataactgtggattaaatgtgatgttggaattgcatcaaagtataatatacttcttttgttttttttttaatcaaagaagaaagaaatttcattaatcacaaatcaaaacaaatttcaacaaatcagcagcctactagccgcacaccagcaggcaactagcagcagaacaaacacaaataaaactctctaattacataataaattatgtatgtgtagtctttcatccttcttcaatttgctattttaattgcttgtactctatagtgcactgtacacttaatctcatcaactatatgtaaacgggactttgagtatccctccaacttgcactgattcctgttcagccaactattataacaaacttttgccaaaataaccacattcaatctctgaatagtccctgaatttttcaaattcagccaattgttccaactcgagaagtgcaaaggccaagctttccaaccaatccacttaaaaacctgctcggttaccttttgtgacagtaagcaagagaaaaataaatgttcatgggactcgtttgcatagccacaaacagggcaaaaaaccgattccaaaggcagatgaaacttcagcaagtgttcacgacttgcaaaagaaaaaatctatgcttaggcacgtttaaggagctccaaacaaccctatagtaggacactttcttctgaataagcgtgctgttatagagaacaatagtattgaacttgccctttcctcctgcagcaataattttcctcttgctgaacctttgtctcaagcggcttaacttgtgccaatagcagctcgggtccggtttgagattgtaggaccaaaaagaagtgtcgtttagataaatgaaattaatctattttatccaaagcaaatcctttttttttttttttttttttttttgtgatggcctaaataaattttgctagaatgacttgattccatttgacaccctccttgaaaccaattccaccatatgccttcggtaagcagactttttctcaagaagcaatatgtaatttacttctaaccccattggttcctcataagaaatctctgcacaatcttttaacctccttcgtgatactatgaggaaggatgaagatactcatccaatagttgtggacgaagatactcatccaatagctgtgcagcctaaacaatacagagtgaatcaactaaatcctccccgcataagacaaatgcctgcttgtccatgaatagagatgctgctaattttttttaataatgatgccacagtcttcaactttccacttagttggtctaagcggaactcctaagtaacgaagcggatatgatccctctattaatttcaaatctctaaggatagttgctttttcaaaatcttggactcccccaaaatagatttgggatttcccttcgctaatatgcaacactaaggtattgccaaactcatcctatatgtctttaagaacaagcattgaactccttattcctttgctaaacaaaattagatcatctgcaaaataaagattaacaaaacacaaacgtttgcatagatgatggtatttataatttgtacccaaggtagccatttggagtcttctcatgaggtatttcattactaatacaaagaggagatgtgatagtgggtcaccttgcctcaagcctttcttaccttcaaaggacccttgcagttgcaccccttccattcatacatatgaagtagttgatagatctaacacatttcataattgtaataccctaaggtttaataatatacacaggagtgcctaccgttttctttaggagttaaaatggtcatggtctttagacaataatgcaagtttttggcacaaattgtggaatttgaaaattcccccaaaagctgaaactttctgtggcgtgccatttctaattgccttcctactcgactcaactacgagctaagcatgtggagcttgttaatgtgtgcccaatgtgtaatgcctctgttgaatctaattttcgtgttcttattggctgcacttttgcgagatcttgctagcttcgatcttcagtttctttaggtactgttacttcaagttttggagattggtgggccaatttgatgccgcattcaagtactggtgtgattgaagaagttgctgtggttgctttaggaatttggagtgcacgcaatgagaaggtttggaatgacaaatcatctaatgcagcaacagtggtgttatctgctagaatttcacttgaacaatggaaacttgctcaatcaaaatggcatgatgccttgcttgttgcgcctgcaacaataagagatgagcattggaaaaaaccagcaacaaaccaggtgaaaatcaatgtggatggggctctctttgctgtagagggtcgttttggggtgggttggttgctcgagacagcaatgggaaggtcttggaggtgttttctcgtggcagggctggtagagttaatccattcattgctgaaatcttgggtgtcgaggatgcattaagtagtgttgataggaataagtggtcaaatgttgctataaaaactgatagtcttgtgtgtgttcaagctctttattgtaatgtttctatgccttttgagtttggccttttggttcaagattgtagagctcttttgctcaactgtcaaaacgttgttgttttttttgttcagcgatctgcaaataaagttgcccatgctattgctagggggtcttgtttctcgccagatcgagttatccgggagttagatttcactcctgagtttatttccattgtattagaagattgtgtttgttaaagtttaccttttataaaaaaaaaaatatttttcataattaatttaagcattaactaaataaatttatgaaaaatatagaaatgattgaatattaaatataactattcaaaaatagtttatagtccttaacaaggcaataattaactttcaatttactgaacaacctaagtatttttcataattaaatttataaataacacaaataattcatgaaaaatacaaaattgaccaaaaatctaatctttcaattttttaaattttataactcataacaaatcatattaaataaacttagatttttataaataatctaaatatttttcataattaattgaaaaaataaactaaataattcatgataatgttaaataaatttaaaaaattatcaaacttcaccaagcaccttagaataaaatagaaatcgaaatatataaaatatttgaaaaaaacacctcattactcccagaatgtggccgccagagtttacatcagttttgccgccggcaaagtgtaactttgttcccgattgttcttagcgcatccttttaattggagaagcttttcacaatacttaggacctcaaaacgatcaagaagaacctaagaaaaagatcctcaaattggcatatcagagttgtctcctttgttggcggtgtaccgtcgttaatggagtcaaaattttg

SEQ ID NO: 227199 - DNA, 2883 bp, Cannabis indica
tgtttggaaagatggatcgaaaatagtaaggataggttgtatataaggtgcggaaaagtgaaaggaatggatggatttgatgtatacttagagttgtttgttatagtaggagggaaagaaagaactatttttttattgtttttttaagaaaaacaatatttaaaactgaattaacaaatttgtgtcatcaatccactccacccatatgtagagggattgtttttggtgggcccaaagggttggcaatccatagtcatttccttcctttgtctctcttcctttctaccaaacaaataaaactaaagacgaattattccattccacacacccctaacctaatccatccctccttcaatcgaccctaccaaacaaagggttaatcatcagtacctttctgcaaacatcagttccagataagtcgtctctaggatctggctcagtgtaacctgcctgctttgcttcagccacaacctcgctgaaagtacgttcaccaaccaaattgttgaagatgtaacttagagtcccactgcgacaatcaaagagacgagaatatgtcacacaaagtttatatgctttgaattgtggaagtcaggaattcaaaaggaaattgtgtatgtctaagcattcaacacctgaaaatgccctcaatccgcaatattttatctccagtctcaagaagacctcgtaatgtgctaataattgggagaccagctccaactgttgcttcatagaagtaatgagtgtaggattgccgttgaagggctctcaacttcaaatactagttgtgggaattaaaaacaaaataaactcacaaagagtgattaacaaacattttgtgagaaaaatatctacttaagagaatatacgttcaattttctacatcttttgacaagaacaattatctttcttcttataattgaacataaatgcctttaaacatttacctgatctagtggtcccgagtttgcctttttgttgggggtgactacatgaattcctttccgcaaccactcatggtaatagcctgcaatagtagtgtcagccgtacagtctaccaaaaccgtattgggaatgaaatgattcccttgtacgtggcggacaaatttgtccatgtctgcaacttctcctttctgcttttgaagttctctccatctggataagttaatgcccctgtaaaatggagatagtggtagaacatgaggaacaattacattcgtatattgaaaactgacaacttatattgagaacttagtgagtgtgtattttccaacaaaagaaaagaaaggaaacatgtcctgtttaataagcttgcagagaattttagagctataaaaaattcattgaaactctcaacttacgaatcactcaaaagcatagttcgtgtgccagtgatacccataacacgtaaatcaatgttaaattcttccttcagtgttgctgcctgcaataaataagaagaataagaatacaatagaacacatttaaacttcactactttggaacacttgatcattgaaaacggtaatgaaatacaaaagacctatctaaagaaagcacctggtcccttagttgatcaagtaaggtggcaccaattaatccaggaccaacaattcccattgctatagtggttcgtgatagataaaatctagagtgaacagctcttagggctcgtatacagtcttctcgctttaccacaacagtaatattgtactcagagcaaccttgagctatagcacgaacattgatatttgcctgcaatcaaacacaaagttggatcaaattgtctagtctagggaagtaaatgataaccaaacatattcatttcaaattgagatcggcatgatgttttctaaactaacaagttacaacttttacttatatgtcaaacatcccatttggaaagaatttttcacactagctttcaaaagtcacactttctaaccttggccagtgcattgaaaagagtagcactaacaccaggagtacttgccatcttctggccaacagtagccaaaatgctacagtttgggataacagcaacctgagaggataggttaaaagcatgaaaaaattgtcacaaaataataagatgtgttttgctaatattcagaaatatctactaaagaagataaccaaacatgctctgtaatttaatattatatttcctatttctaagtaggcttcctcaaatcaagggttagatttttagtcggtgctattttctctctacactctaccaaaaacgaaaaaacaaaaaaaaaaagaagtgttgtagaatggcctatctataggtgtgtaattggaatacaagataccaaagcctgtcaaagatcaattattataaatttataatatctttttccacattgtatcaaagcaatctttatctaagccatagcagtgaccattccaccagactaatctttattattattagtaatatcaacgcttaaagacagtggaaggctgttcaagagattttcattccataatgccaaactttatgtccttcattgtgataatggaaatgaatattgttaaaaaaaaggaaatgaatattttaatcatatctttggagaatttctagtggcattattcacaaaagttccttgtcattgcactccccatagccgaatggaaaaattggcaccttgaattgaagtagcccaagcccttctgtttatacttatgttcccaagcaaatttaggaagaagtatccaaactgcgacatatcttattaatcaaatgtcctcacaagtattaaaccactacctctcttcttcattttcatactcaaacccatcttctctaaaagttaccactcaaaattaggggtgttcacacaatactcaatccaaactaatttgcacgatccaattcaa

SEQ ID NO: 227200 - DNA, 2967 bp, Cannabis indica
gagagagagagagagagtgaaaagctaattcaagaagataatggcgaagttcgacccgtggccaatatttttcaggcgagaatggaagaggaactggcccttccttgtggggtttgccgtaaccggaacaatcatcaccaagttctctcttggtctcactggtaagtcttttcccccaagttgccacatctgattcttaattgttgaaatttcaaaacccaaatacgattctgtttctgacctatttttgcaattgatgatcaccagaggaagatgccaagaattcgccttttgttcagaggcacaagaggtatttccctaattttgtaaaccctagatcttaaattccagattttatttgtgcgcttagtttctaccttaagagttaatcgatgagatatcttatgtaataaccgcagtttctgctatttttctcttttgggcatggtagatacggttatgcttgttttataggaattaatatagacttgaagagtactgtattcaagccttttttccattaatcagttgactttagctatcaaaggtacgaattttaggttgcgttttcttatgtttaaggaagatagtgaacacaagaatcagtggggattttatagtacaccacctatcttttattgcatactgatgcctagattcatggctcgttatgttcttgaatcatgaatacaacccaattcgactaagtaaccaaagttttagtggcccaggatgatttcatacgatgatttcgtagcaaaaaacgccttggtattgcctacggtgtacatcgttgtatctagattctagacaccatcattgacttttagctggtatggtgagttgtgtatgtattcatttgttgtatctagtttctagacaccatcattcacttttagctggtatggtgagttgtgtatgtattcatttgttgtatgtttaggctttgatgttaagatgcagagagtctgataagctatgttgctattgctagtgagagatttataaagaacttgtatacacaatcaaaaatcaaaaacatgcttatctatgggttttaggctcagcctaagtggtaccacatttctccttttatagagatctttgggttcaattcctcacccttaccctacccgcacctcctaccattatattatgcataatgacgatgtaagaataatagtagtagaaaaagaatgcctaattatcatcttgcgtggagtagtactagtagcaatgttttttttctgacatatctagtaacaatattaacattgatactaaagggaaaaatccatctttttgttttcttcgaatatttcatgtatgatttaatcatataataatatttttccaattagtatctctggaaatgagaattattctacaaatgttcattattcatcagttgtgctgtgcatattgtttttgatggtggctataagtagtattcagcaagtaacaagtattttacttttggtaggtgatttctgcatgccagtaccagtgccatccttgtctagtgtggatggagcgtttactgcttttgttttgatgaactacaataacagaaagagggattttctttaaactattttttcttttattattatgcattgtttgactgaataacatatataagaaagacttaagttcatttctatgagtttttttttcttttttggttatggctatccaatacttcaacttgtgcttttggaatctgttctcagttcttacttgcaaagggaaatcaaaagttagaaaaattctataaggcacctcttaaaaaggatgtaccaatgcgttcctaactgttttggtatttgaaataattttttagctaatttttttttttcattgtcacttatagttattttaagtattttgcaaaattttgaaaaattaaaaaaaaaatttaaaaagtgattattttatttatacgtttgtaaaatagattatttgaacacttcttttatattgtaaattattttgaattttttaaaattttgtaagatgttttaaataattataatgtacacaaatataaaaaagaaattagactgaaaacttttattgaatgttgaaattagggttgttatccgattcaatatgcacttttttagtcaaacaatatttaatctgcattaagtgtggatttcatattttggatttaatcctatccgcataacagtttaaatccaatacaatctacaatagtgcggattggatcggttgttttagtgcggattgcattttaatattattaaaaaaaaaaaaaaaaaagtaacataactaaaatttaacaaacaattctttcttaatctctgacaacacattacactttcataagttaacaagtaaaaaaaaaaaaacaatgttccatctgtttagatacttttgcacattcatctctctttattatctacatacacaacaaaccaaatatatgtaactatacactatatatatatactcatcattttcttatttgagcggccacaaataaccatattattacaacccacaaaataaaaattaaactttagaatttatattaatggttacatacaaaaaataaatttacctaattttgttgttcgatccaaacaatatataaaacgataaaaaaaaaacaactacttaatgataaagaagtagaaaacaataggatcgaggcctaaagccaatacaaaagacatatgagtgatttcccacattataccttgtgtcaatggctgagtaggagtaaaatagggtcccgtcgactgaagaggtgagtcaaatagacagttagagtcgactaaagatccgaacttatcggcgagggcggcgagtggtagtcagtcgtcgactggagagatggattggtcggtgtcgtggaagagcagtagagattgactgagatgaactaaagacatgaggagaaaagttttaggtttaggttttagtcttcactcttgtctt

SEQ ID NO: 227201 - DNA, 6088 bp, Cannabis indica
attttcccaagatgccacatcatcaacacccttcaaggtatgtgtaggtgtgccctttgtggacagttggattgggagatcttaggcattcttcggccacaagtctgcatcccaatgaatgggaaatatttaaccccctcaaatacgaatcaatcctacatcacttccttcccattttctattttctcatttttcattctttccttctctgaatatttcaagttcgagaatcctctcaaaagttttgaatttctaattttcagagacgttatcacgaaggctaaagaactttttagagtgaactttgaatcctggaaaaggatttctcgtacagaaggttagtaatttctttctcttttgtaaattcgcttttttgaatgtttgcatgccttttttaggggtagaagaatgttgcatgagattaataaggcttattgagggaatcaaaatttaggataaataaggaaaaatatggaactttctctggaaaattcttgcctaaaatttgaatactcgcaggtttcatgacaaactttgaatattcgcatctccatggtagaactttttgcatactcgcatatttaggttcattcgccttcaagtcaaaatttggtagtggttgggggtttcacagtgatttaatgcttatttctctgggtaacccttaggtcattgtgaaacccccaaccactctattcttccttggagttggttatcttttatgcatatgcattttctattaagtcgcaattaggactaacttggtcttgaagtggttggggcgcctcagcagcctaatgttcatgtagttacatgacccttaagatactgcgacacatccaaccacttgtggaggtccaaatgttagttctattacatttcttaaaatttttgttactcgggtgaggacaccttttgttataaatcacactagtaccatactgaaaagatcttttatcttttagatgagcaatttattagaaaaccaaaggtacgagtctgaatgcagggccttcacaaataaaaaagaaatgatagcttcattcctacattgatatcgaaagacaaatttcctacaataggagctaagaaggctcgctatctactggtaatataggtcacatggtccaataactagatggaccacctatcaccatagaagtgcgaggaagcgaatcgatggtatcagcttaagggagttttattatccacaagtttctccaaacgttgaggtcaaggagatgggtgaagacttcgagctacttgcttgcggacttgaacgtgatgatggtgaggggatcaaaatggactcagtagataatgccccattggacgagccatgctcttacaaagacttagtctcgcatgttaaaaaatctgatttgacaacgtttgaaatattaaacttataaacactactaccacgaggcctatgtcgatgcatcgtcctcaccttcctttcataatttttgtgatgattcctacccaaatcgtggtggttttgattctcatcattctctatggcgtcactctaccctttctctcctttgtaaaggcaatcttgacgcactatgatgtctttccattctagcttacgccaaatactatcgcataatccttgggttttatgcgatgtatatggaatacacgaaaggagaacccgctgtcaaggattttagttttttatgacataaaaaatattggccacgacaattgcttttactacttcagtaaatgggccaattctgaggttaatagggtataagggactgtttccaatatggggcattggaaatcaaagtggttttatgcattcaaaatgccaggaattagaatagacttcaatcatcgacctcgtatgttgcatttctttatacttaattcaatttattatttacttttcataaatgttaacacttatctatactcccaggtagaccgactcaatcaattttggctagagatcgtgtagaaattgttgaggttctgagtagtcttccaatccaggatcgcaattggcgtcttttgtgtacttctacaaaactacaagaacacaaattaattctatctgacgccaaatttcagcgacaactagtttataaggaaccttcgaagaagcaaaaagaaaaaattgacaagcgtctttccaagtaaactctgagacaagtatcaagtgatgcatcttcacatatgctgataatgtctgcggttgtttgcaattttttaatgcttttaacttttttccaaatatgacattcttgaagaaagccctaatctttaaccacaagccaaaggcgaacactacaactccttctacctcaacactgccacaaaagagaaagagaaacattgtcaaatactccaatgattgacttatcaaagaaacataagaaaacagaccaaggcaaagggaaaaaggtcatgatggatcttgcgaccaaggctcctgacttcatgtctttacaaaagaagttcgtgagcgatggcttcatcacaaaaattgataggaatcctaccgaagaccttttgtctcgttcactttatctcatgactcaattggtgactgtatactcgcgggccattgcagtaaactttaaagatcttgatcttctgaagaaataaaatgtcgctattcaagaaggtttgaagaaaattaaactagagggagctaccaaggacaaatagattgaggatttaggcaaggctaagaactaggctgaagagaaagtcaagaaactagaggagcaaattggaaaccttactcgcggccttaggaaagaacgagatgagaagaaaaaggcttatgactaggcagtgactgattacatctacactaccctgaccaaattgccagactatgactttgttgtttttgtccagatgcgactgagatggtgaatgctttttgcaccatgtctcctactgagactcaagtcctaggcgacaatcttttccctgaggaagctgagactgcagctaatgctgaagtcgtagatggctctgagaaggttgcaaaggatcttaatgcccatactccttagtttctttttattaaaactctttttgagcggtacatgggtaatcacgttttgtacttagtttttaagacaagtatgctttgtacttttaatatttacttatttgaacaatatatcctttgaggataacttttcaaaatttctaagtattttcatactctcgatttgtgcttcttatgcatttatagatgcaatttggtgcttttgaaatgcatattttttagtccctattttctttaagtgacttttctacacagcttggtgtgatgcgatttatgagcaccatggtgtttatattttctaagtatataactgcaaagactataaaaaattcaaaaatttaacgattcattgaataattagtagtacaatctttattgaaagaagcagtggtatatatacatatgtatcccccctatacttaggtaatttttataaaaaattggctaagtatatatgtgcgggtaatactgataataaaacttcatatactcgctattcaaagctctatcaaagactgagtcgttgagatcagagagtcgatatgttgcgttccctatctttttagcgataaggtaggggccctcccagttgccaaaaactatgtgcacagaattgcaggtattgggcataacttttggtaataccaaatctcctactcgtagaattctttcttttactttagagttaaaataatgtgctgtacgctgttgataggctgcattttttatttgagctcgatcacgcctttcttctagcagatctaattgaagtagttgattcttctcattgtcttcaatgctaaaaacatctcgtcgcagtgacccagctcctacctcgacttgaaccatggcttcacacccataagaaagtgagcaggggataacattagttgttgaccaaggggttgtattataagaccacaagacttgcagtaattcttttggccaaacacattttcgctctttgaggttgcatttgatggtgtgtttaattattttattgactgcttcagtctgtccattgctttcgggatacgcgaccactaaaaaggccttttgtattcccaaatcatcgcacaatgtttgtatttctttgcaatcgatctgtttcccattatcagagattaacttataaagaatgccaaatctatagataattgctcaatacacaaactcgcataattttgcagctgttattgtcgctaaggattcagccccaaccaacttagtgaaataatctacagtgactactgcatattttactcctccattaccttttgctaattcaccaattaaatctatacacagagtgcaaaaggccatgggctgatgatagaatttaaattcttggaggtttgttcacatatgtggcaattcgccgacatttgtcgcacatttttgtgaagttaatcgcatctacacgtaaagttggccagtaatagtcttgctgcatgatttttagagccagagagtttccaccaatataattaccacatatgcctccgtgtacctctcaaaggatgtaatcgcattcttcaccattgacacatctcaaaagtggctgattgaacttctgcaatatagctttttgtcatagattacgtatccaacggttcaatataaaaatcttctagcttcaagtttatagtctggaagtttgccagttttcacgtaagtaataattggggtcatccaagtggtctgcccaataacatctatctacatgacttcttcccgatcaattgttgactgatcaagtatgtccacatgaaccacatcgagtaattttgcttctcgagttgaggccaatcgggctagggcatttgcatgaaagttaatagcacaaggtattatactaacaataattttttaaatttagacaataactcacaagtgtaagagaggtatctggccactctcctcgatccaaatattctccattaacttgacaaaccacgatttgagaatcgctaaaagctttgaggtacttgactttcatttcaagtgcaagttttagtctagcaattagggcttcgtactcagcctcattattagatgcgttgaatccaaatcttagagttgcgtggactttgaacctgttggggctgatcagcatgatacctccacttaagcctttactgtttgatgctctgtcaacatacaaggtccaaccaaagccttatggaatgtctgtatcaactcgttcttcagttatgacgaccacttgctcatttggaaattcaaggatgaaatcgacaagggcctgacctttaatgtcggatcgcagtttgtaccttatgtcaaattggcttaactcaattgaccattaattaagcagtcatccagatgtataaggcttggctaatacttggtgacgggtatagtttgttagtacctcaatggtgtgtgcttgaaaataaggttgcagcttttaagaagctactgttatacccaaattttggctaacaatcagaagttgacatatgtaccagagaaggaatatgaatcagcttagtaattacattatttaatacaattgaaaataacttgccttaggaattatggttgataaaaatattcaaactcgctaccacgtaggtagatgcgagatgagaataataactattaaccaaaaagattggcaagacaataagtctatctcgggaataaccgagtacataataaaagtaattcgagacgagtaaaccaagagttgtagctcattaacccacatacttgggtataagagtttgcagctcattgacccacatactcatgagtaaagaggttgcaattaattaactcacatatatgtatgtggagcgagtaactacattcatccatctcgctctttatacattaaagtaaccacctcgctaatacgatcataaaaaaaagaagactgcgaggagcattgtacccatacttagtattttttcttataaagacggtaaagaaggacaactcgtatttagcgaggaacaaccggcatagtcagcataactgtttaaggaatgataaaaggatggttgggtagttattaaatat

SEQ ID NO: 227202 - DNA, 3194 bp, Cannabis indica
aaaaaaaaaagaaatgataattgaatcgtatgaactaattactactactcagtgcttttataccaaacattataatgatgttattttcttgcccaaaaagctctcatggccaaaatcaaaacccaatccccacctttttttttatctatactaacaccaccacaagtcaagtgcactcaaaaaccaatttcacaagtagattttacacttttctactcttttcttcagaatgtttatcgaacaaatgtttcattacagcaggcctgtggctccaaatgggttgttattttgtgggtgtgaagcagggtttgcgggaaatgccccaaatcctgcatcgccgaaagggtttgacggacccattaacaaattttgctgttgtggcggttgtggttgcggttgttgttggtatgtaggttggtaagggccaaaggggttgggttggtgatgttgtgtcattgctgccatctgaactgaatgaggagcagcaatgttgttcgacatggcaaatggatcttgtgtctcgaatggattcggtgctggtgctccatatacgggttgctgagaagctcggtatgctccttcttcatacaaactgttcagagtgagtgagtccaatccaccaccctggaatttaagggaaagatataagttagtcttatctttgatcttcggaaaaggcctccatttagtaaagtctgaagatggcttttagaaaaatgatagaaagaataaatgagcattgtaaggacctaccaattgtctatcggtaggtgctgaaatgtcggtgcctggagtggttactaaagcgagttcccatccagtgggatcaaaatcttttgatacaacagtgccagaattgaatgtgggagcggaatctgcagacatgaaatgtctaactttaagtcaccacaatcaacgatgtggtaaaactggaagggaaacgtgaaacttactggcttcagatgttacaatggctagggccaatgcatttctgtcctcaattacagatacatcaggagcatcaaaccctaaaccctgagctcacaaaagagaaacttaaatgaggggaaggacataaaaacaagaataaagacagaataaagctgaagttgagtaatattaatttctgcactgagaacctaccagtaaatctccagtgtctgtgttgctttgaggaggaggtggtggaggtggagttggtgctgctgcagtctcgacatcagacacaatatctgaaggtggtggtgcaggttcatcgcttggtaattggttttcttcggaagaaccttcgtctggtttgtatgttaactgaagctgttcagagtaaccatatacaccaattacttaatttattctttctataagtggtaatagcttggtggagtaaaagaaaaactgaaaattaaacaaatacaaaacataactactcggaaagttagaagagatactaaccaatggctcagttggaacactgaccacacgaggtgcctccctaatatactcttccatcgtattaagaaaggattgtggaggctggataagcatagacataatgttgagtttccatatttagataattgccaaaaaaattaataataatacaaaacaaattgaaatattagttatagcaatacctctctcaaaacagggaactggaaattcctagcaagctcaagtcctttgcaaacttcataaaaatctgagaggttggaagcctgcagcaaaggtaatggtaatacaactgctattattattcctcttcttttaaataagaaagggccgaaaagaatattgattccaactcacctgctggccagctcgcttatagatatcaagggccttgacagcttcatgtcttggcatctcaaaaaactgcaattggaacaatcacagattactttcagcaaaaataaaagtttgttggaatccaatacccccttctcaattaacaaagtgcattaccttatcaacaagattaattattccatcatttacagcacaataaattttaaagctctctttaagcacctgaaaagttcacaagattaacaaagcgagtgatgaagtcaatacgttttcattgtctgatgctatgagtatcattaaaacacaaccagagaaaagaacaaaaaaattaatcaaaaccgatattatcactacgtgtaagaaaaagtttagatttgtcaatttaaaaactaaagctgtagacccaaaaccaatatcaacatagaaattgaaccaaaaaggagaagcgataaataccagagcaagggcatattgtataacataattgtgaacagctgctccttcaggctgcagagtcataaatgaaacatcagcaaattttgcacaagtaataataaattacaaaccattaaaaaatagataataaatctatacggcaatcaggtataaaatgattatccaagggttccaaatgttttacccggcaaccaataagacgatagagcagctgctgcaacgctggcaattgctccaacagttcttcactgtccaactctctggtcctgccatatccctgctaatgaaatgaaagagaaataagattaaatcctcagttcagttcagttactcagacctattttgaaatataacacacaccaactctagaagtcacgataaattttaaaatgcattgttcatcactgtatctgatacctgcctgacaatgaaaactaaaatagtatggtaaattacaataaaaagcaggctccatataatacaaaactagtagctatcaatcattttctcataaaagctcccaatgtctacaggaactcttccataatcctaaagataatgctttaggttcaagctacatggaggaaaaaaaatactctacatgtgaacctaaagacaattcttgtaactctcaaacaaaataaaaatacacgtcaaattcacctttttgtaaggtaaaatgcaaaatctcacagcagtaacccatccaaattatggttaaataatcttttctatctttatgtgacacaatcttgggcctgctttccaataaatcatagcctagttcttccttttatcattgcatcacttcaccacccataaacctcacacataagaacaatttgctcccaattcttgatagcatgcaatgcaccacaaaactcccaacaactgatgccactaaaaccatcaaatcgctagagtttatttgc

SEQ ID NO: 227203 - DNA, 4925 bp, Cannabis indica
aaaagaaaagaacaattaaaaaacttaaataataatattattaatttatataaactactgaagtaatttatattttaaaatttatttttaacttatgatctgcgacaaacacataaaattttaccaacgttgatacaaaaaatatatacaattaaaaaattattaaaattataatattacgtattcataaacttatataatcaataaatatatacagttaaaaaattattaaaattataatattacgtattcataaactaataataaaatacactataaattttaaaatataaaagtgtaagggggctagaattctctctagccattatatgagtcagctagtgtttacactctttttgtttcttaataatatatatgaataaagtatattttgaatatttttttcaaagaaatattataaaattatatgaatacttaaaaataaaaataaaacattaatataattgttgactgtaactttagccaattgacgcgaagtctgattaggatcaaattttgcttatggctatcaggggcaaaatgataataaatataaagacacaagaattcatagaggttcgatctctttgatcatgtaatgacttacttcccatttagttgtgttcactcttgagataataccaaccaaattataggttgagttttgataatttctagatatgactctctttagtattataataatgagaatgcgtgttacaggtgagaagtatgaaaaaagtattcggctatgagagaatgcaagaactctaaatatttagaatcttagtgtatggtgattgcatgtgaaggtgtccctttcacgtagggttaagaccctttatatagtgttagggtttacaaagttgttatttgaaatacataaaagatcaaaatatccctaaagaatagggatgttatttgttgatgaagaatcccttaaattgtagatagtttgaactgttccgaagtcgtaggagtgttgaggacgctttggaaggcttgtgggaaaaaacacaagtgttggagcatgacatgtatcttggccgaccaaccatatttaggggttgcccgatgcatgaggctgtctcccctagccggccggctaaaggtccggctaggatcttgccagtgcttgtatatctctatctttgtaagtgactctgatatcaggatgaacttgcttcagaaccttgaagatgtggatcttgtaagtctccatgttgttcttgtttatatctaccgtgcaaccatgtgatcttaaacgatggaaggttccacgacactaacctggccgattagtgttgtcctgtctctaacgtattttttttgctctttaccgcgtggaggtgccacatcagttggacaaaaattgggataaaatttgcccccaagtccctgtctaaacgtctatttgggtagtgactttaaaatctgtctggtattgtgatgccttttatcgtgcaaattcgcatggccaaatataagtctcttcaactggcgtgattttatgacagtgaccagtttttatgtcgatcaatgtgggaaatcgtgtgatggctgcacactttctcatgttgaaactcttggcattctctttcccatgcatgcctatttttgtgacattaactccaaattaagttttttcgggaaaataattttccagaaactatataagtgtctcatttttttttataatctctcacttctcatttatttttcaagatttcctttttgaacaaaaaaaatctctcaagaacttcatagaaaccgaagccttgcgagcttgagttcttcgtggaatttaactttctcgaaacctacactcgtcgtgcggactaggacaatcttgcctgcatctttttagttggtaagttattgttgagtttcaagctttttaaacttcttgattttcatactttagagtaggctttatgcactgtgatccgttcaatagctttaggatacataacgtatcactctttcatgaaaaagattgaatcttgcgctttgttttgagatattgaccttcagggtttgaagaacacgaagaatgtaactttgaattaagaaaattagatttttgatccgttagggaccctgcccagcactttgggtctgttagagaccatgctcagttcttgatcccatccaaattataacacccttctagtttaggtcgtgttacaatacttttctataatactgtgcaacctttgcaaatcaaaaaatttatcaaaagaagtgataaaatttaaactttaataaataaacataatatgcattacatttataaaattcaggattcgtatctacatttttcaactgtacataatcaaaagatgttgcacagcgactacaaaattgtcagccctaactatctcgaagatctaatactctaggtcgaactatctcgatatgtataatcttcatccagctccaaactcactatcttcaacaatagctttgcctttacctgtacataatatagcatatgtgagtcgacagacttaataagaaaaacataaaatataaacatataaccaacttacggctaagtactcatacacctatcaacaagtcataaaccatgtcaaacacgtataactgagtcttgaatgttcttgaccatagtatgattgatcataataccatatacactcaatactctagtcgtactagtgttggtagcatcaatccatactataagtacaactagccataatattacatgcactcagtactctagcatactagtgttggtagcaatagttcatacttttagaagtatacccaatcataataccacatgaactcagttctggtgtactagtgttgatagcattggttcatactttctaaattgccaaacatatatattcacgatatcaagatgcaatcatatatacaccaactattattctaactgatatgtcatacatctagcaaacataaacatgtacatatatatatgtgtgtgtgggttatactagccttaccttaattatgattttaggtgtggcagtcaacccgagtagaaatagccactgacacaacttacaaggaagaaccataagtatgaatgggcagatacttgtgaaaagagccttcaagaactaaaacaacgattaatttcagcaccaattcttactattccaaccggatcaggagggttcactactacaaaataaacttctaacaacacttttttttaactaaaaaaaattaaaaggcaacacttataaaagtgttgtctcctagactgttgctaaaaatctagtatataagacaacacttatataagtgttgccttatgataatatttaatgctttaaaaataattaattgtaacactacttttaaaagtgttgcttaatctttttccattatataatatttgggaacatttttattaagaatgttaccatacttaactttttaaaacttatttatagcaacatttttattttaagtgttgctttatcaatttttctagttagacaactagcaacacttatatgactagtgttgttatatgagtatattcttattatcaataaataccataataaataattaaccaaatgccacaaagtcgtaagaaagaaaaaaaaaaaaaacgtaaacctacattaatttaaaatttacaaactcaagagttagtacaaataacaattacaaatctgtttaaagaaaattaattacaacaatatagttcaaagtatgcacatataaattttaaactttaactccctaaattttaaaattgttcaaaatgtgttgcccactcacatcgaaccacatttagttaatcctttgagtaaaattcctgattattacactataaaaaaaaactataagtattaagagatttaatatattataaatacatgagatttcacatacttagaatcataaaatttttaatctcttaaataaaataaaaaatatacctttgattttatataactacttggttgaggttcaaacacaagatctctcatcatggcgcaaacgtaaaagccacatgtttttgaatcttgttgttgaggacactacataaatatcaaataataaatagaaatcgttagatattattaagttaataataaacttaaataaaaaaataaagtatgcaaattttaccttaacattataccattgtaatgaatcttgtttcattcttttgccctttgctaagttatgcaactgaaatgcactatatcaaataataaaagttaaatgaatattaatttaattattatgatgataaattcaaaatttataatttatatacttacattcctacaacattcttacaatcttgaggaatgtagcctccaaggggatcaaaaaagtatactatctctttagatacgtcaatcaacaagaacatccaatgtctcctaagtataaaacatttagtttataaaaaaaaaataaaattatatagttacattaattgatatatatataagtttagaatatatttccttacccatcattaaaggctgccatgagtagttgtcctggtataatttctccaagtctttttgcaagatctctagctctatcatcaggtgttctccctagtattgcagctaaaagttgaggctcaaaaaatgtaaataaatgcattctttcattctccacaagtattgtatacaaaaacctacatgtacatgatttacaattatcacaagcttttaaaaatataaaataagaaagaaaatagttattatattgtaaagtacgtacctcatatatagtgatatgcaagcagctgtgattttttcaaaatataccataaactgaacatcttctttaatcactgctatgctatgctctttaataccaaacatgtgttcgttcacaggcacactaatcataaatgattcagattttttcataatatcattccacat

SEQ ID NO: 227204 - DNA, 4059 bp, Cannabis indica
tgattcagttgcctccgtagttctgcataacaaacaattagctacaaacattaaaaaaattgtctgtttttcatctcaaggattataatagcatctcgggttctttcctaatttggcaacgaatgagcaaaaatacttcaaattctttctacaaactctttggtcttatgtacaagacagtgtaagattcatcagcatattaaatgaatgaatgaataaaattcattaccactaagattagagctgatctctctaaaaacctgcggcatagcatattcgttgcttggcgttacatctggggttgacagagggctaagatgatcaactggcctccataactcttcttgagcactactgctgcacaccgatgcaggactaggaggaacttcagtaaaattctcctacaaaggcataagactattagatacttttcaaagatgaaaccagcagttcaaaaccatatgtaaaagaaaaataagtagatgaaaatacctttacatgtctctcatcaaagttagaaactacagttggaccactcatgatatctttcagaggataccgttcgaaaacatgtgattccaacactgattgaatcttcttaccaaacagtctccctctaagagaaaaactatatctgaaattggaaactttttctttgaagctaaatctctcccttttccgcttcttcaagtccacaggaaaattttctgtagcttcaagcttccgcctgatttgggcacctgttagaatatggcggtcctccaggagaagtttcccgaaagaagttcctgataccggggctgataatgatctaactagatttctaggggacaactccttatggagaggtctgtcatctcctacaccatatctgaaggatctggtttgcattttttgtacatcttttgaagtatcattgtctaagtctaacacactgtaagatctagagtggccaccaacaactgtgtgcatatttgtttctttgttcaaaacattctttagcctctctgacacgaatctcctagtatctctactgatgaactctgaagaattcggtccatttaactggatttcacttttatatgatcttgttgattctgaacgtgtcaagtttgcaccaatatccttattcacactgtctctaacctggtttgctatgttcttagcaatttgtttaggatctgatgatggcttttcattataaggagtctcgattccacttcctcgaacaacaactgaaccaccctttctcagcattttcccttgcatttcacatttcagtcgttctttcacctcctcaagaaagtcttctatgctacctctctgctccgaaaagctcggggagcttgtccaagactctgtatggtcacccaccctatcagggccaggctttaatataactatcttagttggagcagacaatgcatatagtttctgatcagtatccatcatagaagattgctcaatatatctgcttgagtttctggtttttgatgatgaatatttcctttcaacctggaaagattccatttcattatgttgcaggcctcctatttcctgtgcccttgcttttattgtctgatcctttgattttacagctttctcaacagctgttcgcccataaagttccgtcctttccttgttcagatcttcatgagcaagtgatgactgtgaagggatgtttccaagctcagcaaattttgaacactctctgaacctagctgcttgccatgcttcaaattctttcttaaacttctgcaattcctcctcctgaggatgctctcgactcctccctttcccacacctcccgccattgctccatctttcagaatctatgtctccattatggtatgatgaattaagttccatttgccttgaagagtttgagttggaagaaagatggtctgttaaaccgaatccatttgcttccttgtttgaacactttgttctcatattctcgcttctttcctcagttggctcaactgtagattttgtatctaaagttaacgaatccattcccatcaggcgagcaactatgctaattggtgcattttgtcttgtacttgaatgtttggagatttcttcattaatcaatttcttcattgaagcttcaaatggatagcaattatttgtagaccaatcttcttccacctgaaagagaggccagagctattataagaaaaaaaaacagaaagcattgattcaagaccaattcaacttttctatgccagttcctaatctggaccgtgcaacaagaaataaaaaatttagaatcttttcctctcttttgtttttatcagtaccaataatcatattctcaatgaaaacaatcaaagattttcgctgatgtaagcttgacaacggagacaaagcctcccgaaagtatattcagacttgagaaatcccttttaaactacattgcctaaagacttggtataagccataaaaggttgtgtgctgaaaaagtaccggcaaatctcgtacagcagaataattctgagaagtttctattcgctgctcgatgctatttcgaggagcttcaagacctgcataatgcatatttagtaagctgattaacaggacaacttcctgagagtctcaaagagaaatgtaccaccatcacagtctaaaagggacatcatttgagtaagaacatagaaatctaatcctatgtttgctaattcaattaagaggtaatcatcaacatgctagtcttcttaacagttcagccaatcaaatctgtcacttggtacttccaaattaatctagaaaacaagggatcagtgtctttttttccatggttaaatctattagaacaccgaacaacataagaacttaccatcaacatgtttcttatgagtaagaactttccttgccatgctcctgttttcaaaggcaaaaaggtgcaacagacctcccatgcagcctgctgactgatctaccaaaaggctatcattccttagcccaaaaagaaaactaactatctacaaagtcaagtgctgcagtggatttttgactgcaaaaccagaagatgcccaaatatcacttaaactaaaaccagaagaaaaaccatctttattcatttgttaatacaagaattagtttatattgtcatcatggtcatattttcccagctcaattatcaatttcttaatcacacctcttgaaaactagaaccttatttgatatcaaaacaattatagaaaggcataaggatcattaaaacatatcacaaaattagatagaatctaagaaagacaaaatctttgcagaaacagaattgaacccaccaacccaatcaatctagcagagaattcttgtcatgtaaaagtgaaaaagaaagcaaaacaaagctattaaatttgaaatgattagaaagctttgaagatgtattataattaccacagtagagagaaaaagaccgttggggttggctccactaaagccaactagaacttctcttttatccaaaatcacagtacagagtcagaacccaaaataatgcctaacccccaaaacttcaattgaggcagagacaagagtcagagagattaaaaggttgaagcttgaaaataatgaagaacagcagagagagaaagagatatgattatgaagatgaagatgaagatgaagaccccaataaagaaatgaattcaaaagctgagaattttagcattgtacagttgggaccctactccttccttcccctccttccttccataagatgatatttagtcaattccaacattaaataatcaaactacaataatgtaaccaacacactcacacacatacacagctaaagctatgcccttttctttgtttttttttttcctttttacttgtaaacttccatctccatggccggacagtaccccagagaaaaggaatgctcttttttttcttttctttttattatttatttatttcacaaaaccatatttccgtacacccacgtaacacgttaagaacataactaatttatttaataataataataataataataataataaggtttgaaataaaagacactaatttatttaatagctataaata

SEQ ID NO: 227205 - DNA, 3318 bp, Cannabis indica
aatagtatttacccttttttttccttgttcttatgtaactattcgagagctattgtcaggattgattagtgttttgactataaagttttcggttttggacaaatttatgtaggtggtacttttgctttgtactcaatcttatgtaggcatgccaaagttggtttgcttccaaatgacacaagtgcaaatgaagttatgcaatatgaggaagaaaatccttttaaggccaaggttgaatcaagggcaagaagagccattgccaaacacaaaagtagccattatctcatgttgttcttggctttgttcggtgcatgcatggcgattggcgatggagttcttactccttctctttcgggtttgcaattccttatcatcttgtcctattattttgcactaggaacgttgcttttcctctctttatttagaataatctttctctttgtctatctatctatgtttccagtattatcagcttcaacaggtttcggaagatcaatgtcttcaatcacatgtaagataataatacccttctgttctaatgtccttttacacaacaatgtgttcttcagttcctaatttcgcttgtgttcttaccagtttcgtcttcagaacataaacaggagagagtctcgaaagcattgaaagaatgtgagttaataatctgtctttagctttgcgaaattcagatattccaatttttgaaaatcgaaattgtttcagatgtaccggttcctactgcgtgtgccatattggtctgccttttcatgctgcaacattatggaacacgaaaaattgggttcatatttgctccaattgtcatcatttggctcctatttatcagtggagttggtacttataacattatcagatggaacccgcatatcttctacgcgatatctccaacatacatgtacagattcgttgtggatgctcgtgctaaaggttggagatcgctcggtagcatcattctatgtgttgcaggttggtttaagactaagagtgttgttttaagctctgttatttcgtctcaaactataatggttcggttaatttttatgtcttttacaggatcagaagctatgtttgctggtcttggtcatttttcgaagaaatctatcaaagtactataactgtttaagaatatgatttccattctcaattagagaaaagcttggatttttagagtttgagataaacttatgaatgttttgttctacattgcagattactttcgtatgcttaatttacccggttctcgttttatcctatgccggtcaggcggcttacatttcgaaaaattacacggttgatggtttcaatcaccttagtgaatctgtccctagtaagtgatcttttacattattattattattagggagatatttgcggcataaatacttaagtaattcactaaaaatattggacattacaggacattttcgccatgtctttgtggtgttatccctattcgcttcggctgtaggaagccaagcaactataacggctagtttttcaatcataaaccagtgccttgctctcggttgtttcccgagggttaaagttatccatacatctgataaaatacacgggcaagtctacattcccgatatcaactggctactgatggttctcagtctctctgcgactctcggttttcatgacattgtcaaaattggcagtgcaacaggtacatctaatgttatttcaacactcttttaagattttgaattggtatttttgatccttttcgacttaatttgaatctcttttcgaacaggtttggctgtagtgtcgggtatgttagttacaacttgtttgatgtcattggtcattgctctgtattgggaaaataatttgatagaatctgtttgttttctaatattcttcgggtttgttgaggcgatgtatgtatcggcgtgcatgttgaatatgcacaagggagcttggtttttggttgtactttttttgttatcatttactgtcatgttgtcatggcattatggaactttgaagaagtatgagtttgatttagagaacaaggtgtctatagaatggcttaccgatcttagtcccggtcttggagtttctagagtacccggaattggctttatctacaccgatatagtgactggaattcctgcttttttctcacattttgtcacaaatcttcctgcgtttcatcaagtcttaatttttgtgtctttcaagtcgttacctgtgccttgtgttcacccgagtaagaggtaccttataggccgagttggacatagagactacaagatttaccgttgtgttgttaggtgcggttatcatgacaatagtagagactcagatgatttcgaggaggaaatcatccggacaataggggaattcatttccctcgaagaaaatgatttcgagtctttgacttctccagaaggaagaatgatagttgttggaaaaccgacatctgatgggaacgctctggttcctcgtattgattctcattcatttgttcccccagagtctcctccaatattcaccaacaacgaaaatcaaaggagtccaatcgcagaaacatctgtcgttaaaaagagaaagaaggttcggttcatgttgcccccgaatagtcctaaaatgagagtttgtgttagagaagagctacaagaactagttgatgcaagagagagtggaactgcatacttcttgggacaatctcacttgagagttcgaaatggttcgaactttctaaagcggtttttaatcatgacatacactttttgtgataaaaatagccgcgagccgccggttgctctcaacattcctcatgctgctcttgttgaggttggtatggtctataccatataaaataataataataacaataatataaattctctaaaaaataaagaccataattaattatgtatcaactttgtatgtatatatatgagagtaaagacagaagaagaatataggttgtagtttacacattacaatgttaaaataagtgatgttacttctaagttttaaatcaaaatcgagttttgcttctcattatatttgggtaaatagtgttatgagtatttaaattttaagtttgtaagcgacataagtattaaataattgtaaaattataattttttttcaatttcgtcagtacaaatttcattttaaatttattaaagaataaccgaaagtaactggtactacatgaatctatttagaaccaatgatctagaatttagatcttatatgtgttctatttaagacaataacagaaattatattgacgaaattatataaaaattacagttttaaaaaaattagatacttatg

SEQ ID NO: 227206 - DNA, 2904 bp, Cannabis indica
ctaaaattatatcagattactagaaaacaaatgcacattgttaatataggtagtatcaatcaatctatttaagtcatcttcatttgtgtagtcacatacctacacagtctcataatcatcacacttagtcttcccaatgcaatgtgggattgcacagctctcaatctttcctcttacggatcacgggattctgactgtcacattattatttttggtgtaagtatcgaatcctatataatttaatataataacttttaagaaatattgttaacaaatagcaagacgccacctgatggtgttaaacaccattagtactcaatgacaatgctctttttcaaacagttattaatattatactttgattatatactgtaaattattttaattttctcaaaattttatatgatatcttaaaaggaatgcactgatgtatccctatctgtgctttggtatccgaaataatttttttatcaaattttttctcatggttatgtacgttatagttatttaagatatcctacaaaattttaaaaaattcgaaaaaaaaaaattaacatgctgaaaataggattcaaacattgtattgcacatgtggctattttattttatacgcgtgtgaaatagacttattgaacattgcattctttattgtaaattattctgaatttctcaaaattttatatgatatcttagataattataacatacacgaatataaaaaataattacattaaaaataattttagatgccatatagtgtatttttttttaagtgtgctagaataactctattatatgtgtttgtgcaaaactctacaaaagtcctaatatttattaatttctttgaaaaataacatttttttttactttcctcaacaattgacactccaaaaaaatttactaatggatagatattcatatggagaaaaccacttcacaaaaatttattaacatctcaaaattataatatatattttcaccaaaactctttatcatagttttagtgtttgaaatttttgataggtgaaggagatggtattggctctttttagtgaatcaaatcttacactttcagatgaagtaattgaatcaattgtggaaaaggtcttatttctcttccattgtttttaattcaattattaattaattaatttgatgtaatttaaaaaattatatatttattaataatgattatttgatatattatttctaaataatttgtattttaatttaacagacaatgacagaagcagattcaaaaggtgatgggaaaattgataaagaagaatggaaagagtttgtatggaaacatccaaatctcattaagaacatgactcttccatatttaaggtgagaaatttttttgcaatactattttgtaaaataagtgtggcaaaataattttattaatatgcatatataatatgtatttaatttttttttaccttgtatgaaaagtcatgaacaagtattattaaaataagagtaaatattattttggactatgtattttgcaaaaattattaattggactttctattttctaaaataataaaatgaacattgtattttttaaaaatagtacaaatataaccatgaactgattttttgtcaaaaaaaaaaataataatttaatccaaagattttatgataaaattagttatattttttgtatttgttcatgttaaaaattatcttcaagttagttatgttaaaaaaaaaaattgtcgaaaaattgaactcatagtcttatttttactattataaaaaatactgagattattttatcatttaacaaaacaagagtgtttaatcattgacttttacaaaatacatagtctacaatattatttactcttaaaataatgctcattttgatgagtattttttaccaatttacacttttattaaaaaatgttttgataattatttgcaaacataccattttttgacactttaatattctaataggaagaatatttacaaaaagattaaaagaaatattctatttttaccatttttaccaattattcttttgatacctaatcactttctttttcttctttttatgacctttttccttaaaaaaaaaattaaacacttctttctatgaccattagagtctttaaaaaatagtaaatttcatacaaatgtgttttgtatagtatttaagaatgaataaatgactaactatacaacatattgaatcatatttctcatatattcatttttttttcttcatattttagggatatcacgatggcatttccaagttttgtgctaaacactcaagttaaggactcgaattgaagatcacaaatatatacttatacatacaagtcaatttaagttgtcgatgtgttatttttgtttctgaccttgattactaaagcataagtaaaaacttaaacaaagtgattaattaacatgttaaaagaactaaagtttttttagggaaattatttgtatactcatatgtatgatttgggatataaaatgtatttattatatgggatacatgtctactatgttaacctatactttattggatgtctttatatatcttctataaatttaggagccgtttggtatgcagattttatttcataagaataagtttaatgttattgtcatgtcccaaactccaatcattaataatatcatttaaattcgattaattactaaataattttgtaagatactaagaccttgaactaagccaagacgaacaccatacaaacaaaacactttctttgattgaaacttaaaggaaacttaactacgttgtattatttatcatgagacatgatataatactgcatggtttgaagagattgaaagaaataattttagaaatatattccttaccaataggagtgagtaggaaatgtaagtgtatgtttg

SEQ ID NO: 227207 - DNA, 6003 bp, Cannabis indica
aactaagcggtctttacactgaactatcatcaaagaatcagtttcaatgaattcagcagataagcaaaggccaattaaccatttcagagcttgatcaagagctaatgcctccatttcttcaggtttgaagcaccccttcataggttttaataacgcagcaataattcaaccactggagtctctcaaaacagcaccaattccactcattccaagagctttgttgcaggctgcatccgtgtttaactttaatttacccacaggaggagcaatccaaggtgaaactggtggaaccgtagatgaggcgaggcaggagctggagtggtagatggacatgcaagggaattggaattcattgctggtgcatgaacaacctggtatttggcaaggtaatctgttgcaaaagctaaaatagcagcaggctgtttggccaatttcccgtggaactcagcattgcgttcgaaccagatactccaacaacaaactaaaaaactttcaaactcaaaagatgacgtgttagctgagacataaagcaaaaaatcatctggtgcagatgtaacaaccactttgagatcaaaagttaggtgtgatagacgccacacttctttagctctggtgcagaagaaaagtgcctgatttatagtttctctatgagctttgcacaatggacaaaatggagtgtctgcaatgtgtttacggtttagttcagcagcaacaggtaaagcattacggaaaactttccacacaaagatgcaaagtttcaaaggaatcttcaatttccataattttgtccaccagttttcaagattatagctactgtttgtgtcatgaagatcagccacagattcagcaaattgatatcttgactttactgtgcctgtggtagtaccattccaaatgagtacatcctcagtgggaaaaatgctgagaggaatggacattatacgatcaatatcagcctgcccgaagttagctgaaagagccaccagatcccaagttctatcttgaccaatgagatctgcaacttggatagaaggatcagatcctatgaagcagtaaggagtgaaatctgtatgaccaggaagccatgagcccaatttgtaatttatttgtgtactagtacccactctccaatgcaggcccttcaccaatagtttccccaaacaatgcttcgccaagtcaaagaaggagaagcacctaaaccagctgtaagaaattgaccgtttaagaagtatcggtgatgcaaaacacggctgaggagagaattaggaaattccaaaaggcgccaagcttgtttatcaaggagagcttggttgaagtgtatgaaattctgaaagcctaaaccaccatgaatcttggctttacaaagagaattctaatttttccaatggatagcattgccagttgaagttgatccccaccaaaaattagccatcatactttgaatttgagtacataaagtagtaggcaaacagaagcaactcatagcatacgttgggatggcttgtaccacagctttcagaaggacttcctttccaaccaacagaaaacaattgctctttccaactactcagcaacttccaaattttatccgtaattccactaaacaattttgttttatcccgcccagcaaaagatggtaaaccaagatattcctcatgacaaggttgaattggcatattgagtagctgatggaaataattctgattcagatgtcttgtgtttggtgaaaaagagagcacacatttatccggattaatggcttgaccacttgctctatgatagatatcaagaactagtttaatagatatggccgattggtgagtggctcgacaaaagagtacactatcgtctgcaaaaaagagatgagacaccgagggagcagatctggaaactctcaacccatgtagagacccactattctcctcagattagagcagcctggataaaccttcagcacaaatgaggaaaaggtatggggagagtgggtcaccttgccgtatacctcgagtaggaaccaaatctccaagcactttcccatttagaagaaaggaatatgatactgattgcaagcagcgaaagataaggcttacaatggtgtttccaaaccccatttacaacatgacttgagcaagatatggccactccacacggtcaaaggcttttgacatatccaatttaattgcagcatatccttgtgtgcctcgtttacgattctttaaagagtgtagcaactcaaatgcaacaaggacattatcagttatcaacctttgggacataaaagcactttgaaattctaatataaccattggtaaaaaaggctgaatccttagcacaacagactttgaaaccagtttatacaagacagtacacaaactgatcggtcgatactgtgtgataagctgaggctttttgacctttggaataagtgtgatgatggttttgttgaggatagtgggatccgcaccattgttaagaatgtccagtattgattccgtgacaagagagccaacaatgtgtcagtagttagtgtaaaacatgacggacataccatcataaccggggctcttatcatcactcatagagttcaaagcattgagaacttcttctgccgtaaagggtgctgagatgatatccctggagtgttcatcaattgttgttgggatagcatccaggatagtattaatggcttgatcatcaaccccttgactgttgaaaatggattgaaaataggtggaaataatctcaagcaaggcaggagaactggtttgtgtgttaccggctgcatcttttaacttctttattcgattgttggcagatcttgcattggcacgtcaatgaaaaaatttggtgttggaatcccctgatttcagccatgaaactggagcccgttggtgccaataatcttcttcctttgctagcaactcatccaatattgcctcagaattcttaagagcagcaaagtgttgcagatcagtatttgttgaattctgaagggcagccacatgatcatgagagtctttaatctcctttctcagattaccaaagttcgcaaaatgccatttctgaagattagtagcatagcttgatatattttcagttagttgaagcaaagaattccctgagttatgattccatttcgcagctatgatatcagtacaggcttgttcttccaaccatattttttcaaatcgaaaccgtgatctaaactcaggagcatcaacctgatcgagaagagttgtaacaattgcttttaaggctctatgatctgacttataaaaatccagatgaaccagagtaggcactaggaaagtcgaatcccaatgattattaatgaatccataatcaagacgttccttgacattcccattaccttgacttttgtttgtccaagtagttctttcaccctcaaaaggaatttggcagagatggcaagcagtgattgtagtacgaaaggcagtaatctgagaatcactcctagttgaacctccaagtttatcttcatgggaaatgatctcattaaagtcacctaaaactagccaaggagactgaggtgatatgtcatagcttctacgcaataaagtccaggtgagatgcctttgggaagtacaaggatgcccataaaaaccagtaaagtgaagagatgacccatcttgactttccaaaaagcaatcaatgtgattatatgagtaattgttgatggagagtgaaacataggatttccaaagaagcataagaccacccccttgcccttgccgtgtcacttccaagccatgaggaaagtgcaatttattgcgaattctatctatactaccatgttgtaatttagtttccataacgaatagaacacagggggcttgctctttaacaagcaagcgtaaatgcctgaatgcgctcgggttccccaatcctcgggcattccaacttataaaaatcatggctgagcgcggcgttgcaaagcaacaaccgcagtaacatcaggcagagactcctcaaaatccacactgttggtgttggaaacagacagagttggagaagaaccagttggtgctgatgaatccgactagatatgtataacatttgatcgacagcgtttaaggacattacgaagtgactcagaatcaatttgccttttaaattgcttgttggggttaacattttcaatgccatcatctgaaacaatgacaactttgcccttagagtttgggtgagggtgttgtagtgcagcagatggaagagtggagacaatggaactatagattggtgccactggagggtaggaacctgacatagtaggtgagcgattggatgggtatgcaggctgagcatttgtaggagaagtgacagtcaatggtgtaaatggaaggtatgatgggaaaggaataatggaaacatcattagtggaaggagcagcagtagtgaaaggtgttgttgtgggaatggaaggaggatttaaaaatttggaagaggaggaagactcttggttagtcagattcgatggcaagggaagggatcgtgtagccagattgggaacgacagcagtaaacgactttttagcaagtctagtcatcagaggccaaactccacccttaaaaaaatccattctatagcgatcataaccagattcgggaagaggagaacaaatcatagagggtccataatcaagagaaggttcattgccattataaatttgttcaaggaatttatggcatgattcaaaagggtgtccaatgactccacattcaaaacaaaactcaggtagacgttcatagcgaaactccaaccaggattcatcaagggagtccttaaatttcatcatcttacccctaagtaaaggcttggagatgtcaaggatggcacgaaaacgtaaaaaaggcccccaaccctcattcaaagactcttcatgaacatcaacataggtaccaagaaggttgcctgcccattcagccatgattttagtcttactcagaaaaggtagtctgtgaagttgaatccaaaaaggagtgagcgacatagcttctggtgtggccgattgaagagcagtaggtgaggatagcacaataaggtgattttgaaagtgccatggctccaataataacactttcttaagatctccaagacagccaaaagaaacaaggaagaggcccgagtgatgatcagtaacactaacagggtattgacctctccaaaaaccactcatcttgatacgaaaagtttttcgattaatgtcccgagaagagataactctggcatagagaacatggttcgagttagtggaatttccattgttcaaatcagtaggaagtgtaagaacttccttttcagagtcagtcaaaattaaggtatggttcatatcattcaatagatcttccatatgagggaactaagacaaagcatgaatactggaaagaaaattgcagaaattcaaggagaaagaggagggaactgttatatttaaaataagggagaggttataatcggttttatgcaaagaaagaagtaactataattgaaaaggataaacttaagagtgtcatggacgttaataccgctaaaaagaaacagagaaaactaactgccacagagctttttaagggcacacatgctcactgtcacataaaaaatgtaatcgttgttattttttataaccacgcgcaaattttttaaaattctcaataattttacgatatcaaaaatatgaaacatatctttttgaaacatgttttaaatattcatgatcgtgaaacaagttcttttgtattagaatttcacaaatattcgtataggagatctgtttaggaaacctcatactgtttttttcctattttctttcttttttactattacacggtaatatttacttttatactatttttttatactgtcgtgtaacaaatgtatacttcacatattaatcaaattttattatttttttaagtgtaataaatatgatgtgaatttgtgttgtactttaatgatagctttttttttttaactaaaattata

SEQ ID NO: 227208 - DNA, 1513 bp, Cannabis indica
tttttgaatattaaaaaccaaactagaccaataaatttcttaaaccaaaccaaaccattaagaacggtcgaaaccacggtttaagtggaatttataattattcatatttttttaagtaattgtactatttttactaagaatttaatttaatatttcaaaatatgtatttaacatgataagtaataaatctataacatataaataacaatataaaaatattctcaaaagtcaaacataacataaaaattcaaaattcatgcaataaaaaacttgacacacaaaaaagttcaaaattatgcatatagtcatatataaaagaaatatataaatcaattatttattgtaaatggtcagtttaaccgttaactatttattacgaactataattgaaccattacgtcgtaaacggtctggattaaccaaactaccaaaaacaatttcttcggtttacagtttaccttggttcaggttgtcgtggtctgaatttaaactgtgattttatgatttatatccctaaaatatacctccacaattaattttgagataagaacacattttttcaaagaatggtaggtctcgaaattaattattgagaaaggagtaaagctatgtttacaacaaaaatggaaacatcacttattattattgccaacaagtcaaatgctagtgcgacacttatataataacgtgccactcttaattggattatattcttttttctcaagtaaaagcaagaagttatatggaagcaaataaaacaaaaataagaaacaatgaaatatcaacaaataaccacatccacacacacattaaatgatctatgatactattgttaacggtgttctcgtgctcttaataaaggtgaaactttttaacacgactaaattgacactactcctagaggcacaagcactaaggccgtctctagcttttcatgggtcttgagataatttttcttttatttcttttttttttaaaaaaaaaaagaattaagtggtgtaaatcttttcatcaccccttcggtggtttagataattttgaagactacgtgctaattataattataggaactttatacattattttctcttaattggtttattattagggaaaaaaacagaaaaatacaaaaaggggaaaaaaaattataaaattactatgggtcggcctattcaatatttatacagctcacatacaaatatttacaaaaacaccacatgttctaaacttttagccgcacggaacgaacgatgaagatgaacatacctcgatcgtttcaaaatagcaaaacaaccaaaatgaaaccaaaaacgagagaaatacaaccattaattccagcgaaatcaacaggaaaagaagacctgcaatgatctaaacagaaatttacgaaaaaaaaaccagaaaaactgggaagaaactaaaattacacaattgttttcggttttattcgatcaaaacaactctccctaatatcgaaattcagattcatgaaatgtagatctgtaacaaacag

SEQ ID NO: 227209 - DNA, 1055 bp, Cannabis indica
gatttaagaaaaagaaaaaagaaaaagtgaaagagtcgtcgtcgcgtacgacagtactcagcaattccaaatccgattttattgaacttcaaactctctctctctcttcctcatcacctttctgatcatcatcgtgattttctagagagagaaagtcttcacattgtcaaaatagtgaccaaagcgcgtacttgttacttcctctcaatctcaatcccaatctcctccagatcttgatcaaaaacagcttcaatacttccaattctagatcgatcccattgctagggttcccaattccatcttatctcccaatggcgaagccaaggcactatcgtttaccttctcggaaatcctcttcctcctcgaccaccctcatcttcactatgctcgttatgttcagctttgtcgttctcattctcgtcgcccttggaatcctctccgttcccagctcctccggtgactcccccatggctaatgatcttacctccattgtacacaagactgcagataggtatagcaattctctaatcgcttcggctttgcattttggtttgaattggattgaatgctgatttgggtaattatgcttcttctctttttaataggaaaacggacgatgatggcaacagcgaaaggtgggttgaggtcatttcatgggagcccagagcgttcgtttatcataatttcttggtgagcctttttgaaattactgttaaatttgttaataccttataaatttcattcaaatttgatatgctggatgtaaattctgttgttgtttgcttttggtattatgattgagagtggagaattaaaattgacattatctcaaaaaatttaaatgtcttggagagagttactagttgtttttgctaaacaacaaatttatgtttcgagaaatgtaccaaagaatatgacgaaagaaaatttgttgttagtttaaccatggatctagattgaagtaggaaatctccacagtcaaatgctgaacatacacaattgtttatatcatcacggtattgaaatgcatctgtcaagtatacaactgacttttg

SEQ ID NO: 227210 - DNA, 3597 bp, Cannabis indica
taggaatacatttaatcactcaatcttgttcactttccactgtgttgacaacacaataaacaagaatatcagtgtgataagggtttggatgaatttattaatcaaataagtaaatagatgatcacatgaaccaaataacacattaaacaagtaatgaaattaaatatgtttctttattgataattgaatagaaaagattacattaaaatagagttttatttagggcacaaagcccaacatccactctgtcatatgccttagccatatctaatttcaaggcgagttttgtgccattttggaacctattttttctcatacaatgcaatccctcatatccaacaatagcattatcatggattaatcttcctttcacaaaagccttttgagattcagagttaaccatacccaaggatgcccttaacctattagccaagcacttcgaaataatttttagataacgttacaaagactaattggtcagaactcttctatccattttggtttctccgtttttgaaattaaagcaatgacagtcttatttaaacaactaagatcaacttcatgattgagaatatttagacatacctctaccacattcggtttgagttccccccaaaatttttgatagaataaagctggtcgcccatctaaaccaggggcttttgtggggttcatttctttaactactcgaattacatcctcttttatgcaatccagcatcgaattgtcattcatggcatcagtaacttttggccttaccacttccaaaacctcatgaacaacttcccattgcacctctgaagccgtgtacaaagtgccgaaaaatcttctatagtgcgctgcataagaatcttgtcatcttgccaaaaacctaaggagtccaccaaccctttaatattatttgttttccgtcttgctaaggctttatgatagaaatacctagtgttttgatcccctattttaaccaaagagccctactttttcgtctccaatacatttcatccttttcaagaagaacatttaactttgctgcttttttcacttttgtccaggtaccaggttgttgtagcaaggcaagctcatgaagcatttttttcatttttgcaatttcaccattcaacaacttctttttttttgctccaaccttgtaaaaattttcccacccttacaattttccttttaaaagcaccaattgaacagacttcactctccccactccaaatagttttaacaatttccttacactcctctttctcacatgcttcctcaaagtgaaaacaactctttctttttacttggccgcatctatccccatcaaatctcacaggcacctcaataatcattgctcggtgatcagattctcaccaatcaagtagttgtatatcagcaccatcaaactgttgtagccattctaaattacacaaaccacggtccatacactccataacttgatctcttttattctcattgcaccgggttagctctattttgacagagctaaaattaataagttgtcaatcatccagaacttccttgaaagcctccatgccagctgagcctcttaatagacctccaaatttcttcgctaaactcagtatctcattcaaatcccccacagataaccatggcccacgaacttcatttttaatatttctaagcaattcccacaaaaatttacgctatctagcatcaggatgaccataaaaacaagttaaagtccagggcctaaaatccttacctgccacacctgctacaatatggcctggagagctcaaatcaatatggcctacaatttcttgctttgtttttttatggaaattttcttcatttgtcccataatcgttgagtttgtctgctccccatgagtcgagatccccaaaacaaaattacccaccatcgaatctcaaattcattagtagattgcacttgtttccttttttgaaaaaaatcgtctcttcatagtttgcactgttgttcgtcccttcctttttccttttttttcaaattatttttagctccaactgagctattcgcatcatgagtaactccaatattatcatcgggacaagtttccttaaatgaattgggctataagtgttattcaagcagacccatttcagtgcaacctattgtgcttggcccattgccactatcattcctaagaaggcccatatttgttatattaactttttgaatagttagcatttggtagtccccctttctttgactttgtaaactgttccccccatattcctagttcccacgttgttatctatctcaaccgtctcaaccattgtagcagttacttctgcagccatcgagcaccaccgtgcatctttcacaccaccatcaacgtccctagctcatctttcttcctactcgggccacccataaattcagcttcctttctaccttcatcgcctcccaatatctcaatcccctatttctctgcatcctcaatttctcaaaggcatatttgatcttgctgatgagccataaaacaatttgatattggatcttcttccttaagccataatcaattttcaggtacattttgaccatctaagcttttttgcaaaaccatttcactatgacaatctttttgttcatgctcctaaagcccacatctttttttttcactatgaccatctattgtctcgatatccagatcaagtgtagtgtattttactaaacccaaattacaggaactgtaagtctgtggtaagtaactgatttctccaccattacttccttcgttttcataaaacattatgcaacatcactttctatatgcattactcatatagggatgctgaattctctactacctattaagtgcatctgaatatacagaagacgtgtctctaattctatccaaaaatggaatagagataaaacagttaaaaactttcttcagctgaacaacttttcattattttcgaaacaacaaagtaatttagcttcactgatggagcttaaattattattagatgggtttttacatccttctagaataattcctccacccccagagtaactaccatctcgaataggttatgagttggtgtagatataaggattctaatgtacacccttatcatctaacatatatgtcacttttagagattctttctcgatggtctcctaatgttccttgtttgattacatcttaggtggctcccactcaacagtaggagtgtctcaggggtatcttgttgtgacatattatcttagtctgaaactataagttccttctagactaagtcatcaacatagcattctagtattaacattaatgtacaatacttgcttaagattaagaaatcataaaagataccataaaatatttcatgaggactagggattttgcctaagtcattcgaatagactttgcaaaattctcctatcttatccttagaattctgataagttatttctatccatatgaatggttagatttactttcttagttatattctaaagttcctatcatgatcataacaaagtaaaccatcactagtgtcttccaaataaagatgggctggaattttaaaatttcccactcagataaggcactgtgatgctatgtccaagaac

SEQ ID NO: 227211 - DNA, 7900 bp, Cannabis indica
cagaggtaagataagttaccagaacttatcttcttttaaaaatgacaaaacttcgactaagtacagctaatttatgttgcttttcatagaatttgatgcatcaaaataaaagagagaatttctgaccttgataagactttcatactgaccacacccgtttctcgttcttcctgtttaataagaatagattttcctggttttgttttacccacgtcatttgcgtttttcacatcattgggaaccccattggccacaggttttgaagcactaccatcaatgatttcattatcttcattttcttcagcatattcttccatcttccctgcattttccattaacttttggaacagcatgccattattagaaagttcatcaaatgttccctcctctttcactgtcccttcatggaccagtattattctatcaacttgtgaaagaaaatgtagctggttcgtgacgagtactcttgttttccctcttaattctccccgaatgcatttatcgaaaacctaagaccaatgagtgtgcagaagttagttcagcatatagtaaatactaaaagatgaagaaagttttcctttttgaatctgaacatcgacaaactcggtaaaagaagcataaaaaaatagaagatttttattcactctatagtgtaaaagcatccatcagctgattataaaataaaaacaaggacttaaccagtaaaatagttatcttcagtttctaatgactctttaacaatcacttacatgctatagaactctggatataatcctaaaagactatcgagttatccaactgaatatttgtattacaagataccataaaatattaaaaataaacttaaggataaacatttaacctgtcgggccacatgagcatccagagcacttagtgggtcgtcaaatacgtatacatcagaattggaatacacagccctagccatggacactctttgcttttgaccaccactaatgttaacacctctttcaccaatctcagtcaaatcacccccctgtagatgcagcatgtgagaaaggctagaaccatatgcccgaaaaaggacaacagattttcatggaatagcttaagaaagttataactttaatatcacttacaggaagtaactcaaggtcatgccgcaatgccgtcacatctaatgccttctcatatcttgcagaattaaaagctgatccaaataagatgttatcacgtacctacaaaagttaatatgtcattcatgagcactgtgcctatctgattttcatttcattagtatacaactatacatcgtcaataataatagcaatttctcccaattttttcttttaaaacaagaccgacttgtataaagagagaattgtctcaagcaaaattcgggagcaaaacacttctaatattaaagaaaagcacaaaatatagatagaacaacagaggcaacaaccactaatctcggtgaaaattaaattcactagtctcagcaagttccattgttagaagttgttagattactgcatactccattacattccaataatcagatatagagttatggaatgcttcacaaatacttacagttgcattaaaaatccatgaaacttgtggaacatatgcaactgttcctctcattacaacacttgaatctcccattgaaggaagctccccaagcatggctgatataagtgatgtctttccttctccagtgctgccaacaactgcaactaagcttccaaccgaaacatccagattgacatttgacaatgtaggtttctctgcctgtacaagaaaaactaactgataacgctgctcacatgtagaattattgcaagaagcaaatgaagtaacaatactgctatatttttactagataagatataatatatttgctaaaacgtataatcagaagagaatagaagaaatactgggattagtactgccctatagtataatcaaaaggagaaaaagaaaatactgggattagtactgtcccttcccaagatttaaagaaataaaagaaaattgccataatggtagaccttagaatcccaagaaaaatatccgttttttatttgacactgctggtagcccaggatcaagaggtggatttggaagaagaacccgctcttcagccaagagtagctcctcgagacgctttaaggacacatttgcattaactgcctgtcatactaaagcatcattagtggaaagaaagtgatacaatcgattaataaatgcataaaaaatatagcataatcatgaaaaaggagaaaaaagtcacactggtttaaatatattctttctttatcatatagacgtcatgtgggggtggatttcttatccttcctaatattttcttgcttgaaaaaaattgtgttccttaacatatagatataaagtcagatgctgaacaataagcatgcagtcattttgctctaatgtataatgtaattagtaaataatgataaaaaaatacaaaggatagagattaagaaaacaagacctgtgttataatgttaggaagcatgaaaagaggaaagcgaagcacggcaaacaaagaaagtgatgtaaatgcccttgcaggtgttagatttcctccgagcaatgtaaacattccaaaagatataacagtcacaaaaactggaatgctgtttagtataaacccattacactgcaagcaaaagaagacaaacaatgctgagaatcaccattttaaccgattaagtatacaaaacatattaataactaaagaaatcaaacaataaatcgatagccaaagctaatgataatactttatagctccaatgtttaacgatatgatgtaattcaatgttccaacacagtttgctgtcttaatatacagcttctgagacataaacatatgacacaagttttcttcctttaaaaaatacatatacatgtatacagtataatagcatgaaaatttatgtcattacttttaacattctttcaaaaagaatttggaaaatatctaatgtcataccgctccaagtagtgatgcttttcggaaccaagataattcatcagtacggacaccttgtaccttcgactggaaactactctcccatgcataacacctgatccagattcaagatattcccaataaacaccagatctttctgggagaaaacaagcaataatattaaaaaacaatagaaaaacatacttcacagtgtccattgctgccaaaatttcattcatgaggccaattctcttgtctgtacgttgcaacccctccttggacaatttctgcatcctgcttatgacatatgtctgttcccacaaaatcactggacatgttaattttaaataatttgattgcaaatacaaagcccatgagaactctaaacgaaatggataatacttgaatggagaaacacaaactgcagtgattatttacactgctttccagaccaaaacaagtaaaaattgaatatcctaactgcatgcatatacacgacggattctactttaaaggaaaaacataagataaacctgactcatattatgattaacaccagctctgtagagataacaaatttgtataaataggattcctaaataaaaatctaaccagaagagcttgcatgagctgtacgtattaaataatgcatcattcaaatagtaattgaaagtatcatgaaactactaacgtaatagaaggaactttttcaaatattcgaaacaaatatttatgcctagaggaatttttaatcacagtaagaaatggtgacaaaatttttgagatacacaaaactaaaacaaaacacacaaaaaaatggtaaatttggaatgtgcaacttctaacctgtaacggaaacataagaaccagcatcagtgcaccaatcagtgaagcaacacccaactgctgatatagaagaaccatagaaataacgatgcgaaaaggagccgaccacaaagtgtgaagtgattgacatatttgctgtaaatttccaacagaatcattagctaaggacccaggatagcttcacaaaactttaaagagacgagacctaataggccaatatcctttcatctattccagaagataaataactaacagtctaacacgactgatattccaaattcactttccatcaaatgtcgcttagttgtgtaaatctggagacttctatttttgtattgtacttgattatgtaataattcttctttctgtttctcatcaaaaaaggaaaggaaaaaagaacagtagaaagtgcccacctgaagtgcttcagcatcagttgtcatcaaattggttattttccccgttgcaaactttttacgagcttcgtgagtcagcctcaaggatttacgaaatacagcagcaacctgcaaatacaaagtataacatgcacccatgagtgcctaaaaggatgcttgtaatgatacagtccttttctaatatttactgatactgcaagttccaaaatataaatttgtaagaactaaaaatatagacacgcatacacacacccgaaggtactaaaaatatgctgtgatgaaagaaaaatttaccagggttgatcttaaccgaaaaccaactcgcatgacattctggaaatactgagcttcgcacaacacccctatagcctgaaacaaaaatagtataaatcaggaaaagtatatgccagtagaacaacaaataataaaaggaagactgcataagtttctttttatactttttttctaaatgagcaaaaaattctatgaagaaggaacctccattttatatgaacatagctaggaacagagatcatcagtaaacaataaaatgctcgaacacaatgaacaccatctacaggaaagacattaaggaccagacaatgtaaacgatccaaaagcacaatagaatatttgtgtcataccactccaacaaatattgagaaggcatacacatatccaatccatgcaggatcccctgttgcatagactgacaaaaagttaaaaaagaaataataattaataattcaagacaagtataaggagtatataatctctatgaagttatttacagaatctaatatcaatcttcttgctcctttctaaccagaccgctcatagtcatacagtggtacagtggtatatacaaaacctctttttctcagaaaataaataatactaacaacaataatgcatcaatgattgttttacaaaattttggggcttataaatcagaattaaaaacttatgattagcctgttcccccaccatgaacaagtagaagtcacaataacaagaagcatctcagaaatttaaataaaatgagaaacccgaagcatttaagacacatctcttgcaaagtattaattaaaaaaaagagctaacctgtagaagacgattcaagataaggggccccacaaattgagagagatcattgccaatctacaagttataaaatgacaaattaaataaaaaaaaaaaacatcctctcaagaatgaatgcttgagcttaaatcactatccaaaatttacttcactttcctatgtctgagagactaacaaacttttgtcctcatttttaatttgcacaaatctaactccttatctttacattttaaaagagagcatttttatttggccctcttaactgtagaattagagtctcattttggtctccataaggagccaaagcgtcaacaaaacatagcttgcatggtaaaatgagacatttgaaagctaaaagggccaaagttagaatggtagtgaataatgaagaggggaggggattggagagctgagtatataatgcagaacgaatgtctatagtatgcacatttaaagtctagttatgcagtatgcaccttacaaatgaattatttgctaatccgtggaacaatgttaaaaagcttaatggagatttgactgagaactcatgagactagataaggaagaaaaaaactacataaataaattcactaccttccaaaagcctccccaccaaaacctatataaaaagttataaaagaaagaaaaggaaaagggaattagatgcatgtacaaaaagtaacataagaaacacaagttaagatagcaactgttgcaattccatccaagccatgtacttaattatattgtctgttgactccattcctcataaaaatctcgtacacacatatatacatatttatatgtaagcttaccttcctccaaggctacggtttaatgctaataacagccatggctttggcttccgacactcatcaacccaacattcttgaaacctgcataaggtacaaaaaaaaatataaaatgacatggtaacatacttggtaattgtcgggaattgttaaatttatatacaagaaattattaggcatgaatgattgcatacttagaattcagtgtttctgttctatcccaagtatctaacttccacacatccttctcagttattggtctttgatatgcacgctgcattaggggattcatccaaccaaagaatattcctgataaaagagcacattcgggatatgaattaatagatacaatacaacataggaatgatcagcagatacagataacagtaggaaagatgaagacagaataagctctaccctcaatatcagaaactttcttttatttatcaaaccctagtccccaagtaagagactaagccaaacacaacaaaaaacaatcagcttactccagaagacatacttgaaattatattggcatgcctctcaggacatatctgctcccctgcaggaagctcttcatatgcagcatcatcaattgattcagtctgcaatggagtgtaaccagggtagggatccaattgtggaacatacaccagcagaaggagtccaaacaagacctacatgaacacaaaagtgacaacataagaactccttatatttgagcacctgtttattgtggataagcatgaacattaccagatagagtatttacagtgaagttctaaatagaagaagtgtatctagttattaataactaattagcttttacttgattatgaacagaaaaagggtaaaaaatactcaaacagcctaaattatgtgtaggtcttatcaaaagagaaaacatagcagaagtggattaactacgagaatgcagtactgaatttggtgggagaataaaccctgaatatcaaataagaaagaaagagaataaacaaacctggcaggcaacttcactgatgtacaaatacaacacagagctgcgaagaaaaatcacaagcattagtaactcaccttcaaaaatggccagcataagtataaaaccaaataatttgataaccataaaacaattttaaatactagatttcccaaagcagtggatgcatcatggacacaggtgttatcatcattgacaaatttatcataccaaaagtctatacaacattttaacatgctaacctgctgtagaagtctttgaaaggaagaatgagattcagcatcacaatatcccctactaaagagtacatgactccaaatctcacaaaccaccggaattcatagatgtagactttggtctcgagaccaatcatgaccaacatagaacaccaagcaagtgcctcaattatgacagaaactatctgttgaaagaagacataagatgaagtcaaaattaaagaaaaaccgattgcaagagctaagataagcatgcttacatgaccttaacattacttgtctctaatgttgaacaataaccctcattccccaaaaaaagaaatacataatatacataagaaacagacaaactaacacctaaatcaaatactgtccaataatcaaattgctaagaacgatgatatccagtaagttttcaacattgtcatttcgactcatttatcattatggtaaaaatccttctagagaccaacttaaatctgtaaatttagccagtacaacttacttgc

SEQ ID NO: 227212 - DNA, 5381 bp, Cannabis indica
gtttgcctttagatttgttgacaagatatttaacagccgtttttgaaggctttttcaacaatggtgatggagaagatgaaaaccaagtaatgaccatttatagaatagaaaaaagaagaaaaaaattgaaaaaaacgtggtcatatgatggaggaaggcagttgagtaagatagacaaaatcagttctttttttaatcaaaatagttttgattgtggaagaagttttcaaacagaaagctacaatgaaaactgaaataaaggaaaaaagataaaagaaaagaagggaaaatagatagtgtgtgaatgtggtataataacatcatactcgtgtaaaaggtattagtgtaaatataacaatattaaaagtaaaaatgtaggagtagccgtgtaggtatatgggtaatatttttttttgatagcatagagataatatttttgaattttttttttattttctatgtaatttttttactaaaaaatatgtgttttattaatttgataaggtacattaatataaaaatatataaaattaatacaaaataaaataaataaatatataaaataccaacatattttatttaaggatcagtttctaaaaacttttataatttaaggaccaatttgacaaaacttatataatttaagaactaggacacaaataaaccttataattattactaattaaatcggattattaaaaaaaatggattggggtgtttttgacatttaagttagtaaaatttaatattcagtaaaatggctctctcagcctgcatcctgggtatatctcgtttctctgctccactttctgcatattccttctcatcttcttctctctacctcaaacttattaccccaagactcaaccagataatacccaccaagcaacactaccagtttcaccgctctaagacaatggctactacttcagcagcacttaataaagaagtttcagccaaccaagagaaaatcactgctccctacggctcttggagctcccccatcaccgccgatgtcgtcgccggtgcctctaagcggcttggtggtacttccgttgactctcatggccgccttgtctggctagaatcccgccccgctgaagcagggtacctaaatccttccttacgtatataaatacttatatgcatatgtaatgcctgtattccgtgaatagaaaattggggttttttttatctgactacaaaaagtttgaaaacaattggtatttgtgttgtaaacaggcgtgcggttcttgtaagagaagcggagaaagcaggggaagaacctgttgatattacgccgaaggattttgcggtacgaacggtggcccaggaatatggcggtggggctttttcggtttctggagatacagttattttctctaattacaaggatcaaagactgtacaaacagtttttaaattccaaaggttcatgttctagctgcttttcacattccattcagtgattcttcatagttgacgttcggttctgttatctctttcaatgtttcaattacggtcatatgctttgttgtatttgaagtttgatcatacaattcttttttgcaaaccttatgatacatgttcctgtttatgtttcctttttatggtagtacctgtcacatttctaaagtacatgtatattttgagcttattgtaaatatactgtagcaatttgtgacattttttaatctgatttttcttgaaagtatcatagaaacctgctaacattatgcaatctgtgacaaacagattctatacccaaaccactcaccccggattacggtggaccagtaatcagttatgcagatggagtatttgattcacgatttagtcgttatgtcactgtccgggaaggtacgttcgtagcttctcctttttcttggtctttttgatttttttaattatttgttacaataaaggttccttttttgttttctgtagatcgtcgtctaagtagcgcaaatgcaaccacagatatcgtgacagttagtcttggaagtgatgatattcaaggtgagaaatgtcaagctgaaatgttaccaactttctctcaatgtgtatattgtatatttgtcaaaatgtttttttatttgtcaaaggttactaatgcatacacaatcaccttcctgtaagttcaaatcaaaaatagcccatagagtagttgaagaaaatctggtattattgatgaatgaaagacaattacaaaatctctttcctagcttttcgagacagccaggtatctccctagagtattatttaccctgtacaattttttccctagccaaataaaagaatcagactttctatttatacccagcccactaaattgaccccaaactaaacacttgctttgactagggttgccacatcaacagttatatgtacacttagtttcttttgtttttatttcttctagaatacactttacgtggtagtggtggtggtgtaactctcaccttgtcctcaaggtggaaatttggaaacttcatattgaattcagcaaaactctccccaactggcttcaaattatgggacggacttccatttaatgagaacttccaaatctttgtcgttgttgagagattgctacctaacttggagcacactctctggttccatgggaacttccaaatcaggcgtcatgggtggtagagaaggagaggacaatgctgtgccaagagctcgcttcaattgagaaatgtgaaaaaccgggtggatagtggaggtgggtggcaactcgagcttataagcaacggctccaactcttgctagcactttaaaaggtccgtagtacctagccgagagcttttcaaatcgtctcttagccaccgattgctgtttgtatggttgtaacttgaggtatactaagtcaccctctttaaactcttcatgatggcggtgttggtcagcttggaacttcattctctgctgggcgcgcaaaagatgcatgtggaggtcatctaagatagcatcacgatcagccaacaatgtatcaattgccgaaacttgcgacaattgagctggataacgaatcaaaggagggggttctcgactatataaggcagtaaagggggatgttttggtggctgaatgagtggttgtattgtaccagtattctgcccatgctatccacttggcccattgtcgtggcttctcgtttgcaaaacatcgaagatacgtttctaaagttcgattcaccacttctgtttggccatcaatttgtgggtggtaggccgtgctttaagtgagtaccttgccatttgtacaactcactccaaaaatgattggtaaaaattcgatcccgatctgagatgatggacagtggcagcccgtgaagtcgcatgacctccttcaaaaaggtttgagctattatggctgctgtaaaaggatgtttcagtggtataaaatgggcatatttgcttaatttatccaccaccagcatgatggtgtcccgcccatcagacttaggtaacccctcagtgaaatccatggatattttgtcccaaactcgggccggcaaagtgatgggttgaaccaaatcagcgggtttgtggctgcatatttgttctttggcaagttggatatttacttacaaatttcagcatatcttttcgcatgcctgtccaatacacctttgattttaacctttgataagttttcacttctcccgaatggcctcccattagagagttgtgaaattcttccaaaatagtgtgtattagagtggagtccttgggaatcacaattcgccctttatagagcacatgtcttgttggaggctgaatccaaatggtttttttccttgttgaatgtcttgcttgatgcccttgaggaagggatcttgttggacttcttcttgtaatttttcccaatgctgccattgtggaagattaatgtcattgagttctgttgctgctggtttttgggacaaagcatcagccaccttgttgctagctcttggtttgtaaaaaatatcgaactcatatgtcatgagttttgctatccaccgttggtactcactgccaatgaatcgttgttcaagcagaaattttagactttgttgatcagtgcgaacaatgaatcttcgacccaacaaatatggcctccacttacaacaaaaataatggccattaattccttttcgtaaatagacttgagacaaccccttggccccaatgtatggctaaaataaactattggtcgattttcttgcatgaaaattaatccaagaccatatctctaagcatccgtttcaactatgaatggttttgagaagtcgggcatagccagaactggaactaaacacatagcctcctttagtttgtgaaaggccttttcagcttcctcaatccacccaaagttattttttttgagttgttccgtaagaggccaagcggtgtgagcatacccagcaacaaatttgcagaaatagcctgtcaatccccaaaatccccgaagctctctaatattttacagcccaattcttcattgctgctatcttagttgggtcagctgttaccccttgtcctgagatgatgtggcttaaataacccaattgtcgctgcccaaacttgcatttctttcggttggcaaagaacttgtgttgttgaagcacatttaagacaatgctaagatgttcttgatgctcctcttcactagtactgtaaaccaagatatcatcgaattagaccagtacattctttcctggataagggcggaaagtgtcattcattaaagactgaaatgtggcaggggcattagttaaaccaaatggcataactaaaaattcatatggctcgttatgcgtcctaaaagctgtctttggcacatcctttgccttgacccgtatttggtgataccccgatttgagatcaagcttagaaaacacttgtgctccatgaagttcatcaagcaactcatctatgattggtataggaaacttatccagaatagtagctatattgagtgctctatagtctacacatagccgccaagtctcatcttttttcttaaccaagaacactggacttgagaaagggctttggctgtcctgaatgattccaacttgtaacatctcagcaattggcttttctatttctgttttctggaactgtgggtaatgataaggcctcgccctaatcggttgggtaccttccttaaggtttatagcatgttcccttcctcgagaaggtggtagacctttgggagttcgaaaaacagctttgtaattgctcaaaacattgtttaaaaaaacaggattagtctccgtggtggctaaattacattcttccaaccgcttggtgggttatttgtgctacgttctcaacactgtttttaaatttaccggactctttcccacacaatccccttttatgc

SEQ ID NO: 227213 - DNA, 2692 bp, Cannabis indica
ttgcttccaataaatttctctttttcctccacacaattaagatcatgctcaagccgatttttggtaatccaatcttcaatcttagtagaatctgcaattctttcaattttctccttgatttcctttgatcgggccaccatttctattttctgcttcttgttccacttatttaatccagtcccacactatgtaaaagccgaaacagtgtatgaaccggctgtaacaccccctgctgcccccaagtttctgctataatcttttgacaatcctcattttctgcccaagcttgttcaaaatgaaatctacttccccatcttttagtgaacccgaaatcatgagaccctaattgtgcatgaattaaaataggtctatgatccgagttccaccaatttaaaagagacaccttattctttttgaactttcttttccaaatttcattacaaaggatgctgtccaatttttcaaaaataagattggaagtccttccattacaccaagtatactctcctccttcagccttcaattcgcttaataaacaattaaaaatggcttgtttgaaattcctcatcaagtactccggtttaggacccccccccctttcttttctttttgatgaatgatttcattaaagtcccctccacatatccaagcacacgaaaacattgttttgagccgatttaaaagtttccaactctccattcgaccaccgggatcggggctgccatagaagcccgtaaaacgccaagagaagccaagatcgttctcaacaagagcatcgatatgagagctagtataggacttgatatgaaccgtataatctttcgaccaaaggagggccaaacctccactctttcctttagcattcaccgaaaagcaaccttcaaaactgagttgaattctaataaactccatgcgtgtactattcaaccgagtttccgacaagaatatcatatgataatccttaacatgggattttaagaaatttaaagtccaagggttcccaagccttggacattccaaaataaggccatcattgttctcggcgacccagactcgctgagttcgccgcttccaagttcatgtcaaaggtcaaatccgccatagaaatttcctttgaataatcctcctttccttctgtaccaagaatcctcacagtagcatcaatcgggttttcctttgggtattttttgttctttttgggacaatttttcgccttttagagggaccttccgtcttgtttatcgaagtaccaccattctcataagttatagggacatctataagattattagcaccattaaaaggggaattaatccactgctccttgtgggaataagtcaatgtagccgttgttggtgcagtagcatcatgaaaggtagtcatatcctcatctcgccaagaaccacttcgctttgccttacttggtccttccaacatactcttcactatgaatccactttccaaagttgaattaccaatggagattactttctcatttgttgtctgtttcaaaacatcatcaccagagaccacagtttttcctttgtccaaagaattcagattgaatacagttggttgatgcaagaattttccaccattatttggttgctgtccagtaatcacttcctgtgttggcctgctcccaatatcattcccgagttcgggggggtggaattgaaattggggcttcgtatttcagagaaacccagaggagtggaactgctggtctttaatgggtagaacccaggcttagccgaatcagattgagctcttttatcatcaactttcagccaagaaccatatcccggcttgacattacccatgccatcctcaaagcgcttgattggttctgcacaaacccgagtatcatggcctataaaaccacaattaaagcacataaagggcagacagtcatacctgaacgggagccatagcttgcaaccttcgttcggaaatagatatcctgggcaaattagtttgtacaaatcgcaccagactttaaatgtgaaaaaacctttggttgcaatcttggttatatccactttttgaacttcaatgagatcccccgcaaaactggctaatcgctccatattggcctgcgtaatagatcgagtgggtagctgaaggactcgcccattcagaggaaattttgttagaactgcattccaatcctgtgggattccagcaaatctttccacaattagtaggccatttttgaggaaccaagggttctaggataaaattctattcaaatcttgagaggatttgaatgagaaaaccaagaacatagaatctttagtagaaagtttgatttccaccccccaatctttttcaaagatgccccaaactcttcccagaatggttttaagaagagggcgattcatggggcggttggagcagaggcgtcccatagcacacagtaaggccacatctgaacctccattaggattaatctcccacccctcctcgtctagcaccgtgaggttcgaagtacgagcaaggagatcttccatggttgagtccggcgtttctggcataacttcaagaaggctcttctcgagagagagcataatattagtctaacttttcagtatttactaagcttatttatgtttattgaatgcaaaataaggttagaaacacatatgtattaacacgcttataaatacatactgtactttgtgtagtaaaa

SEQ ID NO: 227214 - DNA, 4625 bp, Cannabis indica
ttttttttttaaataattaaataaataaaaattcaataaatagagatcatttccaatctaattaatgggttcttcttttatttggctcttaagataccttgttcctagagatatgtcggttggacaatttatccatgtattaagcagcaggctgcatttgagtcctggaaaagccctttttgtatttgtgaagaacacattaccccaaacaggtgagcttcattcaaagccactcattactattattatgttttcactcataccatgactttgctaaaattattccaacccttcttcatttgataccctttctttgcttttctacagctagctgtatggatattgtgtatgatacttacaaggatgaagatgggttcctgtacatgtgttacagcagcgagaaaacatttggctagttattattgcagccacggtgtttgcttgtttgtttgtttgtaagtagtatttgtaaattgtaattaaattaaattcactttgctgtcgtcttcatcatcatcatcataaacgtgtctgcatctctaatttcaagcatggcacgctttgttcaaaagatgttaatttgttatttttctgacttactttacgggccgcctccttatgtttcctttgtcaactattaaaagataggaaactatggagagcatagcctttcttctaaagttacaatgtcattattatgccattgtcatctcacaataaagaataaaaagttcatttgtgattattcatgtttatgtgtttgtttttgttccaacttttgtagtacatgattatgtatgttttcccaattctcaacagcaacactaaaaacgattgacgagtaactaaatgaaaatgctttggtatgctcagttgggtttgactaatccttagtgcgccaaaccataggaaataattaaattcatatactcttgtctaaaaacagttacagataagatttttttactataaagaaaagcatagtatgaaagatgagattgatgagtgaaatcatcaggaactggtttactgactgatactctttacaaccaaatagttggggttggtttaaaagatttgtgaataaaaagtcattacagagtatcaaggactccatgaatggtgacctctgtttccagtatgcacgtccctttaagcaagaaacccatgtttgagctgctgaaataggcttgagttatatatcttgaccaaccacgttcctcgtttgaggcactgatccagtcagtacctgtacaagataaaaaacattgtagttctattgagttataatgtatttcttatatacacgttaaatcttttctcttttcttacctgtaccggataaatggttggaattaacttggtttttgatgcgtaatatgtattccacatataatttatagtctcgaggaagcgtagtgggatcagccaaagccaaataaaaagagatatgagtacccaatccagctcctcttccattgggaaaaaacctcagcttcctacagttgaaatcatcatgaaaaagggatttttattcaagtgcaaaaatcttcttgatatgtgtaaacaaaattgcataccattttcgacttccagcattaaattcttttgtctcaatgcattctttgtctaaatctaaacagttgtcaaccttaaaagtgtgcttgtacacaataggatcctttatcattcgaaaacactctcctttgtctttgcttctttctttgcaaacaaaaacctctgctccgaacacacaagtgtcgtcgatgagaaacccattaccaacatcgttaaagagttttgagagggtatgaactgatcgaatccccattcaagcttcattccatgaaagcgcctttcctttccatctaagaaaaatgagaaagaagataagctcattgtttatggtgggcacattttgcttgttatctttaggcttaagatggagttttaggttagtttataccatgaacaatcatgtagttatctttgttctggtccagtacaaataacttgaaaatcgcgtacacttcccagccagtcttgtgcgagttttcttcagccatggccaagtagacagagaggtgttccttcacatttctgttcttgtttccactcgggtgtataaccaaattcctgtgaatgaacatagaagtgagaagagcataagaaattaaaataaagatgaaagattcgcttaattggtcattataagaaagaaaaatgcaccatttgtagccaccagcttcgaaactcctggattcgtatcggtctatcgaattcttggctaacaatgaaaatgactgtactttgattgtgtaatgagtaggtggaacatccgagattgatctacaaatttctgcaaaaaatacaaatacaaattttaatgcaatgagatcatagctgatgaagtgtaactggtctaatgtttgagacatagcaaaagctcaagcacaacataccatcagaatcgttgaagataaggctggccattgcaactagctagtgatgagaattccaaggattgaatactgattctttggttggaacaagtaggatttttctgtgctttttaaagagaggagcctaatcccttgcttcaacaagattgattgtcttataacaaggaagaggtattgattccccaacttgagggtgtttgtgcagaagaccatgtttgtttgttcatgctcaacaatttagttgtacaagaaaaggctattaaaatatgccttgtgtttcctagtccttccatcctataaagtaaggattccagccatctctgtacataacattcttgacacaattgcatattcttaaaccaaatgttttggcaacacaactgctcactttatttatttgtttgttttaactaaaatacctattttccttaaataaagatcattatttgtatcaacaatattgagtgaccattcaacgaggctcacttcacatcaaagttcacacattgattgataaacgataaataccatgctgcggatgaccataaaggtccataacaaagttcatatacattacataacatatatatgtatgttactaaatttttgtttagttgaaacaaatgtacgagtgtgactctattatcaatcattgtgtcgtgttactattgaatgtgatttatgttaattccattttcttccagtatttttgtttagtttaaagtacttgcgtgttttaggtttcttctaatatgttttgtgattaaattcatgataatagtgatcgctacacgactttacatatcgtttttatttagatcaattattatcttatccatattatggcattttcaagtcacattagtatgggtttactttattcactatattaccaaagaaatatgaaagtttgtagctgtaagagaaatatgaaagtttttttcttaattaaggaaaaaaaaactttgatttttgtctagttgattaatgcattccaatgccagctatggcgcttactacaaacaaatcttgaaaaggaaaaagattaaatattataattcgtttttaacatttaactatatatgtgaccaaaagtattagcttcgattcgatctacatctttaaaatttggttaattttttggaatgagtagaatattttattcagaataaagtatttgactttagttgtttctgtgttatgttttaactatgaatggattttgtttttgatagaactgtgaattgattttaatgatacaataaaatatatatttagcacaatttcttagctttataacgtgataaacaagtaaactaacatgtcctccattagagttgtacccaatacgaccaggaccatgtaaaggaatatgctaagttattttaaagtttgttcctttccttccattacaatcagccgtatctatgagaactactaccacttctcttatgataaagatcgcagtttttattgtccaatcaatattttaatcagtttatttatttattatactattactttagaaaaaaaaaaatcaccactctgaataatattagccaagttgtagcttttcaaaatgtcaaactaactatttgtcaaaaaaaaaaaaaaacaaattattagttatattatattcgtgaaattggcccttaactaagtaggtattttatggttttgggttgagtacttttttgaattttgaaattgtaatagttattacacgcacgttcaaaggagtttaatttgtcaagttgcataagagtcagtcacggtagaagtttccaaccaattcaaactgtatctaattagttagattttttttttcttttgaaagaaatctagctaattaattagttattatcatttttggtttctctatcctaatgataagcttcgaaatgtatatatatggagctaatataataggtattatacattttatctattgataggtataatgatttatagtattgatttaatcaaatggcttaaattaatacttgaaaactacactataattaatattttttatttattattaattttaaatattaattaataattagatccaactaacaatactccaaaattaactccaaacctataatttttcttacttaattatcttataattttttataattttaattaattattttt

SEQ ID NO: 227215 - DNA, 3295 bp, Cannabis indica
atttttaaaaaaaaaaagaaataaaaataatataaaacgaattaattaattatttgtataaaatactagagtgaagaaaaaaatttgttatattacaaaatttcgggcagtttggcaaagaatgatatatgtattaattaatcaacaaagcaaggtgtgaaagaaagacaaatatatggttgcatttaaaagtggcagcttcaagtaatatgtatacataaattaaagggcaagttatgaagttgtacgtattaatatacgtggaatttgtgtggacctgatagaggatggcctctcctctgccctgtggagtgttgtgtaactccttatcattttaggagaagttaagaaaaacaaaccacagagaagaaaaaagaattaataatggctactactgcagttggaagaggactccatattcccccatgtaattctttacctatcatttctaggactctaataaagccctcatcatttggactagtgacgacgaagcaaacatggcctgcccaaacaggaaaatctccaagtcgtactcttgtggtggctcaagcccaagtacgcccaacctggcttcctgggcttgacccgcccccatacctcgatggaaggtgagtgagactcttacttacttggctatgagcctatggatgattctctcatttccttatttgtatatgtattatgcaattgtttccaaacagtttggctggggattatgggtttgacccacttgggctaggagaggacccagaaagtctgaggtggtatgttcaagcagagcttgttcatgctcgttttgccatgcttggagtcgcaggaattcttctaacagatgttagtcattcatttctgaaccatcaagcatcttcttaattacccttttatttttttagggaatgttttctaaagatgaccaatatataaaaatttagtagcaaattaactttctaaaaaattgtattaccaacataactttctctaaaatgtacaaccttaaaataactatcagtgtggttccaccataatacaatatggttattttgcaaactttacacttttattttgtttgtttgtttgacaaattcatctttttgaggtctcttcctgccgttttgagcattttctttggtctatagcccaaacgggtgccttgttgggtggttaagacctaaggataaggagttagggagatatgcattgtactgtatatattaaataagttgtgtgtttgtgcattagggagatatgcattgtattatgtgaatcaaatcattcttcaaaactcaaaagagattaattcttttacttgctttaattattattttgttgcagttgctgcgtgtagcagggatcagcaatttaccactttggtacaaggcaggtgcaattaaatatggatttgccaatacagaaactttgttcattgtccaactgatcttgatggggtaaaaattctctattcattttaggcttcatataattaccataaattattattagtctacccttttgcatctttatgccaattgtatcatgtatatttacagatttgttgaaacaaaaagatacatggattttgttagtccaggatctcaagccaagaaaggatcattttttggattggaggttgctttagagggtctagaacccgggtaatttcctttgatttagtaagaaaaggttcatctttaattcagttttgatgaaagtttagaaaaacaaataaataaaaagtcaaaagcttttcctataatttgacagatatccaggtggtccattactcaatcctcttggtttggcaaaagatataaagaatagtaaggagtggaagcttaaggagattaaaaatggtgggattgattagatattattaactcatgtttttaccatttcatgacaccataatttaatgttttgagtttcttaaaactctttgtggtcattgcaggaaggcttgcaatgatggccatgcttggcttctttgtgcaagcttctgtaactcatgttgggccagttgataatcttttggagcacctctctgatccatggcacaaaactattattcaaaccttagttaactctacttcttaaagagcaagtactaaacaattatctcccatcaagacataattttccgttacattctttttaacatttatttagtcatgtacacatgtatcactaataattttaatacaagttgagttcattttacagtttttttttattgtttctagtgtatgatatagtacaacatttattgaagaataatttttaattcattataaaaaaaaaagtcatattttagtttaattataaataagaataatttcaattataattaattatatattttttaatttcataaaaataattatatcttaataatatatatagtttataaatttaaggattgcttattgtattgttattacatttaatacttttaggtgtttttatttctttttcctagcatacctctatttagttataacatttcgattaaaatataatttatttagtgtcaagtgtattataagataggggttacctgtatatataattatcaaccaataacaaaagagaatcgttattcgatatcttaaggtgcccaaacgtaactctatataattagttagtgtgtttttatattatttaccaaattaaactgtatacgatattaaaatgcactaacatatgccacatcttaattacttgacaccttaagtgcctcgtagcatttaataattggaatatcaaaaataaaataaaacaactctggcttgtcaaagaggttccaaccaaacaatttgttgtcattcattattcattattggataggatttaatatagtattagtctgggctgatcttgagttatattgaattttaagaaaaatatttttttttactcttattataagaatagattgtattttttaaaaattattttaaaaatatgtgtaaattttttaaaaaaccttttttttttcatttgtgcctctgccccaggtgggtcttaggcacaggcttaatcgaccttaatctagggtcgactttagcaacagtcctactacctctatattttttgcaacaatatcctgaaactaacatacattcataacaattagtaacaatattaaatagatgtataagtgaaatttgactaattatgcatttattagaccaattttttttaaaaaaattaacctaaactatttaatattggtaaaatatgtcattttttttctaaaaccccattctacccctctcatttgaacagctctctctct

SEQ ID NO: 227216 - DNA, 4794 bp, Cannabis indica
gttcaacttggatcggaatgaatgaataaccttaacataaagaagaaggtattaatattagtattggtattagttgaccacacgtcacaaaggtcatctgccaaggacccattatcttctgttactttaccactctacaaagaaagtctggtgaagggcctcaatacatctttcagcttcactatcatttacaatcaatgatatgttcacctgcttagtagtagtagtagtacaataaaaaaaaataaccatatgatcattccaaaaaaaaaatatagatagatagatgaaaacaaaaaccaattatgacaaaacacaccttggatgccccttgtgagatcatttgaacattgatatcatgtgtcctaagaacatgaaatgcctgtaacaaagtatgtacttattgttattgggataaaataattagtgatagttttctctaattccctgacccaaaaagaaatgccatgaccttctcaagaatcaatgaagaacgctgaacattcccgataagagagatgattgatctatgctgcaaaagtttcacgcgtgcaattttctcaagctcttcctctacattgtcaagttcctgcatgagaaggtaacactttatttgatccattgaaataaacaatctgaggacaggtttatgtgcactagatcggaaaacatcatatgcttgcctgctggattagatctctgctccagagctttgcaggatccaatgtcaaagataaactaacttcactagtagcaacaacatctacggaaatgcccaaatcctcgaagattgagaaaacctgtaaacaccatgcaaattgcagttaaatcaccagaataaggcatcatagaagcaatgtaaaaatatcttattctcacctttgcaaggaacccaacttgaccaagcatgcgtgtactcacaatatcgagcatcgtaacattacgtttcaaaactatgctggttagaacagcctgaaattttttatttaagaaaaaaaataaataatcaactacattttaaagttatccaaatgcgccactttgaacgctgacagcaaattcagccaccacaaacctctgtcatatctctggttttagtgatgagcgtgccaggagcttttggattgtacgaatttttgaccctaacaggaatatcaccttctctggctggtctcattgattggggatgtaaaacctgcacattcatagtaaaaagtggcttagtcaatagtcagtcaagagtagcccttgttttcttctattaattccattccctcaaaaactttagttaatcaatgtgttatttcattccaatattacagccaattcaagttaaatagaaaacatgaaaaggggaagaaaaaaaaagagtagcgttaaacagcagcatataccaacctgagcaccaaagtatgcaagttcagcagcttcatcaaaagtcaaaacaggcacaggctttgcactaggataaatgctcggatcacaggtcaaaacaccatcaacatccttccacacctattaaaaaatgtgaactacgctggtagtttgttcatttatcaatattgcaaaacaatgttagcataaaaatgccacaaattaaaagaacggataacttgtatatagattcccctgtatgtatttcccaatcttagcaccatccaaagaatagaagatataaatctaatagaccttacaaaaatgccagcaataaacaatgcgtatcggttctactctaacctgaatttctcttaagccaagagctttaccaatagtagtggctgacaaatcgctaccgcccctacccaaggtagtaactgcacaagatttccaaccctacagtaaaaacatacgatccattttatgatcccagatagtaaattataaacaagtgtagtgcaattgaattatgaaccaagtctaagctagacaaacagatgtagcagctaccaacctttccaaggaagccagtaacaactggaattgcaggatcagcaatccaatcatcatgtaaccttttagccacagcagggtaagttgcttctaatatatctgcatttgtgaagtcgtctgtagttatgaaaccaatgtcaaatgcatcatactgcaaaacacaaacaaaccacaagggcaatggccattttagagttagcttgggccaaatataattagttcatcgaataactccttaacttaattgcattttcttcaaattatttacacaaatgaatatgaccacttaaggattcataaatcaaaaagtacatacttggcgagcttttacaccaatcttattgagataagctgcaaatattcttgtggacatgcattcaccaaaagaaactaaataatctctggtgcgaagagttaactctttcatcatagctattcctttcaaaagttgctccagctcttccaaatgttctgcaaacaagtatttataattccaagattcatttacaaagtaaagcaaccttatagatgaaaggtgagaatataaatgttcgtatataaaatggaacccaagttgcaatagcattataaatgtgaacctcaccagagataacagagcgatctactccaagctcatcaacagtcctgaatagaagaaagaaaaggaagggttctacagcttaaatcactatctatacataataaaaaaataatactttaatgcaagagatcaaacctgtgatgcagctcttttatgaagctcaactctttgatttctgatgcatttgaaacaccacaaccaactgccttctccccagcctaagtatatacacatgcatcaatggcaatccaatactataaataaaaaaaaaaaaaaaaaaaaagataataaattttaataaaaaacaacaagacataagaaaagggaattacaagaaggagattattggtggttttccccatagctgagagaacaataatggggttttcttctggaaaactgagaatgagttgagctatctccttaattctctcagctgaagctactgacgacccaccaaacttcattacgcaagttagtgcatttgcatacgaatcattctcttgttcttcatcttcttcatctaattgtcgttgtccaagcacagcttgaatccccttcttactgcccttcacccttaaagctccatttttagctgcattttccaatagtgcaaagaaggatcgagatgggaagcccacgaatgagagggagggcacgagggaatgttgattttgttgagttggaaagttgcagggtgctgtgaatccgccggaaagaagagaagcctccatttttaggggtggatgagacctagggctatgttgaatgttttttctgaatcagaaacagaggaacacaaacccaattcaattggtcttttgattagtcaaattaaaaataacttaccatcacattccaaatctaatttttaattaattaattaattattattattattagaaaactaaaataaaggaaaagggaagatagtaatagattgaccaacagagcaaggttgaattatggaattgtcagactgtaatatcatatgatttgttttttttttttttttgtagataatatcatatgattgttaagaaatagtaacagaaaaaggggaaaaaaagtgaatcctttgatttatttatggctttttttttagatttatttatgactaatttggtaaataaagttaattaattcttaaatggtttggatggtttgatctgaaagcagcatatcatattaaactactattgatgtaatttataatagaattagaaaatggatccaaaatttgagaaaatggatatatattaaagaaatgagagtgaaagagtagagaagttgtgttgtgttgttgtgtgagtgtgtggctgaggagaaacaaataatataataatagaaagagagtatgtggctacataataatgtgccgtacaaatatctaaaatactaatttaaaaaaaggaaagaaaaaaagaacactatcataaattcataattaaatcaccagttgagaatagaaagatagaagggaagactgaagaggtggttttggcaagttgtaagaatgaattgaattaatggtattactatttgatggtatgatgttaatttcagttggcgccaaaccatatcttgtgggctttggctttggctttttatgcaaaataatatgtattatataatcctatcctatcccatttttctactgcttctaatttgtcccagttcatttcatcaaccactcttctctgtcggtagtttctttctccataaatatatcttttttctcaactcaactcttctgggtggcttttctttctctgaggtcgctggcctttgtttggttcaacttttcaatttcatttctttaaaggtaagtttttcattctttctttatttctgaaactcatttgctctttaactattactactcactcgttatttgatattttgttggcattatcatcattaccttttcttcttcaaatttaggcttttgatcttgtagttgctcttttattgtcaggtacaattaaacattattatccatggaaattggcaaaacaagaaattcctctggctatggcaaacctccatggatattcaaaggaaggtaagtaccccataatccccccacattagctcattgtcttcgtttcttttgtcttctttatatttgatatgttttactcaaatgggttgtgctttttatcattgccagtgcattgtatcaactccatcttgtcaaagcagaaactgctcgagcatgtatcccaaaagagtttaaactg

SEQ ID NO: 227217 - DNA, 3667 bp, Cannabis indica
ttttattgactctctcaaaactcaaaatcaagaattcaacgtttatatatttaaacagtttgtatatcgattcgaagtccaaagctatagctcttactgattgatgggattttacttaaaaaagatacatatttctatatagagccgatcattttcgtaactttccaaatacatgcaaattaaatagagatatgagatttgattacatgtgacaagtgacagctctctactacttcccacaagcatttactcatcaaatttaaagctgacaattaaaactttgatatgagaatcacaacagcagaataaatatatatattaattaattaaaagtcttcatgatcttgctttcatatatatcaagatcaatattgatatcatcagttacaaccagagagataacattaaaacgtacatgaaattaaagatataaatactaggacattccataaatacatatatataatttaataaggattaaattaaagggcaggtgggtagctagaaaagataaatatatatttttagacattaattaatatttctcttctagtttttttcttttgaaacaaaataaccccttcttctacttctgtacttctagtgctttaacttgttccaacttgacaagacttaaaacgcttggttttgatgatgagtaagaaatagtacaaaagagatatatatatatatataaatatctcagttagatttttaaatttatgttatcttaactaagaagactttgtggctcttgattttaattttgcattggatacctaactccagctgccatagctcgctgctgttccaactgacattatatcataatacataataaaaacaataattaaatcccatttcagtaaaaaagcatatgcaaaagcctgtactaataattaattactataaaagtaagttataatttaactaagtaatggtttttacttggaaaagttcgtgtaatttgttcttgagataacaatattcatgttccagaagctccaaagctctcaagcacctaaaatatacacaaaaacataaataatataatattaaacgttaaacgtttaaacgttcaaagttttatagtataaaattgtgattaaaattatcgatgtgggataaaatgatgcatgttaatgttagtacccagcacggttgttttgttcagaagcggctcgaaaggcaacgcaaacacttctgactcttttagcaccaatactagagctgcttcccatgaactgattcaaatggattcccattttcttgtaatcccaaaactccttatccatcctatatatatatatacaaataattataaaccacataattaatgtatcccattatattgaagaaggaagataattaaaatccataacttacagtaagtttctgagatttctcaagagtttttcagactcatggaagtagatgtttacaacctcagatacaaagttaggtgagctctcatcttgtagctgttgcagctgcaagaattgctcatccaatactccctacaatttatatataatacatacaatatcaaacaaaaccaaatatagagtcatatgcatatgtaaatgtatgtaaatgggccatatttatatgtacctggtgaaagagtagtgcgagcaaacgactcatatcggcccgcaaccgatctgcacccaaccccaacatccacactggcaaacccgttttggctattctccaccttaacacctatttcaattgcaaaactagtacaatacactactgtatgtactagtactaatataactattattagctagtagtataacttattagtactatcactactcaaacttgtttgttttgaaccccaaatagatatttatatatttatatccttctaacttggtttcagggggattatttaaggttattcctagagctagcgggaaactgatcagtttcaactcatagtcatactctactattattaaatacatatttatattattccaggaacaatcaatagagcaattaatgaattatatatttcaaattttgtaacatatagaaactcatgaaaagagagcgtggaatgcacattccttgttgggactttttgggagtttcgatgacatgtcatgaccccatttgacttattattattatatatatgagagagtgaaattatgtataaaggggttattattaatattatattaattgatttattaagtagtagcggtgaaaaagggcgtgcaatttgggtgtttatcgaggtgaatgtggggtatcaaccggaccagcctacaaactacggccacgggctgagccagtgaggggaggtggtcatgacctgttgttcccttaaccagtcacctcgcgtgctgtctctctctgctgccacagcgttgtgagagagagagaaaagaagagctcgtccacactctcttctgtcgacaactgcctgcagccggtaaaaatgtcagtttccagttaaacccatctcattaaaacaaaaaaatatacctataaaattgtttggagcatcacttttgttcttagtatttttctattattggtatatatatatataataaattattcagaacttgttaaaagcatctcacatatctattacatttaagttattcaaaatttcactatttatattttattaaaaaacaaaattatttaaattgtgggtactttttgacatttacattagtttatttatgttgtttacatttcgagaaaaatgttctcacaaatattatttgttttgtgtagtgactgttttggtgcattgaggtatgtgtgtgtggaaaagaaaagagtgagttgagcagggtgtggtgagggtgcaggagcagagtcatgcagacccacccatgagcatgatcccccggcacacaaggctgtgattaacagctgtgtatgtgattaagctgccacgtggcgaaatgggtgttactcaaactttgtctgtttgtaaagaaaagaggatgatgataagggacttttgaaaagggttggctggttggttggtgatggggaactgcttactctgtctcacagtcagactactcagggtatgaatggaagcacaaaattataggccatgacttttctttctttctttctctctctccaaatatttaattttctaatttttagttcccaaggtacttgtacaactactacagtacaccatatgaaaagaatagtcatgagttaccacttattaatatgcccctcaatatggggtatacactaagaataacatttattatttttgttttgataattacttcctttttcttttttctttcattttccctatcaacttggaaataaggcactaattactccacctgaaaagttcataattaatttgtatcccaactacccacacacacccttatatacaatctttcattcatctatttatttgtaaatgctaaaagggtaacggagtgcttagcaccctcttatgtgtcaatattgttattggtccaactaagtattgagtcttatcgagttttaatattatagtttttagggaatatcgttagtcaatcacaacgcgacatgtcgagaaggtactaagcaccactgatacttaataagaatgctcttatttgtatctcatggatcatgatcaagcatgaaatgtaccaacaaaatataa

SEQ ID NO: 227218 - DNA, 3834 bp, Cannabis indica
tagattctactaaatcagaagctagttttatttttctctgattatacaaaaggtatacaattgtgatgagacaatatgtatttatagagttagggaggggacttagctacaaaaccctagttggactgggcctgctcatcaaaggcttcagtcaactagaaaagcccacacttctgcttcacctagactttactcacagatgctaagcccattaacaattgatcaccaacaacatgggctaacacagcaaagaactatccaatcaacccaagttttaataaaaccaataaaatttaatgtaagcccaaataaaagtctaacacatacttccaggaacttgagtggaaataatttcacaggtcctattccagatgcacttcttgaaataatcacaaatataaatatagaatttatataagctttgaaggatatgagaataatcttttaattaatgtatggcattaattaatgaaattaaatatatataattttgtttgcacagcattgatacaaataattggaatagtactaatgcatgcccatcaaactcatgcggaaagaataataaaagctttgtggtaccactggctgcatcactaagtgggttgctcttcgtctgctttactattgtggttattatttggagactaaggaaacctcataataaagctgctatcaatttagaaggttaatttttaattatatatatatatattctggttatattatttattttagtacgtacgtactttcagagtttcaattactagttcatgttctgcaatgtgtatatttggattgtggatttcttgcagagaataaaaattgagaagaaaaaagtaaattcatttttgttgtatatatatatgttcaagtaaattcttgttagggcgatattatttacaggtgaaaacgtaaagtcggaggataataatgaagatgatcatgaatcgtataaaaataataaaatggaacgatacacatactctgagattggaaaagtaaccaacaacactttcaaaaggtaataggtgaaggtggatttggaaaggtttaccatggttacttaaatggcgttgaagtagctgtgaagatgctttcttcttcatcccttcaaggacatagacagtttcacgctgaggttttcttttttcttctttctaataaaaaagcatatatatatttatcttttaataatacataatctaattcatagtacaatatgtatattacagctaaaactacttttgagagttcatcataaaaacttgactactctagttgggtactgcaatgatggatccaatgttggactcatttacgagtacatggcaatgggaaacttacgatcacatctttctggtttgttatattatatattgtttaagtttatataattatgatcatgaatagataataattattatatattgttacatatttaggtaacagaagtagtggcattataatcttgagttgggaacaaagacttttaatagcaatagacgctgcacaaggttcgtaaacatatatatacgttttccaaatatatggtttgacgtatatatatatatatgttcttattacctatattgtaactaattaagttttctcttaaataaatctcccatacatattatttatttcctgtccgctttactgaagaattaatattattatgctagttactaataaacattaaacacttgatcaggactggaatatctgcataatggatgtaagcccccaataattcatcgtgatgttaaatcaacaaacatcttgttgaatgagaagtttcaggctaagttaggtgattttggcctttccaaagtattcggaaacaatcatacatctacatttgctgttaataccacaaccactcctgttggtatgtcagcaagtattgctggcaccctcggctatcttgatccagagtaagtaaatatcattttgatcaatataattatagattgtttcaaaatgtttaatatttatataaaaatgcttataatatttttttttattactttcaatatagatattatacatcaaattggttgaacgagaaaagcgatgtttatagtttcggaattgttttattggagataattacagctcgacctgtggtagcaacaacaaaacaaaataaacatattattgagtgggttagttcaatgattgctaaaggagatattaaaagtattattgatccaaggttgaaacaaggtactgttgatattaatactgtgtggaaattgattgaaatatcaatggcttgtgtctcaaaaacttccaacaatagaccaactatgagccgtgtagtgactgatttgaaggagtgtttgaccacaaatataactcgaaacaacagcagcaatgttcagactactcctgaatatttaactgattcacatgaaaagtatatggcttcagtagaattttctccaacagctaggtaataaacgatgaagaagatgatatagtaatttagcctgcgtcaagataaaaggaaaaacttgtgtgtgtgtgtgtatatatgtatgttttctttctgaggttttctgtttcttgtacttgttttctgaatacattttgtactcttaatcgtacaatttttcaactaaaattgtgctgttttttaatttctacatatgccatatgggagggagatttgaatttgggatctacttttgtaaagagaagtgtcaaagtactactaagatattagtataactagatctagatattataagggtgttaggattgaagttttatgggaataggaatttgaaaacaagcctattaacacaaagaaggatagatgaaaactatattgggaattccctccccttaaaaagttgattagaaaatcttgcttgccagtctattacttcaatcgactgcctatacttgcgtactaaaaaatctgtaacacttggcctggaggcctttagaaggtgaagagaaaacaccctctcatggatctccttaacaaaagggatttccattaaatgatcatcatcctcaatcccaatttttttagagaataaatcatcaaaatctaagggaatctaaggctggcatatgttttttatcttctcatttaaacccttaccatctttcaaaacccaaatttggttccttcttctgtaaataatagtagatggatggaaaaaactcgagctcttgtcacccaaatgcagccagagctaattcttcttctttcatcgcgaacgatgcttctgcgtcccattctttattgtttgtcttttctgtatttgatgtggctgcattacctttagtttttttttttgaattcgaaaacttttatccatgtgaccatacttcccacaattataacattttctattaaatttattattattctttgactgacctctttttttgtctttcttttgagctccatctgtttggtagcttccatatatgatgactatttttgtcatcatgttttttagaatttttactagcaatttggtcggggttgacctttcttatcattgcttaagagtgtttcttcatcactttttttgagactttagatgtttgcttagctaatgcttcttggttagctagcaagttttccaattcaacaagagaaggttggcttggcaagccttctattgcagcaataaaaattttaaatttttggcttcaatccatgaataataattcttctaattctagcatctgacatgccagaatcagaatctaatgcagaaatttcatgacaaaaagatcttaccttattggtgaagtacgtattgattttcgtccctttgcctggttgagagaagcttaatctcctat

SEQ ID NO: 227219 - DNA, 3309 bp, Cannabis indica
tttaaaaaaaaattaaaaaaataataaatggagtaatttctctaaaattaattacttgctccaattattattaagtagtttgataactaaacaaacaaagcatcatatgtcgactctctaaaaagacgtgagctaattaaaaactttcttagattttttctttttggtatattgagatacaagattttttgaatccattttcacattcatttttggatacatgcataaataaatgtaccaaatgctgcaaagaatagttaattaatatgtcgacatagacaaattaataattttgatgtgctaataataataaatacttctcctatattaacataaatggctgtaattaaaagcaagataaattatataacttctcaaagggtatgagaagcagatagatcagagaagaactgacttattttcaagccatatataattcattacataagagttttgataaacctaatgtatatatttccaaaccaactaattttgtttttcttttcttttcttcaattgatttatgctcatgtatagtactatcatttactatatataaatctcctgaattttaatgtatatccataaatttaaaagatatatattatatatattcactataatatgtgatgatatatcggcttgtactttgtttgttttttagttaaatgtacattaaaatagaggaaaaaaaaagaaggctggccagtgacatttatctcttgattttgtttttatttttttctcaagagaaaagggaccacatataattattaggatttttaattaaacaataatctccattactaccagtttcttatacaagagatcagtttgagctggattctctaattaatattgaatcatgatctcacttgtggatctataaaaaataaaaggggaccagccaaatattaagaagctgataattaatatagggtaaactcccactaagtatggatcactgtagaattagaaggcaattctgttatatattaagggcatttgaaaattgcaaactggcaattgggacctacttgtgactattgtgatgaaatgccatatgtgtatgaataaaccaagtaaagtgccagccaatatgtatataaatgtatatataattctctctccaaaaggataagaggataaaggtggatatgcttcacttttttaaaattaggcaccaaataataaaaagaaaaatggaaaattgggagtggggttggatatgcacctcttggctactaacgttaggacctcttggcatgttgaatgaatggataattgcgtgacataatcaatgaaaacgacaaacataataaattaattaaggagattgattattttagtaatttttttaagttataataattaaatataaaccagagatcaccttcttgattatggaagcgaaaccttaaaatagtgctatacataattggaaagaataataatgaagggtcaagaaatataaatgaaatgacaattaattaatagccttctccaactccaacaaggaacctttgtcattattgtttatgtttttgcattttgccacgtctgaatatgctagttaggttttattatgattattagacgagactataatatatactgatatttgaattttgatcattattattattatatatgtgttacgttgtgattgtggttaatttgatgatcataatgatatatcgatatgtctataaattaatagttaatctctgtgcatggctagtcaatggtcacgtacgagaaaaaatatattaattaattaattacacattaatatattatttatttttgtacatgtaaactaattgtaattatgtatatatatattatattggcatctcttgaacttgaaaggtgaaaatgtataatatttatataaattgtacgctaattaattaagatttcaccttagtttgtgggctctcaattttttaggtccttaacaattttaggtccttaaattccatttagttttactaaagcacttaatatggatacaagttagagtatgatttaatagaggaaattgcaccccatacccacttttcattatctccttttatttttacctttccttatatattatttaatttatacccactattataagtaaaattcccattttacccttacctgttcatttgattatatatatgaagagagatagaatgcatttgaacaaatacttagaagacatttcattttagatatacttttatatataaaatttaaacagtgaaataaaagagaccccattacataaaaaagtaatgattgattaaaaaaaaactcataaaaaatacaaaaataatgtgatggtgaactctcagtgggggagaaattgaggatttaataagagattaaatcttgagggtattttaggcatattacacttagaagcaggtatgtttcaattgaattttaatatggagtgactttttattagttattaaagaaaagaggtaatcctcaatttctcccgatttaatacataacaaagtttaaagaatattatttggaatatgagtatataattaccacattaggtgcttgttagtaaaaatgaactaaattgagcgaaaattctttaattcaatagtcttaataatttgagggaaatttttaaaaaactaacaattttttttttaaaaaagagaaaactaacaaatttgaaaatgtgatttagtatatatatatgtaaaaatttaaagaaaaaaatatttattatgctaaaatatatatatggggtttatatttgtatcttttaattattattattaatttaaaataccattgatttcgacgcccactaaccttatatttcttttttctaagatttttttttttttttgataaatttaattacttgccaaacacaatagttagctaattactaaaacctaatctgcaattaaccttttacattaatattgtttaattacaattacaaacaatactaaactatatatatttttttttttattaatttgaggatattataagagggaaataaatatgaggatttatatatgagaattgttaaaacatattagtagtagcacccttttagtgatattgttattagtgcaaataagtatgaggttccatataatttaataaggtaataattttaaatatcgctaatcaatcataaaatgttacttttaggtgatgttaagtactattagcgtccaataataattctacataattataattaatcaattaataattagccgtaaaagttggtagaaatattatataaatgagtaaagggcacttatggtgtat

SEQ ID NO: 227220 - DNA, 5939 bp, Cannabis indica
tagaagagtagcttgagttgcttagtgaattcttcatgaaatcgaaagtaaaccatatttttctttacaaacttaaatacattcagtaaattctttattagatcaggaacatgtaataaaattttcaagattaatggttaatcaaaaaaattagaagtgataaaggaatgacctattagctgcatgggcaaacctattttgcctcccacaaacatctaatctggtcaattatagtttgagcagactgcaatagtagaagcatataaagtgtagtgattagttgcaccaaagtcaggataccaattagtctcccaactattgttattagtaagcacatttgcttgaacctaataattatgaggactagtaggcctactattggcacccatgaagcttttatcaaacctatcaaaactggttaaagtggtatgccaattttaaagcaaacttggcattatgatcggttgtcaagagtatagaatctacctctttttgtaggattgaaagcacctctaatattggttggaaattgagagttgggagactcaccttgatttccatagccacgaaaacctcctttgttaggtgttgttgagattatgattgttgccaaacatgttccattgagtttgagatgaagagatcaaaagttatcttaaccatagttggttaagtttgcatcaagagaagctgcttgtgattcagcagtaatgtgagttgtcatgtcaacctccttgtcactcttctcaagagtttcagaggtgagaaaaagatctttgatttcaaccatagtgtactgttcaattctggtattagtggatatgacaaaagtatcatattcacttggaaaacctttgaatattgctgctatgtgatcctttacagataagacttcacccaccgaagcaagtagatccacattttctttgatcttgagatgatatttattgagtgatgatgagcctttcttgagattctgtagcttagtacaaaatttcagaatctcttggcacgaacttgaagagtaaagaagttttcaagagttgaccaggtctagcttgaagaatcacatccaaccattcgtgctaagagatttggagtcatcgaggatagtagccaagaaacaaaaggctgatcttgagcttcctaatcaagaaaggtcagactgattttgttgagagcacaatcttcaacatgaaggaattttaatacaggattgtgtagctatgcaaccaattctcacgaattgcagctagaacttgttgctttcacaacaaaaaattgtaatcgttgagcttgatggataagctgtgattgaaatacataagaggaaaaaaaatcattcacattgtttctcctagactgtcggagacatgattgttgtttgtacgccactgacaccagagtttgaaggatcactggagttggtaacaacattcgccgtcaagagaggccaatggtattttgatactatgttagattttctagacattcttgtaatcaaagaaaagaaagaagggaaggaaagtagggagaaagatagagaaaggtgaagaattcaattgtgaatttctagtaaatgtactataatggtaacttaaatacaatgtatacaacaaattatgagtctaaaatcttaacaaactaacagcttgacagctaatacagctaactaataaattgttaagcataagttaactataataactgattctcgttcacattaagtttaacaaatcataagatttttgttattttttttagctatatatgagattagagggtatgtaaagaaaaataaattggtctctacctttggtacactcttttattgaacttgattttatgaattatgaaatgaaaattctattgtcccatgttaagaaaatgtggatagccaaggcaacttggctaattaaaattatcttcacacattttgagatgaatcatgcaaagttatctacccaaaaagttaataaataaaacctttcaaaaagaaaagataataaataaacaaaagtaaccatttttcattatttgctgtgtggagcatatgactttatgggttgccaaatctgtcacatcccagtcatgcagcagacccactcacccacttctcaacatccttgccgtctgcaaaagtttgtattggtctattagagaattgaaaaaccatattctatcataaatattcccaataatgttccacatctccccaaaattataattttctgtatagtaaatcgaaattttaaaatgatttttatcaaatgttaatctcaagaaacaattataattgattaaaatattctgtgtttttattgttttgatttaacaataataataataaatgtaaaatgtgtgcggcaatgtacagtgcgatccaactatacagctggcacttcttttctctcactccccaaagtaaaaacaaattacaaagaagataaagcgatacgacactgttgttggcccacctgcttcgcactgctactatttcctccactcgccataaaacgctcgtcgtttcaatggcgcgtcgttttctcacggcgagtacgtaaatatctctactcgcgcatggattggtcatagtattccatagacatgcagcagaagctttgcgaggaaaagtgggagctccttttaactcgtatcgccactgacaattgaacagcctggccaaccagctgtgaatcgcaacgtggagccctatcattggttaaaatctgcactcattgttctgagctgagtgccgtacgctgtgcccactcgcacagtacccagcttttgtccagctaagtggggaatttggtaacggctatatttttttaagttttatttctttgtgacccttctcagattttttttcccttatcttacgggaacttgtgttctacgtggttgtccagctgggacatagcttgatgacgtggccaatgagatggctaatttgacaagagagagaaatcaaagggcttgtgaaacaagccaatagaattggctataaaacccgggtgttgttgcttgtccctacagatcaacttgtagtagtagaatttcttctctctgctctgcattatcacccctccctcttctctacatcttcttctttctctgctcttctctaatggcagctttagttgctttgttagtgggtctggtggttttggttggttctgttagctcagcaaagttcgatgagctattccagcctagttgggcgttagaccattttgcctatgaaggagagcttctcaagctcaaacttgacaactattccggtactttaaccacaaaccattgaaaatgtttttagtaaaacgatacttaataagtttaaaacctctcaaatcttcatgtgctacccattgaaaatgtttttagtaatataaacctttcaagttttcgtttttaaccatgtgccgtgtttttttcggtttgatcactcttaaactgactaaactattctgttgctgggttttacaggagctgggtttcaatcaaagaacaagtatttgtttgggaaagttactattcagataaagctcgtagagggtgattctgcaggaaccgttactgctttctatgtaagcatatataaaacgtaattttgtgttaatctttctataatgctattatcattatattaattagaatagttggcctcttttattagtgttaccatatttgagtacagtacagtaattattcttgaatagaccggtcgttcccattttgtaatgttgtcaacacagctcagccaatagttagtaaagttactttagggagtcatatagatgacttggtggggtcccccagttaaattatttacaaacagagtgcactctattgcattgaatcattttacttttcccgttacagacaattttacctttggatttgtttaataatgagtagggctactacaaccattattattatgctactagagcctacctgccttaattttttttctactcgtgaatctctgtactaacttaaatacagcatttaatattatttattgatattgtattcacctgtaattatcaacaagtaccataaatcttatataattgtgactgattagtgaactatcgatgtatctacttaataatacatattgtaaactgatgatcatttgttaacatatatatttttttttgtttttttgaatgtagatgtcatcagaaggtccaactcacaatgagtttgatttcgagtttttgggaaactctactggagaaccttactcagttcaaaccaatctctacgtgaatggagttggtaacagagaacagagattgaacctctggtttgaccccaccacagaatttcattcctactccatcttctggaacgagcgccatgttgtgtaagccctttccttcaacatctcaaatatgcatttttaggtataaatgagagcctttttctttagggtgaatgtcacatcaatttgtgaatggtgggttctactgctgcttcaaacgccatttgaaaaagaaaaaaaaaatggaatcttgtgtacgaatgtatagagaggtcccctacctaatacctatttctctgatgtcaccaggctgtacaacccaaccattttttattttgatgaattcacgaactaaattacccaaaaatggttcaattgtgtactgtttcgatattcaatctgaaatatatatttctttttaacgtttcaggtttatgatagatgagaccccaattagagtgcacgctaacttggaagaaaagggtattcctttcccaaaagaccaagccatgggggtgtacagctctatatggaacgcagacgactgggccacacaagggggtcgggttaagactgactggtcccacgctccattcgtagctacctacaagggtttcgaaatcaatgcctgtgaatgccctgcatccgtcacagcagatgacattgctaaaaagtgccggagctcaaccgagaagaggtactggtgggacgagccagtgttgtccgaacttaacttgcaccagagccaccagctcatgtgggttcgggccaaccacatggtatatgactactgctccgataccgctaggttcccaaccgttcccactgaatgtgtccaccaccaccactagtccatgatggtctggtttggtgtgtgacaatgtaaaaagagaaagatggagaaaatgaaaaatgaaaaaaaaaaaaagtatggagcttggtgggaagttatgcatgttgtgtataaaaacatgttctccatgttttttaatttttggtttatgttcgttcttttgttcgtttactcttatttccttcagggtgtatgatatgattagttttcaatatgatttagtttctacttacaaaagattttagatattggtctctattttctttttaaagaaggtcactaacttattattatcgttaagtgaaaacaatctcacaccaataaatccatcaaatttaataacaataataacattaactgaccaataaattacctaaatattttaattgtgattattagatgttatttttagaatcggatagcaatggttggatgttcgaatatctaaattacatgtatattcaattgaattaatgaatattattattatttaattttaatgaataattaaaggctaattagtaattttttcccctaaattttgacatacagtcaatcgtgcctgctgaattttttttgccgttaaaaattcccctcgaactattgagatggttaaatttaaggacttttatctaattttattcaattttactgtttaaataattgtttatgtactaaaccatgcttcccaaactttgatatgtaccaaattatgctcctcaaactttgatatgtactaaattataccccttgaactttcatccatatcagaatttcttactaaaattagacaaaagtccttaaatttaa

SEQ ID NO: 227221 - DNA, 4266 bp, Cannabis indica
aaagactcgagcattgacttatacttttcttttttaagtcattattataattttgaatcatccataataccaagagctagtaagtgcgtctctcttattctttaacatgtccattaacaaggccacaagagatgagtcaatgttgactggactattgttaatatgatcaatcatcaatggcatatctataagtggttggcttcgatagtatggctttattgtcaaagaggcaggccatgtgaagctcaacttgttcatttggtccatcctttttgatcaatacacttgctcccatttttatggtcaacaagtcaatccctacggtagtttgattttgatccaccaattagttttttgataaattgttttgagcattcttatttgatattagtattgtttaatactttttagatgtgttattttataatttgtaaagttattacaattgataattatatgaaacacgatatttaattataccaataacgatattgacatgtaagaagatgttaggtaccaatgctacctttaatagcatttatgatcattagttatatttcgaaaatgagaaatgttaagaggcataccaatagtgtctagcactgttaggactttattagtgctatttttgagtaggttcttaaagtatttttagtgagttttagttgtgttttggacaattttacgcgttttggttgttaatattttgcaagtttagtagtgaagaagaatagaacaaagtcgagaaaaaaaaatatacaaaaatgatgaattaaaaaaaaagtaaaatttgttgctagagcacaaggagatgaatccaagaaaaaaatttatgattcgatgtgattggagctttcttaattgaagaactggaaaatttacaatagcgccacgacataaaaattcaatgttagggtgctaaaaagcaaaaatttggcattacagtcgtgtttagaaggtttataggcaggcctcattattgtgattcaatattgaggcatgagacttgttgttgcttactacccaaattggagctttaagggtcgcgacatgctcttgcagtgtcacgacccgctaggaaaaatctgaaagatttgtgcgtgcttaagagacacaagtcacgacacactctggcagtgtcgcggcccacctagctaattcgacgagatttcaaggttttaaccctaatgcgaagctatataaagggacttttgtcacttttgagaataacaattttgtgggacaaaaattggttgcaaaaattgctctggagactttcatcaatattttttcgacgagttttttcttctactttattttcttatgttttttattaattgttgtaagttgttttcagtgactatgagtagctaaactttcaattaggattgttaatggatattgcttgacactttatttttattttaatgtgatttaattattctctaattttctatgtgtatcgatcttattcgtacttaattttttttaattgtctgatcaccaattagctatttaatgattacaatacaaaatctgagaagtgaatattgattatgctaaagtgaatagacacagatttcgatataggacaagagtacatatatggtttgtgtagcatttatgatttatatccttaatgcctcatatttgttaaatttatcacgagagtttaaagtttgcatatgggttgagatttatatgtcctaaccttaatataagtttctttcgtaaatcaactattgcatgaaaattggaatttgaaaattaaattatattaaaccatataaagtagattcaatcgaaattaatcaccctaagctttaataattattaattttaccttaattatttttttacttgaatttaaacatcttttcttatttttattgtcaccaaatagaattataaatttaattgttcggtaattaactaaagcccttataggatcggcctcactcttgtaagtctattacttgtaaacgatatgtatacttgcatgttggaattttcacaataaatttttggtgctgttgcttgagactgtttttgttaatattaaatcaattacattttattctaatttggtttccctttctactttttgctaaattgtttgtgtcaacttcttattatttcatctcaggtacctttggtttatgtgatgtcaatgaccaactgcaagagtgcctgttgatcttaaattgagaagacatgtaggcaaaatagaagaaatgagaggttagaaagagttgtaataagggttgaattagaagaagtcatggctcataaagagaacaataagggtgtagtggaccaagtattgcccataatccacctgacagaagcttgagggataatgtgctacccaccacgataggggtctagtttgtataaaccaactgccattgaagcaaacaattttaaaaccaagccagtcattctttagatggtttaatccacagtctagtttgcgggactaccttcagaaggcccaaacatgcatttagaaaacttcatgcagctttctcaaacattttagatgaatggagctagtgtcgatgctattcgcttgaggttcttcacattctcactgagcgaacgagaaaagagttggttagtgtctttgccacctaacgcaatcaaaacttaggatgaactagcactgaagcttctctctaaattctttcctccaacaaaatctgccatgctgagaggcgagatcaacaatttctactagcttgacaatgagtctctctatgatgcttgggagagatttaatgacttgatcagaaagtgtcctggccatggaattgaaaagtggatgttggtcaataatttttacaattggttgtgtggtactactcacactctcatttatgttgtagctggtggggaattcatgagaaagagtgctaatgaagcttatgagcttttagaagagattgccatgaacaatcaacagtggcctagtgagaggagcaactcaaaaaaaagtggtggggttgcatgaagttaatgcaattacaaaactaatttctcaagttaaaggcctaactaaattgatgacaacccaagtacaacgagcacaacaagttaaatgtgagttatgtggggggtacccattgttatgagcaatgtcaatttgttgatgttgatgaactgcccatggagcaggctcaaaatattgggaactatcctcaaaactataatcatactcaagggattgtcaacaacaagggttctatcagcaaagatacagacattagcaatcccaacaatcgcaccaaccccaacaagctcaacaggccactcaacaacaacaaaattttgatgcaagttctagtgtccaaattgactttctattacaatttatggctgaaactatggcttccattagaactctaaagactcaaatggggcaattggttgctaaattcgccaatagcaccgaaagtaattttcctagcacaacggaggtaagcacaaaagagacttgcaaggtaataacgtcaaggagtggaaagaattatgaggggctgagtgataaatagaaggttgaagagatgaagcgggatcaacaggcacatgaagatgaagataagatgcaaggtgaagaaaaggttattgatgacctatctggtaaagacgaagctacacaaccaattagcattgagcatcacataaaaattccctatcaacaaaggctctgcaataacaatctggacaattagttttaaaaattccttgaaatattaaagaaattgcacattaatattccctttgtagaggaacttgagcaaataccaaattactttaaatttattcggaggctttagcaaataagaagaagtttgaggaatatgagacggtgacactgaggagtgcaatgaaatctatggaaaaaactgtttggattttatgccttaaataaaacctatttcaatataatcttatttgctatcaatagaagattagaagtcatttaagttaaaatgtgattttattgattatggtttaatatacaatatctgataaacctagaacatgttgttattcataattacagtgatgtcattacagtggaaagtaatttttattatatgcttcaaagtttatgtctcatgattcattagtgtactggatttacacaaatgtgataatcagcggtaaatcttacttacaccttgaataagtgttatgttctttctagggcattggtaaggtatgctagtatgggacgtatggagtatacattgaacttgg

SEQ ID NO: 227222 - DNA, 2427 bp, Cannabis indica
taccatccgaaaccaccctatcaacacattcaatcacctccgaataagcaactgaggaagcagtaaagagattattaaaatagtccactacgacctctgctagaccgtgatcccaatcagtgtaaacaccctgctcattttaaagttttgaaattgagttgtgcctcttgcgcttactagccatagcatgaaaatacttactattgcagtcaccatctttgagccaaagttgtttcgacctctgcctccaaaaagtttccctctaatcaagaacctttgctaacaaaacttttgcctcatcatacttaattatcgactgagcatctcttttattcttcaaagcactcaattcatttttatactgttgaattctttttttaaaattccctgtcaagtctttaccccaccgagagagattagtagcacataggtttagttttcccatcaccgaggcctcaccagtaccctcccaacaatctttaacaatttgaatgcacattggctccttgagccaagcattctcaaaccgaaaacggcgatacggggtatgattactactgatgttaggctcaagaaaaatgggagaatggtctgaagaagaatgctcaagattagaaagaagagcacctaaaaaaatctgaagcaaggcattcgaaacaagggcacggtccaaaagagcttcaacccaggagctagttcctctgcacttctcccatgtgtactggtaaccgacaacttccaaatccaccaagccacaatcgaaaacacaagactggaatccttctagcagccacctggggtacgggttgccacccctcttatcttgttgggacaaaacattattaacatcacaaattacacaccaaggaaggtcagacctattgataaggcttctaaggagattccatctctgctactgcctgcctctgttaggctcgccatacaaccccgtgagcctccaagaagagccaccttcaatagtaatactgatatcaatatggtttaaagaggaacccaacaaagacccatcgtctttgtttctccacaagaggaccaagcccccactaaaaccttgggcctccaccacaaaaataccttcaaagcccaattgatttccagcccactccactctacttttattacacttagtctcacacagaaaaaaaaaaattgggtttcttatgagtcacaatctcttttaggaattggaaagtttgttggttcccaagcccctggcaattccagcttaaaacattcataatagatggcgggactgcaaaccagtacccgccccaaacaagttttttccgttaccatcacctttcgaactcaagcccaagtcacctgtgtccatcatatttatattgttcctttcattgttatcgaaaacattaccatccactccatgaggcccaatacaaataaattcattcaaagatggcccaataagcccacgtggaccctcaaatacagttgtcttccttttttttgaatcaaccagctggagggaaacactattactaatagagttattaagaacccctttcaatttctccaaatctcctccattatccccagtaatctcttgagcttgatatccgcctgagactctagcaccgacccccctaaaatcaggaatattgatatctgattgttgattgtgcggttgaactcttccagcctgtctcccactggcctccaatctttggtggctcccttggaagcttgaactgcctgaactaaccgtcggccccgaacgaagccactgagctccaatataatggtgtcttctacgcggaggagccttcagttcagcactataaggcttctctatcaaatgcatatgggtatcaaaaagacaatcacagaaccgcttggaatggccaagaatttcgcagataaaacaaaaggttggcagatcttcatacttaaagccaacagtacatgaagcaccactcttcatctccaatttcatatttctttgaagtggtaaatcaacccgtattgaaacacgaattctgagataattcctccacactccttggaaattattgggatccgatttaacgaaggtcccaatataattcctaacatctctaataaccctttcagacatgaatttagacgtcttatcgtgaagttagacccaaagattaagcgtgtccagtgttaacaatcgtggattttcaccatgtttaaccctctcaaagactagaggcgcaagatcaaacgtccatgggcttccttcgattactcgttcaatgtccacctcatgatagaactgaaagatgtagtggttatggctaagctctttaacataaacacctcatcctggttgccaaagggaagccattttgttttgcatcacctgaagatctatgttatgtttcgtgagaaaacgtccaaccaaacaccatcgatcatcaa

SEQ ID NO: 227223 - DNA, 1815 bp, Cannabis indica
taggatgaacaaaattagttttggagccttatttgaaaccaaggtaaaacatgagaaaacaaaagatatcatggagaaaaattttccaaattggaatttttactctagtaatataatatttgggagaatcttgttaatatggaagatgaagtatattcaggttagtattgtttgtgaagagcctcaattagtgcactgcaaagttaaatgttgtggttttcagaagcctttctttgtcacaaccgtttatggttgcaactcgatggaggtttgaaaagctttatgagattctcttgctggtattgggaagctcaatgagccttggatcatctttggtgatttcaactcaatgttcagctttcaagatagacatggaggcagacctattcaaaataaagacaaaatggatgctcaaaattggcttgcaatgggtcaagttgaggagtttaaatgctcgggttcttattttacttggaaaaacaaacatgaggtgggagataagatattttccaagctagataaagttttcatcaacgatatctggttaaaggattttcctactactgatgcttgctttaaatgggaggttatatcagatcattgtatgtgtttaatttgccattttgaacacaacaatattgggattaaaccttttagatacggtaaccattggctgtcatacccaatctatgaaaaagctgttatggacagttggaataaaccagtcactggttttgaattggatagtctggtgcagaaattattcagagtaaaacatactctcaaggcctttaataaaagcgcagttggagatgttgcaatggagtataaccaagccaaagctagctactatcttagccaagaaaaggctgctaacaatccaaatgatgtgctaatccaagaagtagtttcagagcacctgcaggttttcttgactgccaagaacaggtacactcaagtccttagacaacaaagtacgataaattggatcaaatttagtgatgaaaacactaattattttcatgctgctatgaggaaaagaagactggaaaatagaattacaacttacatgaagggagatgttatggttgataactttgaggaagtggttaagcactttgttgagcattttgagagcttcatgggcagtaaaattacaactacttgtaagatagatgtgatctgcataaactaggggaattgtctcagtgtggaacaacaagtccatttgatcacccttttctaaaggagatgttaataaagcattgttcaacatccactcttcgaagagcccagggcttgatgggtttggttatggattttacaaagatctatggaacaaaattagagatgaggtctctaatgcggttctatgtttctttgaaaatggcaggttaccttaaaacttgattgaaacaattttttctttaatccctaaggttgctaacccttccactgcaaaggatgacagacccatagcttgttgtaacacaatgtacaagtacatctcgaaactgttatgttcgagactttttgaagtgctccccaacattatccagaacaaccaaggcacgtttatcaaaaataggcttctggctcacaatatcataattttccaagaccttctcaaagggtactcaaggaagaatatttcagcaaggtgcatcatgaaaattgatctgagtaaggcatatgacacagttgattggtagtttgtggaggacttgcttaagtctctttgctttcctgctcgattcataaaatggattatgacttgtctgaaaggaaccaattataacctgcttatcaatggaa

SEQ ID NO: 227224 - DNA, 3754 bp, Cannabis indica
tttttttctgtctatagcaagcttggtgtccctatcaagactacaatatctgctaatgtacttgaagaagctatgagtgggactgttactgtcagaccacttccaattggaacatcagtcagcggaaaggtgcttgtttagtttgctatcgtgatggatttcacattctttctttgtattccttattcttatttgtttcttgtttcaggttgaaaagcagtgtgctcatttttttggtgtaacaatcaatgagcaacaagctgaggcagggattgtagtaagggttacttcaactgcacaaagcaaatttaaggtaatctattacgaatattatccttaaactttgattttaccttatttttgtctgtttcgtttgtattgttgatatgttaatactaaaattacagtcacattgatgaaattttccagttattgtatttcgagcaagacgaaactgccggtggttatggtttggccctacaggtactatatcgtcatctatgatggtacaacatttagtttctgttttgtaacttgaaagtcataattgtttaatcttagatgacattgaagtgtctagaactttggtttcacttaaaattaagataatatatttgtttttccatatgcatttttgtgtagtaatctaacaattcaatcaaatggcttggtttatataatatttggcaattggatataaatattgctatgccatgtcctctttctaggtttgttaggagtgggagaacatagaaagaagtgagaaacatatatgatcttaggaagaggaagaaaaattctgcttttattatgtttggtatgaacggaagtacagggccgaaattttattccttatttggtagaaggggagaatggaaagaaaggatgaactttaatttgtcgagtgagcactctaccacgtattgtttatttccctcctaaaatctgtccaacttttggaatcttggacaattgttcaagttttggatttttaatcttgtgctatgattttgttaactaaaggaggaaaaagtgtgaagaggagggttaagtgataggattggaaaagagagagtattgatcatgtaggtatcgacttaggtatcctgttagccattgatacttgtgtcccaaatggcttgggtaatgtcccttactctttgctcacgacccttcctaaaagaagttggatgagttatgattctctggtttgctaagaagcatttgcttaccatatatgaagcatcaagtgatttgatagtttgactcataatattgcatttgtaaagatgatttaacattgatgaactagctgaaattcggtaaaatcaaccaagtttcaatatattactagttatgtgtgtcaaaacttgttttgttatcgtgttctaagaagtagctaaaggtatcactctcttatttaacaggaagatagcgagaagacagggaaagtgacatctgcagggatgtactttttacattttcaagtgtacagaatggattcaactgtgaatgcggtatgctgattctttatcgtatgagtttgtttctgtttctagatctcgttacctttgaaggggttaactcgaagtttgtgattatttatccatatcgtgatgcagttggctatggcaaaggatcccgaagcagctttctttaagagattggaaggtctacagccttgtgaggtttcagaactaaaagccggcactcatatatttgctgtctatggtctgttatccgactgcttcattatcttgcttagaactcagtgtgttcttatttgctaattgcttatgtaatttttacaggagataatttttttaagactgctacctatacgatcgaggcagtttgtgtgaagacatatgaggaaactacggaaaagcttaaggatattgaggctcagattttaagaaagagaaatgagctacgccaatttgagacagagtatcgaaaggtgatgatcctttcattttaactgtaggtttgtattggctatttggtcatatgattatgtgtttgtaatatatctatataatctttctaggcattggctcgttttcaagaagtgaccaacagatacagccaggagaagcaatcggtaagtttcgaccgctctctgtttaaattattacttttactgtctggttgcttgaaacaacgtatttcaccgatcgtgagaggttaatgaagcctcttttggctaattaaaattttgtcacctgcactttgatatgtaccaaattgtgcccactgaacttttcaagtcgttaaaaatccctcccaaactattgagattgttaaatttaaggattttgtccaataggcagaaatctttgaatccaacaatctcaatagttcgagagaatttttaacggcatgaaaggtttagggaacaaaaattttaattagcttttttttaatgggataggatgctagtttatacaacaacgaattcatatcattttatcccaaccttacattgcaactttgctactcaggtggatgagatgctaaaacagcgagacaatatccattcctcgttctctgttactcggcctgtgaataatggtggaggagctggcagtggattaagtaatgggagtggcagattccccggtgaagattcgaaggcagagtctccaggggaagatgatgggaaagacaaatcagccaaaaagaaatggtttaatctcaacctcaaaggatcagacaagaaactcggttgaaaaggtgctttgaaacttgtttttcctttttgtttttcgattgaaaatggtgcctatatcgatcgatctgtacttagcgccctcttcatttgcagcagccgccaacagctcaagcaaggtcttctccgccttatattcaaacgttcacgaaatgttgttcattatgctaattttcccattttaagttgtgtatgcaaattagttttatagtgtttgtattaatgtaattcatattcatgtttttgcattgacttgacattatcatcattgatcatccaaatacatgtagttatatcaagctttttgatttttgatttattttatttatttgattttcatttttcatgtttggtttgaagagtggttggtatataatcctgtaaatggcaaatgcaaatcagaaagtaattatttgtgaattgacttattgtgaaaatgaacctttttaggttttttatttttattttttcttgcagttatctccttaacataaatgacaattgtttagaatttatagtttattttatttattggtagtttttattaatatatagctaggtaaatattattttgaattttatgttttgtaaaagatattatttggattttttattttgttaaataatagtttgaatttttatgttttaaaatagtataaaataatattttaaattaattttttgtcaaaataaatttaataataatttgatataaatgtgtttatacaaaataagttttatatctattcgtgttagaaatcatttttatgttagtaatcttaaaataattattaaaaattgagtttaggatcttatttatacgaaatatattagagttcacttgataatttttgcaacataaggagtttataataatattaactttatacaattttatttttatttttttgagaaaaaatattttagtaaagagttattattgaaaattgtgaaaagatctttttgtatgacattataattttatctttaatgaagttatttattactgcaaaaaaaaaaaaa

SEQ ID NO: 227225 - DNA, 4981 bp, Cannabis indica
tttattcccaatggagttgtttaggagtttcaggtgtgccctgctggatgaatgaatagcttcaaaatatacttttcttttataagtggaattgctggagcatcaaaacttggcacacatctaagttaattgaatatgtttaccaatcttacaagtactgcaaatatgctatgaatcctttcagacatcaatagctcacctgtcttgcattgctttagaagaagcccttagctgatccctacaggcaagtagatgaacatggcgagcatacttggttgttcctgtgtagctgtattaccccctcaaaccacagcaagtacttgctctttaaacaatggtgatactccaaaactcagtttcgcgaggtgagcctagccttctcgcagtctgctcctgtggcgtaaatcaaagattgatcgatcacctataactgtacacaattaaagagcatagttataggagatcatttgggaagattgtgaaatttgttttgggaaggacaacatacctaacacttcactactttggattgtcaaagggttaactttcataaccctccagctccccaacgctcagcttccgcatcctagattactcacattgccaagattttaaatacaattctaatccaagtgtctgctacatacttacatatgcataaaatcaaaaacaaaagactgtagtttgactctgtagtacttctatatcatacctgtccattaaatctggaccaattattccatcaacaaacccaggaaagttctccaccttgtcaataattgtccccaaggaacaccacctacttgatacccctcaaaaactacgggcttcaaattaccacgcactgcatatatcgcagcagtgtatccaggagacaggacctgagccatttaccagattttcgacttctcttgttgcaataacaaataattaccaaataaaattatgtagctaattagcaatctaatcaaatcactatcatatagtctaaatgggaaaacttaccaatctctaatcaaattattcaaagttaataataatgattcactatcataattgtgtttaagttcataactggtgtgaatctaataaccagcacaaaagtatcattacaaattcttcaagtccaagcattttcaattattattgcttattgctaaacagtctaattatcaccttcagaagataaggatggagagtgtcaactctaaattcatcaacaaagaaaacccggtgtaaattatatttcattctcactagttcaaaaaacaagagagaaaacgcaaaccaaaactaaaatgtacaaagagaaaattacataagaagataaaaacatttttcttcccaatttctattctatttattaggtctcacatgccaaaaaacagttctaatgacaaaataagacttttaatttattcaagttaattttgctttgattcgctaaaatagaatgagaaaactaaggcagcatggcatgcataccaaatgaaaataatttaagcaaatgactgatcgtccatattacactccccaaggaaaactttgaagccccttggcgaaccgcaggtgccttcggtgatcactgctctgtcatttgccgccatatgggcaataatcttgtaaatcatttcgatatcttcaggagcatggcaacgttcggcaacttggtccaaactcaatggctccgctggatctttacagctggcctcattaagtactgccaaaaccctcttctgaagagccaacacttctccggctgccttcttcccagcttccacaccaggttggtggtaagcattaatgttgacaactgaggcatatatccctactgctctttcatagagagctactagagcacctacagatcttggtgtcacttcttgtacagtaacagtaattgattccctatcatttgaatatagagctgatcttgtgccctgtaaaaacaaaaatgagaaatgctaaacggcatcttaggaagcatggacttgacacttctataaagaatgctgcccatctagcttgaaggagcctcacaatgcacgtggggctgccagattggtcggcaggcctacaaagctgctactctgtccaatccggcagccccacatggatcgtgtggctgctcagcctcgtgatgaggagcagcattgctatactgttattggtgcaaagtaaaaattcggatttcatatataacctcactaatagcaatttgaccttatatcaatgctagtaaaaaattcagtgtgtgtgtgtgttactacaaaatgaaagcaaaaagaaaaactggaaagacaagattttgcaataaaatataacctgtagcattccaaaaaggtagtcaccacatgtaacacctggttcgagctcccaatcatgaccagggggcctatctcttagtacctcaatgaaagtcacaaagaaattatggacaccatccctaagttgctgtatataggcatgttgatctgtactccctttgtttccatacacagtcaatccttgatttactctattaccatcaagatcaaactctttcccaagagattccataactaactgctgcaaatacctactaaacaacaacaagctatccttgtaaggaagcacaaccatgtccttagatccaactccatcacaagcccaataccagctcatagcaagcaatgctgcagggttatctttcaccacagtagttctattcgcgctatccatcaatgcagcacctttaagcatttctctgatgttaattccctgtaatgccgccggaagaagaccgacggcagacatctccgatgtcctaccacctacccaatcaaacatgggaaatctagctaaccacccttcaattcttgcagtgttgtcaagtaaagaaccttcttgtgttatagcaacaccctgtttagaaaaatccaaattggcttcacgaaaggccttttgtacttccaataatccatttctagtttctggtgttcctccactctttgaaatcactaacacaagtgttgatgataactccggaccaagctgagcaatttgatgatcaattccagctgggtctgtattatcaatgaatctaatcttgagaggaggattatcaggagccaatgcctcagaaacgaattgtggtccaagagcagagccaccaatacccactgaaagaatctgagtaaatctcccacctgaaggtggcgtaatcttaccactgattatatcatcggcgaaatcgcacacagcatcaagggttttctcaatctgtgatttcaaaatcggtttaggagcaagttcagggcttctaagccaataatgcccaaccatccgaccttcatcaggattagcaatcgcacctttttcaagatcctccatagccttaaaagcggcttgcaatcgaggctccatctgggtaacgaactcgtcagtgaacccaacacgactcacgtcgaggaacaagccaaggtctttatgttggtaaagccaatcaacgtacctacgccaaagctcgccgggatctttctccaacccatgattgttcttcgtcggaaaagcagacccatctgagtggtcgggagaaatgtgacgaggtagggagtgaggagtagcgattcgaggagaattgcgaatggggatggagagggaggaggagtgtgttgggagtgagaatgcggaagaagtgggtctgaggaaagggttttttctgggtttgagagattgggaagagaagcaaattcctgaaatggaagccattgaaatgaaagagtgagctttgagtaggtgtgagatcggatcaaaattggtgtttatacaagtttttcaatttttttttttttttacaaaaatacaattttgtgaaattttaaagagaataaatagattcctcatgtgattccctaggttgcctaatgcctaggttggctaatgatatagtgctcaagcaatttcaatgagaattaggtatgtatagtattttcttccgtattatattgttattagtataattaaaagtattaaatttcgtataactaaagaaaataacttttaattaaaaatagagcagtctgccgttattgtgctctgaggcagttaagaagtcctttatggttatttcccctgttcttgcttttttcatctctgtaaccgctcccttcaatccaaaacaatcagatttttgcctgaaccatgaatcccctcactgacaaaatgaaaggcaagatgacaattgttgaagaagatgattctcctctactccttgatgatgtcgaactccaaaataacactttagatacagtgttagttgctagagttctcactaccaaatctgtttttttatcaacattccaaaaacaaatgaaagatcattggaatggtagattccaaaccaccattactgaaaaaccacctgatctgtttgtgctttcctttggttgtgaaggtgataaacaaagggtccttcttaaggagccctatcactttcaaaaccatcatatagtgttgtacacaccaagtgttctgcaaaatgtcacttctgatgatcttatcttttctcctttttgggtccaatgttatcgactgcctttcttgagtaagtctaaaactttggccaaagctttgggaaatatcattggtgaatttctggaggttcatgatgattctttggaagaaggatggggtccttttcttcgattccgagtcaaactcaatgtcaccaaaccattgctcagaggtcgcaacatccaactaagacaaacaagagacaaattctgggttgattttcgctatgaaagattgcgggagtggtgtatggagtgtggccgacttggacaccctttccagaaatgcatgatatggatggaaaagattgataatggtattgaacctgagttaccttatggtcctgaacttaagggggctgctctgcccacttctggatacgataggtatcgaacagatttctctaaaggaaatgtatggcccttac

SEQ ID NO: 227226 - DNA, 1783 bp, Cannabis indica
tatttatttgtttatttttttctttgagtcctcttgtgttctggttcaattgtcattgtgactaaattagagattgagacattataatagtggtgtgtgttcttaaaattatagatctacaatcatatgctcatcagtacaaaatttgacaatgatgcgggtttcaattttttattcttcatgtttttgtatgattaattttggttgctttgatgactaaacaaagtctttcattaccctcttatggtaataattaaataaaacacatttacttttcttttgtgtgtgtgtcttcaaaactaagtcagatgaaagttcttacataaaacttatgatatgaccctttttgggtgtatgaaaagtatggaatttccaaagtgatttttttggggagcattagttttcatgccacataattgtttctcagtttactataaatgattaattcaccgaagtcttatgcatgaatagctgtatgcatgtaattgtttacaagattccatttccattataagataactcttaattatgagtcgaattataatacaataataacaattatgaaaataattaattccactaatttgctacaattatttaagttacatatctctatcatgcattgttttaaatacattttaatttaaaacttacaaaaacagcatgttagctagtttctaatcattgaggaaattcgtaaagaaaacaatttataattacaaacaatattattaattaatttcgtaaccaaaaaaaaatatatatgtgttattaactcattttgaaaatttgaaatgtcatatcattatagtctaagtaatcatatcttcaagtatttatgtatgattattctttatctttgcattttatcacatgatacaatattgtcaccaaacaatttcaatcaaatcttcagttgtctttgactgaaaaatttggcaatgactcatgtgacttcgatcagagcatgaaatagtgtgttaagattttctttgaaaaagagattgactataggcattaatcgagaaattaacatgaagaatatttatagatattgtaatattagggttctctccttgtaattttatttggcatatttctaataaatatgaaaacatgtattttcaaacaacttattatatgtatgtgctttttttaatattaaagatattctttctatacaaaaatttgggaaatttacatgatatattaacttttgttatttttttataaaaactgtaaggcggtattttttacttttaaactgtatttttttataagtttcatactgcagtatattgtgttaagttttcaccggtgttttactggtgttctactgttgttttgagttgtcctgctttgtgttttactggtgttttataaaaacacagtattttgaaaatatttccgtgtgacagtattttgtaaaagttaactcaaattctagtatttttgtaagtttcccaaaaaatttcttattacaacaaaatttgtgaatgaaaatacattaatgctatcactgaaaagtgtataattataaaaataatattttattgtgactaaatgcgattttaattaattaggttaacataaaataagtagccacatatatctaaatgttattttaatttagataacaccatttatttttcacattttaatgacaacttcaatgacatttcacgacttagagacttatttggtggtaatgataacatttaaacaattttgacgatatatatggatcatttcttaatggatattactcatgaatggttactaa

SEQ ID NO: 227227 - DNA, 5028 bp, Cannabis indica
gacaaaataaggtacctgaatcatccatactgcattatcactataaattgcattgttaacgaaccagctagccaactggtcccattcactttgttttcttccataaatcgaaattctatactctgccatctgaaattataaatatagaaatgcataagcctacaagcaattattgaaatgtacagttcttcatgtccttaggattaacataaggatataaatgaagctatattcaataaatagcagatgatgaaatcagggttgcattgagtcttggaggcagaagagaagtgaacactttcggtgttttttaaaactacattattgactaaaataatcccgacaaataacctgatatttgctagcttccaggtctgatagaacttcttttgtcacttctgccaaaaaccgtcctgtaataatttgaatgtacagtaaaaaagttggtcgggaaatgacacgttatcattgaattgtagcagcaaatgcaacctaaaataagtagttcgcaactcaacatatctatgtttctttctgcccaggcatatattgtatcacagttataacaactaggaagaatgacctccacaactcctacctacttttccctcacctcccaaagaaaggaaaacctctacttataattcaagcttaactctaagtcaggaataaccatctactaagttaactgctttaaagttgttagaatttggaataagatgcatgaggttccatctcaaaacaaattggcaatgaaaggagtagcccattcatcttatatatggtattttatttctacacattagcaatgtgtgactaattctaatacaccctactcacgtttgggcttgaaaagtgtgggcagaacgaacgatctttaagagaccacaggaccgaacgtgacatttgaaagaatcccacatgaccaaatattaagaaattttgaaacagataaaagactccaacactgaaaaactggaacactatctcaaaactatttggtaatgggaggagtagcccattcatcttgtatatggtattttatttccacacattaacaatgcaggactaactctaataaaagtaatacacaagtcataaaattccaatgaatcatagaaaaactgaggaagtaacaataagattcacaaataatcagtcaataacaaatataaataagcaaagacataacactacatagttgacaccaaaaatgagggggagcggatgaagtttaaggataacaaagacaccaaacattagtaagcactaaaatcatcttgaaggtaacatattttatttcatatttacagttgccattttgaatttacgcaggaactgtaggttaaaaacatctcacagcagcaacaaaccttggataagattgtcttgtttcaagaatatctctctaagtctgctctgaccacagggattatactttaggttgaatttgtcaaatcgatgaaaggtgcttttatcagcatgaacatccaataaatcaacattcaggtcatgcctacagttcaatatagcctacaatttagagagacagagaagaggattccgttcaaatcaatcaatcaaagaaacaatgtataccctgtcaagtccaaactttcaaagacttccttaagtgtaagatactttccatctctaaatataacaacctgtcagaagtaatcaaacaaattgagaagtgtcaagaaaaacataagaaaatcaaactagaaccacctccaacactcaattaaaagttagaacacttagtgcatcattgcaacaatggataatttttacctcatcgggttctttcctcagcttggacttgataaatcgtaaaagatgcttctgattcatacaagcagaatgatgaacatgtgtatccacttttctgatattataaaaatcacgatgtggtgcactcttttgggcaagaaactccttatcggcattcagtagtaaatgaagtcgaaatttctgtagataatagccacaaacacaaactaaatgaatatcataagattataaggtcaaaggaccaagacaaatttagagagcaatacctcctcaagaaatcgtagcctatgatgacatgtggagcgagtatttccaatggacataactttcaaaagataatgcatatcagtgaaaaacgctgttgaacttgcaacagggaaaagttcttcactatctgcagaaagagcaagtccacatgaactaattctttgagttcaagttattaaagttaagaggaatattttaaattaaggatgaagtactatccaagaaattatatctttagctataatccaaagatccaaacatgttctaaagagtcggcgtttaccatttccctttgaatatacatgtataacaccatcttccatcttgaaggagtgctataaaatagagtgataacatcaaacatgcgctcacaaaatcagttcagatttacatatatttgtgtatatccctatacgaagagacaagaaagaagaaatcgacataaatgggaaaagtatagcatacagctgaggcatcaacagattcaaaatgaaatgggtctttcttcggatttgatgtatttgagacggctgctttcatccaaggagaaacactttctcggtaaagatatctttggcgtagctctaaacattcccgaagcatcttacgtacttcttcctcttccttgttcgttggatctttaccaaaatatcacagcaagtgtaaagaaacttagttcataagtcatatgcaaaagtgatacaaacttctttctacatatacagattttcaaatagaatcaggtaacaggtttaagtagaccatgttcacattgaactgggccatcttccccaacctatctcctaacttggatgtaagaaaagtaatgatgcgtagatattatgctaatgatactaattatgtgtccaatactcgatagaccaatgaaagcagttttgagtaaagagagttaaattaccatgagttgacggaaatggtaaaattatgctggaaacagtagcatcttggccaaccaagtccacagacgttgaacctatgtttttttcaccttgtgtagccacaccagctcttgtttcgcttggagttgctttaaaagtttgatcttgcatacaattaccatcattacctataactggaactgcagaagaattctgaaggattgaatttacttcctgcaaattcgtcaacaagtaaaaagaactgatcctaaacgtcttgtttgcaattgtcactattcctaaaagtacatagttataaattgagaacgtacagccagtaaggccaaatggcaatgcaaatctggcgcattcttagtgatttgaagttcactctttcaactaacaaatcaaggatcatataactattctaaacatgccaccaccaatcatatctaggaaaaaggaaactactacaataaacactgttcgtcccctaatatatagtagatacagttcttgcaaacattgaattaccactcagtaatttgtgcatcatcacttccaaaagatataattataaagtgagcagatagttcttatgagacatgagtatgatcatttgactcaggtgaaggtgattaagtaaagtccactttaatgcgcgcaattatatcctcattttactaagctacacatttctaataaaaagatgtcaagtttctttaagccaaaactacacgtactagtccactcatgccatcaattgaaacctctacgttcccatagttgaagaattcttcatctccaatagcaagttccgttccatcatcatcagaatccccagtaatgccaaaggtcccagcttgggatcttggggtcattaacctttcaactgaagccacccttctacgggagctagaacgctcaatagataagtcccctgcgaaacagaaataaaaaatcacttagccagtttcgaagtcaaatataaatacacaatactctgataaagttctttacatttatatgtagaactcataccgtgtctttgatcggttcgaagaggcggaagccccaaaggaatgtgattaagtttatccaaggaagaagaaaacccttgagctctaaagtttcctgcaaaatcgagtttggagttatcctcaacccaatcgtagtttcccaaagccacattgggcaacgacgaggacattctatgatgccgaagaagcttctcatcaacagacttcatcgagttccttcgatcaaaacccatttcaccgtcagcaccaaactcagcctcattttcaaactcttccgctccctcttcttctccttcttcatcatcaaaacgttctttcacaatacgcttcccgccttctctacggagctctgtgaggcggtcaagcacttggtcaacgcttcgcctgtggatgaagaaggcggagatggccatgattgaggctcctactaaagccgccatggcaatatgcaaagacgaagctgcagaaggcgaacaagaaggctccattggaaaagcctcctctgtttttcttattaaaaaaccctaacttttcttcctctgcttcttcttcttttagttatcagataatcagaaatgagtgttgagagagtaagagccagatggtgggagctgagaggcttgggtagttatgcagtttggagtttagagaagaagaagatgtataaatttatatattatatatatattatggagaggtcacgtgctctcctcaaggaaggcatttctattggaacactgaaacacgagggaatgttcacgtgtccagttaacttgatcatctcagccgttactttgtacgaggtgagacgtggaacgccgatgattctgttggctgcttttcctttctcaagtaaatacgtagagaagtatgatgaagaaaagttgtaatctttttagattatatgttttctactgaatgagtgttttttttgtatggtgaccgatataagttaaaaaagaagtaattaatggaagattttttttattcataaaggtttattcttaggggcatgcagacatatt

SEQ ID NO: 227228 - DNA, 3866 bp, Cannabis indica
gagtgtctagagagttgctcaagactaaaaaaagctggcccatcaagagaagttttctcaaaaaatagagagaatgatggctcacctccgagctaagtttggagatctggtgggtgagggagattcagatgatggccactccgtggaatgtgttggacaaaataacagggaaaacccaactgatcctataacctctgctcctgtacaggacaagggaaaagcaaaagtaggtgaccctcaaaacccttcagctcccatacctcctcgaaaaaatgcaaatccatccagtaggcctactcaggcgtagaaggccatcgactcttctgggcttggatgcccttctgctgtgaaaggtcatgctgcgcagaaaaggactggtacaaaagtaccgaggccaagggaaggaaaaactgccccagtgattctgtaaaccaggatagtgggactaagaaacaatattctgataacagttggtccatagtagatctctgaaggcatcttcacaccatgtatggaaaagaaaaaagtgaaaaggtgatgccacaagggaatgacctcagattctttcttgccacgtgtcaaacattgatgtccatatcatcagggctactttgggtgtaaacgtttttccctcaagtcaacttttcatttgtgtgaggtttacttaatgacgtgaactaagccagtttctctcaaaactaccaggtgggcatcaatcttggcaatcttggataattacttctattcttcaagcattcctaccgagagtaggattttgaattctcactccctctgaatagtagaattcaaaattctaagtataaaaggagaagagaaaagatgatcatcttttcttttcctttatcttttccttttcaacttaaaatttaaattactcctcgagtaatttcctttgatttgtgatacttttgaaatgtttaacattggaatgtccatatttactccgatctttggctgttgtcttagcattgtctctcttgtcgcactgtgtgtttatatagatatagatgtagtcactgtcttctcttaggttgtagccttgaagttctttagcattccctcagtcgtgtttcagcaaaggtgatcttgttcatctccttgatttgatagcagaagaggccttcgccaaccccttaactttacagtgtaggatgccttcatcatctcctcagctttgtagtggaggagatattcatcatctcctctgctttacagcggaggaggacttcatcatctttttagctttatagccgaagagattttcaccatctcctcatcttacagcgtaggaggtcctgttagaatctgtcaatgatgtgttgtaataattactggcctttctttggtcaattgaggatgtgaaaaattcctgaattaatatacccaaaatgtgggtgaggtcttccccatattggttgcaccttagagtgattgtaggtgcgatctcaattttatccttggtcttaaacttagaggtcttcacgtcccatctcctgtattcacaatggaataggccttcttcgtccgtttggctgtctcaatagtagaggaggtcttctacttcccctcgactgttagcatagcaagggaggtcttcctcatccccttagttgttagcacaacagaggaggccttcttagtgaagttaactgtgtgttgtaaaatttgcatgctactattttgttgccaaggagacagtcgataccagcttttgtcgagaaattgacagacaagtggtagataggtgagatagcttagaggttgttgggggttgaccttctaaggagacttggtgtcgatcatgattatctacgtttctacaaagtatgacatgtggcatttaatgaggagggataatttaatccttccttaatcgaagtcctttgatactactttgtcacagagaggctttctggaactgcgaattattcgggatagaaaaatacacagaagcgtacgtaatcctacctcgtcttcccagactcaggaggagaatggtttctcctagacccgaggggtctaatggggaagcttactaaggtggtacccaaacgagtgcttgaaaggtttaacgcaaacgtcaaccaccttagagtgtcgtggacattgaccttttatgctcgctaggtcactaaagtgacggttatgctttttctatatgaagatcagatcttgtctcctacatgtttgcatggtagtgtgcgcaccaccaccaccacgttttgccagacggatattacagactcttacttgtaaaggaagaagctttgagcgacatgtggcctctacttttaaggattgaacctttgagcgacatgtgtctaagaggtacaaaatggtccccattatccagctgcaggacacccgggcataatgtttcccatgggatcattcggtcaactctaaattgcacgtaatttaccattttagatgaaatcttgggcaagtcacgggcctgtccatactcgcgacttagcctataaataccccttgattctcatacaaagggggcaagacaatttcacgtagctaaaactctgctaagatttctctaagtcttcttcttcttcaagagaaacttagaatacaaagttaggtttcctgcaaaaatagtgtaaatacatcaaactcaccctaagaggctaatagactgactcatggactaaggtttattcacacccgaaccacgtaaaaaatcttcatctctacaatttataatttctctagttcttaaatatttagtttctgaaaaattttggtgctttcattgagagctgaagaaagacataaaccactactacaaccctagtagtcacacaaaagacaattccaaagaagactcttcaaggtggcctcaagacggtcatggtggaggtaaaccccctcttgccagagcacgcccaaccgagcgatgctagaggtggagatacgtccaatgtgaacgatcaaggggatgatccagataaccaacatgaatcaagaagaggaacacaatgacagttatgttaaagacaggtatttcaaagacggttatcattacgagaaagaccccatagtgttttgagtgtctaatgaattgcttgaaactagacataagctagcatctcaagagagattttctcaaaaggtggaaaagatgatgacttgcctttgagctatgtttggagatctagacgggaaagattctggcgatgacccctcggtggaatgctttagaggctcttcgtttaaccagtcgccacaagatcactacttcgaagaaagtagttgctagaacactttccattttcttctatctaagctggtagattattcttaccctagttagttggctttatactagactatcggatagccttatatataaataaaatttccatgttgattgagtggggagttgcccggctcaaggctttattaaagaagaaagcccaggaaaaagggcccttctctgtcatattgtcaagccaaagaagagagaaagcctagcccttaaagcaagcctgcttcaccttcacttccttccgtacctgattcttaggctgatcaaaagccagccagtgactcgaggtcttctagagtgaaatcactctcgggtaattaaagggttcagctctggttcaaatggtatctggggtatatctcttatttgttgttcatgaattcgtttcaggttttcaggcatacccagtcttttctctttcagttgctgctctaggggaagaagtttcattggggaaggtggtatcttctagttgatcacttaagcttttagcttaaaggactgatctttgcttgaacttagcccgagtaaggccaactttaataaagataactaggtgcca

SEQ ID NO: 227229 - DNA, 7163 bp, Cannabis indica
aaaaaaaacttaaaaaaaaaacctcacaacatttgttcaattttcgaatccaaaggaaccgatttaacattctagttcgcataaatgtctcacaaaaatacccaagtgcacgcttattgtaaaaagtaataaagtgaaagtagagtattgtcctatggataaattatcacttaaatttgtcatgtactaaaaattatgttttctcattcttatcccaatagttgaaacaatataagtgaattaaaaataaaagcgagcataaacaaataattcttaaacctttcacgatggttttttattttttttcatgatggttatgcaaaactattttgctcaatcaactatgtatgctcttatcaagatcatgctaaagaaaaactcaataagcatgggttcttacaaaggttatgcatgccatacaattatattcttatactacgtaaaactccaagattgtttagtgatcatacatcattgtattcaaggccaacagaaaattccttttctcatgttcattcaggtttcctaatcaatctaattagtgatcaggttattagatacaagtagcatagaatataacgaacaatttaatatttgattctaggatactggtttaaacatcatcattatatagtttacaagggaaaacaaaagatttagaatttagaagatgaaaactcttggtaaaaattcctccaatcgttaaggttttgattctctaatttgttattcgcactctaggtttcgtgaagtagtttctctctctaaaatgtgcaaaagtcggccacccttttcttttttataggcttggtcaaaaattggtaattttttcacactaaatcaatgttcagaaatgtgtttttaagcgtcaaggtgatttgtctttgtgaggcaaggagtaagcctcatggtgtaatgaggtttaagcctcaaaaagccttaaatatttaatttaaaaatatttatgagatacctaaatttatcaagaatgaatgattaaatataataaagcataacataaaagtaaatgtttgaattaaaatgaaatgtcagtgccgtaccttaggttttccatcactcaaattgaggtgcgcctcaaaattgccttctcaaacaaaacacaaaactagttacctttctctaacatcacgtatgttgtgacgcttaagaggtgtatgaggcttaagccaaacatgcttaaagtagccttttctttcagtgttgcaacactgaagggtacgccctgctactctaatgcccaagtattttcagcccctaaaatgtttgcaacttttcccaaaaaaaggaagagaaaagaaaaaggaatattatttttctttgtataccctcataatttttcaagctacaaaataaatattaaacaagaaatgtctaaattttttccatcagacactaagcttcaaggtgccaaaattatgcgtgataacacactattagacgttgcagttgcaatcatgtaatacactaaattgaaccttcagaccatagtttttttgttagagtaagcctttttttttaatcgtgtataatattttagaattaaaggacaaacaagttttcttggatacaagttgtgtataattgcatgttatttaccgttttaagtttttttttgctttcaatgttgcagatctttcagttctctacaaactgtggcaaatgaagcagatatacaacttccatctgaaaggtaaatttctcaagaagattacaagaaacctttgacacaaattttaacaagcataatatagtaatcttgttaaaagtgttgttttggacctttcttattgtgtgtttatgttagattcacacactctaggcgacctaggacatagagttgggcttagttaggtgctggggtgtttgagaagtctgtcctgatgtgtgctgttttattaaatacattgaccaagctattctattttaaatgtgttgtacagtttgcttccttgtatcctattggtgggctagttagttgtattgttagccatggcctataaatagttagtctttgcatttagaagagattatgcagattgaactttttagagaaaagatttctctgtggagtttccaagctttctcgataaacttcaatgaatcatacctcaagggattttatacaactgagcagtaggaaatagttacaacagaaagtggtttatgacatagctgtcataaccaactaacagctagcctaaccaactaacaacaacctaaaagaatgtaactaacttctacacagtcgcaacatactttgttctattttccttctgatcaatgaagttctctattcatcttcttcctatttttctgagccgagtatgagtgtctaccagtttttctatgtatgtgtgggagaatatataaaattaaactcattaaaatccagcttcttaatggttttaactttttgttgtgttacccaaattgttgaagaactataattaagaattcaacatagaaattttcttctccgtgttaaattttcttaggatttaaagttttgctatttggaatagtgctgaagcattattagttattactgctctcacttatgaacagtcaacatatatcgagattctttcttatttataatgtatgctgagagtgtatttcttgctttcaatcatgtttataaagttttaagttggaccaagtgagtgaatctgtttcatcaatgagtcttgataaatttgtctagaacaatttattgagtgcatactgcacacagttgaacagttttgagtcttttgatagtgatatttctcatgtagaataagattgccgtcaaatttattaattcagtctgtttgagtagtgtttatatgggtttcccccataacaatctatttgactggtaagcatttgttatattccctccatatttgattagatttatattgtaggtgtgcaacattgttccctgtaaactaattttgaaatgtaagaataggctccttcaatattgactctgttgtaatattttactgcagacagaggatagcagattcacttacaaatgctatctcgttccttgacaaatttgaacaaggagttaaagactgcctcgaaatttgacacaagttgttgtggatatcatgcttgaaattcagatgatgtgctgttttctttgatgcaattggtttttttccaactctcgtttgtgttatttaccttggattaccttatttttcaccatttcttgacaatggctgaacttcttaatttggtactgttattgtgaagagctgaaggaagtggtggaggtttcattgcttggtatttccctgttgctcattgaactcgaaaatgtaccttgtatcattcaatgtcggacaggaaacattaagttagaaacacagctaaactttcaaatttcactatataatgttcgtgtatgggatgaaatgaaggcaagttttagtcgtacctatttcagagtgatgtttttctaattatgttcgtcaaccagttaaaacctgcacttgggcgttgttaactttctaggacccaggggtgtggctctagctgaccactgactggatttcatggactgttttaaggaaaagcaaaactaattttttgtttagttatttacttttttgagtagtcagttttgaggttaagtcgttgtaaaaattccgtttactaggttttattcaattagaattgcatcctttcttgcctgagggcttatggctttcgttcgaagaagacgtataatcttgtatgcaatgctgcttcacgttgtgcttattatattttattttataagatcaccatagctagctcgtaagtaagtggttcagagcttctgaatctgataagcgtgacttcccacattaaccttcatggaactatttctatgcattgagattaattgactgcttatttctgcctgttatattatctagtaaggacaggtaataaaaaaaaatgtttataaaatgagcgttatttacacttgaatttctgaggaaaacattgcacatttgcttcccggtctttcaaatgggaatagtaattccttacacaagactacgaaagattatatatgcccattatgcctacgccttaatcgggagattacacatatggtactatgatctagcacatctataatataacagttattgacccgtaccatatgggactctgaactgggcgatcaaagcatcctcctgattcaagtgatagcaaggtattccattgcatgtatatttgtactgactatagcaggatgtggagctatgtagagatatttaaccttaactctgctggctctagggtttgatttggggaaccagaagcttgcactaaatacaagcgacaacaaggtgttccatctggattggtgtgtatggaccgaggcaagctgcggagcttgttgaacaaatttgaagggttatgaaggagtccaaaatgagcatctgggtcaccaatttgtgaaagattaacacgagaaaagccaagtgatggcaggagattatcaggccagtcactatagaaatagaagatggaattggaaagtgtagttgagggtttgttcataaaatctgctaaaaggaatgtgttggtcattgtgcacttatcagcaattatcctcagtacctgcattgcctgtgagtgagtaaggtagtaaaggagaccctctaatatccacaccgtgttcttctcaggcacataccctgatgtttcaagtttttccaaccaatcgttacctttgatatcggctgacactctggttaaggatttagccattattttcagatgttggtgttcatttggggattccattgctgcttgcaaaagagtggttttcatttgaactacttcaggtaaatcaacttcatacacatcactttccttcaagcaatctaacctgtatgctcttgcgtccattcctatacatttagaagaaaaacaagattgacaaattaagtaaacattgtcgatgtactactaattaagatatgtaaaagtacaattatgctatctgttaatatatgtaaaatttggtgtttatcatttacctgcaccaaggagaacaacttgtgtttctgtgccatgtaaggaatgaagggctgcttcaagttttgaatcgaaccagagagttctaactgcaagaataactccagagatttcacttgcattgtttgcacagtctttctttatcttctcatgaaggcttcttaggtaagtctctccagcaagtaaggctgccaaagggtcatgagtgacatgtttccacagtgctcgtccagcagccgtttgacatgctgaccttcgaagggcatcccattctttttcgatggtagcatgcagttgccggacggtttcagtggacaacaattcaggaattttaaactcaggccattctgggacttcaggcaagtttctttcctcactcgacattcttgttaaagataatgcaaatattgcagggtgtagatattagatgataggttttaagaaaagtcacaagttgtgggttgttttatatttgggataagaaaacagagccacacacaaaaccagcgctcataaataaaagctctaccgtatccagcttcttagacttatgaaaaggaaggtaccaatgtagtccacgactaccgcaatccacatgcccaattctgtcgccctctcactgcttttttgttttagatataaagtgactagaagatgtggctaatggctacagtagggaaaaatatgtactatatgtgatgagtggctcaaggtaaacaactgttttttattttattttggcttctcgctgccgacttggctaccaccataaataatatttacacatttattggatacccccctttccccaagttggcttcttctactgtgtcctactagtcaatttgacaagacacttgtacttgtattatttgcttgcatatgtcgtacaagtcttggagatgagtagttttggtaattgatggtcttaactcgtttaagcccttttttgtgtttgctagggatgtatgaggtggaaaagggtttttcatttacaaccattatctacataactatttcttgtaccattcttgtgtatttatttatttattccaaatattcttgtatttattttaaaaaaattcttgtattttttttttatatatgttgttcgagttttcctttagtcatgacacgtggatctccgtcaagaggaagccctgtaagaagggtagacccatcactgaaaacaatgccacgcgaacagcactcccaggaagaaggatccgggatcgaaatgcctaattgagtctaggaaggtcatccaattggtctaagtcagcttcaaccaagttatagtcggtaaaagtcaaccatttaaggaagcatcaataggccgagaacgttagtgcagaccacttctcaccatggtctcgggctcaggcccaagagtcatgacattaagctacatacaattaaggcaagctcttattggtattgcctagggacagaacttctcgggtccacaagtgttctgggcgtgtttccgacgtggcactgttctgacatcatcctaccaaatctacagaatgtctcctttgtcttttcttagagaagagtttggcaaagaagtgtgatcaatatagggattattgagatcactacgacataaaacattcctcatacatcaattggtggctcaagtgtggcaagtcactagggtacagtaggccttacttactgatttggcctttgggccttaggctttgtgcccaaaccaattcaataagctacaatgtaatcactccattagtgggttgaacactatgtaaacatttaatgggtccatgtcagcctaacctgtattgcataatgtcctacaaataggacttcatcacctccatgtaggaggtttacgaaccaaaagtttatttgcctctaccattctatgagtctcttcctttttgcatatggcatcaccactccctttggcagcatccatccatataatatataaaaagaaactccaaatatttgatatctttctctttgaatgagatctcaattccagtgacggttttattagatatcttacaactagaatctctcttttttctaagctagttcctccaccgtcgcgagcctcagttagattcaggcatgataca

SEQ ID NO: 227230 - DNA, 2612 bp, Cannabis indica
ctctttattatatatatatatatatatacatgctagttataaatatatatataaaatgttataatgtgtgtgtgatttaaggccatatgtatatgatgactctgaagacttggtagtatgaacaaagagcaaattaaatcacatatatgccgacatgtatatatttatatttgtggccactaattatatatatacttagtatatagggccaactgtctacaactctttttctttttctttttggttcaccaaatatgtgtacatatacaaaatatatgtagtaattattatgacttttatatataggtctatatatttaactttaattaaattaccaaacttgttatgtagcatgtgtcctaaaactcaaaagaaaaatttatagctatatatatcaccacacactatatatatggcctattctaatgtatagctagatcaatacattattaactttaattatgctacctaatatgtggaagtggaaccacacacacactgtacaaaatttttatatatattgttttcaaccctagctaggtttagccataatatttatgtaggtagttagtgtatctatgtcatattattaagattgagtattgctaataggtaccagtggtgcctagcatcttctcgacatgtcgcgttgcgattggctagcgatattccttaaaagctattatattaaactatatgtgacccgatacgtaccaatagcgatattgtacacataggaaggtgctaggcaccactgatgccctttagtatttttctattattaatgaccatttttattgatactaatagtgcctaacattatttaaatgtagtattttttttattggttagcgatattctaaaaattattaccttaattaagttatataagattcaatgcttaattataccaataacaatatatgataccaagaagagttctaaacagtaagtaccactactgtcttttaacttttttttattattattagaacattactattagctaccagtagtcccaaacacattttatagtgatctacaattggttaacgatattttctaaaatgtaatttttttaaaattatataaaatctgatacttaattatactaataacagtattacaccgaaaaaaatactacgcggacaccaatagtattttttaacgattctcttattaatatatatatctaagttcatttagagaggagaacaaaagttgcacgagccaattattgtgataagcaataattatttcaccctaactaatacctaattattttaagcgaattcgtactataaatttaagttggacaaaaagtatttttatatattaattgacatgcattactatactttagcatttcatgttaaaatttttattattatggatcattaattagtatgtttaaagctaaaagttatgaattaaaattttgtctaataatttattgtgtcttattttatgtcaactaaaatgatatattaaaaaaaattaattttttggaccaaaatatatagtatggtacccctataattttaagcttggacttgcgttcgttacacgtttattataatattttcattatagaaaaaaaaaaaacttatcctttcaccaaaaaataaataaaataaaataataaggtcctaaattgaaattctcttatcccataatcaaaatacaaaaaataaataatagtaataaaaaattcatgccttattgtaaaattgtaatggatgactttgaccttataaaatcaaaggttgacttacataagcgaaaccaataaagtcgtctcatctaacggtcatgagacttacacaataagataatgatacttccccccacacgtgatcaaaccccatcaaacacgtcactttattaataataaaatattattattcttttaatcttttggagtaaattctaaccgtcgagattaggagccacgtgaaagtagttgcatggccacgtggtagatagtgagatccacagcaatatcgatagtgccacgtctttaaaaccaggggtaattttgtaattttaatgaaaaagacaacaaaaaagtagcagaaataaatgcctcatcttattaataatcatcgtccacgtaattaataatattttttttaacactataattttttaacatattttttttttaaaaaaaaagaaattaattaataatatctatttaaaattttacccttaaaaaaattaaaaaaaaaagaggtgaactgtttggtttgggattttaatccaaacgtttctcttgtgtttttttttccctcttttataacggtttttttttctctctcttgacttttccaaatgtactttgactacccgccaaacagttttgaccaatatttacatttctatccaaaaagaaaatagcaaaataccaattttgcccccactgttcaagcatcaccgcccaccaccactttaacaccaacaggaagccaattcccgccgccgccgccgccgccgccgtgatcagactcagattcggcttcgagcctaacaaccattgagtcttccatcgttgacccagaaagcgttgacttcagttcctcaaagctcggaacaagaactttctcaatcca

SEQ ID NO: 227231 - DNA, 2309 bp, Cannabis indica
ttaattacattaaatatattttatcattcaaataaaaaaatcaaaacaaatatattttaatggaaattatagaaattttattaactatcaatctcagctaccaaatatggtagcaaataagttggaacatcctccaaactaaaacaacaaacagaatataatatagaggctctagcaaagttatgaatcaccatattagttcatttaacaaaaataatagtcatttctcaaattaacaagaaaacttttacaatcattaattacttgaccaaataaagaaatcatcatgatagagctccttagtgcttgcacaacactcaagcaatccgttctagaatcacatgcctccactgctattatttcatccaactaaacgcctcataaatccccattccttctacaagtttcgttgaaagcaaaccttgatacaacattcaatcaaaaaatctcttacatcccgggccacataaccaaaaccatacatacaacaaacctcaaacaaagtagcatcaatattgaccttaatactatcaccttgtcgtaaagtccattgctctactccatcacccacctataataaaggccatgatgactcatttgtcgagttctgaacaattccccattgattaaggcatcctttagctaacgctacaatgctacctactcccatcacctttcgcttccacacacatccattacggacactccaaatagtccaacaaagggcaactacaaaacatttctcatcaatatctactccttgaaagcaagcatcatattagtctaagaaagtatcacatgaatgaaaattagtcttgatatctctattccaacaaagttttgctactagaaaagtgactaaggcatggaaaatagactcatcatcctcactacaaactgggcaaagagatctaatctccaccctcttggtgcacaaccgaatcatcgtagggagacaccccttccctaccctccacaacaagttttttatctttggaggaatttttaaactctaaagcttcttccaaaatttattaaatgttgccccctctaaatctcaaccaccatttgaatcttggaacatattataggcactctttacttgtgtaaataccaggtatttcttttatccatactaaatgatcatcaccttgggcaagttgtaatagaattctaaaaatcagatccatgtccttctccataaaaagatcatgaagaattttattatccaaacttttgccatcagagttcaacaaattactcactttcgcatcaacgagacccgaatgaaaagaaatttttggaatttatgttctaaaagtaactatttaatggataatagagaatatataaaatacaagtataagataaatgacgatgttaattatagaaatataattaataaatatctaaaaatttcatattcatatagaaaagtataatcttgtaaggaagtacaagataattaagatcatactatatgaataaaagaagtcggtagtttattaaattatagaatttttaatatggaattaccaagtacatattactaagtactatactttatatggcatgtgatttttatttgggtcacatatgtggatatatatttagtaaagatgttgtgtattatttgattatgcatgactagaccgatatgaacttacatcttttatcaacgtgtcgtttatcataaaagagttattcatatcacaataattattattagtagatcagtctgaatcttaattattcatgaactcctgtttattttcattaggttatttgattcacccgttaaagttccttagagaatataattcttacaacttcttttttgggagtttaatgacatgagtgcctgagaacatgttatacaataatagaatccaagctttccaaaaggattgaatattagctcccttatattgttaattttgggagtgactacagttggatccaaatttataatgaaaatcatagattaacttttcacttaaaattaatggtacatagagaattcaagagataattagaagggtaacatgataatcttgaccagttttaattatgaactaataaattagaagaagatatacttatactgattatatcaatagactattagaaataagtctatattgtcaaagagtataatttcatatttatagcggagtaataatgaacactataagaaatgataatttttttggtgcatttggccaaacgcgctggcaaaagttatcggcataaaatggttcaaccaatgcccaaaatttttagtgaaaacttttgtcagcgcaatagtg

SEQ ID NO: 227232 - DNA, 2123 bp, Cannabis indica
tcgaataaggaatattcatcacttggctcatcttgtcgatttgtaagtgctgatgttcctatagcttttcctcctcctgacttttggacttttgctttttgctttgtcatatatttaatattgttcttgctttttttgtgcacttaaatcagcatgcaaagacaagtacttggtctttgagtttgaagacaactacattgttgtcttggagagagaagcatctaccgctgcttcgtcctgcattctaaaagattatggcattccctccgaaagatcttcggatttgttggaaccctacgtggattcggtgggagacaaccaatcattagacaaggattatgctgatagcccagtttcaaattttgaaatcggttttgacgggctcctttggacatgaattattacaaagttttaaaaagaggccattctgaaatttctcattgcatcagatgtaggaggtaggtaggcatagtttgtttatggtaaaattgttaccacacctgcttttccttggtgccatatttatttgggagttttttaactttattttttcttctttaaaaatagattttctaaaagagttcaatcatttttttccaaaatgttatgttcttgtcaatgagggcataaagtatttagaagtcattgcgtcttagccttgaaataattcgtgtaataagcatgtgcaatgacaattattgggttatttgataaacgaattgattatttatttatttagagtgggttgttcctttttcatggtaagttctcatttttatttggagggtaatacctgttattatcaattaaaaagagatattatttacaataacagagtaaatacgtgaacgaatattcttcaaccaaaagtaagtcttattcacttctaatgcaaactaagccaactcgtgtgtaatcatattaattgtatatttaacatgagtaatatttatattagaaaaaaaaaaaaagacaagagatcagactagaaatgtctacaattaagtcattaaaagaagaaattacattaaagggaactttcacagcataaaggatcatcaatgcatctgtctccacttgtgttataggcaattgcaactgatgggcccaattcaaattgtgaaagagcgctttggcctccatgggatgcgaaattggcaataatgagttttgaaagagcaacaacaacttgaacatatgtgtctcgaacaacaacaccaactccaataattttcttgttagcatccacattcatctcgagatcactaagggctagaggtttccacagcacatgaacaacagtaggaggggagagttgaggagtggcattaacttcaagatggtatttgatcttggctgcacggaaattatgcaagtaggttgttgtaaaagatccaagatctctagctggcttggctttatttccattctttccaaattgaccaaagagtacatataatttgttccatctcaactttgagtaaatagaagatagatgaaacaataatcacccttgtgtattgaagaaaatttatgccaatcgaaaaccatgtttgagtgacgccataatgatcgagcatacttacagctaaagagtgcacgaccaataaattcacatgtttaatgactaatggagcacgttgaatccgtgattactttccttctgaacaagaagtagctactggtaggggtgggcatccgattcaatccaacatttttttttctcacccgatccaatccaattagtaactgaatttggaaaatcagcatccaattcaatccaattaaacctcaaatcctaattggattagatcgagtttttttaaatggatattcaattacacacctaaaatttaatattaacttaaaatatgaagaaaaacacataaaaactaagtatcagcctttatttaagtttaatactccataaacataccatcgttacaagtgtaatgtaactaaaagtttcaaataattaaaacaacaacatttctaagtaataaaatagaacaaaacatcataaatataaatacacaaaacaacaaagtgttacaaattcaacataacaaaaaatactaataaaaatttcaatattttttattatataaataattttttaacat

SEQ ID NO: 227233 - DNA, 1974 bp, Cannabis indica
tttttttctttttttgaataaaacactttcaagaattttaagggaagtgaagaagagttttgagtcttgaacatgtgatggttcaagaactctagagtaaaaagagtcttatatatcctttatttttgctcttaggttaaaaactcaagctataaacttaatccgtgttctaaagttgtaataacaaaagttgatgaagataatagaactcatggagggaactagagtagaccattggttaagctgaatatataagtataaatttgggtattgtgtttttgctttgagaaattattttcactttagattatctttcttattcttgttcttgcctatttttgagttggtgttgtgtgtttccaacataatctcacaaccttctcaatgggttttaggatttccacttattttgggtattgatgagtgccttcaacgacattacatgagtactgttagtgactgaagagttgttactagtggtggttttccatctttgaagcttagatctaagtttgctatattattgttatttggtttttgttgtttttttttttttggttttatgttccaattttggattttcccttattagggagtttgggtatgtttcttaagtttgtttacttatagtacttgttaaagactgtcattccaaatagtgctgtaaatacggattagattttttgacatgacacgaaattggtacgagctcagaagggatgagcacaactaggtacgaaaaaatatgggcttgaacacgacacaggtgaaaaatatgtccttaagcacgacacgacactaaaaacatgaaagacatgacacgtaagcacgaatagactagcttaaaaagcacaacacacaacaagtccgaaaaacacaacacgacatattaaaaaaatcttataatatattaataataacaataagatatgaatttatcaattataaataaattataataataaaacataaataaaatattgaatattataattctataattaagacatgaaaaattaagattatatattaatttatttatagagtgtaatataaaatttgagtatttataaataaatatgtaaattttaatagtaataattttttaatatgattatttgtaaaattttgttcaaaagttatataaatataattaaaattttaaaatatatataatttaataaatgtaaaaaaaaaaatataaaaaagtaaagtatgaatttaaggccgaatacgaaaatgaactggcctgtttaagaaatacgagctgacgcaagcaaagcacatcacgaatcagagcacaacacgaaaatatcaaacctacgggtcgtgctggacctaccctttaaaactgttagcacgatacgacacaacccatatttttctgtaacatggcacgacacggtccgttttttgaaaagtatggataaatacaagccgagtcagcacgatacgcacgaacttattacaaataatgtttgtgtcttgatatgttggtcatttgatcttgttgtttagcttgcttgctcttttggggaattattcactattttgacttcatgagttattgtatcaaaccccttcctttattctcttcatgaaactttgaacttaccctctaaaaacaacctcctctaccaagtggcacatatatataaatgtatcattactactaggtaattttgttagaaattaatatataaataaggagaaataaatagacaataataatatatatattaattaaagaattgaaatataaatacaaaataataacatacaatatcaataattgaaaaaaaatcaaggcacattaaaaatactttctttaaagcaaatttactgctctacttgaatgatgttatttaagcgtttatatattacaaccatattttacccgagactcgaatctagaaccttcaagacacacacccacctatggccacttgagctagcctcaagtagttgaatgat

SEQ ID NO: 227234 - DNA, 5582 bp, Cannabis indica
tgcctcagctattccttcaaattttgcctgagctacatcttcaacttccttatctgctatgttttcacattcatccattcccacctctttaaaaatcatttcagcgtcctcctctacttgataattaagggatcttctagttcttgagcttacatgtgacatttccacgtcttccacaatatcattttgatttggctctgtattatagatcatacgacgagaagatgctcttgtactaacaggtggtgaatcaattacaacattagcaggtgtagaaaacttacgtagagaactccttttctttacaacaggactttcaagggttgtatcttcccaatcagtttgactcttcaatgttgcttttcttctttttgccacaattttgcataaagcacctggtcgtatgtgctttcttggagatcttcgtagatttttcattttcaagtggaaattactgtaaaaaaaataattaaaatatattgttaggaaaacttaaaaaaatacaacatgtaattctcttgataaaccaaaataaattaaggaaaagaaacaaaaactataaaaaaataagtaacataatatcaactagcgaataaataaaactacaattattttaatcataatataccaaaagtacatatggaaaaatacaaaaaaaattatactcaatcaaaatacattaggatataaaaatgaaactcaatgttcttcattataatgctctacagaatcactagattctaccccaaaacaccctctatttgaatcttttaaagctatataccaattagatgactcattctcccttgcataaaaggcttttttaacttgtgatgctaacacatatggatccctaatcgattgagcttgacctatattaaaatttacaagtgtatagaaatctaacttctttacaccatttcaaatattcgtccaatcacactgaaatagtggcactttaaatgtacgataatcaagcattattatatcattgataacaccaaaatactcctctttctcattcaattgcccactgccatgtgattccaagtatacaccattattttgagtcattttttcaactcctttcttatggagacgaattccattaatcatgtaacctttgtaggaagtaacactacgacttgggccttcagccaattgtgccagcatatcatctaccttgttagatttagaaatctgaaaaataaaaatattatggtcatcaatttgtataagaagtctaaatattcacttttgtttttgtaatacagtctaaccttctcataaaaccataaggggaaactttcagaatgtcgattccacaataaagtttgattgttcttcaattctagatgcatttctttcaactcatccatatggatattgagaaatggtgctacactatctgaattgaacaacacatatcgatgtgctattgaaatgtttgcttggttaagttcaaagcattcagcaactgatagtggattttcttcaatcaatgtagtatcttgatcatcattttgcttcaaaaatgtctcacaaaagcgtacacattcaacagcaagatagcgattcgcaatacatccttctggtcgtgcataatttgatacaaaacctttcaatactttcatatacctttcaaaatggtacatccatagaaagtgcaccggaccacaaagtctaacttctcgtgctaaatggacaaccaggtgaaatcattggatcaaagaaagaaggtgggaaatattcttccaatttgtaaagaatttcagcagcttctaattctaattttctaatctcctccttctcaacaacacgctgacacaatccataaaaaaatcgacaaagtcgaagaattgtctctctacaacgatcttccatcaaaccccttatagcaacagccaacaattgttgcataatcacatgacaatcaggagatttaagtcctattagcttctgttttttcaaatctacacagttgctaatcttagaactatatccataaggcaatttcaagtcaaataccctcttacaaaataaattcttatctaattttgaaagagtgtatgctgcagcaggaagacgagtaatgctcttatcttcataaggatggagatgagacattatgcccatctctgtcaaatctaatcttgagttgtagtgatcttttgattttcctttacaatccaataatgtgttaagtatgctttcacaaacatttttctcaacatgcataacatcaagattatggcgaacaaccaatacctcccaataaggtagcctaaaaaaatagacttcttcttccaccttttttctatctctgtaccacggactcgctttttgccctttccaaaatcgtttgttactttgcttaactgctcaactacttcaacaccggtcattatagttggacattgtggtgctctctcccttgctcttgcagatttatatttcttctttcgataatggtgttcttgtggtagaaatcgaatatgattccaaaaggacatcttcttgctatgcttcaaccaaacaacatttgagttttcaccacatactggacatccatacttccctttagttgcacatccagccaagtttccataagctagaaaatcgtttatagtccataataacatgacctttaaattaaaaaacttctttatagaagcatcatatgtataaacgcctttccataattcaagtaactcatcgattaagggctccaagtaaacatctatatcatttccaggttttttaggcccaggaatcaacatagatagaaaggtgaattcatccttcatgcacatcgatggtggtaaattgtagacaacaagaattatcgaccaacaactatatgtagaactcatatttttgtcgggattaaccccatcagcagcaagtcctattcgaaggttgttagattcgagtgaaaaatctggccatctatcattaatcacatcctaagcctctgaatctactgggtggcccattttcccatccattcgtttgttagttgcgggccactttaacttgtagctgttttttcatgtttaaacatcctttgaaatcttggtgtaataggaaaatatcttaacaattttgcaggttgtccttgtaaaatctcccctgtgtcttcattttgcttccaccttggatactgacaggtgggacatacttgggcattagcattttctcttgtatacaaacaacaatcgttcacacaagcatggatatgcttatagtttagatcaaacgtctttaaaaactttttaattgcataaatagatgttaacaagagattatctttttggcaacattgctttgatcatctctaacatctcacaaaagccaacatctgacaatccatgctttgtttttagattgtatagcccaacaatggatgaaatttttgtgtactttgtacaaccttcatacaatggagactcagcatcttctaatagactatcaaaatcaacctcatcattattgttgtcaaaatcattgacattacttgaatgaactccagcagcccaaaataaatcatattcagaacttgtctttgtcgtgcttctttcaattgaatctgatcttccccatgatgaaaccatattttgtaagatctttccatgccccaaaacactaagtgtttgacaacttcatctaaaagttgatgtcttaaattgtgacatttgttgcatggacaaagaatcttggtcggaaaaccaagatttattactgctgttttaacaaactccctagctttcttctcatattcttcagttgttctacaagttaagaccacactttaatatcaagtgttacaacttaaactaatatcttaaaaagctatacggtattatttactaacctgttaagatggatccaatttttatccatctgcatatcataagcttacacaaatcaaaaaacaaagatgcgtaaatcatattgttcatagtggattttttttttctttttgcaattctagttacacaacaccaaataaagatatattaaaatctaataaaaagtatgtatgcacacacacaaaaataataaagtcacagcaaaattcaagaaaatatcatttttagagtcaatatatattgtcgatgttctatttatcaactagtacgtaacaaatttgattaggaatatatatagcatgagttctacatacacaaattttttatattaatttatacactattttttatggacattttgtaactacagacaaccactttcgtgtagaaacccctcaaaatcagaaacatcactgtacatttcaaattctagtagatgaatacaaaaaaaaaaatggtaagagaggataaagccaagggccatagataatgacccaaatagcgtcaaagaggcaagccctttcttagagccatcctatagcaaattctcatctttgagaattgagtttataaaccaatattgctcttaaggaagaaaaaaattaagaagcacaccaaaacataaaagaaaaagaaagaactaaatacaaaactagagagatattttaacacttttatacaaacatataatcccaacaatgttcacccacataacacttcacccacatgtcatttctctcgtcacatgcaaatcctaatcacccttatatataccaaacacacctttttcatatggctgtcatattataatacattcattacatatctctaccaccgctgctctctgttgaaatgttgttagcatgagtttcattattggtattattggtccgtgactcttatctcttactttcattatttatttttattcttattcttgtttagctctttatatctctaaggtaggtctatatatatgattaacaagtatttgttatcttgtatacatatacgtatatatataaatatatatacatgacatgaataaaaatacctaaactctctaaaacttgttgagagagaagccacaaaaacaacaacaagaaaaaaattgtgactgaaatgcaaaactagaagattttactaaaacacaatttgggaaaaaattcataatccattctagcataatctcaaacatctgattacctaaaaaaggttttgggacattagtaggatttgaactctcattccagattgagatggaatgtgaattaaagacttagctttactctaataatagaagcttccatccttctcgtgagaaaaaattcccaaaccaaatgaaatcaaataaagcaaaaaaaaaaaaataaataaaaacaaaatactatcaaatgaaatcacatttttatttccaatcaaaatgaaatgagaaattgaagtgtttattttcctagaaaattaggttttgtgagcattaatgagaagctcaaatggtaccttgagaagaacaagacagaacatataaaagaaaaacctagatatcaagataaaagaaaaaaaaaatctaaaagaggcatacataccacaaatgaagagctatcggggtgagctttttcttttccctcagtgacaacaacaaatggctgaggaacaattgcagcctttctcggtcaattgttctggccaatctcagatctcacgaacaga

SEQ ID NO: 227235 - DNA, 4946 bp, Cannabis indica
gtaatattttaattataacttagattcagatttatgctatttcttaacaatttgctaatgtctttctttgattatagttttaaaaatattataatacatttatattataacatcattacaactctacatttatataatcaccaaacaaaattgaccttatgctccctttttatacctattttctttccaaaaataattaaagtaaatatgttttgttaatacactaattattctcattattattccaaaaataaaccatacatgtcattctcattattatttccatatccattacgatgaacaaacgccacctaagatttgaaactaacgaaaatgaatatatcactaaaactttatatatgacttttgtacataggaataccaccaaaagcacttagacaataccgccataaaatttgacagcgtagagatatatagctacaaaacaaattttatacataaaaatatatataaatttgtatgtaatgactgttcgtatagtaccttagtatgtccgctatatacacctatatttcttcttgcaaatactatcggttctatcatatgagtgtacatataaccatatatattcatggaatatacccaattaactcacttgtttatattgtcattcattttttcaataaaaaaaaaactaattcattatcaacaaggttataaaggaacgcagacttctgctgatctatatccttataacacaagtagtcaagaataagaggttagctagctttacaattaatgaaaactatggaaaacaatttcaagttattcggtggaagatttggttggttgtgcttctatttggggattgttcttctacttcaatatgccaatgctcatgaaagtaaatatatatcttcgttttcactttaataattttataacttacttaaacatatatttatatctcatgaatattgatgatgtcatgagcctattcttaacagatcgatgctttgtgggtgtatttttacagatagaacaaacccaacaaaaaatgtaaatcttggcccaatccagatgtggagaagtgcctacttctgcttgcaatatcaggtgtatatttctacatgtgaatacttaagaaaaaaaaaaagaaagacagaaaattactatacccagttttcatttttaattttaatttttacatttcttttaacactctttaatttatatccagttttataggtgatatccctgttaataaattatgtgaggttatatttggtactttaattataaaagaaagtatttatcaattaaaattattttattgttatatttagttaatgtgttataaaaagtggtagttttcatctccaacaccagatgtgaataatttgaattacacataaatattactcattacttttttttttattattttggaaattacagatatggcttcttttgccatttaacgtttacaaatgtatatgtaaatttgttagtatttctacgattttttagaaaaaaaatatccagagataatataggtgcgtaggtaactatttggtatccaatattttgaaaaatatcatttctcaataatagtcacgatcaatattacatgaccactatttgaactagctaacaaaacaatatttgtaaaaccatcttactagtcaaaacgagactagtaaaatctgataattttgataaagttgtcatttgcaagtaaataggaaaattttcatttttatggatttttttgacaaaaatatgttttttagaaaagaaaattatgggaacaatttaaaaaacaaatttaaagtaactagaagaataaccagtgccttatactattttttttttctcacatttttcttttaatttttgagataaaataattttttgtttgaataaaaccatatttttacacattatatagaaacctgtaaaaaaattagactaataaatgaatagttatatacattaattaaaagtgagtggatgatgaatactagtttggaattatgatcagggagcaagccagcaggtatgcaagtggaaagacgtgataacaccagtaggaaacctaaacgtgagttcccaagaaatagaggagtattgcaagccaggacagtgtgcagaccacataaggactaatgttcttacttgtatctatttggtcatgaggaacctcaacatagctgtcttcaaaaatggtgcatccattcaattactcaatgataccattaatacaggatgctccactaatacaagtaactataactaactaactactcttctcatctcttactactattatatatataataagtttttggtgattattgtgaatatatttcaggtataatactaggggataagatagacaagaaaagtagcagtggatcaacaaaggtgtaccagaagacgtacatgacagtagctgtgacaggattattggtgttttttttccattctcaaataatgtgaccatgcatgtatcctaattagtatacataccatatatggaagatgttcaacaagtcaataatttaccatatttaataagtgggaaatgatcaaattctacttatactcttaaattaattaaaatgagattataaatgaccaaaaatatctatttggctatttagtactattactttatgacgggaaagtacccctttcttttctccaatcatacttaaaagggcattgttataaaacacaagccgtatctagtatcacttaaaggtagccttataaatgattaatgatatatcatgtagtagttattaaattagtttatatagaattatatacttaattatatatcaatgagaaatgctaaagggcaccagtagcatcctcttatgtgtcaatatcgttattggtccaactaagtatcggatcccatataatttaatataataacttttagggagtatcgctaaccaatcgcaatgcgatatgtcaaaaaggtcttagacactactggtgcctcaatgctcacatatattaatagtggtatgatactttaagtagtactaattaagtaccactagagctctcgtgattactaaaatttaataaacaattgaatcggaatcaatatccatcattcaaatgattcaaacgagtcctaaactagcaatagatcgggaatgaattgaataagttactaaattatgactgtctaaaatattaagttatgctctaaaaaaaattaataataagaaatgaacaacggtaattttctctttcgaaaatatgaacaaatattggtaattacagtaaggaacttattactattccttttcattttcccacacataataaggacccacaattttgtttcactcttgaaaataaggttatttgaattacaccaattaagttatttggattacattaaggccgtctttttttataaaataaaaaatagtaaagtgattatgatcctgcattgagcctaatttagcacacatgcattccctagattgtgatatatatattatttgacaaagtaaataaataatatattaatagcaaaggcttaactttaataggaaaattgttgaaatttaactttcgctgtgtgaaatgattgaattctactgatatctttaaagaaaggaaactacctatacatatacataacataatttttgcacttcatttatctcaattaataattgctagtcttaaatttttgttcaaataaataaatatatattgagaaaaacaaatatctatatatatgtaagaaaaacccaataaaatgattcaaattaattatcattgggagaaaagtcgatctcaaggacttacacacgatacaaattatggacgtctcgcactaactttattacctatagtaataacaatatgattaattccactataaataatgtgtgtaactgtccatcaacattggagggtcagtgtaatttttggtcgaacaagagtagtgagtaatgataacattaatttgttatagtcatatatacatatgatgtttctatatatatcatcgtgattctttataccaatcctacatagtcaaaatgatagtaattgcatgcatgtgataccacatgggatctttttacaccccaaccagagtaattaatccttttcaaacaaactagtttaaaaccataaatggtaaaggcatggcttatttcactattctatcgtcaatcttacatatatatttatatatcatagcttttcaaagtttaaaaacaatgtccatgtgcggagaaaaaagctaaagagaatattataataatttcaaatgtgttttgatgatgagttcaaatgtcattctcaacttacagttcccaaaacatggaaaacatgtttgggcttagaattttccatgcacatacatatattcatgttgtttgggcatggattttgctttaggcagaaaattaaattatttatactaatgaacagtagtacagattaaagacaagaaattaatgtcgttgtcttaattcttgattattaatttgatggataaaaacaaagttatagttttgggagggttctaggaaccttggttgctgaacattgaaggtacacgaaagaggtcaaagtcgcttgtttttatgctcttttcatttctcccaattttcatttgtttgtctttactctctttgctcacttggaaatttctcccaactgaaactttttgggttagttggggccaactggggttcaatctttttggtttgcttatcgaaaaccacttaaaagaaaagtcatatattattggaattgacatattgtatgccactactcttcacagaaacttcctcttcttgaaaaaagtgggaaattaatggaaatatatttgatatattgatatatggaaaaagaaacgtatgagtgcttaggtcattgatgggtcatgagatatcactattggagagtaaatatatatatgtttaaaataatgttta

SEQ ID NO: 227236 - DNA, 2660 bp, Cannabis indica
gaagataataatgtacagaaaaagaaaaagtaaacaaaaaggaaaaaaaagtaaaagataaatattggaggagactttataattttcctgtttacatttttaaatatagtgtgttatttgttgtttaagaaaccttagtctaacttttaatttagtcattttttttttgagcagaaaaatatatgcttctaacatgtcaaaatgatcactttaaaaaatagattataatagtgtaatttttgtgtccaaataataaattgcgtggctgaaaaaacttttgaaataaaaaaaaaaataaagaaagtgagaataataacaatttgtgtcgtttattcacataatttttttttttaaaaaaaaaaatctgattgtatatcaactaggagagtcaataaaatgtaaaagaaaaacatatggttaatttttaattttagtaggcgtgtagcggtatttaaaacaataaaatggtctaagaaaatttcataaataatttacaattcacgttgatacatataattatttttttctaaaactactaattagattaaaaaacaaaaaagaatgtaaaataataataaaaaaaaaaatagaatgtaaaaaaaaaaaatatttgatcaacctagtttactgttattttgaaaaaaataagatttttattaaaaaaaaaaaaaagactactgtctagaaaaagaaaaaaaaaactaagcatgtaggcagagtttaggagagagaaacaataaatatacattggtatacctatcaaaaagaaatgcctaaattgtgagtattaaaataggtaagggtaaattcttaaataatttaataataatagttgttggtgcaaatatttcttcaaaattccgtacaaccatattttttgtaagtttttaattatttttgtttatttatgaaattatcttctgaaaaaacgtgtaaatgtgaaattagtttcaatgggccggggtctggtgatactggacttaggataattatgatttattattaagaaattagctaccaatttaaatttaagtactctattctattggttgagcctaatgtcggcatacctacactatttaaagggtagagtttggtttcaaaccttttatcacactttttctttctctatcaagtaatcttcacatatgaatttcataagatttgttgtatctcactccttatttctattgaagaagccataaagctctttctataaggtctgggaataaatgtttatacgacaagtatctctacttgcaagactttgtgatactattattatttgctcaatccctttatccatagattacttttcaagatacttcaacttctcatctacttagatttgagagtttaccttagttactaaatcttcaacattttacctcctatgcatgtacatatcggttcccacaaacctaaatttaatcttttaaatcctagctaccattagataactagatactattttaagggtaactagttacatatattatagtaaccggttgccaaatacttaaattagccttctatgtccttgttaacttcccacaaacttatggatgatgttaggtaataagaaattcatcaacagatctttcaacttatgtataatttccatcgtagctttcgaactaaaaatgactttcataggaattttatataaagaagaatttttctttaacacgaaagtataaacaagtgggtaaatatctcttaattataagatatatatttataatcaaaaagtataaaaaaagaaattggtatattatcaaagtaagatctattaatgatatagaagcaacgaaaccaaccatagttaccaaaatataaattttggcatatattattatcaatataaagcttaatgtttggatctctagactcaccattacaattttggtatggtactagtagtgcatttactcacataatatataatcagattgacttctgattttttgttgggattgatgaatcataatcataaatgtataaaaatatatataagttgtttactttgttattaggagaagccgtgacagcagctagagtccaataattgtttatgagctatcttagaaagtccgctgacagactacaaaaggtttattgctttatttaataaaaaaaatgaatttaattttatttctttatttagtcagaatttttggaataataattattctattttaaaatggaaagaaaattattttaaaataaaaaaaataattttttttgtatgttttaaattttatttcattccacttttatttttattcttatttttatttctatgttttctttctaattaaatgtcacttaagtgtacaatctctatataaagtattgatatttagcactagtaatacttaatactttatatgtagtattgtatgattaattaactatattttttaaagttattttttaattaatataatactcaatatttaattatattgtagaaatatagtacttgtataaaatatcaacacatatatattaatccaaactgcttttatgacctgattctataaagtcacagtgtcgaccaatttaatttgactctattaattaattgttatggtggcgtttggtaacacttttttaattagttttttgtttttaaaagtagaaaagtgaaaatattt

SEQ ID NO: 227237 - DNA, 5793 bp, Cannabis indica
ttttaatttttttttttaagtagttggttttgctcacttcattaaaaaaacaaacctaaaataaagtagtgtgaaagttaggtagtacgatataaaatattcgagttgagctttgcccgaactgatttctctttctctttcactccttgagtcaacagcaatcgcggcttcatcaccaagaaaaagcgagcccctgctacattcatattctcagactcctcaaattacttcaaccctgtctagggtttggccacaggagttcccaatccccaaccatggcggaggtcatgaacatcccggtcgactcgctggaccgccgccgtgaatccaaggaaaaatccgtggaagctcctcctgctcatgctccttccactacacattcatctccgcctccgcctgcggtggttccggggccctcgaaaaggcgtgaaagagacgaaagagatagggacgtcgaccgaccacctggtcgccgtggagattactacgatcggaatcggtctccaccgcctccacctctcagggagagggaaagagatagggactacaagcgtcgtggaagcggcagtccccttccgccaccttatcgcgatcgtaggcattcgcctccgcgacgctcaccacctccgccctataagcgttccaggagagaagatagaggaggctacgatgggaggagaggaagtcctcgaggagggtttgggcacggtgatagaaggtgagagttcattcattgcgctttacaattacgttgtttgttttagttagtatttctgatttgagttggacttcaatttcaaactcctttttgagaaaaaaaagttagaaattgaacggagaaactgaagcaatttgcattttcaaattctcattgttaggaagattgtatgtagtaattgataaagagaatggtgcatggaatgggttatagatttgaaattaaaatttatggtaagatttagggttactttttttttttttgaggtaagtgaaagccttttaaaaatatgttcagaatatggaagtattaatcgttacaagtaagaatatttgttttcttcggaaatatttcgtattgtagataacaaactttgaatttggactggaaatttgcaaatttagtttgtgagatttgtaggagatatattcatatacatacaagagagagaaagagagagatagagagtgagagagatagcttattgtcaaaacttaaaagctatagagagagagagggagagcttattgtcaaaagctgcaagtgcaaactctacaaaagtgaaagagagagacagagaagacagagcttatagtcaaaagctgcaaactctacaattctgagacataccactgtcaaggcagttttgtttcaaaaaaaaaaaatgaaaaattgtgagacatacagtgaagattggtctgttgcggaattgtggagtttacatcttttccaatgctacttaaatttgtagagattgtgcctttgaagaatttttctcgaggtccatataccatacgggaaaagtaaacaaaagctgaaagaaggatttgattaatccattgtctgtttatagacataatgcatttacacctgcggaatcctagaaattgatataatgatggttaatataaatatatggttgatgtatgattggattttgttggtgatttttatttcttatataatctcgtaaagcctatcatcttcttagttttgatccatggtctgtatgatacaattaaaatggtatcctccaaatattttatggtatgtatgtattaatgagagttttcgttttaatctattcaaatgaataaatggtttagaaatcaaaatctagagactataagattacatatttgactcttatacttcttatgtcagacatacgtatccatacaattttacactttcatgaagtttccaaagtattcacagattgctattcttgtaggtgatccagagtcttttcttctcttgaaatgtgtacatagttagtttgcttttgtagcactagtgatagctattcttttatgggggtaaattagatgctgcctaaggagtttaagtctgccattgcgtagcgctagtgatagctattctgtattttcaattgtaagtagtatgtctttacatcttgtttctttgcattttgtttttgatcctctaaatccttgtattttcacatggagtttgatcccagccaagaaatatagccatcctacactagaatgttgtgagacagttcggtccgtatcctttttccatagttaaatcaataaaattttgtttctgttttaaaacacaaaactgtgattgggagcattaagaatataccttattttgctaagtatcattcatgtaagagatcctatttttctcttaataattttttttgaaaaaagagaggagggaccaatcattaagattggcccccaccctcgagataaataaaaaccctcgcttatggcggaggaaaaccgtagttacaaagtgcaccaccttctaagacttaaacaaggtctcaaggatgagattacagcgagcactcccctaggatacatttaaagaactggaaacttcacaggggaagagactataaagcataagcgaaaatcttacaacaacactctccattctctcattaaatctgagaaagaaacattttcaaagagcttagtcttgtacacccaagaagcagtccaaaatttaattttatcccatagggcctctgctgagttctccgaaccttcaaagattctattattacgttctaacatggtgttgatgatgttttgtagcatgagctacggataattgcataattaacctagataaataatcttttttgtcatattatttcaccacatctaaggttaaaatctataacttgaggttttattttgtcattcctcatgttgaaactttgaaccaattagctcaatgcaaggtgttggtagatacatttttctcttattattagcattattatccacagaaagaagcttatatatatgaagtgtatttgtgactttgttcttattggtatttgtgctttgcactctcttttgtgaattctgcttctttcttattttatattatcaagtgttgtggatataatataataaaagttagcccacaggatgtgtacttggaaaaaaaagtgtagaattgaattgcaaaattttcttaactagttttgtgaatattttatggtatagatttggatatgattatgctggtggatatgatcgtgagatgggtaacaggcctgggtatgctgatgaaaggcctcatggtcgctatgctggacgatcgtctggtgcctatggtcctccaggtgaatgcagtgtcctacttatgttatcaaaatgcatgtgttatttgtctttatcgctttccttatattttttaatgggcagtttgaaggggaaaagttgcatataaatccatcttcaaagcattgtaattagatcaatgtaaataatgctggtcttaaaaaataaaatattctgtagtattaccaagggtcgtatggtaagaggagttcaaacttttcttatttataaaatagtgtttggtagcatatggaaatgtcataatttttcatttttatattatgtgtgagtctcatagtttataatgaaaggggataaactcacttatgtagatgggacaaagtcatcttttgagattctcatttaatgctaagattacccgatactgaacggcccctaaagctttagagctttacatagtaacttagtaaatgtatcatatttataataaggatctttaaaccattatgtcacttacctagcaaattagaatcacagacttgagttcaaattggatgcttcttagaactatgctgattgttacaaagctgaaaaagcaatagtcttgctcatgttgataagatttaccgaggttgtagtagtaagagattataaggtatcatccaaattacaatctagatagccattaaaggcaaaacaatctgatacaaaacagtacatattacaaccaaaactgccaaccatttggaaaatagtattgtgcatattggaagtggtttatcatttagaacctgcgaaaactgaaaaaggtggttttgcaaacaatagtcttgctcatgttgataatatttaccaaggctgtaggagtaaagagatgataaggcatcatcccaattacaatctacaaagccattaatggcaaaacaatctgatacaaaacataagagtatcacatattacaaccaaaactgccaaccatctggaaaatagtattttgtggactttgtccacatattggaggtggtttatcatttagaactttctgaattaaggccttacatatgtcctggtctatgttgccaattgtatcaaacatatataatactaaaacaacatgatcttgttcatgtatttttatttaaaatttgatgaaggacttttttccattgaaaactagaagttgtaagttgcaccatgaaacgaaaatacacccaaaaactgttgaaaagaactaaactaaaagccaaaatttctaaccaaataagtattaaaaaagggaaagtgaatattttcaaagcacaaatcctgtatgtatattgtgaggtgtgaacttaatgtggttggtatttgtgtttcttaaacaaatggaacttctattcaattaacaaaaatctcagccaaaaacctgccgaaaataactaatctgaaagcacaccaaataagttaaaagaaagggaaaatgaaaaagcacaaatcctgtatgtattttgtgaggtgtgattttttttttccaaataacgtgaggtgtaaggtggcgtttggttggaggtaataaaatagaatggagtggaaaggaaacaattttttattcaattcctttgtttggttgcatttagagtattggtggcgtttggttggaggtaatgaaatggaaaggaaacaatttttattccatttctttgtttggttgcatttaggtggcgtttggttgaaggtaatgaaatggaaaggaaacaatattcattccactcctttgtttggttgcattttaaagtattggaatgtcattctaatggattgacttttctctcattttggtgaaatgacttccattttgaaatgtatggaatgaccattccaatgcaagatgagaaaatttttaataattttttaattaatttttcttatgcattttaagtttgattctattcctattcatattcccatttccattactttcctatgttttcattccgtccaaccaaacaccaccttagagtattggtatctattctattttgaaatggaaggaaagactattccaatgctagatgagaaaatttaataatttttttatcaatttttttatgcattttaaatttgattccattccattcctatcgctattcccattctcattcctatgttttcattccttacaaccaaacgccacctaaatttggtatgtatttgtgtttcttaaacaaatggaacttttattcaatttaaagatgaaagttcaaatacttgggaacaagatttcctctctaatttgtttggtagattgaaaattttattagagaacttaagcacaccaattatattgaagtattaattagtattaaaggacctttcaaaaaaaaaaaaaaattaagtattaaaggaattaagtacactaagtctttggtagcaagtttctgttcatacttctatatgcattcagatattttcacatccataatgtattggaattggagtgaatgtttttgttctatt

SEQ ID NO: 227238 - DNA, 1261 bp, Cannabis indica
gttgtcatgctataaaaataaatattttttggaccgaagtaccattatacaacagaggaaaaagtttagggactattttaaacaggttaaaaagtttaggggcacaatcatgcatgtgtcataattcaagggcaaatatcctaaatagcatacaaaaaaaatagtaacaaataagatcgaaaatggtaattagtatcatattatcttgaatgaattatttattgccacaaaaaaaatattttcccaaaaccaccaccacaagtaattatcattttttcattgattaattgattcattgataaagtaattatcattgattcattgattcatttcctacttggattaaactggtcatcacaaaataattaacagaggtgagaggttctcaaatttaaattcgtagtgatgaggattttatcgaagctgtgggagactttgagtttcgctttacagcccgagttttggagaatgatagtgttttggatatgggctctgctgctctcttactttaaggcgcttctccttccaagctctaggcgctatacccgttcgtctcctcctcagctccctcacaccgcttcttcttcttctcctcctcctcatttcagacccctttgcatcatcaccggagtaacccttgaaagccttgccttccatttcaactttttccttttttaatatgctttaactaacttttctgtgttatcttcggcgggtttttaggctacctctggtttgggagctgctgctgcacatgctctttccaaggaaggcttctttgtcgttcttggtaaatcctcttcatcttttttcttgtcgttctgtatcaggacgtgaattttatagttctttcttttggggatattatatgaacgtaaaggaaagactttatattctattatggctctcagtatgaaatgagaggctgaaagtcatgtaatgtatgtatgcagttggacggtcgtcccagttattggaagaggtattgtttctgttctctaaatttcatatgcatatgtgccctttacactttatgtgtttgtttatgtatgttcttcttgttgttggttatgtaacagactatgagagaaattaaagctaggaacaacactgcccaactcaaagcttttcaagttgatctgtcatccttcatttcgattttgaagttcaaatcttcccttgagcagtggcttttgaattcagatatgcattcctccgttcaattattggtgaacgacgctgggatactggctacatcgca

SEQ ID NO: 227239 - DNA, 6624 bp, Cannabis indica
aataataataaatggagaaatatgtagaattatttataggaatgtataggtaggtagaacaaggagtagtgtaggtggcaaatgatggggtgagatgagaagatgagacgggccgccgggattttgcaaagttctgggctggcccagtcagactcgcgagtcaccactctcactaactcactaactcggtgcctcactcactgagtcgtcttctctgtcgttctctttctctttctctcactaacccaaaacccttttctctctctaactctccacctctgcacacacacgcttcttctttttccttcaaaactatctctgtcctttttagtcttttcacatttcatcttcagtctcgcttaatccgacggcccaactatttccacgtcaccatcgtcttcttcaccatcctctgcgacctgctctcccccacacataacatacaacttttctcgtatatatatatacacatttatatttattatattatataactatataacaatcctcctcgttctttgctctagggtttcaagattaatcttcgcctattctctatttttttgggctttcgaattctcgtgcctcggtcggtgatttcgccgcttaagctctcatcttgtttcgttataatgaggtaattttctctgaaattccagtattgtttggtttttgttattgttttagtgttttgatttgtgtaataccaaggtggttttcgtggattttgagtttgttttttttttttttgtgttgtgtttaattagggttgggattcggatttttctgtaacgggttggaagagtttggagaattggaggaattttggttcttgttttttgtttctattaatatattatgatacatggcgattgagaaaaacaactttaaggtttcgaggtttgattcggagttttctcccggtagtaggaagagtatgtccagtgatgatgatgagcttcaacgacggagctctgcggttgaatctgatgatgatgatgatgaatttgacgatgctgattctggggctgggtctgatgactttgatttgctggaattgggggaaactggagtagagttttgtcaagttgggaatcaaacttgtagtattccgtttgagctttatgatcttcagggtcttgaagatatattgtcaattgatgtgtggaatgagtgcttggatgacgaggaacgacttggtctaactaaatttcttcctgacatggatcaagagacttatatgattactatgaaagaactctttacaggttccaattttcattttgggagtcctgttaaaaagttgtttgatatgctgaagggaggtttgtgtgagcctagagtcgccctttatcgcgagggctggaatttttttcagaagcgacagcactaccatcttctgaggaagcatcagaacactatggtgagtaatttttgtcagacgagggatgcttggctgaattatcgaggatacagtattgaggagaggcttcgggttttgaacatcatgaaaagccagaagagtttgatgcatgagaagatggaagatttggagactgcctcatcagaaagagggtctgatgtaggtttggcaaatagcagggctaaggataagaagatttcgcagaaaatgggacgtcaatctgcttatgttgctaatcaaaatctggatattcctctacgaggacgtgcaatggctttggaatcaacaaattatgggaagcagaatccgaaaggtatgctcaagttgagtggctccaaaaatcctactgctaaaggaatggggggacgcattacccctgcataccatggattggatatgaactctggaccatacagttcggcggtagcttatcctcggcagagtaaagcattagcttatgaaccaggggcaagccacaaaataagagaccaactgagaggcagtgatgatgctgaagatacatatggatttggtgaccaccgaaatcgcatgatggagaagtctggagttcttaaagtagggagaaagcatgatcttcctagaggtgatgaattgggctctgaaagtttgattggtttccctgtgtcatcaaagactgatatacattcctatggcaggaaaaagaatgcaaatgctttctccgaggcaaacctgtttggcactaagccttctaatgttcgaggtccttatgatcttccaaaaaagggcaagtatcctgaatatgttcagcaatttgcagttgaggaccagatgaagtattttaaaggcagacttccgcaacaatctgggaaaggaagtcgagttgactcatcagaccagattgaatcattctggaataataggggtaaagaggatgctttctctgtagattcacccttcagagctgatgattggagtgttaggagcaagaaacggaagacggggggaaattctcctgatcttaagtacaagttttatagggattcccctacacaattaaatgataggcttttaccttctgaatatagagcaaaaccatttgaagagaagaccagaggacagaatggaggagctgacccagcagtaaatagagctaataaattgtttaatagaaatgaagaaacagaatctgactcaacggatcaatccctcgatgatgaggatagcaaccctttgctgagaagcaagatggcttacccctctggtgttggggaagcttcccggtcttctttgtctaagtatgtgaaaggtgctaaaaaggccaaagttttcatgaaagatccagcagcagatatacagtcccttgatggaactacacactctaagaaggttggtagttttctggaagagggacatctcctcggtatagaaaaatactcttcaaaagcaaaacagaagggcaagatgcgagatagtagtccctttcgtgaatcatctgccatagttatggaagaagataactatgagttgggtttgggtaaatttgctgacggtggtaatgattatgtttacaatttagtcaagaatggcccaggggaacctactggggagaagtcacaaaagacccatccttttgatgggaaacaaaaaaggggaattacccgtgaccaatcacatcacattcgtgattatatggttgatgatgaggatgtttcacttcgacaaggacgattgtcagcggatggtaagagacaaggtagatttgggaagaaaagtatgaacactgaagcatatgtggttgatcattgtgaaaatcctgaggcctctctacaagggtgcagtgtgatgacgaagaaacggaaagggaaggttgatttaactgacatggataagggggatgaaggagacaatgaactgatatctgactataagcatcgtattgatgattccatttctttaaagaaaagggccaagaggaaagttgaggctgacgcttgtggctcagatatagaaccttctgaattacctattccagaaatgggtactacagatatggagctggagattaagccacagaaaaaggcatttactttaatcacaccgacagttctaacaggcttctcattttctattatccatcttctttctgcagttcgcttagcaatgataactccacttccagaagatactttagaggttggcaaatctgttgaagagcagaataagaaggatgatggtgtaaatggggttcattctagagagaatgtagatgccaataacacagagcaggctggggaagttaatgtaccttctctaactgttcaggaaattgtaaaccgtgtgagatcgaaccctggggatccatgcattcttgagactcaagagccacttcaagaccttgtgagaggagttctcaagatattttcctcaaaaacagcaccattaggagcaaaaggttggaagacactggcagtctatgaaaagtctactaaaagttggtcatggcttggtcctgtttctcatagctcatcagatcacgaaacaatcgaggaggtcacatctcctgaggcttggtcccttcctcacaaaatgcttgtcaagttggttgattcatttgctaattggttaaaaagtggccaagagactcttcaacaaataggaagccttcccgcaccaccgttgtcattgatgcagctgaatctggacgagaaagaaaggttcagggacctaagagctcaaaagagtcttaataccattagtcctagcactgaagaagtgagggcttattttcgcaaggaggaaattcttaggtattcaattcctgatagggctttctcttatacagctgctgatggtaagaagtcaattgttgctcccttaagaaggtgtggtggcaagccaacttcaaaagcccgagaccactttatgctgaagcgtgatcgaccaccacatgttactattctttgtcttgttagagatgctgcatctagattgcctggaagcattggcacaagagcagatgtttgtaccttaataagggattctcaatacattgttgaagatgtttctgatagccaagttaatcaagttgttagtggagcccttgaccgtttgcactatgaacgtgatccttgtgtacaatttgatggggaaaggaaattatgggtttatttacatagagaaagagaagaagaagatttcgaggatgatggaacttcatctacaaagaaatggaaaaggcagaaaaaagatgctgcagagcaggctgaccaaggaacagtcactgtggctttctctgggtctgcggatcaggtcggtggatatgatttgtgctctgatctcaatgccgagccaatgagcattgatgataaaggaacagaacttggatttgaaagacatgtggatgatatcattgatccgaatcatgggtctgaacagggtgacatccgtgaaggcgatccaattgtttgggatgctcttgacctaaatcctatgcgagaaaacaaattactgtgtcaggaaaattcaacaaatgaagattttgatgacgaaaccttcggtagagaaagaccagttggagtcttattgtaggcttgcaaggagtccttcaggtagctttcaatagcataatgcttaacccctaatgagttagttacttaatcctatttttagtacatggtgttgcatgacatagttcatgaagccttagctagttatgttcttgttaatctgctacatacagattatgttatataacatctttatatccttaggtttgttaccattaatcaaatatttctattttcaccattctttcttaaaaattgaagaatctgaagactgcccacgattgagtctcacacactcgctatgtgctgcactatttttactcatgtttgacagtcaaatcatgtttaaattttgttgcagacccagatgtgatgtgaagtgatgtgcagtgagtgagatgatgagcatgatctcaatccatggggttgcaagtatgagcaatcaaaacaacaaagcaacagatttgattgaatttgcatgacttgattgcacagtgtatattgattctatttgtttgtagcttgaaaatgtagattaccttacaagttgatctctttttgttggtacagtacaggtggatatctatatagttccaagttcgtaaataatgcaaattattttttttttctccatatcttacccttttattaccatatttaagataataatttacttgatgccctaaactagggaatagatacctgcttcgtgcagttttaataattttttaaattttacattaaatatattaatttttaattatgaataaaatttcaaatttagtacttttttatgtttttttattatgaataatataaaatgtttatgtgaaatcttttttattcgtgattagggaattaatttatgtttttttgcagtctttcataataattgcaatttttttaagttgcttcgaataagtgatataatataatataaataaagaaatttacatgatatattaatttttattatttttttttataaaaatactcttaagtggtattttttattttttactgtgctttttaataagtttctcactggtattttttaggtgttttactgttgtttagagtttttatactttgtgttttactagtgttttatgaaaatacagtatttttgaaaaaatttccgtgtaagtatttttgtaaaatttaaccaaaatttcaatatttttgtaaatttctctataaatatgacataaatttatgactaaccttaattttaattttatttagtagttagatctcttccaacataattttttattatttttatagtgatgatcagatcatgtgtgaaaaaaaataaattaatatatatttatctattaattatttttttataaaataattataactaataatattattatgtttgatagtgtatagaataaattaatccacaattgaatttttttttttctttaaaaatattaattttgtcataagttactcatgctaaatatattatatattatgtttgttcgtatatcaatcaatgttatattctaaaatatatattgtatataaatactctgagcaatatatatttatataaatttatacaattaactagttttgctctagttctagatcctccactgcaacaagagtcaataggattcttattgaagtgtgtttcac

SEQ ID NO: 227240 - DNA, 1236 bp, Cannabis indica
aatgtaaaggtgaaaattaagcaaaggaaccccaggaaatcgggtcctcccatctatagtttcagatcttaagacaaaaaaaggtaaagatttaactaatacatgtttgtattagaaataatttgctttcgttttggtacaccgtcaatcgaacttagctagctatatctcttccatgtaatatttcttaattatattataaatttgttttagtgtcatcatgtataatgacctcacacaaccacgataaacttccaaaatatcatcaaaaattgatacttgttaattgttattacatatcaaatacccaacttgaacaatctaagccagcccaatttaaataaacaccatcaaaactactaaacaacccaagaacccagtttttagtcattagcagtagctagttgaagagaaagcagctcctcctccggtatgagcctaatatgacaatccgacgtgggataagcggcgcacaacaatgcgtagccgcggtccaccacatcgtcactcagcataccttcactctgatcaaccgaaccgctcaagagcttagcagggcaggtcatgcacacaccgagcttgcagtcatgaggcactgaaaggcccgagtccaaggccttggagagtatggtctcgtccggatcaacctccagctcggtcgacttattatcgtgctcgaccaccactttgtaggatcgtacggtcaaggatgagcgacgctgtgaggttggagtgagtctccgccgtagatgcagctcaaagccggaagtgatgggtttgttggggtgcctttgtctcggcggaagaagggaaggagatggagtgaagtgaagggtggccatggtaggaactgaattgagtccttttctttggtgagagctatgtttcaaggattgaggtggagcactggagtggataagattactatcttccaattgttaatgggccgtggaatgaaaactacttgggccatcctatcctatggagtaatttacaggaaatcttacgaaaaatactaattttttttgtcattttttatattttttgctcactcttttttttttttttacatttttactatactgagttttttaaaatattgtattaaagttttaaaattacaaaaatactgtgttttaataaaataaaaaaaaaagacaactctaaaacaccttaataaataacatgaatacaattataaaacaatcaaaagataactataaagcaatagaaaaa

SEQ ID NO: 227241 - DNA, 2852 bp, Cannabis indica
tctttcaattaccaaaacaaatataacatgtaccaaaacgactttttaatagtagtaccctataataaataccactaacaagaacaataagtaaaagaaaaatgagtaatatgagataaaagaagaagaagaagaagaagatatatttacttgaatgtgtaatatggtatccctactgtaaatgacatcaaaagaattatgaggataagtttttttggtgcaatcagcaacttcaaattcaacagaacacttaagcccagtggctctttcaagagcaagagatatcatattaacagaaagatcaatgcccacaacttcaacatcaaaattctcagccatatagaagtcacctcctccaattccacacccaacatctaaaactctctgaccaggtttaagctcaagctttttcacaaattccttagttgtttctacacaagaaaacaatcaaatagaacaattgttaatgttctttaactcaataaattaagagcccatgattttcttaaataaaaacaccccaacatttctttcagacatttcatcgaacacatgttaagtaaaaagaaatttgatagataaataaagaataaatatttgaacccgaaaggcaccgggttgaacccaacccgctcgaatattttttttaaaaaaaaattgcgggttgaccgggttgggtccgggcgggttggccgggtccgggttgaacccactcaaattgttcagccctaattattggtagatgttcaaaaagtaaaataaaatactaaatgcatgaaatgactttaccattataccaaagcttattttatgtgtatagatatcactttcatttataaatatatattgtaactaattaaaatgcatatatatttttttctaatttttttttcaggttggacgacggccccacctcgcctctatgtgggtccgcccttaattttactaatgacatagtttaggaaccacaatacatatttagtgataaataaataaataaataattaccaaagcctccagtgctcacgtaacctggtccaaaaactcgctcataacgtaaaataccactacatttgtactgaacattgtccaaaaatttctggaaatctttgtcatcttgagaactcactttttgccatgtccaacaaatctgcataacatttaaacaaaaaatcctttgtaatgatataattttctattatttaacactttgttaatgttgaaataattattttttttttaagacaatgacgaataccactgataattaaataatgtcccacatgttaaaagattatacatgtcaaagaataaaattatagtcagtcatctaagtccaaaaaacatgcataattactttatgtgtaatcacatttggccgaccgatgtacatgaatcagggacattcttaaaattctaaatgacatgttacatcctataacaatgatcctaagaatgtctcgtaataaaagccgagacaatagcaaaaatagatcattgaaataattacctgattttggtttttcttgtttcgaacataagctccaatacatttacagcccaccaaagaaagttcatagcaatttcctgattcatccttagtgtgacactctttgaataccttaagtatataaagtaataacaaaaattagagctattttcacaaaaaataatagtaattaatttagagagaacatgttaagattgtacaagaaaattttacaaacttaatagttatggatgtaataaaatattttaattttatttttagtattgtaaattatttagaatttactaaaaatttataaatatacaacatacatgattttgaaaaaatatatatcaaaattgaaactaaaatatctctcatagataacaaaacagataaaaaaaaaatgtacaaaaaggaatattctaagaaatatactataaaaactaaagtaatttatggtgtaaatacttaattttaattctcgatcggttggagataaatacttaaatttaatttttagcggtaataatacttaagttatattttaaaaacttccgtaagtacctagtcattaaatatcaagtcattatctacgtgtgattttcttattagtatatttaaattaatttttaaataaaaataaaaatttaatgaagtagactaatcaaaaattgtcatatgacaatttacttaacactatatattatgccacaaattattttaaaaattaccctaaaattatttttttcacataccacaccggacaaaatataattactattcaatacattattaaaatatcaatcataaatttgaccccaacagaaaaaagaaaactactgtttctcataatcaaggatagataattgtacttgcaataattgagctatgtaccccacatatttgtttagttgaatattctgtggacctaatttatcttgattttttttttaaaaaaataaaataatgaaaaaagaaataaagggttttctatttttatattttaaagtagtttttttatattattattattttttacaaaaatctacatagtaaccactagagcagtattaatcacaactaaaattcacataacaatttacatagaaactatcagagtaattacgaaagcaaccaaaactaggaacatacccactagtattaatgtggggggctatagtcccactaacaaaaatattaccttttaaaaaattaaatgtaatatttttaatttgatacctagagaccaaaataataaaaaagtctccacaaaattaaataaatctagtaaaaattattataatataaatataaatattttttaatgatgaataagtcctcacaaagtaaaaattttgag

SEQ ID NO: 227242 - DNA, 1529 bp, Cannabis indica
aatggcgaataccaagtcccgtcccattccggacaatattgaagatatttacgaaaataccactgcatacaaactaagcatcagcatgccacctgcacgcactacaacatgcgccaccactttgaccaccacttggccaacttgtgggcatcacttagcttgtaacgtgccatcatagactgcacgtaacatctagcaacgtaatgtactacccaatttattgctcgtatgatgaaatgtaagtggacattaagtaaagtagatagaagaatttggcaatccgcaactaacaagccaaaggtacaaaacattgattgattactttgtatggcttgcactgagaccatactatcagtttcaatctcaatctgttctcaatgtttgtctttaatccagttcaaggtctctttaattgccaacacttcaataacttcagcagcaaacttacctccacaacagttatcagtttcaatctcaacctgttcccaatgtttgtctttaatccagttcaaggtctctttaattgccaacacttcaataacttcagcagcaaacttacctccacaacagttgccggagtgttgcaataaggctaccatgatggttacgagcaacaatatcgaagccatacttttcctcttgttcaaagatcgcagtatccacgtttatcttaattgtattttcttctggtttagaccataactcagagccctcacccttgttgtcgagacacaaggatgttagagtgattttatcttaagcttttttttcattgatcaagagctatattggcagattcaattacttccataacagaggaatttttcttctttcaaacagttttgttccttgccttctacattaaccaacatgtcatggcaatgctacacatggtattgattgaaactgtttgaaacaatagctccaaccagcttaccaagaaactatcggttttgcttggtgggctgagaacaaggcccgcccaagcattttgagaaccgtgtacgaaagattaaaattgagcttttttattaaaaaaaagaaagacatttacattaagatcacaattccattactaatttatttatttatttatttattttaagatatgttcttaaacttttaattatagttgtttttatgtatgtataataataataaaaaaactttcctttccaaaaaaaaaaaaaaaaataagccctttaaaaatgggagtcttgtacaatggtccaagttgtctaaagcttagaccgaccctaattaggaatgaccgacttatcaatttatcttgtaatctgttaagggctcatgtagctcatgcattaagcaagtttgaaaatattgaccacattgtacatgtggcaaagactactccatagacaacccccattagagatgatcttctttagtaatgtttggttttgtagaatgtaatgatttatcattagaatgaatattgaaataaatgataaattaataaaattatcttgtactttttttttttgagagagtgatctaaatcacactat

SEQ ID NO: 227243 - DNA, 3692 bp, Cannabis indica
ttgggttagtaaaaatatgttataacccgaccaaaccgaccgacgtacacctctaactgttgtgctgaatgagattttcaggtggattaggtttgaagcttgggctaagcataaggtaggatggatgaattggctttcggtcaagacttcaagcaaaacaattcatcttttacaaatgattcttgctgccacagtttactttgtgtggaaaaataggaacaattgtgtacataatagcacttgttatatggtgggatacatagtcaaagagattaaagatattgtaaagtattgattgtatagcattcctagaattaaacatgaattaaaaggaaatgctttgtataggcgattgatgaattgagaggagttgtttggttggagccggttggtgaggcttgtgttgtattggctgttcttgattaatgaatttcttctttagtcaaaaaaaaaaaattattgaagaaaacaatattaaagctaaaattatgtatatattttatattccatgtcaactttaacaaaatatattataaatatataatggaaccttatagatatgctttgaaatactaattaaaaaattaataataattcattggactagatatttaataattatatcagttagttgattagaaaatataatactttcaataattaggatgggctagatatataaaaaatactagtaattatttaatattttgaaaagcaaaaaaaaattgcttatcttattaaaataaaaaaaatacataaaaatttgattattttgcaaaatttgatttttcatgagttaaatgattagcaaatgtacacgtcataactactaaatcttaaccttacgatcaaattattataattgagtaagaaccatatacaggagcatacaatttctcttgtaggggctcgttttgtcaatctctgcttgtcactttttattttgttaggagtaggtgcttgctgctcgttaaagctatagcttgctgtctattaaacgagccttcattgcctgtccgaaagtcggggaccattagttacattttgaattaaagtagtgatgagcctgaagttgatccctttcgagctaaatgccaacaagagaaagaagaactagcgactctccttctcaacacgagaaaacttgagttttgtttctaggtaagagtgattgatgtcataccagtagcccttcttccaacaaaggttatttcgcctggaaagtttggccattttgttgtcttgtcatttttgttatgagtcctcgttgacgatgatctctccaactgtcaaaaataatatatacggatgatcctcctttcgataacaaaggggcaggatgggcttcgaacacaagattataaggagaagtagaaagagctttttcctttgtgtttattgtagctcgcccttataacgctttgctctctgcgcttagcttccatccctgagctaacctcctctaccacattttatatgtcattaggagaagttattctgcgcaatcattaacccgactctgcactacttctttaaaagtcttgcgcatggagctgctaaagccaaatgagctatatgcagccgttcacccttatctccccaaagacacctcaggtcccatggaggtctataagtctctaagtgacttttgtgcttatgttaaagagtctcccgtatgcaaaacttagacattacaaatttcggtcaactacacggggtgccctcatttcatatatgagttctttctaatttctcatattatttttcgtggattagcgtctcgaggtcttttgatgggcataaagaaatcgtcttagtagcaaccaccaaaccaatagaacaagggctgtagtaggctatattcagattatctaacatctaatcatctagttgcttgtagttttcttttttgaaatcaaaagagtacgcggatgacttgactatagtataggtcatatattgtcatgagcagtaagcagcaaatttgcccaagagatcttttttatcggtatgccattactgcttgaatgaataccttcactttggttagcttttcttgactaattgatggaaaccctatctttctcctctttctttcttgcctgaagacacaggcaggcctattgctggtctagtgacttggcatacaaagtcgagtagggttctcctccatgtggtgcactcctgcttcttcatacctagaaaaatgggagcagctccaagggacaactttttactactggatgaaggtcttacattggctaacaagataaaaaatttcatctttttttcggttctgaatatcgtagaagctccatgtacagttttaaagctgagcctttccaacaatggggcctagggaacgatatgataattggtttaggtagggcggccagcctactacagacatctgtaggtattagtacgtgagacaacgatccacaaactgaccctctacttgggaatgaagaggggcaagatagcatgtcacaagagctaggagtttcaagcgctaagtcaatcctttcctttgggaagtcatttcaagcaagaaagccatctagggaggaaagcaagtcagtcaaacggtagcaagccagttccctcccatcgatagtagtcagcctcttttaactaaggctaatttctacctgatcatagttacacaactccgacactaggcctcactctatttagattgaatgagtcattgggtgatcttttgcctctagattgcctacctgaggggacatagaaatgaccaggccccacagagtctctcgctgcattagtagccccatagataaaggaagctactgaagtccctacaatagttcttaggggacccgattacctacttctgccaaaggggagagagtccttcaagtagttccaacgcctatagatccagtcccgggttgaggggggccagttgttttcaagtcaagtcctgtatcaaacgagattgaccatcgatgcttattacatccttaggacgtgtgtctacacaaatattgttattatcatagacaaggtgccttttgttacccaaagcgggcaaacaaaaagatcgtgtaacttgacaggtgcagccacgtctgttcctaggcccaggaggaggggctctaagagactagggaagacgggcagattatagaactagggggggatcgaaggtttgtacattgggattaggcatgaacgagccttgactaagccaacattgatgaaaaaataacaaaagaaaaacttaaaggatgacaaaataaattgagggtttaagattttacaaaaaaaaatatagtgtggagtcttagtttgaaaactaattaagatattaaaattaacaaaaaaaaaaaaaaatccgtgtgaacaaaatttaaggcttatcaagaaatatttatatataatatatatctatacaccaagataatatacgtcatcttatgtagtccacacaatatttatctccatggattactttcctcatcaataagaactgctttgcgggacaatacccatatatctcatttcacacgcagccttatacatgtataaacatatttttgtttctttacctcctcttattccatgaggaaaacagttcatattggctatagggccaatatgtcctgacacaacgaataagcttcaagggctttgagagagaaatatttatatattatatatat

SEQ ID NO: 227244 - DNA, 1819 bp, Cannabis indica
tatttacctttagcttcagaataaccaaccctgattttatttgcctcaagcatccttgacacctcctttcctgattcagaagctctaaaaaatcgatgctctatatccttaatgcttgaaagaaaatctttagccctgtgagtaataaactctgaaggatcctctctttctccacctaagtctttctctgctggtgccttcttctttgaacttgtatgcgcctcaattgcaagtttccctggcaaactgccaactggtgcattaacatgccgtttgatgtctaactgcttactctcaccattactctcttgaagagaaccatcaacttttactgcattactcaaatcatcaccgttcttatttgattcattaactgaattacgtgggacctcagaagtcttttgctccatttcagtccttgaagttccttcacgaactccattacctcctttggaaccagctccctcattcttaaactgcctccatccattcatttcactgaaatttaaatctacttcattgttccccatgaatctgaagctgtcattctcatcaatggggtcaaaaaaatcccaagaccctggctcaggaagaggaggaggaggtggcattggaaattcttccacataaccatcattaacaggactgaagctaacagtcaccgcggttgtaccccctgacctcatgtagttcaatgcaggcaccgccggtgaaacggccacctcattgtgtagcggcgagtctgaaacttcggctagatgtgacggcgatggagaagggtaagatgagtgagatggagtcttgtcagaaatcgacagagaagattccatcaagacctcggcctcggcgtatcgacgaagagcaatgccgatgttacgaagagattcaatgtaggacacgtgggcagctgcaagagcgtaccttgaatcgatggcttgcttgatgaacctgcgacgctctttacagagacgcaaagcttcatccttttcgtttttggagtttgtacagcccattttcaggaaaaccctcagagaaatgaacccattttacctaacttcaaacagagaaaaaagctgggtttcttagtaaacaaacaaccccatttttcgcagcctaaaaaatactctaaaccccactttataccagaccccaaaacccttttctcttgtcactttgtcagtgtagaataaagaacaaaaaaaaaaactcttctttgaaccaatacgatatagtttgtaccagaccaaaacagagtaaacaaaacaccttcaggcccaaaagagcaggtgcgattcgaacgaaaatgggaacaaatagtataactttctcttaggtttaatgactggttagaggcttatttggcttgcgagctcaaaatggagaagacaaagttgcttttttatgaaagatagagcaacagatgagaagtaaagagaagtagttgagaagagtcataatattaacacaaatcccattaagggaaaatggaacagaatgagaaagtaatgaattattgacgctttcgagtgttcatcttcctttctttttttccactcttggcactctggaaatgggttttatttaattcaaagggaaagagaaaaaaacaaaaaggaaacgaagaaaaaaaaaataaaggaaactttaacacggcgaaaatgatccaaagctctgagacaggagagaagtgaagagggagaggggaatctactacagtttgatacacaataagccaccctcgatttgtgtgtcaaatttcttcagttcattccagttcatacttcatttaacaaaataaaaaagaaagagagagaataaa

SEQ ID NO: 227245 - DNA, 2132 bp, Cannabis indica
taactaatcagattgtaatgggttttatttagggcataaaacccaacaaggctaacatcagatcaggtaaaagtttctctcctcccgtgctgcatactgaatctattattcaaaatttaagctcaaaatttgatgaaccaaaggagaagagctctggtcaaaactctttggtacaaattgatggatgatatggaggatgaaattttatactggaacactgcaatggtatgttatgtgctaggtgccaaccctcctttgggaccatttgaaggctttgcaagaagagtttggaaagataaaggagtggacaaggttggattgcttaaaccgggggtgttcattgttagatttcaggcaataaacacaagggatgaaatcttaggtggtggttttttattctttgataaaaatccaatcataatgaaaccatgggaaccatacatagactacaagaaggaagatgttacatctgcaccgatttgggtacaactccatgggttagaactgagatattgggggaaagggcattgttcaaaattttagagcaaattggaaatccaattatgttggatgatatcacaaagaagaaagaaagattgaactttcctcgaatcctgattgaagttcgaatgggccaagaatttcctgaacagatagaatttcgaaatgagctgcaacaggaggtgactatttttgtcaaatatgaattgttaccaattacttgtggtaattgttctgggataggacacaatgcagctgtatgcaccaggaagcaggaaaagaaaacgatatgggttccaaagaaagtacagaacattggctagaaggccaaactagaggaagatgaagaaggattctgtcaggttcagatcaaagggaaaaatggacaaatgggaacaaacaaggtaggaaataaaagtgatgatttcaaggggaagatgaatacagagaatatagcaactgctaaaacttttgagattctagctgaaccaggagatgagcagagagagccaaatcaaggggaagaggttactgtcaacacaggacgagggggagtacctcctctttcaaatggatagaataatgagttggaatgttaggggtctcaacagccacaataaacagatggaggtcaagaaattgatctctaaataccatgtgggacttgttgggctcctagaaactcgagtgaaagcttgaaatatggggaaagtctatacaacaatgttttctggttggtgtttttcaatgaataatccatggtaccgtggagggaggataataataagttggaatccagatatgttttctgttgatatattgagatgttcaagtcaatttatgcacctaagagtgtggacaagaggtgacaaagaatattttatgctacatttgtctatgctttcaatgatgaagctggaagaggaagcctatgggaggatttgaagctacttgcagcaactataaaggacccctggattattcttgcggattttaatgacattttgcatcaggatgagagggttggcagagctgttaagatgagcaaatctacaaccttcaaggagtgtgttgaagcttgcaaggtagaatatattaaatactctggttccttctttacatggacaaacaagcaaaaaattgaatctcagattcattccaagatagacagagtactggagaatcaagaatggttaagcaagtttgaaaatgcggaaatagtttttatgatggaaggattatttgatcattgtccagcactacttacggtgtatccagaggttaaaattgggagacaaccatttcgattctttcaaatgtggtaaaacatggaaggcttcatggaggtcctaaaaaagagttggcaaaatcagattgtgggaacccgaatgtatcaattagtcaataaattgaagaatcttaagaaagagcttagagcttggaacaaagaaaaggtgggagacattggagctgcagatgcacaagcctacaatgctatgatagatagtcaattggcttatcaacaacaaccgcttaatgagaatctttgtaatagtgaagctgaagcaagaatgaaatatgttgatatccataaagcatacctttccttccttcatcagaaagctaaagtt

SEQ ID NO: 227246 - DNA, 2732 bp, Cannabis indica
agaaaaggtaaaaaagttgttttaaccgtgtgtaggtttatatgtaataaagtgtgtaatttgtatttttggtgtaaaaatttcattaagagtgatatttaaaaattaattttctttttagtattgagatgaaaatttcttttttttttttcgagttcaaaataaaaaaaaagttcacaatgtattaatcccatttgtcgaaatgaaacctcgcggattgccagcgtggcagagcattcccacgctaatccggcccctatataaactcgcatccaccgttcccaccaaactcatcaaattcaaattcaaatcaaatcaagaactcaaatcgtttcaacaaaacctctcaactttcaacaatggaagccaccaaatcaaccaagggagccggaggaaggaagggtggagataggaagaagtccgtcaccaaatccgtcaaggctggacttcagttccccgtcggtcgtatcgctcgatacctcaagaagggaagatacgctcaacgtactggtactggtgctcccgtctacctagctgctgttcttgaatatctcgctgctgaggtaaatctatttttctcagatctgaatcatttcaaatgcgattctttgatttagcagaggttaatatttttgatcgaaatgcaggttttggaattggctggaaatgctgctcgtgacaacaagaagaatagaatcaaccctagacatgttcaattggctgtgaggaacgatgaggagttgggtaaattgcttcaaggtatcacaattgccagcggtggtgttcttcctaatattaacccagttttgctaccgaagaaaggtaaagctactgaatctgagaagcctggatcgaaatctcccaaaaaggcctaaacgtattaatggaaaataatagggaaaattaggtcttgtgtttcctgttttcttctctgttttagttattgttgcaaatatgtagttcgatatatagtaaattcagcttatctcattaatgaaatgaacgaaattattcacttctcactccatttctccctatgttaatatatatattcattatgattgtgtgtacaattcagtagtgatggaaatgaggatgggaattgggtatcaaagaatcatttcaaattcatttggtctctgcttttcttggtagtaaaatttcatgagtctatgacttaaactcaaatgcatggaccaagtttttgacacaacacttgttccaaatctaaattttatgccttaaaatgagggaaaacttgccaataatttcagaacatttatataatcttttggtcagaaataaagctactttcaactgttaattagttaattaattatacagctactactctaactgtttatatgacaaactcattaatcaatgaagctaattattctcattttcatgtttcttaacagcttcaccaacaaaacataattaaggaaaataataatgctaacactattaattaatgaaagcatattagtcaaaacaacattcattaaatccaatattatatccaaaacaaatatatttcgaatatactacactttccattagtaacaacacttttaatatgagtttttgtcttgacatcaactccatacatctaagattttgaggtgtcaagtgttcttcaataccaattattggactattgttgtgttgttaatcttttctaatagttgtatcctatgcttgattgttacattcacggattctatgtcaaattcattgaaaaatcacatctattcctacacatatatattgaacaagaaagagaataaaatgaagtccttccttactgctatattttcatatgacaatccaagatcttcctcaacagttttacaatctaaagacgagtgtcgactcgtaatactattgagatcttacttttgtttcagggaagaattatccaataactatctttaccgcacagtaaaatattttactgaactgttttatggactataaacctataacattaagtttcaataaattaaaactgaataattaatttttttaattatatgagttaatttattaattttaatattttttcactgtgaacttaaaattgaattctttatgtagtagattagtttatagaaaatttttctttaagttttctattaatataattatcttacaatagtttaaccatccaataaattagtttataaaatagaatggaaaaattaccattttacctttctaatttatttcttagtctttaagtaccattaattcaccagtgaataattaatctataatcttattgtagatttaagctcaaaatcatttagtattagaattaacttttaaggaaaccaatacaacctgttcagaaggattaaattcctttttgttatttcatgttctcaactatccatataattaaatctccaacacaaaagtcattaacctcattctattgtaagactttaacaaatgaattaaaaattcaattaacatgaacataagatcatgaacaccccggatttaggttgatctataaacgatcatatgttatgatatgaatactagtctttattattaaatgacttttatataaagactttgattcatatcggttcttgactccttgtcatatataatcatactgtataaaatacttttactaagatgtgtaactacattaataattcgaatctagtattttttttatacttaatatactgtacttaccaacccaattaaagaat

SEQ ID NO: 227247 - DNA, 3709 bp, Cannabis indica
taaacttcatgaaaatcattctttcacatgttgcaaaaatttcaggttcgagtttctgctgtgcttaccaatgctcctttcatgttgaacttggattgtgatcattatattaacaacagcaaggctgcaagagaggccatgtgtttcttgatggatcctcaagtgggaaagcgagtctgctatgttcagttccctcaaagatttgatggtattgataagaacgatcgatatgccaacaagaactcagtcttctttgatgtaagtcacacaaaactctcacatcataatggcctttaatcctactatttcaagtagttaacagctaaaaatgtttgtttttgtagattaacatgagaggtctagatggtgttcaaggaccagtatatgtcggtacaggatgtgtgtttagaagacaagccttatatggctacaatcctccaaagggtccaaagcgtccaaagatggtgagctgtgactgttgtccttgctttggccgccgtaagaagcttcccaagtatgtcaagaatgaagccaatgaaggagctagtctacaaggtctgtaaagatctttgtcctttaaatactttccttgttatcaaatgcaaacttttctttccaagccgactaagtttacgttcgtttttcgtgtaggagtggaagatgacaaggagatactactgtcagagatgaatttcgaaaagaaatttggacaatctgcaatttttgtaacctcaacattgatgacagaaggtggtgtgcctccttcctctagtccagcagccttgctcaaagaagccattcatgtcatcagttgtggttatgaagacaaaacagaatggggtcttgaggtagagttcaaaagcttatcaacatttacattttatgtaatgagttttagaaaaatggtagcttgaacaaagaactgaatattttcttgctcattgcatatgcagctaggatggatttatggatctatcacagaggatattctaactggttttaagatgcattgccgtggttggaggtcaatatattgtatgccaaagaggcctgcattcaagggtacagcacccatcaatctttctgataggctcaaccaagtacttcgatgggctttaggttccattgaaatctttttcagtcaccattgtcctctctggtatggccacaagcaaggaaagctcaagtggctcgagcggtttgcttatgtcaacacaactgtctaccctttcacctccctaccacttcttgcctattgtaccctccctgcaatttgcttgctcactgataaattcatcatgccaccggtatgtgcagtacattaactctttcaactcaactcattttatgaggaagataactattcatttaaccatttacatttatttgattctgttggtaaaattatgatttggtttgttcatgatctagataagcacttgggcaagtctctacttcatttctctgttcatttcaatctttgctactggtattcttgagctgagatggagtggagtaagcattgaagagtggtggagaaatgagcaattttgggtcattggtggtgtatcagctcacttatttgctgttgtgcaaggtcttttaaagattttggctggaattgacactaactttacagtcacatcaaaaacaacagatgatgatgattttggagagttgtatgcctttaaatggaccacacttctaattccaccaacaactctattaatcatcaacattgttggagtggttgctgggattgcagatgccataaacaatggataccaatcatggggtcctctatttggaaaacttttctttgccttttgggtgattgtccatctatatcccttccttaaaggtctgatggggcgccaaaaccgaacacctaccattgttgtcatatggtcaattcttttggcttctatcttctccttactttgggttcgaattgatccatttgtaatgaaaaccaaggggcctgatgtcaagcaatgtggactcaattgctgaaaatattttgtacttgcatttgtccccctttcaatgtgtgcatccccacaagatacaaggtatattcttgtttatgtgattatgatgtataaaccaaatacattgcagattcccaagaatgaataagatagagtgaaatttttgtgtagcataaattcaatgtatgtacccagttttgcaattgaaacaaaattgttgcttatgatgcttttcacaccagtaccatcttttggtagtcatttacacaaagtatgtttccaaatgtttatatacaatcaagttattttacactatttgcaactactttatgttatcaaatagaggatgaaacaaaactgctaagtttcatcgtccaagtctatgcccgaaaaaacttatataaagacatttttgattattaataaagagttgagcattttgatatattcttaaaaattaaattattaatatttattattgaataatttatatataaatatcgaaaaaaatccttatttatatatgaggttgtggcttgtagttgtacatcaatctaagaccatttagctatgaataaaatagtgagcaatatactaaagttatgaaatatttaatcagcgattgttagtactgttcactaatgcctgttcttcggtgcaagtaatattggttcagattgcggatgtagtatgacattaaagtgaaggtgttgtgtataatagagaatatatatgacaaggaccaatattaatcaagttgtctttatctaacacgttgtttactataaagacctaattcatatcataaagatgattaatagtagatcgacctaaatcttgagtaattatgaactcttgttcatgttattagttatttttattcattcgttaaaggataaagaagtaattagaagggtaaaatagtattttgaccaaaactaattacgaaccaacacacggagggctaatcactggaattgattatatcaattgacactggagtaaaactcagtaaatataattctataattactaagagttcaattccatatttttagtggagtaatcatagaattaataaacaaagattatttggttgatgaggtgatccccgaattgtcagcttaaaacattgtcaagagaatggataaaaagtagtataatgtcgttcgaatatagattggcaaaatagtaattattaataaataaataatttttaaatttattaaataaggaaatgacaaaaaattttaagacaaaatttgtcaagataacatttgttgagacaaaagttgtcaggacaaaagacaccatccttgtcttaaatagacaagggtaggcgcctacatctttataggtttgtccttttgggttagttagttaattcattaattcaattagataaatatttaaatttaaaatgtagttaaagatattttaaagttgttgagatattctctcaagtagttgagagactccctcataaatatcagttatagatatttatttatttatttaaataattaaatatgattttgtttaccgagatttttggaaactaaatattttagaactaaagaaatagcaaaatgcagaaatgaagagacaaagattttatacgtggtggtgtgtgttgagttttgtgccctaaataaaacccattttaatataatcagatttactaattgattaaagatcagaaatcattctatgttgca

SEQ ID NO: 227248 - DNA, 10042 bp, Cannabis indica
tcagcatgtctatcctctcatgggctaggcctcacgaatacaatcctaatttatgtatttatcatataaactccccattaaagggaaataggaaaccgagtataattcatgtaaacactatagatacccaacaaatccttcagattaggggttgaactctcttgcaatatttgctctaagaaaaaatagagaacatatacttattgtattcctaaaggcttttctagcaaaaatacataataatatcgattcgtggactaaggcttttaacgccccaaccacgtaaaaatcatgcgttgttctattttttttctttaaattatttatttcttcagttttaatttcttataattggtcttctgaaaatctcgataaatattttagtactttcattgagagttgaaggaagcagtggtaccatccttcttcatagttagccataagtatccttgccggatgatcttcttagacagacttggtccggatgtatgatctccacagaagccttcgtgtatttcatggattaccaaactttttttcggttccatctatacacctcagatatagtactgataaccctcttcggtataactttctatccaagagcacatatctcagagcttggtatttaatcttctgggtggctgccctgtcatctggaagctctctagaatttaagaacttgtggatggggtttatccaggaagttgaatgatcaatgatgcttactcccagtgattatgtgcttggaacatcaacatgggcaatgggaactagtccatacttctctatttctagatccgttgctagttttgctaacacagatatgaaggggttgaggttcaacacagatatgaaggtttgacattagacaaattttactgattttttatttgggttctgaattaacaatggatgtggggaaacaaatataggatttttcagttctatgtttgaagtttttagatgtagataaatgtgtgtgtttgtttaaatttaatgaatgaagagtgaaataaaaactagaaaagaaaaagaagaagaagattacctgtaagaaaaaaaaaatgaagaagaaagaaaaaatagaaaaaaagttgttttattttaaattaattaattttaatttttaattttattttaaatatttatttacgtgagttaataatattgtgtcatgtgtacatatcgacaatactctatgtagacaaaaataactaacttagtagttaactaccaaaaataaataaaaataactaaatgctaaaaggagattttgttgtcaaaatttatattttaagaattaattactagcgaaataaaaatattaagaatacgatttacctactaaagtagtaatgacatgtacacttatttataattacactaaattttcgctttttgaaactagagaaaggtgaagcacacatttttatttttatgtaattgtaaataaatgaaaaatgttaaaaaatattaatagtgtgctgtgcattaataatatggctcaagttaaataaatagtcattcttctaagaaacaagttttttagtacatgttacaaattctagtcgaccactcactcagtacctccaacgcaaataaaagaaatgtccctggttggtctcagttgcactccttcaacgttcttatatacctcaaattcatctcaaccccttcccaaaccatccaacaagatttgttatccttcttctaacccttaatttctcaactttttctggcacaattttcagatatggaaactgggtttctcccagaaacaaattttatgcaaaatcttctgactcggatgtagataacagagaagtagacactcagttttctccacaaaatgcttctctttcaactaatggtggcaacccatcaaccagtttgttgtcttttctctgccctttgctcaagttcttctctgtaattatctttaacctctttcttcttcttcttcttcttcttcttcttcttcttctttcgctagttactcgttaattattaatgtttgtttattgcaggggggagatccctctggagaacgcaatgatactttagaggtaactattttcaactctactgtactcaatttgaaaagaagaaagaaagttctttggcttgttggatgggataacaatatttttgccttatttgttggtaatatctttaggtgttaacatcatctttgtcttccttggcaagatttccatgggggtcaaaatcactgtcagatagtttgggtaccaccaacaccatagaccctcctatgcgtttacagctttttgaatttggtatgtacatgttacctatttcaaggttatgttagaatcaaaatcaaacaatgtaacacatgttaaaatatcagattatcaacaatgcacaaaaacagaaaactaaagagaagaaaacaaagaaaattatcctggttcgtatctcaataggagtcctagtccagctctcccccaaagaattgctccactattcaatgtgaattacaaacaccaatcagttgtcaacaattctgggatacaaaaccgaagagtaaagctctcaaacgcttgaagaaatgagcctatcgaacaccatgaaaacacgatcactagcttctctttttagtcaaaaggattaaactatataatagtgttagattagttgacatgtccaactaacttacaaagttcacaactaacaaaactataaaaatactaaccgactgttcaaaacagttaagaatgttaagagtttggttttctttaaattacaatccacacaaagcataaaatatacctttaatgctaacatgatggatctcaataaataatttgtatagattcaactccaatctttgttttatagcatctgatgcagttaaatctcaacttcagtttccatctatcaattaagcttatcatagctgcaatgcattctaattttgtcgacagaggcatgcccattttgcaggagggttcgagaggcgataacagaacttgatctttctgtagaggtgagtggttaaaaaattaattttgattacagtgtttaactttctttcttgggaaagttggtcttattcttttcatcatataagcaattttttgcagtcatatagtttttgtccaataaaaatactatctttgtacttagaattctgtccagaaactttcatgtacatcatgaagttcagaagaatactgcaaaacattatggttggggttttactcccttttgtcctgccttgatttctgaccaatgtttattcagtcttaatagcaaattcctttttttcaggtatatccctgtcccaaagggtctctaagacatagagaaatggttagaagatttggtggcaaagagcagtaagtagttactaactttattttacaaaatggtctcttaaaagaactcatagtatgccttttgacatatgatcatgagtcaaaatttaatttaccttgtttaaacaagtcatcttgttgcctcttcacatttcctaagtaaatatgcttaaaaagtattgatctaatgcaggtttccatttctcattgacccaaataccgatatcacaatgtatgaaagtggtatgtcatgaattcactcttttatacttgacctgaagtagtttgctcaacttttaagaactgtatatttaagggaaaagaaaaggtcaacgttagcaattgcgtcatcaaattcaattgtataacttgtatttttccaacatttgatgacaggtgatattgttaagtacctttttgagcagtatggtcaagggagaaagccctcggcagggcttttggaaaggtaacgaacgtcaactcccgtgaagaaagctttaacactgtagatattataaatgattagtatgcagcatttactgctagctagctaaacaatttctgaattctaagtggttgtcaaactttgattgagtgtactaattgcagattatgtttttagcatatatgtaacatgttttccaatgcagcacattggtcacaggatgggtgccaacacttctgagaacagggagaggaatgacactatgggaaaaggccagattagatccccctcctaaaatgttggaacttttctcatacgaaaacaatcaggtatattaattcttacctaccttatgttaaatagaatgtgtgttgtctgcaaccaaaacaaaacaaatctctaatcacattccatgtatatataactttaaccgaatcacaggacagtgggataaaaatgttgtttctctactatactactgctatacttgatgcattttgtgttgagaaaccacattctttgcttctttcttttcagtatgcacgaattgtgcgtgaggcactatgtgaacttgaggttccttacatccttcaaaatgttggagaaggatcatccaggtctaagtttctcattgatgcaattggatcaaaagaggtctgcaacttgtctctttattacttttttttttcttctcatcttggttggatgacacactcagatataactaaattgaaagtagttttataagatttttattgataccaaaggtaaacgttacaaataccaagttttcggggtcttgcttatctcctgaaagtaatttactttctcactaaacataattccgacccctaacttagagagatacaaggtctttttcctgctaggacttaaccaaactaatagcaacattggattgcctctaatggccttgaagttttattttaaaatatcctctatgaggtgcctcatttccatgcatgatgttatctgttgagaactctaagccaaggtgattgagtaaaacattcttcgtacaggtgcctttcttgatcgacccaaatacaggtactcaaattgctgactataagaagatccttctttacttgtttcaaacatattcaacagacagttccacttccatgcctgttacttgaaggtaatctttgaccgagtgacgggctaagcaagatgtcatgaactttggtaataaaagattagtgtcagtacttatgtccattaacttggaggcatgctattttaaggcaattttgtattatgcaattttggttttggttgtgatcataataaaacaatagtggaattttatgatttcagctactactcaaattttgaagataaacaaagtgttttaccaaggtaaaaaaaaatccatgttttatagaatcagctctgttgcaactataaccatcactgtctcttattgaatgaaagtaatgtctaaattacaattctgtgaaaagaacgtttgagctcaaaagggtcagctccaaaacttaggtcttcctagcccaagaacacctaatttataaagataattaaaatataaaagaaaaataatttaaaaatatactcttattcatgctcggatatcatgaccagtgctgctcaaacgcaagcagcaacagctacagcaggatgatcatcagattcacacctactctcgataaatctgtgtcgaaatttgtcaaactcaccagcttcgattgcttctcttatggacttgaagaaactcagataatgatgagtgttatgtctgcagcatcaatcaacagcaaaataatttacatatgttaaagttaaaaacttaaattcaaaagcattgattgaagttagagggacaagaacagaagaggccattgtacatttctagcagaatatgagcaagcatttcgtgtacattgagcaggtgattgatgtaagctcttgtgtgattctggcatgtataacacccgcagttctcaaaaattggtgatgtgtctttcctgaatcacaaacatgtaccaatgcaatgtttatatgatatatatacatataaatgtataaccaaatatgaatctataattttatactgtcaaataacaccaaaaactgtatcagcatagatatttcagttacatttactaatcctcctttatgttcatattttcataatcagctgtcaaaaacatacaacttttggaagcaggttgtttggatcctaatgaaactttgaaagtagaaatgtgaagtttcattacctgtatattgttgctcttaaattaattttggtctgttcaattccaatataactaggctgaaattcagaagcattaatctcaactccagaaggtggaaatgtaagtgcaatgcctccaagtgtaagatggtaaatatacctgcaaaacagtcatttacatcatcggagtttggccaagttagcagcagaaagaaacatgaaaatgtaaaatgatatgcagtagaaaggacaaacatactcagagtcgaaaagatcgatgccagcagcaactccctgcaaaacctcctctgaaatattaaaaaacaatatttatttggtgacaatttatgaactccttaacacaaataaagttgcaaaataggttatcccatatggatgaaatcacaagtctaaaatgaaatatcacaaactgagtaaatagtgaatactattacagactaaactctccaaaaaaatagtgcatatttcttcaaaccataatgaatgccttgctagtacggaattcaagtctgctgctgtaatgtggaaaagcaacaattctatattagaaagcattgaactttgtacctggaaggccaagcccacagacgaaacgaggcttctcctcttgtagcatatcctgaccatgttgtagaagtattagaagtatataactccacgttaaaattacagttaacagttaatttaaacacaaactgtcatgtattgaaaatgttcacggaaattgagtgtatgaaatgagtcatacagtaacagcgttgagaagagcagggcgctcctctatgctctctccaagtccaaatcctccaatcaaatagcctgcaggggaaaataatcaagatcagtttacagtgaaaaagattgcataacataaaagaatgacagcttaaatgagaaaaaactaaaaaaatatcagcagaagattctaatattatggttaggaaattaaggttatttagtcaaactcctttaagatgcctcattggaaaatacccttttgtgaccaaggaaagtgcttgttgttgtaactagttctgaacctcaataacgtttaactaagaaattaacatgtaaaatgtctaaatatcttctcaattatacgcagcacaattatgtgtactttatagataagctaactacaaaaactaataagagcaggttactatgcaatcaaaatatggcatcatgatataattgtaatgttattaacatgattttttttcaaaattagattatcattaaaaccaacagctactaattatttcttagaattatgtaacatagaatatgataattcaaaaagttgagtaatctcttaagtaacttatttccaaaagctagaaaagttggaacctgatacacttctcctggctacctcttgtgcacaacgttcgcgttcttccacatcagagcctccaacaatggatccaagaatagctccacctgcctacattctaaattttattaaagatttccatatcaaccacatctaaaccaaaaaaaaaaaaaacataaagaaacttttctgttgcccacagtttcaactaagtcttactcccaactaatctgtcctttgaacactgtgtatgaacatctacaatcattgccctttctatttataaactggaactaaacaaaaggtgaactgagataaaacatttagagccctttaccgagcttaacacaatgcattcatcgagccatctcacagttcgatccacagaggtcttgtttctcttctctggcacccatgcaggaacttcatctgccaaagtggcccatacattaggcctcatgcaacttatcatttcaacataatctacaggtttaatctgcaagaatattaagattttgcaacttcaggacaaaatacacaatgaaattaaatgcattcaagaagcaacaagtgccaattaccaaaaatcgaccacaacgagtctgaaaagatgctccaattttattagtggaattatattcaggaagactttgcatagagtccctggctacagcagcaaatgcatagtctggcaaaccaagcatctggttcaatcctccgagacttgatattgtttttggtgatagaccttccaggctgcataagcaagcaatacaacacaccattcactctcagctaatcattcaataacaaacaataaaatatacatccctacagttacaaacccagttaattgcatcgttggtgttagaaagtcccgcattaataatgtgtgggaacttaataccatatataaaatgcacgtgctactcctctagttcgcaagttttgacatagaatcctataaatcttaccatatacctcactcaatcctactttcatagcgagccaaaaataactcatacacctcaccctatcctactttctcaaccacttttccgcattctaacagttggttttttcattttctatgttggactgcaaagtagcatgtaatcaatcaagtgggcatacaaaaaattcaatttttaatggcaatgcctatctatcttgtctctcagaaacaatttcacaaacacttgaactgcactcacataacaacaaaagcagttgtaaacaatgaaagaacaaaagggtatgaagttaaagtttttaagactcacaagtgaagtgggctaacttggaggagatgggaatgagggaaaggaagagaaggaagaaggtcagggggaataaaatgaggaagccctttacgtgtggagaggagaagagcaggggtttgtatagaagcagggcaatttcccagttggagtatccctgtccttgcttttccagtactccaagccttaaccgaaaacttcatgctttgcttttcttcttctactacggtaggtttctgagagagagtagtttcactcagaagaagacgaagtcaaattcaagagtcagagatgcggcggcaaccaacaacacgaaaccagagttgggctttcactagtttaaaatttgatttatggttttcaagtcctaattttcgacaccaaccaatatttaagtactttgcggagaaaaaaatgcaatatataatttagtttaggaaaattgtgaataagtatggtcaagctcttattataattatttagttaatttttatatccgaaaatacatgcagaatatatttaaatatttttttttaatggcagttgttatttcaaaatttacactggcgtggcctttacacgttgcacagtacaatctaggactgttcaaaaaaatttacaaaccacccgacttaggggtggcaattcgtgttcgcgggtcgtgttcgtgttgtgtcgagactcatgtataacaggtacatgctcgacccgaacacgacccttttaataatcgtatcaaaaaaatgaaacccgaacacgacccgtttataaacgggttgacacgacacgactcgtgtaacccgtttataagtatattttgtttaaacatatcaatcaataacacgttaatgaagtattcaacatgtttgtaacccttttatgacatgttaaagtactaaaataactttaaataggtcattaacgggacaatttcgtgttagccgtgtcaacccgaacacgacctatttattaaacgggttagacgagtcaacccgaacatgattcgaacccatttaaggcaaacccaaacccgctaactctcgtacgggtttcgagtcgtgtcattgtgtttgacacgttttgccggccctaacccgatccgaataaaccgcctaaaccaaaccgaataaactgaaaaaaaaatacaacccgaataactttacaaaaaattcaaaccgcccaataaatatattcgctgggttgaatattattctaacccgcccaaataactcgaataaaccgatttacataatttttactaaaattatctatattataatagataaattatgtttaatagttaaactattttacatttaaagtttgtattttatagtgtttaatttgaaatttggaatttatagttgataattttga

SEQ ID NO: 227249 - DNA, 5822 bp, Cannabis indica
gactcttaatggttcataacttttcattacactaatttagagagtagatcgatttcttcatacataaagggagttaattataaaatttagaagtgttataaacgacaatctggatatatataatacatatatatatatatatatacatatattaactaaccattacatattgtctatgacataaaatctgctaacaaatccagcaagagatcgatgtattagaatattatttacttatgattcaatgatctatatatatatatattagtgatatacaagaattaaatatgtaagtatttatccatatagcaattaaatctctatacaattcattattaatgatcattgtcggataagagttaattgtcatatatattaatattattactgtgtgacacacaagttataaattaaaatgaatttgttaatgagagagtttaacatgtgaatatgaattgaataagcctataacatataatgaaaaataatttgtataatatatgcatgttaggtactgcaactctttttcacatgtatgtacccttatatatatttttttccgaaaaaaatatatatttatgcatgcatatatattctctctctcagaattaccgagctaacaattatatatatcgttagaatcatatatgataattcttagataattataatatagatcaggaaaagatttttatggaataacttaaacatcaagagaaaaagtctattacacccatttgagcttacacataatacacaaagaccttattagacctattaatgtttgacgtctctcacaatattacatctcataattcttagtatattttaaggtaaattgacaataattatacacatcaaataatattgagaggagggtccccctttcccctaaacattcgatcacaatcaacaaatttgggtcccaaagtaataaaatcattctatatatatcgtgtacttgaatgaattaaaggaaaggatccactacagagaaattaatctaaattcatattgtgtgtatataattaatagatatttataaatagttaatcttgcttataattatatataaaattataggggtagaagaaattaatattacaaagatttagaaaatttgcgaaccagcttaaacgtgctaccctttaacccaacaagaaacacccacggatccctataaaccgcatcagaaacgacgtgtctcatcaagctaccaagtaggcccctaactccgtgctaccgtagggaacattagccgcgcacactgttctattcgatccccgacaccacacgtgtgaccctctcgcagcatcaaaattaccctcaaattcctcacgacacgtggcgcaatgacagaccttgtacggcgaaaacgtggacccacgccactgcccgaacaacctataataataaagtaaagtgttgatgagtgaatcaaaagtcaaaatattggtcggcggattcttctcaaattcacatgcacagtcttatatataagccatcttaataataatttgtgtgcatattttggtcgtccccgctgttttcttcgttttaattaatatataaaactcgctaaaaatatgtatacgtacgtgtggatatgtagatatataaatataaatctatatatatttcacctataaattgtttgttacattatttatacgtaagtgtgtaagtaaaattgtcgtagattgttgttatacattgggagggtcccagaaatttccatgcagtacgaggtgaactaaaaattctacttaacacattttgggtcattggctttttcaacgcatatatatttatatgatgtgaaaccaaatactttgaatagaatttcgattcagtgggtaatattattgatcaatacttttgattattcttttcctccttgcacatggctttcgagtgcatgcatgatgtcaagtattgtaacctctgatgtaattatgtaattatgtaattatttaaatattatatatatgttatgtacgtacctttgactgatgattttgtttctctcccactctttgctttcttttcgattattaatttatgatgttcttgtttagagagttggtgtgaataattaatttgcatttgagttcaaaaacaaataatattatacctatatattatctgtacccttattgttctatatagttaattaatggaatgtatttttcactcataattctttgtactttgaattgacgtatatcaattattattacatatataatataatatgatccatatactagtacgcacttcgatatttgtgattcttttattacatattaccaccgattttaatccgtagcacatgagaacagagtatttatatatgaatgtcattatataactctgttgaaagtatgactactaccttcccggcactaattaatatatttatgaatttaaatgataatttgatctttgggaaagaaaaacatcttctataaatatatatatatatcctatccactatggtaaaaaaagatcgaaattttaccataaacctacattccataatgatctcagcaatgtttttattctcttacgtaaatgaccaaaaacaactgctacttgagaaagatataataactcaagttcatgcataaaacttcaaatatatatatatatatatatatttataaattatatatatgtataggtggttcaatagaaaattttgaaagcatgaaaaaaaagtatgtagacgtactttttgacagaaattatgccatgacatataaaatatatattatagatacaattattgtgtgtttgtatatgaatattataatgtagcgtatatgtatgaatagttacaaacgaaaactacaaaagcagacaacttcacgttcaccccatcacgcttaaagcatagaaagtccaacttagtgcataaaagtatatatgctacgtgtttttggagggagggagggtacgtactgtcattgcatatatgctcaacttattgatcgtattcaaacaccctatactatgttacctaataaaactagaaagaaaaaagggtagaactgagagagagataaaaagtagataagttgaatagcacttatattattccgtctaagttgaaaccacacttgatcagcacaaccattaggtcattatcttactcgtgtctttcagcaaaggataaaatatatatatattttttttaaaataaaaaaagtttgataaagcgtatacaagtaaaattccaacttcctccataaacaaaaataaataaatatagtaaattccaagttgaataatcttaaaagaagaaaaagaaaaaagacaataataattggtaacaccgtacacctaaacatgtcacgcaccaaagcatttagatattagtttggaaatgattgagagctggtccatattggtttctaactcattcttggttgaaaaatagcactaaactatatctgaaatgacccacattattaattcatgatcacgataagttacaaaccagtgccccccacctgcgcgtgcatatatagccaccaaacttaatatatttatctattttaatataatatatatatttatcaatatgcaatttaggcccactgtttgacaagacctagcattaatgtgttgacgacccaacttggctgtgagtatatatttttgagttgatagggcttaattagcttcatcggctatatatgtatatatatacatatacaaaattatatgatacaggaaaaacgcgtacggcgattaacaatatatagaagatcagacgatgttctatttgacagcaaataactagccaattaccatcaagaaaattatttcgaagtaactattatggtgggactcaaattttgatgattgataatgatttttaggaccaccatttttattttttcggtgctgctaattgggtatatatatatttatatagtacctcaccttattatatctttttttattaatggtcacattttgtggaaaacatactaatatgtcccttgtccacatcttgtcattgaattttaatttagctttgacaaacaaaattaaaatcatgataatgaccctctttttgttgtgtaccaatcgtgggttaagtagtttaaactattacctataatttgattctcatgcggtttatatattcacagtttgtgttgatgatcctagtacacaattaagtagttttcgtattaaaaaaaaaactattttcttttaaataattatcatttttagcaattcatcacctttaaattgaaccgatcatgtaataatgatggctcgactagtcgaagatcgatttttcattgacttgataagcactttttgttttgatctttacttatatggtgatagatatgatttgatgttattttattttatttatctattaagtttgttattattacaaatagccaaattattattcactgaaagtaatcacattccaacaagctagcaagatatataacagtattataagtttgggctttagagacaatttttaaggtctttgagcgtcggttttggcgaaatttgttactgacgttaatccaaacaatgctatagggtcgaacaaccgacgctataatgtacactatggcgttagttatttcataataattgacgccatatattccaagtggcaggcccctgcctccaagagaagacccaccattggcgccttctactgaaggaaggacctaagagtgatagccccctgaaacaacaactggatctcatctctaattctacactggagagacaggtccatgagttagcgagcctgcaattggcaagccccatctggacatgggagaagatctcaagttagctagacttagggaagctgcaggccatgcaggctaactgacgaactacacactgctgattgtgatgttttcgctcagcaaagacgcaaattcttgagatggattgatgaccaggagtacatcctttgatctcatcaagcagagttagatcaccgcaaccgaaaggctagcgatctaataagatggttcaagcaaagaaccgatagaagaggccaagatctccttagaaatccgctttaaggaagacatgttgataaatcagggaggatctattgacatgctgatgaaccagctccttaggaactaggacagatcttcccttgccaaagggaggacaaacctttccttaaaggtcaaatgacaaaaatagcaaaatctcagcaaccagcggcatgagaggccgaccagggatctcgagctctgcgacacaccccattgtacaaccaatggtcgaccagccatcagcaggagcacccttggccagacagagtacaacacttcctccccaaggggagcatggatcccagaggtaatgtcacgacccgagccctaggctgtggcagatgtgtaatatccataacttgggtggtcaaaggtcagactttgacccttgttgaaagataaagcttataaatgatcctttaatttatatcacaaaatactaacttaaaagtaatgaattaactcctatattaataagaaaatattagtaacaaaatcaggaccactcatcaatataaaagaaaaataatatctctacagttatgtaatcaccaaatagatagatttaataagtcattaaaataccaatataatacctagcatccatcattcctcatttctaaccagtacatagctaatttaagtcatccataccatccatttcagcttaaatacaaaaaatcagtttcattaaagggttaaagagtaaaataagactaaactaataacgacttcctttcccaacggtaccatcct

SEQ ID NO: 227250 - DNA, 2635 bp, Cannabis indica
gaggccttggttataacattacttagtcaattggatatatgcacaggcgtttataaatctttcaaagaaacagtacacatttgctactataatatgtcctaaagaaattttgatcgcattgcagccaagggaaacagagctacactcataagagataccatttgatagggactgcaacagttctaaaattgggtggcattttagaatttgtgtcatgcggtaagaaacatttggtatacattatatacagaacagaatgtccttcgtagtgccatgtggattggagacgtgtaagcagcaaaaattggaatgttccaagagaatggaggttcaatgcataatggtgcagttttaatcaaaggggtcaatgcgagggtcgtgttcacttgccattgccattcccgtacagaggcatgttgtacacataacctgcaaaattggaagaagttgtgattaaaactcctctctagtagttgtagaagcatagcttcctaatatgctagtcgcacttaggaggctttaattttctttcttctcctaagcacaaaaatgatattgatcaattgcatgaagttaatccatgcttaggtaagtgttcaacctttccagatcctgaacaatttgaacatctttcagttctaggtggtgatagaggttgattttcaccactagtcgaggacactggttcaataagaacaagggttcctgtggttgaacaccgagcacaagcaagatatcctgcacggattaaaagaataagaaccgcatagaaaaataatgcaaactttctactgtcttagtctagtttctttcaaaagaaaaaaaaaatactaaggtcttggtctcttagacacaaagtgacaaacataatgcacagaagactttatctccacccagataactaatgctaagctttaaatttcaacatgatgcagattacttttgaaatactaaatccatgtagccagccttattgattaaaacacattcttatcttggaatggtaactaaattttcaataaagcccctagtcatgtgtcagaataggcataccagttccaagacaatatttgcatcttttatgttcctgtaatttcacgttgtttatttcaacaatcattaatgctgagatcactccaactgctcctcctgagaatgatgctacaatgggatcaacctgactgcaatttgacaatgaaggatttcaatagatgacaccaacatgagattgtgtgaaaatcatttagtagcttcataccaaaaatttacctcaactgcataggcagatgcatgcttcttataaaatcttcatatgatgtgcctcctattcccagctttagctccaactgagatgcaaatgaaaaaagataagggagaatttagaaataaaactgattttaggcattgagatgtgtcctattaattttgcccaataataacaacattatagcttaaaaataacttacactgggtgcaagaaggcccccaaaaagcataatcccagcaatcagagaaaagcaggaagcatagtactgcttaaggtttgctgaagtctgaatcaatgtacatgagaaacacagcgaacttcgttatccctttatcttaaaaagaaaatggaaatgaagacacaggtaaaacaaaatggtgcaatgaaatggacaaatcagtgaaagaaggtctataagtttaccagattatggaagagaacttaccaaaggaggcaagaagggaatgaatgatgggaaatcaggaagttcaacttctcgctcattctttgaaactccaagctcagtcacttttaattctctgttgaatctcagcctgcgaacctacattcattcaaacaaccccaattcaaatcagaagatgacacttcatcaacttgatacgaaagtaaagtaaaatcaatttgtggataaaaaacgtttcttatatggtactcttagaagttagaacaggtctaagctctttattaacaccttcaaataaagatatggcccatagactaagcaataaaagaaaacatgaagatactgctactactaggagaagagtccatctgcaattagaacaaattcacagacaatacatgttgaaaagccaagctggaaaactaagtcgatacaaagtaaaaccaaaagacaaatctagtttcatacaccctttgacgaaaatttgcatcttcaatggtgacaatagagccatccaataattgattgatttaacatattgatggactctcttcataagctactattggttcctactcattaaacataggctaatactaatcacaaccaaaactagtacacaccaacactagtagtctattattaccaagtaaaaaaatgtatgttccaacagagaaatcagtttaacttgcccacctcttccatatgcaaaaaaattttgttcctgcgacttcgtatattgtcctgaatttcttgtaattccatattggcaaagtcttccactgtctcaggcccctcgatgatacaaaacctgtatttggattgggaagcacgtcatttgaagacatttaatttcattacgtatgaaaaccaacaaaaagaaaccccaagtcgtccaaattgcaaatagaaaaagaaacaatcatatgtatatacatatatat

SEQ ID NO: 227251 - DNA, 2639 bp, Cannabis indica
catggatgaaaagcatgtcatatatttttatagagtgagatgatgaggttaattaatgttgtgtgtgaagatagatgaggttgtaactgaaagagttcctgatcaagtccagtctatatatttatatatatagatatatgtatatatgtgtataggcaacccagaaagaaacaaagccccacaagaacaagtccaatccatatgagaacaaaagccagcaacaatatgctttctctctttttaatttatatatatatatatctgtgtaaaactacacgtgaacctcagaaaacatcaaaagagagcggtgttttcgaggtaacaaaattaaaaacctaataataataataataacctttcttgtttttcttattatcactacttccttttcccactttgtaattcgaaaaataactctcaaatattttttaaaaaacaaaagactacacttgtaaccgtaattcaaaataaaatacaaatatttcatcaaacaaattctgggttgaaatgtatatgtaaatattattattaaaataattattataataattacctggagaagagagtgccacattcacatctgtattctctagtaccacatgtcttagaatgagctttccaatcagactgaacagcatagcgtttagaacatttctcacacttccatttcttctcaccatgttttctggaatagtgttttttaattccggtgagatctcccaaagcccgagacgggtcgtggtgaacacaagtaggttcagggcaaagaaaaacttttcttttaggtggatctttgttgttcttctgcttaagcttccatggaagattgtgtcctcttctgtgtaactgaagattttgttccctttgaaaccctttgttacaaacctcacatataaacctgtttgtcgccattagagtctttggagataacgccaccacttccgcatcagaatctacacacacatatatagttttaaaattagggttttcttttaattcgccaataataattaaaacaaataataataaaggtaagagagagatgacttgcttgaagctgattgatttcttctcttctttggaggagctgtggttgaagcaattgaagaagttgttgtagtagtagcagtagtgaaagtagttgatgaattaggctgttgttgttgttgttgttgttgttgttgtaacaatatttggttattttgattttcttgttctgatctaaaactactacttccataaaaactcaccgatgatgaaccagccgccatctcaattttccctgatttttttttcttctagggaatgaaaaaagaagaagaagaagatgaagatgaagaatatatatatatatataaatatatatataataataagataagatcaattcaaatttttcccaaacaactatgggaaaagctaccaaaaaaaaataaaaaacaaagcatttgtaagagagaagagagatagaataaataaatatagagagacaacaagaattacagaaaattataaataagaataatcaataatataggcgttttcttttctttttcctttgctctctcttcttagctagctagctgtttggttcataatcaatcatttttatatatgtcatgtatatacacagcatgtatacatgtctataccatatgcatacccatctctctttttttcttttctctctgttaatttgtgaaaattcttttttgatatattaaatcaaaatattattttattattatatatttcttccctattttgtttcgaatagtataatagtcataattcattataatatatctatatatataaattggtggaggcgcctgctagctgtgtgtcgctgttgaggcagctatctcacgcagcctaatgtgtcgttatgtgaagcccaacccaacccaaatgggatttgcgttacacaaattgggggccactccttctaataatacaattactatttgatatttttacacaaaatcacctcaaattaatcgtataattttacattgtattttcaattttttttcttacattttttttttgaaaaataatgtttttttttcacgttgtagaaatatagtgcaatgtagcataaatattatttttacattgcaaaaaggctaatagcaatttttccctccgaacttttcatctatgttagatttttttactaaattagataaaaatccttaaatttaacaatcttaatagttcagggggaatttttaacggcaaaaaagttcagggagcatgatttagtacatgtcaaagttcgaggtaaaaattgctaattacccttgcaaaatatataaaatgaaattcaatttgatttaatgtggttatatgaattagaataaaaaaaataatatgcattgaaataatctctcttttattgaataatattgtcctacatggactaattgtaaaaatattgagttatatattatatatataagaacatgctcgatttcatttagtaatcctccaccaaaattgaatattaaatttcattgcatttgaaaaaaaagaattacagaatttgattcttttccattctaatattacccacaacttataatcaaatgcattagggtttgttttgttgggtaataaaataaagaaaaaaaaat

SEQ ID NO: 227252 - DNA, 1436 bp, Cannabis indica
aagattatatttagtattttgattataaaagaatgtatttatcttgtttcgtaaagtgctacaacaatctgcgaaggtggacggtggttcatgtctctagaaggagtaactttatggcacagaacttggctaaatgggctatattaatgaacatggaaggaatcatcaacatacaacacctccatcctttagtcctgaatgacaacactaagtggaatttttttttttttgataattaaaaaaacttttattgaaaacgagaaaaaagggggctacttcccttaggaaacctgaagcgtcagctttatgcatcctagcccagcagtcgagtttgtcagccaagacattttcgttctgattaacatgcaacacgactactttgttaaaagccttacacagattcaaacactcagaaaacaagggaaaagtgctccaaccaaagggaagattctcagccgcaaaagcagtagcagctgccaacgaatcggtttcaatttgaacctctttcgcctctttctctatagccaaatgcagcgccaaagcaataccctgaagttcaccttcaagcaccccagagaaccccacagaaacccaagagtccccaatgtccagcccgtttgtgtggacagcagcaaagccagccacagaagcatcaactttgcagcaccaagggtccaacaacaggggcgagacaatcccttccttctctgcagcaggctcatctttgtgatcaaaccatatgcctcttctgaaccagataccacgggaaaacggacacaaatggaaagcattctccgaatgacagaaaaaacaacattgatgctccttatggagaaagacgattttgctttcaatggggagagtatcagtgaagagcttccagcagaaatgtttcaaaccagggtgaattctagttttccacagattttcccaaagcttctttaactctttgaaccgatgttgttgacttaaccagtacgcacttttaaccgagaatcttcccaagtttgttgccttccaaaaagtgatatcactaccttcatttaaaggcttgatctttaaaatatcttcagcaatctcctcagcaaagcattcccgaatcaaactatcattccatatgcgagtcccaagatggaacagatccttaaccttccaaagaacttggttgtgtatgaattgaaaattctctttgatgtcatcaagtcctctccaagggatccaaggtctatcccatatttcacactaagtggaattaagtctcaaaatttcatcaatatatatcttcagtataaaatacatttttgatggataaaatatttatataatggggttccaactcaaaatcaattggcaatggctcaatacttcacatgctttgatccatgttgagatcatggggttccaactcaaatcaattggcaatgagtgaagtgccc

SEQ ID NO: 227253 - DNA, 1826 bp, Cannabis indica
tcggggaccgagaacctatatttataggtgagatactccatcagtatctgcgctacattaattgtcagaatatttttacaattaattcaggaaatcaaatcgggtaatgaatattaaaatatgaccatatatagaatattacgtaactaatttgtccagattcaataaaatattcatttatcacaaaatcaattttttattttatgccatagatagaaatattctaatactagtagatactagatagcctatgagcacaaatagcacacaacgggagaatatacaaaataagatgtacaatgccgtggccttagtagtcatatgctgaaaatgaaaatgcaccatttgttgcgcttcttgatctgttcaatttttcattagcaatgaagataactatattttgatcatgtaatgtataggtggttaatcctatattgacgataggtgcaatcagacagaggcactaaacaacatgaagtcaacataagagctgaattcaaataagctttacatgaattgagattacagcttatgtgaaactttatttggtatagctacaaattattcctgccatataatgaaaactcaagtcatattatgtttgaaaagtccaagtacattctcattctggaacaccactgtaagaaatatttgtgtataaattatgaattttgtttcatctgaacactcggtagttccatttgaatatatttcttactcgtttatggtttactttatatagattagcttttgggtgataatatatcttggccagctgtcatgagttgacattgagttgacatgtgagttgtcaatgtcaatttggtgagaattagagttatatatacttgattcctaaaaatcataaccaactccactcatttgattctttgatagagatttttctctatcagagcaaaaatctttttcttctttgtttcttgcaagttcatccattgttagagttcatgcttttgtgatgaaatgataatggaggttgtttcatctgaagagagttcagattcacagcgaaggaatttcagctcaatcgaagcaaatggagcttgtcttccggggacttagatttgaactttggttggttaatcaagatcttagagtaaattgttgtaagaatctttgtggcattgctacattcaacactcaagatcttaggttttgaactttcaaccactaagttagattaaagcaaattatactgcacaaaaagaatgctttcaaaaatcaaaatgggaagctcaatataccatccggatcaacagaggtaagaacagccatgagaacgaaattcacactaacttcatagaatttctcaacaacataaaggtaaaatgtgtaatcccatgctttgagaagattgtcttgtagcagagaataggtgacactgacaatctcctgcttgagggtttctctgcagacaattgtccattcttaattgtttagtaaagcaaaatgttaaaggattttcttctgacaattgcagataatccttttaccattcttaaaactacccaaaagggacgctagatagttatgctcacattttgtatttcaaatagaggcagtaccataaaaccaaaaacaagacatttataaattttacttgtttgataatgaaagtgatctcataaaaattaggattcatagttcataccaaacaaaacaaagcaaatctgaaatgtgaaaacttttactgatcaatatcttgatgtagccactacagactaaatgtgcatctattttcttggttttttccatcgtttttagacaacataacagtaggttgtttaataaactcaacactcaaa

SEQ ID NO: 227254 - DNA, 5407 bp, Cannabis indica
caccttgttgatataggtagtgtcaatcagtccatttaagctctcctcaactgtgcagtctcatacctacacaatctctgaatcatcccacttgatctttcccaggcgatgtgtggttgcacagcttacccaatatttgcccttacggatcacgggactactaactgtcacactttataattagaatttcaatatttcatagcactttaaaatttatagtttaccgatatggtctaagtcgcacatatcatacagtgagagagtctactttacaagtgttaaatatggtgtgggtcgcgcctaacataagagatagtgtctactttacaaatctaaggagattctacctcaaaatcatatgacaataagtggacttataccttagccttataaagataaactctttcttatatcaatgtgaaacatttacatgtgttgtttgggaagactatgctttaacattcccatttctctctcatatgctttaacattaatgtttcatgggactagacatgtgagatccattgtaattggttatttgttctcagttgaatgaacttgattccccctcttattttaaaaaattaaatatttgacaggtagaacatcctaacatgatggagttttttgagaagcttggaattgagatggagacatcagatatgtcattctcagtgagcttagatgaaggagaaggatatgagtggggtactcgaaatggcctctcaagtttatttgctcaaaagaaaaatctctttaatccttacttctaccaaatgattagagaaattgttaagttcaagaatgatgcaaacaggtcaattcaactatatacatattctctgtttactttgtattccttttctttattatacatttatttgatttctttctctaatttattttcttgggtcatattagctatgttgatatgcttgagaacaacccggacatagaccaaaacaaatcgttaggcgacttcattaagtctcatggttactccgacttgtttatgaaagcttttcttgtgagatcacttaaacttttctactaactcaactctatttgtgcatattagtaataacatttaatattataaatgtttattgtgtatgcaaatatatagattccaatggtttgctcaatatggtcatgccattcagaagttattatgagtttctctgctttctctaccctttcgatttgtcgcaatcaccatctctttcaggtataatatatagaagtttctactctgtttggacacatatatatgtacatattagtaataacatttaattttattgttgtttttggcttatgcagttttatgatcatcctcgatggtatactgtcaaaggacgttatgtaaataaagtaagtaacttttatgaaaataataaatacggaattcaattatcattattattattaaaaattactattattaaactaaacagttaagagaagagctagagaatagaggttgtgaaattaaaatctgttccgaggtacaaatgatttcaaccattgataagggttagtgctcaaactcattttacattagaaattatggcttaattacatttgccttttttattttcctgaagttattattaatttggttatgagattttttttcataggttgtgtagttcacaatgaagatggttctaaagaagagtataatgggtgcatattggctgttcatgcttcctaatgctctgagattacttggagaccaagctactcctgttgagcagagagtacttggtgctttccaatatgtttatagtgacatttaccttcatcgtgacaaagctttaatgcccaaaaacacaactgcatggagtgcattgaacttcttggggagtagagacaataaagtatgtttgacatactggctcaatgtgattcaggtgatcaatattacacgcaaattgttatatacacaatctatctcaaacattaagactataattaactttgaatgtggattaatatatatatatacagaatcttgaaacaagtctcccttttcttgtgactctcaacccagatcagccaccaaaccatacattgcttaagttttcaacttgccattcagtcccatctgctgctgcttcaaaagctttactcgagattcatcgaattcaaggagaaagaggaatttggttttgtggagaatacctgggtaaggatttctacttgtgggatgccaaatcttttgaaatttgagacaaacgacaatatggtagaaggggttgcttgcttccatattagtttttttctatttaaaaaaaaaaatttaatatgttttcacatacttgtttcaggttatggcttccatgaggatggattaaaggtgcttactaaacgaaataaatttatataaaataattcaatcatgtaaaaaatgttgttctcaacaatggcataagactaatgttcatttttacaggcaggactggctgcagcacatggtttgattggaaaaagttgtgactttcttagtaatccaaatcacatgctaccttccctgacggaaagaggggcacgcctttttgttattaaatttcttaaacaatttatcactaaaggatgtttaatgtgagtaattgtactcctgaagttggaatcatttggatatgctagttatttgttgaataaaattcaaatccttacatttttttttactttgtgtgtattttgtttcaactgagatcatactttatagattgtacacttgttgtgtaacagtatattggaagaagggggcacaattttcacttttgaaggaaacacaaacaaatcttcacataaagtatctatcaaagttcacaatccacagttttattggaagattatgacagaggctgatttaggctttgccgatgcttacatcaatggagattttacttttgttgataaagatgaaggtttactaaatctctttttggtaagaactatataacattaaattttataatattctaagttaaattaatgctcttgggtttttcttgtcaataacttatttatggaactctcttctcttctatagatcttcattgccaatagagaatcacaatattcagcctcaaaactaaagaagaaagggtaaaataaacttgttgacatcttcttatatatatgttagcatgatagtactggttttaatctcctaaaattaactgacaggggatggtgggctccatatctttacacagctactatagcctcagcaaaatatttctttcaacatgttttaaggaaaaatacacttacacaggctcgtacaaacatttctcgccattatgacctggtactaattaaataaattattgaaagaacacacagaatttttttatctttttttttttttttggataaagtaaagttgttggaaaagtaaaatcctgattactttacatttgtctctttgtgtgtttttagagtaatgaactttttgctctgtttttggatgagacaatgacatattcatgtgctgtatttaaggtcagaattgaaacctcctaataatttaatgttctaaaagtttaacatgtactagtaattttattgtgaattaaattattatttcagtcaatagatgaagacttgaaggttgcacaactacgaaaactttctattctaattgagaaagtgagtttctttattataaaattattgtgtataattcgatgtgcattgtcataaaatgttcttgtattctataatttttttttttgtctttattatataggccaaaattgaaaagaatcatgaagttcttgatattgggtgtggttggggaagcatggctattgaagttgtcaaaagaactggatgtaagtacacaggcattactttatcagagaaacaattggaagtagcccaaaagaaagtgagagatgttggccttcaggtactaaatataatcaaccaactaaaattcaatgaagttatttatcgagtacttttgttctctataacactctctttctagcaagatagttgacaagaactcataattatttaattttgttttgacaaataatgctggtaataggataagatcaaatttcttctctgtgactatcgacaattacctgctaactacaaatgtgacagaatcatatcttggtgagtaaatattaaattttgtgtcaagcaattaataacattttcttttattctaaattaatgtaatgaatcatattttgcattagtgggatgttggagcatgttggccacaaatttattgaagacttttttggttgttgtgagtctgtactagcagagaatggccttcttgttctacaggtaataagaattgacatttcatttccaagttcatgaataacatttcataaattaattctcttctcgtttaaggttgttagagagtctcacattattaatgtgtagaaacataataccataattaaaatacatgagttatacttctctcattgctaattaattttaagacggaagctcatacatcttatccgccgaggcttgaactccaaacaagaaccaacacaacaccaaaaataacgcacaatggtcaagaacacattcagcataaaaccagcaacagaaactagaacttaatccagtaaaaacaacttaattaaagtaataaaagacaacaagaacttactaggttgggctacacaatcaatatgatcatgagcttaatccacgggagaaagcagccttgagcatggctgtggtgatgagttttattaatctgaacagaggtacaaaacagggataaacccttgaaacaatggagacttgctccttacaaagtgtctctcaaatgactctctcttacaatctcaagagaggccaattacagctctcaaaagactatctcaatcctcactcaaccattttctgtctcaacctcgctcaagaaaaaataagaggccttcaatatatatacacggttagcaactaactaacttaactgtcacaacagttaagttagttgaaagaggttgctaactgtcaaaactgacagtgagaccaaattcaagaggtcaaacctcaacattaccaaatcaccatatcttactttaccaaccacactcctacattaaacatggtagccgagccaattgtaattcggagatagtgagccaagataccattttgagagaatgttagtgcatgtttggcatcataactaaaaaactgttttttgtttttaaaaacagaaaattgtttttaaaaacaatttggcttgtttggccttgttttttaaaaacagttttcagaaaacaaagttacaaaaaacaagaattttaaaaacaacaaaatgttgttttctgttttaaaaaccaattcacctttggtcaatattgtttttaaaaatcactaaccaaacatgacttgt

SEQ ID NO: 227255 - DNA, 4293 bp, Cannabis indica
attataatattgtttttattataaaaacttatataaatttatatttatctatatatatgttttaagtttataaatttaacagtacaaaacgaaactttcattctaccgtacgaacgaaaccctcttccctctttttttttttattttcaactcaaaacctagcgatctaagctccggtagtagcggatagcaaatcattggagaatgagagcttaaggtaagaattagtttcattttaaattaaaaacggttggttttatacagtgactttataaatggaagaatcgatcagctttatcaagtcttgttaccctaatttgagaatccttataaaaatttctaaatgtatctctttgccatgttccgataattgataatggggatgcccatcataatgcaagagatgcattacgactatatagggatttattttggagagtttaatatatcctctctagctttgtaactgtaactctgtttgtagctttttttttaaagttagttacagttacattaaaacaaatttaaagattaattcaaactttaccacagttaatttaaaaagatagcatttctctccgtccaccagtggtctcactcagtctctctcctctctcctttagtagtctcttactccttctgtggcctctctttctgacaatgtgacagtttgatggtggtctcttatatttctctaatttggagaagatggactatagaggcattattgtgcatcctgaaatttttagctccaaaactatgacctatgcattattgtgtcccttaaatttttttgcactttgaaaatggtcatcgaactattcaaagtgttgtaaagtaattcttctgttaaattttatcacacgtggtaaataaaatgataatgtggatgtttataccattgtcacatcagtgccatgtgtgtaatttaaaatttaaaaaaaaaaattaatgcacagtagtagtctaaatagccacactatcattttgtttgtcatgtgtgacaaaacctgatagaatgatcactttacaatattgtgaatagttcataatcccttttatcgagttaaaaaattcaagagacacgaaaatatatagttagataataaaaattataattaacttttgaatatatgtatatataacacaactcaaacatataattacaattgagcacaaagtgatgataacatataaaatctatttcaaaatatatatatcacataaatcattaattaatttaataaagtaaacccacacatgaatataaacctataaaaactaatatacattcacacaacaagcacaaagataaaagaaattttttttacaatatctatagctttgtagagtggaaatgacaaaccaaaatggcataaattttcattcccatttacatctaatttggtgggtgtgcttgaaatcataagtcaaagcaagagatccatccattcttctcaaaacaaaactctccaccaaaatatagcaaccgaagctagtccattcatccaatccatcatactcataagctttcaccactctcccttttctcctatccctaacccaaccaactctttcttgctcccacttcattctatcaacaatagctgcattcaaccctattccacaatcttctccaactctttcactcataaaccacaccaccttattggtgttcacattcttctcatcccaaatggctttccttattcccccaacaataagaacatcttccgtctcaacaacaacatttacaaacaccaagttcccctcgtttccacactcaaaaacccgaacccatctttgctcaagcgtcatttcgtagaacatagatctcttcatttggtctttcaatttcataacttcttccacgaacatgaacggacagtaccatttcccgacgacttgagtggtgttgaacgggggaagagttgcgcggagagttgagttgagacctaaggcttggcttagttggtagtactttggagtgcgcatttcgacactccaatgtttgttcctcaaaaagtaaggaggaaacccatctgaggcaatggacgtggctgtgaaaccatggcggtgttgagttatctcaacctgttgatattgatcacatggatctaatggccttggtttaacgtctttaatatagctaccgaatatgctagtactgctctcgtttttcttcgaacttgtgtatgcttctctataagtaacaaacaaattcatttaatcaaataattaaaaaaatttactttacagttaattagccatatatggtattattttccaaagtttctataaaaaatgaggtacatatttttttagagtaataaaatgaggtagatattaagtagtaggagtgaaggaaaaaaaaataataaatttgaggagagaatggtgctatactatttataattatgaaaaaaaaattacaaaattaactatgcacagttgatcgaaattattgaaaacataaacactaaaacacattaaaagtaaataatatagtaatacatatattgaaagaggactatgttattaattatacgatatcattaataattaatagccgttgaaacaggatccaaacagttgagatcaaatacataactaagtctatttgatatcgcaatatcatttaatttatattattagtcgatcgatatacacatacatatatacataacaagagagatgatacatatattatatatgcgtaccctatatggttgccctcctgaacaatagcatagtaaagattggaagataatgggtgattgagaacagggataaaaaggacatcctgatagaagtcatcatcctcaactttgagaattttgttctgagggaaaggcaagtccctgatggtgttgtctttgtatgatgatccagtccaactctccttcaactcataatcatcttcgttaaaaattacaagataaccagaattcggaccttccaactgaggtgttattgacagtgcctcatgctgtcttctatacattgacataggccttgttacgtacattttaatttttattcttctctgatctatattgtgtgatgatatatgatttttttatgattatatctatataagaaagatgatctgattatatatattacactttatgtgttggtctgggattcctttattttactttcatttaataagtattataataatttgtgccatcacatttattaataataatggtcaataatttccatgtaattcaaagtaagagcaattctttctaaaataataaattaaaattatatagtcaacatgaagtaatcccaaaagggtactacttataaacttttatataaaattaatgaaatatatatacatatttaatatttatatatatatatatattgatattggtcaattatgaaatggtatggaagttaccttgaactgttctgaaaaaccaatatatattatcatcttaattatcttgtgaaaggccaagtcacctctgacattactacagaaacatttgtagatatagataactagaaatatacatatatattttgatatcatagaaaatatacatattaatttagggggaagaagtatgtgaaagcaacaaaaggaagaattgttcaaaaagaaaaaagaaaaacaaaaaaaaaaaggaaattaattcgtacaagggacaaaattgacaaaactcgataaaataactcaattttaccctattattataattattatacatccttacactcataatagattcatttatttatctacattaattcttggaatttttacaaaaatactaaattttggacaaaaatttgcaattttactatcacgcagaatatttttacaaatatactctttttataaaacaaccataaaacaacaaaatagaacaattaaaacaacagtggaacaactataaaacaaccgtggaataaccgtgaaaaatgaacacagtacacaatataaaacttacacaatattttttaaaaaaaattccgccccacagtaaaaaaaataaaaaagtttaaaatttcactacgtggtgtaaaaatcccttaattcttaccttttagtcttcacaatacaactacaatcatcaccgtgagtcacgacaaccttgatgtttggttgatgttagaatctacaacttctaactcttaaaatacaacaattaatacacaaagacaaaaaatcataattttgcaaatttagtcatgctttaggggtgttcatcaaactactcaaaccgcccgcaccgctaaaaaaatttgatttgaaattctttgcggtgc

SEQ ID NO: 227256 - DNA, 2255 bp, Cannabis indica
tatataattaagtaaaaaaaaaaaccatacatacattcttttttttagaaagagaattgctaaaaaatattattagtatttagtatcttttcggtatcatactgttattgttataattaagtattaagtttttatataacttaaaaaaataattttttaaaaatatcgctaactaatcataagacgtcacctatagaaagtactgaacaccactgatgtccaataacaataatcttctattaataataacatcttttattcttaattgtttataattagttttattactatttcacaggaataacatgctagtgtgattgccagcttaagcattatctatacatgaaatttataattttaacaatatgggatttgttatatgtattccctttaattaaaattatctacacattcttctacacttttctaaaacttaattataatttagagataacaatttaactataacttgtttgtttgttgataacctacccattagattaggactagctagcttttaaagtctacataaaataatgttgtttcatgttggtgtacgttgcaaacataatccgatcgagctattcgagtttagtttgaaggtgcgatctcaaagtagtttatacgaagtaaaaaatcggtttaatgggatgataatggccatttttcgcaatgtgcaacgctctaatagtatgtcgattgttagggtttgcatatccatattcatgaggttttagttggtttgatcgtatatcttgaaccaactttcaacacaattctcatctccctttctagtggcttggatgcactcattgcagatcgaatactacaatagattgagcacgcactaaaaaaattacctttagtaataattttttagtcacaacataattttgttgatgactaaatataatttttggtcacaacaaaaattacttgtgactagaatataatatttagatataagttgttactaatttagttttagtcacaacaaatattgtgactaaaaatacattatttaatcacaacaaaaacaaattataatttttaatcacaatataagaataattatttataattagtcgactttttcagttccttatttttcaaaaccttgttttgattagtagtgaaaacagattattattttgcaaaatagttttttttttaataatttttatacaataattctcaagcgataaagtatttttgacaattgatcgagaatccagacaaaatatcgagaattttgagtactattttgttaatgtaatgaatgaccacttctaatattagggctagccataaattttttgtaaactatatttaaaataaataaatagatagtttactccactacatgcacaaatgggacaatcatagattagttggcttaattagactaattaatgagcttttgaaaccagtttgattccacacaatattgatttaaacttttcctataattgacttgtagtgtcacaacaaattagttacccttttcccattaaaataataataataaaaaaaattaataagtatacaccaaaccgactcatctttacaataggtcgatttttatattttattatttttaataaaataaataataaaaaattaattactagatcaaggcaaaaaacactcgtattttttgttttcttttattttattgtattaaaaataaaaaatatatatctacaaaaaaaaataagaaaaaaaaagtacatataaataaaatgcaaattaatttattaataagtgtgccttgcatcattgtcaacgtcattttgctaattgtttaatttgtaataattaatgtaaagtcactcatatgtgagattaattatcactttattattattttttaattaatatattatactttaaaatcaatcaatattatattattaattaactaaaaaaatacttatagtattgtgtttaaaataaataattaaccacttcttcttctctatgaaaacttcaatagctatacaataatcattctctcaaagtgaccaagaaaagactaggagacaacaagttataaatatatctatatattttgtttttcttcattgtttttaatttggttttgtaaatttattatgatatataataatgatgatattatatatatacacatctttttgttgatcatgtaaattagatacatatatcattatgcaagaagctccttgtttgatcttcaacaacaacaacaatattggttcaagtactactctaca

SEQ ID NO: 227257 - DNA, 2417 bp, Cannabis indica
tttgttgttattttgatgttacttttatgttgttttcttgttgattttatgttgttttcgtgttattttttggaaaaccgtaaaaatgtaaaaaaatattctttgatcgtaaaaatgtaaatattttacaaaaaatggtgccttatgtaattattcctatttaaaaagtataactctaggtatttgactgttaagttctcatgtaacactttgttatcggtgaattaagaaactcgagcaagaaaggaaatgagctatctcattggctgactgtttaaattagcaacccacaatcgtacaagtcggacgaagcccttaaaggagacaatgtggataagggacacctcctcttttatcatcatgactaaccacgtttaaattaactctcaaagtgaattttctttgctaaataaacagtaaatctttactctctcgttccttcaatttttacagcaacaataaagtcaagctactgtttctaccaatgccatcaactgagaaaacacattcaaaccccatctgccttttcccccattcaactcgaccctttctacagttagtttcacaaagaaaaatgaaactacgcttcttttgtaccaccatgtccttcaacaattgtaaagcctatgtgctgaaaaatgaagactaagacaagagtttaatggaaaagatgaagcccccttatcggattggaaccgatgagttacacttcttagggagtctaaagagcatgaccctaccatgaaatggcccgttgattatgagtttacagcatttgcatttataaatagataatctataaagagaatctctaacatgatgacattatgtctaattattagatacaattatcattcaattatgaaaagaatgcaaaagaaaatacaaaagagaatctccttagcacttttcagtcctcgtattataaagttacaaggcgaggcaataatagaaactgaataagggatgcttttaaaacatatttgtgtttcggctacccgtagttctcgaaagtccagcttcagttatgacaagtgtttacataagttttggtccaatgtaaggaccaaaactcaacaaacaacattaacataatatgtttcagcaaaaaaaaaacaaacattaatataatacggccttagcatgagcctatcttattctataacttacaataagatttattgtaaagcatataatgtaatagccaacccaaccccatcaacaatggaattaaagacaattccacatggaattggaattggagttaagagagaattacagtgtcacaggcgacttctgtggctagaagcagatggtttgaagctggcgaaaccagtgatttctctacctgtaaccaagctgttgatgtcatacgtcccttcaaatgtgtatataggttctagatcacagaacgcctaaaaagtgatcaacataagagtcaacataaacataaaattttagtgtaaacaactgaactctgaaaataatagatgagaagaaaaaccttggctactaagaaatcagataagatgccgtttccgccaagtaattcccgtcctagagagacagtttcccttgcctttaaggttatccaaccctgaagattacaaacattaaggaacaaaacaaaatgtatgggatcaacaatgtgaacaagagtactaaactttttgtattattaccttggctaagctagcttgacctggagtcattttaccggtctcatagagcttgcaaagtcgccaacccatcagtagcattgcttgaacattgcccagcatacggacaagtttctcctgagtgatttggaaagctgccagtggagctccaaattgtttcctctctttcagatacctggtcattaatcacttaagaaattctagcaagaacattttaaacacatttgaaaaagaattgagctttaaagtacctgtgacacatgtcatagacacccattgatataccaataggttgccaagcaaccataacacgggaaacagcaagaacctgtttgaaatggatgatgacaagtataataagatgaaatttaacaaaagctaattaacaaaattagaagaagtaacataaaaaaccagcagtataattttcatattaaatggggaaacagtagacttaagagaacctcgtataatcaaagtaactgtttggtaatcttaatttgctggcttaaaggaaaagtattgcttaatgataataaagaggtttagagtattactatttgtagttatgcatgaaagcaataagcaagaacatgtactatattttatttttgaagttttttttccccccctcttttcaattgctcaacttgagattacatttcaatgtaagagcataaatacatgtaggtgcagctacatttgtgtagaatgatgtggaaagacacaacacacata

SEQ ID NO: 227258 - DNA, 3818 bp, Cannabis indica
gacctcacttgcgtgagatactacttgattgcgtacacttgcgtaataaacataaaagttcgtaacaccaatcgggagagacaattactcggtccagcctctctctgattaatctttcagcttcttgaccattggtccaagtaaaaagggccccaactccaaccagatcaattgccccatgattcaagatgaaatttctcaagccttccctttcccctcgagtcacctctttccctccactcttctcattagcactcaggacagaattgagatcacccatgaccatctaaggaatcgagaaaccatccataaagcctccaagattgttccagaaaattactctttccgctctcctcgaaggggcgtaagttaagcaacccacccaatccgaggagaatctatctcccccaaacttaaccactatcttgttagtatccatattcattacatgaacatcccacccttgtctccagaacagagccagccttcccgaagaaccaactgccgagacagccactccattgttaaaacccaacctaagccagatagcctccatgtccaacgcacttttcttagtttcaatcagaaaaatgacgtcgggattggcactccgaatcaatcttcggagagcatcgactgccgtaggtttgccaagcccacggcagttccaggcaaagactaacatgaggcatgggggggcatgtgaaggcccgcctcctcggccataccaaaattcaccttttccttctctgcatactgtgatacattttcaatagaaatcctccccacagacgaagagcctccagattgtctttctaattcttgactcactcctatatcttttgattctccacaatccgaatgggtaaagtcagtcccattgtgatctgggtgatattcgaattggatacctttcctgggcacactttctttttcaaattatggacctgctgctccttcagattgatgttcgaaccccgacccacttccattgaattgaatctcctctttttcccattacccaaagtaaagtcctctgacccaagcccatgagagagaataaattgtttttgaggggtctagtgggccttgactgtttatggactgattttgaattagagcccaatgttgctttgaataccatagctaatttctccacgtgcgatgaatccacctcaccagcatcaaggctaatatccacgttttttgaaagtgtggtgggaccacagaccgccccagagctgtcgtgcgccaacacctccccaccaacctcaacgtccttaccatgcacgttgggaatgttatgacagatttgcccctgtccctccgccaccgtcttttctgatttcgggcattcttcctccgccgtacttcctcctagaactgtctcaccttcttcattaagcacaagcagagggtcctcttctgcctcccttctagctggctcagctaaagcttccatatgtaactctgtaccaattaaagccggctcaaaattatccacaccagggatcaaattttgccttgcttcggcttgattctgggcatcaacgatctctctgttcagccggtcttgttcataaagttcatagttcgagaagcagcctttttgtcgagatcccaggcgaatccatggtccatacattggagccgttctattacagtcgtcagcgatcattctccgtttacgcttgcatcggaactcttcatgacccaccacacctcatttgtagcaaatacagggcatgttctcgtatttaaagtaccaccaaagactcaccccttcttccataggcaaaaacacccccaccattatcggtttattcagctgaatgttcacttgaaaacgaatatattcattggtaggaaacccgtttctccacattctgtcaatcgaaatcaccgaacctaccttctgagcaagcgcattagcatattttcgggtccaatacctagggggcacctcatacacccttacccatatcggagaagagttcaagtccgcagaactccattttccgtcttcaggcatcggtttcaccacgagaaacccatcacagatgttccagggcccattcctagcaatctgcatcgcctcctgcttctttgtcagtctcagtataaacgtattcctctccactcttggagtttccagcccttggccagcctccactttctgcccagaatcgatcgtagaagaccattgaagaccgatttagtggtatacattttcgccaccaccgatttctcgattgcctccactcctaactccgggttgtcttcgagagaaatcttgaaatcctccagcccacagagttccatctgtgactcgactgagttatcctccatagcagaaaccttttccaacagaaacaaaaaccggtgcagcccaatgaacggaaacaggatgaaaaaaggaaacaacctataaggagatagcgctacagctcaaagaaaaccaggcacccaagcagccaactctgaaaaacttttcggtgtatacaaaaaacgatacaggagggatattaggaaaaaccctagatcacacaacggatcagaaagaatttcgcataaaacgacagtcgtttcactgaaattcatatacgacacctatctttttcaaaatcggtcatgcacaatacacatgtccagagagcattttccccacatgtacggagagcatttttttttccattaattaatttgtgggggatttttgcttggacagtggtgattcgtcaggggttgggcttcacggtggaaatctgaggtgcttctcctcttagtggtaggattgatttacgtaattgtggcaacaccctaattttttatgtgttggtgtttagtgatcctattaatattctttggtgtttttattttccttctttattttttagtgcttgtttattttattgtattatgcttttaataatagtggtttgtcacttcagtgatcatctggggatcttcttgttcagtggactggtctttcaataggtttgttacttggttggttttgttattctcttttattctaacttgaataattggggtgtgcctacctaatttctaatttttattgaaatagttttagttgattgttattgatatgatatgtcacatgctcatttcaaatagaaatttagtattcttcacattcttttaggcgacgtttcgttggtaggaataaaaacttaaaagaatttaataaaaaaattattaaattttttctcatattacattaaatgaaaattgtttttttttctatttcattccatttcattttcaatcaaaaatgctaccttcatgtttcacgagtcatttagttgaagatgttattagggatatttttcttatttattgtaatggacacctattagaaattatcatttaattaattccttctctaatattaaaaaaattattaaattattcattaattttcatttagtaatatttttaatgacaatcatgtgatttagtaatttaaatctgcacatgataaaaaaaaaatctgaaaatacaagaaaaatttgaaaaaatatgcataaaatagcttaatttttttcccctaatctaatacattttaaagtttaaaaaatatgaccactttacaataaacccaaaaatacccatctcattttcaaacctcaactctctctctttctctatctctctcggttgttttctcaccatctcaccctcaccaaccttttttttattttttcgtcggatgtgatttggacaaaatctgggtttgggatttgatttcgtcgggcccgatgcaacccgatgccggtccgatggtaacacaaaaa

SEQ ID NO: 227259 - DNA, 2930 bp, Cannabis indica
caccagaaacactaaacacacacaatcacgagatcagatctaaaattgatctgatctattccacaaagtacaaaaaaatagagttagaaaggtttagaaaacaccagaaatttttcccaaagttcacccaaattggctacgtccccgttgagctattccccagatttggtagctcgattccactatcaatttaatgttcagagttacaaggatgagattccaagtcacaagtatgagtttgactaatctctagatttaattacatatattgtgtttaatcccctttctctttccattcactagctctcttttgtttttgtgcatgtgtgagcttcttctccttcttcttcaaggatcacaacccctggatcttgaagaattttccctcaaccttaaccttaatcagagtttgcagcaggtatatatatctgtagcttaggtttctgatttctttagtagttagttacagaaactagttaggtgtggattgatgacctgtcataatccattctaactaatttttattagggattaagatgtacaaggccgaaggccacaatagtaatttgcatgtgtagttttccttgtaaacacttgatgaacagatatcagtgtaagtggaggtttattcaacaatttctacctaaaccttcactgagctaatatcacggtagtcaagacaaatctgagggtctttgctctgtgatcttaaaatcacattatccttggtccagccctattaagtttagacaatgtctaatcttagatagggtgattacctttgtccccatgtctgcaggattctcttctataggcactttatcaatattgatgtgtccttgtgtcacattatcccaaataaagtgatactttatttcaatatgtttagttctgtcatggaacataggattcttacataggtgcacacagctcaggctgttagagtaaattacaggtgtattgtttagcaaccttagttattctaggaccccctttacccagatactttcttttatggcttttgtagttgcaatatactcagactcagttttggatagtgccacaactggttataattgcactttccaactcacacaatttcctcccattagaagtatgtaggcagatgtggattttttgttgtccttgtcccaagcatagtctgcatcactaaaacattctgtagttgtctttccttgttgctgctgtatttaagtcctagtttagttgtcccaattaagtaccttagcaaccatttcataacaagccaatgtgtctttccagggtttgccacatatctgctaagtacactaatggcataagcaaggtcaggtgttgtgctgaccataggtacataacagatcctatggcattagcatagggtatcttactcacctcttccttctcagctttggtttcaggacattgtttcttagataatgtgtactgagtagtgataggctgactagcaattttagaacccttcattgagaatttctcaattattttgtgtatgtaatctacatccaaaaggttggttatgtgatagctaatgtggagattaacatgtggccgagaccttgggtcccagagaaatcaatagaggaagttaagtctagcttccactataataggattcacgctttcaataagtagcttgcatgtttgttgatggtaccaaaacttggaatgagtctctcatcagagcttattttgatgatgatgttgcggagtctattcttcgtatcaaccctttaccaaatgggagtgacatcttattctggaaggctactaaaattggatttttctcagtcaaaagttcctattggagtagccaagctaaacagtttcgaaccccaaattctatgtggacaactctctggaaacaaaaggctcactttagatatgtgtttcttatgtggcgtattctgtctgaatgcatgcctactcagagtcaattgggtttttattctttagctgataagcttcgtgccttctgtaattctaaggtagagttagctctagacattttttgtaagtatagtatcacccatggtatttggtttaaaagcaagtggggctgcacatgaatacttaaaaactggatagatactatggcatttggaaaatggtggattgatttaaaggatgaagacatcaagttgtttgcaatctacatttgtgatgttctatgattttggagaaatgacattgtacataactacaggatctgggacttcttagctatttttaatgattgcatgaggagatttgctaaattttcagcagttacatctcctgctgaagcttctgtcccttctactcttgtgctctctggttcagaacctgtgtggtgttatttagttactgatttggattctcgtgaagtgtttcaagtagatgcctctgttgtggatgaagatgcaggtcttgttgttgtgcaaaggggttgctcgagcatggaagaggctaggatagctgtggacttttcaattgtttgtaatgtcttagaagctgaactgagagccattatgttagctcagtagctgactaaggttcttggcttgcctagcatcatcattgaatctgattctgaggtggctgtcaagggtctcaagcttggttctcttccttttggttggggatcttaccctttgttgattgtgccaatttgtgtaaggactttaagtttatggacgttatttttatttctcgttgtgtgaatgttgcgactgatatgctcacccattgggcttgagtcgttaagatcaagtctcgtggctgcttaagggaagtggccccctttgtggtcactgctttgacttagtttgttttcaataaattacctcatatactattttttaactttttttttttttttataaatttacgatttgggttacttcggtagtttttctagtgatttctat

SEQ ID NO: 227260 - DNA, 4146 bp, Cannabis indica
tgtaggaaataacaataaatgttaacagaaaaaattccaaaaggaaaataaacaagaacatctaagtaattaagagtgacttacttattgatccatatggtgttaaaggcttgtagttaaaactgaatatttgggtcagattgtcaaaattggggtgttgtgcaactaagttccacatcgagtaattctttgcatagttgaagtttgtaattgtaacctttactctccaatattctctgtaattgatctttaaatgccagtggactcgaattgggcacatatggctagtacattgcaccacaggtgtattcttttgagagcctgagacaactgaagctatgtatggtgaatctggcctgtaaattaaccatgaaaatgaagcatacgaagaattattttacaattttatatgaaaaaagtgaaagaaagtaataatgttctggaagagagaaagaactcactcaacacaacttcctggttgagtaatgtctttttacatccacatgaacatgtagggcaggaaactattgtatcgttgtaaaaagaggaaagagaaacacagcaagttggagccttggaagctagaaattgtgaatatgtacaagtaacattccatgtctctgccatgacaagaaaggaaaaatattagtccaaaatctcaccaatggggattacacatattattatcgctaattaggaatttcgcctccaaacttgacttataccaaatcataccccttgaaattttcaaactgtaaaaaattctctttgagctattaagattgttggatccaagaacttttgtccaattttactagcgaaagtttgatattgataaaaattcaagagacacgatatgatttggtatacttcgaattttggggagcacgatttagtacatggacaatcaccacattagtaaaattaaacagaatttcagagaagcacttgaactcaacaatctcaatagtcttgaaaagttaagggagatttggtacatgtaaaagtttaggtgacaaaaatcctaattagcttagtattattaacggcttaataaagctgaaaagtagttccaaacagattagcattcaacttactcaaggctcgagtgactctccttttgtccgcagaaagaaattttgttggttgaacaacttttgctggtccacaagtataaccaggccctggtgctttaagagtgaagttctttggcaaagtgacagccgagctttttgttcctgcttggccgacacttagctggaacgaagctgcagcattggcaggatcttgcacccatgaactaagtactccccctctgcagcaatttgcaatctgttgattgtaaggagtcccaggcaacaaatcaactattgtggggcttttcttacagcaatgtggaatggtccctttaaactttgaacaatctccttgctctgtggcttggcctccaaccatgctccatattatctcctttttggcccatgtccatcccaatgaccaccctggtgattcgaaatgacgatatgcttggaagttagtaatcgtcacaacagcctgttcattcaatgacaacccaagttaagtgttcttaatccaatccaaggataaatgaatcagataatcacttaaaactaaaattacaacaaaaaagttactaaataataaacaattgaagactatttaacaattaaacacaaatacataaaccacaaatcaaaacttagttcaaaaagcaaaatgtagtatctgtaacatcaaattttgaagagcctcatgttgcttttcaaaacttatcatttgcttggtatatgttaatatatatcgtacttacaacatagccatctggggtccagctaattatgtcccatttgattgtaacatttccatttgggtcaagtgcatcataggcctctgccacagagaaggaaggaagaaaaaaatgttagcacatatttctgattgataatttagtacttttgactaagggaaaatggatgcacgtgcagaaagtataaaacagactacagaggaagttccctttggttttgtgatcgttcaaagctcttaatacagtgcttgagtttatggaccaatcaaattatataacaggagcaattttcaaaataaataatgaaataatgcaaatttaattcagcttggggaagattcaaaaattaataaatggcaagtcatttgaatcaaaccaaacgccacgccaagactcagaaagagagtaaaaagtaaaaaagtttaaataagaaaaaaaaaggtaaaagtgtcttctggagacacgggcacttgtttgtaataccataatttaaggtttaagcgttatattgattttattttatttgatctcttctaaataaaaacaaaattatacgaattacaatcaaaacctatatgaccaaacttggcttttcatggttgccaaaataataataataatcattaatttgaagaaaagaaaacttttcttccccatgtaaactttttgaaggagtctttggaagaggctaagctaaatagtggtggcatttaattttgaaggaggactgaaaatcagtaatgcccaagtttctttcaagaaaaaaaaaaaaaaaaaaaaaatctcaatttctttgaggaaaagaaaacattttgaagaaggattgcaaatatcaaaattctataatgaatatatataaataattatttcatgcaatgaccaatgagatgatggcctatatgtcactaagtaataaaaatttgtgacagaaaaggagagaaggctaacctgttgaaacgaacatgattgaaaaaaccatgatgacgacgaggaaaaaactccaacttgattctttccatgcccaattcatctaggattgtaacaaagcaaaaaaaaatacccacttcaggcgtcgagttttcttctcaatagaatgtttgttcttctgtttcagtctctggaagggagagagagagaacagagagtctattacttacagaataaggtgagtttgagtggattagtggactttttaaggttgaagcactgttaaacgtatatatatatatatatatataaggttccacgccagttaagcaaatggggatactttggttactttccctttcgttttcccttttttttcttggttagtaacgtttattttaatagtttattactttatttgtgtgctctgcttgtacaagttttgcttttgtttttattttggggtgtatattaatgagagagagttaaatacggctaatatagtgaattggagacagttgtaaggatataagaggaaaagatgtagcaacactttctagaaaataacaactgtgccattagagtttgactgtgtctgtctctgtgttctcgagaaaactagagttaatacaagcactttcccccatataacgcaaactcactcttcaattcttcatgtcttcttctgcaatgttaaaacttgtaattcttttacattttcacttctagtgttttggtgtaagatgtctcggtccccttaaaattaattagtaattagaataatagtctattaatcgacaatttatttccacatataggaaccgggactaagtctataatatttggttctttgtatttacttttactttttcaacatctcattgctaagattaggggaatggaatgatgtatatttttcttaatttccaatatagagataaagatagtccaagctgttttggttgattgatttttctcctattagaaagaatacgtgggggtcattttctccaaaaacccaatgttacagaaaattgctcttttttttttttttctcttgcctaatattttttttaagaattattttataacattggccagtggccactgaatagctattgaaaaatacattaggaaagtaaaaaagagaaggaaatcttgaataaataaggaaacgcggcgattatggagatcttgggccaaatgagtaccacacaaacaaacagtggaaacagctcatgtgaattgtgatgacgtgtaattaaaagctccgctaaactccgcgtatttgccaagtgtcattcatatagtggttatatatttaggtttgcctaacataataagttgagttgagaataatacgaattttcaaatatactagtgacctccct

SEQ ID NO: 227261 - DNA, 5746 bp, Cannabis indica
tgggtttttaataaaagtgtcatgtatattttttagtttgaaatgtattggtttaagaataaaatattagggtttttaaagtatagtttttcaaatttcccaaagaaaatggggccaaaatgtaaatttgatatcttgatatcctaatccgaatttaaataaatttgggtcatcactttcatttcaccaaatcttaaaaaggcgggaactgcaaatcgttacagggagagaagagagaaaaacgagaatggacccaaagaagtcgaccaacgatttgaagaccatattagatgccattaaatcttcagatgtaagtatttcacattctaccaatcaattttcatagattatgtttcgtgctactgttggtttaatttggctattcgaatttcgaatttgaagtaataatattaacagaaaagggattgtagagagtttgtgaacttgttgattttctggttcagagtaaatttatgttaacagtatttgggacttgattagattttatgagattacaaacaaatgtacacaggttgtagagagccgtacccagctgctttatgaactcggagaactagaattatcagagaaatctgacttggtttccctcattgaatgcctcacagtatccattgacctctctaccattttttagctttcattgctgaaatttgaaatttgcatcattttctgtaatttcaactttcgaatcatggtttctaaaaatcacttacttgggtttaccaacttttttcttctacttctaaaattcgaatatacaatgctcaattttagcttccaactccaatttttctttgttctacatgccatttgatcgattcgtatttgtcagctgcttctatatatgggtttgtaggcatctcatctgtaatgtgtgagtccttgtttaagatgggctaagatctcacaccaaaggatatttctttctcataaaatcacagtctaagatgggctaagatctcacaccaaaggatatttctttctcataaaatcacagtcttgtgttattgtaatctatatgtttcatcaaatttcatctggcaagattataatgagtgttataaagtgtatgctgtttttttgccttgacaacaagcttgacattttgggaagactacacttgtctggatgtaactcagtgcatgttaaacaaggccataatacatgtggctttaaagcacctggaatcgggtatatcctgttgtcaatgccagtttcttacccttgcaacgaaggtatagatgatactctaatcttgacttgaagaaaatttatagatatcttattttccattaggctattagtgtaaaatcttgaatgtaacatgtcagtcaagcatatggtgcggaaagcacctgaagatgactctcatgtcctccggggagtctcaagaagaggagcataccgaactgttttttcaggtagatgatatttgacattatctgagcttattgttgtactctttttctctatcttttgtgtgtgggtgcccatgctctagttctagtaccgactctttcggtaatgaccagaagtttgtacttgtaaatcatctgtatttttcctttgaactttctctagatgattaactttgtatatctctctggtgaattatttggttaagtttctcattgcgtaaacttttattttctgaatttccttttcagctactagtggattttctgagcttttccactgctagttattcagctttggcaagaattcctatatcagctaacagaacgttgatggatgctactgaaaagttcattttggagcaattaaacttaaccaaagagttgttatcagagatcaaggtactgtaatgtaacttgtgtttattcattgaatgccaagcacaaaacatgaaaattacctaagagtagttcaaatggttaggcatgtggtttgatttgagttttcatagtttcatcgtataaagacaattcagtttccttcttgaaattcttatcatttatctaaaaagttatatttacttcttttttaagtttgtctcaaaagagccttttaagcatttatcaccagaagtaatctttatccaaatgcagaaaataaattcacacggatcagaagtgttgaagatagcacatatggttatagatgctgtaataagactgtgtggagtgtattctgaagctgtaacttggaatgttactgatgaaaagcttgatacagagaacagtagtatggaatgtgaagtgatcaataatatgaatcatgttattgatataacaaagtgttcaattggaaaactgcatgagataggcataattgctgctaatagtgggggaagcttagtaagtatacttaatgtgtcatggaaaggtgtggtaagtctgcttcagcttggtgaggggatcttagctattaagatgaatgtagcagatatcatttcaagtctaatctcattggctaatgaatatctgaaaagtgttgctgaggcttggtcttcttcgctaaaggagcctatttctgcagttgaagcaagaaggaaatttattccactaaggttttacttaattaatgctctcaaaatttcagctttatatccatgtcaagcatgtacggtgcacagggagataacactctgtatcctcatgattttgactcttaaagtctcttggagcaaggacaaactgcttaaagctgctagtgaagctttttcagaacttttgggtaaaacatcctttgatctacttaattcgtttctaagttcagatcaagtggagcaaaagttaaaattagaggttgttgatagcctgttcagtgacgaaagctttgcgaattctattcctggagatatgaatgatcataataagatgcttcacatggatgtcactctttcttctcaagtatttactggggtaagctcattgttggttggtcgggttgcattgtttcttagtttcttgagatgttcacctgatctaaaagaagatataaaacttgggcttgccagaaagcttggatggtttttagactctttaattgatgaagaggtgtattcttcagttctcgttttgcaactccctgtattgtgttgctctggggaaaaaagagacgctagtttggcaaccaatgttttcatgtcttttggatgcactaaagtcatttttggttggggtatcttcaagcgatgcatggatggaagtggaagcatttcttcttgagaacctttgccatcctcatttcctttgctgggaaattgtaatggagctttggtgctttattctacgttatgctgagtcaggaatggtaagtggatttattaataagatttgttcattgatgaagtcactggcgtcttctcaatcagttcttgatcctagttcgggaatgagaaagttggcaagatcaatcagcatgctaatcagtttcggggcgcaatctttggtagaccaggttttcaaatccataattggtgacagcagatctcaactgtcgtcaattatgtgttcagcattgttcatggagggctttccactgaacttactatctgataagatgaaaagtattgcagctgaaagaatacttgctgattttcttgacttcatagaaagttttgaagaaaaatcaataacagctactaatgatggtgtttcgggagtccccgtatttgcgctgtctgcttcaatgcagtctctgtaagttaaaagatttccttctcttcaagatattaagcttcttttgttgtcgttgaataacctttttgggaatcccaaccaaaaaatgattcaacaatgtttcaactgattttgtttttcaatgttatgtagccagatcaacttatctgatattggagtgaagatcctgcagttcctagtttctttaatccataactacggtgtttgtgtggacaaactaaggaaggagctataccgcaagcttttgagtgaaacattagcgatcatctcaaacatgaagcacctatactcatatgagggaatgatcaagcttcttcttgagcttgaaaatttgttcatctcaggtccagcagcctctgacagagacttgtatgaatgcaaaccaaaccttgctcttttcatggcaggtctcgcacacatgccaatggcagaagctgataaggacagtaccaaaatctctgccgctagccaattgtatcaaatgatgttaaaggaaaggcactgggctcttattcatttggcaatcacagcattcgggtttttttcagcccgcacttcgtgtgatgagctctggcgattcgtgcctgaaaatgcagccctttcatacgatttagaatatggaaaagaggcaaacgaggagagattcatgtctgaattcaaagtatttctcgacaaaggaactgatatcgacataactacttcatcatccgggggtgagcaactaggacagctttcaaaggagggtctgattttgaaggaaatgtttcaaaagatcccaactatcaaaacagaaactgttgctgtatctgaaacaatggaaattgatgatgaaaagcaatccatggaggttgatgtagagaagcaacacaacagaaaaaggaaacttcctgatggaattagcaagggaatggaactattacagagtggtttgaaagttattgttaatggtctttctgagtggcaccaaactcagcctgagtcaagtaataatgaacttcatgatcagttgaagactcactgttctcgtctagaagatgaaatttctcgattagcaggccttgctggtggaaactaaagctgggattttagctcacttgctggtatgttccataaaaatataatactatatgtagtaatagtagtagtaaatagcttatgttgtatgatatgagaggaatgtttatttttttacattttatttttcattattttagatttcattgttgtgtggatttagaggttccaaatttcacatgtcattgcattattatacatgagttggttcacatgtaatatatatatgactatgagaagtttacttacatagacgtagtagttgttaattgtcggaataaaaattcctttaacaattctgtcccattccaatactaaaaaaacatggcattttgtatataaagttgggtatatcttaaaaaatatggatatagtaggtaaaaaaaactaaaaattaatatttttggaaaataattgaatctttttgtaaataaaatataaaatataatattttgaagaataaattaggcctttttctaaaaaataattatattttcttagataaatggtgattaaaatttaaactggtatttttgaaaatatattggggcattttttttggaataattacataaggtactattttttataaaatatttatatttttacgttcaaagaatgtttttttatatttttacagttttccaaaaaataacacgaaaacaacataaaattaacaggaaaactaacatgaaaataatatcaaaataacaacaaaaaataacatacagataacaaaaaatcaacaacaaattaacaagattacaataaaaaaagaccgtattttctataaataaaattaaaaaaatcgttaaaatgtttaaaatttcgtaaaaccgtatttttgtaattttttttgttgtttttatatttttgtaaaataattccttttttttttccaaagatttttgtgttagggtgcccttgggccggctctgtttgcttttctatttccacctcatttcatgataagcattattttattt

SEQ ID NO: 227262 - DNA, 1429 bp, Cannabis indica
aaaatatttaagtcaaactcaatctttttttttactattttttatgctaaaaaacttttttttgttattttttttagctagtggaacaatcctattccatataacgtaaaaaaaaaaattctaattaaataaaaaaattaatcataaaaacttaattttttctaatattactcattcatgggtattactcattaaaaagtgcacccatatatattatacgaggacaaattgaaaaattgtagaatatgatgatggatgacattattcatattcattttatgataatttggcaagttccaaagtactttatagtccttcgcattttcattatgcaatatattcacattttggtataaagtatatatagctttatatttgattttgacattgtatacacaatataaggaagaatatagctggaaagttgcaagtgaaataattataaagatatatttatatttatataatatggttttgtttgctacttactttttattgcttgctttggaataaattgatattgatggaatgagtttcttttcaaattcactgtcaccagtctggttgaagctggcacaaactcctttcatttcaataatcaaaattttgttctattttatttaataactatatagagagtaataaaaatgtgaatcaaacaaaatgctaaattgccacacacaaaataacaatgaaaatatctctcaaaataaataaatgattaacaatgaaaatgtagtagatgaaaaacaagaaaccaagactaatattaacatgtatatatatgttactatatatagtaataaataaactattattatgctaattctgtaattgaagttgacttaagtccgatcttccatgatgaactttggaacaatataggtgattaataagtaaatactaaccaaacaaaaggcgaaagaattaaggttacaaattccaacgactacctctcgaaaaaataaataaataaataaatccaactactagataaatgatcctgttcgataacaattttaaaattgattttctatttttaaaattattttaaaattgatttctattttaaattaaaatttaaaataaacttgtaaaacacgttcggtaacaacattttattttttatttttttaatttaaaatcaaaattgaataaattttgtaaaacagatttatgttgattttaaaaacatattttctcttttgcttctttctttcttgctcatctcctcttcaaaagctcaaactattccatggcatcagttattcaacaagtaaaatactctccctctctctctctctctctgggattgtaatagttgcagtgacgattttgatataaacaacacatgaaatcttattctttttggaccgaataagagacttattgtttggtctcactatgcgtttatcaattgggagagttt

SEQ ID NO: 227263 - DNA, 4072 bp, Cannabis indica
tttttctttaaaataacaacttcagtatctatagctacaagccatttgggatcttgtaaagcagctttgagggaagtcagttcaggtgagcggagaaagacttttggctttcagattccagacttgcctctagtagtcataggttgttgattagcagtagggacagaagaatgagagacacaaatagaaaaagtttcagaagcataagatgaagaagaaattggctctactaagatgggaaactcggtagcagtaggaaattcaatagtgacaagaacttcatgaagagtttgagttaaaataggattagctgaaatgaaaattggttgagtaaatacctcagtttaagatgaatatggtgagacaacaacaagactttgaacagatgtaactggtgtagcggaagcatatctgttggaagttgtattgcagcctctggaaaagagatagcaatgtttaaaggttggccaagagcaatttagcaagatgagttagatgatgtggtagagatgctagaagcagtagaggaataagggaaatgaaactcatcaaatagaacaactcgagagatatacattcttctctcttgagagtaaaatttgtaaccttttgtgtgagagactatacccaagaaaagtgcaaggcacagatttgtattgcatcttaacttgtttataaggtctcaaatttgggtagaaaaggcattcaaaaactctaagagacttgtaatatgattttactttaaatagaacttcaataggtgtcataaaattaagaacttaagttggcattctattgatgagaaagactacagttttgtaagcctcatcccaaaattttaagggtaaagaagcttgatcaatcaaagttaaaccactctctactatgtggcattgtttgtgtacagccaccccattctgttcatgagtgtgaggacaagacactatgaataattcttgaattctcaagaagacttgtaaaggcttgatacttacctccccaatccaattgcacaactttaatcttgaaaccaagttgggttccacttgagttttaaacttagtgaaagttagaagagcttcacacttggttcttagaaaatatatctaagtgtgtctggaataagcatcaacaaaattgatgtaatacttatagccttttaaggaggtaactcgggctgcaccccacatatctaaatgtagaaattgtaatggctcagtaaattcaattaaagaataagaaaaagatcattttttatgcttatcaaggcagcaagcaaaacacaaattagacacatttttattattaaattcaatattacatgaagaaagagcagacttgacaaccttgacactaggatgtccaagccgattatgccacaaactaaaacattgtttttgagaatcacgttgagacagttgttttttagttgaaacattgtttgtcaccactggtttgagtgactgaactgcaacacacacttaaagactcaggttgagacttggaatgcagatctgcaatatatgttgaacttgtatagaccttgttcaagcttccaaacaagtaagattttcctagtatcctagtccttgacacatccaaaagagggatgaaactcaaaaaagacaccattatcacttgaatttgagaaacactcgataaattcttagttaaatcaaggacatggagaaatttatttaatacaagagactgagatataaaaggtgaaatgaaagaagtttgataaatgtttagaataggtaagcatgttttattgcccataagaatttgcttttgtccattgtaaatttgagaagtgtttagattgcctccatcaactataatgtgatgtgtagctcgagtatccggataccaagaggtactggcaacagtctttacaatgcttgcatatcaacaacaagaacactaccaagaaagtattaaaacgattcaagtcttgtaaaggacttttcaaacttataaaagcattgctttactgtatgtcccattttttgacatagttggcactatgtattttgtccctaagtagaattgggaccacgactttaagagggaccaccactacgttgtgttcatgaagactgaccatggctaaagcttggaccaccacctccatgcatttttggatagccagtatgactatgaccataagagataggataaggtgttgtaaagtatttccaaaaccaaacatgttagattcatgagagaaggctcctcttgaagtcgatgaagatctagaaaaagagcctccatggttgtagggaaaatctctggtttgagacaaatttgccttaggtttagagacatcaagttcttgttcacttttatgtagtcgaacctcatgagctaaaagaagagcctcaatttcagacaccgtgtacacatcctttcttgtgttaacaaaagtcacaaacacatcaaattcataggagagaccattgaaaatagtcctgatattttcttatgcagtgattttgtgtccaatcataacaagaacatcgaccaaagctttgatcttcagcaaataatcatcaagattgccaaacatctttgtgttttaaaggtgtgtttcgtagtgactaatcttaactctgtcatgagttgtataatactcactcaaataactccagatctaagttgtagtgtctgatccaataggcgatttatagttttctcaaatattgacaagagtagccacgaaacaaggatgttatcttgctgttcctaatcttcatactcagctctaacacaatttgtagcttcatcttttgttgtattaactttggtggagcaccatctgaatcgagaaacttttggagtcagctaactttgattgaagctaaaacttgatgtctccacggcaagaaattattttcatcaagtttgatcgacagtgtatgaaaaggtaatcatagatgattttgaaaaaatgaccattgttttgagacaattgaactaaaccaggatttgaaaggattctccgtggagaaaggacgagggagctctgataccatgttgaaagacagaaagatagagaaaaaaagaagaagaaagaattgtattgctccactaaaacttgattacaagcggtgcttatatacaatgatgatcgaaaagcctaacaaactaagacggtaagcaagaagacttaactaccctctaacttatttctagctaattaggagctaactgattctcattcctaacaatgtaactctcactattttaaattttaattttagtaatgtacattattcaaaataaaaaaaaaataagaacaagtagaatgtctaccatataactattgtagaccatcatatataaaaaattgagtttatattcctattagttagaaggtctctactataactacttatatatatatatatagaaattaatattttatttttaatatatatgtgtgtttataatgatcacaaccttttctgtgggaagattttaggggactcattgagatagaaatctttaatatcttgagaagcaaacagaggacgattattatggttaggcgcagttaacatggcagtaataagacctcctgtgcttgttccactaatcacatcaaaataatcaccaattcttgcattctcatcaccctcaagcctctgtaatattaagttaatattaatttttttattaattaattgttatcaattattttgtttcaaaaaagaatataacaaatgagtatatatataatacaaattgttagaaattctgaataattatttgaatgcataatcaagttcaaatacaatttgttataagcatgatttttttcaatatttatacgcagggaacaaactgtttaaatctttattttgatattctaattttctttttagaattttttgatgtaatattacattgatcatatacaaatgtaaaagaaaataaaaaattcaactgaaatagtataagtatcactacaagaaatgtcacttttaccagcacaattcgatactgcgttcgttggtaaaagtgcactggcaaaaagatcaaaattttaccaacgtacatttgcagt

SEQ ID NO: 227264 - DNA, 2455 bp, Cannabis indica
ttgtttgtttgttggttggattgattatgtatttttttcttcaataatagatactatgaacaaattgttatattatatatgcttaatttaataaataaaaaataaaaaaataattatttgaataaaaattaattttttttaaagagttgaccgagttgactgagttgaccgggtcaacccgccaacccgctaaacccgaccaaccgaaacccgccaacccgtgacccgccaacccgccaacccatgccctattcgggtccgggttcggtttcaattttttgaacccgaaacccgtgaacccgaaacccgccaacccgaaacccggtaaacccgcccgatgttcagccctactgtaaaatatatcttacaaaataattataatttaactataaaggataatttaataaatttaaacattctaactatgtttttaaagtaaaaggagataaattattattattctatttctaaataattttattaatagcatattacaaatattaattttaattattttttatttttccttcaaaaaaaaaattattttttatttatttggttacatttcccaattaatttactctaattataaataaatattgtgtagtaagacaaacttatagctaattcaataatgacaaacgtaaattctatgcttgaaacaaattaaaaggtaggaaataagaacatgaaagaaacacaattacactactcgaatcaaaacgccaacactttctcaacgataagatacactgcagaacaagataatcaccttcaaccaacttttttttaaaaatctgaaccaaaaaatcgtataatgaataaattgcttatattatcagatcaaaattttggttcacaaccactgcgctagaaaaatcgcctgtaagctgtgctattatctcttataggaacatttatagataaacaaaagacaaactaattcatcaacctactgaataaatacaatgcccactaggcatcctcaaccttgtctaccatatcatttgaggttcgtgcagcatgtttggtttcatagtcagaaccggtccatagtttccgagaagaaaatatcggaagagaaatcaccccctaatccagcttgagctcaatcattgtcgacaccttctaagagctaaaaacaaggaaactgacaagggcttgatgaaataacagggcattcataattacacttgaagacactcacattgccccgaccccaagaaaccatatatgggctgtccctgtccaaaccttcggctcaaaaaaattagatggtgatacatagtccgtaaatgcaaggacctagttagtgtgtcatcacaggtattgtcgaaggctttcaccactaatggtttccatttccttgagaatctcctgcgcaagggacttaacagagggctccatatcctcgagtagttccccgaggaaggggatggtttcagccaggaaaactagatattcttctctgagatgctcaaccaaatacttaactactcttaggcctagaattcgagcccgcaccttttcacttcgagtctgcattagtacctacacatagtatacagaaatgcaaaatatgaataagaaactattcagctggtcaaatgcagtaaatagtcgaaagaggcaagaataggtgagcggaaccattgataacttttgaatagatccaattaacaaaaaaaaaagaaaataaaaagtataaaaataaaggagaaagtgctcaggattagtaattggtcacaatatagcaatataaatataaagaatcaatcctctaaaagcataactaataatggaagtatataagattccaaaagtacctcatggtttaaaggtttccataagacgtcagttgctgcagtcactgccatttgaccgatacaaacaaccaacaagtcgtcaacttccttcactgatggcaagtttgaatgttcttcgagggaacttggtggttcaatagtgagctgagaaacaataggcttcaaaagaacctacaaacagaaatgccaagttcaatcaaccaaggaaacaggtaattactctagtaagctgcaaaacatgtttttgacaaacctacaaaccaaaaaggccatttatttctaattattattctagaagagacagatatcacatgcctatgactgacctcctcccaaataaattgagagccttcactcatggagaagaaagaccgtggttacaaaaaatagacatcattataaccccacaagtgacgccgagaactactcattattactcgtaaccataacccaatatctagtcaaacttcttaccaaaaaggccatattcaatcagaaagggattgaaagaaggaaagtaacgtgtaaacaactaaacacaattctttctgattactttaatgtttaaagggaaacaagaatttaaaataataataaaaaattattaaataaaaatatttttaaaaata

SEQ ID NO: 227265 - DNA, 1894 bp, Cannabis indica
aaaaaaaaagaaagaaaaggatttcctaacgaataccgcatttaagaatgatctttccaatcaatcttccattaagacaaatattgagcattaatgtagtaatatacattgcgacacccaattgcaaaatctctcctgcaccctaaaatttttcagcacctgctctacaaatgagtaactcaacttgtcataacctttaacaagatcagtaatatattttggtttgccaactaccttttcctctagagtttaggtcatgtggtggtaagatattgggtttacatcccaagatcaagtttcaaatagaactttcacccttgtctatattatttggtattgaaaatattggtatatagtatttttgtttcccaaactggttgtagtatacatcttttgttcgctattacaattaatatataatatattatatgaggcaataagttgaagattttttgtttaaaattatttagtttggttcgacttcagtcaactactcaaaacctaggtgcaactagtcatatgatatatttacacatatataggtatgcaagtgtcactgacagagactttactcatgagattaatcacaataagtttatattatatatatatatttatataattgcttaaagttgtaatggagatatttaaaataagtcgtttgttttagttgtatatcgaaatggagtcaattagtgtttggcaaccaactcccacggggttttggggttttgtccatattgtttgacattggtatatataactccacaataatctgcctttccaataattaattagtactagctacatgtgtttgtatatatatttgtcaagcaaaaattcttggagtttattattttttgaacattgtgattatttcgtcaaatcattatatatttatttattttaaatatttattattattattattatggcacaaataaagcaacacgatcacaattattgtgttgtgtcggggcatgtaatttattattatgtttagaatttagattaaaaaaacgattcataaaattaatatgtttagaaggttctgatcaatctttttctacatacgtagtcgtgtgaacataaattataagtgaatcatataatacatatagtacgagagtataatatggagatgtaataagtacgtaactgttttcccttatatgataatatagtcctatttctgtagttaatataagtttgatcagcataatatggtcccaaaacgatatacatatttattagttttttttttctcaaaaaagaaagtggatcggtcacgaggcttgaaatataagtgattgaaatacaaaatttgtagagacagcaaccattattatgggagaataaatgagtttgcaagtgccaagtgcatgggggcacaaatagattggtttgttatgaactttttaagaaaagaaaagtaaaattgatatgaatgtagattttacagtggggaaaaaaaaaagttgcgtctttcataatttggaattggatatagttagagaagaaagtagaaaatgcagtagtatagaagaagtagttactacttatccagaacagatgtagtgtgtggtacaactctctctgctctcatgatgaggctcatggggttgtcctgtatctataattaagagcacctaccctcacgaacaagctcagtaaatatcaagccttatataaataaatatctatatgtattgtatctcattaataattaaggagaattgactttttctatactggattaaataccacaccaacatcagcttaaattgaaaacaaccattcaattataatagtgttagaattaatgtaatatttttattattattttcattataggctctgttataacaagagtcaaataccaatgtggttattt

SEQ ID NO: 227266 - DNA, 4378 bp, Cannabis indica
taatgaaagtaaatatttttatgacagatgtgcttctattagggccattgaggccaattctgttttggaaactcaaaagttgaacacttattgggttgtcttctctctgattttgcttcttgaacacactttgaatctccttgaatggtaagtttttttacactactatgttttctttcatgtttgtaacatgatgacatgaagttttttatttgatttcctatgttgtgagaatgtttttcctcttggtttttcagaaaatgtcatggtaaaacaggaaattagtactaaaggggttcataaatttcataatttgaccaccaagcatttgctttttttcttcatttagtattaagtaattgaagaattagaaagttcccttgttgattggaaactttttcttaatatcgctattgatacaattcaatctcgggctctacttattttactttaacaataattatagaaaattgctaaccatttacagagcgacactaatgctcgatgttattagtaccacttatttgtgtcaatacatttccatagagagtaaaaggcaaatcattatgtattaggattctgataatgacccttgatatagatgaataagaatcttcatttctgattattaaagtttctgaacaatctaataactctacaacataagattagagtgagaaatttattctaacacaaatttcttatctgtcattatgcaattttcacttgtcaggttcccactctggccttacattaggctagttactgtcttttcactagtgataccttatttcgatggcgcttttcatgtctacaaacatgttttatgcccttgcctttcaatggatcaccagattatcttaaactggttttcccaacagaagcatacatcagtcgagaaagagagagttttaactgaagtggagaaatatataagggaaaatggaactgaagctttggaaaaaatcattgctggcaaggtatggaagatatgatatgttagatgttatagaactatgatacttcaattcaatgaaatcttagggtgtgtttggttaggagtaatggaatggaaacctttttcattccattcgttcgtttggttgctttataaagcattgaaattgtttttctaccatttcggtagaatgactaaagaggccttccaaaagatgaataactataattttaattcgttcattatatagaaatttagtaacagagttttgtttttcacttactgttcggtttagccgagtagcggtagcacaaagaaccccgaggtgaaggagatcaaaccagtttcagttgaagatgacaaattggttaaacaggttagctttctttatattgttgaatttggcagccattagtagaagttggaacaaagtcatttgcttagctttctctgtcttttaatgatctatttattaaattatttgaatgaaatttgttttttatagtcaagctctgatgggcctaatttgacaaagaaagatgttagtgatgttaaattaacagagaagaaagaagttaaagaacctgttcaggtaacattttaatgatattggaaaatggaaatttgaagtactcaaattgaaattttatgaagttggcctctgcattgttatccttttctttactttcacttcttaattcgcaggctagccgtgtagagcctaaacccgccgaggtaactgagaagagaacaattataactacagaggcaaaacaaacagttcctgaaatcccatcagcaagagcacagctttctcttcctcttcttccaaaatcatttcaaaaagagtggaagtgtcatttgtgtaaggtgaaagttcaaagcgaaatcaccttcttttctcatcttcaaggtagaaaacacaaggatatggaaatggaagaggcaactaaagccaagaagagccagccaaagatagtcatccctaagaaatcaaatcaatctactgagggggagccaagaaacttggcgaagaaccaaatggatactcctaaagttgtattttcctatgctcaaaagcaatccaatgaggtggggaaacaagctttgttgaccaatgattgggaaccaatcattgttagacatgacatgtctaaaggcatcttgaagactaacaacattgcagtttcatcgtcgagtgtgaagaccgccattgctcctgtcgcgaagcctaaggtttaccatccatactgccatgtttgtaatgtgagttgcagtggtaagattgatatggattctcatctcaaaggaagaaggcatttgagtcaacttcaattgttggggacaaagtaacttagtaacataatgtaatagaattttagtgacaatggataaatgattagactttgttttgttgctttgtgagaaagaattggacaattttgttttgggatttaggaactgtttgaacatgaacctcacattttctcaatcttaatattctttaaaatgtgattctatattgtataaatatttatatagattatattaccactctacatatttctcattatccgtgttttaaaataatcataataataaataaaaagcaagtaattaatccctgttttaaatatttgtgttttttttcttaatttgataataataaagttatcaatttgcatatgagcaaatggagtgctatagttcatgttcataagattaaatttcaacgatggtgtataatgtgagctaaatttagctttgattaaaagttagtgactaaatgtattataaaatataagagaattttaacggagtagctaaaaatgtggttcatatgggtggaatataaagtgatttaaatttatcacatgctaaaaattatatcgaatttagcataaaatataataattataatacggaccaaattttatgaccacaataaatatcacttttttatttactcttttgctaattaataattttttactttcaataaaaatttaatatttttcctaactttttttacactaattttatccctaaatgcattatagtactatgtaaaatttgtgtcaaatataacattgagtcattttttagataaatttaacttaaattatacaccatttggtcacataaactaaatttacaccacaaaaatatcacattttttaattactcttttgacactcattaaatttaaatgttaactaatttttaaggtaattttacacataaatacattgaagcacaattataaaatttaagccaaatataatattgactcatttttttaagctaaatttagtacaaagttcttgcatttataacattaataattaataaatattttatattttgaataataattaatgaatattattagttctcaaaataaaaatttaaaaaaataaaaatgaaaataaattttttttgaaggagcatcatatatacattatgtaagagaaaaaaaaaggtgactgcttggcttcgaagagatggaatctgctttatttaaagatgttccttcgtacagtgactcttcacttacacaaatagaagtaaaaaaaaccatacaaacttacaaagagaaagagaaaatcaacttattcacttctatagttcaagatagaatattgatgatgggtttttctgggtttcttcaaattcttcttacttattttctacacgatcttgcatggtatgatgcattataataatttcctcactctataaatatatattattgctttattaactataatctctttgttttattgttttgttttgttgatgatgtgtacacatatgaaggcctctacttgcttttgtgtatccttcgtaagcccttttttattctttcttcatatttatgtatagatttatttattcattattactttattatgtatatataatattaattcattattagaaaatgttgtttggatgattattttgtgactggacagatactgttctgttaaggcaattgagattaataaattacaagatgctcaaaagttgaatgcttactggattgtcctctctttgattttgcttcttgagcatgctttaggaaccctcctccaaaggtaattatataaatatatatacagtattttgcaatgtgagtgatatgagactagaagacttacacaattttttgaaaaaaaaaatacagtatttttgaaaaaaaattccgctccacagcaaaaaaaagtaaaaatgttaaacattttagtatgtagtgtaaaaacccctaaaattttaaggcctttatatatacttaaataacaaaaattttgtggcttttttcattcaggttaccattttggacatacattaggctagtggttgtttgttggctggtaatagctcactttgatggtgctttttatgtctataaacacc

SEQ ID NO: 227267 - DNA, 3900 bp, Cannabis indica
tttctcttcatgtcacgatacaataccaggtctaacagtcaaaagttaagctgatgatatgaataattatcgtctattgtgacttgtaaaatgaaggttgacaatattaattttaatactcttagaaattttagtatatgttgtaaatgtgaataataggattgtgctatacatgttttacatgttttttttccctttctgccttagcttgtttattgttatttaaccactattgagccaaaaatgtcctcattattactttaccttgttctttaaattatgtaataagcatagaaataaaattagggaaacaaattgtaattaggtaaaagtgttgatagtgaataaaattgcatttaaattatttagggcatataaaaccccaacaggcgcctcctccaagcgtcaaatcaatacatttcgatatgtattctcttaattttcttttttaagataaaatgtgatatcaatatatacaatttctatgatgaaaaaatattgttttattttatataaccatgtcacattaagcataggatattgagacttggttggaactttatttcttcaaattataattggattattgtgatttcatttacttatttggaaagagataataattttttttttttcgctggccaagacatcataatattgttgttgaaattcccaagtcattttatcatcacttgtttcacctcttaacttttggaccattgtagttttttcatataccttgagtataagacaagacaccatatatttcaaccatgcattatacaaccgccaatagtgtaacctaaaatgcctactacaacaacagccattgaagctggtccaaggcacttcttccctagagtccctacaatcacatgtgatgaaaacctcccaaataaaaaaataaaataaaaaattatgctcttattgaaataaagatgtccttaaaaaaacatttccaataacaaatttaatattgggagaaaataaataaatattgtacatggttttgggcccaaccccatgtgatatctctgcaatatattttagtcccttactccttgattatgaagtcttataagattaggttctgaaaatccctaggaacttgtgtcaagcaaatatgatatactacaattgggttttttttaaaagataataattgataacaccaaggaaggagataaaaatcaaacaattggcacaaataaaagactcaactcagctcatttcttttttaagggaataaaagactcaatctctaactagagtagattatgttaaaagaaaagaagaagagagaagaaataataagaaaccattaaatgcccatgtgtaccctgtttggtggccatgccatgatccataaaggttccactgtcccagcataattaataagagcaataacaataatgaaatagacatataacaatgccatgtacctatacttcttttccattttttttattctttctggagacaagaagacaccaaattgaatgcgaaatgaccttgttcgggtaattacactattcatcttcctaaatgattagtataatactacaatccgtgattcaaagggcaaatttaaaactatgtaagaagtatttcttgtattattattggaaaaacaaaaagtttttttgcatacaaatatatgggtcacattaaataaatggcaccttatgaaaagttgtgagaagagagtgataaaaatgattggaggaagaggataagataggcagatgtggatgactttataacaaggaacctaaacagagattgcttagaattgaggaagcaatgctaaaggccagtccatgttattttcatgtgagtaatgtccccttcccatgtgcatttaattctatgcctactctccttttagtggatacccctttttatttggctcttgtgcttttctcatatttttttagagggactaattttgtccttgaagaaagtcacactttttctttactatgcattatttggaactgaattttcctttttcattattcggcaatttcatgatcccatatttatatatatacaattataaatacattctgaaaagaaggaaaccactcaaaaggggtgaagaattgtgaaaagaagtgatgaagaagttgaatttgtaagctatatatgtgtgtatttatgaattaaaggtataccgtcagatctgtataattgatacaatagcttgttttattattagttaaaataattcaaataaaaacgaaaaatgttagacacaattaaccgatcaacaaaggaaaataatttggaaaaactaagttggaacaattttcactttctcgtattattaaaaaaaataataataaatttacggtattggtaattaattataaggaattattacataaaaaatataaattggcattttatttacaaaaatacctccataaggtgtggacagcatttatacctttggtgtgattttaattaccaaaatacctcttacactatcacttactaaatcagacgataattgcagggtggttgctgcgtgattgcgctgtggttgcatcagacgaaggtttcaattagacgatggttgcatggtggttggctggaggttgcatcagacgaaggtttcaatcagacaaaataactattagctaaatatttatgcaattgtaatgtaactataatgcaattgttatgaaacattaaaaagcagagcaatatctccacgtataagtaactctatctacatgtctctttatgatttaatatgaacaaatttaccattaaaaatttgcaaaacaacaaaaatacaccaggataaatattttattatagtattgatgtaattttttttggattatacttgagttggattgtttgggaactccaattcaactttttgagatctgccttatatggaactgaaaattgaagtcgcgacattagttttatgcaaattaaattggatttccaatttaattttagtttcgtacgtagtagtttttctgtactttttttcatgaatttgaaacagcgcttattttaattggttttggtcgtcttctcaggtgaagtcaccaaaattaatggtggttctctttctggttgaatttttatttcggttgtgttgggttgctacgtggttgcccgggaagcatggatcctgggttgaaagtatgtgtaagtggtatttgtgtagttgttttttttttttttattttggagtgtatatttgtctatttggccagttggaagtaattttgtaatattgttactttttcttggttgaaactgaaataagcccttttaataataaggatcaaaatttcttacaattttttattttgttttgcaaaattataaatatataataatatgtaacttcttaggtgataacatcacttttgctctcacttgtgagagtatttttacaaatttttgtttcccgagattttcgaaaacgaaataagataataagatctgaagaaacgataatcgacagagaaagtataataagggacacacaggtttttacgtagttggggcgttaacaagtcttagtccacgagtcacttttattcagtaatgtaaaacttataataatctctttagtacatagagcgtatattcgtattgttgggattttatgccctaaataaaacccattacaatctaatctgatttgttatcaataagagattagaagtgatttatgttaacatgtagtttttcatgtttatgttttaatatatgtacaaaatctgttaagtccagaacatatagtcattcacaattacagtgatgtcaacacagtggaatgtgattgtgattatatgattcgaaagacaaagtccatgtttcatcaatgcattggatttacactgatgtgataatcaacgatgaagt

SEQ ID NO: 227268 - DNA, 3690 bp, Cannabis indica
attattattttttgtaaaagaataagaggtactaatattcgtctataagccaatgatctttgtttcatattttctacttacattaccatatagctaattaacagaaatgatgtcatcatatatatatatatatatatatatgttctcatttctatagttttttttttttctgagttaattattactattgatcgtgctagaaaaagctagagcataccctcgtcaaaccaagatatatataattgaagctccattaattaattatatcaaattttaatcatagataaagccaaatgaattaggtgacaactagggtatataatcaattttgagatactgagtatataatatcttaattaaaacagcttaaattaaagggtatcatataatcttattatcagcacttggaaattattatttaatttctttatatattatatacacataatattaattaaatacatacatatcattggaaagagttgtgaaattcttacctttagaatctccttctgtcagatgaattatataattattaataactaatgtatattatatagatgatttatgcatggtagtactacaaaacattatcaaatattatattaattaacatataatattaacagacatgcattcagagaacttcgtaactagttaaaatattattatttcgtaaaacacattccaaactttagaaagaagctagcttatattatcatgtacatactactataataataaaatcccttaattaattaataaaaaactaatatatatattaattaataacaatcataataattataataataataataattaataacaatcatttctttctgtaatagtctgtctctttgccctagcattatgaagcttcccatggccttagtgatgtcttaattcagacatccaattaataaagacattaattgaatatatattaaatgagaagatgcttttgtaatctccatgcctaatcatggggctccctaagcttatcttatagtaccacccatatgagctgttctatatatacatatgaagtcaactatatattcttattaccctttccaaaattaaataaattaaatatttttattatttacaattaaaatgttttattccattcatcttttggagtacatgatatatttttatgttaagaaaaaaaaaaagtgcttgctttgctgtcaatattatttcttttttctcttccctctctttcatttagtcaattgtatgtatatgttgatttttcttgttttctttgcttttttgttttatctgaaataatgtaacattgaatattcattaaaaaaaaccataaatttggggtgattattattatatttattttgctttaatgatagcagaataaaattcatgggagttaatagtactacttcttattaattaattaattaattataattaacaagggttaccccagctaattgacatatttgataaaagtattttctcaatcaagtcatttttattttattattaagtgaccaattataaaaagccactctaccatgtatatatataataagttttcttcattttcttttaaagcttccatttttgggtgttgtgaatctctgtctcaaatgattgacttggtatctgaacatgaacatgatgttcatcaaagtaaaaatatttatttttactaattagctagctcgatcacattttgttttattattattattattattattattattattattattattattatgcttcttttcatataaattttttaatacaactcttttgtatagtacatatataattatctcaacacaccaattgcaaggccaacactgtacgaatgttgggctcttaaacacgtttcacaattatagccaagcaattttgctttgagtcgacatatctaatcctaatcgtccctagtaagttaaactagaaataattagaggtgatgaatatataatttaaattaaattttaattaatacaacttaactaattatatatacatatacacttggtctatatatatttgaaaacttaattacgatccgtaccctaaaactatatcatatgtccgtaaaatttagagggaaacaaagaatatttcaattataattagcaataatatatagcatagtaaataatgttaaatattatttaaaaatattaaaattgaaaattaagagaagaaaataggagttgtgtataggtatagcttaacttgcttgcaattttagaaaaggtccaccactaccacactacacaagcgccgacgacgacattaaaggggtcctagtcttagatgatatctctaattggtattagattatatttgagaaaatcttacaccatatatagccatatagtattttcaaacgtggacatggtaatcagggtcatctaattttacttgataaatattcactttttctcctatatattatagcatcgtggctaaagatgaacttattaccaaaactttcattaggttacttgggtaatattcatttttattcatgtatatatatactagtgaaaaagttgtgctaagcatgtgaaaaaaaaatgataaattatatttattatatgtaagtaaaataaatttttatttttcagactccttatgggtggagatcttaagcacggctattaactcttaaaaatctattttttttattggttcattcttgatattggacaaccacttcaaaattaagtaaagaaagccaaaattaaatttttgcatttagaattataaatttacatacaaataaatctacatatttatatatttatgcagagggtaggtcattccttatttcctctcaacttattgacaatgctttgccaactgaaattctcattgtaggattttatccttttaccctacaccaacaagaagccttttaatatcagtatcaaggtcaaaaacgacttttccaagtctaacttatgctttagacttaaacggcaccatttatccaacacgacaccaaaacctgtgtcgtttggatcccagagtttaaatactctgaagaagggtctagaaaccctaacactcaaacactcagcctttcactctcacgaatcgaaaccctcagagcaagttctctttgagaacttgctcgattccaagccagaaacccagaatcaaacccacacacccatagatttaggtttagacaaatggaaaacaagaaataaggaaagaaatcaccagattagtttcagagttcaccccaaaaatagggctacgtctctgtcaagctcgtctcagagattagcttgatatccactatgatcaaaggcaaaatacaatcgtttggagcttcctgtcacaagatctgatcaggtaaactcgattctttatttgtacaagttttatttgtttttccttctgatttttcttctcgatctaactctgtttctttgttgttgtgcatgtactcatcccttctgtctcctcaccatgagatctccattctcgaggttggatcttggagctgaagtcttcaaactagggttttctcttctctctctctctgtaatttttgatctgatttctgtgttgtagatctaggttatttgctttgctttatgctttttatattgtagtagagtcggttgatcaaggcttaagagttagttacaatttcagttgtaactaactactaagtct

SEQ ID NO: 227269 - DNA, 4581 bp, Cannabis indica
tttcggtttttatgaacacccctagacggtactccacaaaacgaagatactcaaccaggtggaacaactcagcgtcaagggaaagaacatcagaattctcataggacaaatacggctgagactcctcactcaaggggaggaaatgatggaggatttaaacaaactgaggagaaaatctcagaaagacgtagtaaggacgcttatgatcctactagatatgtgccattagtggaattaggaaaaagacaactccaacaacgattggctaaatcaaattggagaaatgcagagttagaatgcgaggctgcagttgcaagggctgcatagatcaatgcacctcctagccaaccaaacacatccactaggcaaccttggtggagacctagaggcttgaagaccatgagacatggagaaactccaagaggtgatagtcatgggaatcccacgaatccccaagacgaacaactagggtatacaagggatattccagtggatgaaggagacccctaaaatccaagaaatactgacaatagagaaactcgacccaacggtcctaaaacctcccacagaaacacaaatcgtgggaatgtgcaacctgagaacccagagtcatctcgcatgaacacagatgtcaagaaaacacgatctagggaccaagggttcacttagcacaatgcaaaggggtgtagggagatgacctgggtcaggcagtccaccaagacactcataaagaccaaactaaaatgatggagatagcacgtttacctacttgagtatgggacgtgtatcaaatctcttccaaagacgaagaccagtgcgagaggaaccgcaagagacatgatcaagtactggtcctagtgggttgagatcaaggacgcatggtcaaagtagatcaaccagaacccatggacgtgaaaggcaaacaaggagtggggaagatacacgttgccaatatcaagatgaacaagagagtatgagtaactgtcagagttaccagtctgaaagttactctagaacaaggtcggttagaaattacaaccaaagaaataaagggcgatgcgaccctgatcttcatgaacactaaaatcgtaggtgacccaactcacgcgagcatctgaaccgtaatgtcccagatctttaagattggctaaatcaaaacacagctcgttaacaacaagttgagcatagccagacatggatccaattcaactgagaataatttagttggacaataaattcaagcaataccaagatgggaaatatgggaaactgtcagggtatgattcagatgaggaggaagaaccttttcacctgatatacttaattcccaattcccttaaggattcaagaatccacatgtcgcataatatgacagaacaaccaacccagttgcatagttgaataattttgacactataatgcgagcaagtaatgtttccaacaacttgcgttgcatattattcctaacatctctaactggggcagcgagtaattggtttgataaattcaccaacgcctccattacctcatgaaagtagttatctgaagaatttaggaaacagttccaggtcgcgagagatagaaggtcagaggcatccttgttgacgaacatcaaacaacaaccaagagggtctttaaaggcttatataagttattttagtataggagcaacaaaagtaagaaatttaaacaatgcattcagttaacatcccttcaggctggaatattaatttgtcaaccgcaagaggcaaattgtgggatgatctgcaaggtcgcccagtcagaacaattaattaattcaatgataaagcattagtgttcatgcataaagaagaagcataaaacgagatgaagatgcttaaattaggcttgggaggtaaacacggctcgagtattgcaactgcaagtattgtaataacaaaagtgaggaattcgagccagaatgggttgaatggaaaaaggaaagatgaatcgaaagacccatcaaaggataacaagaaacaaaagaaacacgagaagtatgttccaatttactcaatttatacagagctaaatgagtctcgtgagaatatctatcccgcaaacgagaatcgggtggctttacaaagacccaaacctatgaagcactaaagaaataagcatgatccaaacaaatattatcaattccatagagacattggacataccattggagaatgtcactaattaaaggacgagattaaatgactcatttccctaggctatctaaggcagtatgtaagaaatagtgagaatgaacaaaacctgctcaataaccagtatcaaaactaaggtgtacaacctctctcagttgagggcgaggacatcctggttatttctagagggtcgcatctcgcaagaaatagcaatagtgctaaaaaaaaggtatataaaccaagttaaaaattaagaatcatcctttgcacaagagcccctcaagcgtgtgaagcctgaagaaccattaatagtcttcattgttgaagatgcagcaaatgtacggttcccacactcaggtcccctagttattacaattcaactcacaaataaaataataaaagaattctcgttgacaacaggagttcggccaatattctttacaaagagatactaaagaacatgggtctagaagaggccaaattaagaccgtgtatggtgaacttatgtggcttcacgggggatagtgttgcgagccttggcaccattgaactcccactaactatgggcgaaccaccatttttagcggctaaaatatgagaattcctaggggtagatatcccttcactatacaacatactaatgactcatcctgcactaacaggattgggggcagtaagttcgataaagcacttgtccttaaaattcccttatctttaaaagagtgagtttgaatcaacttgcccttatctttataaagcaataaatgtgtttaatcaactcacctcgaaaagtacaattagttaaaatattcaaactcattcttttaaagataaggctgagctatgaataataactaccaattgataagactggcgagatgaacgacctacgaagaaggctcatctcagaaagtacagaatacacaatagaatgacaatgcttggaaagagtggataatgaattatttaaagagcttgcaactcattgacccacatactcgtgagtatgttaagagactaagggtaacattgttagatttttatgccctaaatgaaacttatttcaatataatgagacttactaattaagaaaagatcataaattattttatggtgcatggttcacatgattactttcatgattatatgtttaatatataaattctattaaatcccgaatatatagttattcataattatagtgttgtctacacagtagaaaataatcatgattatatacttaaaactacttagtcccacgatttatcagtacactagatttacactgacgtgataatcagtgatgtgatttacttacacttgtataagtagaatgtcctttctaggtcattagcaaagtaaactagtattggatatatcgggtatacatcagaatgggccgatattgagagtgaaaaagatatcataaacttaccgttatgtcttttctaagtcaatatcacttagctgatcttaagtcagttgatctcaatcctgagatggctaagttctagcttaattgtactatacaagttctttgacttatttgttactagcttacccgtaggactagcccatacttacatcttgggaattcgatagtacagttgagttggagcattaatcataggtatggaatatatagcttttattaaaagtgaagcgatatatagttttcttagagcttggcttaacgcgataaatgatagagtgctcatttcaataattatattagtttactgaaatatcatttacaagtagctaagtgttttaaggataaaatatattaaagagtaaaacggtaaatttgtccctattcaatgtaaaccatctatagaggatcattgactatttaaattataacaatggataatataataacgtatctatatttgatatatagagtattctatgtaatcaggagtgcaagtctgaatctatagtagagttaggaggaattaataaattaagaaatttacttgataaattttgaatctacttattaggagctttgttacataggcctatgatccccacattaactaagataatattattttgtagtctcaattaattattttatttaatcaattagaattctaaataatgattatgtcttatgcataaattttactaaggaatggcataattgagaagaaaaagagaaataggggtttatttattaattaagacactttgtgggtttaattaataaacatatttaaatagtgttttatttgataattatttattattattaaattaaaatggatatttaaataattagaagagataagtggtaaaatagaaaaagacgttaaatgaagtaaagtggcataaatctaactctaaagcccatatgtaattaggccctaatagttgattcaacccatgtctttattttaag

SEQ ID NO: 227270 - DNA, 3682 bp, Cannabis indica
ttacaaaataatgtcaatagaaaggtgaaacttagttcttataaataaaaatatgtctatgtgggacattagcaaatacacaacaacttcactttctttaccaaaataaagagttagagaacaaagacatcaaaaatcacatccaaattgtatatatatacataccacatgtaatagtctatagatatagacatagatatttatgtgggaggtgtaggcctaaactcaattccctccaaaatgaggccagaccaagaagtagcacaactaacctctttgagagtacacaacactaaatcatgatcaccaccttcattgaagaattgacccattttaatctccttccatccatctcctctatcttgagaaattagggtcatgttgttgatgttgtttctagaaggaggttttaagaacacattaaaaccctccatttcttctcttccttctaattgaatacgaagctcaactggtcttctatcgaaattgtactgatgttcttcaagcttgaacacaaggtaagctgtgtatgttgtttttggggatagaatttttgtctccaactttgctgacacatgaagccaccatacaacattgagtagtgccacttcagggaacctgtacacaatccataataatgttgtacataattagacattttcaaaattttgaaatatgagttgagtgagattcattgatgagaatttagacttatgttcttctctacaaataaaattgtttgaattgatacttattttagttgtaaatgaatgggagagaaatggagaagattttgacagaatttcacataaaaagaaaaaatccaaagggcattactatcctgacaatttaggggtatttattagaccacatttaatgattttaagcctatctaaattcgattcaattatatattagatgttagatttattattctattcgatccaattaattttagtcatctaatagatgttgacttggaccggtttcattcactggatgtattttatgtatatttattagtttaatttggatttatctaatattttaaacttagtatttattgaatcggatcggatccttctaaaattttagatctaatagctatttgattgaattggattcatccaataaaaaaaattaatgttaatttttatgtatacatatattttatttacgtttaataatataaaatttaattactcattcaaattaaatgaaaatattatttagtttgattggatataggatgtattgaatttcagacaccccacccaacatttgatccgatctaattagatattaaaagataacatccaatctaatccgatcacaattgaatatttaatgtttggtggtcaactgtaattggattgatcagttgtcattagattgaatcaatttatacacatccctacctaagatattatacttttgttagtgtaattaagtatcaggtcaaacatattttaatttaataataattataataaatctaaaactatttgtaagacatgaccttaacgttagtactattagtagtaatactcaaaatgaaattgtgagtagacattttcaaacttttgaaatatgagtagtgagattcataaataattaaaattgagtagtgccaccatacaatattgagtagtgtcactttagggaacctgcacacactccataataatgttggcatataataagacaatgtcaaaattttgaaatatgtgagattgtagagtttatgttgttatctacaatcaaaatgtcttaagagagaattgttaaaaaaaataaataaataaataaaaatgtctaagggagaagatattgagagtttcacaaaaaaatgtataaataaccaccaccttctaaaagtgaatataatgaacttcataacattggcttgctaataaagaatccaactagaactataactataatatagacaaagtagcaatatattattataaatagaaaaatgatgtcattagtgcctaacatcaataggaagtgtcatactgctactgctaatggggtagttaaatattttagattttatatattttaatataatagttagattcaatttgaggtaagatccaataaatccaattttctagttattcctctcttctcgagaatctatactttgttagtatatgacaagaacataataagtttagattcgccatcacgtgatgttttggactctagatttttttaactttacattagaattctaagcctaactattaaacacataagctacaagttaagagatcttattatgagaccattcattggtgtttggtacttgagattatcacaatcaataaccacactaatgtactacctataatgtgtggtgtagttgtaaaaattcttttcaaacaaccttctttgctcagattaagagtttgaatctcattatgactcttatgactcttatggtgagaaattacacttgtccttgaaggccagcttgccagcttattgtggtggggccatcattggaatgaaaacccttataggtggtaatgatgacttaattaaaataagaagatataaaaaatttttaaccattttttcaaatcaacatgcacattgcggttttttcaattttttaaattatacccgcactgtaaaattaaaaatggtaaaaaccgtaccgtaaaaaatagtgcagtttctacagtttgaactatcaccaaataattaaattatcacaaaaacaataaattttgaacaacatttgtcagaaatttcttaagacttgaaaataaatataaaaaaaagttttaagtttcaataatacaatagtagactttggattgggccttcacgtattggacttaaataaatataaaaattggtgtttttataatatgttgtgtggtgcggtgtagtttgaaccgcatattaacaattcaaaactaccaaccgcaccacaccgccatatttaggaaaattcaaaccgcaatcgcgctgtaaaaaatttcaaaccgtatttttttgcggtgcggtgcggacggtttaagaggtaacaaccctaaatataaagtccctataactatcatatgattcctaggatggggtaggaaagagatctaaatgtgatccttttttttttataaataaataaataatttagtgtcaatgtgacaatgcttttataattcaaatcataattatgagactaatcaccaaccaaactagaaaataaattataattattcaaatgcttttcttcttcagatgcttttaatattggaatcataattatcagacttactgaaattattatgagagaaaatcaataagagtgaaaaagaagattaattacctagattcaggtaaagatatccatctccaataatgaggcttatcaccccatataatctcaagctttctacctccaaccataaaacacttcttcccactttctctatcaatccaaaagctctgtctcaaaacaatcacaattaattaattaattaattaaggggttttttcatttttacattttaaaatagatttttttttgcatttttacggaaatttaagtataaacccctatcgcaactagtgctgcaacctaaattgcaacaaaaaatcgtataaaaactcctactgcaactagcgcgacaatcacttttgaaacacaaaccgtaaatttgaa

SEQ ID NO: 227271 - DNA, 8920 bp, Cannabis indica
ggccctcaaacccgggacaagtttacatttgaggatatgttatgtttccaaaaggtgattagattagatgttcgatgcaaatattttacatttatttaagttttttaaacatcataaagatgtaaaaaaattcccacttttttttttacttttatacaggattctataccaacgtctatgcttaaaataaatactgacctgatcagcaaagcaactaagatgttccaaattatcttgaagtacatgggagctgatccatctgaccgacttactccaacaagcctagatgaacggatagagcttgtcggaaaactatacaagcaaacattgaagcgaatagagcttcgagatgagttatttgttcagctatcaaaacaaactaggaacaatcctgagaggtatgcctatctatatatctaaaaatgcatatttcggcttatttatatgtttcttaggttttagtagctgtagattaatatttccattcttcatttttgttctaattgattttggttaccaggcaatacttgattaaagcatgggagctgatgtatttgtgtgcctcctcaatgccccctagcaaggacattggtgcttatttatcagagtatgttcataatgtagcacatggtgtaaatactgactccgaagttcgagttctagctttaaacactttgaatgctttgaagcgttctgttaaggctggtcctaggcaaactataccaggacgtgaggagattgaagctctattaactggtcgaaagcttacaactatagtgttctttttggatgaaacttttgaagaaatcacttatgacatggcaacaacagtagttgatgctgttgaggtaatacttttacttgcatttgcacctagtatgttgctttgaaaaattagacagaaaacaatcagattagtgtatagaaatagagtattaggcatatgctagaacatttgtcctaccaataggatgaacactagatgtttaggtcaattggataaatacatgaaaaggtaaaagatagttcaataaattcctcagaaccttgtaattgctaaattgtcacatgttttggtgtatagttcatttgccgcatcaacaacattcgtgatcaaattactagtagttatggcatacactatggatgtataggtggtttagctttctttgcaacttaagttgcattgcatcaagtattatatgtatggaattttcgcaagctgcctgatgatggtgcaatttaaatttcatgaattaaatattcctttttcttctatttcttttaatttttttactcagttgctcttagtaatgactaactaaattcatatataattaggaacttgccgggataatcaaattgtcagcattctccagctttagtctatttgaatgtcgtaaagttgtaacgggctcgaaatcacctgattctggaaatggtatttctatatccacttgactcgattcttttcaacaattcatattcatacaatcattcatcttatatagaatttgatcccatccatgcagaggaatatatagggttagatgacaacaaatatattggggacctattggcagaattcaaagttgcaaaggatcgaagtaaaggagaaatactgcattgcaagctgacatttaagaaaaaactgtttagagaatcggatgaagctgtagcagatccaatgtttatacagctgtcatatgtacaagtatgttgtttaagcaaacttactattttcctgcttgaaccataaaactcaggtgtgtgctctatgtatagtaaacaaatgaaagaaaggatcactgttaatgaaattcaaggtgcaataaagaacctttaagtgtgaaatatgtgaatgcaatatttcatttgttgataatgatattagctttgacctctaaaattatacttgtttttcttttttacagttgcaacatgactatatatcaggcaactatcccgtaggaagagacgatgcagcacagttgtctgcattgcaaatcttggttgaaattggatttattggcactcctgagtcatgcacgtcagtatttgttgtgtttatctcttgtttaatttgtaattgcttttctttttcgtttaattaactcttccatgagaagaaataaataggacttgcttttacctttcccagtgattggaattcgcttttagaaagatttctaccgagacaaattgcaataacacgagcaaaacgagagtgggaattggatattctttctcgttaccgttcaatggtaagacaactctaatattctttgtgaatggataactagttgtacttataagtcaatctttgtttacctctgatctctaagctagagtatattctgatgtcaacattgcacttatgtcatgaatgtataagtatgcatctcattcatgttatttcatattttataggaacacttgacgaaagatgatgcaagacaacaatttttgcgaatattgaaaacacttccctatggaaattcagttttcttcagtgttcggaagattgatgatcctatcggacttttgccgggtcggattattttgggcatcaataagaggggtgtaagtattgcattttgaacttgtatgaaaccataagattactacaatacatagcatcatttatgtatcctttcacaggttcattttttccgtccagttcccaaagaatatttacattcagcagagttaagagacataatgcaatttggaagtagcaatactgctgttttctttaaaatgagagttgcaggcgttcttcacatatttcagtttgagacaaagcaggtctaaacacatctccaattatttattggttgtagtttttaaacatttttttttcattattttatgtcagttttcatttttcttgctccatgtagggagaagaaatttgtgttgctcttcaaacacatataaatgatgtcatgttgcgtcgctattctaaagcaaggtctgctgctagtggttcaacaaatggcgatctttctaacattttaaaccgtctagttctagtgcggaagtgtacgagaaacgggttcaggatttatcaaaatctgttgaagaatcccaaaggaatgttgatcaggtatctttcaaagaagctcaaatggtggctacttaaattgttattggattaggctacaatcagtgacattgtcaagaatacactgaaaatgccctctattggcttttttcttttacttgatcttaagttttactaagataacacgccatagacattatagttcatgatttcttgtgtgatggtatgtataccttataaagtttctaggcaacttctctcattccctaaagctaattcatgttgattaaaaaaaaatttcttgtgttgagtaaaccttgttctgtttgctatcttaactgtttcaacatctatatgaaggatttgcaatgccaattataatttaaataaattatcatatttatacagctgcaacaagaattacttgaaaaggaaagtgaggcagctaaattacgagaagagttgggggatttagaagtgtccttgagatctgagaagcaaaccttgggagaagttacatctgaacgcaataggctatcatcgatgtgtgaggaaaaagacatggctctccaagtaagtaaaactaagattgcatgatattactctaaaatgatatttataatcgcaagcattgaagtctaaaatcttcctataataccttggcttaccaaactcttctaacaagattttgataattattgtggaactcattaggctatggtgttagagaaaagaaacatggaagcaaggttagcaaagttgagtgatgcagtgttggagaacagacaaaaaaggatgcagttggtgcaaataaccaggtaaaatttggtggatatatttttattattattcagttggaaaaagtacctctagttaatacttttatatttttgcaggcactatacaagattcaagatgagttaaaacttcgaagtgaggagttgcatgttgcggaagaaactataaagaggttgaaagatgaaaagaaattgctggagcaaaggatatttgcacttgagaaaaagaaagttgaagaggtaactttccactaaagtggagcttcttttgatacgcctgttaaatataatattttagttaggaaactatatttgaacatatattataaaataatattgttcaaatatattataatagtaaaacatagttaaaccaacaacataccatctcataggcattaagtaagtatatttgcatataaggttgataatagttgttaattacagatgcagttgcttgagaaaagatttgaacaacagcgcaaattgttagaatctcaagtatttgaccttgaaaaaaagcttgatggagtcacacaagagttagctatttccaaatcaactcttgcagctaggaactctgatttggctacaatacaaaataatttaaaagagctcgaggaattgagagaaatgaaagaggtgagtacttgcactgaatcggtaatctttagtagttggtattctttacatgagttttggtgcatgcataaacatatgtattttcctaatattatttggtttgttcttcttaatcacatttaggacattgatagaaagaatgagcaaactgcttcaatattgagaatgcaaggggttcaactcgctgaaatggaagttttatacaaggaagaacaacttttaaggaagcgttattttaatactattgaaggttgggttgttttttcttcaaatatttactttttaaagtaaaaaattgtgttttcatttgaaaaattgattttttcttcttcttctcgtggtacatttcagatatgaaaggcaagattagagttttttgtagattaagacctcttagtgagaaggagatagttgaaaaagaaagaaacgtgattatggccttagatgagtttactgttgaacatccatggaaggatgataaactgaagcaacatacatatgatcgtatttttgatggcaatgctacacaagaagatgtgtttgaagatacaagggcaagtttgattcataaaattaaattgcttacaaaagaagatcttactctttcaagttcgcttctaatttatttgtatttttaacatgtttttattttgttttactgttacagtatttggtgcaatctgctgtggatggatacaatgtgtgcatatttgcatatggtcaaactgggtcaggaaaaacatttacaatatatggatctgagacaaattctggactcaccccacgagccatagcagaattgtttaaaatcttaaagcgagatggcaacaaattctctttttcattgaaggttattttaaaactaaatttgttagcaaattttaatttaaaatatgttgaatttaatatcattcctaatttctatgcaggcttatatggttgagttgtatcaagatacacttgtagatctattattgcctaaaaatgtgaaacgctcaaaattggaaatcaagaaagattcaaaggttttctttttttcatattctgttgctatgttgtacaaaatacaaatgcagtatgtgacagtttaactcaatgcttaattgattcatgatgatattagggaatggtgtcggttgaaaatgtgacagttgtatcaatttctaactatgatgaattaagtaccatcattcatgaaggctctgaacgaagacacacgtctgggactcaaatgaacgaggaaagttcaagatctcacctcatactttcaattgttattgaaagtactaaccttcaaactcagtctatggcaagaggaaaggtatgaatgtgtttcccgaatcatagcgaatgaagaatctgtgttctttcatgcgttttagttatctcatggaattgtaccagtagtatttaaattaatgttttcttgtttagttgagctttgtggatcttgctgggtcagaaagggtgaaaaagtcaggatcatcaggtagtcaacttaaagaagctcaaagcatcaacaagtcactttcagccttgggagatgtcattagtgctttatcaactggtggtcagcacataccataccgaaaccacaaattaacaatgctaatgagtgactcactcggtggaaatgccaaaacgcttatgttcgttaatgtatctccagctgaatcaaatttggacgagacatacaattcgctcatgtatgttttaccctatctctgctttctcttccataactataatatcattttgctattttgatattgatatttgcttgcttgatggttggggacattaaatcaggtatgcttccagagtgaggtcaatagtaaacgacccaagcaaaaatgtttcatcaaaagaggtagcccggttgaaaaagttggttgcatattggaaagaacaagcaggtaaaaggggtgacgatgaagagttggaagaaattcaagacgaaagaccaaccaaagacaaagcggatggccggcattctatgtaatcttttctcttttttttttttgtttgtattaaagtaatggcacaaacattgtaggtttagccaagcaatcggttgcttggcaatggcagtgtttttggatgaagagagcagggttattagatataggtgaattatatggcaatgaaggatagctcggctagcatttcataatagaatagttgactattgtttgtttgtttgattgttctccttcatgcatattcttaggatgtaatgtatagctgaatttgaattgcgtgtatatataaagcttcactctaccgtttcaactttcaactagaattggtgcatacacaaatgatgtttgttctgaagatattctgtacaacttgggatggggctaacatgatgttattttgtttgaaaacaaaaaaagcaatccaagtgtttacttacttgattatcttaccactatctgaaatgtgaaatgttgttgcttatcttgtttgcaacaaataaataaatgattggtgaaatgaaaattggatgagtatgcaattatgttaaaacaaacacagactacataatgatatgttaaaactaattacatttatttatactatgttaaaactaatgatatcttaaaacacagactactctttttaatgtgtaatatttagatgtaatttgtaggtgcaattactcgtttatattacataaaattcataaatgtgagaccccacccctattgggctattgagtagatacaataataatatgtttcaataataaaaagaagagcgtgtggagagttaagagttcccacagagtatggagataatgacaagaaagaatgaggataaggtagattaatgtcatttaatgaatgaatgtgtatgacactatgagaaaaatcatagcaataataacaaactccattctattattttatgttgggattaggattgggaagaagaaagaattaataggcaagtgtagttgttgttgttcttatagctaaattgataattgaatttgatggagcaaaatgaagagagttggagtaggagttcatgttcagcacttgctattctcccacgtttggatcggttagatcgtctggtaaagctgactcctctttattactctactatgaatttgatcaattaaccatatcttcttcttcttcaactactacttattgtttgtttttgtgtaacatatgatataattaataggtgaaattactggatgagaagagtagagtaataagaggaggaggatgctgcagcattaatattagtgatcaaacacaaaaccatattaagaagacttctctgtggtgtgcactggatgaagttgttcacaaaggcagtgtaatggatcgactccttatgcttgagaaacgactattaaaggtttagatacgttcattcatttgatgcatgctattattatatatacttaattaagtagttgaagttgttattttgttttagttgtgggtggaagtggagattaaagtgaatgagatggagcaaggaaataacagcaacagtactactactgagataaatgagacagataagaagaagaagaagagcaaaagaagaagaatacaagattacaatagacacttgggattgagaaagtggtttccattttcaaagggattctaatactactactactactactactactactagactttgatgttatgttgatcatgatcttttaaaatgaaggagatgaaggagatgatgaaatgaaagatgttcaaatactcagttctactgagtagttaagttatgatgttcacccaccatcttctttccctttatttattgtttgttattaataataaatagagcacctccctcaatcttatcattttcattactcaattcaatgctcacctcaccacctccacctcttctttaaatctttatgatatgatatgatacgatatgatttcttatcaaatttttattaatttaataatcactactacttctatctaactataactaacctcatgtttcacatctcccatttaatcatttatttaataatcatatcattattctcaagtcatcgtggttggttgatatgataatacttaatttagtagttaaaataaaaataaatgataaatataatataggttaattatgattttttttcttgaattttgacatgtactaaattatgtcgtttgaattttttaatctggtaaaaaacccggcttaaattattgacattgttagatttaaggattgttgtccaacttcattcaattttactaattttggtgattatttatgtattaaattatgctccatatctactaaattatatacctttaacatgtattaaatcatatatctaaattttgatttatgttagaatttctttattaaaattggacaaaaaattttaaatcgtcaa

SEQ ID NO: 227272 - DNA, 1865 bp, Cannabis indica
tctggctagccgaagcaaaccaaatgaagaggcacttgaccccacatttcgaaatcccagcaggctcattcactgtcttcacactcctcgcactaacactatgggtggccttatacgacagagtcatagtcccacttctcttgaaacgcagcccaaaacaactccaccaacccgggttgggctacaaactgaggatgggcattggtttggccatctcttgcctggccaccgcagtggctgccatagtcgagaaaaagaggagagaacatgcactcaatggagagatcatatcagccatgtggcttgtgcctcagtacagcttagttgggttagctgaggcttttaatgcaattgggcagatagagttttactattctcagttccctaaaagcatgtctagtattgctgtgtcacttttcacacttgggatgtgttatgggaacttgcttggggctcttatagtgaagattgtggagagttgtactgaaaactttaatggtgaaggagtgagttggctccctgataatctcaacaagggtcgattggaccagtactattggctgctcactctcttcggttttgtcaatctgctgtactatattttgtgtagttgggcttatggaccttgtgagaatagacagatatgggaagaggaggaggaagaacaagaatatgtgtccaaatctaaggagtcatattcctttgcagcttgatctagctattaatgtatgatgaattatttatattatggtgattatggtcttgccacagataattaacggaccaatttgaatattaatagaaatatatattataaaccgataataagttctattatgagtaatgctagacactagaaacatatttaattacacattttttataatttgatgtgtatttagttttagttatacatagttttaagtgagaaacatgtcatgttttattgtatgttaaaacgtaaaagtagttggacaccattctgtgtaaaaaaaataaatacaattttggtaataaatggaccgaaaaaaccgaaaccgaccgttatacatatatattaatttattaagttttttttatttaattattgtagttagtaataatatataataatatattattattttttaaatattaaagttaaaaataagataatttatttttgaataattaatttgtatgtttgtagcagtaaaatttaaaataatgtatttatagaataaattggatcatattttaaaggaaaaagaaaagttcagttcggacggtttaaaccgaccaaactgagattcaaagcaatcagttttaaaataggttctggattgatcggtcggttttcgaattgcaccaattcacaccaaaaatcaaattttagatttttatataaaaaaactaaccaaaccgaccgatgttgagccttaagtgtgcttataatttttttggaaacatctcaagtaggcactctttgaaaggatgttaagtagaccctccatttggtgtatatgtgattagttgagaatgaagtccacgttgtatacacggtaaagtgtgttgcagcagtgttaacagtagactctttgtctattttgatatttaaaagagcttttaatttttttaaaaacttgtacatttaattatttataatcaccagaaattttaaaaaatttatcacaacaaaaataaagtttaaatattttgttacatctataattaatttttcttatttaattttatttttgacactgtaaattatttaaaattttctaaaattttaccagctttgcaaatattcctacttattacaccaagctgtaattaaagtcgcaaatatatatatataaaaaacgcaagtacccgtgtactgc

SEQ ID NO: 227273 - DNA, 2102 bp, Cannabis indica
tattttttttttactatgctagtatattatttttttttatagtggtatagtaagttaggattggggtatatttttatacaatccaaattttattattttattttgccgaatgttaaatttttgtacacaaaatgtatatactataatgcaaaatgtatataccacaaactaaaaattaatattccatcattttttttatcttagtataaataattaatatatcataacttttctctctctaagttaacatgaaatatataaatcatattcatatataaaaagtgaacagccaaattcagtttataaaaagtgaacagccaaattcagtttataaatcatattcagtttattgtatatcaacacttgttaataaaaagtgaatagccaaattcattcaatagaatatatatacccatccattacagtatataacatactccaactataattgaaaaataaactgatgtaccacaatatgataataccttatgtatagtcaagggtatttaaggtagcaaaaagtaaaatagaacatttactttattattctaaaaataaggagacattagcttttactagagagaaaaataaagctatttactagcatttctctaaatttgtacgcgttgttacggattgcatggtgtaaagctatgtatataatgtgatatgataataataagattatttatatatggccacatcccttcactatctgtagtttatgataagttggtctcttttttttttttttttgtaagttgatctcttaattttaatttttaggcaattattcctccaccgttagtaattaatggtagtctggagaactataatacatttttttgcatcataattaaaagttgtttaaaaaatatatataaaattattttttgagaataattagacatgtttagccttatttttaaaaacagtttcagaaaataaagttacacaaaataagaatattgctaacaacaaaatattgttttctttttaaaaaataattcactttttatcaacattttttctccactctatctcacatcatttttctcatcactttcttatattattatctctctaatcactttcctttcatcattttctcacattagtttttctctcctcgctctctctcctcagtctctctcaccacttcctctctcatcattttcccacattattttctctcatcttttctcacatcattttcgctctccctatttttctctcaccactttctctctcatccttttgtccatcatttcctctcccactaatttctcacattatttctctgtcatcactttctcacattattttatctcccattacttactctctcaaggtcaaggtctggggccggggtctagattaggattagagctggggttggggtcggggccgaggtccaggatttagggtcggggttcatgttccgaggccaggttgggattaggcatctaggttagggtctgaggtctagggtttgaggtttggatctgggatccatgtttggggctcagtctggaacttattttaccaggatattaatttactaacatgtttgttgattataaacaatatactctaacatcctaaaatataaaattcataaaacgataataaacaccttaaagattaggattacttacaaaaatagtagcataatataatgactcctttaattcagtactctaacccttgaatcatttccgtagtagagtatcaccaagtaatgaacctggattacttccttaatataacaaacaatttcttttgcagagtcttccacacagatctatgtattaccttgaattgtgtggccaattactcaatactataagacccaaaaatttgagagtgaaagagagaaagagaactcaaaattactttagagaaaagaaggctttttccgatttagtttttgttattttggcagacaaacactgttatgtgttacaaagccttaacattccttttatatggtcactttcagggttaaagtaagaatagaatgggctttaggaaaagataatgactctcaaaatcaatcccttgtccgaaaccctccataggcccaaatagatttgtgtttt

SEQ ID NO: 227274 - DNA, 8846 bp, Cannabis indica
attgtgtgagttttatattatatactgtgttaagttttcttatttattctacgattattttttagttgctctactattaattataattgttctgtttggttgtttacggttattttagattgttttataaaaagatgttatttttgtaaaaaaatttgtgtaacagtaaaatgtaaatttttactcaaaatttagtatttttgtaaaactctcttttttgggggtgtaatagatggaatcaaatgaagaaggttcaaatctttggaattctcttaatacccttttggacaatacttttagctgttattcgtaattttgaatgggcgacacgtaaattctaacggacacctaccataggtaacggtcaactaatcggcccatctaccgagaacagttaaaactggatggttggtccagttctcatctcactcttcagcagtaaattcggacaacaaatcccaaataaaaagagacaaaaagcatgtaaagttaaggaggatgccctcaatgtcaggggtcatccgagtacagaattcgaaaggatgtttcggatagtttactattctaaaggtcacctacgtggcacacttctaacacgatccttaaaaatctagcgacctttcccctttgttagaacttggaaaagcacacggcaaagaggaaattacctttttgggtgaaaaccactactccaacaacagctcgcgtttcaactgtcattatcaatagtactattgtgtataacagacaacgtattagaattatgtctcccctactcggcccaatagctcaaactataatataaaataagtgtattttactccatcaattgactttattgtacaaatcctaatgggacctaaatccattaaacatatgtgcctataaatatggctcaatttttcatagtaagggtttgaattcttttagttcacaaccagaaagcacagtaaaaaattataaaatttgttgtgtgccgaagcaataaacaacaatatattacagtagtaaaaaataaaagacacaaaattacgtagttcaataattctcctactctacaagagtcagctgatattattgaattcagtaggaaatatacaaagtacaaatacaaatttccacactaataatatattttaagtgtttttccaagctcactaaaaatacactcacaaagtatttttctctcccatgagtttggctatacaaatgttctctctcatatttccttcaaccttgaactaatttaaaatactcttcaaagagctttatatttataaatattgtgataaattcaacacataaatatacgtatcgttttgacaagtaatactcatgtaagtgagactgttcccatgagaactgtagctaagtatcaatcaattgcattcttgtttccatttggcaattgaataaataaattttgaaactaaataatctaagtaaaaaataaataacaaaacaacaagcaatttttaatcaagaatgaaatataggaaaattaactttaattgcatccaattcctatttcaataatgcaaatcaattttcttcttctacctagtatggtagcagattatattttcaccaaaattcattttagacatcaaggtactaaatttcaaggataattattgcatctctgatacaattatattagcaatatgcattaagcaataacccaaaaactacacaagccacacaaatatttttgtttatcgaaacctatgtttattttagattttgtattgagatcataaatcatgaataagatggctagtcaaacacatgtaataagtacaattatgaataaatcatacatctataaaaaaaaaaatcaaaattcttaaattagaatttagctaacaatctccataaaaaacattcataatcaaattcgtagaaaacataataaaacccaaaaataaaatgagaaaaaaagttttaagaagtctccccccctgaagtttgcaattttcttctttaaaaagaagccctcagactattttttgcaaaaattcccaaaatgcccttaaaaagctaaaatgtttgcaattcactgtgcatcgctgggaactaataaaaaatgtcaatctcctctatagtggggtgtcgagacgcaatatttgggcgatgtggcactaattccaacaacgtgcacaattttttattttgaaatcctcctacaatgactgatggtattttgactataattttatcaatattcctcagaattaaattattcaagatgttttgaaaagtttaagaaaatatctagaactttcattcacaacattttcactgaaagtgaacacatcataatcaaaaaaattagcctgaagctttagagttaattttcaatcacaagtggaatatgttgagcattcaaaacttataaattttcatccattatatcctagaacacaaaattccatgataagttcatcatattcatttaatttaacacgtttcttcttattttcaattcataatatggattttaccatttaaacctgaaacaagaaaaataagtataattttgttctaaaaatatgtattctcataaagaaaagagagattaaaacacttaaaaagtaggctaaaaactagcctaacaatagaaaaaaataatcatctccaaattatatgtaattaatgagaagtaattcatttttcaatcatatgtaattaatgagagttagctcagctctcaaccatatgtaaatgaaatgagcataaatcaacagttattacataacttcattaactaacatgacaaataataagttcaaaatgtcttaattattgaattatatatttggagcttcaaactaatttgacttttgagccaaattcaacaaaaactccattgccaagagcttataaaactatctcgtaaactaaaattcattatagccccaatcaaataaaaatcatgtattgtctttttcatcttagttttggtagcatattttttttaatataatcgatttccaaaagactctctaaacattaactatgaaacttttaaattgaacatgaattttttttatacaatgtttggattttcttatttttgtctcccatgcccttttaatcaaaattattgaggtcttgttaaaattggaactagattgattgtcccccattggaaattatgctttgattaaatataagttcatatgtgttagtctatcttaaggtttacttatgtaaactgattatttatcattggataataaagtgtggactgtggtttttgaatttattgaggaggtaaattagaaatagtaagggctaataacctagtcttagttattttaaatatgtatatcatcaatcacttcttttcatatatttgtctctcttcaatatgcataaatgttcactatgcaacttcattacaaaaatacaacacgcaataaaaaaatgaaatcaatgtgcacttaaatagaggccattaaattatatcttttaacaacaaaaacaaagtaataatactatcatacattataccatatgggtcctagttaacatcatccacactactcactcatatcttcaactcaccaaactttcctagggcccataagcccaagaacttcttcccaaagcccaacacttccaacactcgcaagcccaacaacatttgggctacaagcagccacagtccaataaccagctttaatttcatctctcaattgctctttctcccaaccacagtacccatcaaaaaatctaaattcctcaagcccaaccatatccctcttgaccatttcagaggcacaacccacagtctctttcgtcccataatacaaccctttcataacttcatcaaacacaccactcttccccaccacgtcatcaccctttccttgtgggcttaccaaaaacaggccttcctctaaaggcccaccaaagaacaaaggcctatcagagaacgtgccagcaatatccaaggccgtggaccttgtctccttaatggacataagagaaggcctgtttagaataatccctgatgggcctaaaggcccagtagccaagagcaaaatgaccgtacgctcaaagatgtggaccccatcgagcttttccgttgctatgagtaggcaacccttttcgggctcatgaatagtgtgggcccatttatcaccgatgttgatcgacggtggaggatccaccaccgcgtcgagatcgacggacgaggaagcttcctctgcttgttgaggcctaacaacttgttctccggcgaccagtttcgctctaaatgatctccaatcgggatcgatcatcggcttcttatcatcatcggacggtggatacgatcccggtaagcaacctaaagttcaaatttttagaatcaatcaatcaaatcaaagaaaaatacagttttttttatatactaaattatgaaagtaaatagaaattacatgatatggaattggaattctgatttccaagtttcctgtaatgaatttgagtagaaattttcttggagaaattgagaattttgggcctgattgaagggggtaattctagggttttggtgaaggaattggttgtgaataaacaagcttccattttttttttcctctctctgaattgaatttcagataaagaatgattatttttttgggcaatggataaagtagtagttgggggtagatatttatagtaagtaaagggagtcaatatacaccacatggtgtgttgttgaagaagcccatccatggtccttggtattgatattgaaactttactttttaagccctaaatgacaaagtatgggccagtggatatgactgttgacgtggcagtgccaagaggtaccacgtcagctagagaattttcttctctttcttttggatattggatcaatcagacccttttagataaaaaaattcctaaatgcaccaataataccattagaggtatcacattgttatttgttattagtgttatataattattataaaaaaaaattgctaattatatgatagtgttgtctttagcaagcattttagatctgggcaaaacaaaattgattaacaaaggaataatgagcttttaaagtatcatttcccataaatgagcttaaaaatttcagctacaactatggaatacttatattctccattgggtgccaaatagacctaatccttagagcaaacagattgccctaatactacacaacattcttattttctctttcaaacaatttaatcaactatgctgtatttttgctaatggtaataaaagacaaacaagcttgatatggagaatgaaagacctcacatacatatatatggatgtcattacggcaatcattcctctatatatcaaaaataagtagttaaaaagagttcaattatcttttttttggacaatttgagaataccattttcttcaagtgcttttaatttaaatcatgagtggtgtactgtaaactagatctttgcaagcaatttagtctttttttttttgaaatgcaagcaatttagtttttaaacattgataagatatgcaaattgtcatgattcaaaacagggaacaaaaactaaccagagattgtagtagtagatactaataacctgagttaagtagaattttttgcggagctttaatatctggaagaacaaaaaaatagttgaatcttgagtcataagctatacttttaagtatacaaaaagaattactacagaatcagttgcctttttcttcttgccttaataataaagaataataccattcttttgcctattggtacaaactacaggaagagaatttgttttggaaatttgcaatggaacattctttaatgcaaagctatcttgtatgttgccactagatgcattctaaagcaccttctattgcctatgttatttttggaaatatccgattcgcttaagatcttgactcaacctgccaatcatctgataaatcttatcagattgaggatgtgattcatcaaatacagtgaattcatggacctcatcatccacctctatggaacttgcccctgaacgtttttggatacctgtactccgcattagcagcctcatattggcaacactgtcccaatcaccagctgcagcataaatatttgacaacatggagaagtttccaggatctgatggctctaatttaaccaggcgatcgagaacctctctagcaagattcacatcattatgtactcggcaagctcccaaaagggtaccccagatgaccgcatttggctctaacgacatgctattcacgagatcaaaggcttcattgagacgtcccccacgtcccagaaggtcaattacacaaccatagtgctcaacctggggaactattccgtactcactttccattgagtgaaagaatcgaaggccttcctcaacaagtcctgcatgagtgcaggcacagaggacagcaatgaatgtaaccggatctggcttaagtctttcttcctttttcaattcagaaaaaagatgaagcgctttctcaccgtgaccatggatagccaaaccatgaagcatggcattccatgataccaaatctttattcgttatcctactaaagacttcatatgctttgttcaaactaccacactttgcatacatatcaaccagagaattagatacttgaacactacacttgtatctatttctcttaattgaagcatgaactttctcacccaaaccaagtaaaccagactcagcacaagcagccataatactaattattgtcccctcatcaggcttcaacccaactttctccatttcatcatacaaactagtggcctcctttgccaatcccttttcagcatagccagctattataatagtccaagtaaccaagttcttaacaggcatcttatcaaacaacatcctcgccatttccatatccccagctttactatatccagcaacaattatcgaccacgaaaccacattcctctccggcatcttctgaaaaaactcaaacgcctcattcatcagcctagccttactgtaaccatccaacatagtattccaagtaactaaatctctctcaggcatttcatcaaacaactggcgcgcctcacccaactcgcccactttcaccaacccaccaatgatggaattccaagaaacaacatccctaactcccatggcattgaaaaccttcttagcttcactaacaccaagaggaccacacttacagtagcaatcaataagcgagttgggcacaaatatatctgaactaaaaccaaatttctcaatatggttatgtatcatttgaaccacaggcaaccaattcctcccataacaagctttcaaaagaaaggaataagtaaaattatcaggacaaacaccattactctgcatattaaagaaagtagcaaaagcttgagaggtctgagaattctgaatgtgagctctaatcatggtattatacaaatgcacattgggttcttgaatttgatcaaaaacgttcactgccaacgccaactgacgacacaaagataaagcagccactaattttgggacaatataaaggtcatggtgaagattagctctgataatctgagcgtgaatttgctttacttggcttaaatttgagcatttgtggagctgagatagcttctgttctaagacccttcttgatgaaacccattttggagttcgaaccgaaacacacatttgcataatggaaaaccgaagaatttaactgtgtaaaatattatgataatggaaaaagatttcaaatttcgaatttgtgattgaaatgaaggtctgaccttttagttctcttctcccatggttgcttcatagtccaaattacagaacacttatctttctgaagctgaagaagaagcttatctctgatttttaatggtgtttttcttctccttcggttggggttaggagtggtagtcgtggatgatagagaaatgggcttttgggcttcaattatatatattaacaaacaaggcccataggcatgtttaattggtaggcccactatatatggagtcaaagagtatctaataaatttcagaaatcaaatttgctagtaagtagtactagtagtattctttcaaaaaaaaaagtagtcctagtagtagtaactgattttttgacatgacacaaaattagcatgagtttaagagacacgagcacaatctgtcatgaaaaaatatgagtttaaattaggaaggaaataataaaggcaaaaacagagagaaaacagggcgtaaaatctggtgtgtattgtattgattgtatattcctcaataatgtacagtaaagatattagcagatatatagtacaaggaaaggaatcttttcctaacaataaaatattccttttgccaatgattggctgaatacaaaaggaatcccaagatattaggggattctagaattcaataaattgacagctcatggtacgctcactgctgaggtgtccaagctgaggtaaatatctcaaaggaaatatctgatcaatttaacacgctccctcaagcttgacttggttgatcaacaatggcaagcttgtttttcaagtatgagaactgactcgttgacaacggcttggtaaagatgtctgcggtctgctctgaggtaggaatatgcctaacttcaacaatgccttgtttgatgagttctctaacataatgcacatccacctctatgtgttttgtgcggctgtgaaatatgggatttgaggagagttgattagcaccagcattatcacaccaaatgacagcaggtatcttatgcttaatcccgagttctgtgaagagtgaatgaagccaagcgacttctgtggcagtttgtgaaagggccctgtaccctgcctctgttgaggattttgcc

SEQ ID NO: 227275 - DNA, 4260 bp, Cannabis indica
aataaatcaagatgtaataaaaagaatcaagcttgtgaagctatataagataatacaacagaaaactaacattttgactgaatttaatttaacaaatttaaaagaatttgtaagacaagtcataagaatacaatctctaagtcctcattggtttttgatgcaaatctgctatgagagctgagttgcagcctccatatcatcaattccccttgatgttgtagacttttctatggagctggcatctccattgaaactgggtcctacttgtttctcctctgctgcagctgctgctccttcatctggccccaatgcctgactactcgagaaggaattatcggatgcattgttacgcatccaagcttcgtggagttgcaatacatactcgaggtgccatagaacttcccccattgttggccgagtcttcccttcgtcggctagacatttctctgctatctccccaaacttcttcaatgattcaggacaatagcttcctttgagacgagggtcgatgatggtttcgagggacttctgtctttgccatctcattgcccattctgcaagattgatttgatctttgggcaatgttgggtttataacagctctagcacagacaacttcaaacaacactaccccgaaagagtaaacatcggatttctcagttagctgctggcgtcggaaatattcaggatctagataaccaaagcttccttttactgcagtgctgacatgagtgtgatccaaagaagggccatttttagacagtccaaaatctgacatttttgctacaaagttttcatctaacagtatgttagttgtcttaacatctctgtggattattccttgctcagctccagtatgaaggtaatggagtcctcttgcagcaccaatgcaagcttctattctctgtttccaggttatgggagggagatcactcccgaatagatgacttctaagtgtcccatttgccatgtactcgtaaaccaagatcatttcgcgttgttcttcacaatagccaatcatggagaccagatgcctatgcctgagcttggaaagcatctcaatctcagtttcaaactctctaaggccttggtttgattgcggattagcccgtttgattgctgcaagggtggcatcttcaatctcccctttgtacaccttaccaaagccaccaactccaatcatcaatgtttcatcaaagttatttgttgcagcacgaatctcggctaatgtaaaccgcttcccacctctaatagtagccatagatccataaggattctgaattcctcccttggcatttcctgtgctgttcccaatggatccatgaagaaataaaggccgccaaacagaagcattgtgtttggtgtcactcgatttggctcctccccggcctctgcagaagcatagtactaaaacaactacagcagccaagataacaacagaaaccaaacctgctccaattcctacccaaaggataaaacttttcgattttcctgaagatttcccagctgaatcatatctctccacataagcaagattcccatttcgactcagcttgaaaatctctagcccatttaagagagcatcggttactgcagcagcagcagacgaatcaggccctaactgaatccacagtgtgtcgaatttagaagacacagtgtcaacaaagtcctgatgatatgccttgttcttccctcctgctcgagagaaaacatcgaaattatcagctgcagttctgttgttgatgtagattctaaaggttctttcttttgcctgagcataaactagctcacagaaatgtaaccgaactaagtaatcgaaatcaggatgcacttcaaatttccatgacatgttgaaccttttctccaagacttcattgttggacatagatctagcactttcatacacaagaagaggagccactgaagaatcattcatggaagcataggtaatattggaactattatgaatttcagaccctgcattggctgtgatcatatagctagaatcaacttcccatgtcctccaaagatctgagttctcagaaggtttaatctcatcccccccaacattcaacctatacataatctcaacccctcgcccattcaaattcagattcactgcatttccacccactttaccaacagaccctggaaagaagttatcaacaactgggataacctctatagcattaacgaatccaaatgaccctttagttgggataaattcaataacaagaacactaggattaacatccaaaatatactctttaaccagagaaaaagtagtgttgcctccagaactttgcaacaccatgttcttgtgtgaaagctcaccagaaacactgaattctgaaaccagtttcagaccatttgccacaacactaaatgaagaatcatttacattgaaattcttaaatgggaatggacaaaaatgaagccttaccacacagtaaccctgaattattggaaatgtgtagttcataccatcagtgaatacccgggcagtgttatacactgaagccaactccaacttgttacttgatgatggagttgattcagcaactccatgagagctgagagtgagattgttattaggagctaaatcaccaacccatttcctaccctccaattcaacactggaattagctccacagttaatgaaaaaggagtttgattgagcttctccaatctccacaaacacaaagaaaaccactaaaaaaagcagacccaatacactgccttgtaccttcttccccatatcacccaatattcttctagtatttcaatgaaaacaaagattacccaaaactcaaaagacccaataatacaaacaacaaacccaaaaaatcccaactctttgctcacaaaactacttccattccccaaatgttttgacaagaactattttttttttcttttttcaagtttgggaccaatccaatcacatcagaataggttttctaagctattttcatgacaaccaatctgttattctgacttctcaccgatttagaaccaagcaagaagggctatgaaaagcccacctgtaacttcttctaaaagtagcttctcttcacttccagagaccaggataggtcacagatctagaggaaaaagataaaatgaacaaaaagggggaaatttcttgcttagctgaggaaaaaagagaacaccaactgaggagatgaagatgataatgatgattatgatgatgatgatgaaatggggttgcttttaaatttgaaaaaaattatataaagaagaacatgggttgttgggaacagattggaaaagaagatcagttcatatctttggggtggtttttgttttgtttttgtacctcttttactcttttctttacagaagagagttgagaatctgacaacattgaatttgtactttactaccaccctctttttttttattatttaattcttaactgttgcaacaggtgctttcttttttatttttctattttattttagtccccaaataaaataacacctaatacggtgcccacttttttatttttattttagataactgttttaaaatagaaatttaaaaaaaaaaattgaagaaaatattctaaaacctttctttattttaaaacttttttagaattactatttatatttaggatattggtgaaaaaattacttacactttaatttttttaacaattaaccacctcaatcgattttttaatagtaaaactactcaaattctctttctgctagctatttactctttctatccaaaatattatattaagtgtcacggtagatatgccacactgtacacaagtgtacacttgataaatttttagtggtatatgcaatatatatttttataattaatttttttttcttatttttaaaatttttaaatattgaaattattttttgataattaatattacctggactaataaaaatttgtcatgctcaccgtggcacttaacatagtcttttagatgaaaagagtatatagctaacagaaagggaattcgagtaattttgtcaaaaaaaaaatcaattcaagagtttaaattgttaaaaaaataaaaagtaaagaaaatggggcgggagtttatttattttttgcattacatagtttgtgttgtactatccagcaatgagagataaaaaaaaggttaagttcaagttagattgaaagaaaaataaatgctaaatataaacatatattttaatataatataaaaagagaataaattgtttaattaaatagtaaaattaaa

SEQ ID NO: 227276 - DNA, 3244 bp, Cannabis indica
tatatagctatatatatatatattcacagaagtaccatttgtttttcagttagaattccattggtcttttgggttccctgatgatgatctcctgcaattgttttgtcaagttttgcttgcttgttgtttgtgccatccagttttagcccaaagtggatgtgaggaaaatgtgcccactgtgttaaaacaaatacttaaactcattaaaatcataaataataaaaaagaatatcgataaataaatagggctataaaaaacaaaactctatattactttggttttagtaaaattacttttgttactaataaaagttataataatgagagattatattattttctgtacctagtttttgtgttccctccagcaccctctctctttctccactcacacacgcatatatatatatatatatgtattatgtatacgttttatactatagttatcttttttataatatggttgtggagatcaaatttagcgagaataattctcttaaaatttataagagaaaaagatgatatatacttagcatctacgttagttgtgtaatgatttttcctctcgtacgtctctatatatataatgccaattattctctcgtgaaagaaatttcaataatataggaacatttctaaggcaaaatataatatatatatatatatattataaatatatgctcactaaattagctaattaatttattgatatctataggttagtttaagtataacaatttgtctacctatatatttcatgtatcttatacagatattaatttatatatatatactatataagcttgtttaatttctttgaagtacatatagcatataatggtgggatagacccttatgcaaaaataacatatatatcccaataaatgaacaatattcctacatacacacacagtagtagatatgcatatttatatatttatagtattgagatatatatcttacatttttagctgcagtgctaaaagcttctctgtgacttatatcagggttactagctttaatcctttgaatttcctccctacattatgcaggtaaataaaactatcatatatacatataaacttgttaatatattaaaagcattaatgaataaataattactctttaagaacatacattacaaaagtattatatatactgttatgttttgacagaaaaattatacaaactatgctgaacataacatttttaacaccataattttttccaaccacattatgtgattattggattgacatatataaacatgtgtatatatagtatatatatattataatctaatcccgaaatttgcatttgaaagtaagaaatgatcaattatagacgacagtacaaaaacgaataacttacttaataaacctgttatatgcagatggaacccgttgtcttttctctggagctgaagtttttgccacaaaatttaaattataaaaagtactagaactccagaaaatataataatcatcaaacacaatagtaaaattactagcatgatataaaagaaagcacatatatacgtgtaacgtgtatatcaaaaaattaaaataaaagagtacatgtgtttggaattaagatcttcgatagtgtattatattatgttaaattcaattaatttttatttataaaaatttaaacctctaataaaatcaacaaaattagttaacatatttaatataaattaaattagttgatggatgttaaattagttaacatattgtattaaaattaggtttaatagtgacactaattttttaataggatcttgattcatgtgtttgttagtattgttacatgtcaaatcattaatactgcatgtctgtcttatttattttgaaataaataaattaatatatacataatatatgttacatatttctatataatgtggtcctaataatatttgctctacctttaggtacattttcataggctgtctctttatatttcaatataatatttcattatcatgagtaaaaggctagctacatatacaatcagaaccgagcaccagccttgcccttcaggttaaatttgagtatcgatgaaagtataactttaagaagactttataataaaaataatgctatatatataattcattgtaataatatgtataggttctacttcttcctttcctagcaactagggcacagctagactacattaattaaagataaaacttttgttacgtaatgtcaacatctaaatgggccaactgatgaggtgagagaaaatcagatgcctgctcttctggtttatctgaattattagtgaactagttggtttggttttttcttaggtgtttttgttttcatcataatttatttaaaatagagttactataaggtctttcatatcgttctctccttgtcccttttgggtaactgaaaaataacttcaaagtagtagaataataatgttctctggacagctgaataattatttataaatatagagtatttatatttattattaattattctatacaattgaattatttttatatgtgacactctataatgtttaataattataacaatcatttctaaaaacaattagaataattgaccataaaatagatttcaaacaataagttatgtgtgtgcctctaattctttataagcctacaaaaaattattttgaaattaatgttcactattaaaaattgataaaaataactgtgtaattactaagtaaggtaattattagggtagtaattacactatattttaaaatgtaatgtgtgtttggatatgaggtggtaattacatataaattcctaatatcttgtttggcaaaatagttagtaattacataaaaaaataatatattttaatagctaatgtttaatatagaaagtttaataattacacagtgtaattacattcaattctcatgggtgtccatgagaattggagagtgtaattagaacactcaattacttccaattacagtataattacatggtcagacaaatatgccaaattgtgtaattacttccaattacacacaaatctaaattatattgtagcttttcaaacgcacccaaaaatttcccaactaaatttccccttggaaaaagtttaggtgagggcatgaagctataggtgtattttttatttttggtatatagaaaattataaactatctttctatataacagaatgtattacaattatagagattgcacaagtgtctgtttaattttttaattctatttttt

SEQ ID NO: 227277 - DNA, 3223 bp, Cannabis indica
ctaaaaacaattttttttttgtctaatatattatattttatatttttgtttgcatactcggatcctagacccggaactaaacccgaacccaaatctggatgagttcatatcatggtatggtgttaagatattaattttttagtaaaaaaaatctaaaaataattttaaaaaatttatgtcaagcacaattaaattttaaaataacaaaaatctgttttctattctcacttttgacagcacaattttaaaagctgaaaagtgaaaacacagccaaacaagctctaaatatctcagtctttccaatcatttggtttaacactatgtatgatgaatggaaagaatagtaagtttgttttatgttgtttgacattagaagtaaaattagaaggatagaaaaatagttatttattaaaattattatattatttttttaaatagtatttttttttttttgtgaagggtatttaagatatttattttttttattttctcttttcttccactttttttttttttgaaagaaaagagtatccattgcaaaaaaagcatcagagttcaatatacaaattacagatgaaattttgatctttccaacaagcttcctaatctaagcctaatgcatactttgtaaggcgatgagcatcttcattagcccatcttgtgatgtgcctaaaagtagcattagggagaaaagacatcaagctttttatgttcttagcaaacctgttcaagagaatattatgagtagcatcattacaaatataatccacaagtattttacaattagagacaatgcaatctggttttatgctgtgtttttagcaccatgacagagagcatgagcttccattaaaaaagttggttttattccttcccaaggtgtcaacacggtcaatagcaagtccccattattattatatagcgccatacccaaacctgtcttgtttgttgttacattctgggcagcatccacaaagagctttaattgaaatgttgaagatgaattcccattgctagaggttgcacacaaaaggatggaccccgaagagatttggtgactgttgttttgttgatattggtcaaggaagtctacagttacatgaattaaattggctggtgtcgaaacccgcttatgatagagaaattcgttcctacaatgccatatcttccaaagcaaataaagaaaaaactggaactcacttgtcgtgagttcagtaacagctaagtgaagaatatccttgcatgttagtgttatattgttggatatgaaagtaaaaaaatgtgttaattttcataccttttggacagttgcacatatgaaaagagcatgctctagggtcttgctttgattgggacaacaacagcagtcggatgtgggaagggtctgcttcttgtgcaaatttaggcttgttggtagtatgttataataggctctccaaataaagtggttgatttttgggagaatagattgtgtccacaaagatttccaccagttttgattaatcatggtgtttgagggtgtgggatcatctttgtaatttaagctgtgagctttgtggtaactagaattgactgtgtaatgtccatgtgatgtgtagggccaataaaaggtatcaggataggggataggtataaggggtatagatttaatggcttggctaatgtcggtggggaaaatggtttcaatgcgcgtggcatcccaatggtgaaacgaggttataagatctgatacttttgaactcccgtctgacaggtatttgagataatttattttaccataacctgggatccaagcatcattataaatcgaagtagtagtaccatcaccgatcgatttcctgagccccgatattggaagttccttaccccaagagatactgatccaaactagcgaaggtcggcatcctttgctagcatcaagaaaggtggtgtggggaaaataacgggccttaagtatggttgcaacaagggaagaaggtgcctgaagtaagcgccaagcttgtttggccaacattgcttggttaaaggccttcattgagcgaaaaccaaggcctccatggaatttagagagactgatagaagaccactttttccaatggattttccgactatgttcagttcctccccaccaaaagcaggccatcatggattcaaacttagaaagaaaaaaggctggcaacttgaagcaggccatagtatatgaaggaattgcctgaaccacagacttcaagagaacttccttctccccctttttgagaaatgtttttgaaatttaaaaagattggattttatacattcggagggagaacgtatctttctatctttcctcatcctcctttcctccctaccaaacatatgatttattttctccttctatccctctccttccatccaaaaattcttctggccaaacatagtgtaaaaaatagggattatttctataatagatattttagccccaaattttaaattttagttggtaagaaaaattaaacaaaaaaagaaatttaaagttattattttcaaaaatacggactgaacagtctgcatcttcttcctcaaattaacactagcaataacaacactgcaataacaaactatataatatctagaaaagaataattaagttgttttcatgtcattgtgaatcttcttttgtgttgtttttgcaatatcttatttcaaattaaaataaaatcaagttattttcgtgttgctgtaaagtttgttacgaattatttatacactacactggttgttccataattaaaaaatatatatttttacatgttacaataaaaatttatcttatctcttacatatagacatagaaaatagtaagagaacacacattatatattaattttgaatcaagtggggcaatgatagaaagagattgtaaatatgaagaaaaatgtaatatcctgataagcctaatggtaaataattagggtttatatttatattatgggttaatcatgtaataagtgggattatgatcctactaatttatttcagcataaaatttaaattttgctataagtgagtaaataagtgtaatttataaattatggagatttatatatagcatgtgtgaatgtaatatgagctatatgtgggataaaaatattttcaggtacagcgaccttgaagatctgataagtggataaataagcataatgtgttaattatagagatttatttaaaatacgtggatataata

SEQ ID NO: 227278 - DNA, 6062 bp, Cannabis indica
ttttttaaaaatactgtgttttttataaaataccagtaaaacacaaagcaatataactcaaaacaacagtagaacactagtaaaacaccagtagaacaccagtgaaacttaacacagtatactgcagtatgaaacttataaaaaaaacacagtaaaaaagtaaaaaatactgcctgacagtatttttgtaaaaaaatgacaaaagttagtataccatgtaaatttcccatacattaagctgggttgggttgggctgggctttaaagttatagtatcaggcttaggcccacataagaacagaatgaggcctaaccgaaagcgaaggatctgaatccacgtaatcacagtagaaaggcaatgatcgacaagattagagagaggttcggaccttcgtcctcctccatccatctttccctttttctggtttttcagtacattgaaaatccaatccaaaaaagcttgtatcaaacctcatatgaaatggaacattttcgaaaatgtacgactccgcagcctcaacctcaaccaccgttgaaataatccgagaccgaagcgaattcgaatccggcggaggaagctcaaccatggtcgccaccaacaccaatcccattctgatcatgaaattcattcggaaggagagagtgatcacccgtggtctgttccgagaaggagatcgccgatgcgaagtgatccgcacgtgcggatcgcaatgtacgtggccatggcgcatgcagggctggcgctctccttggctttgctctacttcgttacgaagcttctagaaggctactggaggccaattcaatgggcgattctctgttctatgcctcttcgggagctccgtacggctctcgtctctttctggtctcgttccctcagaatcggtctttttgagaccataatcgccgtcccagtcgccgccctacgcgctgccacagactccgtcgtcaattcccaagctgcgttctttggatttcttcgtcagtcggagactcggagtagagaaaaggttgggttttttaagctcgttcaatggctaatctcttttgcgttattcataattgtgtatgagtatatagggctggtttcggttccagtgttctgcatagcttgcttgattgtgtatttaatgggttctagaactataacgaatgttggtgtaagaacatcgctttctgcactcacgtcttttcgacggggtgggagaaaacttctcaagaaaagctctttcggtagtaaggtaggtggctacattacttgctggatgctcaataggttaaagactatggttgggattggtttgatcatgtgtatgatttttggttctatgtttgggcttattttcttttcttataagattgctatggaaggaaaagatgcagtgatatctgtgaacacccatttgaaagaaagtaattatgcagagaggattggagttacacagtgggtgtacgataatcatattcctgaattggttgataattacacaatgaatttttacgaagctgtttcacagaacattaattctttggcagcacattacaatgtgacagagattgttgatggtcttagacattacttgaatagtccatcccctagtccaatagtatcaagtgctagtactgtctctgctctgtcacttactgaaaagttgaacaaaattatatcaaagctgcgtaatagtgagtggaaagtgatttatagagacgttgacaatgtgttcagggatttggtatctttaattagtagggaggaattgatggagaaaatcaaatcacttctcctccagagtcttgataagtcaaggcgattactcgccagtggtacaacggtgttggctggaggtgtgaatttcttggtctttatggcagtgtcaattgtctcaggagccgcaggattaatgaacttcatttcagggttcatggtgtttttgtggctactctattatctcattactactgagtctggtggtgtcatggaccatgttcttgaaatgctgccactttctaggtccactagagctcgttgtgcccatgttcttgaccaagctgttagtagtgtcttattggctgctgctaaggtcactttctttcaaggctgtcttacatatctgttgttcagattctataagattcatttcctttacatgtctacctttttggcgcttatgagtgctgttttccccataactcctgcgtttctctcatcaattccggctgcggtgcaattggccatggaagcaagatatgtggaggctgttcttttgacagtagttcatcaactaattttggaatatggaacaatcgccatacaggatgagatcccaggacagaatgcctatttgacagggctgagcatgcttggtggaattgcactatttccatcaattttggaagtaatatctctttcatttcaaactaatttgttattcttatcatcaaggtcattttatatggtgtaagaaatcttctatctataataaaactttaattgaactgaagggagcaattatgggtccattactgatgacagtgatgatcacattaaaaaatctgtatgcggaattcgtcctctcttctgcggatgaaactgattttgatctaagttaaaggtaaattattttgttcattttatatgtgtaattcttatttatttattttgggttagatttaattccatccctgagatagtgtttttctcattaaatgcagtaataactggacctacgtcggaaggttcccaaaactactttgcatcagatggtacgtcttcatgttatattgactgggaaaagtcacatgtttatgatgatcctaactgataatatttagcgacaaactatctgtttatcataataattagctggagaggaagatgattgtaggaccttttatatcactttgttcatttttgttatttatgataacataggaaagatagagcattcagcgataccaatgggaattttttgttattattcctattccttaattttgtgtttggtacaataatgaactgaattttcaggcacatcttctcgaaacccaaactttaagaccatgtttcatgttaagagtgacagtaatatttggagagacaggatgcccttccaccacttgaagcctgaaattgctaaggatggtggttgcaagtactttcatttggagcaaagccatgtctttacccaaacatgacctaggtccagcattaaacacagtgtatttgtgagatggtacatacacaaatccaccttgctctgaaatccatctctcgggcttgaactctagacagtccggaccccatattttttccatccttcccatagcataatacgacagaaaaattcttgtctttcgttctgcccggtgaccactaggtagaatgtctggttcagcaacagttttgtgattcaagggcaccgaggggtatagtctcagtgtctcatacaatactgcctgtaaataaaccaacttacttagctcctctgcatcaaaaaactgatacttgttatggttattatcatcattaacggtaggaagattttccttcatttcttctagaattttggcttctatttgggtgagtagctacaagatagaaaaaccaactaagacccgcagttaaggtatcccttgcggctgctacaaaattcaacgccacatcctttaaaaattggtcggagtagggtttctttttcttccatataaagtgtcatcaagtcattagagttggcaacttgttctttattttggcttttacaactttgatataactccttccgttttatttggatgcattgatacatgaattcatcgaagactcttcttgcttttgttagctttctctcatgcccaacttgaagccacctctccaatttccaccaaacttctggtagaaagtgtcgacgaagtgtagcctcttgaatgtcgtcgattgcctttctgtattccaatttggagaatgtaaaggaataattatccggatcaaggccgaaaatcagcaagattgcactttcaaaggtgaccatggattggaatgcttcttgtaagtcaatctattgattgaaataaataagtaaataagtaaatcgtaaataaagagaaatatatatatatatttatatatttgtaatgcaagctaaacattgttgtgtatataactaaaattgttatgtaaataaatgacaacctgagttcttgtgttggagacttgatcaagaaacgggatcagatcgtttaccaccttttgttgaattgttcttgcaacaaaagagtcaaattttttatgttgtctgctccacaactgaaacatctttctttgaagtctccataaatccgagtcgacattcaaaatcccatcgcctagagcttcaaaagcctccttaaattgtggcccctttggataattggcgaagtttgtgattaggatatgctgaatatttcgaggatcacaagtgataatgaaatctaaattagcaaaccaggggcctttgaactcaatggtgagatcgcgttgtcttagaaactcagttgcaaagtcatgtaggcggggaatgtttcgaagaaggtttggccacatgccgaagactggccggccaaccgccccgagaaagcaaattattagtagtagcacccctccaatgagaatctctggtaaccctatttctagatccatggaagctaggtagctgtttgtagtttaggttaaagcattaggacgctcataattaattgttggtcttttatcttatcattaccattaccatcatcatcattatctgtatgtagttgccccatctatccttaattggtttcattttattaaggaacatgctaattgcatggtaaccgagtagttgagttttatttttgaactaattatgatctattgtaaattataaaagagtacaaaatttattttagcttaaccttctacttttgttttgtttatagtttttttttttgaaagattgttttgtttatagttacaagtataagataattattatataatttttttttcaataaaaatcactttttaaagtgtttggatatcattttttttttgaataaaggataaactttattaaactaaatcatccaaaactaaggatgcaaaaacaaaaggtaatgagtctctaccaaaagtacggtcagtctcaaaaagagaagatcgcgccaaggcatgcgcaaccttattagcagaccgcttagcaaaattaaaagaaacaacatcaaaatcagcaaccaaagtcatacaatcataaagaatatggccataaggagaagccatatgtttgaacttttgcaaatcattaatgacccttaaacaatccgactcaacaacaatctgtgaccatccattcgctttactccaagagagagcttccttgataccaatggcttcgacaatatgtaaattattttaattttagaaataacggctcataaatctttttgggagaaactttagtatttttaaatttaaaaaagtttttattttttatccaaacactttttaatttttttttaatctaaaagctatagaagctatccgaaggagttaaaattaaatcttacaaagaattttttaggaatattatcaaggctgatgtgatatttgattttcctgagagggagacataccatttaatgtattttaccttgggagaggtatgtatttctattgatcctattgagcctattgtatgatccatgccataactaattatcaactaatagaaattgctgtttacatatatatttataggactcttttattataggaattttaaaaaatactctataaagtggggtttatggccactaaaatatagtgtattgtaggagattgaaattgacttttgacataggtctcactcatataatgttatgtttgattgatgaaaaaaacactcattttttttttaaatgcactattggagaatattgtcccacatgaattaaatgtaaaagtattgaagccatatatatgaacatgagctactctaactcatcaccaattggttttgagattggaatcctatgattcttgtcaatggt

SEQ ID NO: 227279 - DNA, 2000 bp, Cannabis indica
catttaaacaaaataataagacaaaacttaacaaaataactatatttcaataaatataaaagttattaacaaatgatatattttaaggggtagaatcagtattatttttatttaaaaggtaaaattactaatttaatatccacgcacaacaattaaataaaattaacccttaaaatatgttgttacttgttaataacgaaaaattcattaaagtaacatttgaagcttggaaatcgcccaactcataaattagcatgctgtaaagctagccagaatagttactctttacattcttaatgtcattaattcacttttataaacgaacaaacaaacaaacaaaacttgtcaataatccattattagcgttatgcaactctaaaatttaagcaaaaaccgttcgagagaatcctctgtcatacaattagtaatagtatcttaaagggtctgtttaatgaaattaacaatttggtaagctctattaagtggcattcaaaacaaaatgctatactctttaatgatactagaaaagaagatgtagaagtctaatagcaaaaaccagaacataatgtaaagctcagtcaatacttataattgactcaaacaaaagcaatgaaataacacacttcactgtatcaagagaatatagtactacaatcctatgcttgaattctaaagcttatcactttgaaatagagcaatttatttagcattagcagaaacaacattgcaaaagagaaagagatctctcttttactttcttcaacaagaattagaaaaaataaaagtatacacatacaactagaatattacatatttccactagtgggactataatgcaaattaagctaggaaaatcaaatcaaacattctagtgattttaaataacaactctatgatgaaaaaaagaaagaacattggcatgacattgatcttaataagaaattagtaaactactaagctaagaatatcatactcatcagatcaaatcccattgatttgctttttcccttgagagttcattcattgatcaaatgctaaagagaactctcaattgagcaaaaccaacctgaaaaacctcattcgggagatcatagccaataagaaagcctacaaaatcaaatgctaactagccccatctaagcctcaggtgagggcattctcttgaccttcttcttcttctccgaaacagctttcgcgaaagcctcaacgatcctctgctgtgaatccaatatcatctcggttcgcttcatctccatctccattcgcattgtttcaatctctctggccatctccatcttcatctgctccatcctcacaaacccatctcccaatgccttaattgctgaaaccatttcggtcaccggatctttctccttttccctctctctctccctcttccccaatccgggtctcactgaattacactccctcacaaccttagtaccaaaatttggccctgaattcatcgaattctgatgaatcatcccaaactttggatcaagtttagcataaaccttcgtccctggttgagcaatactaaccccagtgggaattcgaattctaaacccactactactcgaaccaccaccactacccccaattccattcctgtaaagcttgctcatactcttcatattcgacccatatttcaattcctcataaagttgctgatctggatcttcctcttcatcctcgtgatcttcgtcttcaccagggctatctgagttttcgggcttcgccgtcggacctttctccatcgaatccatgcgcttaaaatgaacccacgaagaagtaaacctcgaaacaggcatagatcgagcacgctgaagctccgtacggtaccgtttccgcagtttctccatcttatgtcggcactgcacggcggtcttagccggagacgccgagggacatctagccgagacggcatcggcgacctcttgccagtgggtggccttgaggttcccgcggcggagagagtaccacttatcacggtacgaatc

SEQ ID NO: 227280 - DNA, 9972 bp, Cannabis indica
ttaaataaatagttttgacatttctaggattaaaattgaaaaatatgacattattgaaagaaaagatgaattctgaattaaagtgacaaaattgtaactagtgaggcgcactactatggtcggccacttagttaatattttacttattattttatcttttttaattcatataattaaatcctaagccctagttgaaatactataaaaggaataagatgctctcattctcatctaacctaataagcagttttcatttttttttttgaatggaattttcattctttttcaaacaactagtaaatgagaatttccttcctttgtattttcgagttgccttcttgttcttcatcaatattcaaaacctttagtgatagagtaccataccaactcataacaagtcaagtacttaatcatagtgtggaagactgtgaagaatccaacacctgaaggagaaccaagctcagatcttgttattattctgcgacagaaaggaacaagggttagagatctgagtggaagaagacatattattctactgccatcaatgtaaggttttctaaactttatatgtgtttatttcatcgtattaggatattcatgtttaaggtgttagattatatattgtaatcaacatacatgttagtaaatcttgatcctagtaaataattttcaacaactggcctcagagccatgttaatgatttactttcatgaaatatggattaaaacaataattttgttgatttagatgtgttcatgttggtttatgtgtgaattgatgaatgtttatgaattatgaattttttcatgaaaaataattttactttcatactggaaataatttatttggattccttgtgaaaaattaagcaattttggtttttacgaaactcaattctgataaaaaaaatgagggagatatggtgatttgaaaatttgggtgcatatggtgtcaaggatggtgtaccatcgcaccagtcactcggacaaggagggggcatgcgtccggaaatcagacaaagccttgtctaaatgctcggtcagctcctcgctcagacacgagcatgcatgcctagatgctgcaactgtcgagaaatctcggcaccaggatcctgtaattacccacctgcgcacgcgaaacgggcttcatgtagccagttcctcgggcaaagcgtgatttttacctaaaaaccttatatttgtggtttttttcattttttattttttttttttggattttcccatttcaaatccctaaatatctttataaaatatgatttttaatatttaaacctaaatattaaaaattttatattagtaaaattgaatgaaattagacagaatttcttaaatctaaccatttcaataatttaggggattttttaacggcctgaaaagttcatgggacatgatttgatacatgtcaaaattcagggggcaaaaatcctaattagtctatatatatataactacaacataatattcctagcaaaggtaaggaaactaacaccaaattatatacaatgaacttcatttttttaaataataataaatttgaatggcttacatataaatatgaaaccaaattatgagattgaatcggtaaatgatacataagaaaaaatttaatttgaataatatatatcttaagcctagattaatcatcaaattttcgtcagtataaaccaaataaacatttaatctcaaaacacaagtctataccttatacatagaaattgctgtcaatataaaccaatgaaaagaaagactagtagtagaaatgcacttcataacaaagttaccaaaattaatagggaaattaaaatggaacataatactttccaaaaattgtcattcaactcgatcaaaagccttagccatgtcaagtttaaaagcagcctagccgctcttaccgttcttcctggagttgatggcatgaataatttcttgagaaattaaaatattatcaaaaatgattctaccacaaacaaaagtactttgaaaaggagagataattttatcaagtacggttttaagtcgattagctaaaaccttagaaataactttatacaaagtagtaccaagactaatgggcctaaagtccttaagagagttagcatgttatttcttaggaatgagagcaattaaagtagtatgaatatccgagaaattagcaccattattcaagcattccaaaacagcatgaacaaaatcatgaccaagagtagcccaatttttttggtaaaataagcattaagaccatcaaggcctggagctctatccccagacagatcaaaaatggcttttttcacttcctgagtcgtgaagggttgagcaaggaaatcaatcttaggatcttccaaggaaggtcctaaacagtctaaaattcgactagtagcctcagcatcacaaccctcagattgaaacagataagagaaaaagggaaaacataaggtcacccattgcctcaggatcattaacactattaccaaaatcatccttcaaatacttaatagtgtgtctttttccttacgcaaaccgataaaaaaacttagtgtttttgtcaccagctctgagccaatgaaccctagcccgttgcctccaatagatttcttctttgtaaatagagcatcaatctgggattgaaggtgtttattacaaagaaaggactctctgctatcagaagtagaagtctgaagcctagcaatctccttttgaagatcaaggatttgagtttgaaatattttcttagcagatttattccaagttttatgagaagagagacaagacctttgatagtaaagaaatcgattaagagcactcctatcaatacactaattagatgaatggtgccaagagtcctgaacagtggtataaaaatttggattctctaaccaaatattttcaaactgaaatcgttttttaacaaaaggatagctaattgagttgttagggtgaaggataaccttaagggctctatggtcagaaccataaaaaggcaaatgatgtaaagccgcatcggggaaaaggttactccaagttttagaaccaattgcccagtcaagacgttcacatatcgagctatttcgccaagtgtacttatctcccacacaagagagaggagaaaggcaaaatttatcccaaaaatgagcaaattgatccacatctttatgattataatagttactaccaattttgtcatcaaaagaaagaaaactattaaaatatcccatagtaaaccaagggaggttaggagcattataaaatattttttcaaaaaggttccaattaacaacacgctgagaggaagaaggggagccataaaaactagtaaaatgaaacatatcattatctttaaagttgatattacagtgtatatgattacaagaaaacgataaaatatttacatagagagtagctttccacaaaagaaaaagccccccaccaaaatatttcctgggcacttcaacaccattatcaaaacccaaagaaactctaactctatcaataacctgcataggcaaacgggtttccatcaaaaaaaaatcattagggcaatgctccttaaccaaaagggagagcctcctgaatgcatgtgtactccctaatccacgtgcatttcaactcaagatactcatttttttgggtgggtgtgcataacatcgcccgcctgttctaaatcagtagctttaagggaaattcaacttcccagtcaccaaaacgagcacgcttgagttgggacctcataaaaccaccaaccacaacctgttggggttgaaaagaaggccgcttaactccagaggccgatgccagatcttttccacgaactgtaaaatcaagctgaccagtagcagggctagttcccatagaagaatcaccagcttggatggtactaccaaaaccagccgcagagagagcaggggcagaggaaaaatttccatctggcaaacaggactatcagcaataattaaggagtcagtagaataggaggtaaaggcagatgggcgcaaaaaaatatcaaaattaggtctatggaaaggggggaaatatttgaagtattagggttgagaggggtgggcatcatcacaacagtggtggaatggggggaagtgaatgggccagagaaattagcattgggatttagaaaagacgggaaggtaatagaatggcttgagaggtttccaggaggtaagttgagattaaccgggtgtaaatccaccatagtgatagcaggagggtccgggtattgaaaaggcataggcttttcaaaaatcttttctttccccctgaggagaatattatacggatagagaggttcaaaaataatctcatcaaatttttgcaagaaagaaagacaatacttcttggtatgatcaagtttttcacagaaaaaacaaaagttcagaagtcgttcacacttaaaatccaaccatataacaaactctctacccattctaataaatctgatattcattcctcttctaattggcaaattaacatcaaggaggatttgaatacgtatgtaagggccagggccctccttaatggtatccttattatggtcgcctacctccatttctataaatctagccaaatcataagattttcacataaacaggataccgtacatttgaatctataatgggacatagtgcaaattatcatgggtaagaggaaaacaactgttaggggtagcaaagatagtgatactttgggcaaaatgctaaggttaaccttctaggactctacctttatcccgctcatagccaaaggtaaccagaaacatgccatcagcatgttcagacacaaaaacagggaaatgacactgggatgaccaaataccagagagggttttcatgagagacgaacgattataaggttgaatggtgtgaagcttaaggagaagactgatggtagcaggggaagaactagacaaaccaacatcataagtaaagatagtgttttcatcaggaggaagtactaaagcagtagagacattattcaagaactcatccataatagcacaaatagagacacgtaaaacaacagtatagagaattggaatcgaaaaaggaacaagtgaggagaacaatacctgagcttagttatatatagaaagaatcagaacccgcaaagtactcttctcaaaacctccctggtcacatccatagtcgcgtccatggtagctataatgatggagtagagctgaatggcttcgagaacccagtcgtctgcctccattttgtaatctctaaaggcatatttcttggataggatttgggagatctggagtaaatgaggagaagacaaaaaggaatgatgaagaaagtggaagggtgaagagaaagaagggttcgagtatttaatactctggctagaattaatgagatgggaaagggggtaataataaaccccagagcaataaatactcgataaagagggagaagaggagaaagaacgacgacttgttagatgggaataagacaaaccaccactaaacagagaagggtggacgaattcctccatgggaggggccaagatctcacaaggagaaatgatgtattgcatacctgctagaagactccaaagagaaaagctataatttgtctgaaatataatcttttaacaatatcattttataatatatataggaaagttctagtgtagtaataacacatccttcctcatgctataggaaaattatctaaaccaataataagtcaagaaaattaaatgtatacagattttattgagtttatatacaactgattatttgaagaaaattgggtggaaagttggccgtgagcaacatattaggcccatatgggtacgtgtccttcaactacgcgtgggagtctgaaacaacaagctacatcaatggggtcttctacagtgggagagaagattatgtttcgacacatggcagttgatagattttgttggctaattttgagctattatttgggttgcaaaaataccattcgcattttatcatttttttccagctgaaagatatttatcttgcactattaatttaataatatcatatttttaaaatatattacactaattttacaatcagtttttttatatttagaaatatatttgagtccaatttttttttgtgatttaatgttgtagttctatcaaattacttttaaattacttttaaatttttaaaaaattctaaatagtttatcttgccaaaaataaaatttaaacagttatttaccacgcatacaaaaaaaaaacaattatgcatgtagtaaatatataaatcttattttcggcatttcaagctatttagaattttttttgaaaaatttacaagtgaataagtaatcctaaatggctatcacgtatacgatcatgaaaaatatttgactaaaaatttttctatatgctgaaacacacaaaaagtttaccaaaacaccgctttaagggggaataagttaggaatacctcttttttgtatccattaaccaaaaatactctcatatttaattttattaaaatataaccacttttatgagtggattgctcaatatacccttactctccacttaactctagcacataatttacattaatctaaggggtataatgggaacatcatctataatagtgggtatttcttaacaaatataaaaatagaggtaaaaattaaaacaaataaagtaaagtgggtatacaatgtaattttctcttaagaagtgtactatagacttatcccatttttttatgtatttttacattaatgtttaatttggttatacatataaaaaaaaaaatagaaatttattactgtataaattgttctattactttcttaaatacttttgcaaaaaagtttaaaaatgattttggagacacatattgatgttagcatattgactctttgactcccttatgctctcttctctctcctctttctgagaagcgtggtcatacatactgggggcttccatggcccttctggtcatggaaaacaccaaaactccactggttttgggaaggaaaaaggccttcaccccattggtgttggctgggaaaatttctctgatccaaatcgtggtcagaaactccataaatattggagttttcatactaaacacaaggcatttatgatcactttgtcaaaagatggaggctcggttagaatttgtgaaagaacaagactttttgggcacgagataggggtaacaatcgatgcaacgaactggatgattggaattctggaggaactgaaaagaaaattggacagcaaagggatgcattcaaaagattctttagaaacaacattggaagttattttatggaattctttgctaactctaatggagctttcttgaagatttcagccttgaaaaacaacaaaatcagaaaggtgattgttctagaagaagcagaagctaaaggatggtctgacctatatgattgtctctttggtgtacttaaaaggaagccagaaaatcttcaagaagacagattaacacaacaacaaaaggagaagataggagaaggcagggcgaactcacaatcatgggctaatatcgtcaaaagtttgaggcagcttgtcactaaaccaaggggtgggaatgataatattccaaaagaaagacttcctcgagctttgaggaaaaccaacaaactgggatattgggattttctaccaaaagggaacgagagcttcagaccaagaaacaagtttccagaaaaaagactagagcagaaatttttttacgagtattcacaagctgagaagagtgacaaggaatggattagggcggtgatgatgttcagagacaatagtgagacgccatggagtgccatattctacaatctctcaagggaaatagatagaaagctagtggttagccaaatgtatgatgatcgtactataatttggtgtaagaacgaggatgaggtggacttactattgaagttaaacaagatggtaatacctggaacaaggggcaccattgtctctttcattagatgttatatggaaaaacaaaacaaagatgagaaagttgaatgtagaaggtcatggataggcatcgaagggctgccattacatctgtggaacatgaaaaccatgtggagaattggagcgttgtgtggagggctgctagatattgaaaaggatactgcagaaaagagtttcctgcatcatctgagacttaaattggaagggaatgagcatggttttgtaccaacactcatctcgtttcataacgaaggcttggaaatatcactgaaattattcaaattaaacgattagggatatagattcagtggctttttcaacactatttggcatcaagattctgaggtatattaaaaagaaaaagaacagaagatgatgaacaagggagaggcggattcggtaaaaggaggagaaggaggcgagttggctggggggattcagacgacaagtgtgtcgtccgagattgtcgcagaggtggttggcggtgacgagaccaatagagagggaggcgaccagagcttgtcgtcagattctgtgctatagtcggcgatggtgacccaggcggatgaggggcagtcggaatctgcagattttccgtccatgactgagacgggcggccaggcatcggtacagcagccagagaaggaattaatgattaattatgggtgtgcatcttccgagattgatagccagcccaggagtatgccgattgagtgtccccataaaaattcaagttgtggaagagagtcgattcctcttcagcatgtctttagccgtttattgaatagtctaagtgagccacgtgtgaatagaaacccttctaattttttgaacacgtgtctttcttatgattcaatagataaaattaaatttggaagggttgtgatgagccgggcctttgctgaaaataaagaggaaatggggcttaagtcttatgggcttagtaagtatatctctaaaaatagggagataataggttcaacagctattcaacttaatggactgtggtattaccaaaagggcccatttaatcttatcttgggccaaaaggtgggacctcctgcaatcttaaagcaaaaaatggtggactctgttgtaaatggatttagatggaataaaagtctagaaaatatagatagacttgaaaagtgggagaaacaactggcggtgtacaataagaaaacaccaaaacaagtgatatatgattttttcgaaggaattttaaggaggattcggccaaaaaagagggcagaattcagagtggctataattaatttatgggcagattttgaagatcaaacaaaagaaacatggaattcagttctgcataataatgaaaaattggaggcagcagaggttaataagaatggaaaacaaccaataatatatacatggaaaagaaactcaaaagccttggttggggaggaagatactatcaacagaatagaaatttgggaggatgatgaagacccaagagaggaagcaatcgaagaggacttttcagaaagtgaagcttcggatattgattgtgaggacaatctagatgagaccaatgaagaatatgaagacattttgggtgacattaaagaattagggagtgagaaggataatatgatgagtggaggaattgggaagatttctagtgaagagcaagtcgatacggaaaataattctgtgtcatggtcaaagatggtggattccatggctgatttggggatgaaaataattccaaataaggaaagagtgccagtaaaagagtccaaagaagacacaacaagaagaaaatgcggggaattgagaaatttggactttaacatcaactatgaaaaaggtgttaaaaaatcagggatggaaaaacaagtataatgaagattcttacatggaacataagaggcagtggtgataaggagaaaagaagggctattaaggcaactttatgtaaactcaatccggatagtgcaataatacaagaagtcaagaagg

SEQ ID NO: 227281 - DNA, 3369 bp, Cannabis indica
tgttagatttaaggacttttgttaacttcattcagttttactattttagttattgtttatgtactaaagtatcctccctagattttaacatctattaaattatgctcctcgaacttttacatgtactaaatttttaaggatattttcaacgactttaaaagtttggaggcatgatttgatacatgtcaatgtcaaaattcgagataaaaattttaattagccaaattttaattttagtatgcttttgctttatgtccagtgaaaacttgacaggtaattttcataatttaatataatatttatattttttttgataaattatttatattattgagaaagtaataactaaaactaaatacaatctcaaaaagaaaaaagaaagtgataataataaataaaagaataaaactctttcctaataaagcgctttgttcttggttttgttagatccccaaaacacattttggatggatctctctttaccattcatctctttttgcacaataatcattggtaatgttcttgaagtttttcttaactattatcatgatcatcatcatcatctaaataatcatggcacataataataacaataatagtaataataatccttcacgttcgcctccaacggatttctacagtattttgggaataacaacaagtgcctcatccatcaaagaaatttgcaaggcatacaaatcccttgaccaaaaaaaaccatgatcataagaataataataataataataatgattcctcacatcatagtaaacatggcaacgccaatgaaacaacccacgataaggtacgtaatattttatctttcatgcaaactattattttcaaataatttgttgtttcttttttttttgaattcaaaatttatcaataaatgttcatccaattctttatttttgagatttatattgtgtgtgtgtatgaatgcatttttagggtatgaatggcaaaagattagagaaagaagctcttaccataagtgaacctattaccaagttattagggtttgataatgggaagaagagcatggttgtggatgatgataatagtaatgatttctttccaatgccgaggcctaaaaataaatcaaagagtacgagtaatactcctagaagaagtaaaacaccaactccaacatcatcattgtcaagtattagagctaataatagtgaaagcaggagaagcaaaacaccaaacttgacaaggaatagtagcaaaagtaggagtaactctgaggatttggatcagcaattctcaaactttgtctctgggaacaggagcagaagatgtacctctgaaacccaattcaacatggctgcttcttgttcttcttctcctgcccattctagttttacgaccggtttgtcgagagataagagcaagaggagcaccactcctattgttttctctcaatcgacggagagaaagaaacctccgcctgtcgagaggaaactagaatgcactcttgaggagttgcttgatggctgcctcaagaagatcatcattacaagaaatgtcattgcagaaactgggtttgtctcactctttatacattttactccttgtttgccttttcaatcattattattgtttttcatttactttcttcaacagcctctttagtgaattaaggttttgtttcttaagatataagatataacatatatattagataaattcttatatagtttgttttacaggataatagtccaaaaagaagaaacattatgggtaaatataaagcccggatggaaaaaaggaacaaagattacatttgaagggaaaggagatgagaaaccaggctttcttccagctgatataatcttgtgtattgaagaaagaaggcaccctttatatgaaagggtaggtgatgatttggaaatagtggttgaaatccctctagtgaatgcactcactggctgttcaatcccaattcctctattgggaggagataaaatgactctttcctttgatgatatcatataccatggctatgaaaaagttattaaaggacaaggcatgcctaataaccctaaagaacatgccaggagaggcgatcttcggattaagtttctcgttgagttccccgtcgagctcagcaatgaacagcgagctgaagctgctgccattttgcaagatagttcttgatcttaattcatcttatatttgtgtaatttgtttgctttttgaacatgtgtgtagaacatatatatatctgtggagaataggtggaaaacgctaaagaagtttctttatgattgattataaataatagtaagtgtttaaagatcaaaatctcatgaattatattacaaatattatgcaaatgagtagagtttgaaggggggttatgttagtgagaatagtgcatatgatttgtattaaaaaaaaatacttgaaaaataatatataaccatcatatgatatgtcatattgtaattgatgcatcctaatatcgaatcattgaatggtgttaactaagatgaaaaataacaacgatctttgataaaaggttacaaatttttatgtaaagattaagataatacactttgtaattgtctggtgattcatgtcattagataatgtactccaacatttctggacaccaaaaggtaagtaattattgtatttaacaagaatatgagatttgattttgagacatttagccatcagttagcactgactgaataaagtgccaaccaattatttaatagaaaagacatcatgtgcataagtaaattatgcatctgacaattaaactaaagctatctgctttagtattattgcatatagattttgatgatttcggattctatttataatctacattgctgtggaaaaaggttcaagaacttgaactgttcgataaagcttgttgcctagcaagaaaaggtacctcaaccagggtaccagtaacagagtctcctacaattacagtatctccttctgaagcagctcttctcttaacgtagcctaggccaacatactcggttccatttcttccgggtacacagctagtcagcttccccacctacataaatgctatttattgtaataccacgacgaagagcacattcttattttgaaaactagagttatgctaagaaacaagcaacacaaaactaggcgtgagaaagtgaacgatttctttaaactctgctaccacagacttagggtaaattttgctcaatggtgttttgattttacatttatggatattgtattttgcaatttctttttctttttgaggaagccttgttgttttggtttagtaaaaaagttttgtttcttaaaatataacataaaatattgacaaagacaaaaaactattgcccacctttttaccatcaa

SEQ ID NO: 227282 - DNA, 1526 bp, Cannabis indica
taatgacacatatatcaaataataatccactacgtttacaccgactactctttagtcttttttatttgatctcccatcatcatattaaaacttgcaaagaaaggaaagcatgaggttgttacacttctgtgttttactatggttgtgtgacaactagtggccaattcatcagagaatgtatatcttcaaactctagtagtgcttgtaaattaaggaataccgatccaagcatacacaccatcatttcaagttaaagcaaaataataaataaacccttcactgacgtgggctacttaatacctacaaacaataagatttgtggccaatatattcactctgctactaaatgaaatcaattgtttattatatgtatttataatataatattaaaatatatattatacataccttatgcgtatctaataaattaatagagtttgttgtgtcaaatctgttagttttaataaaaatcttaatttaattgttaaaaaataaagtggtgactcttataaaaatgataattttccaaaacattggaagtaataattatgattattaattaataaataatataaaaattaattgttaaatacataaaggaaaataaatgtattatactaatattattaaatttattaaaataaatattaaataattaatgaaataattttaagtttcaacatttttattgataaatcagcaactatattattactccaaataacaatttgtagtgtagtacacaagggcaaagcagccgagataaccttctttttgaacttactcttgttagcctttccaatccacttacttgatttgattcgtggcaagaaggtagagcaagagatgtcacttttgccagcacatttttgtgctggcaaaagttagtattgtgctggtaaaatataatttacctatgatgcgttggtaaaagggggttgacaaatcaatattggtactagaacttttgccagcataaaatgaaaaacgctgacaaaaaagacttttcctagcgcgtaaatgtgctggtaaaagttagattttagtcactggaaatgtacgctggtaaaactttgatctctttgtcagcacagtttgtgaaatgcgctagtaaaagttacttttaccagcacagtagcaaactgtgccggtaaaaatgacattccttgtagtggaggtagttccccaatgaagccattctttaaatctgctccaaacaactcatagaaaaagaacactcgaagaataagtgttctaacgattcgtctccactattacataagagacaagaagcattatcaataatgctaaatttttgcaacctatctttagttttgattcttctaagcatagctaaccacaaaataaagctatgcttaggaatgttgaatcgaccactacaaatttttttacttttagtcacaacaaaacttgtggctagctataaaactaaaatagttatgactaattataaatcatcattcctatgttgtaactaaaaaatttgtgactaaaagtattagtca

SEQ ID NO: 227283 - DNA, 2940 bp, Cannabis indica
catctttaaaaagaagcgggtgccttcatgcaatgcttagagacctattgctcgtggtcgggccaatccgtgaattaccaaaaatctacgatccatttctcgaaaggtgtcccaagaaatcgagcggatgcaattgctaataaactgggtatgaaaaggatgaaggaggaagcccagtaccttggtctgcctctcttcaagtctcggcagcgttctcgtgacctgaaattccttgtgtctaaggtccatcggcgcatcgaaggttggaaggctcggttgttatccaaggcaggaagggcgtgtttgatccaatccgttggcaactctcttgctgtctacgctgcctcttcggaagtgatcccttccagcattgctaacgccattgatcgagtttgagatgcttttggtgggagattctgagtcaagaaaacagtccataccattgactggggtagcctctgtaagtcaaaactacacgggggtcttggctttagacaaacaaaggacattaacaaggcatttattctaaagtggggatggaaaatggtggctgagccgtcaagtctatggtgtcaatctataaaagataagtacctaaaaggctctactttttgggatgttcaaatcaaaggttcagactctaggatgtggaaagcgatcctcaattccagacctcaattatggcagggattgtgtcggagaattggtgatggaagttcaacatccatctggttcgacccttgggtgccatcgggtaatatccagcctgccccgctcctggatgccacttaaggtgcaaatttagttagtttcttcatcaacgatgaccaatcttagaatgttcgtagggtccgacaatggtttgatattgcagatgcaagaaccatcctaaacattggcctcccggccaccaaacaaaatgactcgtggagatggttaggagagagcaatggaattttttcaattaaatcagcccaccatttgatcactaaacggagatgtgctgactctcctcagaggacttggaaactcatttggaataatcccatccatgtcagactgaaggtgttgtggtggcacattatgagtaacgctctccctacccgtgaaaaaattgatcaggccttcaacttgccttcaactctatgtccaatttgcgataaagagagtgaatcgtccttacacctgctttggaattgtgactacgcctcagccctttggtttggctgctgctggggtattagaactgatatccgtaacttcagaaattgggaagaatggacgaaatggttcgagtgcaacagaaacagacctgctactctcagctttaatgatttcatgacgggtgcactgtgcatcttcgacgtcatttggaaagtgagaaatgaagttattcatggtggccatctcctccaaatttccaaggcaatgagtattgctagtatgcgcctcaacgatcatctagcttgcaaaatggatcaaccagcgactacagcagcatctgttcttactccaccatcagggtggctaaactgctgctctgatgtgaatattgattcaaatcattccttcggtgcagcagtgttcagagactcaatgaatcgaatctgtagcgttgttacagatcgcttcccagtgacagaccctgctctagccgaagcttcaatgttgttgagtgcagctaagcatgcaactcaatcgaattacagttcagtgaacttcttttgcgataatgtttgtgctgtgtccaacattctcaaagctcatggtacccatcataacattaacttagaaggagtttccacacattttcaaatgttaactgcccaatttgcgaactggagtgtccaaaagatcaacaggaaggagaatttcatggcacataatgatgcaaaatgggctaaaatcaactctgctattgggaatattcaggtctcttccatggatccaaaggtcttcgaagactacaaggaatggtggccagacccagggtagttttctgtccgtagttcatgaagtttgtgtctgtagggttcagtcctgcacttccgtgcttggattgcctctttttcagtgtttcctttataatgtttttctttgtttttttgtctgtaacttgagacctgttggctctctgttgtttttctttcctagtttctctattgttagtttcttcagttttttttgggggttcctttaatgcccttctgttctgtactagctctgtttttttattgaatgggtgcttcgcaccccccttcccaccaaaaaaaagaacacatcaatgtagctgcaatagctaaaaaaaattctcaaagatcaaaatcttaaatcttattttaaaattaaaaaaataaaaatatattacctaattaaaaaaattaaacatacatatattgcatttaatattacttaattaaacaaaaaaaactaattttacgtgtattgcacgtaacatcaacttaatatatatattaacctgatacaatagattctaactttttttagttaatacaacaataccacccatatttaaagatttttcaaaatactaaccagcctagttcgatacacacttatttacaagagaaatgctaaaagacaccagtagtgccaatcactctcttacgtgtcaatattgctattagtctaattaagtatcaggtcccatatagtttaatataataacttttagggagtatcgctagccaatcgtaagacgacacatcttaagggtgataggcatcactagtgcgaatagcaatgctctacttacaactataatgttttaagtattattgatacattcattagctgctgctaggttgggatatgaaatactgtttaaattttggtaactacaacatatgaatttaatgaaacaccatttgactttgtttgttggaagctacaactcttggattctccaccttaattaag

SEQ ID NO: 227284 - DNA, 2084 bp, Cannabis indica
acatatcacagatcaggcatcacaaaactaaaatatactctaaatcaatgaattgtatttagagatgttgaaacatgcctaatcgcaatagtctcccataatgagggcgtaattacagaaatctaatagataaataccctttccaatgcgatacgcaagaagatttgattccccaatatcatttggaatattacatcgttctgtcttcagtgtatgtggatcactttattctatcggctgaataatcatcatcaccatatggacccaacctgtctcgtgcccttccggaaccgcaatagtcacatatttttggactagctacaatcatatattgctatcagtcaacacagaatatgaaatctcacacatgagggatcaacacagctaaccctagctacctctcactatgccaactgcatgtacgtacaaacccttgtaccatcgataaatattgccatgttggcctatatatattggtcctcatgagctatatatacataacaaacacgaggaaagtatattagcaatacgctatatatttctctaagtattattcattgcataaataatatttagacacattggttttaattttagtttggtccgacagtgtttacatgaggagaaggagagagagaatgcagccaaggatgacttgccggcattattttctgtattatacataattttgtatggtgttgctggtgggttgtccttggctacatttcactcttcactcttaatgtaagccatgtgacctatatatatacatatttatatatatatatatctttaatttgttgtacgaaggcaacctatatatgaattccagtcccgatgggcattttattagcggtattcgtatctccattccatatagtacgcacacaattgtataaaacatattttcattatcttattttagtatagtacgtactgtgaccatgaaaaatccaaaactcaaataatgaatatatccatatcaatctcttatttattactttatttttcaaaattaacattcaatgcaaagatcttcatgtatatcatgacatacatattcacattcggttctattgttttcagttttgtttgcccttgcagtgtttttttatctttgtagatcgattttctgtgatcaaattgtattttgaccttatattatcctgtattaatcagacgaagtataaacacagaaacagaaagcaaccaaaccaatagtacataaaaaaagataataatcgtcataataataaaaacaaaatgtataaatatgtatatatatacattcttgtccatagttatatggagaatggtactctatactccagatatggaaaagaaagttgttccaattccagccctaagcctctactaattctcagctggatctatttttggaacatttctgttaaagggccttgtttgagaccatgtgaatctcccaattagcaatttgctactttgttcaatgaaaacaatacaatttccatttctatattcagcaacagaggaaagaaagaaaacaataaatggttacaatctcacactacccttaacaactcagcttcatcacaaagtccttcagccagtgtggtctgtggtctgacgctctctcatttggctcgagtgtctcctagctagttgtaattttctctcctacttcaccatcagctatagagtgcagccacttccctttttttttctttgacgtggttcttccagctgagtcataccattattccaattgaatatccccttttgtattactttaggatccaattaagtatggcctatcacttgggctacattaacaatactccctccctcaaaattaaattgtctgggctacattaacaatactccctccctcaaaattaaattgtctacaaggttatatatgtaggtcgtacatgttacgaacgtttccaaaatggtcccatgttgcatccactacaacaaatatttgaattcccgactatcttagaaatgacttttttcggggaccgtcgctataaaaattaagcaactatttaaaatcattggaaaaaatgagtatacccgacggttttgagcagtagcta

SEQ ID NO: 227285 - DNA, 7677 bp, Cannabis indica
tataatcaaactatttacatacctcattaacaaggtaccctttacttttacgttttttttttttttttttgaagaaaaggtacccttacttgattttcgattaaacttctttttttttttttaataaaaatccttattttaatgtaattagtaaaattcaattttatatacaatgtctacagaaaattataaatttgtaataaacttttataaaattataacaaatttttatccagttttatagttaaatataaatatggtaaattacaaaatactttcctaaaaaaaactatgaaaaatgtaattttttcaaaaaaaaaaatcctatgcatagtgaattttgtaaattctgtaaaaaagaaaaaaaaattatcctatacataataaattgaatttttaaaaacagatgatcatatttggtattaaactagatgtaaaacaagagaagtgaagaagacatctgacactctaatactaaaggcgttgtcagcatacttgaaatcaacatacacacttaaatgccattcaccaattctaactaaatcttagtcaattttaatagaatccaacacaagatctgctgcagtccccttaagttgttaggtgagaccaaagccatagttacaacttaccaacctacaatgaacttctagggctctgtgtaaattcaaaaattactgtcatgctcaaattcaaattcaagtttcatactaggtattacagtaatggtacgtctccaactttagcagattgaactagaatacagaaactgtaaaggtatgtaattccatatagcaccacaccactaccttcccccatgaaaaaaaaaaagaaagaaaacatcttggactcaatatagaatagattagatacttacaagttaaacaacatacaataattactgtttctgcaatttcgggtttagctagattcttataaagagaagtttttctttcctacttacaagtttagggtatgttgacaattaaaacatactagccaggggcccaggactagtcctccaagacaggttgtctctcaagctcagttagaagttctgtgagcggggttgtagtgccattgtcagcctcattttcacccttgcactgtagcaattgctcccgaagactttgtacaagctcattaagtttctgtatatttttctcctgagagaggataatctgcagcaaagtaacaagataagaattagggtcatacatctcagaggagctttcccatcacagggtaaacatcctatactcaaaagaaaaggcagcaagaaatggaaaagagaatctttagataaaacgtgacaagaaaaatttagatatgaaaacagtaaactgcgtgttcaagagtgacgttatgtaaataaattcagattctttatagagttgataaagagatcacacaaactatccttatttggagacaaaattattacatgcttctgggatgactcaaataacaactgaaatagaaatagccagggagcaaagctataatttatccagtccacaagaataaaattccaaatcaaaatgacaccgtacaggttcccagaatccaagcatagttctcagagcaaaaccatgatgacataacaggtgatgcttgatatggaaacaaataaatctcactccacaaaccacaaggagactgtgcaagtgaatgagaagatgatcactcattgtttgcacatgcaacacactaattcaacataaatcatcttcagctactaaatgcataaatcttttgaagggtggcccaattaacatagtgttacatctctaactagcagacttagcaaaggcgtagttacaagatatgcagccacatctcaacaagattagacaaccctaccctgtcttttggttcctccacacatacaagaattgccggtagacaaagtatgatatatggatattacagttgtatcttgtaggatcaaacttcataactcatctagaaccaaaagtatatagctagcaacagttcaaatgtatgaaatttgaagatgtaaaggatacaatcagataaatgaaaaggttatataagatatcaaacacatgatgccaccatgtgaattggactaatgtatggtttggatttaggtctagccaaaaataacatcaaaactcattaagacacctccatccaaaagcacacattgttaattaatctattctatttagtttactagtatttatccatgcctatcatcaagtatagataattcaacaaatatgtatttgaatttgaacatgcatatataagctagttcataaacaaaaaacattttactgtcaacacatcccaccaaaattttagaattccgagaatacattattgctacccaaaatacaaaatactagaaagccagttgatagtatcactttccctttagattccaaaactaaaaatccacaaataaaaactgcctaatcaattatttgacttataatacagcaaatcttcaagccaacaaaataaaggctcacaattcacatttctgtattaataacctttcagtacacaagcaaatagtaataatgggtgtaatatactattatacttgatgcattgcatagaagattagtgcttaagaaacctcactttttctttgacagattcttctctttcagatatatattgttgcctcctggaagtatctggagtagcttcaatctcatttccatactgttgtttccattcaaattgtgatgtaaatacaattaacaagagcaaacaaacaagggcccaaggtcttgacatcctcaatgtcgattctgaacttggcctgtgtcacagttaccaaaacacccacattcaaaatttaccaaacaacctcccattcaatctcttagagacaaattctcccattcaatctcatttgacgttctataaaactaaagcagaatatttagcagatcatcactgagagcaataaagtactaaaccactaatacccccttttagaaactacttttaagtataataaaatccttaaattaaaatcttcaatactcaaaaaagctacttatctataaccctttaagaaagcctccactttctggattttcctaatgggttctcactttcctaatttaacaatctttaatgctttactactccaattaccataaactcgactgttctatcaaaacacaaaaacaccaaaataaataaataaaattgagattttctttcactacatttattcctaacaaaaatcatctcttattgtgtcgatgtaacataatttccttccgtagaaatgaaatatacatatcagaacaagtagaatcttcaaaaggacacgggaagagcaattaaataaatataatggtaaatggaacttacagatcgaaggcgaagaagagttatttcaggtattaggggattgaacagtcacaatttttaccattctgatctacaggttgtggaaatgattttctcataatgaaatcccaagttggttggtaagaagaagaagaagactagttcgaatactggagccactgaagaaaaggtcctcggtgttcctaatttcccaaaatgctaaggccaagtcaccgagtccgaagtgagttctcactcgctgtttcattttgtagataaagccctaaattgtttttaggtttagtatcaaattatgcaacttaaattttttgaaccttttactaattttttttaaaattcctgagattatttgatttaataatttttatccaattttactaataaaagtttaagaaatacaatttgataaatgttaaagtttggagatatgattttgtagatattaaaattcgagaacatgttttaatatatggtcaattgtcgtgttagtatagtgaacgagattgaatagaagtctttaaatctaatcttaataatatctaataaaaacaaagggttgtgtagaaacaaaaaaattataacgtttttcgctccaagattctctctgctagggctctgtttgggctctgctctggttagtccctggactcctccctcgtctccgaagggttcccgacgtgtcgggtggtgtttctcaccttagcaatggatgaattgctgtcgaaaactcacaatcttcaggtctcggatgaagatgagtgggaagtggacaagaacctatctcttacaattgcgaaatacaatttaaggggacgattgtgcactaccgttgagcacagcaggggatttttgaaaagggtgctgggaggaatatggcaactcaaagaggcggagtggaacataaagatcaaagacaaatttgactcaggtcttttcttaacttttacctttgcttctgagtcaattcaaagtagaatcttatctaaaatgccatggtatttacctgacctgctttccaatatggggtcgagcgttaggggtaacagtcgatttcttgactccaaaaaacactgtgcgattggcggcaatggctggggaggttttcacggttcataattcagatgtctcaaagatggtggcgaatggttatttcagattccaagtctggatgtcaataaacaaaccagtatgtttgggatttcctctgccgtgttcgggcaagaagaagtggattgcatttaagtatgaggaattgccgtttatgtgtttcaagtgtggaagaatcgaccacagcctcaaagattgtcaccaagaacctttcatagtcactggggaagataatatcacagcttctgcatatgggatatggttgaaagtggagaatgacactagagatggatttcaagatagaaggttgggacaaggaaaccacattacacaaggaaagaaggtaaaatcaggaggctctgggattggtaaaaggagtcaaaacatccaattcctttgcttcgttagatgagactacaacaagtgtggaaaccctcttaagagaaattgcttccaagaccgagtctttgacacaaaatgcagcagtgggacaaagtctaatggcacaagttaataacgagggtccaggaggtatgatggaaactgaagtggataaaaggctcggtgatgaaggagggagagggaagcaaagaatgatggaagactaaggcatttcatggcaaggcaagttacaaaaaacgatcacccagtcatcctcagaagctcagacacacaacctccacaacattccaataacatattcacaagagattccaacaatggaggggccctcttcatttgtgtttggttcggtgttgaagaatttatttaaggagaacagaagaaaggtttcggtcaagaaagattcaaaagctaagaaggggaagaatggtggtacagtggaggatgtttctcagaaagaagattcagcagccactacaatcactgaagaggcgaaccctgtgagtcagggtcgcctacagcaatgaatactctgctctggaacgtccaagggctggggaacccttggacgattcgttccttaaactccctggtgattcgtcacactcctcaattggttttcattatggaatcgaaacttaacaatgttagcgcggaagctttgcatgtcaaattgggctttggtgggtgctttgtggttgaagccaaaggtaagagtgggtgtcttcttttgttgtggtccgagaaagttgaaacccatgttctttctttctcccctttccacatagattctttcattagaatggaggaagggcagtggtggagatttactagtttctatggagatccggatccaagtcaacgtactcaatcttggaagctattgaacaggatttgccgtatgtactcggggctgtgggcagtgggtggagactttaatgaaatcctgaatcaaaaagaaaaaatgggaggtcctcccaaaccgggataccttattaaaaacttcagaaaggctctggacgcatgtaaactttgggagattgcgtttgaaggtagtgattacacttggtgcaatgggaggaagaataatctcattttcgaaagacttgatcgagtttgtggtaactcggattggtttgacatgtttccctttgctcaagtgcgtcatttagagagaaccaactcggaccattgtccccttcttctcacagaaagtgactcttctcctatgaccacgaataagactagatggcgaacccgatttcactttgaaagtgcttgggcagatgatgaagactacacaagagttgtcaattcggcttggcaacatagtaacccaattatgacaactagagatctgaaagataagttaggaaaatgtggaggggctcttcaaaagtggaatagagtaaaacggaaggaaatgacacaacagttgaaggaatatgcagaaaaaatttctaaactctcccgaagtaccaatgttacggaatgacagcaattacatgatttggaacacaaataaaatatccttcttgacaaggaagagaagttctggaaacaaagaagtagagctctttggctgaaagagggggataaaaacacaaaatttttccatcggaaagcgagcaatagaaaggctaaaaataccatcaaagggttgattgataacaagctgaattgggtgacagggaataaacaaatggggcaggtggcttgtgactacttcataaacttgttcacttcgaattcggttaccccggaagagctacaagagtttcagcggcttgtcccaaactgtatctctaaagccacaaataaatatctattagagcccttcacagtggaggaaatatataatgcaatacgtgccatacattcccaaaaagctcctggaagtgacggactgcctaggttattttatagaaaatactggtccactattggtcatgaggtatcaaaagtttgcttgggaattctcaatgatgatatgaaggtggaggaaattaatgatacccttatttgcttaatccctaaggtccctaaaccgaagtatatggaagaatttagacccataagtctatgcaatgttgtttataaaatagtggcaaaatgcctagcgggaaggatgaagaatagcttacatcaagccatctcggaggaacaaagtgcttttgtggggggtagactaatccaagacaatgcgataataggatttgaaagcctccattgcttgaagacaaaaagatttggaaatggcaagaaaatggctctaaagcttgatatgtcaaaggcctacaatagagtggagtggagtttcttgattacaatgatgagaggcctgggttatgaggagaaatgggttgagaagataatgaaatgtgtgacaagtttgtccttttcagttctaattaatggagagaaaattggaagattccaacctacccgaggtcttagacaaggtgactcgctatccccatatctttttttgatttgtttagagggtctttcctgcctcatacatgaagtcgagagggctggaaggatcaatggagttcaatttgggagtaatagagtcaaggtctcacacttatttttagtcgatgatagctttatgttcatagatacaagggagaatgaatgtgacaatatgaaattaatattgcaacggtatgccaggctgtcagggcaacaaattaaccttgacaaatcagaggtgtgtatgggaaagagagttcccattactcagggccatgctcttgctgctagatttggggcgcgccttgtttctcatcatgctaaata

SEQ ID NO: 227286 - DNA, 5792 bp, Cannabis indica
gcgtctaatctcagcacataaacaagagtttaagttttacttcatcattgatatattcaatgtctagtgtcatggtatacaacctaattgcggttttacttcatcgcttgaagaagttgatggaaaatagcgagaagaaagttgcctccgggagtgttcagttttgttgttgaaagagtagtgttcatcttgacaaattatctagaaacttaatttgataattgtgacatattatataatcagctagtatttaatgtatgcatttttctagatactcatttaactgccacatgaactatcatatcattcaagttatgaatttagtaaaacattttttaattttaagacttttctcatttgggttatttatattgtcaagtgattctcatggtagcatactaaatacttgaacaggaaaatttgggcttaaggaggtaactgtcggagtggttgctgtttttgatggtcataatggtgccgaagctagtgagttggcgtcaaagcttttattggaatacttcatcttacatacatactttcttctcgatgcaacatattctgttgtattcaagagacccattggaagattgctgaagagtaatgaagatgataatgtttttcaattgcttaattgggaagaagtattggggcaccatgagttggatcatcaaaggtggttttccctgtaacctgtttttgtttctgtataaattgacttgagacaaccctatctacagagttaaaagtacgagagataatttattctcataacatgtgaatgtggtagcaatcactagactagagattttttccactaaaggttcttttctttgacataacaattatttactctcatcacatgataacttctcatggcacaaagttatgaaactataacacatcagtaagtaatagagttgttccctttgcatcatgattagattggaagattaatttgtcatggaagcttagcaatgtttaatggtagtgtgtcatttttcattatgtaatacttcgtaccgttatatatgactgtaatttgaagctaagcctggctcttgtgcatttacttcatattggctatgttatgtgtatgtctcctatttattttctccaattttaagactcttttttcaggtcagccaattttaggactctttgcctgttgatagatttgttgttatgtagtgtaatacatttattttattatgcatgtatcttattttgtattttattggggggtctactgtattaatgctgtactcaaaagtcttcaatatatcaatattgttccaggtttaagacttcactgtcagataattttgttgatgctcctcacttggtaattttgaaggaggcattgttgagagcaatcaacgacatagatgcaatttttaccaaggcatgttatatttgttgcggaatcgttttgcatagtatgtcatgttttttctgttgtattgacttcaatccaatcgaatcatgaaggaagcatctagaaagaatctggagtctggttcaacagccacagtcattctattagcagatggtcaacttttagttgctaatattggagactcgaaagcctttctgtgctctgaaaaatttcagtcacctgcagaagctaaaggtcatactttggctaaagatcagttcattcttttttcctgaacaaatgttgcttatactttactatgtcatgatgcacttcaataagagtaacttatcctggtatagttttttcttgcttgttttgaaaaatgatagtgttgtggagattattcattttttttttggtgcttttgaactgcagccacttatttaaagttatataggcaagaaagacgtaatggtgctatttcacatgtaagaaatggtgtaaactctaggtccccttcctccagtggatcattgcatttttctgtgaaagaattaacaagagatcatcatcccaacagagatgatgaaagatttcgggttgaaaatgctggtggctatgttcttgaatggggtggtgtgcctcgagtcaatggtcagctggctatttctcgggcaattggtgatgtttccttcaagaggtgaggctcaaagttgtggactaatatctcttaccatttccatccttctccttatgttcccaatgtcatgtttcataacagtgtttgctgtcaaaggaaagaagggtcaattttgtacatcttgcatttatcatccatccattttatttaatttatgacagaatactcattcagttttatgctaatctcacatcagctatggtgttatatccgcaccagaatggacagattggcaaccactgactacaaatgatagctatctggtcgctgcatctgatggaatttttgagaaattaagcttacaagacgtttgtgacttgttatgggaagtacgaagtcatggcccccgtagatcagagctctcttcttcatgttcctactcattagctgaatgcatagtaaacaacgcatttgaaaagggcagtatggataatgtggcagctgttgttgttccattagaaaacaaagaaggagacaaaggttcccctgcaccagggttacagaattccatgtatgatttctcaggtgtgtccctgcttttacatctttctgacttttgtttgctgttcaaagcaatttttgatgagtggtatttttatgttgtaccataattaaacattactctttttagataatatacattccttattacatttttgtcatcttttccagtcaatgagatcagatctgagatagttcatgtgaagcctgctcatccagttatgaccaagtttgagaggttattggtaagtttgtcaacataagatttcttggtttattttattatcagaagatgttcttattatgttcatgtattagctgtagagatttattttccagttggatacatcacagttttttacttaatagatttaatagtatctcacaatgccatttgagtccctttggggtttatactgacactttctgttttcattagtaccatttagggatcttgacggtaatcgatgatccacccagttttttaattattactttttttatcatgattagtgtttaatcactagaaatattccagttgatgtaaaatattttctattcatattattggctgcttttcttgttttaggtacaaaggaaacaggggtatattggctggttttatttagctgagaaccttgctgaactcacagattacacattgcaagccaaaaaggttgacaatggaaattatgccgtacctaaggctcttcctgggtccattgaccacagttttagtaagtaaaggtgttactggtgtaatattctggctatttagtttcatggagccacaaaccttaatttatatatctatctatatatgtgtatatatgaatattattatcacgaggcatatggattgaggctatttgaacttctcttccaattttcattttcttgattgatttaacttcaacttgtaattcaatttatgctggtgttatttacaaataggcaattagcaactttgtcatatgcttctgctgcatgaaaatcctttaccataaattttcttcatgttggtatgttgtattatatgatagagcactgcctataatattcaatttttaattttaggtggatctgtaaatctatatcatgaccataatctgtgcttgcatcatggaatgaatgctgatggcaccaaagatcagtgcataaatccagaaggcttttcaagtttcattggttttcttgaatcaattcctattcatggttctgattcaaaaaatggatcttctgaatttgaaatttctagtttgaggtataaatatcttcttcatttttttttattatgtatatacttttaatattttattggcagttcaaaaaaatattttattggcagtggcactgatgactttgtcccaatttattccttaaatggcatatgtggctgtctgtggtactaaattatggattcttagggtgatagggggttgggcgtcgcacagatttttttttacatgtggttgttctagctttattattgactttatcattttctatgcaaattattgtttttttcttgcatctaacttactctcttcgctttaccagctatgttttaaagaagaggtttggtcaaggatcatatggtgaggtatggatggcttttcattggaattttcatgagggtagcaactcttctgatttcagtggcagagaaaataatgtctcatttaattctatcccatttgattcacaaagcaagaatagcagctcatcaggccacaatggtcaatctggttctgttgaagacaacttgtttgttttaaaacgtataatggtaattattttcatgacaacttgttttttcaacaataatggtaattattaattattgtcatttcaatattcacctgtctacagcaggggtgactctttactgggaggttttttgatctaagatctgttttattttgttgcaattgtttgacttaaatccttacttgagttcagaggttcataattatgggaatttccattgacataaatactcattatgtatctatgtaaagtctttcagatttaattactattcttttgaattttgaagggattgaaaccccatattttttcaagttttattatggataggccaaaatggcagctactgagtagttgattacatcaacaggtagagaaagggacagcagtttacctaagtggtctacgtgagagacattttggagaagtctttctaaatgcttcaaagtgtcttggaggtttgccaacaactggagctttaggcagtttcccgaaaacatcatgtttaggtgtctatgacataatagaaacaaatgaatacatggcacatgaaataggaaacagctggagcttcaaaaatatgattcaagataagtttagcccacaaaggggttattatgaagaaggtttaaatcatattgctagatttgtagaatcttttgaatcccgaactaatgaaatatggcttgtatttcattatgagggtgtgtcattgtcaaagcttttatatagtctgaaagaagtagataagaatggcaacgaggaaagggctgaggatgggcagtatgctcagatgctgtatccttcgaaatggtggcattggttaaagacaacagaagcaggacaagaggaaatgcggagtctcatatggcagttggtatgtctgcaataaatcattttcatttgagccttttatgatcctttgtagtagtagttgattttacttactgctatcttgtataattattgtgtggattggataatcctatgaacaatattgtctggcatataagatgaagacatatctttgatggatgctgaatttatgatttcagctttcaaggatgagtaaaagctgtttgtaagactgttgttttgtctaaatattgtgtagcaaggttgcttttgtttgtaagttgtaacagttgctttgtgtgaaaacatgcttttaggagagttatgatattttttttttgggggttgttagttacgtctgttttctcgtaaaaggaattctagcatattgagctcatgcaatccttacaatacgtaattgtttttttcttcagttgatggcagtcaagtcctgtcatgatcgcaatatcacccacagggactcgttaaaaccctggtgagagattgctctgctgtaatttatatttgtttaattttgcttttttgaccacataaatgcccgtggagttgcctaaagctttagttttt

SEQ ID NO: 227287 - DNA, 5570 bp, Cannabis indica
caataattaataaaataaaaatttgagtttttatacttaatttaactactcatattagaaaaaatcaaaacatgtctctttttaaactatacccaaaaatatgtttatatataaatatttaagtcaaactcaatatttctttatttattttttgttattagaatatttttttcagccaatggaacaaactcaattcatataatgtgaagatttattttttttaattagatagaaaaattaaatataaaaaattcaaaattttctaataatatatattcgtgagtaatacttattaaaagtgcaccatataatttataaaagggtcaactttttcttcaataccattttctttgaactcaagccaaatttaatagaataatattgtcaaacttattagcttcacgttttatccctagaaaaaaaaaacgtcaaactatatattttatttattatttttttttaacaaaagaaacttcaaactatatatattataagattattttggatcttttacaaaaattttcaaaaaaaaagaaaagaaaaattattttggatatataaataggggcacaaaaaaaaacctttttaaaaagatatataaatgcaaaaaattatattaaaatatgattataaatataaaattttacacaaaatagattaaattataaacacatataatttttataaagatcaattaaccctacttgtctccatataatctgccactaattctatttttctactctatattgtaaataaataaatagtattagccacatatttatttataaatgcaattaataagaaaggtagcccatttatcaaacttattagttaattttaaagtacatgtttttatgagaattttgggttatattatattatgagttaagtccatacgtgcacttttggcttaatatattatatagtgtatagagtaattggtgaccaaatcaagttatgaccaagttgagaagcaaaattgcaaaacatgtaaccatttatgccatatttgaaaccaaatagtcaaaaatggcatacaataagcttataagagtgttttttgaacaaaagcttataagagtgttacttactcataatagaatatagtcaaaataatatatattatatatccatgtgtattatgtatgagattttgaccttggctttgaaatcaaaataaaaataatatcttaataagcaagtaaaataacataaaatatcttaggtaacttcttacataattttgtttaaagaaaaaagggtcattactccttagctagtgtatagatattttgttatatcactttttctagatatttatgtctaagtagtaagcatgactcattagtcattatagaggaattggatccaaaatttcatatttttatagtctccttcatatttcacaattaaaaaacaattaaatatatttgtggaaaaataaaatgtgattttaaatgaagtagttgctctcaagctatggaaagtaataattccattaaaaaaaaaaaaaagtgtcataaataactaaattatgtgaaataatacttaatatatctttagaaaataaattatagattttaaggaaattaagtggtagaacattaatatatgaattatgttaacataatttttgcacatgtatttaattttagcaacatataaatttaagtgaggaacacattatttttatttgtatggttaagattaattacacattatttgtggaaaaaaattagtataatttgaaatctctctctaaatatatatatggaacacttctcaatggatattacccattaatagttactaaacaatttaactatgaatattaatttttaaaatattaaattataagattttgatctaattacgaataataagaaaattttaaatttttatacttaatttagctatttaattaggattttggcattgacaatttagagactaaaaactttgaatttaatagttcttaactcttcataatgttaattaattgtagcacgtatctaaattaaattgactaaattatttcaacaatttatggtctattggtttaggtcatcctaaccacaaatttaggagaaaaagaaagataaaatttataaactttccatgaaatatcaaatggccataaaatgtgggtgttaaacatggtattagcataaaagatttgttttagaattaatgagtcaatcattcaattatatacttttatagttttaattggatttataatactttacacataatcataaacaggacacatataaggcccatattttaaatcgttgggtctagacagaaacatatagtatctaaaacttctaaatgttcttttaataaatttaaaacaaactctgtagtctctactgataaaactggaagaaaattacagttttataaacattgagtatttataccgctaaaaataaacattaaatttatctcgcttacaaacttaaaattttaaatacctatgtcgctatttacccttattattattaaattataagaatttttaacttgttgcattttttggttagtatatttgtgttatatgtcgtatttttgtgcttgttgtgctttaaattttttttttttttgtgttgtgttatactaatttataatatcgtattgtgtcatgcctaacttcatattttttggtaccaaagtctaagtccctagttacaacactattctcaactaataactaactagtgagcttttgactagaaacaatgggtattcaaatgcaataccattttttccccttaacccatcaaacaaacacaatgtctagcaaaaacaaaacgcgttcatgaatcataattatgaattaattaatcaaacttccatttcaaaaccaaaaaacacccctatattcaattcaataacaacaaagtttaccatatatttctcctcaatttacccaaatgtattttaaatgcataattaaatagctgttagataatgacacccttaaaatcacagcttgcatatcaagctctccactagtggccaagttggtgttggaaacgtgtgaatgtgactatgaagaaaataaaacaataatgtacacaataaagtacaaaacagtataataataataccagataagaacgtttgaccatacgcggtcttgctttttgtactaaccatatatataatattggatcatcacaacaataaaaatcagaactttaactgattttcttttgtgttttgttgtttttgatcatcaatggtactcttggtagcaaaaatcagtaagctttattccaagctggaaaatcttcaccatcatagccaaacagaggctttgttagcttcttttgaagggtttgaatcccaagtgtccaatcacttgataaagtttcaatctttagggttaaagatcttatctttttcatggattcatcaactctttgagcttatttctttggtcaacaaagcttttgctaggcttgttgttgagattgaataccctgcaagtaaatgggaatcttcatctattgatgagtatctcaaatatagcttgaatttgcttgattttttcaactcaattagttcatctctttctcatcttgctcaagctaagctctctttatctcatggtgtgagtttagaagagaaatcatcatctttgggtttgaagaatttgaagccaattcagccatttaagcccaacaacaagaagaaatatttggtcaaagaaaaagtcaaagatggttcttctttgtcttgtaaagaagaggtaattcaccatgctttgatggttatggaaagtttgagttattgggtatgtggggttgtgttgtgtggtttgtctagtgatgatgagatttactttgaggtgagaaaattggcaattgggtatgtgaaagtttcttcctttattagattagagtcaagtgtttatgaatttgtggtggagaaaaagaatggtgttaaggaagtgaaagaggttaatgattcattggctaagcttgtggatgcaatttctgatgagaaaagctatgatgatgaagctgaggatttgaggaagaaattgggtgtttttgaggctatgttggaagggtttggaaaagaagttgatcatctttttaatgaggttttgagtggaagaaatcaattgattaatggatttagacactaaaattaatatgatgtgtaaatcagcacaagttgtaatgttttataaagcttcttatttaagaagaagttttgaatcttttgtgtattttatctcgattgattgtaatatgtatgtcttgggattaagaagaaatctatgtacagaaaagctcaaatttaattattcattttctcaatatgttctttatttacttgttgtgttcttatcatttcataataggtgtttcaaaatctcataaatcattgtttggaattggtgatgttacaaagtacctaatagtaatataaattatttttttcatctgttgaaggaaagtacctcatcaagagcaccagagatgtaaatgtaattaatcttacactatgtttggtagagggatacatggattgatggattccttatttggcaagagggagaagattgatggagggagactctttcactccatatatacaatttctaaaggaggagggagggagagggatagagggattgatgaattttcttgtttggcaagagggagaagggaagggaagggagaggattgatggagggagaaccttttcctccaaatgcacaatttctaatcccttaaaaaatgggggaattgaaaaaaaaaagacaaaaatgttatataaaatgacttttttacccttcaaaataaaatatataatcatattaaaaataataaaatagtaattttactctccgtctttttaactttactttaataccaaacaacataaaagagactaactatcctctccatctctcttacttcccatcatttcaaaactctttatctatcctactcttcctccttcctactaaacatagaaaaatgctaaaagagcactttaaggtgtcaagcatcacaagagttgacgtactgctgttgatgtaatttaatatcgagtctcacacatttaataaataatacagtaaaccaatagctaattataaaatatcatatcagtataatattagacccttaaaacaccaaataacaatattctaccggcctacttgttcttaaggtaccacatcattaatattagatattgtgctaaatatcatataaacttataccacttcaaaacttaatacatagtaaaagtcttttttttcttaaattttttaagaaagctttgtcatacattctaacttctcaaaccttaacagagccaaaataaaatactcaagcatcaaaaccaatttttctttcttgaagagaaagaagaactagggtatataccttgagttgactaacaaaattcttctcaaaacttagttgaatccttgtaaaattgataatgaaaatgattcttttggtacaaaatgtgtgcacaaaattagttttttagggctcgtttggtacgtcgtataaatgtcgtattgtattaaa

SEQ ID NO: 227288 - DNA, 2041 bp, Cannabis indica
gtttgaaattatttgtggtgcgatcgcggttcgaaaattttttaaaccgcgcggtacggtatagtttgcggtaatttaaattgttaatgtgcccgcaccgcaccacatattataaaaatatcaattttaatatttatctaggtccaatatgtgaaggctcagttcaaagcccactaattattgtattgttaaaacttgaaacttttttcatatttatttttaagctttatggtatttttgacaagtgttgctcaagctttgttataaaagtgatagtttaattatttagtgataatctaaactgtaaaaactgcaccgcaccgcactattttttgcagtgcgatttttgcagttttttaattttgtagtgcgggtgcggtttgagaaattgaaaaaacctatgtgtaaattaattttaaaaaatggttaaaaatcgcaccgtccgcactgcaaaattaaaaaaccgttgattactctttaaagtattcacatagctaaataatgagtgaagaaataattagctagtcattattactctatttctaaattctaattaatagtcaagacttagtttttcccttttttatgtataagaaaaagaagagagttatcagtgtgagtagtgacggactcagaaaatttgtttagtagagtaaaagctaaaaaatatatctaaaaatagacaaaaattatactaaaaagggagtatagatgaaaaaaattacataaaatagactaaaatgtaaaaatatattaatttttttataggaaaaaaaaaaggttgagagggggcgccataattgctctctctagtcctaaggtaggtacgccatttgcgagtgtggctccctctttttggatgttattaagggagttctaatcttaaagaatgttcgctaagaccttaatcgacaaatcatttcagggcgagatatgtcaataaatgaatatatatttatagacaataactatataatgatatattgttattaaatgttagtagagttcaatattatcacgagatatcgttttgttaatggttaacaattattttttaaaataattattaaattaaatatgtaattccatatttaaatacacaatgtggtaatggtggatactttgagattttttttttagtatttcttcatattttcgttttaaataaaaataaaaataaaaataatttcaaaatatttttctaattaaaaaactaagattagtttcaaccgttattttttcctcttttattaaaaaagaaagattagttttaacttttttgattacatcaaggcatatgctatgttctgaattaaaatcacaaatgactaaattagtatatttcttgtaccaaattgtgaaaaggtataattttgttgtcacaaaaaaaatggatcctacttttaatttgttaaaacaaatggacccaaaaaataaaaatggtattttaaattctacaaaaaaatgtttcaaaaaaaaaaaaaattcctacaaaaataccatttttctagtacatagaaataaaaaagtatttttcaaaactaacaaaaaagtcacatttgtaaacatcaacatataaaagtggtaaatgcaaaaaattgcataattttcagtttttccaatttctttcaacttgtatatatcattagaaaaacaaaatctaaaggattctattttctcatgtttgaatgaacttgtacttattattattgttattattattataactttattttcgaaaatataaattattaaaaatttataaaaatcagtaaaatacaatatacatcactatacaaaaattatgattcaattataatacaataggtaaaaaatagaatgatttttcataaagattattcaatttaatacaatatgtaagaatatttaaatttttttaaaaagttataatttctttataatatttataaaattttaaaagatttattatgatttttacccattaaactttgatatgtaccaaatatgtctcttaaacttttcaggctgttaaaaaattttcttaaactattgagattgt

SEQ ID NO: 227289 - DNA, 2173 bp, Cannabis indica
aaaattttttaaatagtttacaaagttaaaaatatatttgaagtttttttaaggtgtacttcgtgaactggaatatcaaaaattctgttttcgatatggtaaattatttgaaatttttcaaaaatttattaggataatactgtaagtgatttcaggtgtagaggttaattaagaggttctaattagcactcctctttgaatgtaatgcatctgtgttgatttgaattagggaactaaggctttctgtagtggaggtgatcaagctttgagaaaggctgatggttacaaagattttgacaattttggtcgtcttaatgttttagatcttcaggtacattttcttttttcaaaacattcatttgggttattaagaaggtttgttcatttttctttatgttattattatttcagatacaaattcgtcgtcttccaaaaccagtgatagcaatggtatatactaatcctgatcctaattttactctgttcattcaatcctctcaataaaacttacttaacatgatatactcactaggttgctggctatgctgttggaggaggccatgtattacacatggtatgtgatcttaccattgctgcagataatgctgtttttggtcaaacaggtcctaaggtagtacttgcttatgactcaaaattatagtccagctctaaaaggggtttttgatcaaacttgaccaagctgtaaaattttattgcaggttggtagctttgatgctggctatggaagctccattatgtcccgcttggtaagcttttgaactgagatttattaagaatagaataaatatgatttgtctccagaattattaagatacttgttgagttttgaactataaaaatcatcagtttaagagtatagaccaaaaaatatatgtataatatgttacattcttagagttgatatttgtatgtttaataccaatttcaaataatttaaaattgttaaagagattttctactgcaatcatacctccaaccctttgtcacgtaggcaatttgtttaaaaatgagttagatgtaattgaaagggaatatttaagattttttataatttgaatggattttttgaccaaaaaaaaaaaaaaccaagggacaaactttacaaagatcataattgagataaaaaacaatcttacttaatcttaagaatataacccaattaatgtgtgtgatccattatgtatgggaactactaaacaggttggtcccaaaaaagcacgagaaatgtggttcatggcaaggttttacacagcttctgaagcagataaaatgggacttgtcaatactgttgtgccagtaagttattttgctttattgaaataaaacttatttgaatttggttaaattaaatgattctgttgatttgtccagctagagaatttggaggaagaaacaattaaatggtgtagagaaatactaagaaacagcccaactgctgttcgggtcctgaaatcggctcttaatgctgttgatgatggtcatgctggccttcaagtaagtactaatataagaaaacagagtttagagaaaccaagagaataatttaccttacataaaaaccccttatatgaatcataatagtagtccccattgattgaatgtactgagttgaaacattcaatgtacatgtaaatgatgatcatatttgattagttgttttgtgggatggatgtaggggcttgcaggagatgccacacttatattttatggcactgaagaaggtaatgaagggaagacggcttatatggaacgtagacgccctgatttttctaaatttcctcgacgaccttagttgcattgtgttagtgttaccattatttattaatgtaaaaatatcagtctctttttgaaattccaagtggtatttcactattttgtgctaactagctattaagattgaacattatcacttatcatagcattttataattgattagtgatgtttttatattatttattaaattaaaatataaaaaaaaaatgtcttacttaccataaagattatgttagaatctgtagcttctaaattctaactccaaaacacaagaataatacataaaaatggttttgtggtattttttaatttagttatgcttccacgactaaaataataaaattcaacctcatggcctattaaccaagaatctgttag

SEQ ID NO: 227290 - DNA, 3903 bp, Cannabis indica
ttcgcacaaaatcgattgatgaaataattggtattacgccactagagctgtcggaggaagaggatgatgtactcgtagggagaaggagctgtaactcacaggaagacttgtttcaacctcctctgtctcctaaatcctctctgaaggaaattaaacgcattgatgatgcgaggaatgatctgttgcattttattcatgcgaataatcaatgtaacagtgatttatctcgaggtaagatctcaaatccccctattttgcgatctggttcaataattaggaatctggaacaatcgttgaatcaatcagagaaggtaagcaaagtcaagattactttagatgacatagaagatgaggtgaattttctgcaaccatctattgtatgttatgtcctgggatctaatccccctctgcatatattagaaggttttgctaaacgtctgtggaaagacaaggtggataaggtgcgaatgctcacctatggagtgttcatcattcggttcacttccatggaattcagggatcaagtgctcaacggagggtacatttttttcaatcgaatgccaatgattatgaagccctgggatgcagatacaaacttcagaaaggaggatgtcaagattattcccatatggattcagcttgaaggacttgagctcaaatactggggacagaagtctctctttaaaatagtggggcaaattggcaaacctgtgatagtagactcggtcactcgggaaagggatcgtttgaattaccctaggattatggttgaagtgctcatgaaccagaattttcccaatacgctggagtttgaagatgagtatggaagtaatacgtgggagtgaaatatgaatggaaaccagacctatgtactaattgctctggaatggggcacttagctgcagaatgtaaaaagaggaatggttctaaacaagaacgggttatcaaagaagataaaaggaaggagaaaatcatggtagatgaagagggatttcaggcagtatcgaaaggaaagaaagtgcaagagcagaaatctgagataaaggcaccaagcacttcgaatggctttcaagtgctagcaggagtattagatgataatggagatgctgatctacagggggctgatgttgtagcaatggacaacacaagagaggggtggggtccctctcttggttatggataagttccttgtttggaacgttcggggagccaacaaccagcaaaaacaacaacagattaagcagtttattcatactcaggatgctggttttgttgggcttctcgaaacaagggtaaaggttcacaaacttggaaccttgtaccttaatgtctttaatgggtggtgtttttcatcgaacatagcttcgcaccaaggggggagaattgttatagcttggaacctgaaccgattcattgttgatattatcaagtgcacaagccaatttatgcacctgagaatctcaacaatggatggtacatataacagtctgttaactgttgtttatggtttcaatgacaagaaagatagaatagaaatgtggaaggatttaatgcagctaaaaacagatgaaagctagatactaatgggagatttcaatgccatcacaactaaagatgagagagtgggacacagagtaaaataccatgaggaatctgagttcattgaatgcatacaaacctaccagttagaagacattaaagctactggtagtttctttacttggacaaacaagcaacaaggtcaggaccgtattttctcaaagattgatagagtcatggctaaccaaagatggttagatgcttatccgaatgctgaagctttatttttgaaggagggaacctatgatcatgccccagggattctgtctttattccccaagtggaagtgtggaaaaaaaccattcaaatacttcaagatgtggaaatcacaccctgaatatgatggcaaagttactgcagtttggaaacagcaaataaatggcaccagcatgtatcaaatggtgcaaaagttgaaggctttgaagaatgtattttgagagattaatcagaaaggtttttctgatttacaagcagttttgactcaagctaaacagctccttgatgaagctcagagcaaactacatgcagatccactaaatgaagagttgcaatcacaagaacatgatgctaggaactcgtttatcttagcacaacaacattattactcttttctacagcagaaagctaaggttagctggcttaaagatggagacagcaacacagctttattccacgcaagtatcaagcaaaggaacaggcagaatcaagtcttctcaatagagaatgaatctggggtgagggtttttgaacctgaacaggttacggaggcattcatctcatattacaagtctctcctgggatcaaaaatggcaagtaggaagacagtttctaacaagattctgaacagaggcccaaaggttactcccgaacaagctaaattgcttactagtcccttcacaaaggaggatgtcaagaaagttgtttttgagatctcagggaacaaagccccaggtccagatggtttctccagttttttcttccaagataattgggagctagtaggagaggatgtgtacagggcagttacttaaattcttacttctggtaagattctcaaggagataaacacaaaaattctcacaatggtaccaaaagtgaagtgtccaaacactgtcaaagattttaggccaatagcttgttgcaatgttatttataagattgcaacaaagctagtgttctctagaatcaaatggattctccctgatctgatctcaaaatctcaaggagggttcattcaaggcaggtttattgggcacaacattatgatctgtcgggatctagtgaggcattatgggaggaaatcaaacaaggcaaattgcatgatcaaacttgaccttcagaaagcttatgatacagttgaatgggagtttatagaggagatgctcattggacttcagtttccaactctcttcattcaaacagtaatgaattgtgtaagatcacccagattctccatcatgtttaatggttatattcatggtttctttgaggcaaaaaggggcttaagacagggagatcctatgtctcctctgctgtttgttcttggcatggaatacctatcccgaatcttgcaagaagttggagacaaaaaggattttatctttcatgagaggtgctcagacttgaagattaatcatttggcctttgcaaatgatgtaatgcttttttgcaatggagattttaaaagtatctactatatgctttaggggctgaaattattctcattgacatctggtttacaaccaaatcctcaaaaatcagcaatatactgcagcaatatgccacaggaggaggttagtagagccgtttagcatctggttttttactaaaagatatgccttttacttacttaggcgttccaatttaagctaaaagaatttctggaaatgaatgcattgctttggctgaaaaaatgactgcacgaataagaacctggagctttaggatcctttcctttgcagctcgagttgttttaattaattctgtgctcatggctattcatgcatattggtgccaagtgtttatcttgcctaagaaagtgattagacatttggaatctatttgcaaagctttcctttggaaaggtcaagcttgtgcaacaggtccgggtctaattgcttgggagtctctttgccaacctaaagctactggaggtctcgggtttaggaaaatcagagaatggaatcaagcagccatggggaagtacatatgggcaatagcacaaaaacaggatagcctttggttgaaatggatcagcagtgtctatctaaaggatcaagaatggtggagttacaaggcccctgc

SEQ ID NO: 227291 - DNA, 2284 bp, Cannabis indica
tttatatatatatattttttttttgataatagaatttatatatcatttatagggtgcaaataaaagttcactcttttttaaagggtgtcaaaatgttaagtccttttttaattttagtattaatttatgtaataataataatcaaatttgccgacatatatattagagttatcttactttttttttttttttgtacttgttcaaaactatatgtatgtgagtataataagaaaatggtgatcatgtggtgagattgtatatattgttttacattattgttgagagatacatataaatatatattgcttcaaataatatagttgacatatttgataataatatatagtaaatgattattgtatagtataatctctagtgctacaagtatattctctaacaacattacaactgtctaaaaatatttctcttccccttttaaaataagaaagaaaagaaaagaagaaagaagaaggaaaaaaaaagggtagaaattgctatattatttgatatctttcttaatttaagaaattagtaaactgtactcaattatgaattctctctctctctcttcttttttttgagaggaagaattctctcttacacattatataaccaatatatagattgtgtaatttttataaattcctattttttattagagtgaaaattagaataatatcgagaataaataatatataatagtcccaaatatatataagaatgtacatatataataattgtgaatgtataatatatttgtgattgtcttgatgaatcttatacataagaagtatcagaaccacaattaagtttctttttcttttttttttttaatcgaattaatgtgagaatataatagagagtagtacagacaaaacatccctgcttttatttttttttatttaattaatattgaaatgtagtagatttattaaagttgttttaatttaatgacaattaaagaactcaatgtataaaactaagaaatttaaaaatttcagtatacaaataataaactagaaatgatcgatttccacattgttgactaaagtaaagttattaattaagtattctaccacaattagaaagactcttcccgcaacataaatatatataaaaattgaaagaaaaaaacaaaaaataaaacatataaacataactaagaattaaataaaaaaatgtgatgtttgtgctgtatcacactgtacgtaagagggagttcgagtataaatccagcctttttctccaatgctacgaaaaaataaaaataaataagtaatgatctttttttgaaggaaaacattagtaatgatattgtattattgtgtacttagtatgaaccagaagaatgggtaaaaaacaaaggacggttggctgattaataccacgagaaaaggaaattttagatgatacactgtttttatacatggtgcatgtaatttttataaatttacatttttacattttaatttactataatacggacatgtctttaagttatgtttttcttatatagtgtaagatggtgtgatacggagttgagtcaaactgaagagttgattgtgataagagtgtgtgagtgtgagatatcaattgtgtattaatttttttttcactagttttgtatttattttggctaaacactcacgtggtaaatattttcccattccataatagaagatgaaaagctctaatttatcagctatatcacacggcagtaatgccaaaaagtgtttattgtaaatacaaatggtctatttatagagaaggaaacaggtcacagaaactaataccctcccctcaagatgaattatatatgttttttaagttcatcttggttacaatagattgaaaatagcttggtaaaagaggcttggtaaggatgtcggcaatgtggtttttggcggtgacatgaattagctttagtgtgccttcttggatcttctctcggacaactaggcagtcaatctcgatgtgctttgtgcattcatagaatacgagattttcggagatgtgaatggcggcagtgttgtcacagtaaaggatggcgggatctttgtgttggatgccaaagtcacaaagaagtgccaacagccaagtgatctcacaagtggcatgagccatagccggttattcagcttcagcggaagaacgagaaacgttagactgcttttttgatttccaagagatgagagatttgccaagaaaaacacagtagccagaaacagaccttctagtgtcactggaagaggcccaatcaacatctgaaaaaagttttagatga

SEQ ID NO: 227292 - DNA, 5406 bp, Cannabis indica
taaattggatgaacacccctaatctactgaggcacatcaccttattaagaggatttagaggattcattcacatgcctaatgttgggatctgactttgataccacttatcaaggatcgtcgaacgctatccatctccatatttggtatgatattgtccactttgggccaaagctagccttcacgttttattcttggacacctttccaaaaggccttacaagttacactaatgaatatagcgtccatccttatatacctatgatcattcttatttctagctaacgtaaaatttggttgcattcctaacatttactatttctaaacaaggttcgaattacattcagttgcatgctgattgtgtttccaaccttgggctcttcatgtggaggttgcaattggtggtagaacgcgggcttgcccgtgggcaatgcatcctcgagttattttgtctccattttgggtggttctcgtgtggtggtgtgctttattcagatattttattgggaaggttggggctctcttttgtgtaggtcaggtattgttgcagtgttttattagttttttctgttgtagtaatgtttatcactctgtcttctgggacatcggctttatgcctttttatttgggcttgttgctcttctttgtaattggtgtcgagtgtcttttgttagtcaatctccttgtaaaatttgtggagagttgtttctgtctaacttattgggcagcttgttccttccattaggttggactaggtcatcagtcatcgagatctagcacaatctacaacttagtgcaggggacaggaaattttcttctaaaaagagaacaagaattacttggtgatgaaaataataatttcattttattctgatctatatggcaattttaaaccttttttttagaatatttcactgtcatatacaccattgtgcaaccctttaagtatttagtaatttaacaatcattgccttttttaagggaaaaaaaaaacaatcatttgcatttgagttgattatattataaagaaatacatgtactattgtactccaaaaatattctcatccgtcccaaaactttgatggaaaacaaacaacaataaaggcaaaatgagaaataatcatgtcctgaatttgagtatttaaaaaaaatgtctacatgattaataatatttaaaaaaattaattaattggacacatttttaaattaatttaatacattacggacactaatttttcacagatgatcttgccctatatatagactcaatttgttgggttaagccgtatacaattaatgatcactatatatatattatatatatatattcagaactaaattccagtccattaatcggtgatcagatcatgtggtaatgttgtgttataaaactagctagtaataatttaaatttggaaaatgtgaatctagatccttggagtacggcataatatattaatgatctctttctaaaaatgtactaactaaattaaattcaatattagttaatatacaacagttatcgttgaatttgagttcctaatagagtaataatcagtcagaactattctatttctttatttcaaatgttattaattaataataattatccataatgaggaataatctcattacttcgaaccaagcgaaaatcatattttataaataataagtaaattaaaaaagttaacgaacattacgatgcatatatataatttcaaattgaagacgtaggagtcgagatttgtctaaacatttaatattactgtaataaacttgtgtttaattatcaatatataatcatatcttaaactttttattattaactaattatgtccaagttggatgtttgtttctgtgtgtcatgaacaagaagtatgagatattaacaccaacgtaagcaacgggtcgcacattacgataccaaactactcatacataacttgacattctttattattattattattatgtttatgtgtacataacacaacataacataataataataatgttattttctgtttgactattcagcaaagggaagaataatattaataatgataataataaattaaataaataagggcgtgggtttggcatagtcaagagagaaaggatgagaacgagaattttcaaatctttttccgcgttatttctcagtactttagctaataattaatatttatatcatatataaatttaatatttatgatatggacaagtacacaagagtgtaaaatggccatatagattttttatgcttcgcttcatatctaatgagtagatttatacagcggttttgaactttgaagtagtcagcaattggattattcgtacacaaacacatttactggtccattcttgtttgtcactaaagaaagaaaagaacaattttgaattaattttttaaaaaaaaaaaaatcattttcttttcaaagaaaaagatcgtttttttttgttttccttcagtcaaaatccttataattctctttttccatctcttttccccatctcttataaatcaccccacttcctctcaccttcttttttaagaaaccctcactcactttctcatcattcattaagttttacccatttctttttctctcttcaaaactagtactaaactcaaaaacccatcaaactacacacattattcactttctttaagtaagccaccttacaatccaacatctacaacttcactctcaattatttgatgatcaagctatattaacaaattttttcctttctacaaacacccttttgctttcctccaaagatggttccattttaagtcctttgagtacttgattatcaaatttgtgttgaattcagcttagtgcatttgttggtttactgttgttattgttaattaaatggagaagaacatggattttgagcaaaagaccctagtgaatgaactaatggaggggaaagagctagcaaaacagctaatgggccatcttcaaccatcttcttctcatgaagccagagatgttttggttgaaaagatattatcttcatatgaaaaggcactttcagtgctcaactgggatggaaagtctaagcctttgggtttggaatcttctccatgttcctttggaaatactagcccaagaagtgtaatcattgatcaagacactaatcacagagatgtctttaagaagaggtacaaaaaaaattgcccaactttagatttcagctaaattgtaaggaatttgtctgatttgagctgcctttttattttaataccataatttgtgttttttactttcgcagaaaaatcactgtgaggagtgagcaagtgagggtaccattgggaacaggtgcagaagggaatctggaagatggccatagctggagaaaatatggccagaaggatattcttggggctaatcatccaaggtaagacacaatctcttgtagttttaacccaactcacacttattttagatctcctttttgtttgcctgactccattcagtgtaatctaatcattggtttcaccaccacaaaattgagtttgtattttcaaagcacacgtttaactcaattaggctaatcaatcatcaatttggttctctttttcttttttaatttttagaactgtttaattgatgggccttattaattgagcctattgttgttagccacttgggttgacaattctacttcttacaattcatcacaaaatatctcaagccacacaaacagacacaaaacattattcttcttcatcgtagtagttcaatttattagtcccctatttttctggctggacttttatctaataatatgtctctcttggtaatttttttctttctttcctatctttctttttctccaaagttaatctctttactcataaatttacagaccccacgtgttctgttgtgcaataaagtttagactctaccaaatttcatcttgttagttagtgccttttgtggacccccaaaaaaaaaaggcttgcttgagttaaaaagagaaaaattgctataaagaaagtaatgatttgaatttactgtttgtgtaaagaatttgtacaacattcacacgacatattcttctttggtggcaacataagctcttaattattcactcttacaaaatttgtataccaaaacaagagtgtgtacactttttctaacataaaattgtgatattgcagaagctacttcagatgcacacatagaaaaacacaaggttgtttagccacaaagcaagtccaaagatcggatcaggacccttcatttgtagacgttacttacaaaggccaccatacatgtaggcgagcctctcaaccagccattgtggcctcatcttcatttaccaaaaagaaccattttccacacaatgaagtagtagtcaaggaagacaagataaggcaatctcaagtgaaaccttttactcttgaagttaagacagaggatttggacacaagggaggatcacatgtttgcacccttttcattcccttcaactccaatagaatctgaacacaaccatttcttctctgagatgattgagactgatttcgcgggtggtttctcgtctccttttatatctccagccacttcagattcagcctacttttcggtgtcaccgtgtcataagatgaccagctttggacttgccaacaatgtccaaactcctgagtctgatctcactgagatactctcagctccaacatcactgaccaactctccaatgggtgatttggatcttacacttgacaatgtggattttgaaatgaacttcccatttgacagtcctgaatttttctcctgatgtataggagaggtttttattttgttattactggcataaataattgaagagtgttcataaaagttaggactaggaagttagaatttgacaaggcctatggccatgatgctatcagagagagtgactgttcctctccttggtactaaatttaatttagatgtgtagcatttttggttttgattttccttgtagtcttgtttaaaagctttttttccttttggaagtccaagtctcctagaggactctgttaattataagaaataaacaaagttcaatcttgcatcctgaaaatatataatttactgaagataatgatgatattccagttttattgcccttttcgtaaacttcatagaggatgagtacaaaagtggtacattccacttaaacaagtattcaagtatataattactagagttgaggtcacctaatctatcaacacaacttatacaatcatctaatatcattttggttttgtactagaaaaccctttgcaataagcattgaggaatccaattctattttcatccctggcccctccaagtacctgaaacaacacatgttcattagtacatacatacatgctccgaaatttcaactagaaaaatgggaaa

SEQ ID NO: 227293 - DNA, 4073 bp, Cannabis indica
gtaagattttttgtagtgattttctcattaccaactattgaggaatacaatgcttatataaagaagataaagagtataagagaaacaagaaccaacacttaaccacttaacaatttaatagaaaagactctagctaattaactaaaactagactgtaatcacaactgtcactgacttcctcaacacgccccctcaagatgttcaggaaatattccatggacagcttgctacaaagaaaattgaatttgagaaatgttacagccttagtaaaaatgtctgcatgttgtttttcataagtaatgtaagatacatcaatttgtttgttcaaaccaattctcgaacataatgaacatcgacttcaatgtactttgttcttgagtaaaaaattggattggatgccaacggttgagctccttgattatcagaccagagcttggatttctgaggcaaagtaatgccaagttcatggaggagagaagagatccaaactagttctgtggtagtggttgatagagccctatacttagattcagtactcgaccttgacacaaccttttttcttctagaggccaaagtaatgagattcccttcaaccataacacagaagctagctgtaacagactttctatccacaatgtcaagcccaatcagcatctaaaaaccctttaagagacatcctctttgcagctcgaaaaactaaatctctacaaagtgtaccatggatatatctgagaactctcttgcaagaaaaccaataattggttgtgggagaatgcatgaattggctgggcttatttacaggaaatgatagatcaggtctagtaagtgtgagatactgaagtcctcctatagtgcttctatagagtgtagggtctgagaatggttcattgttcgaagtagacaattttttgccaaggctcattggtgtggtacaggcctttaagtcaagcatctttattctttggagaatgtcatgagcatacttagcctcgcataagtgaagagtagaaccatgactcgaaacttaaaaacccaaaaaataatttactggtccaagaacctttaaggaaaactatgtgtgaagattagtgataacctattaaatactcttagaattgacaccaataacaagtatatcatcaaatatatatacaagcacaatcacaccaagtgattgtctttatttgaataaaatagtgaactgtctgaaacatattttttaaatccccaagcttcaaatgcagttttgagcttataataccaagtcctttggtgactctttgaggccataaagggctttatggagtttacaaacatgatttgggaactgagaatcattatatccttgtggttgagccatataaactgtttgtttgagatcaccattcaaaaaggcattattgacatcaacttattggatttctcaattaaaggtaattgctaaagtaaaataaattttgatggtgctttctttaactacagggtagaaggtaacaaagtaatcaacaccagtctattaaaacctttagcaactaatcgagctttaagtctatccaaggatccatctaccataacctttttcttatacacccatttgttccacattgtgcatgtcatctgtatatggaaccaaggtccaagttccatttctttttaaggcatagtatttagtgtccatatctttgctccatctgggagactttagggcctgcttaacacttgtaggttcacaaaaatcatcattagtagtagttagttcagctgctaatacttttactttcgttataccacttttggatcgagccttcatggggtgcattgaaataaattgtggaggaggtgcaaatgaagagggaacattttgaggagtaggttctgtgatggattgataagcactagtggactctgaactagaactggtaggactgctgtggtcaggaaagggagaatatattggatgtggaaaactagggggaggagattgagagtacgaggtagtggctagatgagttgtggacatagaggattgaggagtaagttgtggtacaactagatgaggagctagagatggagtgtgcattaaggatagaattgaggtaaggaagtaggtgttttaggaacatgtgtagaagaggcaaataatgtcttgtatggaaaataatgctcaccaaaggtcacactcatggctatgtataacctacctgagggatgcagacatttgtaccctttgtgagcgggactataacctaagaaaagacaggcataagttttgaaatcaaacttgtgagattgatatggtcttagggagtcgattaatgagatatgctgcaaaacttacaccaaaacttgagagataaactagcttgagctaacaaggtgagagccatctcagtgagatgcctgtgtttcctttcagctttacattgttgttggtgtgtgtgtggcaaggatgtctaaaaacaaacccaagtttgagaagaataggtttaaagggtcggtattcatcaccccagtaagcttgaagagttttaattttgcagccaaatttcctttcaacgtaagcattaaattgcaggaatatatttggtgtttcaaacatgaggtttaacagaaaaacccaagtgtaggtagtgaatttatcaagaaaatgcacatagtatttgtctccatatgtagatacttcatgagacagtccccataaatcagtgtgcacaatgttaaatggtgctttggccatgtttttagatgaggggaaagtaaattgatgcaattttctaagttgacatggatgacagaactcaactttagagcagggactttgaaattgtttaagaattttattcaaaacatttttatttggatggccaagtttttggtgccaaagatttacaatggttgaatctttattataagaatttgaaaaagaaataatgtccacaagtggtgtcattgagatttgagcagaggagtagttcttggatctttagactgggaatttgacattggattgatgagactcaagttggtacagaccatctttaagagtgccctaaagaagaggcttctttgaatccttgtccttgacaaaaaaagatcaggggtaaatttgatagtaacatcattgtctttggtgaattgagagatgctaatgagatttttggaaatggatggcacatgtattatattttcaggtataatattctatcagcagtgaaagaactattaccaatgtgagaaatcgagtatttggaaccattacctacaaccattttttccatgcctttgtaggaagtcctttgcatcaagttgttagcatctagtatcacatggttggaagcaccactatccagattccaaccatcatcaggtggtgctaaggaaaaagcaatgttggcatgtggagcagtttcactagaggttggagcagatttttcaactctagtgaagctcacatcaaatctcctatagcaccgttgagcagtatgtctagctctcccacaaaatggatagatcactctggagccatttgaatttccacgtgcttgataggaaccattgcctttgcctctacaacgaaggcattgttggagggtcctaaagttgggagttgaccagactatgaaaatcaagaggattgattcttcttagcttgaggggaatttagatccaagagaatacttgaatgtgtaagttgaagtcgcatctcatggtttcgaagcataaactggacttcctgaagagtgagcttgtcctttgaagtcaaattcactactacagattcgtaatcgctgccaacaccaataagaacataaatgatctgttgttcttcagagatagaatttcctgcagcttgaagaccattgacatagcttgtcatcttgagcatgtacttatcaattgattgtgagcctttcttggtgttctgaaggagtgacatgagatgaattattctggccttggattgagtgttgaaaagttgctccaatgtttcctagatagtagcagcagattcacagtgcacaacatggccaatccagttcagaaattgaagacattagccatgaaagaagaaa

SEQ ID NO: 227294 - DNA, 3875 bp, Cannabis indica
gagaaaggaattttgtttcccaaccttcaattcgttttcgaacacgctcttttaagtaaccaaaaacggctgtcttgttacgagatatagtgctgggaagtccaagatatagactattcgtccctgctatagtcatgccgagtctttggctaatattgttacgagttgccaaggttgtgttagtgctgaagaaaatagaagacttagaatagttaactttctgacctgaagcctcttcaaatttactcaacacctcttgtactcttgtagtttcttccatagttgccttacaataaagataactgtcatccgcaaataacatatgcgatatccggggggcaccatttgcaactttgcaaccatgaagtaaaccacgtgcttcgtatcttcgaaggatcgctgaaaggccctcagcacataggataaaaagatagggggataatggatctccctgtctctttaattttttcaaaaaaaaaaaatgtcatgttaccattatttcattaagaaaatgtttatattttttgtacttattactcgaaattaatattaatgagatttaatataagttagttatttacctttccatggtagtggacggttgaagtagaagcaagtgccaaaaatgcttgaacaagagatccttgtcatcataaggcaacctaggaaccatgtcattaccataaacaaatctaaaatactttatattatgctctctcaattttttggtcatgaattccccaaattgcccatctccaaccctaggttgcccaaaagtgtaaacaccctccaatctctccaacaaaaaatcatcctcatgtaataccaaaacagttggaaaaagaatagctagggcaccaccaagactatgccctgtcaatatgaaatttgctttgtcgtttttactcaacaactcccttagtttatccctaatggcatagtaagcagtagccgggcggttctgctgctccctgtccaaatcggtgtcgttttgggcctgaatatctttgggccagcccaggttcttttgtaggcccaaagctttcataaacccaccatggattttgccaactttagaaagctcgtaccaagaaatgtcgaagtcagaacaccaatcttcagcatcgaatggttcagttcctctaaatgcaacgacaatcgtttcatggtcgtttcccttgtctcgaagtaagaaggcttgtgtggatggcttttctagatattctaagggacaaaaaacccaaacattaaattatatatttccaattattcatatatctatatatgatcgtaaaattcatttatattttatttctttaattaccgttccaaaagtcgtaggttcctaagcactccatctgagaacacatgcacaaaaaattaattaagtttaatgatgattaattaaagttacagaaatgttaaaggcgccggtagtctcctacgtgtcaatatatctattggtctaatttagtatcgggtccattttaatataataacttttagggagtatcgttagccaatcgtaaagcgacacgtcataagagtggtagacaccactagtgtccgatagcaatggtcttaaagttaagtgataaaaaatataccttccaatgatggttgactatattttgaatgtaagcagtgttttcataggatgccttagaggccatcatagagagtgacccataatatctggggtccccaaatttgatgttggtgtctagattcattctcttgtccaaatttccaataaacgacacgaacatttctgatgttttatctggctttaccactttccctgtccaaattaattccacaattcacaacataatcattttttttcttatatattatgtaaattactaacatcattacattttttttaaaaaaagaagaatgcatatattatggtagcgttaggtagttaaaatagttaattaaaaccaatatggtacaaattaaaatatggataaaaaagcttacatatattgttttcttctggagttttcatgtagttcgtttttagggtaaataccattttggaccctgtgttttgcaaaagttacagattggaccctgtgttttgttaaatgacaaaatggaccctgtattttctaaaatagtaaaaatagaaccttgagcttaatttttgacaactttttttttaatacaaccaacttgaagacaatgcttaatacgaacagataaaaaaaaatgtaaactagttttgtcatagctacgttttaggtcggattataattaaattttattttgacaaaaaatcaattcagggtcctatttgtactattttagaaaatacagggtctattttgtcatttaacaaaatacagggtccaattgataacttttgcaaaacagagggtccaaaatagtatttactctcaaaataaatgtggatggcgcactctttgctcaagaaaagaggtatggcttaggattagtctctcgatcttctgatggaggcattattcaagcaaaaactttgaataaagttggtacatttcaagctcatgaagtagaagcaattggaattaaggaggcgttgagttggatcaaggatatgggttggactaatgtgattgttgagtctgattgtctgagagtgattaaggatttggaaaatataataaagttatggcttctccttatggccatattatttctgattgtaaggctttgttagccgatgttttcaatgtttcttttcattttgttaagaggtctgctaataaggttgcgcatatgttggcgcgatcttctcttattgaggctgactgtgtttttagtagagatactctacctattgtaattgcttcccttgttttggaagacttgaattaatgaagtttcttcatgattattcaaaaaaacagtatttacccttattaatacaagtataaatattgtggacattattattgagtttatattggtggcctactttgcttttgacttatatatgtaaaagaaaacaatataggaaaattgaaagagactagttgattaaagatccaaattcaaaagtaaaatttttggcgaattaatgagtgaaataatctcatttagtgattcacactttttctttcaaaaaagagattccaagttcaaatacattactctcctaatgtcaaaaaaaaaacgagtaaattttaagtggtatataattattagagtctgtcaaatttgtgtgactttgtaatgtatgccatctcagaaaatcaaagacaaaaatctaaaatttgtacagttagtttgttatacatgagtagcagttagtagttaagagtttctagtttttgggatgagcctataaatacccttagctgtgtaattagaacaatttaatctcttacttgtaaattcagatattagacacagagcaataaagctatttatttcagctaagttcttgtgttcatttgacattggagtttgtttttacttattgttcttggatgttcattgtgtgtgtgaggatcgaattgtcctcaccaataatatcatatatatatatatatactagatgagagttacgtggcgagccacgtaaatattagttttatataaattttagtggtttttgtttaagaattcattaactgagcaacgacaacaacaatggtagatagatctatttaagtttttcatatttgtaaagattataaatctaaacttttaattttcttgatttgagattttgaattgttctgatttatttgtttatgaatttattgaaatacttgaatatttattggttctgattttgaattgttctgatgtattcatacttgaatatttatattaatgaaattagtctgtagctttatgttcttagaaaaaaaaaagatatt

SEQ ID NO: 227295 - DNA, 4808 bp, Cannabis indica
atattaataatctggattatattgaaatagagttttatttagggcataaaacccaacaagagccacctaccaatccaacgattatatggtcttgtagtatttcacagtcccttttttcgtgttgagtaaggaatcctagtggggtaagagggtatatcctcacctacctatgggtctataaataacttcatttttcatgtacaaatgtagaacaatttttacttacaaaaattctactgaactttctatagagctttcttctttgagagtaacaaaaggaatacagagattatcattgtaaacacttgtaatactcaaatatttgccaaagaaggctaatactactgactcgtggactaagaattattaacgcatgaaccgtataaaaaatctgttgatctattatttactattttgcatttctttaagttcttgttaattcgttcctaaaaatctcgataaacatatgtataacatatttaagtcagtgttggattaatatatatatatatatagagagagatgcatttgtagttttgtgtatagcatattttttaaccttttttctactctttcaaaaaaaaacctttttttcttaaaaaaatcccataaaatcactttctcggaaaaaaaaaaaaagagtaatgataacacaaacttgacgcacacttactagtaagtaacttcaaccaattatctttatttaagatggatttattaaatataacttgtcataggtgtgtgtcatctttatgtgtaaattgtgtgtaaaattggcttgataaggtacttggagagttgtaggcgctataattagctagaaccgtttagtacttcacatctgcattccaatccaagtgaaacccacggaaacaaatccttcaaattgttgaaaatataagagaaactccctcaaaatctcaggcatttgtaaggaatcttccttcaagctctcaattagaaaaagacaaaatgtgcctaaattgaggtgatcgcatcacatttttatgtagatcattaggacccaataaagaaaaaagaatgaccaaataactctttgcttttatgttacaacctgtaaagaagaaaacagaaaaccccacatgctatagctcaagtattatgacatccttttgttcataaatggaattccattataagaatcctcaaatcaatcacctttttcttgagcaacaatttacatacagattgcagctatgagatcttatctctctctctatctctctctagaatctagcaaaagaacttgagctggaagtgagatttgcaaatatgctttttacagagagagagagaagcaaaagttggatgcaaaacagggccctcacatcaatctttcagtatcatatcatagtgtaataattatctaaatttataatgaatgcatgattggtatgtaacacgttataacatatatgcatttcacacaatatgtcgtatatatatttgtggaatctcagttgtcttcctctgcagatttcaattacaatcatattcccttttcaaatcaactaagaaagaaagaaaaagagctagagtagtgcttttatgatggacaacaagagagtaaagaaacaacttcctaagaaaaacttgtggaaaccagaagaggacttgatcctgaaaaactatgtggaaactcatggtgaagggaattggcaaactgtgtccaagttaacaggttaaacatttacttgtgttccttatcataatattcttcattattatttcatataagagtcagacactcatctggtctctttcaccttctctggcactcattttctcatattattataggtttgaagagaggtggaaagagctgcagattaagatggaaaaattacctcagaccaaatataaaacgtggtggaatgtctcaagaggaagaagaccttattatccgaatgcataagcttctaggaaaccggttagtgttatttttgatttttcttttttactaaaatgtcatttatttatgttcaaatgaatgttaacttgagtgtaagatgataagttcaagtaatgattctcttcttctctctagatggtcactgattgctggcaggcttcccggaagaacagataatgaagtgaaaaactattggaatacccatttgaacaagaaaacatctgcagtggggaaaagaaaacgtgtaaacaataacagtgaccaccaaaacgacacaaaaagcactgagacgacaaacaaaacgagcgaaatccaagaccctcctaatcccatgttgagcagcgaaactcaaaaaatctccaatgatcttatggatgacacaaaaaggttcaactacaaaatagaaaatcccattatggctacaaacagctccacttttgtcttcgatgatgagcctctccctatcataacttacatggattccttcgtttgttttgaagcgtttggacacactgcagggttggagaatcatgcaaagataggaaggcaatcagtgtttccataatgtatcttttttaaagaaaagaaaataaggaaaagaaaaagtagttttatttatagggactagtgtactaaataaataatcaaagctactttcactcctggactggagacccactcattcactcacatacttgtcgtttgtgtataagtgaatacaagtctcactaatgtacttgtgaaaccaacatttaagggtaggaactaaaatttgaaaacattgctggatcgcaacactttgtgctataatttcccccctttaactttatggccttgtgttttatcctgcaatctcgacggatagcattatgtagtttagttattgttatattaatatatattttatatgtattgaaacaaaggttctaatctcctagcaaattttattcgaagtgtttgcagattagatgtgcgtaccctttacccctaaaccaagagtttctctcccttcaataaagaagcaacgagaagtgagcctaacgtatctttgccatcttttgaaatcgaatccacatgatatagatgataagagacatgggaggtgatgatatcttgccagtggaccttatctccaaaaatcttaataataattttacataaaagagaatatgaaaaataaaacgtgtataggaatcccgtgatctaattaagtagaaacaaactgagacaatcccaaatgttggatccaattgcaattaaagagagacagatactcagattcaggtaaggaaatctaagagaatatactttcattcccaagaatgattggcaataagtctctgaaaaactcttaacaattacagaagcataaaatgtaaaataaggtgaatatgttgggaatacaaaaccttataaatcctcccattttgataggacagtgaaaagaactacaatacttcatcatcttgttgagaatacaataataagccattgtcaatgggcaatgaaggtggagttccgggtggaatagaagctgcgccattctccccagcacatatgcacaaagcttctgcatctcttatgactgcatcgagctcaatttgaccgctcaattcatttatgaacttcaacagagtgtcaaagtccatctgctcccccattattttatttcggtaccgtttcaaaatcgcaacacaaatgtataggtgtaaatgctcagacatataatgagtccataatacttcccacaatctcattgttttctcatattcaaattccctggaaatacaaaaggaattctgtcagctgcattgtcttggacatggaagatttaatgttaaagctaatagctatatgttatacagttaataagcagcataaaggataacatagtccaaagttaaaattaatggaatttggaaaacaaacaaaataaatagtgaaccagggaacccaaccttttaaattgaattaagacccagcgaaagcaaaagaagtaattcaagcactcctgttgcttgaagtaattatgcaatggactgtccaacaattccaccaactgccacaacaataattagaaattattaagattgcaacagaaagaccactacctgcctagcgaaccaatgaaaacatacagaccaaaagacacaactcgttgtgacatgtaaaatcacattggaagctcattatattgccaccaaaatatcatttacttaaatgattaaatgattgggagtattattttatttttatgataaggaatttcctgaatgattccaagcgtcacattatttatcatatctcaaacgaagaaaaaaatattcaatagagtacaatatgtttatccaagtctacaaaattgataaattttcccaccaaatagaatttgactttctttttcagtttcatattatcccctgctcagcaataaaagtaatacaacatgttatttcaatttaaactatgacaccctatttggacaagaaaaagcaaatgaaattcaaaatgcatggaaaattcaaaacaaaagaaatcaaatcaaatacaaaatattagaagctagtgtttttagtgtgacatattactgtcaatgtcaatttgttgcgagtaaaatataataaatatatatatatgtatatgtatacattcatgaagaaagaaagaaagcaaataccttagaaattgcaaaaagttgagtgtgcatgccattttggtcacggttaaaattaggtcctagacgctccatcagcgaaacaaaacaccaaaaggaatcagcttcattccccattacaaataatattggggatagaaggtcactcataccctgagtcacagaccaacaaattttacttaatattacaaccaatacaca

SEQ ID NO: 227296 - DNA, 4654 bp, Cannabis indica
atttttatttatgttgttttttaatttcataacttagtcttatgttgtttttattatattaaatattattaattttgttattactattttataattttaataaaatagcatgctttaaatcaactattatactcttgtggtaaatttatatgagataaattttcaaaataaattaaaataagggctagaatgttaaaaaaaagtttaatatccaacatcttcaatggtatagaatttggtgcgtcattaaagtgtaattgtgtgaagatttcacaccaatttagtgaaatggtacactattggaaatgctgaagctttttatacgatgttagaatttgagagttaggttaggaagctttttataccatgctagaatttgagggttaggttaggggtcttatggtatatagacttcttttttcctttgtaaggagtcttattatatagatttgttagttgaaaaaggaaatgtgacgtgttactacgtcgtgtacagggaatgcggcacacattaagacagagagagtattcctttatatagcaaattatgattatggacggatttatggtctccattcactttcacagtagttcatcaaaccacagagagaatcttcttgtgctataaatgagagagaggccatgccaatggcaatgtacgtagacaattacctaaccttcttttgaaatggcatcggcgaagagcaagatcttgttcattggcggaacagggtatatcggtaaattcatcgtggaagcgagtgcaaaggctggacacgacaccttcgtcttggtccgtgaatccactctttccaatccggacaaggctaagatcatcgatggcttcaaatctctgggggtcaaaatagtccacggtgatctcttcgaccaccagagtctgctcagtgcgattaagctggtcgacgttgtgatttcgaccgtcggccatgctcagttgcccgatcaggttaagatcatcaccgccattaaagaagctggcaacgtcaaggtactttcagaataattaaaacctcaaatcagatatattttattgcaattatatattattaaataaataaaatgtgtggtatataaaatttgaataaactagaggttcttcccttcggagtttgggaacgacgtggatcgagttcatgccgttgaaccagccaaatcggcatttgagattaaggctaagatccggcgagctatagaggcagagggaataccgtacacttatgtgtcctccaactatttcgctggttattttcttcctaatctcgcccaagttggtgcctctgctccacccagggataaagttgttatcttaggtgatggaacccctaaaggtaatactaatcatcaaactattttgttattaattttatttacgaataccttttattaaaattttattcccaattgtaatatttggtttatgttgaaatgtgaagcaatttttaacaaggaagaagacataggaagttacactataagagctgtggaggatccaaggaccttgaacaaaatcttgtacataaggccaccagccaatatttactcatttaatgaacttgtggcattatgggagaaaaagattggtaaaacccttgagaaggagtatgttcctgaagacaaactcctcaagactatccaaggtttgtttttgaaactagacttacgtattataatattaattagcttcacaataagagatttgttctgaaatttaagtgtttcaaattaatggcagagtctccaattccaatcaatgtgatcctatcaatcaaccactctgcttttgtgagaggagatcatacaaactttgagatagaaccctcgtttggagtggaagcttcacagctttatcctgatgtgaaatacactactgtggatgagtatctgaatcagtttgtctgatgttggaggttgagggctagagtagccacccctcctattgtttctatctttgattattcactaaataagtcataatacacaagatgttgtctctgtttcagtgttttgtgtgagaaaaaaaggctgaacatctcttagtaatgcaaatattatcttgtatccaagttaattgaactctgtgactttaaaactagggacacatcatataaatatttccttagctatctttgttataagtatttcttgtatatactaatatcacagtacccatatcctattttattagttagagtacatacaggtgtttccttgagggaattaacttatcctattgaattttgatagaaattaaaaaggattttttcgtgtatatactaatatagtaaaaatattacacataaattgagcaggtcctataaatatttatctgcaacaaaaatttacaaaaatctctattgctctatccattcaatcttacccaccttcgacaaagacaacttccaaaaactaaatcaacaggccaaccaaaaagaaaccaagttaaacgaagaatcaccataaatttcagcgacatcacctcagaagaagactggaagaaatctaaacacatacaatttcacatttatgagaaatcaggcaaaaaaattagttcgaaactaaaattcagccctgaattacaattaaaatcatagaaaattaatcatcttaatatcaattttttagatttataaaatgtagatttgtctgaaatagatctggagttcttgatcaatccaaatcaggtataaaccaaagaaaaatgtacactagctaatgattttctcgttgcattaacgttattttctaaattttcaatagtgaatttattcatatcaaatcacgaataagaaagaaaaattgaattcttatagagccacgtacgtagaaacgttgttctagttttaaagtttctgcgtagttgcattgcagttgtattaatattttactaatgttttgaaattagacatatcaatgattacaaattgtcaacgatacaatagattttatgatatttgtaggtgtttcatatctataatccaacacaaagctcattaaaaaaagattataacatgttagttttattaatatattcatttggttgttataaagttggttcacaaaattctaatagttgtttctccacatattattatattaaggtacaatttattgttgattagtgacaaaaaaaatactaacaaattttttcatgacggtgtccattcaaattttctatttctagttgcatttaagttgtattttagttgaataatagttgtgctactacaatattattatttttttaaaaaaatagggctcgaaattggcaatacacgactcaaacagagaaaacgcgattgtggtaagttttgtttgtattacatatgggcattattagttgttttaaggtttaatattagttgcctcacagtaaatataactgatgcattacaatttcatgacagttatcccatggctgacttacaatgcttaaatttttaaactgtcaggaaaaagacacaatttcgtttcttatattttgcaatgaacagtttgatcaaggtacgaattatgtaaattacaaatttactggccaatacatttcaatagattgcaaatatgaagaactagtacacaagctgaaacaggtgctggaatgcaattaagaaaacactcaactgtaactgaaataccaagtaaaagtaatatactaaccgttgaggataaatgacgatccaagcctattcttctacatgcaactaaaattgaaagaaccttacttcacaaggtatctattgtgtgtgaacatgatcatcaacacaacaataacctacaacacctccttctttgcaatgagcaactcattagttgaacaacaattgttttaaggttgtatgacatatataaaatattaacagaaacatacagtattatcaacatcatatttgacacatgaatgtgaagtttcaaaacttttcttactacattgacaattctattcaaaattttcttattattaaagtactgcaatttttaaggtccaagataagtgttaccatggggactcgaactctgaagaataaccaaatgaggaaccttatgcaaagcattccaaccaactacaccacacactcggtggtacaattaatcagtcattttaaaaaataaaaaataatcaatacttttgtataaaaaaaaaaaacttataatccttagagatatttaaaaaaaagaataaataggattttttttctcctaaagaaactattaataagaaaagttagactctcatcagcttggttctcccctttcttaactccggggaggagaatgttttcagcaacattaaactttactttcttcttgacagggtgacgatcactttttttggtaggcggagcaaagtctgaatcatcatcttcaacaacgggccatttgcctttagatttgttggcaagagatttaacactcatttttgaaggttttttcagtaatagcaatggggaagatgaagaccaaataatgaccttttctaaaatagaaaaaagaagaaaaaaaaattagaaaaacgtggtcaggtgatggaggaagatggataaaatcaaatttttttgttcaaaaatagttttgatcttgggagaagtttttaaatagaaaggtacaatgtaaaatgaaatgaaactgaaaaaaaaaa

SEQ ID NO: 227297 - DNA, 2456 bp, Cannabis indica
attagcaactttgaaaaatattttaggctagagggaaaggtagctcttataacaggggcggccagtggtattggcgaatgtacagctaaagtctttgctcaccatggagctaaagtagtcatagcagacatccagaacgaacttggccacttagtcagccaatccataggccaaaacaattgtatatttgtccactgtgatgtcacagacgaatcccaaatcaagaatgatgtggacaaagcagtggagacctatggaaaatttgacataatgctcaacaatgctggggtaatagatgaagaaaagccccgaattatagacaatgagaaggctaattttgagcgcgtcatgagtgtgaacgtaactggtgtcttccttggcataaagcacgctgttcgggttatgatccctgcaaaaagaggtagcatcataacgacagcgagtgcaagctcatacatcgctggtgtcaactcacacgcctacacatgctcagagcactgtggtaggccttacaaaaaatgcagctgttgagttgggacagtttggtatcagagttaactgcttgtcaccttatggcgtggccacgcctatggctaaggccacttgtaagcttgatgacgaggagctcgagaatttgttgaactcggctgcaaacttaaatcatgtgatgctcaaggcagaggatgttgctaatgctgctctattcttagctagtgaagagggaaggtacgtgagtggacataaccttatcattgatggaggtttcagtattgttaatccttctttcaaaatgttttaataccctgataaagatgaaccttgaaaaaagataaatgctttcagttatatatatggggacttcaaaagtttggtacgtactagtgaaattgaatatactgcatggtaagcattactatttgttatatttactcatgtactatttattttgtatcaatgtcggtgaagctacaattttgtgatgtggagcaaaaaacttttgatacgtgtcaattttaagaactacaaacaaaactgttaaattgggtacctacggactaactaaaatttcgagcttggggactattattgcagctttttgagattgaagacttctttacatcaaagtgaactttttggggacttatgccgtaatttaatatcaacacgttgtatttttgagagcaactaacaaatctgttaaaatgaggaccaactaacttacaagaatgtcaagcttggggactattatcacaatttttcgagattaaaaatttatctgcatcgaaataaattttttggggacttatactgcaattttcccataaaaaaataatttttactatgttaatgatgataaatgtatacttaaataaagaaatttggtttcataagtatataataaaagcctaacaaaaataaatttatatataacaaatattagtgaataaataataggtcaggtttcgaacactattagggcttgtttgctacatcgtgttgtattatatagtatgatattatattgtatatgtattatttaatacaatactatgtttggtataaacttgtatattaataagtggtgtaaaactatacaatatttactataaacttgagccaaccctgatctcgaccctggccctggactcgaatcccattttgggtcccaggccgaactaggactcgaaccacttcctaagacctcggatcagggtctggggctatttctggcggctgggactatggttccagtatagcgtccgggtcgagtttgggtttgagatttgaggtgggatgcgggtccagggctgaggttggggttcaaaatccaggttcagatttgagtctaagtttgagttttacgttcgacattcagagtttaggtttgagggtcaggtccaagtccgggtctaagtctgggttcaaatgtctaggtctggggcttgaggccgggtcccgaatccagctccccaatcctgacccattttcaaatattataatacaagctaataattcaaattttttatatgtattaaataatatgattcaaattgtattaaaatttatggttgtaatatgttgttgactgttttattcatagctaaatggtcttagttctatgtatagctacaagccacaacctcaaatatgaattataaattttctgatatttacttacaaattatttaataataaatattaaaaatttaatattcaagcatatatcaaaatattcaactctttattaataatcagaaatatcttgacagacttttcagtgcataaatcctaacattttattgcatagtattttatcaatgtaattagatcatatgatcatggatttacaagatttataaattaatttatgtatttctaattatacacttatttctcattcttagaaatgaaataagttcataacatatttagtgaacctagtatatatatatata

SEQ ID NO: 227298 - DNA, 3790 bp, Cannabis indica
atcaaacccaccgcaacccgtagcctttccaacctgtccttacaaagagtctcacacaaaaataaataattgggtttcttctggataataagattcacaagaaattgataagtccatgggttcccaagcccacgacaattccagctaagaatactcataatggacggtgggcctagatcccagcacccaccagaggccccttttttgagcccaattcttgattaacttcatctacatgaacatccaaactactattacccttctcaactagatccttacacaacccaatagcatgttggcccacacctcgttggcccgatggcactccatcccttgtgcgcctttttttaaaatccaacaacatgatatcatcattcgaatcatcaatatcagcatcattatcatgtatctcattcccactattgtcaacaccgacatggtatcccatactttccatagcattagaagaattagattgagtagaattccccccccccccttatgcaggactgaagtgccacaaaatcctccaacaccctcctcccttcttggctgctgctgtaacagtaccgaatcagtcgccctatcaccatggaatcggccgacaaacatctcgtccgtctcattcccatcacgcaaccactgcgagcccaccaggttgtttctccgtcgtggttgagccctcatccaagcaccataaggctttatgagcatcttggctggtgtatcaaaatgcttaggacaaaatctctcagaatgccctattacactgcagataaaacaaaacgtagggagatattcatacttgaattctacccagaacccatcctctagtgcagtccgacggagcttcttgcattgtttcaaaggaacagtgatgtccaatgtaacctgaacacgcatataatctctccacacattctgaaagttcttaggatcggacataacatatgtaccaaaaaaattacccaacttttccaccacactccctgtcacaccacgcaaacaacaaaccagaaaaccaccccaggacaactacctccagccaaaaaaccaccccgaaacaaacacccctggaccgatcgcacctgtcaaaccgaaccaacaaaaccaccacaccagaccccacggcaagaccagcaagagacaccaaccgcaccccgagcaaacccacgagaagaccaacccaaacttgctgaaattagacacaaaaatcaacccagaaaaataacatcaatcacaaaacaaagacacacaccatgtcacaacagacaagacatacaccgaagaagacaactccggccgataagaacccacgacagaaggaatcgtagaagaacgacgcctgtgagaagaactccgcacacctgtgagaagcagctaaatcatttagggaccgccaccggccgacgacgtaccgacgccgagggttgcttcagtccaagaatgacttcagtcgcagtcgcacccaagaaatcgtaagccgtgagtttcttcagtcgcagtcgcaattgtacgcctagggtttcttcagtttcttcagtcgccgagcaaaagcatttattattttatataaatgaaaattattattccttcaaaaaaaatgaaaattattattatcatattaaaattaattttgctttattattattttataacttaggtttaaatctaaatattaaataaaaaattatctttttttaatcataaaatgaagaaaacaagttagtaaagaaaattaaattaactattaaaatatatttgtgaattttttcaaatttaatttttaaaataaaatttacatatattttttttaaaatagaacgtatatatatttcaacaaaaatatatgtattttgttttgtttactttaataatttttaaataatatatttaaggagacactcaaaaaaaaataataatatatttaaggagaatcatcggttatctatctttttttaaaaaaaaatatatattttttatatttatatttatttatttattttactttaactctgttctattatttttctttttacggtaatactagttttagggttttatcttctctaaccttccacctgaagatcgtatttttttcttctctaacattccatatgagagataattggagatcatattactctgccatcagagacaaccatcggaaaagtaccattgatgatcactattggagacttccaactgagactaccattagagaccaccatcatctgagactaccattagagatcaccatcggagaccaccattgggaaccaccatcaaaaactgctattgaagtgctttctccatctctgaatccctaactaaaactcatattgcaaccctaactaaaactcatattgcaaccctaactaaaactcaaatcgcaacctacttccttactctgtctttctcttcactggtgagttttcttatttccttttctttggtgagattatatactttgagagtacaaacccaaactaaaactcaaataacaaccctaaatcaccattgaatcactcatcaccactagtcttcgtccactgcattccagtccactttccctagtttcgttgttaatgatttctcaaatcaaaattcaagttttactcaaattgtaactcaaatcacaatcctaaatcaccataactcattcgtcgtgctagtctccgttcatggtgttcaagaccactaggcctcacacgatattgttgccatctgcttaatgtattctctaaaatcgaaatccaaattaaaatacaaatcacaaccatctagaccctagtcccagccatttaatttttatgtcaatcaattcgcaatcatctaattttctctttactgtgtgaaatcccaatcgtgaaccctttctttttaacactgtaattttgtaaacaataaatttgaaccatatttttgcacaaataattcacggtaaaccgtatatattaaaaaagccctttttcaaaatgttaaataatgaaatccttaaggaattcagtcattattatctcttgtgaagaatacaattatgtcgtaccattactaagagtaacttcaatatagcaccaaaatgtatacaagtcgtgctataacctctcccgcccaacaccaaatatccctccatcttatcatgtgagctacaattaaggttgtctttagcttttatggagcctaaagaaaaattttataaataggtcttttatttgagaaataaaataaaaatcaaataagtttttaaatcatttttttttttgcaaaaaactttttttggggacttatgggctaatttaaaaagaaaaagagactgagagacctattgggctgaggggccttgggcagtggccccagctgtcctaccctaaagagaaccatgacagtgcacaacatatatgtttgtttacagaggttaattcctatgtatcagaactaaaattttctacaaatcagagcccagttcttcgatcatcaagggagattcaaagatcacttgcttccgcaccaagaactcatcaagaattcaacaaggaattttacaagaacacagattgaaggagaatgtcgatggcaaggttcgagctagagaagttcgatggatcaacggattttgcactatggcgagagagtttgaagggtatacttgtgcaccaaaaggtggcaaaggtactcggggatgaaaaattactggctgagaagaaacaagaggaaattgcagagatggaggagatggcatactacaccatcatcgtgtacctgtccaatggagttagaagaaactaat

SEQ ID NO: 227299 - DNA, 6675 bp, Cannabis indica
gcagagaacttcaatacaaattctctttctttatgctacataccaacaaaaaaacatctaaattagtcaaatttacaatacactaaaatcattgtgaagtttattttcttgatcatttaccatttcaatgtaatcatatacatctgctattgcatatttggtaactccattcatagtatatgtctttccactacttgtttggccataggcaaaaagggttgctgcatatcaacaatataattactattatgttcaaaattaagacaaatgcatacacaatatgtataatatgtgtatcagggtcggtctgagaatatatgggctaagaccatttaaattttggttatgagactcgaactcacactattgtataatgtgttatacatctcaaccaactaagatttaaatatttattgtttacaatacacttgattttagttaaataaaaacctaataaagctttttattttttattttgggccctaggcatgggcctagcccgcctatgcctagggctgacccattgagaatatatataattatatatacatatttgtgtgttgtgtataaataattttaagaaaagaagtagattactcacaattaatacccttgagaactgaaagaatgacttctttagctccttcattgtatacctcttttgtggtgcagtcgaatccaaataccctgtctatctccaattatcacaaatacattaaaaatcgaaaagagtattaagattttgggtataattttatagtatacaaaggatccttcacgtttcagaaaattttaaatagttaacaatgttaaaatttaatgttgaaatattttgttacatgtttgtaacatatgtgtaacttgttttttttcttcttatatatgtgttaagcatttgaaccgaaaatactataaatcattaagaatttcttaaacatttacagaaatttacaatatttatgaaaagaaaaattggacatagaaaacaaaaaaatatgttaccaaatcgatcattttaagaaatgtattatagattttcataagattttaaaattcatatatacaaaataattcatttaaaagagagacaaagaaaagataccaaaagtataagcagtcggaaaggtaatacgttcagaaagattgttcttgattgcaacagtattattactaatacattcccaatcacattcttcatttctggctaattccttttcgttcaatggtctaacccttaccgaaactacaatgctctcttcctcatctgaatttgcacccttctctaccaatgcttctcccttcatcattgtctttaattcttctctttctttttcctttgtatatatattaaagagaacaattcacgtttaactttcacatatcaaattttcatcatcgtgattctattttgaaatatagaataacgcaaaattatcgaaaaaatatacactttcattgaaatgaaaatgtaatagaagatttattccagaaaagaaagaagagaaaacatggcgagaaataataggaagaagggagagaaagtcgttacaatgtctctctttctctctcttctcttcttttgatttagatttggatttgttatttataccaaaaaaaaaaacagcctattattttcttagtaaacaaaaaccaatattaatattttgttgaatttttcattggtcattggattaatggtcattattgagtgacatgtcatttgtgtcaactatgataataacaaggatctttatggattattgtgtgtatataaattgtaatatgttgaatttttacaatatatgtacataaatatgacatatgaacttacaagtctatttttatttagattttatcttcttgtgttattttttaggagcttttgaataaaaaataaattcttttcttttaatttaattcaatatcgaatctcacaatatacataatttaatttaatgataattatagaaaattgctaacaattaaatctactgctagtgttcttggtatgcatgagtcgatgtaggttcgaacttcgaatccaaaaattagtatttcgggcaaaagttccaaattgcccgatttagtagggggtttcaatgagatctagccctacaagatttcgaaactaaaaaactctaataattactacataaataccgagagactcgaacctcaagccactacgaaaacaaaccacatgcctgactatttgagccaatcctcttgtttttacataaatacccacaggagagactcgaacctcaagccactacgaaaacaaaccatatgtctgactatttgagctaatcctcttgtcaaaactctccataactgatattgaattaactgtataaacagattaagtgcaaaaattggaaacaaaaatacaatataatagcccaaaattgtgctcacactaaccatgaacatatagttaccgaaacttttatgcaatatcaagttctaaattcaccttcttaagtatgatgaaagccattctgtgtcgttgatgttctctcggttttgtattgtatccttataaaaccaccgacgaattaaagctcgcaagcaccaagccagcacactatcttgtggagggggggctcgagtcggtttgatgaatcgtgaataaaacctaataatgatcattgtaagtaatgatagcttgtaacactgctctcattaacatcatccaactgtgtgttcgggcattaatagaagtacacagctagcgagggtgcctccaaacattctcctggtagtcgctatttgctgctgcttctttagggcggtcgcacctgcacttcaggcacgctgtgtttcttctataattcaggaaatcacatctacaataccgaattaagaatataatgtatcagttcagtaaagctatatatgtcttgaaaataaagagagaagaaaaagagaaagagaggtgatactcacgagggacattcccactctccgggatttaagagtcttttgggacgtgactcgagacaacgtagacattttgcattgcttgcgaaattcatgaactcacacctatcaacaaaatccaagttgtaaggacaaatcatcaaataaatgtaaattgaggtaatagaatcacatcaaagcagataaccctcgagaactaaacttcacatgttatggtgttttttttgccccgtctaccatgaaactctgctattggcaaatcatgatggagagaccgtgggttaaaacttctttatgcttaaactaaagaagcaatttttcagttcattcaggacgaatgtgaaaacaagtagcaaaactggactgttctattctcatattttgttaaagagagtgaaacaatccttaataagtatgtaagaggggaggggtggggaggagaaaaggcagcctgaacttcttatctccatgtcacaattttaaagattggcaaatagaatttagtggtttatgggaatgaagcaacaggaaataacaagcaataattattcggtaacagtcattcttccttaagaccaactttactccaatggaatggaaagctatctgaaacaatcctgttgccaaatgtatactttccactcataccttatgaggattaattaatatctaccctatttttaacttgagaatttgagcaatgatagttataaaaccacctgaaattgattagcagtacataatataaaaggaaactcactttgggcaattccaatctcctttcttcatttcaatatcagttcctccagatttctttggtccctcagctttgcacttcaggcagcggatatttctggcaaaattggtgaaattacatctgcagcacattcaaaagggcatcaaccattagtttaggcaaaaataaaagtgaaaagaggatcataagaacacatataaagggaattcgttcaaagcttggataaaaatatacacacactaatgtagaagacgggtagtttaactcagcagtgttaaaatataactttaaaattttaatgagggtgtgtatccttcaatttaactataagtctaatattctgaaatataatccaagagtatctaatttcactaaaccattatgggcagcgggcacttactcaggacagctccaatctcctttcttcatttcaaactcgcttttgccaacacttttagggccatcatttttgcattttaggcatcgtaaatttttggagaagttcatgaaattgcaactacgaaacagaaaatgaaggtattagcctatggacttaagctttaccgaattgctacaagtatgctgtaatttcatcgagtaaaaggggaaaaggaaaaaacagaaagcccttcagcccccgcccccgttgccataataatatcgataaaatctaagatatactagtattcaatgttatttattataatacaggcaaggtaaaaactattaaagaaacacaaaatgaaaagaatgtaacttaatgaacttacttagaacaaatccaatctcctctcttcatttcaacattattcgacaagtcatcatctgtcaaactcgacacttgttctttcttctttggaactttggcagcaggctgtggaagtgatggatcaacgggcgtttcactgagctcaagcaactccaaaagtaattttcttgcagacgattcaacaagctctctacctacaggtttttcaccccctgagataacaattggatcgagagcataaaaaagcaatatgcgcactatatccactgtccgggcatcagcttcaaattcctttaagattgtataagctctatcacaggaacctcgcagattgcaagcactacagacctgaatccaataaaatagtgaatgatttagatagatatgttgcaatttttcctgaatattacttctccaagtcaaagccatctacgttctaagtcataacctataaaaaaaaatggaaaattgagacaaattgtaaatgaagtttgagtttttgtctcgaattttctcaccaaccaaactaaaagggtattaagattatcttattttctttagctttttcatcgtatacctgctttgtggtgcactcaaacccaaataccctgtctatccccaattatcacaaatagattaaaaatcgaaaagggtatgaagattatcggtaattttatagtacaccctctaaaaatacattgcagaaattctggataattaacattgtcgaaaaataaagatccaaatattttgcacataaacttgctataacatcacaatgagaaaaatcacatacatccccttcatcgagtctgacataggctctcaatcttttagctgaattaacagctttccttaacagattaggacatccacctccaacaatcacctcaatatctttcgtcgacaatgatctacaaatgtaacattagcccatcagtaaaaaagttaaattttttcatatatttgtaatgttaaaccatggaatactgcttagataacaagtaaaatccaaaggaaagtgttcttgttgtgttggtgttcaattcaaacaaccacataaggcgtgaatagttccatatatgtatatatatgtgtgttgtatatacagttaaatatatatggaaaattgagacaaaatgtaaataaagtttgagtttgttttcttgtattttctcggaaaccaaacaaagagatagataagttacaaacattgacgaaatgctcaaaatgaatacaaattcatctactttctaattcatacatatataaaaaaaaatggaaaattgagacaaaatgtaaataaagttcgagttttttgtctgtattattttctcggcaaccaaacaatgaaatagataagttacgaacattgacaaaatgctcaaaacgaatactttctaaatcataacatataaaaaaatggaaaattaagacaaaatgcaaatgaagttaagtttttgtctagaattttctcgccaaccaaacagagagagagagagagagagagaagttacttgagaacatcgtaacgatcacgagcgaagctgagacaaggatctttcaaaattttcatattcttgtaaagactgtcagcttcatcagcagcaagggtttcgccaaaataacccttggtagtcaatcggtcaacgaaggccgtccattcaggccaagggtgacgagattcttcagtgctgctgctttctaagacggagacagcatcaacggcggcggaggaacagtagtagctactaccggtgggggggaaacgcagggattgggaagaaaggaaaattttggagaaggaagaggagcagataatagaaggttggggtaatagagaaagaggtttgtgggcacggaagattgtagttcccaactgtaagaattttgaagaagaagaagaagccattgatggggttttgcttcgttatgaaagagaagggttttaggacaagaaatgggaccaaagggttttgtggatagatagatagatattggctaggagcgtggataacacgcgccaaaaatgatggaaagttggaattgaaaaaccatattgttaaaaagattatttggtgttatttgtgtaattaagtatccagtcttatataatttaagaaaatagcttttagggaagagaaatgttaaaagatattagtggtgtttagtaattttttacgtgtcaatatcgttattggtataa

SEQ ID NO: 227300 - DNA, 4168 bp, Cannabis indica
ttttttttttttttttataatgtaagggtatttttggagaaaaagatattaaaaatatatatattctatttttaattgggtgttatattcaaacaacatatttacatttaagcatactaacctaaatttcctttaaagaattagaacaaaattacatctaaacagtaaacacaccaacaaattaagagggtgatttaaatccttaaaatttaccaggggcagaagagtaatctttcatgccataccataccataccataccataccatggtcatgtagcttttttttttttcttttccaatgggcatattatgaaattgacttaaagctaggctagaataagctagctttgccaagaagtaactgatgacagcctatctttcaaaagtagacaagacaatatagtcaatagtaaatttatactagtcattcttacttttattcatcaaaaataaaaaagacaacaactcacattttaacaatcccacaccatacccattactctgccaagtttctaggattttgtttcttccaaaaccccacttccaacttccaaagaggtaagtaagtcactttctcattatataaatctacatgattataatttatttatcagtattgttttaagtcattgatgatacttgtggatttcgtttatagttttagttaatttttaaaggcacaaagaattatcatttgttttatagttttggtaagttctttttctatagattggtggtcttaatgtaaagatttgggatatcaaatgagttattagatgtataaattcaattgcaaaaaattaaaacttcaaaaaagtggtgttggatttgcaatagagagaaaaatagaggtgcccaagtgaaaattttgattgaaagcataagaaagtgatgaacttctaaagaaaatttagatgattacttatattactttacaattcctaaacttgaaggtaatgctttgaaaaattgtttcagtaactgatgatgaacaaaactaagaagtatgaagtgggtaaagggaaagaggaagaagaagccaagcaaaagaagtttaaggttatattgaacaagctcactccccagaattttgaaaaactgtttgagcaagtaaaatctgttaatattgataatgctggcacacttcgcggtcttgttgcacagatctttgacaaagttcttatggagcctactttctgtgagatgtatgctaacttttgctttcaccttcatggagagttacctgattttagtgaaggtgataagaagattacttttaggagattacttatcaataagtgccaggaggaatttgagagaggagaaagagagcaagaggaagccaacaaagctgatgaggagggcgaggaaaatctatcggaagaggaaagagcagagaagaggattaagacaaggagacgaaagttgggtaatatcaggttgattggggagctgtacaagaagaaaatgttgactgaaagaataatgcatgagtgcattaaaaaactgttgggacaacaagagactcctgatgaagaagatcttgaagctttatgtgtgctgatgagcacaattggggagatcattgaccatcaaaaatgcaaggagcttatggatgcatattttgattggatgaaaactttatcaaataatacaaagctatcatctatggttagattcatgctgaaggatgcaattgatcttagaaataataaatggcagccgaggagtagagttgaagtggctaaaattagagatgaggaagaaggggctaagcagaggcatttgagggctatattaaacaaactaactcctacaaaatttagcaaattgtttaaacaagtgatacatgttgacatggataatgctaagacacttctcggtcttgtaggacaaatccttgatagagcccccgtagagcctattttttgcgagctgtatgctaacttctgctatcggctttcactagagttgcctcattttagtcaagaaaatgagaacatatcttttaaaaggttacttgccatcaagtgtcaaaaggagtttgagaaaggagaaagagtaagggaagaagtcaatatggatgatgatgaggagagagaagtaaaacaatctaaagaggaaagagaggagaatgtaattaaggcgaagagacgtatgttgggtcatgtcaagtttgttggggagctgtacaagaagaacatgttgactgagagagtaatgcatcactgcattagaaaactgctgcatcaacaccggactccacatgaggaaagtcttgaagcattgtgcttactgataagcacaataggggagatcattgaccatccaaaatcaaagacatatattgatgaatatttggaaaagatggaaactttatcaaataatattgaactgccatttaggattaggttcatgttgaaggacatcattgatctcagaaagaataaatggcaacaaaggaggagtgttgaagggccaaaggaaattcactatcgaaaggcaaaatcgctctctcccagttctcagttaggcagtcagaatgttcatttagatgtgggaaagccttttgaggccatgacattatcagctcccttaactcaaagaccactttgggatgatgcttctagagtagagaccagtagaggatcactttcaccatcattttctttgctgactgatagaaatagtccaaggaaggatctcattccgaggatgtggctcgaagaactgcaagagaagacaaaggcagctattaaagaattttacaggtttgttcatctgctagctatgtatgtttctaatgcccatctactcataactttcaggatgtcaatgcatactttcagggtgtgtttggtaacgcttattgtttaattaacaacagtgctcgggatgtggaggaagttactcaatgcattaaagagttaaactccccaagcttccacccaacaatggtatttatttggatcacagactcttttgaggaaaagggcatggagagagatcttctggcgaaactccttgtcactcttaccatgtctcgtggcgatactttgagtcgatcacatctcattaaagggtatgcaaattaaaaatgagaacttgttggctttctgttagaacataaggcattttctttctttctactactaattcttcttctgggcaggcttgaatttgttttggcaactttggaggataccataattgatgaccctaaagcaccagagtaccttggtcaaatattagccaaaatgatcatggcaaatgtggtttcattaggagagattggtcagttaatacacaaaggtggagagaagccaggcagccttataaaaactggaattgcagctgatgttcttggaaatatcttggggactatcagagaaaactatttcgacgagattatcaaaaaatctaatctgcatttggagacattccgaccacctaatcctctaaaatcaaggatattagagaggtttatccaggattgatagtaatgctctgtgtaaggtagttatgatggaatttgtgaagtttgacaaaagttctccctatcccattgcctcttctttggcttgtttgtgtatggtatggaactgggttgctttgctgtgcttagatttgtgctatgtagtttttataagaacaccctatttattatttaaaattaacataaacttttaacttatgctacaaaaatttggtttagagcaaaaaacagattgaaaattgaaaaaaattagaaggaagttttaatatctaaaatatgcacttaatatttttttttaagaaaaatgcacttaaatatgtgccatcacatttatttaaaccaccagcgagtagcatttattcaaagtgaagaatatggatgaataaaatagattttttcttttttacaagtgaaatgaacaaaatagaatttgtatacaacaagttaggtagctccggaaaaagaacccacttgtttcataattttttatgacaaaaattggatacttattcatctcacttattcttttttttttaaggtaacttattccttaccgtacacgtttgaaatagtcatcaagtcatattgtattatattgaattgaattattatatatcatatttttatataatactatattaaactttattttatactaaaatattatatat

SEQ ID NO: 227301 - DNA, 5015 bp, Cannabis indica
ctctcccccctcatgctcgaactatggtgatcaagccccccaccctttacatgcgtggctttgatcaaatgaggccacccctcgtgtgcattggcccgagatgagcgaggccacctccatgcaagcatggcgcaaatcaagtgaggtcaaccccatgggtggtggcccggatcaagcaaggccaccccacgcgtgcgtggcccagatcaagtgaggacacctcctcacgtgcatggcccggattgagcaaggccaccccctcatgtgggttggatcaagatgagcgaggccacctcctcacgtgcgtggcccaaatcaagggaggccatcccctcacatgtgcaactcgagacgtgcaaggccaccccaccttgcacggatatggtccccaaaggcctcaaccacctctcttactatgtttcctcctccatgcaacatgtgaagatactacgatctaactctgacgttccatgtatgggccacatagatattctttccctttgtccactaagtcatgcatgaaagaccttccatttatctacccatggcatttgaataagaataagagagaatcacttgataagaacttaccattaccaatccactatacccaatgatgtttaataagcataggtttcatacacatcgaacaaggaatctcttaaaaagacctacacaaacaagcccataacaagcttcaaggtacaaggtacgagagtacacagtacgaaggtacaaagcatgatgtactatgtacagtgtatcacaaagagcgtgcacctccactttgaatcgtcaattgtaataagtttatgtcataacccaagatactgagactagaatggaatagtgttacttgatgaaaacttcctatgaaaaaaatcctaaactcatatgcctcaaccattataggctcacacacatgacattatggaaatacccaaaacttggaatgtcaagcgcctaaggaaatttaccattccaatggtaatgaagaaagatatcatctcaatgaccttaaaaccttatgtttgaagggtcgttatgataaagagcttaagtgcccaatgctataaatatcgctacacacttagggggcaagaacgagtaagagagcaaaataaaaacactcttaaacgaacaaggattagctacccttggtcgccacatgagtaaaagaatgagaatgccttgaataactccttgcccttaaacataaacaaaagcttagcaataaaaaagtcttaatagacgcttaagctaagaccaagctagcgaaggtacctagccacaagagggtcttaaaagaaacccaagaaaaatagtatcatgaaataagaaggatgcttctccaaaaaaatatatgtatacatgttaaaaagcacgcgcaaaagcataaacaaatacaaaaggtagagacaagttcatagaactaacactcccttaaaatagataaacttaagagagagatcttggatcaaaaaatcccatactccctcattacacaagattacaatccataagagatacaccttagctcaaaaagcccatactccgtcatcaaaaatgttacatgaccttgacaaacctcgcaatggggaagagtcatataacaacaaaaacaacaacaacataaaagaaaaaataatggatgttcagtacagtcatcccaaagttaaagacacataactgaatgtaatgtcataacaaagcccacataggggagaatcactacaagaagagaaccattcagcaacacagcctttgtgcatctttaacaagctaaactgagacatcttcatcctacacctcccaaaaaggcagggtcaaccaaagaagataaacatgtgtgtcatgttggaggaagtaatgacatgcctaatatctttcattgaggcatccatctcgtcaatctcgaggataggttaatgctcttcttcatatagcatcacaagtggaaagtcatctgagcaaaaagaaaaagaatgagacaaagtgggagaagaggaaaaatcataaattaagtaatgagaaaatgtaccaacaagggaaaactcgccagagacatctcccacacctttcacatagaagaatttattcttccacctcccataattacaaagactttccacgattgaaataaatgatgtgtcactctatcaagatagtaggagcctctgcccattggaacaagtgccacatcgtacatgaaatgaacctccattggagtagagatcgaacatatctttgcatgaacaagatgtaaagatacgtcatgacatgaagggagaaaagttgaagtagttcaagacctaaatatagtaagaattcaagggaggaatgccacaatacgtaatgacgtgaatactatacgtcacaaagccagggaaggatgattggctctatcatcattagtagatgaccttcaactcttccctctaaacagtacatactcacaatactagcaagcttagccttaaccatttcatagatgattgagttaactgcaataactacttcccctccactcttttgtgatccatcctgatacaatgtgataaaaataaaagtatatgaatgcatagatatatgtaaatatataattatatatatagaaaaagaaaaaagggaacgccaatagaaaaaaatatatacttagaaataagtcagccaagacttgaatctcttaatgaaggccttaaagtttaagtactttactgttgggctaagtggtggaatggttttagataatcttatcaccatgaaggcctatttataggagaagagacctcaaggcatgtgcccgcatttcataaaactattggcaagtccttgtacttgttgagaaatagtgatgattataccttgaggatgaagtcacccgccatcaacaataacacgcaagaatagttcaagaccactcctaaaggatccatcttgaactagggagaaagtgttgatatggaaaattagcactcttaatcaagagatgtgtcttatcaatggtggccagaacctcaaactagttagctcaagcacgtggattcgtacaaggaggcaccctatacacatacagatgcgcaaagcttatcccctcgctcaagtaacatgaggtgtgaggccaccccctcactcgcaccacatagggtgtgaggccttctgcttcctcgagccacacgagttgcaaggctaccccatcgctcagggcacatgggttacgatgccccctctcctcacgtacaaagtacgcgatataagggctccccacatttcaattcaaggacatgagaggtgtgcctcacctcgtatcctaagcccatttgaagcctcctcaactttacaaaggtctttacaaggtccatacgatacaaggttcccttcacctcatacatgaaaaaccccatgcatatcatttaatctacctctctaatctctttatgccaagtgacatatgagaggggccttctaatgcttacacatgacatatcacaacaaggaagtatctcaccttcatatcaccaatatatagtgataaatccatgttagctacccttatttacctaaaatgtttaaggagtggaagaaggtcattcgacaagggcacactatagctaagcttctggcacttgtctacatcccataagtttcagcttcattcaccttgatccaatggtctccctgatgagcctcgtgtgcatcaagatatggtaagctacaaggtataaggtataaggtataaggtataatgcacaaagtaaatgatacaaaggtagacacctaaaagacaagttggttgaacctccacgcctctgaaaagtctacaaaaagtagtggttgtacaaagggtaatagagacacaatccataggtgtcaggacgacttgagacctgaccaccactacccccactacccttctaaagtgttgaccttagatgtacagttatggtgtgatttatacattagggaccacttgtaacctagggccaatagagcctctataaataaaacatttttacattgggaaaacggttgaaaaatcgtttgtatgaagattactcaatgcaatataatttttataaatactctccattaaagactagttcattttagtaagttttcaaaagtttatcatatttagttctttactttgattttctaatcttaacttagttgatgagttcttaccattaacaatatgtgatataagaagaatccaacgagtcaataactagaataatttatttacttatttacttttagagtattttagtttatacatgtattttgtataagtggtattttccatgaaagtacacaagctattaagtttgtagcatttaactactcgtagtacttttttatagcgaatatacatgtattttgtataatttgagtaatttctttttctaaaaatatctctttaattaggcacatttttcacaaaatattcttttatttaggtatttttacaacacatattcttttagaaatttttgtagtagagctcttaaaggatttttttagtagagctctatctgtttcggtatgtaagagagctttctagtcattttttttcatgatcgtgtgcgttgtaactatttaagaccacttataaatttttagaaaattttgaatagtctacaatgaccaaaaataatatttaaacagttattcaccacaggtataagaaaaatagtcgtgcgtgcaacaaaatatgtaaatattatttttagtattgtaaattactcgaaattttctgaaaatttataagtgaacctaataactataacgtacacgattatgaaaaaataaataaaaaactctctagaaaaaaaatataggaggtttatcaaaatatctctttaggggtgcaatgtaacataactgtgaaatacaagtagctacaccaaaacatgaacatcagatactttttataaaatactaattgttatgatgattttttttaaattcttttcattccaaataaagtttgaaatttttaataataataataa

SEQ ID NO: 227302 - DNA, 4290 bp, Cannabis indica
ctctctctctctctctactaatacaagtttggtttctttttctttataataacaaacaatcttcatttccttcttcttctttggcagtttattttatcttcctattttctgagttatatagaggcttagcaatttgtatgtctcttatgttatttatagagatggttgtatctcaggaccacaggtcaatatcaaggtttataggatatgcattatgtgctgccgatgaagctctgaaagatgcaaattgggcacctgtagagcaggatcagaaggaaagaacagtaagcatattctgtatgtaaattggctggctattactgtttcccatatatttttttgtatccttttttaacttgaaaaatgtcagggagtttcaattggtgggggaattggaagcatgagtgacatactagaggcagcacaattgatttgtgagaaggttacattaccttctaccttgttagattattgattcattttctgaaattatttctaatggtcttcttccaatatgcaggttattttttttttatttatttattgaagtttgtaatgcctattttgctttacttttatagcgtttgcgtcggcttagtccattttttgttccacggatattaatcaatatggcgtctggtcacgtgagcatgaagtatggattccaggtatcatctcccataaaacccaattatactgcaaactaagaagagtaaataatgcttaggtatgcaccatcttcattgcatggataatactgacacaactaggctacctgaacttaaacttcaaaagactagtctgcaaaacaactttagtgataactaacagaaatttcatcataattattaagctctttaatgctcataaccataaggacttccatatgcagaatgaagtgcgtgctatagtaatttctcacaaaagatatgtgatctttctcagggaccaaatcatgctgcagtgacagcttgtgctactggtgcacattctattggtgacgcggcaaggatgattcagtttggagattcagatgttatggtggctggaggaactgaggggagcattgatgcattgtctgtagctggattttgtaggtattacttaattatcataccaagtttttgacttaaaatgttgtttctcataaagatggatttggttagtagttacatttgaaatctttcatcttttaagaaatgcttttaaatttccaggtccagggctttgactacaaagtacaactccacccctcaagaagcttcgaggccgtttgactgttcaagagatgggtttggtaagtactacaaaaatcttttgtcttcagaggtgtgtttccatgagctggctattgctgttcttttactgtttccatcctattgttttggctaatttttcttttaactcaggataggtgaaggttccggtgtcttggtgttggaggtgagttgagactcgacatgtgcttttcaatgattgacttgatcctttttataacttttttggatccttataagtgtgccttggattatcttctgctgatacattgatgacaaaggaacttgagcatgcaaaaagacgtggagcaaaaatctatggggagcttcgcggatatgggacagctggttgttctctgaacactgcaaattgtacatttttcccctgtagtaacttaatgtacttagatttgaatactttgttctcctgcaggtgatgcatatcatattactcaaccacatgttgatggaagaggtgctatcctgacaatgtcacgtgccttgaagcaggtaaagcttgatgattgtggaccattatttttgtgttcctctagatttttaaatgttataacgttcttaggcattcaactggcacagttttttcaaaactatccgaggaaaaattgatagtcttatcaattttatgatggtttggtcaactctattagttttccgctagggcgtgatacatatgcattgtaatttgcagtgtagatctaaaatgaacaagctttcggcaagtgtcttttacagtgatgttcattgccaaaggaaaattatgttcgtactttgcaggataatatttgcagatgccattactgctaccccaagcttattcactactggataggtgtactatgagctccttgcactgtaacatacctagttctgcatacgacaagcttgttcactaatagataggtgtgctgtaggcagacgattagcttgtttgtaaagcatgtaacatgagtaaatgattgagcaccaacaagtattctgtcttgttttgagaaagtgctttgggtgtgaacataggtttgagcattgggagagaatcaatctatttgttcattaatgaaaaattatcgcggaaccataccattttttctctattattgtcaccatctcatgaatggatcaggaaatacttctggcttattataatgttgttgttttacagtctggtcttcattataaacaagtggattacattaatgctcatgctacatcaacacctttgggtaagtcttctagaccttcatctacgatgtttctccttttatttttataagctctttattatagctgtagattcataatgttgcttgtgatgctttgctcaggtgatgctgtagaagctaatgccatcaaaagtatgttctccgatcatgcaacatcaggtgctttggctttgtcttccaccaaggtaaattaagcattatgaacatcttgtcaacacaatgttagtgtggttttggaaataactctacttcatttcatagaaatattagctactgaattagttataatgaagttttagctttaccattttcttgtcttcgttccaaaggatatttcattcagctaaatggatatttgtttgtgaaaagttttcttgcatcataattttctacacacacttcagcatacatagaatgaggtttccatcaaaggaagaacataaataagtaaatgtattgtatttttttccctcatactttctacaattcagcttggttcttcatattgtttcctttgggggtgcaattataataaattatagggagctattggtcatcttcttggagcagctggagctgttgaagcaatctttgcggttttggccatacatcatgtaagtgattgcctttccttttatattttctatttataatgcaagactaggattttactactacaaataccttacctcctcgccaaataactaatttctgtaaaattgcagggaatggcaccgttgacacttaatcttgacaaaccagatccggatttgaggatgcgtttatgcctttgatatcttcgaaaaaaatgccaattagagctgctttgtcaaattcatttggctttggaggaactaatgcgtccttgttgttcacctctgctccttgacaatcactttggttctgcattgtcttgtctcataagccatatttcattcgtcaagcgatcttttcggccaaatgtgagataagcctgtagcttgagaggttctgcggacaaaaaagaatgcaaagcattgttgtctcattaatgttgaggttcacctctccactgtttgttaggattttagctgtaaattttgagtgagctttgttttgggagctgaggctgaccgttatttgggctgcacaagaagttgctgcaacggctagacgtgtgcttttggtgaagtatgacagctttttagcatagcaagatttgttcaagggataattaaagataaaataaaagaaaaatccgtcttttcttcaccctaaattttgcattacatcactttcatgatcttcaaatctgtatcttgcattaataaagagaattatatcttatgaaaaaaaaatagttggagtaaggttttcaaaattaattagttaaacaaacacctcaaattttgtaataatattttgaattacacaataattttctaacgtgttgtaaatttttttttttggttcttaagaaaataaattgttgccccttctaccaaaacaaataaattcggtaatggctaaatttgaagttcaaaatatttagtaatcataattcataagtgaaattactaatcatttatcacaattataatggataataaaagtcatattttagggaaaatattttactaaaataattagacacaacattcttttactaacattacattgattctgttaattattggctactagagtttttcttatttcttatattcctcttagtcttttggatgggtggcgtcctcctccctaagattggcttaaagtgaactgtgatgcta

SEQ ID NO: 227303 - DNA, 9094 bp, Cannabis indica
attttacgtataataaaaattatactcatccaaactaaataaaaatactaattagttcgattggatgttggatgtattggatttttggacactccatccaacatccgatccgaaccaattggatattcaaaaataacatccaatctgatccaatcacaattggatatccaatgtttggcggtcggttgtcactggattggatgatttatgcacacccctacctacaacccctctgaattctcacgaccgacgtgaccactgaacctccacagaaaccctagccttaactcccacgaaagatcttaacacaaaaatcctaacattggaacacaggcaacacacttgaatcacacgaacacattaggaaaaacctaacacatgtcaatagacaagactatttatagagattacttaatctaattgtaatatgattagtgctgaaaaaaaaaatcctaatatgattaaaattattgtaaatgagaaaatagtgtctagtgtagtagtaaaaagttttatcttaagttaagagatctagagattaattctcaaatcctattttctattttttaaaaaatatttaatttgtagttatagaggattaaatcttggaatgagttttaaaaagttttactaccactaaataaattatttatatagggatctcaaactttaattttgttttaagttctattatcctaaaattttaatttaattaaaaaaaaaaacatgttaaaaaattaaaatatttatacaataatcaaacactaccgtccagtccacaaaatgtatagtgtaagaattctgaaataaataattcaatttgactattctttttttaaaataaaaaaccacaacatatatatataaacaaaaggttagacctcgcagtaattataaaagatatagtcagggatgcagcagagcgctaccatatctgaaaagttttgaataaaaattcacctaactacattatggaacgcaaaattacaatatttaaaaataaatgaaaaattacagtttaataaccgattagaaagttgattacaaacaaatatgtaactgttaatattccaaaagaaatacttttcccgagaacattgataactttttccgaatcacccaatcagaacaaaaaggtgtttgtttcctatcatgacatggccttcttttaacaaaaaggtgttttaatctgactattcaactaaacaacgttcttgatttgtaagtgaacctcattacatgacttggccttcttttcatcacccattttttcttatcatctacaatatgaaaacactcattaattttatgaaaagataattattaaaaaatattattagtgtctagtattttagtatcatactgttattgatgtaattagtatcggtaagagcggaactaaaattaaatgttagggaagccaataacgaacaattgaaacaaaaataaaacttcatgtttataaattttggtgacccatatttttatttctagatagtattgactatatttatgggtgatctattattcttcccctaaatttaattcaaaacatataaatgttataaatcaaaacatatatatatgaatcaattagttgaaaatatgagatatttttatttattatgttaatatacataagaccacacttatatgtatagatataattttattattattattttaggtttaagtatcggtttcatataatttttaaaaaatattgctaattaattgtgtggcgccataaaaaaaatgatcattattttcaaatcaaagttaagcctctgaaatttgaataatatcatgtgactattccgataacataagacaaatttcgttgatcccagagtctttccaagatattactaaagaaaaactctcataatatttatggtattcttgtaatcccagtaaccaaaaagtctaagaaaatatttattatagcacacatggctctgttttatgagctctgttttcttctttttattattgtttttctgccaaacacagccttatctcaaataaccaacaacataacagttggcacaacactcacagcaacagacaactcatcaccatggctctcaccctcaaccgaatttgctttcggttttcgaaaactcgaaaaccaaaacaacctctttttactctctatatggtacgcaaacataccagacaaaacagttgtctggtatgccactacaataaactcttcggctatagtgccgagggggtcccgagtcagcctgacagctgatcggggacttgtattggttgatcctcaaggaaaagagatttggagttcggagatagtaaggggagacgcttctcacgcgattatggaggataagaaactttgtgatctttgggtctaataaaatttgggagagctttgatcatccgagtgatacgcttttgcccggtcaaagtttgaaccgcggagaaggggtttcgagtcgttggagggagaatgtgttttcgaaagggagatttgagatgaggttgcagcaagatgggaatttggtgttgtattctgtgaatttgcctactgacaatgctaataatccttattatgctagtgatactgatgatacgagtaattctaccactgctggaactagattggtgttcaatgagacaggtaataatgtgtgcttatttaacgaaaattgttgttttaatggtttttttatttaatatttaaattaataattaggtaatattgtaatgtaactctaatacaacgatacctccattaagtgaggaggaaataacttgtatatgtatatatacatatagatacatatcaagggactctattggccaattcagtggagttactatattgtgttaggagttgttagtgatttttatcatagttattaaattatacatatatgaaatgtaacattgtttatatacatgtatcatgatcaggcaatctatatgttttgagagcaaataatgaaagattaagtctagctagtgagaacatggtctcagcaagggacaactatataagagctactcttgactttgatggtcttttcacacaatattatcatcccaagacatccaatggtgatgggaaatggattgttcttcggtccatacccgaaaacatatgctacaaccctgttgtccccggtgtcggtgtttgtggatacaatagtatttgtactctcaatgaagattcaagaccaacatgtcaatgcccaagaaagtactcttttattgatcccaatgacgaatatggaagctgcaaacccgatttcatacaaggctgcgctgaagacgagcttactcccgacatagaagatctctatgatgttgaggagctgcgcaatgtagattggcccttatcagattatgttgcactgaagccttttaatggggatgattgtagagattcttgcttgaaagattgtttgtgtgctgttgctatctctagagacggatcatgttggaagaagaagctccctctctcgaatggcaaggtcgaccagagtcttaactcgagggtgtttatcaaagttcgtaaagacaatatcagtatcactgtacctaggattccttatgtaaaacaagagaagaggaaaaaccaagacttgtcaatcagagttggtgcagctcttttgggtacttcggctttcgttaatattttgttgacagccacaatttgtgcaggagtcttcttcatacgcaaaaagaagagtcttagaagtaaaaagatttcatccccgaaaaacatacctgactttaatttgcgtagctttgcttatcaagagctcgaggaagccacaaaagtgtttagcgaagagttgggaagaggagctttcggaactgtttataaagggatgttggatatggattcaagtgtcattgtaatagcagtgaagaagctaaattttgtggtacctgaaactgagaaagagtttaagaatgaagtaaatgcaatagctcaaacacatcacaagaatcttgttcggttacttggctactgcaacgatggacagaatcgtttgctggtgtatgagtacctgcaaaatgggacattggcaaaatttgcgttcggaaacttaaaaccgaattggaagcaaagagctggaatcgctttagacatagcaaaaggactattgtatttacacgaggagtgcaatactcagatcatccattgcgatataaagcctcagaacatacttctggatgagtacaacaatgccaagatatcagatttcggtttggctaaacttttgatgatgaatcaaagccaaacaaatacagccattagaggaacaaaagggtatgttgcacctgaatggtttaggaatatgtctattacttcgaaagtcgatgtgtatagctttggagttgtactacttgagattgtttgctgtagaaaaaattgtgatatggagattggtgaggaaaggaaagagatcttgacagattgggcttatgattgcttcacagaagggtcattagatatgcttgttgattatgaagttgatgctttaaatgataggaagaagttggagagttatgtgaaggtgtcaatgtggtgtattcaagagaatccaagtgttagacctaacatgaggaaggttgttcaaatgcttgaaggagttgttgaagtagactatccaccttgtccattgccttattccatgaccactgcataaataaacaagctctttttcagtctttgaacaattaaatatgtcctatttttcttttaatgttgaatgtaatatacaattaaatataaaatattctaacatttcatttcatttcattcatgttagttagtcctttcatctgtagaaaaatacatgtagcattagtgacaatccagtagtatgtatttgtaagagtataaataatgttccattacttaaatcataactaattttgtgcattttcaatggatttaattcagactcaaatgatgatgatgaagattggaagaaagaactagcatagtgtcacgagctcacctttcagacagcaaaattcgccgtgtaaaacctggcccgtgaaagaaagcatgaaaatcgtaacagatgctacaatggcataaagaaaaaaaaaacagagaatatccactagaaaggacagaatctccaacaattatatacttacatggtccattggatgtttgtccatggagatcttaatcttcaaccccttgttaaaaatgcaaatagaggagataagaatgtacatagatgagtgtcattataatacgctaagaacgaagaattcaagttcaagtcgttaatgtttcacttcctcgttgattaaccgatgaattggcttggcttgctcgttattccaagaacatcacaatactcatcccgacacaaaatttactccaccgatggccatttcagaacctcaaatgaatcaatatactgagaccttctatattgatcatggtgttgaaagaaatttctctagaactgtctgtgtctaagttagacatgtatttggctatgctcaagaacattcatagcaacttttaacatctgtctagccttcctatcaggagtacatccagcagactccatttccatgaatatctctggtacctgccaaaccaaatcaatatatgaattaatggttttcatgaaaaatcataataaaataaaggtaaataacattttggaccatgtttttgcaaaagttacaaatttaaccatctgttttgttaaatgacaatttggatcctgtgtttttcaaaatagtacaaaataaacccttaactcaattgacgaaaattaagttcaggatctattttgtactattttgaaaagcacagggactgaattgttatttagcaaaataaggatccgatccaatcaataacttttgtaaaacacggggtccaaaattgtatttaccgataaaaaagaaagtaaagctaccgaggcacgtggaagtaccttatcgtacttctttgcccgactaaaagctttcatgagtgtagtataagtaacaacatccgggctcaaacccttcacaaaacagaaaatgtatcttggttggttagtatctgataaaaaaatgcataggaaaacgctttacaaatctgtcatgcctgattatgaatttgatttaagaaaattgagacttacactttcttttatatgttgatatattgatagagcctccaaatgtttgccagcaatcccaaatgcattgatcaacacgtttagcattacaacattaggttcaatgccctctgcttccatgagctgaagcaccttaagtgtctgatcatataatccctgcaaatattgtgtgccatgattagatatttagttattaataatgagaaatgggtgggattttcaagaccaaaatccattttttttcactatcaacaacaatcctttatggaattgaaacaagattgtaagtcattcataccctaaaaacatttatggaaagaaccgaaaaaaaaaagaataaataaaaaaaagaataaataggatttttgccccctaaacaataacctttacagaattttcgcccatgaacttttccctattgccaaaattcttcccgaacaagttacattctactcggtttttaaaacaattttcttatgggaggaattatgaatataattgcattccaagggtctattcaataagtttaaactacctgaaatccaatttattgacattaaacacacaaattgtagctccaaaaatccacatacatattctcataattcatcattagactgctatttatgcatttattttttgtctagacttttctctgtgctagattatcaaattgtttaaagaattgaacagaatgcaactacgagaggatatttgtaacaatttttattgttcagggagaattttcgcagctgagaaaaatttaaggaataaaactctacaatggtcatactttggttcatcaaaattgacaagcatctttagccataataagcatactttaaactcaggagttttaacaccctagctccccaacagacatagatacatatgttagcacaaaatgccaaaatattacacaaaagtaaatgttaagctttcaaacgatttgataatccatgatgagtgttaattgaaaggagcaaacctgctgagcataggcattggccaacacacaaaatatgttgggggaaggcggaagaccttctgacttaagagccgaaatacactcttcagcgttctgaaatttcccgtattgcccataaatatcaaccaaaacagcatagatcaccccacttttcttataccctctaaaattcatagcctcaaacatctttctcattacatcccatttcccttgctctcctaaatagctaataatcgaaacaaaaatcttcggatcgggatacaatccttgttcctgcatctcattgaaaagcttaagcaccataccaatatctccagccttacaatgccacattattagagaattccatgttgttatattaggcttcacattttcctctttcatcttctcaaacacttgcatagcttcacctaattcgccatatttaccgaatgtatcgatcatactattgtaaatttgtctgtctaatgacattcccatatccttaatctcttcaactatatccatagctttcttccacatcccattgtccctatacaaaccaataaccttcccatacagaaaagagcttagcctaagcccttttagcttcatctcattgattacagaccaagtatcatccaacctaccagctttgacatagtaatccaataaaatctcataagtttctctactcctctgaatacccttttcctccattactctcaaaactctaactgcagtccctaagagacctttcttcaaaaaccctctaagcaaaacattgtaaagctttacttttggctcaaaaccaacaaaactcatttcttgaaacaaacaatcagcttctaatgtcctaccaacactaccaagagcttcaatcaaataagcataagatatgaaactaggatgaaaccccatggcatccaactgagacaaaagagtcatagccctatctacattcccttctttacaatattcacgaatcaaatggttgtaagactcacctgaaagttcttctccggttctaagacgatctgggcactcaagaattgagctttcagtattgaatttcacttcaagaccgagtcttttcacacctttgctatgccttgagtggctcagacaacttgaaacgagactagttcttctggggatggaaaattgtaagaatgagttgttggggcacagaatagaccttagttccatgtctttattctcgtagatgattcaactcttcacttgggtgcatctttagcataaaacccattactctgaatctttcataggattcagaaaaagaaaaattaaagctaataatggagaagctatcatttctaaaggggaaaaagtcaatacccagatgaagatactttgagaatcagagaaaagagtattatgataacaccaaggataagaacaagattacaaccttgaaaacgacaacaaatgatgacaccaatgtttcttatttatgtatctcaaaaacgacagaaaatgtatcaaacgacatcaatattattgcttgctcttccaacttttcgttttaataaaattgaaagcattttctttcctggaaatttgaaacacaatcaaagaagaaaacaaatatttttataataaataatacatttcaaaatctacacaggatcattatagattagactttgttttgttataatataaatggaataatttgaaatatatattatatatataaagaaagatacattcgagcatataacacaagattaatccagctactaatatttcattaattagataaaatagtaataagaacataaacacttagctaacctaattagccattggattctaccacaccattttacagaaacccaatgttaagaaaaagccattacagaagaggaataagcaaaattactaaacagaaatcatcatcagctgcaaatccctaagctctctcgcctctaatcctacgagccaactgaatatccttaggcatgat

SEQ ID NO: 227304 - DNA, 6071 bp, Cannabis indica
taacttaatgaactgttattgcagtcagaacagtgagactttcatatcagagaatctacaaacaagacagagtgttaatatctctgatgtttatattcatgaacgagctactccaggagtatagtgcctgagaatggtacaaatggaagtcaatagaacacattagaaccagaaaaccatcatggattctcatgctcatcttattcatccaagaatggatccaatgggtatgacattgggaaggactttaatcagaatggtggaaacctattaaaagtggaaactacttcccataatgaacaggttgaatttgaatgttctcccgaaatgaccgtgataaagggaggtactaaacctaaaagaccaccttattctcttggaagcaagagttgtaagttgccaaaatcaactttgaaagagaaggaggagcagttctgctcagaaagagagtggaaggggcaggttcttgaatcaagtgagtaaaaagttctctgatgataatttaaatgaaaaagattactttaaatgtactctatttatggttcctcattttttatttttgttgtgcagaatcctctagattgaaggatgctcccatacaagctagtgatggaggtgcaaacacacggattttgaagacgctgggcctgaaaaagcaaactaaactcactagaaaagatgtctcagaagtcagtggtgatagacacaaaactaaggttactctgttcaatgtaccttcttgtttaccttcactgttcaagggactattttttattgggttttaaatctattgctgattttttggatgtttcatttgtcggtttcagatgctgtttccttatgaggagtttgtgaagttcttccagtgtgacatgtttaatttatcatatcggggccttttgaattgtgggaacaggtacactgccctcaatttttattttcttttgagttgagaatatttaatgagactaaatagaaaattcatgaaacctgaaacctcaagatattgttgcgttcaatacatcaacctcacaacagctggtgcctactttggtctgttgctgtctagaaatttgaagtcagagttttttgattttgattgctattagttctaagttaaaaggtttcattattattttagattttgtaacatgatttttctttttaaatatgtaaaagatgctttttgcacatgttttggtggactcatgttttctctcttttgcacatttttttgaaattgttttctgttttgcagttgctatgcaaatgctgtcttgcagtgtctgacctccacaaagcctctcattatttacttgcttcgtaaatcacattcaagatcatgtactcacatttctcttttaattttgtgttttggctaggtttaatttctcctttacagtttgttgttgtcaatatctagtgatgttttccttgaaggcacatgtatcttacttctatctgctatatgcactataggttgtggtaaagattggtgtctcatgtgtgaattagagcaacatgtaatgatgttaagagaaactggaggcccactttcgcctagcagaattcttttgcacatgcggagtatcaattgccatattggtgatggaagtcaggaagatgcacacgaattcttaaggtgaaatttagttattgcattttggggtactgctttgcaatcgtttgctgctgtttaatttttctgagcaattttgaatcagattagttatgaagtttaatttttctatgtttagatgagtaacgacataatttgcatttgttttatggacttttcttccaggcttctgattgcatctatgcaatccatatgcttggagggattgggaggagaaagtaaggtagatcccagattgcaggagacaacttttgtacagcatacttttggggggcatctaagatcgaaggtgcttttatataagtcagttgtaacctattgttatgcatttttcttaaattgaaaaaaatttctctgccacattaattgtgaatgaagcaattttattgaaaccaggtcaagtgtttgagatgtcgtcatgaatctgaaagatatgaaaacattatggatcttacattggagatatatggttgggttgagtcacttgaagatgcattgacgcaatttacaactcctgaagatttggatggagaaaacatgtacagatgtggaaggtttggtcactcattataatttttattttgaggaagcccaaagccgttaaatttatcagctcttgacgttgtttgtttgtttcttttcttttggtaaggtgtgctacctatgttcgagctaggaagcagctaagcatacatgaagcaccaaatattcttacaattgttttaaagagatttcaggtatcatttttcggtggtgtttcgagtatggaattatattaatgtttttctttggtgtaattgtcaagtatttaagaagtgaattaatttgctttctctctttcatttcatataactcaggcttaacaccttagctgatacatgtttcttttactgcaagaattccttctatcccctgactttctttttctgcccttaacttaatcaggaaggaaaatatggaaaaattaacaagtgcatcacatttcctgatatgctcgatatgattccattcatgactggaacgggtgatattcctccactctacttgctctacgctgtcgtggtgcatttggatacattaaatgcatctttttctgggcattatgtttcatacgttaaagacctgcaaggaaattggttcaggatagatgacactgaggtaatctctcatcaatatttagatgccacttgctctaaaacaaaccagatttttcagatggctactcggaacagatactcaaattttgttttctaattttttgattaaaatgttgctgaacagcctactacttgattaattactctgtaaggataataacatatatttgccatctctttttgtcgattcaaattttaggtgcagaagtttgaagagtcttttggtgttttttttttcattttaaatatcattttgaagtttatgctctaataaaattggaccctaactttgatcatgtttatttaacaggtccagccagttgcaatgagccatgttatgtcagaaggagcgtatatattattttacatgaggtataattaattaattttagagttctggttagaaaagatatagttactgtgttttttctttgcttccctgttataattgcatgattataactaccactttacctagtatttgggcctgtctgtaatatgttttactacccaaagtgatgtgttagacaccaattatttccctgttcttcgggtagtttcttcgcacgcatcattattatatttattttctttaactattccaggtcttgcccgcgacctcaaaaaacacttactggaagagccatccagcagcaagttccagaatttgcaactcattgtacgtcaaagccttcaaggtctggaaaaggcaaactcaacggtcaatatgttggtccagagtctttttccgatgatattagagctggaatgggtgatggttttactcaccacacctcaaacaacatccttaggagtgcaaacaggaatgttgttccggctatggaaacaagactcccaaacggggcagagttttctgatgctacatcatcaagtgattggtctctctttaccagctcagacgaggcatctttcacaactgagagtaccagagactctttcagcactgtagattatgctgatacgggcaatgtggatccgatctcatcaatcttccacggtatatatgcgccagattatctccataattccattccctgcagaaatttattgaataataggccacaaagtagatttatgtctgaggaaaagggtcatattttggactcatacctgtcatcatcagcacaacctcttgatagattaccgaaagttgactattcacaacaggtcagtgattctcccacagtattttcatctgacagtaactgtggcgtgtttgtaagatatgggagtagtaacccagtagaatgggattgatcaaatcacttgtggtcattgtaagttctagttcgtaggaattcctactgattgaatatacgatttagtaggtagaaatctgtgtgcctcaattttctttttcaaattctttgtttgattgaggcatatctggtttatttcaaatcgtaggaaaggaatattcttgttagctttaaaaatatcagggaaagttgtaaagcatttgtcattttcttcttctatcactttatgatattccttttccataagaaaatttgtatctataactataactaaaagtgccaaggccttttactgctgttcatctccatatcactgtttttctcagaaaaaaatctcccctaaaccttgagattacatgatatgcagtaaataaagattattttggtaataaaatacccttttaatggagttgtgacatgagtaataataacccggtggggaacccacttgcttccccttttttctttttatgagaagataccttatcgaaagttgagtttttcattgtaagcatttcttttaatggacatcaaactaagtaactttaatgaattctctcagctgtattgcagccacgcaacagcatctattaatgaatactgtcatgtcatgttaaaggaagtggttttagctttttactttggacaaatgaaaagtgttgctaagccaaatatctatatatctaagctgggaaatcttgttgatcatagtcaagtccttcctgtatagtcaaccaacatatttgagcgttaaggaaacacataaaagagaaggaaaagagaaactcttctgatccttataccattttggttctacaatacatcacttttattcagttcaactacaatatcctttcctcaccacaaaagggtattatccaaaaaaacacttaaaaattcaagctcaacccaacttctaacttcatttattccttttattcaagtgaaatcatttttcaagatcaaacagcatccaaatctcattcaccctattcttgaactcaaatggagagttgtactgcgcaaccgtgtaaaccgaactgctttcagttccacggttcttgtcaatagcggcagaccagatagttccggcaatgctggcttggagtgcggcggcttccactccaatttcgtaatcatttacaaagccgctgaattgtctaatagccacgtacgtgggcttccatttttgaatatgaaggccttttgcaggagctggatttgcctggttcttttttggaacaaagaagcttacaacgaatgaggattcgcataaaggtccatcgctcggtgagacctcggtgatcactggcccggtcatctctatcttctccttgtagtagttcttcccttggatgtagtcaaacagcctgaaatgaataaccattacagattttaaggtatgtttggttttggtgtgctgaacccaaaatactgagaaatgctatagtgtactttgtggtgtgacttaatgacttattgtatttaataccactaactaattataattatagaaagagaaatcctaaaggtgaccaatagtgtataacactttctttttatgtgttaaaattgttattggtccaattaaatatcgagttacatataatttaatataataatttttaaagagtatcgctaaccaatcgcaaaccaacatatatctagaggggctagtcactaccagtagcgcccaataacaatcatcttatagaatgtcaatattgtattaggcacgttaagttgtcaaatggcaatgctacaaaatatatactcattgagtttttcttttcaaataagaattgcaattaagtattattatgtgattatatcttataaatagttaaacggtattttataattattattaaagtaaaaataaagtataattgaatttaactagtagcacactactgtgattggtaggcaacattaatatattataaaaaaagtaaaagaaaaaaaaaaggaaaaaagaaagaggaaatgggaaat

SEQ ID NO: 227305 - DNA, 3982 bp, Cannabis indica
aggatattattgggagaacagatgttgagatttttactggtgctggtgttaaagaatctcaagattttaaaagagaagttttggagaaaaaattgccagcaaaaagggaaattacttttgagacagaattgtttggttcaaagacttttttgatttatgttgaaccagtttttagtaagtctggtgaaactattggtattaattatatgggaatggatgttactgatcaagtaagtttgagttttgatttgtttagtttaatgtttttgtttttttatgatgattaaaagttgataaaggtttttgatttattgaacaataggtgagaaaaagagaaaagatggcaaaagttagggaagaattagcagtacaaaaggctaaagaaacagaattgaacaaaactattcacataacaggtttaattctctttcactagaaaaatggtgtcaagattgttattagtaactaacttttgaatattttttgtagaggaaacaatgagagcaaagcaaatgttggcaacaatgtctcatgagataagatctccactttccggggttgtaagtatggccgagattctcaccacaacgaagctcgatcgcgagcagcgtcagttgttggaagtcatgctgtcttcgggtgatttggttcttcaattgattaacgacattcttgacctttccaaggtcgagtcaggttcgtgattcaaccttttcttatttaattaccaaaatcctatcacagggttaagactcagaagctattgagtgactcacacgtgagcaatgtggggcaattgagatcccgattcgatatagtttactaatttttctttcattaaactccttccataggagtaatgaagttagaagctacgaaatttcgaccaagggaagtagtaaagcatgttcttcagactgctgcagcatccttgcagaagagtttgactttagaagggcatgtagcagatgatgttcctattgaggtaaggtctataagaatcaaacacattactaatactataaacacattgtataaataattgttatgtgacaaatttcaggttgttggagatgttctaagaattaggcaaattcttaccaatttgatcaggtactaagtcctttgagagaaaatattacttttttgagtgtcttattgaatgaattgcttattgaattctgtaatttcgacttttgttttcgcagcaatgcagtgaagtttactcatgaagggaaagttggtataaagctttatgtggtaccaactccatcatggggaagagaagaaggttgtaatgaaataacatgtctagaaaatggtgttaaagaggaaaaaccaaagtctcatcatcacatccatgaaaatggttcttatcagaagaaccattcaaatggtgatgagcctagaactccaaacaagactgaatccccaagggttggtgatatggatcaagatcaagatcaatctcattcttctgaaacaacagtttggattagatgtgatgtgtatgatacaggaattggtataccaggtatgtataatagtttatataatagaataataaggcactggtggtgtctaataccactgaagatgttatatcggtaatcatttgtaaggtgctatctcgtgatgatactaagcaccactggtgcctaatagcaataatcttaataataactaaactattagtacttcgttcacttatgtgttttctcaatgaatttgtatcagaaaatgctctgcatactttgttcaagaggtacatgcaagttagtgctgaccatgctcgaaaatatggtggaactgggcttggattggctatatgcaagcaactggtataagcatagagttgttcttttgctgctttttgttctttcaattttgaaaacttgtagaacagatgttgatacttcttttgaacttttttaaggttgaacttatggggggtcgtctcacagtgtctagccgagaaaagtgtggatccacattcacttttgtgcttccttacaaagtttcgaatggaggtgatagttctgatgattctgatgagctttctgatatggctaatcatgatgctgcatctgatgatgcaaccgagagctatttccaattccaaccgcgcactttaggttctctgttcaattccaatggctcaagcaggacacataaactcaacggtttgccaccttcttcttatgcctttccctctactgattgcatacccgaagagacagtttcggttgtaaaaccaatatcagaatcagcagtgagtgaaaattctaatcatgatagagataatggagtttttgaggggaaaaagtgtcaagataacacaacagataaactcgaaaatcataatgtagaggccagtaaggactcgttagaagtgtcaccatgtcaaaagcaggagaaatctgaaacaaaattaccatgttcaaccttagaacctaagatacttcttgttgaagacaataagatcaacatcatggttgcacaatcgatgatgaagcaactcggccacagtatagaagtggtgaacaatggcgctgaagctgtgaaagcaattcagcgccgcgattatggtcttgttctaatggtaatttcaatactccgagcttttttgataacaacaaaaaaatgttgatgattgtctaaaccttacttttcatttcaattttgtaggatgttcatatgccggttatgaatggcctccaagctacaagaataattcgttctttcgaggaaactggcaattgggaagctgcagaaaaggctggaattgaattcaatgattcttctttacagaaaagtcatgcctttatgccatcaacaaagagaattcccatcattgcggtgagtatttttttgtgtagtcctaaaataactttttcgaagcaatgttgtcaatggcgtttgcgagcatgatatgtgctcacaaaatatgtaccaaaacactaaatccagtgatgtgtcaacacgagacatacaatttaagaaagttctgtcgtgtcgtatcactggatttagtattttggtgcacatttattttgtaattatttgtgcaaaacacattgtcatgaccatttataaatatataaataaatatttatgtaaatacttacaagattatgaaaatgcagatgacagcaaatgcattgtcagagagtgcagaagagtgttatgaaaatggtatggattcatttgtatcaaagcctgtaacttttcagaagttgaaacactgtcttgagcaatatttacctccttaaatttctcttttattgtaaatgtcatgcttgtgtataaaaaaaaatataaaaaagaaaaaggacaaacaaaaaaaaaacaaaagaatgaatgaaaagatgacatggtaggaaaagttttgtaatcaatgtatcatgttttttttgtagctatttgcatatggttatcaaattgtacatagttattctcatagtgtaagttcaattttcaaagcaatgaacaaaatgtatggtagtctatattatgcccaaaatcaataaatagcaatatacgaggatatatcaaagcggtaaataaaaaaacacacacttacatgattcaacaatttttttactctattggggcaactgatatatttaaaataaagtgaatatataaaatacaaatacagatttacttaccagtagcaaagaagcaaaagttatattttcagtgactattgactcggacaagagccttagatctcgggcctcgggacccggaccaagacaaaccccaggttcaggtcgggatttgtgttcaagatgcgagtatggggtttgtgtccatgatgcgggtccaagtttaagtccgtgttcggtttgagttggggtctaagtaattttttcctctgaacttagacatgtactaaatcgtgccccctgaacttttttggtcgttaaaaattctccccgaattattgagattgttaaatttaaggacttttgtctaa

SEQ ID NO: 227306 - DNA, 4297 bp, Cannabis indica
ctttttggtccgtagttatattttgtctatatattcctagttatctcgactagcttatggctttaatctatctaggacttgggctccttagcctggcttgtctcagtaagtttaaatttgagttgctcttcctctgggcggtgggttcttgttttgaattatttctcaattttgctattgttttgtcgtcaataaaaaaaaaaaataatgaactatgtcaaagcttttaattaaaataaaaaaaaaaaaaaaaaaaaaaaaaatatttgcaaatacaacaagtttgatcgactcgttcatacacctaacatatcatattattaggtataaaatgttagtaatgttaactaattataataagaacaatttttataattataaaagattgttataagaactatatcaaacgtccaattttgtaaatacatatcaagtcgggtagtttgtacacttaatttttcatattatttaaaaaaaattatatgaaaaattaataaaattaaattttttaaacatccccagttatttacatactattataaaaacaacactttagtattatttccaaataaaattctacattattattaaaaagtaaaaataaatttacttcgttctgaatttttacttactaattattttattttttaaaaattaaaaatcataatttataatcatacactctctccttcatttagaagtttattcgtaattaagaaaaagcaaaattattatagatatttcattacttgaatttgaatcaaatagattagagactaaaaaaaccatatccacgtcaagaaaaaagccacaacctcacaagcctggattatttatattctactttaatgtacaacatggcaattattacatctgtagacaaactaggtaggtatacaactatgctagaccaaaaaacaaatggatctaactcgtgctcacataatttacaaataattgacattaataatagaaagctttacaaactactcgccaggaactatacaaattttaaaaataggaagctttaacattcaacttaaattaacaaacacaccgtacagggtccatcactccttcctgccttttcgaaaactcttgaatagcagtgcgaaaaatcgaggggtctgatttttgtatccagaggcagaacaagactcaacagttgaactcattaatcattccccctccgatttgaatccactcgatcaagtcgatcagctctccacgagattgaattagtggatttcaacagcaaaccaattgcagaagagcatgttgctctaacaacggcatcagatgagcggctcattttacccaccaacactccaaacacctaaaacaagagagaccatttgaaactgctatttcggattatctacacaataatcaatgagacaacatgaatctgaaaaatacctgcgtaaaatgacgagccaaaatgtgttgatcatctgaaaaagacagcatactgctagaaaagtatatagcatttgcctggatcactggccaaggggcatcgaaaacctgtcacattgacatcaaaccagtcaagttggtgcaccttgcagtggcagaagagaacacaatggtgtttgatctgagattctcaaggaacaatgtccccaagggccttcattccagatgatacaaaagcaatatattaacagtaattgttaagaacctttattattgatgccatgcaagtatcaactctagaaggaagatgctgaacgaattgctttgagaattctctaacaaagtcttcataatcgcttctggaaaaatataagatagagttagtattcttccatcactgtaaaaatatcattactttagatatcgtactgtaatgtaaataggcattatataatgtcagggactacctatgatcagaattgaaacaatgtaagctcagcagcacacttaatccctccatttccaacaaaaggaaaatttgttttactgtattctattcacaagagaatagaaaacaagtgtaattaatactttcaatagtctccaattacaaaacaaaaaaaaaataaggttgtaagtaaatacccgacaagcctgtcgcacaccaacatcatcatcatgcaggtgcaaaattaagcgaggaagagcaatatgtatctggttatcaaaaaaagggagcagcatgcatatcatatcatatatcaagttgcaagtattatataagtttgaaaagcaagcaggttgtcagtgaaaaaattagagcaactacctttgtaaggaactaagaattctaacaagactgaaatacgaaacattttaaaaaattccaaggtaagataagcttcaaaaagatacctgctcaagaaatgggtcccgttgtacaccaactccaaagttgctaagtactccaaaggctgcaaaagcattagctcgcatctttgagttcatacacacctattcgaaaagcaagtcagcacaaaagctctgattacaaataatacaaaatttggtgcgtatcattagtccttgtttcaacaaccaaacttctcgcacctgaagattacgaagtctcacagaaagattgattagaacaggttcgacggcatcacttggtgctgattcaagtatctatgcaagttaaataaataaaagagcaagaatgagcagtcaagtcaataatctgtaatccattgacgagagaaaagaaatcacattttttcaacataatatttaacatgaactgcaaaggaggctcactgtgagtaaacaagaaactgcagtcaactgcacagattcatctgagtcatcaagtaatgctaatattactcccagaacttgagctgtataccgcagaatatgaatagatggtatctgcatttcagatatttgaacatataatttatttgaaaatgaaaaacttcagaaaatagacattgagatacttgattcatcttcaagcactcattcctacatctcctaaaagggagtgaaatgcttgcagatattgagtgtgactgggaaaacatgtctgggtcatgtatgtagaagaaattgaagttcacactttcaaagaactgaaaataaaaacaataactacaaaataaaagttcagctgtaaaaattcaatgcaagcatctgaagacctgtactagccctctcaagcacaaacgtctaacagttgaagactcgtctgatacatgctgacacagcacctccaccatttgctccaacagggaaccaaatccaccgctgcagtattcagaaaaggcaataaagaatttactcaaaactaactaatatcgggagcgggaaaaagagctcaatattgctagttaacacataaataatagaagccatgaagaagctcgcacattaatgatggtcttaatatgtgactgaagtcttagacatgcaaggaataaggcataccatgtcaaaagcacattcaaataacactaagtgaagtatattccctagcaagcatggagccttgggactctcaattttttattgtagtaaaaaaaacataatatttttattgtggcacaaaaaaacaaagatacccctaaatttgacaataatagcattcaaaaagataaataaacaaaccctaaagcattaaacccctcaatcatttttctccctatgtctctgcctacaggtacctgtaccggacaaactcagacgatgcagcagctgcagcttctctttgatatttttgttgtcgatccaaggatttactcaaaagtaaacatatagtttgaacctgtaaaagacaaacaagaacgaaaaaagcagagagacttaagcaatacacatgcatatttttaaaatatttattcattatcatatggatctattggcatcttatccaccactcaaagacttgctatcattcaagaagggaaagagattttaaaacctagaaaagaactggccaaacccaaggcatgatgtgaacttgagttcacaaaaaataaattaaaaattaaaaaaaatcattaatgtgaattgtgttcggcttgctgtaccatctttcagttaccaaccataaattatctaatatataatctagagcaagtatcctttgtagcaaatactgcacacaaacaatacagcatctttcttgtcactttcccgttgtatggactgattcaatatttttattgaacatccgtgggcacgcttatgaaaaacattcagaagtatatacctgaacatactcctctctactatatgaattttaatttcccaaagagcaaacacagattgaaaaacataatgagcaaaagagggtaacacatgcaccagaatacct

SEQ ID NO: 227307 - DNA, 1357 bp, Cannabis indica
tatttaggttgttaattaacatacttgtgagtagatctaagatcctagtaaaattaattccaacagatattttcctaggaatgattttctctctgctgcaacttgtggtgcctcttctctcacctggcaaggaatcggctgggaaagagagttactgaaaaaagggattagaaagaaagttggtaatggccttggtattacctgtgcaacagacccctggattcctggaaattcgatcttcactcccatgttttacactggtaatccgaatagtgttgcagcagaatacattacaccagaaagagaatggaacttcaacaaattatctgctgatttttcatctgttgatgtgggaaggattctttctttgcctttgtctcatcatgttgcctctgactatttgatttggcatggcatagggggtgagtatgaggttaaatcaggatatcttttttcttgttcttcatcagatgatactattaagtctgtctcgaaccccaacactgcctggtggaagtctttttggcagcttaaactacctcctaaggtgaagatttttgcttggaaggcaatacataatgcattgccgattgctgcagagcttttcaagaaaaaatccctcacttctgcttcgtgtagtttgtgcctaaatgcatgggaatctgtgggacatgcactattttcctgtaaacatgctagacatgtttggaaaattgttggtttttcattaaaaacaggctgctgtttccatgaaaatagaagactttttgtttcagatttcagaatgttataccaaatctgagttggaaacgattttttgcactatgtggtctatttggtctgatcgaaacaatgtcatacatggcaaacttcctcaacaaccgactgttatctacgctaaggctcagaattttcttaacaattacaagtctacacagctgctatatcttcatgctggtttgtcaccggctgctacaccctccacatgtaaagcttggacacctcctcctcctacctgtctgaagttgaatgtagatgctgcctttgatgaaggtcgtaacaaaattggttttggtgctataatcagggattcaaatggcaaagtcagggcttcaatgtctcacccaattaatggttgctgtcaaccacaagaaatggaagctaaggggcttttttatagtcttaaatgggctagacaattcaatttcaaggttgatatggtagaaacagattccttgatccttgccaatgctctccgcaaatcaacatcaaatcgatcttcttttcaagatttaatatttgatgttcaaactcaattatcctatcaccctaccgtttgtgttaatcatgtttatcg

SEQ ID NO: 227308 - DNA, 2589 bp, Cannabis indica
aagaagcttcataggaattttttttagagtttttaagtaagtagtatatagtgttttctcgtttttgtctttaaagagtcttgccgctatcttattgaacgcaggggtattataggtcagcttcctctatgcactggctttaattgatcacatttagacgagatctaaccgttggtttagtaggtggtcatattaccatatggtatttaaggatgtcaaatggtacaaaccgaatatcatacacatgtcgtcccaaggtcttcctttttaaatttcccttgtcaatggtcattggatcattcaggtgtgtacgattaggcgcgcatgctttgtactatggcatatcatgggggcaaatcttagtaatacgttacctgagaaagcctagctactaagtccatagtctgacatgtatgagcagagcctccgcgaaatggggttacagctcagctagacattttccaaggcacctttgggcacttggcgagaaattcataccctttgtgggagcactcgacttaagtcctacgagagtagttggcttcagttaccaggattgggagagacttttaattgcgaaagtcccccgcatcgttgctttgcaggggagttcctttcatggaggccctttccgcgagctagggcttctatcttctcgaaaatgttggtcaaaggtgtagaccggctgattaatattgagtttttctagattagggtccacatgtcaagcttacaaaaatctagacagcatttaccacccaagcttctgggacgtagcgcagtctgggagcttgtagtgcttcctcatgattgactccaaacgcgtaggataatctgagtttctcattacgtcatgcaagtagtcgccagctgaagtatcactggtagaagttatcatttcttttgcttactgacagaactttaaatgctgacttttacaatttacgcacgtgctaagctcgtgtttgggaggtgccaaaacgacagcgaactgattgagcagacttttcatttactgagcactttttgcgatgcgtgcggtgatggaagttaaacattgggagccaatacatcttcttaacttcccattcatctaaccttcaggtaccccttttgggaacgattcgaactgttcactcctcgaggaaggcacctcttcttggtgctcaataaatacttacagcaaccatcattttttaagtttcaacttttttccaccctttgcatcagagctctgaaattttatctcatcctcttgcctggcttgcaagacctttctaactgcaccacccttaggtgcgcacatcgccagacgcagtgtacgcgtaaccatccccccatcgatactctcgcctgttaatcggtaagaattctttgccactgtttacttgacgtagagatggtgtgcattgcatacgaaacactaatataaaaatgttggtcctaattgtatggtccttgttaaaaaaggagacttggggtcttacgatgcactgacccactcaatgttgtgttggctcttgcaggtacatttaagtttgccatggaaaaagtttgttcttctaaagccgtgggtgacagtgatcttggcaggaaaagacagaggcaagaagctgctaatggtacagggggccacccccgcattacgacccacagctgaggttgggccgacaccacccatatcacccttctaccattcgaaaaataccttttgtgggattcacatttcccaaaaagaccataccccttgacccactcgcatgtagagggagaaggaagtaaacaaggctttaagggagcgcctgaaagcagagaagggactggtatgcagaagggccaccgtgctttcggttgtaaggaaagttgaaatctcaaacgaccttcatgccttaaccgcagccgggccaataattgaagtggaggccttagaaaagcatctagcccccaaggttgggagtgaagctgcgccatttttagctgaactcttggaccaggtggctggaagtgcctctgagctacccctggaaactttggcatcatgcagcagtgttgactactttaccttagcccatgctgacaagcaacaggcagttgtggtaaatttccaaaagattttttcttttccccctattttttttatttggacccttgtcatggtattcaactcttttatttttgcttattacaataggtggctttgctggcgaagagggctgttggagaagccagtatggtggtcacagagctggagtagaccagggtggacaaccgcaacttgcgcaatgccaatgacacccttcttgccaaacttgctgaggccaagcttcaaatcgagggcttgaagaaggaaaaccaactacgctaagtagactcgcctcatacgaagtatgatggccatccacgacctttacagagagaccgtggagcgaatgtctagagtggactcttataacccatccagtagcgcccatcattgaacactccaaatatgtagcaagcttcttttgttttgttgtttttttatatttctccccctttatactctttttgatttcataaaagtgatttatgatattatattaattagta

SEQ ID NO: 227309 - DNA, 3869 bp, Cannabis indica
cagttttcacatcttcagctccaactgaaccctccaactgctttgatagcaaatcaaaatcttcaagggcaagtttagcttcctcagcagctgcctcatttcttttattcatgccacgcacctatacaaaataaacacaatgtatcaaaaaaaaaatcacaaaacaaggtccaaaggtagcatagaataatatagagtttttaaagaaagtcccaggtagagaatatagatacttaccatgaaaggtaaagagagcactcctgagtttggcacttcatcttcttgatttaaaacattaagtgttttctcttttgcttcttttaataacttggacgtcttattctgctctaaaccaggttcttcatcagactcagactcatagctactctcgtcactgctgctgctgctgccctctttcatggtgttcatttttcttgttaaaagagcatgcaagtgctgctgttcagctacagcagctcgagtgccttcatcctgggcatccaatcctcgttctttaatgcgcttcgcccactttgagctgcttttgtgcctcagtgtcatacgttcctagatcaatgaagataagcataagtaattaataacataattggattttaaaatgcatagccaccactgaatcaagttatctaacagctagttgaatggaaaatcaactaccttcgcacgatcatattcctgtctccttgccatgtctttagaggcttctgggtccatctgattctcagaagacgctgccttcagtttatctttcttcaacaaacgatgaaatgtttttgatttgatcttttttatgtgttttgcctttaactcgtgacggaaaagaaggctgcgcattttggcaatacgattttggcgttccttttcatcttcagcagacacctgcaaacatcagaagaaaccagtaagccaattaacaggaaagaaacttctcttaatttctatcccatggaaccaatctaatccagctcactgggccactggccataatgtacactaattaaaaagaaggcagctcttttggcatttggtcataattggatttagtgatgtacccatataaccaggattgaatatttccctagagctcaataaacttaaaaaaaattcatgtgatagtacccgaaaggaatgacaagaaacaaagaaagagatcaattattaaacaagaacaacaaataaagaggctacaatatcaatgaacaaaaaaataaagaggctcataagctcaatgaacaaacattgtcaaaaaatccataccttgttaaattcaagaagcttggaaccatcatttgagtgagcatccataaccttgtcatcgtgtactagtgaagcaattttcttctcaaattcagttctaggttcaaattctgatgctattgctcctacggtagaatatcccaagtctacatcattaccaaaaaataaggtaggagcttccctattcctcttaacaagtggctcccatttaagcaagtctttctttgagtgttcatacgccgccttcctctctaatttttctcgttctgctttaggaagtggtgcttgtgtcgttgttgattttctctccatttgatgcactctcttcctaagttggttataaccagatttcccctgtagagggtttagaaggtcttcaacactaatttgaccatgaccatccaaaacatcacggctaggattatattcagattcaggatatgcctctgtaatgacagtatacttcttattcttcttcttccctgatatcaaaaataacttttgagcagtcatacttgtagccctacttactctcacataataaattcccacatagaaataactttacacgataagtacaaactgccaccaataacaattaaccgttcacagtcaaaaagttaattagaagttttcaaaaattttgcatatttttttaaacagggctactatcctaatcctaacatatttgagggatgtgaaactatagaaaatagcaacttccaagtaagtgctcagtagggactcaaacctccgactttttggagagcaaccattagagctaaccctattctgttattaaaatttgtatatgtaagcaactgacaggttcaaccaccagcataaaattcattacaaggttttaagaatcacatagaaataaagttataatcacggccataagtgatcatccaaaagaaaaatcctatgaataaacagtgttaaaagtattcttcaattatctaaatttggctctctttttctgcatctagtatagaatgtccaatacaaaaaggctgcactgggatccagtttataaagtaaaatctatatgacaacaatatagcatccttaaaattaatcaaacacaaaaagcatcacattattagaggaagttaagcacagtaccatcaaaagcctcggatgtaattccagtaattccctgcaacatcctcacatgtttttcatctccattgtcatcatcctcgtcactactggatacgtctttattatcgtcaatctccttgtcatcatcagacgacacattctcgtcctacattataaaatttgaaaccaatcaatgcataaatgcaccaagtcaaagataataagattttgctaatactacaacgttaaaaggggaaatttgcataacataacttcttattgctacaccccatatgatatgaaccaaccattagggtcgttctgaaatccttaatgcaaatatggttgcttcgagcaacaatgaaacattttggaaaatcccttttgaaacaatagtaaaagggtcgggtgtatagggattcatactaaatcacataacaaaaacatttacaggcatgactatatgcttactgcatccaatcaagtccaatttattcgcttctgaaacataaacagtaaagagcaaacctcaaagtcgtgtggtagttcataatcgaagttctcgacccggtcgaagcggcgattcttcatggactcttcttcaggtactttctcctcgtactcgtagacgtcgttcccaaaaacttcaccctcgtcagaatcgatcctttcgtcaccgtcactgttaataggactgccagtcctagggtttattcggtcaagctccttccgaaacgaagacggtattcgagggcctcgccttttggtcttgtccttttcggcggccttctttggcttcttgttattcttccgggttcccccatctctggttttgcgcttggtttccgccatgagcgtattcagatgtctcagagaggagtagctgtggaataggggcaatggtggggtttggcggcacaaacaccctatgttatgaggagcagaagccgaaagggaagaaagccaaggccaaggttttagtggtttaccagggtttattttttatttttttacaatttttcagtttaacttttgtcatttattttagagttatttaagaatcgtagtaaaatttaaaaaatttaattttttttttttaaaatttaacacgttaaaaataaaattaaattgtgtattgtaagtagattataagtagaaatacacacggcgcaggaagtgctcccccgtctctatccctattaaggaattccctaattggggtggggacgaaacaaagaatcccttaataaaaaaaataaaatttataataaaaatttaaatatataaaaatatttttttgatagttaaatatataaaaatattaaactacataaaaattaaaatattacacattaattaatattcaataaattaattattatctaaaacacaacttaaaattcatatattaatatattaaaaaaaatacaaacttaaattataaaatataaaatatactagaaatataatataaaatactaaac

SEQ ID NO: 227310 - DNA, 4712 bp, Cannabis indica
tgcttggaattatatttatagcaagttggggaagagtttgtaagtagttgaagttctaggaactagtagcatttaggttctccttcgcctaatgagtgtagctatttacaactgatttaatttcactcacgtattggtagtgaatgaccacctagcaaaccgaatcgatgctgaatgctttctgttgttacttttgcttttagaattctagtcaaggtttatgccagatgtaaacctagcttattgcaagtacattttaattttctttgaactgcaatgaatgttgactaattttgtaagggttggattggaatttgtaataacttatcttttaaaagtcggaatgagctaacctgatcaatcatgtctagtgtttgttttgttcgttaaataggcattaaattaactccattaaatattcttgtatatgagttatataaatataaattaacacataaaaaaataatcttttatctactttcccgttacttcattagctgacccagatgttgtgacatatgcaaggtgtgttgggaatcttgtacgctacttttaactggagtgcatgactttgatgatgaacctttggcattcatgattatgaacctgtttattatgaacctgtttattttttttattttatttttttaaaaaatgttttggaagaaaaacattagtctttttgtgtcccacattttaactggaatgcagaaattaaatatccttcagaccttactattggcaatcgtttgtttagagtttgaacttgatggctgatccatgttttgataagtcataacaactggtttctattgcttattgcagtgacagttcttcggacagtgagaatgaaacatcgaatcgttcaaagaaactcaagaggagtgacaaacacaagaaggtggttatttgaagtatctttctaatcaaaacaatatatatgttttcttgtattgatttgcttccattcctttctccttgtagagcaaagataaagaacgaaccaagaatcgtcgccataaaaggcataagcatagagtaaaagaggtaggcccgatctatggttctttttccctgcatgcttcattaatcaaagcttgcacagagttttttaaatcgtcatggcaaactatgtgacatttataacttctaatacgctgttgcacttagttcatggtatttctttaaggtactgtttaaagtttttcagtttggccatatgaaatgtgctgttctttggccgttaggcatgcatatataacaatacacatccaaacggaaatatgcttcatggctgtcatatttatcatgtacatccatatttggattggagattcttatagttgtttctgcctgttttgtggattggctctttgaaattggagctggggtctgtggcatgatgactggactcttgactaatttgcctggatgatttttctgggtcaatgtcttggcaatgtgagatatatatagaaggagcaagatgaaagacgtagcagccccgtacagctttcaaaggttttcactgcactctggttaatgtcatttcagctttacctgtttagctcatgccaattatttattttttattctggcttcatacagtatttgggtcgtcaaaaagatgatggtgttcgtcgaagtgcagtctcaggcaaaaaggtaaggacacattttcggtttgtttatcttgcctagtttgggatacttataggactttagcacagttaattatatgtttctctctgttctgtagattctattgaaacttgacaagtcaaaggaagacaaggcagcggagaataaaagaaatgaattgctgaaattcttgaatgctagttttgattaattttctggaaatttgttactctcgaaggagttagaaagtgcatggaaggagttgaggtagtcactgcctatttgtcaaattttcatagcacatggcagaaacctagttatctattattgtattttaagcgagaaaatggttctctatcatagattcacatttttacaattgttattgtcgggaaagcattgttatctgtattttttttttggattttacagttagtattttatttgagccttcaatttgggttgtgtacttggtatgaggcaagtgtttccattgttagactataaatataaagcacgatatttaattttggtggttctatattttcatttatttatttattttttttttgaggagaaaggtttcaaccaccaacaccaagagcaacatgcactctacaaaggtggggtatgaattcatttaaaaataacatctgctatcaaatagttctgaaagatatatattacaagatttacaacaataaataaaaccaacatcttggaatctattataaagactaatgatgctctttaaaacaagtctcaaagccaaaatgtcacattgcttttaattttaactgcaatactcagtttgatttgaaataaatgttatcatacctaaaagaaagacactgaatcaaagcattgcaaagagccaaagcctttgccacctcaggatccaaacaaccctctgtttgccagcatgcagatgccttgaccactcccactcctttctaaccaccatgccaagaccgctgcagttgcctactgaattaataattgcatcagtattgactttgaggcagtcctctaaggaacccaactactaatactcggctctaaatggggacttaacgatggcctagaagaaaaagaaactgctagcggcctctgctaactttgaaagttgccaaggtagtctcaaacccaattcacaaccaacttgggtgccatctccaagttattataaacttttttgttgcgattatgccaaattctccataatatcaccatcaccaactcaatcttttcttttggtaaagcatcaaaaatctatgaataaattggagaaattccttacaacggactgaaggatccctcaaatcaaaattacagagtttcttgcaagtcatcaaaaaagagcacccctaaagaacatgatggatagtttcttcttttaactagcaaataggacaaagaccatgacgtgctaagttgatctttgtagggatccaattagcagaaacttgccaagcaaaaagtcatatctttggaggaaggtttaacgtccaaatctttttctaccaaaccagaataacccccagatggagaggcatggcccaatctagaattgcgaagagctaaccagtatccactcttaacagagtaccaacttgacttctcaaagtttcaaattaaatttatctggcacatcataagaagattagtgaatatataaaattgcttctgcttcattagggagaaaaataccatgaaccaaatccttttcccaactgctcgtggctctcacaacaaagatacctttcatgtagcatcaagaacacgtggagataaaacaagggaggaagatgcaggtagaatccaattatcagaataaattgcaatgtcatttcctttcccaactctccaaacaacccccaaatcaaaaattcattactgcacaagatatttttccacacaaagcagcctcttttagataaaaaaatttcaccaaagtttttatttttgaaatacaatcccttcaaaacatgggcactttaggatgcaaggacattgtaaatttgagaagcctattgagcaaggagagtgattaaacaaatgcatatcacaaaaccccatgcctccatcttccttatgcaaacaaagtttatcccaagtacaccattgcgtctttactatatatattattcccaccccattaaaagctagcacacatcctatgaacatttttgataaacctctcaagaagcttaaaatgagtcatagtgtaagttagaataaactgaataataggcttgatcgaaacctcacgactcgctatagagaaaagcttggacttccaaccattaagttttttccaaatctaatcacaaatagaattgaagaatccagcgttacaatgaaccgtaaaacatgggaggccaagattatcatgacaattagccccaatcacccccaacaactccaccactctatctttattagagcttgttatacccgaaatcgggctaacactttagaagaggacacgtgcaaaactgggagaatataaatcaccaaatataatattaattgtatttgagaatggaataactcattaaatgcggaactgatagggtatattcacaacttgctgagtgcaagatcttaagcgaggtaaagatgtacaaaccgttgttgtaacgccctaatgcttaggcgcgctacagtgattttccaaataacatactaccttgctaatcatgggttttcttcaaaaatcatgtcaaatcaaaactttgaatgaagttaataaactttataaacatacatatgtatatatattatataatcgggatcccgtgctagaacttttataaacattttgaaaatatttttacgtcgcaaagcgactacaaaatatgccccaagatgtcccgagaccgaacactctaggtcattctgtcttgacatgtataatcattacccgagctcaaaactcattcatgttcagcttccaccttttctttacctacacatgaaagtagaatctgtgagccaataaactcagtaagaaaagcatacaacaaaatatataaataatcgacatgtttctaggcgcccatacacct

SEQ ID NO: 227311 - DNA, 3427 bp, Cannabis indica
aaagctcaagttgtacgatttggtaaagttaaagttcgaaaaaaaattataaataactttttcaatttaatacttaaaattaaaaaattgctaattatttataaaataacacctcctcatagtgttaggtaaaattgatgtttaattagtataatttattattttgaggcaataagactttcattagggaagaggtgggagtgtagtgtgggacttaaatataaatataagtattatctattttttattgttttttctttggaagaagtattgatttatataatatacatgttatagattttgttttggatcatacataatttatttatttaaagctatgatttaaatatgtgtttaagattgcaatgtatgaataaacaaattatgataatttattattaaaaaatatcattgatccatattattggttgatctgattcctcaaggaataagatcaatttcccatgatataatgtgtgtatatacactagccatgtttgcagtctttaattttataattaatgtttattaataaatccattagtgttagtttgaatcaaaaattgtaagaaaaaaataacatgatggtatatatacttttaatatatattttgtcttttgtaattatgggattaaaaagttcatttttttcatgattatttatcctataagatattgaatattgatattatttacttattatatatttattgtaaatggaataatattattacaatagccaagttctccttgtatatttatatatatttctacaatatttattaataaacatttaaattaattaaaaaaatgtaagaaataatatcatgacaaactcattcccttcatgataaattatttcataagatcttaagtaaaaatattatttattgttttttttatatatttgtgaattagtgataacattttttttaataattgactaataatacaatagcaaagtttggtctatgcaatttaataattcatgtgtttaattttatttaaattaataaattggagaaaaaacaatatgatggtacatgtgctttttttttttttaatttgtaattatatagtaaaattcattcctttcatgattattatttattccataagatattaaaaatttccctaacaaagttgcaatgtttttcccaaataaaattgagggtaagtaattagtaagagaaaacagcatttgacgttgttcaaacttttcttgttccttattatgtttatttgaaattgtattacttaataatctttttatttcatgttgagtgttctcgatacacaattttaacatacaatatgtaaaatttattgtcgaaaaagatttattgatcggttaaaaaaaaccacatcataaatttataacgccaatagagtaattgatatttttattcgtaacttcaaaaagtaaactaacgcctttgaccgatacaaaaaagtaacataagaaaaaaaaatataattattctagtgtgtgcagtttcacctacacatggaacaacaattgtatatgggaaaacctaagaatcctaaaacaaatattttaatatagtgatctatagaaatgttcaatttgatgatggagtgaacactaaaatttaaatatatattttgaattatgttcaatcttactttatttgaacttatttttaacataatttgcaagtaaataattttataagttattacctactttatgttcaaaattttttacacattacataattttgttttataaaaagtatcaaaatgtgaaagtaaggtgatacataagttattatgtgtaatatcttaataaatttgcaaaactttaaagttaatgataaaaaaacgccttaaaattgtaatcataatagcctccggtcgagatccaagccctactgcgacctgtttgtgcttcgatcaaaatctagcacttgcttcgatcgagatcaaagccccatcgctatccacctttgcttatatttgaagatccactataaacttcccttaactatactcatatctctattaaaataatacacaatctatgtggaggacaataatcgtcaatcataaattattctccacgactaacccgttaagattccctagaacttgattattagaatctaatgaaaggcatgaatacaaattaaatttaaattcaacttattttagaaattaaaccaatgttttcaatttgaaataaacttaagaatttcaaacatcaaaatctctctaaatatttgtcacaaaatatacccatgggctttataatcaatgtgggagtaaacaaaattgaacattttttttttgttaagaaattaaaatgaagtaaccaattatctttatgataactaaaggtaaccaattagtttacactatttttctcatattttttattaataatacttatttatgagttgatcaacataattagcatcacatttaaattttgcatgtacatttttaattgtattaatatgtttgaacttcatttgagtaataattaataaaaactatataaagttaaaaattgataaaattaattaattatcataaattagtgaaaataagatatcttatatactatatattgaattcaaatggactaatttgtgtcgtattccaacccaaataagttagagtaatttgtagcataaatatttaagtttaacttacagttgtaaataaatatctaagtttaatttttagcaaagaaaattacattgtaacccactttattttatttgttttaatttttaactttatttccatattctacacttaagtagaaggtaaaaattacgcaacccactcataaaagtaggtagattttaatgaattaaaatataaaaatattttttataaaagtattttgattaatggataaaaaaaaaaagaatattccttaatttatccccaagttatatttctgtaactctgtaaatacctaaccgttaaatattaagccattaaatccacgtgtcattttttttattggtatatttgaactaattttttttaaaataataaaaatttaatgacttggaccaatcaaaaattgcaactagaaattaaagttaagtatttatatagcaaatttaaatttagggtccaaaacccagaccgactcgaaaaattcaattatataattaaatttttaatttaccgaaccctaaaattataaatccaaaaagtaaaactagttataaattgaattgtaattgagtatgggtggagaaatgtgaatataattattattatatgatattattgtataattgtgtaattattttgtgtttattatatataagtataattttaaaaaaaattaatctaaattatagcagttattccttacgattgttaactatgtttgtgtctggcttcgtccggttctttcatccggtagaatatcggtgggcgt

SEQ ID NO: 227312 - DNA, 2165 bp, Cannabis indica
gaccatcaaaatcaatgcaacaacactggcggcaacaacaacagcaacaacatcagcttttcggctatgcaaccggcttcaacaatcccatgtggaattccgtttgacgctgcaactgcagctatttatcatcagaatctcttccatcactatcaatctaattacttgggaaactctgatactactgcgggttcaagccctgccatggggggaatgattcctcagcctgctgagttctttatatggcctcaccagacttattgatatgggatgctatataaataagtagttagtggttttttccagccccttaatgttagcagctaacaccattaccgaaagccctctgtaagtggctccctttccagctgaccaaaaatctgaccctttaatcccacctctcgaccttgaggagttagaagaaaaggctatgaggtttttctcttttttgtatgcaggctatataactactcgatacagtaggaaaagctggatcttgtaatatttaacttgtttagatggtacattggctgaaaggaggatatctagttcagaaaatttttctttgaaaatctctctcattgtcaagtcaaatatttttatgaacctttttattaccaacacaatcacaaaatattaattgggaagccaagccaagttaatttacaataaaataagaagagaaatacggttatctattgcaaaataatctgtacagagcaaagcccctgaatttcagttggtagctgctacgaactcaatctttccaacccttgagaagccataaccaaaccgggttcgattcttattgccttttcataagtctcccaagcactttcctttagtcctttccactcgtaacattgacccaataaacacaaagccctcgactccgcgtcggcgtcgccatcgcacaaccggattgcctcgaccaggtcctcgactgccgagtcgatacgacgcctccggtttgtggcgcaattaagctcggctcgcttgatcagcgcgtcccgacgcgcccttccggagagggacttgacgcacggaggagacagggccagatcaagagatcgcagagccgagcttctgcggtccatgagatccgaagccatggctttgatgatatgagcggaggggtctctcggggaaagagagatggctttctctgcttcggccagggcgttcttcgcgtgggcctgggattgggccttgtggggaatggatcgggctcgatccaataggttcgttgcttgagctaagtggcggccggactgaaccgttgttctgtttttggcacggaacttggttaaggcttgttttggatatttcagtataacgaagaacattcctaaggtcatgaggaagaagaccagttgtacggtcaattcagtggccatctctgaaatttcttctcaggctttctggttagttattgtttgttattggagacgagtatgaaagcagttcagcagaatagggtgaaaaaaagagtggcaggtgtatgttgggctttgcattatggcccaaacaaatggggggccaagatccattattgaacaagcactgcttgtttcaaaatcctataaatttgtggagtttttattttcatggtttttaatgcattaatttacgaaaaatgtactctttttttagaaaaaattattttaagggaatttatttttaaaagaagttaaattataactaattatggtggtaactaattatgggggtaactagttaccctcagaaaataaaaaattttttttttttaaaaaaaaaatcatatttatgcacatattgtataaaaattcatgtgtaattttgtcaaaatttaatataagggggcgctgggtataggaagtttaaaaatattaggaaggagaatatgattatctgtaaacttaattatacatgagaatatttaattagattatacttatttggttctcttatatattattttagaaaagtaaaataaaataaaataattatatctttttggggaattactccatatactatttgcatcaattgtttggagaagtgccaagcaaatcgtaacatcagactctaccatggatgccaaatacatagatgtcgctgaggctgctaaggaactagtctagctaagaaagttcttctcaaaacttggtgttgttcctgga

SEQ ID NO: 227313 - DNA, 6253 bp, Cannabis indica
tacattacaactgatagagaatggaatttaagtactaaattgtcctttaatttttcaactgttgatttggaacggatactctccttgcctttatctaatcatgtcacctctgattattggatttggcactacaatggtgaggagtataatgttaagtatggatatcattttgcttgttctttagcgtatgatactattgattctgtttccaactcgaatgtctcatggtggaaatccttttggagtctgaagttgccccctacagtgaaaatattcgcatggaaagctattcaaaattccctgcctgttgctgcataattgatcaagaaaaaatccctcacttcagtctcatgtaatttatgtctaaatgcatgggaatttgtgggacatgctatattctcttgcaagcacgcgaggaaagtttggaaaatagctggttttgctttcaattacaaagctgttgtgtccatgaaatctgaagactttttgtttcagttatcagaatcttataccaaatcagagctggaaatgattttctgcacaatgtggtcaatttggtctgatcgaaacaatgtcattcatggtatgtctcatcctatccatggttgctgtcggccacaagaaatggaagcaaaaggtctcttttatagccttaaatgggctagacagtttaacttcaaggttgacatggtggagactagattcattgatccttgcaaattctctcaaaaaaatcaacattaaaccgatcttcatttcaagtatttaatttttgatgttcaaactcaattatcctatctcccttcagtttgtgtttataatgttcgttgtgatgttaaccaagccgcacatgatttggctaaacaagctttagtgtcgataatatttgtacctggctttagaactttccctaagctattcattctgtttttgtaaaagactctttaattttataataacagttctttttctcaaaaaaaaaaaatcaaaattatcatatgaaataaaattaacaaaatgagattattttatcaaattttcggtttaaataatttttttttagttatttaattataagaaataccaatatgtccaatcccaaccgtccgtgcccgcgggacccaaaaccgtcaacagctcagattattttgtctaacgtattttctttttcctgcatttatttataaaattattattaattttttttctgtatttattaaattattaatttgattaataaatttaaaagccaacaaaattaggacgacggacgtaacggacccttcctctacgacatctactaccgactacttgagatctcgagagagtgtgtgagagagagagagatctacggtggtcctgaattcttctctgcaaccggagattcatcaccgttcgattaaccacacattgtccatccttccagatcccgattctcaggccacaactcttcactctctgatctcatcatttcaggtaggtgagaagctcatcactcattactacgccattttgtttggttactgagaaagttttagctcttatgttctaatgattactttataggaatttcaattttgatcgaagcagccaatgatgataacaatttgtttcaagttttgtgtcatacaatatgggttctttattatatttgtttatcatggctcagagagtcagagtgcttgaattttgcgtggttgttgcaatgagcttggattgttgtgttaagtaatttgattaactatttatttggttttatcttttccttgttgaatgcctttcattgctgttgctcataaattgttctattactcagaattttcatgtgggattgatcaagtcttactatattttttttggtcagttaaattatagtgtaattaactgttaaatcaatttgaatttatgaatttgagcttccctcttgcagaattctgaaatggggatggtagagaacaacaattggcaatcagtattggattatgatcagtgggtagcactaccggtatctggccctaggccatctgctcggtacaaggtattttaagcgttcaaattgaatcattttgttccatcaaaaaacaaaaaaaaaaaaagaaagaaagaaaatagtcattttgaacaaggaagaaacggagaacttttcttattgtttaaaagtttcctgtctattgtattacaactgttgttcatcaagttttctttggctatttataagtccatcatcaatgccataatttagtgaaaacatttgtcttatctatcagggtaaaaatttcaacgtattgtttgcctttttttacattgtagcatgcagcagtagtagttgatgagaaattatatattgctggcgggagtcgtaatggtcgttacctatctgatgttcaggtaaatagcattatttactttgacattggaaatttgtgattccatgttctataatattaggccaaatttgcaggtctttgactttggaaacttaaaatggtctaacataaaattgaaaccaaatgttgataaacttgaagacagtgagtcacaggaagctctttcacccatctccggtcacaatatggttagaattcactttcatagtcatcctttatttgtgtgcttgcgtatttcattttctatccaataggctttaatttttttagactgtcctgtcctgtatggttgccactttccaatagatgagtaattttgtatgtttgacagattaaatggggcaacaaactacttctccttggtgggctttcaaagaatttttctgatgaagtgataggtttgtatcataaggatatactgtgatcggattatattgctctctttcaagtgttctgattctgatattactcatggtgtattgaaccttacgttgtgttaatgtacttgtagtttggtttattgacttggatacacatatctgtggcatcatggagacttcaggaaaagttccggtaaaaaatgaaactttattgctggttgattttttcttttctggctcaactattgtacatttttccttttgcctttgaaccaatagatttattttttcctttatgtgattctttttgctttgtttggtttgttgagtaagaaattccatgagtatgcattgcaattgaaataaaattgaccatccttgtgctcatgatttcatttgcatgtctatctttgatttaatttcatattgtacttgactaaacgttaaagtggaaaagtgacatggctcaagctacacattctgtttggcgaaaatgggcatactataaacactgaatgtgaaattgtctctaatttttcatctattcaattttcatttaaagagggaaacttcccttttctgtaacattgttacttaattcagtatattgtgactaatggagatgcttgtggagtgtattctaggtggctcgttcggggcagtccacaactctggttggttctagggtaattatgtttggtggagaagataggagcagaagactattgaatgatgtttatgttcttgatctagagacaatgacttgggatgtgttggaaaccacgtaagtatctaagatactatttggataaacctttatggttttggaagatttctgtattaagttcttgtgttatgataggcagacatctccagctcccagatttgatcacacagccgcaatacatgcggaacattaccttttaatttttggtggttgttcccatgccatattttttaatgatcttcatgtactggatttgcagtcggtaagtgtttctgtttggaccctagtctattttccttttatgttcttattgatctgattgaactattaaagcatataagctgaatgcgtaggcacagtgtgtagggatgaaaatgcatatacattttttcatatgtgtcagaaggtgctatgaagtttaacattgattgagaagagggtgaatgagtttaatgtcatctgttggatcacagtttctgcttcaaacagcatcccattttgatcaaatacttctgtattatttaatgtcatactttttttgctgccaaccctgctatatgagaatctattgatacatttttcaccaaatcatatttgatatatgtcaatgtaagtgattgtatatcctgacagaatgtgtgatgtgttaagagagggttatcttatggagaggggtaaacaatttttcttatgaatatagatttcaaaatgtcttaagttactaggactgtatgatgtataactcaataattctcttacatataagctgaataatttatgttgaacaatgtgatatttatgctctatatgcctacatccttttcagtcagttttcatgatttgacatcataagatacgccattttgcagatggagtggtctcaaccacaaattctaggcgacatggtgacccctagggcaggtcatgctggcataacaatcaacgagaattggtatttagttggtggtggagataatcgtaatggtatgtgcaagtgcaatgatatgttatcagtctagtcaaaatatgcttacttatgtcccttgtcaattccattattagcttccattttactgaaatttatattttttttgaggttgcccagaaacgctggtgttaaatatgtcaaagcttgtctggtcatttttgacaagtgtgaaacaagggatcctcttgccagtgaggttactactttagcccttgttttttttactgtaccttttctatgcatttttgagccttcttgagattcatttttgttctattgccaccagagggtagctcaaatagtctgatatgtagtttgctcccacaaggtctatggtttgagtccctgttggttacatagcaatttttatagtttcttggtccccaatattgtaggggttaggcaggaagcctagtttttttgccaccatggagtataggctaactcttaaatttattttatttatctctcacagtcatcttttgtttgtcttgttctgcaccatgtttctatttgtttttgtgaaacatatatctgttatagtaaaaacccagtaactcgtattaaacatataggtgaccagatagctggtgaacaaattgatccatatgtgatgtataaatgtatatattgaaacagggagtcagtctttgctcggtgttaattgatggacagaatcatttggttgcttttggtggctacaatgggaaatatagcaatgaggtaatataatgtttttaataccatgagtttagtcagtgtgtttattctttacccgacccatttaggttgcatttggttggaggtaatgaaattgaatggaatagaaagaaatcaatttttattctattcctttgtttggttgtcttttaaagtgttggaatgtcactataatggaatgacttttttttgtcatattagtagaatgactattgtatttttaaatttcattccgttttattcttattcccattcctgtattttcattcattacaatcagacagaacctttaagtgtatctcatatccattgaggtaggaacgctcacatttcacacaatgtacttattaattaattttcatataaaggtaaatctagagatatggaactagggaaagggaagaaaaaaagtactatggtcattgcccacttcccagtagaaaattatttctttgacatgtcagtggcctagtattgaccatatgaatggggatggttctttttcactaatgtaaatagctgggatatcttgaaaggtaaggtcaattgctccttttttcttcttttgatggccaatctttgttttgggaaagaaagggattcaggttgggttaggactgattcttttcgtagggatacaaatgtggcctcaggcagctcaataaaattagacattctttcaatatgctacatgctagtagcgttagagaaaaagcttcggtcatatttctaagaagataatgagttattagatatgagatagtttaaagatgtcacttggaaatttgaggttttcttctcctagacaaggacattggcttaagcatataattgtctaggaatattatgtttgatgatggaatcaagcggataccccttcattttttattttttttcaaaacactttcagttattgttttgttcttctattcctatgaagaagataatggtagaaaaaccctgttttctgcttatgtactaaacttcaatctttatttaatgcattagttcatttgtttctatatttatttctatagcaagctttgtatca

SEQ ID NO: 227314 - DNA, 2344 bp, Cannabis indica
gaggttgagtctgaaagtgacgataacagtgatgatatatactctgatgaggatgattgtcatgaatttaatgccatgaaagccatttctaatgttgccaaatttgtatgctctacagaagttgatcctcgtattgtctcgagtgattcttttacagggttcatgaagttacttaatcctcactttgagcttgattatactgctgttcagactgagtgtgtggcaatttttctaaaagagaaatcgaaaatcatggaaatgttggggaatttcgatggggagattagtgtttctgttcgcgaaatgggaatgacgaaaagctttgtgctcgtttcattacatttcattgatgaaaattggagtttgaagaattgggtaatcaagttttgttcgcttgtgaaaccgagttttgtttcaccttgtgatgtcattgttgaatccttgaaagattggagcattaagaacaaagtttccacagttacaatgagctctttttttgatgatgatgcatttgatttcatcaaagaacatggtttagaagataagaaactctcattgaatggtgacctgtttcgagtttattgttgcagtgactgtattagttcaatggttcagaatgcatttgaagaagtagaaggcattacagacaagataagatgcctttataatccaaagtcagaacctttatggtacctcacaagctctaaactgaaagatgctattgagttatggtctatgggggagttctcttctagaaaggaaaaagattattctgatgtaccaactgttgaggaatggaatcgagttgaacaagtatgcaacattgtggagagcatttacaaagtggcttatgggatattccataaggaacttgtcactgctaatcacttcctttatcttcttaacgagattcgagcaattctggttccaatttccataaaacctgagagttttgaaagagatatagctaagggaatgttggagcaccttgacaagtatttgaaagacatgttcttggtcttggcaatagctgcagtgctcgaccctcggtttaaaatgaagtatgtagagtttacttgctcacaagtttggggtagtagtgttagtaatggtactgatgatggtatttcaaaggctaagactttttcagatgccattcgcgacttgtttgatgattatgtgagtcggtactctaagactgttagctcgtcttcttcgagtttgatgcaaggatacaagcagttcatccaatctcagaaatgtgatacgaaatctgaattggagttgtacttggaacaaccaattatgccttggagtgatgattttagtgtcttaaattggtggaagaccttaagtattcagtaccctatactttctaagatggctcgtgatattttggctataccaatgtctcttactacctcatatgaagcgttttacactgaaccaaggcctgtgcagaaatatttacgtgtgaactcaaagatggcgaatgccttggtttgtactcgaagttggttcagaaaggattcaaccacgacgagtccttaactggcttgagtaaaattcctttcttttcatgatgctttttttgctctttaattgttagttactttctctactttatgtccaacaggtacttttggtgtctttttaagaacactagttagaaaagtatgttattattattattcagttatatttaattaatggttattgttttggtcacccctcaatacaactaaacaactaagttaaggatggaataatttgatgtgaaaccaaattgaagaaaagagtttttctaacaagtacatggactaagaaacacattatcatattgtaggatatcattgaaaagtttgagaatttcatcaaaaactttagtaaatataacaggagactatccattatccattaatgctagttttgtaactcattttcctatcttttttgtagtgtatttttaaaataaaaactatttaagataaaaacaaaataaagactataaaagaaaatgtatgtgaacatatttattctttttatcatgtgggacattctaacatgaacttaaataataatcttctttttttttatgatagaatgattctcattaaatcaaacaacaccattacaacttaagctaacacaagctcagaattgggactccaaaattaggaatactaacaactgtttacaatattaacatgagcttatctttagtggatatttttttcttcctaaacaaccaaatctagcttttatgttcagctaaatcatttcactaacatgattaatagtataagaacaatgctaaaaaatataaagatttttgtttacccaa

SEQ ID NO: 227315 - DNA, 7455 bp, Cannabis indica
ataaaatatgatatcgtatatgaggtttttttgtttgtttccttactagttctaaaaatttacacaaaaccacactgactgacttctctttcgactttcaacttgaaaaaaaggaaaaaaaaaattgaaacaatagaaaacaacgcaagcaagcaagcatttataacaacataataataaaaatttaccaagaatgaacaataaacataagagagaaccaaccaaccaatcaactaggctgccctttggcctctcaacgtcgtcgttttggacatagcttccttgagataatcatatctgcttctatgataatcaatccaaacacagagttgtcttatggcttctctcttctcttctcccaaacccataattcctttgtttttctcttccatcattttctctaactctcccactttactaaccaaattctccttttctctttctccctttatctttattacttctaatttctccaccttgtttgataactccaactcttgtcgtttcgtctcttgaagttgcccactaaggtaattcacttccttcttcagcttctccttttcttcgtttgtttctctgatccaattctttgttaaatcaacgtcgtacgacactactgagattgattcaagatgggttttgtattcctcttcgaatttatgtatcactgtttggagtccaatcatggtgttgtttgctttctcggatatttctttgatcattgtttgatgagctgttatggctttggacaatgtagatactctttcttcaagttctttcttctcttcaagatatttcttttctgcatttctgaaactctcttctttttcagttaataactgttctgtgattctgagtttttggtttgagagacgtagtttgacttcgatgtttctaatgttatcttgtaaagtacgatgttcatcttctttaacttccaattctcctctcaagtcttcaatcatcatttccatatcaactactctttcatctttggattcgaatttttgactgaactcttccgccattgtttcaatcttcctttctgcaacttcaagttttgctttgcaatcatgaaaccaaccatggacttgagtgtgttcctccttcaaattgttatgtgattcttctctttctttcagcatcctctggtgttccacgattgagctcgataattcgagcttgtgattctccatttcggttaatctttctgaaacctcttgcttgtgagcttggacagaatccaactccttttgcagatcactaatttgggctgtcaaggctgttatctgagctgaagcttcattctctttctctaccaaagttgtctccaattccgaaactctgtcctttagtcccacgagttgttctctcaactcaccattctcatggattttacttcttacttgctcctcaatttcctcattctgtctctgaattgattcaatcttcacctccaaattctgactttcagcaattaaaccttctttctcttccaaaattctctgctgatccagactcttgcttgtgatctcttctttcaaattttgtatctgtatcaaaaactctgatatctcctgagtcttgctttcgagttccgatgccaaatcgcttttctgtctgtggagggactccagttctttctgcaatgaattcacctgatccaataatccagtgacttgaattgatgcttcatcacctttacataggatctgctgttccagttcaactttatgagcacgcaaagaatccatatctgttagcagattattgatctgtgttgtcaaatctgctgttctagacgttgattcattgttgttgtcctcaagtttcttcgtgagagttaaaagctcatcttctctctcattcgacatcgactccagtttcaaaatttgagattgcagctccatatttccatctcttagttgagttacttcagcttccttactctctatcttcacttccaaatctctgttttcacctctcacagtttccagctccagttccaggcgtgtcacctgagcctccaattctttaatttgagctgatttttcatttccgtacaactcgtgcttctcagagagacttgaatactccctttccttttcacccaatttctcttccaattgattcttttcaactgacagttcttcaattctctcctgtgcctgttggatttcatttgaaatttctgaaatttggacctgctgcttctcattgtcctctcttagttgctttgcttcagtttctttactctctatctgcatatcagcatcgtttttctgacttttaacggattcgagctcaataactagacctgccacctgtgcctccaactccttaattctattcaaagtctcatttcgatgagtgtcgtgagtctctgacagagttaaatattccctttgtttcacaccacattcctccttcagctgacttgattctgccactacttccttaattttttcctgggcctgttgaatttcatttgaaagtcccgaaatctgagcttgtaatgctacattttcttctctcagttgtgttgcatcagtctctttattctgcagctccagttccaggcctgtcacttgtgcctctagttccttaattcgagccaatgtttcattccgatgcgtgtcatgagtctctgaaagagttgagtattccctttccttcacaccacattcctccttcagctgactagattctgcctctagttcttttattttgtcctgagcttgttggatctcacttgaaagtgctgaaatttgggcttgtagcactacattttcctctctaagttgtgttgcatcagtttctttactctgcagctctagttccaggcctgagacttttgcctctagttcctgtatacgagttgatgtttcattccgatgtgtctcatgcgtctcagagagagttgaatgttccctttccttcacactaaatacctctttcaactgactagattccgccaatagctcttttattgtgtcctgagcctgctgaacctcaattgaaagtcctgagatttgggcttggagtcctacattgtcctcaaccagtttgctagcttctgcttctttgctttcaatctgcacttccagctctctcttttgatttttaatggactgcagctccagttccatggctgtcacttgagcctcaagttcctttagcttggatgatgtttcatttcgctgtgtctcatgtgtttcagagagagatgagtattccctttccttaacactaaatacctcctttaactgaccagactctgccaatagctcttttattgtgtcctgaccctgctgaacctcatttgaaagttctgagatttgagcttggagtcttgcattgtctgcagccagactgctagcttcattttccttgctctcaatctgcacttccagctctctcttttgacctacaatggactgcagctcccgttccaggtcagccacttgagcctcaagttctgttattcgacttgatgtttcatttcgatgtgtctcatgcgtctcagagagagtagaatactccctttccttaacaccaaacacctcctttaactgactagattctgccagtagctcttttattgtgttctgaccctgttgaacctcatttgaaagttctgagatttgtgcttggagtcctacattgtcctctgccagtttgctagcttcgtttcctttgctctcaatctgcacttccagctctcttttttgaccttcaacggacttcagctcacggtccagctctgccacttgagcctcaaattcttgtattcgagttgatgtttcattccgatgtgtctcatgtgtctcggacagagttgagtattccctttccttaacactaaatacctcttttaactgaccagattctgtcagtatttcttttattgtgtcctgagcctgctgaacctcgtttgaaagttccgagatttgagcttggagccctacattttcctctgccagtttgctagcttccttttctttactcccaatctgaacttccagctctgttttttcccctttaatggactgcagctccagttccaaggctgccactcgatcatcaaactcctttattcgagttgacgtctcatttcgatgtgtctcgtgtgtctcagacagagatgaatagtccctttccttcacgccaaaattctcctttaactgactagattctgccagtagctctttaatagtatcctgggcctgctgactctcttttgaaagttctgtgatttgagcttgtagtgttacattgtcctctctcagttgtttcgattcagcttctttactttcaatctgatcttccagatcttttctctgaccctgcaacgaatccagttcaagtttgagggatgtcacttgtgtctcaaattcttcaatttgaactgatgttttgctcccatacgtctcatgtaactcagagagagtcgagtattccctttccctctcacttaatgtctcctttagcagaatcgcttcagccaaaagttctttcactttgttctgtgacacttgaatctcatccgaaaactctgatattttcaaagttagagatctgttctcttcctctctatctttcagagtgttgtttaaatcagagacttgctgttccgtcgattgcagttgctgtttaacattgagaaattcctctttaatagcttccagttctaacacaagtgctgatttctcgctgtttagctgatcagccgaagatcttaattctgctgcgacctgttccccctcttgaatcattctgattgaagattctttctccttgatcaagttgtttttctcattctctgactcttctagctttttactgagatcagcttctaactgtcgggaagcttcgagctgttgctttaattctctgttatcagtaagaagctgtgttctttcaccctttagctcctcagcttcactctttaactccacaactattttctcagcttcttgtatgttgctcaaagctttcaagtactctgaatttaaagcttccttttcttcggttgtagctgccaatttcttctttaattcagcaacttgtaattgtgatgcttcaagttcttgcttaacaccatcaattatttcatgtagttcactttccaatcgcccgtttttgctgcctttttcttttgatgaagtatgatcagagtcagaatctgagctagatgaagaagaagagttatccttttcttttttgccatgaatttttttcctcagctctccagtcaaattatcataacgtgcatagagtgattggtactgcttatggaaatccttgacaagtagttgaagtggttcttttttggtttttgcttcagtattactgccattatccgcagcatgttcttcatctttgataagctctaagatttgactcatcttatcatccatttctgtaatacaaagcaaaatttattaagttttccatttagccattataaatatgcataaaaactttaggagtctaaagatctgataaaaatttacccaatttagttccttccatgtcatctttttcctcttgaatatgatttccaaataaggattttatagaatccttcacacgttcgttttcttcccatccttgcaattttccgatcaccctaacaactccttagcgacaaaagacaatcaccatacccagagtctgaaacacataacatacattttttattatcatttgtagttgaactaccacaaaaagaatatttaaaatactaacatatgaacaaatggaccaatactattcttattcttataagtataactatggtgaaatatgagtcatataccaaaactaggcctatccgccatacttcagagcattatgttaagttataacgcctataaatatcagttgacaattttagtactgaattagctaatttacggctttctttatagtcatttattatttgatgtatttacacaaacaaggtatactagcagttattcatgtaatgaatcgttaaagtacaataaatttgacgttttggtggattaaaagagggaagcacagaagttaagcaacgtataatggctcctctttaagaatatacacacataataatggtccccagcatattcgttttattaattgaaccaggtacttcaaactcaaaattcttccacagtccacacacgattcaaaaccagtggtggttactgcttactggttaatttcatgaacacccaatcacattaacaaccaagtaaaaattaagtagcccacttaattaattctaccatgtcccaggctatttattcttatgtacctaactgggctaaatagaaaaaagtactgggcaaacgaagcagagcctaacgccaccttaaacaaggaaatatataatatattaaatattaaactaatatttttgcttaacttatattaaattaatattgtttggaaagaaaaaaactgaaaaaagagaaaaagaaagaagactggtaacgtaggattcttaaaacaaaaaagctttacaactctgccacgtcagattttatttatttatttatttttaaattcaggggaatcactcaaaggctcagaagaacatgatttttcattcagaaaagacagatatcatatcagaggaaaatgagctgttctttttgttttctttcttcctcttgttgtaattttttataatttttctaggaaaacctcttctttttgttctttaatctttattaattattactcatataccgtattatgtcacctacactattattatcacaaattttaatattaaaaggaaaaataagaacaaagaagaaaaaaaaggtaccaaagtaaatttattgctgtaattttcacaggaaatgattaaatgaccgataagccctttttattacacacgaagagtcaaaatcgggaagaagagactatttacctgaaattttctttcactttctctttcaattttcctccggaagtttcttaagaatcgccaaagctcaatttcctgaacaaaaatgaataaattaattcagacagttaagctaaaactcaaacgaatctaacgcagttaatactatatgatcatttgagaaatttatattcgttgatttgagttatcaaaaaacagtgatcgagttcgagttcatgtttgagaagaagaataaacacaaaataatcagatttaaatccagaaccatgaaaaacagtcgagaaagaagtaagacaaaaagcactaaagcaaaaaaaaaaaaaaaaaaatcaaaatattcaggcaaaagagccacgatctaataaaatccaaacaatcagagaacctccgtgattaaaccaatgaaaaaaggaaacaaagaaatactttccagagctcactttctctcagccgagaaaatcacaaagagagcactgaatttgaaatacttaaattgaagctctccaatcaaaaatagagagagagagaga

SEQ ID NO: 227316 - DNA, 6102 bp, Cannabis indica
ctctgacaaatacaaaaatagaatataatatgatcatttgtcatgaactaaataatcaatggtccctagaagttttaacttattcaatacaaagtatcaagtaacaaagctaaggctaggatcacacacacacacatccataccagatacatgtgcaattactacaaaaagataaagttaaaccacaccaacatcaccaaaatgaccaaaaatacatctctttatgtgtaaagaagtaatattttaaaccaatgaagcatacaccaaatataaatagagacataaaggaattaaaaaaaaaactgaccataaaatgaaatttcatgctcatcattcatacaccaaaaaaaaaatggcgatggcgaaagtttatctagtggatgtgggtgggggaagttcttttggtggtgggtgggggaatttattcgttcttctcgtggtgggtggtgttcttctcgtggtggagaaaatagcgttttaaaaccctgaactgaaccaaagtgaaaaaaaaattacacgtgtacaaccacgtggaatggaaaataggaaccacgttagccctccattattaaaatgaacgaaacaagacaaaataccacaagtttaacatcgtcaaaagtttagggagaatttttaacgttaaaaattgtttagttcaggtggcaaaatttagtatgtgtcaaagtttgggggaaaataccaaatagcctatatataaatagcaatttagagagaacgttttttttaaaaaaaaataaataaataaataaaaaaaaaagaagaagaaaaaaagtttgatttaaaatgaccttgagaaaatgtaaaccttaaaaggagaatgtatttgaattgtttttctttgctttggaaagtgtaagtatttgaattgtggatttgtcatcccgactaaaaccgagagaaagaaagacgaggttattagaaagtggagctattcacacagtgacactgtatctgtatctgtagtgagtctgtagtaggggggtttgaagaactactgagctgggtgtgggtaacatcaatgaactctatattccgtttcatctcacaaaggccatgccctgcaagacgacttgtcgttttccactcatccttctccaccaaacccagaaccaaagttaaacccaaacccacttattccaactcttcttccactactgccgcctccgccgccgactctgccccttccttttctcctaacctttctcattccccctcttcggctaccctctcgccctccggagatataaaacaagaaaaatcttctccgccggcaccggacaggccgaccgagattccgttccaggccaaggtttccaacttggtgcacctgatcggttacgttcacgcgccggttcagttcgaaacttcttccaacggttccttttgggccgccactgttatcactcagaaccccacatcctcttcttccgaaaatgaatcatctgatgatcttcctctatggtacttcgaagctggtcatctttattttttcgtacttgcatttgtgtttatttagtttgttagcattattctcttatattttggtactgaagtcattgcttaacaatttcttttgtgtgtgctttgaaaataggttgtgggaatctagtgtgttgcatttttttattattattatttgaaaattttcaattttgtagatatatactgcatgtaggctgggttagtttcattttctttttatttatttttaaaaaaaaaaagatgaagaagaagaagaagagaagaaaattaattggagcttgttttagattactcaatgactctgttaaacatctgtaaataattttggtcaattttaatgttctctgatgtttattaatttcttgaatagaaaaatattatatagttcttcatttgttttttgatttttactcataattcttgatttggcaagctggagatcttgctttaatattggaaatgggtcaagtttcatactagaatttgatttgattatatattggagaaaataaaggtcttgactgatttaattctctcaaatcatatttcaacaataaaccaagaagtatcaaaacaatttctttactactgtcaaaacaaaggtcctttcagctacaaaaattaaagaaatacaattctgagagattttctatgctaaatcagcttcattcaataagtgaaactctttttcaacaagtaattttagaatgtaagtaggatgaatgaatttcgagaactttagattttgttacataactgcggcctatctttaatatatttgttttaggagtctagttttcatttgtggtactccatgtctccaaacttttaaataaaggtgtttgttatgttagggtccctacagtatttgagggtgacttggctcacatcgctgcttcccatttgaaagtaaatgatcgtgtctatatagctggaaaactgagtgcaagtctgcctcacttgagttataatcagtttcaagccagtgttcaggtatgactgattaaaccctgaatgttgttcctcaaattaagacttcagaacatgtggagtatgatgttatggaaatatgttatcaattttctttttttatgaaacggttttaggaaaatcgatcgtactgttcaagcaagtgttatggtttgattagcttaagcttttttttttcttctgtgtcggtgtttataaaaatgtggttccggaagaggctttggagatacagcttcagtttgagttgccaaatggattacccatgggagagtggaaagtagttctgggttagttataaaagtaaaataagtttggtcttgcaaattcttggaaaaaacaaatcttgttttttgaatattaatattaaaattttccaaattgattttgggaatatacttcttgaatgcaaacttgatatgatggatgcattctctttagttttcttgtgaacaaatgtgtgatatatcaattatttgtgaacattaggttatggtgcatgctctcaactttgttgaggaaactgttcaaatgaagaaaagttctacgctttgtgtaccagaacaagggacatcattcatcaaagaaatagaaaaagggaccttgaataattctggtaatcctcttttttgtttatatcttaatgttttgttccgtcaatttctactgtgtgaacagtttcatggtttctaatgttatgagttaagtattcaacaaaactgccccaggaaatttttggagcttattaaatgtgagatgaaccatacatacccaggagagggtcaatccttgctcattctgtctttttttcttggcatatcatttatggtggcatcacaatgttgctctataacaaattcttcctgatattacagttttcatttttattgtatttatgtcgaggaataacagtgcctaaaatgttttatttactaaactagttctcctttatgaactgacatgttatctatttatccagagagtgtttggttcttgttcttttcatcttggaaattcatattattagtaactagaactctgctttttctttttcttttactttttttttcagatcctgtgaaaacaaatatggactcactttttggcccctggtcagaccttattgataatccaaaagagtggttggactgtcgtgataaaaaagtcaatggattggtaatgagtgcttaatttgggtactttctttaagtagattcactgtctaacttgtttcaatactggatttcctgtgatgttattttgtttgcaggtgagtcgaaaatatcctgatttcaaacggaaggatgataaaaaagcactctggcttgacagtgcaccaaaacaggttttaaagaaaatctcagcactggagtttgacatttcatctcaaaactcaaatgaagtaaagcagtttaaaggtgagactacacaagctttctatcgagtttaacttgttcctttgcctttcatcttcctcaagttctttagttttcttggattttcgccgagtacttggcatactctagttacatttttttgtggtcacttttgttacatactttttaagttactcttgagatatctgcaaaatttccttgtgttgatgttttgaatcctagagagcttaaccaaactgagtcctgatctatatcagaattttgagaactatatgcatggggaactattaatggtattggactaaatactattttaaagggtttgtaagtaatttttggtgtgctctaccacaaaatgggtactaactttttgtttagatggtgtgaagaaagatggggattctgcaataaattcatggaataaccttattgataatccaaaacaatggtgggattaccgtaactgcaagcacaatggactggtgagggcttgcttgcatccgatttattttttctttaccttaacttataattgttaacttattatttatctcaaaattttatctaggtgaatccaaaataccctgatttcaagcataaggatggtagccaatcactttggcttagtagtgctcctctatggctttcatcaaagattaaaggtctagagtttgatgttccaactccaaaatcaaaagaagtaaatgggaataaaggtgagattgtgcacttttctgatagtatttgtgaggaaggactaagagaaggagaagagaaaaacaagagaaatagaggtaggaaataattttggacttcatttatctaaaaaatcattaacactgaacaaaccctatatattgacggacactgctaaacaactaggaaatcagaaacctgatcaaggataaacatggcaactggaataatggaacgtaatctagaataatagtttggcctaggttttttaggctgtgtttcatttttgcatatgctattcacagcttcaattatgtgtgtcaatggcttcctgcgtaatgattcaagtaattacaatgtatgtagatggaataataacaagatgatagcttgaattcttcgtagctttctaatttatggacttgataggaaccaacactttcagtcacagcagcagcaagaagatagaacacaacgtaatagaacattaggaaatagagtagttgattccctttcaaaaataaatagggaaacaaacacgggtggtattcaagagaccaccttttctcccaaactgaattcacaatcagaagattgtctaaaaataaaagttttatttgccagaaagatttgacatttgcatcggagatgccataaggtattagcttgagacagctatatctatcagttgtctaaagttagaattcctttagtttttcatatttttttggcttccttattttgtaggttcttaatttttttaccttttgcaaggaccttattttgtaggtttagttcttaattaatcctgtttgttagaacttctcttccattgtcttatgttttcttgcccatggatggttaagtcttattgatgtggtcttttgttcatgccaaatgtactcttattatttaggtgatgatatgtggaaggagttgttggaaaaccccaataagtggtgggataatagaatagacaaggtacctcattctatatagacatattgacatgcatacatgtttaaaattcctcatctgttcatatcattgtttgcttaaaaagaaggtgatgctgtttgtatttgcagaaaaatgagagagctcctgacttcaagcacaaagaaactggtgaaggcctgtggctcagctcttcgccaatttgggtgcaatctaagttgcagcctcctaaaactaaaggcacacaagatgtgggccatgtatcaaagaatacaacgggtgcagtggcaaatgtatgtctcagtgttgctgaaagtttaatatttaatgatgttagcttctaggcaataagctattgccaataacaattgatcaaattggtgaggaaccatctttacttgatttttttttcttttacaggcgtatatggagaattgaagagatacacatgagttttgtcaagtccagcattacggtacacagtgatgtggtatattttaaatcactcattttttccttttttttattaaatgagattgcattatttatatgggtggttaaa

SEQ ID NO: 227317 - DNA, 3798 bp, Cannabis indica
actcattccaaccacaaaccaaacattgtaattaattaacattcctattccattacattagtattaccattacatttatattacaccaaatcaaacattataacaatttatcctcattaaaaaagcactcataccttgtaataatggccatgaattctcatgtttctattgggttcttcctattccttcaatctacacatcaaacaaaataaaatgtgtaagggtttgatgaattgaacgctactctatttaactctcttcgcacacacatcctacacacctttagtcaccaataaggggcatgacctttttatataaggattagtgggtctactagtcttatagctcaaatggagagaattttattatcttggatcaataaattgactaaatacattttagagcgtatttataaacttcgagtgtgttagtatattatattcatcttattatgacctaatagtaatactatgtattgatgattatatgattatcattatatattaataacaaatattattaaaaacaaaataacaatactgagtaagcaacatttattacttatttattaatatagaatattattcaaaaaataattatttattctagttctaaagtttctggtagaattttggtaatttgacgaacaaagtttatgaaaattgatattgtgcttgaggatcctcaactagttcattatagaatcaaagtttatgggcagtaggaaggtttttttgctacagtagtttatagaagcaattctatggcagaaagcaagaatttatgggataagttggcaagtattggttaacttactaagctttgattatttttggggattttaatgcgatgtttagcttccaggatagggatggtggaagacaaatcttagctaaagaaattgctgatgctcaagactgacttgctttaggccaagtggatgagtttaagtgttttggagctcattttacttggtctaataagcacgaggttagagatcgtatcttttccaagcttgatcgagtctttacaaatgataaatggttgatttcttttcctaaaaccgaagcttgtttcaaatgggattatgtttcagatcatagttactgtattattaaaacccttgagctgaataaggtgggtttcaaacctttttgttatggaaatcactggttacagtacacaggttataaagaaactgtattggcttgttggaactccaattctggtttgagaggaggtcttaataatattgtgcagaaactttttagagtgaaacatattcttaaaagatttaacagggaagaggttgggagtgttgtgttgaattacaaaatggctaaggaagactttaataaagctcaagaagagtggctgctaatccttctaactccaatctgcaaaattcaattattctttcacaacagaagtttattgatatgtagaattggtactcttgttttatcaagtagcaaagtaaggtcagctggattaagttcagcaataaaaatttgagttactttcatgccgttacgaggaaaaggagaatggaaaacataattacttctttctctattggtgataaggttgaagatgactatttcaaagttgttgagcattttctctcccattttgaaaactttatggggaggaaaagcctttttcagcattggagcagcaagttagtttattaagaccgttcaataaggatgatgtgagaaaagcctttttcagcattcattcttccaaaagtcctgggcttgatggtttcacttcaggattcttcaaaggtttatgggacaacattggagatgaaatctctcaagcagtgttagagcttcttcagaatggtgttttgcctaaatctctgaatgaaactgttatttctcttgttctgaaggtttctgatctgaaagcagcaaacgattacagacctattgcctgttgcaatacactttacaagtgtatatcgaagatgatctgtttaaggtttttagaattacttccctatcttattcacagcaatcaaggggcatttattaaaaacatacttcttgctcataacattcttattttctaggatcttctccaaggatatactagaaagaatatttcagcgagatgtatcatgaaaattgatcttagcaaagcttatgatacagtagactggcactttgtggaggagctttataaaaatctttgttttcctcgagatttatcaactgggttctggtttgcttgaaaggaacaagatataatctccttatgaatggaaggattcagggttctttcaaagggaaaaaagggtctccgtcagggagatcctatgtctcctctcctttttctgattataatggagtacctaactagattattagctcaaaagtctagtaaaaaaggttttggttatcattctcattgtaagcacttgaggttaaccaacctttgttttgcagatgatttgattattttttgcaaaggcaattcgaattcagtgagaggaattcaagaagctttcatggagttttgtgattccacgggtttctatgtgaatgaatcgaagtctcatatctactttgggggagttaaagagaatgttaaggaagagattcttgaaatgatgcaaataaaagagggtacttttcctttgaaatatctagggattccatctttgtcctacaaaatagaaagctttggattgtggggtgatcttggacaagttgaacaagaatctcaacttttgggctagcaagaatttgtcttttgctgggcgtgctcagttaattcattcggttttgcttggaatccgaaacttctggatgtctattttcataatcccatccaagattactactaccattaataagagttgtcgtaatttcctctggggcactaaggggaataggagcaagcttcatctcccttcgtgggagaaagtttgcctccccaaaaagctaggtggagttggttttcatgaaggcaataaatgaatatagcgttgatgacaaagcatatgtttgggtgatctcaagtaaacaagattgtctctgggttagatggattaattctatctaccttaaggatcataatatttggagcattccaaacaatcagggaatgagctggtattttaaaaagttgttgaaacttagacaaatttctagtgaagcgtctttgaggcttgctattaaacgaggtaaatttcgggttaaatatttctatacctctcttgttgcttatgctgaaactatttggaacaagcttcttgtgcccaaacatagattcatctattaacaggcctttaactcaaacctgctcattagagatcatttgagccgattcttgcctatcccttcagctctttgtcctgtttgtgaggcgaattctgaaacacattgtcacctcttcttgaattgcatattctcaaggaaagtatatgaggaaattagttgttggttgggtactattcaatggtctagttctttcttcgatctttagtaatggtgtctgcaatcgactagagatttaaagaatcaatattatttttttctgttgctctgtactttatttggaagaataagaattaatatattttttagtgtgtagctcggctaaaagaattagcttagagattagaaagattgttaaatgtagagttttgagcctttggcaccttaaagttaacaaaaaggataggtatattctaaatgtagttgaagactgataatggttttttgtttgcagctgctgctggtgctggctacgaattggttgggagtagctgttgctacttttctt

SEQ ID NO: 227318 - DNA, 5075 bp, Cannabis indica
tagatgaaccctggtgagttttgaggaggagaaaatcatatcgactaagatcttctccaacttttgtacggggaccaacctcgtctttgcgctagtccgtcctcctcaagtcgacggacaccttccttggaacccaaggtgcaacaccacttctattccgagtagatcgcaggtgaaggctacaggcaattcatttggaaactcaagaaggggtggagacgttacttcgcatccaactggacatatatcgtccgaccagacttagttgatacgatccctgtaggccgtccatgttttggtgcctttggcattcccattgccacttctgccgtgaatgttgcacgaaataccaaccaaccaccgtccagagataggatgatggctggtacaaaataaactatgcgaaagattgctgcgactgacccttacgtggctcggtatgccacaatgccgagcgctggaccccgcctgctgttgaggaggaggataatgagggggatgttgaagtccaagaaatacatgatcagggcgaggtccgtcctgatagtccctttgaggtcgaggagggaggagttgctcggcctttatgctttggaggttacaatgaggtaggggaaccagtgtctgaggctggtgacgtcttggaagaaggtgatgattacgtcactgagaagtacgtcgaggtggttcctcaaaggaggcaaggtgcttttagagctcgatgggtatctcctatgtccattgtaacccagtctcaattgaggagtttcgagacggatggatacatgggcggtgttgaatgcttcttccgttctccaaatcaccaggcaactagtccaagagagggattctgcgcctggtcgggtgcccataccaagcagggtgtgatgctgcccttgcattcgtacttcaagattttccctagttttgcgtaggtcttcttaaagagacgccactcttgattgaatctttcttttagcttcgaccttgtggtcctcatataacgtccagtacttggcactaatttctttttcccttaaagtctacatggtgtcgcacttgtcttgggccttcttgatatcaagtgcagcttgagttttaagccattctgcctcagtacacatggcaccattcttggctatcaaagattggatcctagaacagagctgacccaagtcaatggtgatattcccacttccttggcagtccttttcgcaaataaggccatatgggataacacaaatatagttagatgatcccccataaccaaacaacaacactaatgatacctaaagattagaacttactcctactgcctgctgtttggtggccacagacagagtatatgggtctagacttaatctcgctcatgcttgtgcccacacagtccagtatcttcgcagtgtaaagagccactactcaactaaccttaggaaccaagttttggcttatagttgcaacgtctagtactagatctagtgatgagggatgatggatccattctgagatctcagctatcttcacgaaagatagtttgggtggcccttctttgtaggactacttgttacttctcatgatatctctagaaggtgatagtagattcgcctaccttggtatgataattatggccaaggacagctagcctcatggggaatgaaaagcccaaaaattttttacccaaagttatgcttggtctaggaggtggatcggtgggtgtgggcctcagaggttgttgtcctattgaatttagaggtactgactgttgtacttgagttggagtacattgggatggaactatttgcagctgttaaggtgatgtagttagttgttgttgttgtggtagaaattgttgttgctgttgtggtggtggaagttgttgtcgttgttgttgctggtgttgttgttgctattattgttgttgttgttgttgttgttgtgatggtgatagtgttgtagatgatggataggataaagttggagttgagagctttgcctttctatcaccttggctcgaggaagtagtcgaccctttgcatttgggtttgacaggggcattctttgcggaaaggacaagcccttctaagatgttgtcagaaccttttacactcattggaatgtcaaaaattgctcccctcttaggaggagtttccctcaaggcttgctcccgcaaaggaactggaacttcggacgcctcctagaaggtggtagaagttttctccacacctacggcagccgaagaactcgagatcgtatagttgacctttgtgggaggagcaatttcccagatgtctaatgatgaggaggttgagggaggatgtggtttttgggccctagaggcctgagatttgatctttcccttccctttctcttgggtgcgtctagccttggccaaggtggtagtaatcttgctgcttaaggactttaacatcccggactccggagtatctacacagataactacaatataagcaacaaggaaccacatacccaactaaagcaaataatagggcgattgtaaagcagcaaaatccactaagaagacttgtgtgtgggtgcaaccatttagtgagctgctataaggttacccacgagcaaaagaaattatgtatccttgatcaaggaagctactatattccctgaaatttggcaatgacatgacaatgaaaggatccaccctaacattatctaaagatgtccctgaattactagggctcctaacaatttggttactctgtatatataatctttcatgggatatctgtggtggtctaaactcaaaaagtatttatcaaatcctccctgattctcccaagaaatgcggtaaacgttgggggtacggaggatgcagaaggggctattacatcttcctgaagtgctggctctcagagatttcctcctcctcaaataggggattaggatgacgtatcagccagtcaagctccaagagttcatcttctttagcttccttagggataacgacggcaagattagtcgcgatggctcctttcacctcttttgaagccggcgttgcccatagaggttgacaggattgatattcttgaaaatcacaatcaagataaacctacgaagttcaattgtaaccaatcctcgacctttaactactacccagaaaagaccttgtattgaacttctttcttggctatttttccagttttagcactttgggaggaagttctagtaaatatacaagcatctgcaagtcaattaaaacaaagaaaatttgaaaaataaaattaaggttgagtgacaatagtacgcggtagctggaagttcagttgaaggaaaggcacccttttatggggaacctagaggaaaagaactagtatgcccgaagatcatgagtacaatccatatggctgactaggcagtaggagtctgggtgcttgtccaacctgaagaagcccaacttcttcttgtttgtcctcataagattagcctttacactgtagaagttaaggacctcttcaggggaaggtacctccaacttgttcatcttacaaaagacataccacccagccaagagcctatacaatgaaaggattaactagaaaggagctatcctaattttggcaattagatgcacgaagtaggttctcaagggaagatgagcaccgttagaaatgtgggacaagctttaagcgttgaatccctctatgctagtgtaagttgattctattgtggcagacagtctatgccacatcaatccagaaacgttgtgaagaccagtgctgtcagcataggcctgcaacatcccataagaccgaaagcagttggcttttagatccatctcccagacggactcggtgtaagcctgtgcgactgcgggtgtcttggccatcctttctcctttggcctttgcggagggtcctttcttcatagtaggttcatcctctgggacattttctagagtcatcccgtgtagaggaatttcaacgggaaccatagactggctaccttttgctggagattcccacattgcccatttctactagcacaaaaacgaagtgaaaagtgagcttcttgaagcagctgattaataaaaagaaaaacctccaaacaggtaccccaattgaacaaatcccatggtctacaaacatacaagcacttattgaatctaagatgatcaaaaagaaacatgtagagacgacattgttcgcttttatgacaattcaattctcaaacagattttttcttgaaactgcaaaatttccttcacatattctattggaatatattctaccatgatctagatttactaccatgtatgttatttaacatcctaaaaagaaatttctaaaataatgtaaataaacacatataaagtttaggaaaccttacagtgggtgaagcggaatattaatggctccttccactcagatctttaacccttgtatcctgaacgagggtgctgtcccagcgtgtcccaatgtccgcgcgcgcacacgtgtgcatccaatttcacatgttttcatccaaattcaaaaaatcataactaattcataaaaaaaaaatccaaattaggttctataaaagtctaaattcattaatttttcgtctactttccagtaaaaatatttccagaacgaaataaaaaatatttttacaacatatattgcgatttccaaacaatcgtcatataagcacataaaccatcatgaaaccgtcccaatcaacacaaaacatcgttttaattcatatttcatgaaagtaaatcattaccatggaactgaggccagttgttggaatatgttttaccaggatctagagttattaccatgtatgttatttaacatcctaaatatgaatttcgaaaataataaaaggagaaggctgaggaaaattttactgaagctgaaatttcatcatctttaagtgtgagccatcaatatctctttataggcaaccacctttaggttaggatttattaggcattaaaatattgaaaaattaaatggaaaatcccttgcaagtggccagccatagtaagtgggccccacttgggaatttttccacttttgacaatttttccttattttctcaaaaatgtcactttt

SEQ ID NO: 227319 - DNA, 2478 bp, Cannabis indica
ttctgaacagaaattccttgtgtctgtctcagaaatggtaggctctgaaaagacagttgttagttttcctttcggaaagtggtaaagcatatttatgctaattcatacagtacatatgtttgtattttagggtgcatttgattgggagtaatgagaataggatagggagcgggagagtgatagggacaggggggatagggacagggatagaatggaataaaatttattgagtaaaaaaagttaataagatatatgtatattttttaatttgtgtattggattaagaatagaattgaataaatttaatatcagttaaatattattaattaaaattaaggagactaaaatctgaatatttttcatattatttgtacaactttatcacagattttaatttgtcagattatttctttcctcaaatgtttgcagactggatttttctttaattatacttatttcattacactgactcgttttgcagattatcaataagctacactggtacgtacaagatggtgacatggtaagattttatttatcattgttattgttattattatttttgggtatttgatgggtttgtggcagtgctataaatttgacggatctgtcaattcgatttgctgttttcaatagtcaagttttaaatttgtataatccatgttaataatctgatcagcacttgtttccttgaacagatagtggatttttgctgtggtgctaatgatttcagtgtcttaatgagaaaaaagcttgacgagacaggaaaaaagtgctcattcaaaaactatgacattatgccaccaaaggtaacatttttctgataaaacattctttcattgcttcttcttcatcttcttatggaaataatgtatacattagaaaacctaaacagtggagatagtattgtctgacttctttaattttagacatgaaataaaatggcattcaattttaggctgtttgagtttatgttcttcccataatttgaatattggcatttgaacttagcgcaacttaaactctaagcaaactttgttgtttcgatttgagtctccaagttagtgtacgtttggtttaatgatggttgttcaatattgacgtgctaacattcggaaatgattgtatttccaagagaaaagtcaattgtatgttctgtattaaaagggaaaagaaaagatgattttatctttttgattggcagaatgatttttgttttgaggagagggactggatgactgtcaagccaaaggaattgccaagcggatcaaaattggtaagagcgaaaggattttagttttatcacatcaaagatatattgactgccggggtctttagaatgtttattttggtttcggacagatcatgggattacatcctccctttggagttggagcaaaatttgcaaagaagttcattgataaggctcttgagtttaaaccaaaacttcttatacttattgctccaccagaaactgaaaggtattacttgttatcaacctattcatctcatgtatttaaagtattattgcctcatctagagagaaggatatcacttctgctttgtgacatttttgtacaggctagatgaacaggaattaccgtatgatttggtttgggaggatgaccatttattatcaggaaaggtgaagagttattgccttttattatccttgatgaattgtaaccctatttaaatgtaggatttaagatatgataactaatttactatgctggatgtttggttgtccttctagtcattttatattcctggatcagctgatgtaaaggacaaactaatggaacaatggaatgcgaagccacctctgctttatctatggagtcgttttgattggtctgccacacacatggaaatagctaaaagtcatgctcatattttcaaagaagattatgtgacagatgctgcattgatccatgatcattcgatgggtaaccatgataatttgggtgaaatacctgatcatgcaatggttgattgtaatgattatggtaatatttgtaagcatgctcttggtgaccctagtgatgatgtaggtgatatacttggggtggttggaggagaagaatgcaaggattactctcctttaatcaatagtgacaaaggaaattatgagagttctgctgggatgaaagcatccaatgatgagagaaaaataataattggccagactgatagaaagagcaaatagggtagtgatgtacttgtatctccatatacaagtggtaatcatcattttgaaagtgagaatcttagaagtgatgtagaaggggtggttggaataggaggacgtatggaaagaagtggcccgatcgatattaaaaaagcatctagtgagaaatcgaagcgggataataagaaaaaatcaataattggctggactaatactaggagcaaacaaggtagtgacaaagtatcttcagatacaagcggtaatcattattttgaaagtgagaatct

SEQ ID NO: 227320 - DNA, 1814 bp, Cannabis indica
attttcaaaataaagtatggttttgtaatataaatttgtagtattattattattgtattatttacattttatagtatattaataaaaagagtcctattttaaattgctcatagtttagagttaatatttgcatgctaattaatgttaataaacaaattaatattttgcaaccattttataattcatggagaactttttaaaaaaaaataagaattttttatttttatattttagctagagcaatttttttttacatttttacgaaataagttaacatagaaatccacaaagtaatctaaatcataatctcaaatctacataacaaccaccgaagcaatccaaaccatgtaaaattaaaaaaaataaaaaaattaatatatgtgataattcttcaataaaattaacaaatacaaacaactttatgaaagtcatagcatatagttcgaatggaaaaaaaaatcttatttattttaataattttattaaagaataattatgtataatatatataacttttgtcaatattagtacttataatttaaatattttgagaaattataatttacttaaatttttatatatataacgatttgtaacaatttgacttatgtcttcttatgtttggttccatatattggctccaaaaccctaggtcctttcccaacattttgttagtgtcctatatatggattaatccataacatgcacttagttacgatgataaatattattattaattaaggttctaatccaaatgaaacaaaacactacacacgttaacattctttgaaaatttgactaacaagagaattagctagtatgaaccaccaattgccaaccttgtttatccaagattaaagttcctaaactacgaaaactcatacccctatttttcttgtgattgatatataagtatagaatattaatctagtaatattaaatataaatgtaatcaaaatataagaaaaatatttataaatttttttataatttagagaaaattttgtaataataaagtacaaaacttttacaaaggtattaattagttcatgggaacatattttaattatttagttcaaaatattaattggaattagggatgtacacgggtggagaattacgcgaggagtgctttcttgtctttgttctcgttaaagatattttaatttctatcttgcttgttctctatcagggaacggtctgtgaatttcttaatataaaaatgaaatttattttaaaattttaaatgtataaaaaatagtaaattaaaatattatttaatataataattattatacttaaaaattataaaaataatactaatatactaaaaaaaatatatgtattacaaaatataaaatattaataaaaaatataactaatatattacacgaatttttatcaaagcaagaagagtaatcacctgtttccgtcacattctctatttagacagagaatccctacacttattaggagcaagtctccatagactcatttccataaaaaaaaaaagtgccttcttaattcgaatacatcaccatcattttattattattattattattattattattattattattattgaaatgattttttttttttttttgaaatgcatcacattggcgtttagtgtttttataactcttattatacagttcccatgaccgactgcgccagcttgtctccaccaatcaatataaattatatcatacaattttttttaaaaggaaaattatatcatacattttttttttagaaatgctaaaggagtaaaggacaaatcatggcgcatagtatttttgtgaaatata

SEQ ID NO: 227321 - DNA, 4528 bp, Cannabis indica
gtacccatgttttgaaaaggttgttttttttttaaataaaggcaacattagtatcttaacgccagtttatttatggcatcttattttacgtaagtaagggcgttacatcttcagtccaagaagcagtcagagtgacgaagctaaatctcaagatgaacaaggtgaagaagctgtggccgatggggctgaagctgctgttgtggttggggcggaagaggaggacaaacctaaagctgtgtctcttcccaagagacgagggaagataaggtacaagatttatggtcttgatctttctgacccaaagtaggctatggtggcagataaagttaatgaggctgcagaagtaatttggcctgaagaaccgaaaccaatatctggggaatgcaaacttgttactgataaaatagtttcattgactgagaaagatgatccatctccactcttggctgaatgggcagagcttcttcaacctagtaaagttgattggaccaatttgcttgatagattgaaagaacagaatactgagctgtactttaaggtaaacaaacattgcatatgacatgtattatgctagtagtaagagttgtgagtttttcttttgaccatttttggctaaattccatgtcacactttgtgattactatttaccttttttcttttttcacaacaattttgcattgtttatcaccagctttaactttatataagtagcaatgacatcagactgtaaaagactataagctaaatatatctaataatctgattctgaatcatgcaaatattataattagttaatatgattttagggtaagaagtgggagagaacagccttggtaagtaatttagtatgtttcattgttggctcttaaataattctgatatcattaggtttcataaaaaaatttctacaataaaaatcatgttctataaagtgtatattttgtcgatttgcatagtaaggtatctttgttctgttttgttttgctgaagtgttcagatttcttcattctgtgtttcagtttaaatattatgtaaaatctaacactgacagagtcatttacgtgtgtacataactatataccatttttatttagactaaaaacatataaaaatctcaaaaaactgacttttgttctgtacatgagttaaaaagttaacatcttattctgttttttgctattatttaccgatccgcaaataatgtagtctagcaaacattcaaattttgaatgcactcttttttgtattagagcttgaggtatccctacttatgttattaaaattttttccttttatgccgagacaaatctgatactggacatgttttgtttatgtgaactgtatcttcgtaatttctgatgtcaaacgggatttgttttgtaggtagcagaacttttattaagcgagaagtctttccaagcaaatattcgtgattactcaaagcttatcgatgctcatgctaaagagaaccgtttggaagatgcagagagaatcctcaaaaagatgactgaaaatggtatcatgcctgatattttgactgccactgttttggttcacatgtacagcaaggttggaaatcttgaacgtgcagaagaagcgtacgaaagtttgagggcccaaggtttccaactagactttaatctttacaattccatgatcatggcttatgtcaatgccaagcaacctggaaaagcgcataaaatagtgagggatatggaagcgagcaatatcaatcccacagaggagatgtacatggctgtgtttcgatcattttcccataaaggagattgcattggagccttaaatatttccagttccttgctgtgtgctgggtaccaagtaaatgccgagacttgtaaattgcttgtcgaggcatatgggaaagctggcgaatctgttaatgcaaggaactactttgaccacttaagaaaacttggtgaaatgccagacgacgagtgcactggaaacatgatttcagcttatcaagtgaagaaccaattgggtctagccttggaacttttgttgcagcttgagaaggatggtttcgaaccgggagtagctacttacactgttcttgtggattggttaggaaaactaaaactagttgaggaggccgagcaagtggtggccaaaatttccgagctgggtgaagctcctccgcttaaacttcatgtaagcctttgtgatatgtattcaaaggctggaattgagaaaaaggctctacaagctttggggattcttgaggctagaaaggaagaattgggtcagggtgagttcgagaggatcatagatggacttgtggctggcggctttcagcaacaggctcgtaggatggggcagttgatggaggcacaaggtttccccatttccgagccactgaaggtaaagttgatggcgaagcaaacttttcaaagcaccggacaaacttttcaaaggaccagacgaacccgggtatgacataatttggattcgtttaaggctttttagttgctatgtttcgatagttcactcaaacttaatatttaaattatataaatgtgttttgatgtaataaatagagagaatctattattagaaaatggattaagtagtaggaaatttttgatattttatttaaacatttactaaatatttctgaaatttcatcagaacacttctaaatttcaaaactttgttaaacaggttttcattcactgtcttcttgaattgattttgatcatttagaatgtcattttctctaatttgaactttttaatactaatcaacaatttctaaaggcaatcaaggtagctttacaagattatctaagttgaatctaaaactctcatttcagtttctccatctcttttctcaaaagatataggcttataatgcttagcacaaacaacaaataatccgaaattgagtgcagccaaagcagctgataagaagtaaaaccaatccaaatggccatcatttaggttaggaggaacccaaccgggtttcttcccatcactcgaagatgtaatcctcatcacgatacttaaaatagcgctagcaccgtagctccccatggccgaagcagacaacgacaaccctattcccaagctctttaacccgtcgggtgcttgtgaagcaaaaaattccatccgagccacatagacaaacgcgtccgaagctcccactagaaagtactgcggaatttgccacaaaatgctcaaagagctagtctcctgttcgagggaaccaatggcgaatttcctcctttgttgctcgacgaatccagctaccaacatggctagtgaggcaatagcgagccctattcctatcctctctaaggcactcggaagctttggctcacgttttgttactttaacatgcaaagggaatacgagtctctcgtatagtatgatgaagagcgatgtgaagatgaaatcaaatacagtcatgcttgcaggagggatatcgaagctaaagactcttcggttcataaccgcgccttgttcaatgaaaagcgaaagcatttgaacaaaaactacagaggagaagattgtgcaaagccatattggtaataatcttaacacacattttacttcttcaacttgagtgacagtacaaacatgccatggattttgtgtgcttttgccttcggttgttgttgtgattagtttcatatcttctgtcataatgattgcagcccggtcaagaaacctatatgaaagaaaatatcattaaaaatctcaacattttaaaatagaatagcatcaatttaaagcaaagaaaagcaaaagaaattaagagcaaaaatgacatttttaagaacttaatacttacaaatattactatgaaaattgtctttgatgtattaaaataaatgggaattcatacttaggattacaaaaatatatgaaccaactaatagtttttggttaagaaattctaattgaaatgagaaattatatttaaataacgtacgattttgactatttattatattgatatatagtttgaattaactaaaaatcataacatacatacttgaagccattactatgaagaatcctcctcattccatttctttcactctctttcaaatcaacttcataaagctcttgatcaccattcaagggcatcttgagattaaattttctaaaagaggcaacaataacttgagaaaacctagagatgggattcccacaaggcttaaaacgcctatacctcaaattcccacttaagagaaaaccataagcaacaatggaagataaagtacaaatccgaaaagccaacacccattgccccatgtcctcgatgtaaaccaaaatcgtctcggcggctagggcaccgaggtttagagccaagtaaaagtaggtaaagaatgaagctttggattgtctttcctttggatcttcctcatcaaattggtcagctccaaatgcagcaagtgcagcctcagctgccccatttcctaaggcaattaggtatattgatgtgtagaataatgctatttggaatggtttgtgagcctcacatggctcaccaatctttccac

SEQ ID NO: 227322 - DNA, 2068 bp, Cannabis indica
tatttaattattcctatgctttagttatgggggcataaactatgttagtttccagattgggcatgtaccatatacaccctgatcttgtgaatttgggctctagtgtttttcatgcacaataagtttttagtaataacatctacattccactctttctctctctctccctctctgctatacattcacattacgtggtatgcttttgaagattgaagcagtgacaagaagaatattgtggatcaagtctaaagatccaagagcaaaagtccttgttttttcaagttggcatgatgtccttgacgtaatagaacatgcatttaccgctaattctatcacctatattcggatgaaaggaggcaggtaagataattatcaagcttcataattgtatcattctatagttggccaacacttttcattaaaaaaattgttaggagtgaataaatatgagcatctgacttcaattatctgaaaaatgcaggaaatcacatgttgcaatcagtgaatttagaggacaaaaaagcagcccaaaagggaagaaaaagaagccttcacaaaaaccagaagagcagtctgtccaagtgttattgctgttaattcaacatggagccaatggcctcaatcttttagaagcacagcatgttgttcttgttgagcctctactcaatccagcagcagaagcacaagcaatcagtcgggtacaccgaattgggcaagaaaagaggacactagttcaccgtttcattgtatgtgtacctttcatacgctttgctcaattactactgttgattcataagctaataacaaattgaaactaatttactcctggtttagattttttccatgtatgcatcctcttattctcaattcaaatgcatgaactacttactatgtacttgttttcttggttttaggtgaaagacacagttgaagagagtatatataaactcaaccgaagcaagaacacaacattgacatcgttcattagtgggaagacaaagaaccaagatcagacctttttgacactaaaagacattgaatcccttttctcagctgcaccgtccacagttccagcaccggaaaatgaagatgagatgaccgataatttaagacatttgccaccttctacggcagccgctatagcggctgagaggagactgaacaagcatacattgtcatcataactcactcacgcaacttgtaattattcctttctactgattgtgtaagttcttagctctaaccttttttctgatttcttttttaatcttactgaatagactaatcacttcctgtatatactataccattttagtagttgtatttgaactttgtagagactaattcagaattgtaattgaatgatattcatgtgaaaatggtagatgttgagtctcatcttgggctaaaggctagttgtactttttatttttaatcctggttatccagttgtaaaagacaatgtaaactttgaataaaaaaaaaacttagaatatatgcttggaaagttaatggtagagctttgacatctgaattttaataaacgtttagcctttttatgtattttattttatttatttattttcttttaaatgtattgaaaagatgtagtgttattaaaatatgagacattttaggggaatccaaaaaaaatttcattatttgataaggaaaacttcattaaacgaggaaaaaacaaggaaacaactacagagcctctaaaaggctagttcgaagaggaaacaaagggagcagccctagcagccatatcatgatggttccttatgaacttttgtatggaagaaaatttaaaaaacctattcactgggatgaagtgggtgaaagaaagttcttaggtcccaaagatgttcagagaacaagtgaggcagttgataaaatcaaagcgcgaatgctcgcagctcaaagcagacaaaagagttatgtagatccaaagcgtcgggatattgattttctgatcggggatatggtatttctccgagtatcacctatgaagggcattaaacgctttggtaagaaaggaaaatttagcacgaggttcattggacct

SEQ ID NO: 227323 - DNA, 7663 bp, Cannabis indica
aaccgtatatgtaacttgatgcggatccaagaagcaggagaagacaacatgtatttgggacttccaagtatagtgggtcgcaataagaacgctgtgttggggttccttaaagaaagaatgaagaagagaatcaacagttgggagggtagatttctatcccgagctgggaaagaggtgctaatcaagagtgttgttcaatctctcccctcatatgctatgaatgtctttctctttcccattggcacttgcactgaaattgaaagaatgatggccagcttttggtggaagtcgaataatgccaacagtaatgggagcggaattacttggatgagttgggatagaatgacaaagcacaaatttgatggcggtatgggctttcgtagcttgagggacttcaatttagccatgcttggtaaacaaggttggcgacttctctttaatgttgagtccttagctagcaaagtctttaaagctagatattacccacatggtgactatctaaactcggagcttggatcgaatccgagctttatatggagcagtatctttgctgcaaaagataccgttaaacttggcttgaggaaaagaatagggtctggtgtttctgtacaaataacatctgacccttggcttcctgttcttgaaaacccgataccaatacctgtgatggatggccttgaaaactttactgttagtagtctctttgaagcaaataatagaagatgggatgaagacattgtgaaggatttgttttcttctgaaactgctgctatcattctcggcattcctctaaatcaagctggtggaattgattcctggtattggatagcagaaaagaatgggttctactcggttcgaagtgcatataatttgcgtcaaagacttaaactccattctgatgggtctgaagctagcgttttctggaagagattatgggctcttaaggttcctcctaaggccaaggatctagtgtggagagcggcttccaattgtctcgccaccaaaaagaacttgtgcataaaaaaggtcttaaccgatagctcttgccctttgtgtggagtttttactgaatccgaatggcacgttttggtctcctgcaactttgcttggtcttgtttttgttttgctggtcttgctgctgtggagagggactctttctcttcactactggtgtggttggaagctactgctaaccgagttagtagtgaggatttaagcaaagtggtgatgctgtgttgggccatttgggctgcgagaaatgatctggtttggcagcagcgtgcgagaagcgtgagtgctgtggtgtcattcgctacatcgagtcttgatcgttggttgaatgctcaaggaaaaggaaatattcccttgttgtctcctctcaaagatggagatggttcagagcggtggattaaaccgatttcaggaatcaaacttaatgtagatgcagccctttttgctcctctccacaaacacggctatggctgtgtgattaggaaccccgctggtgagctgatatcgacttttgcaggggtgaaaaatggctctgtggctcctgaactggctgaaataatcggcattcgggaagccttgagttggctcaagaacaatccatttcagtcggctgttatagagacagacagtctcgtgtgtgcagcagcaattagaagtgcagaaactcttatttctgctttcggtttggtagtggacgagtgcaaaaacagttttaattctttgtccaatgtttctcttgtgtttgttaaacgttctgcgaatcgtgccgcgcatttcattgcccgccattctgtatatctagctgaacgtatgtttcccattaacagtgttccctcggacttattgtctatccttgcgagcgattgctcgagttattaataaagaacacttattcaaaaaaaaaaattttgtgatacttcattcaacatcccatcggatataattgaattcaaaaataacattttataaaaatattaaattttgagaaataaaataataaagtaactggattggatatgcataataaagcaagggaattactgagtagtgtagtgtcctgtgtcccgccttggctcccgcattttcaaatttaaacaaagctctttgttccttgcctctgcattaccgttgttctgttatatcatattgttgccttctctctctgtttttaacaatggagatggaagttgaagaacaacctccatgcccttctccatcaccctacatgttttcctcttcgcttttcaaagacatttcaaatttcaaaaccccaaaacgtccttcttctcacaaacccaacttccattccccttccactcaattcttcaccgcttccaaacagacccctcggacttgttcttcctcgtcttttcgcagtcggccttctctggctccaccctccaaccggatcaagaccgctcgtaaactcaaagccctcgaatttgaacagtcacaatcctctcgtaagacccagattgagagtgaacgctctctgaaatcgctagccaagtccctcaatgtttggcttaattttctgtttgaaaatccggcttcgtgtggctgttatttgtcgaccaatggcgggaatggagatcaaattgaccaagtcccggctaaagggaagagagataattatccgggcatgggggttcgggttgacgctgcgtggcggaaccctaagcgtcagagagatttgtcatggcgagcagtggagggcaaggataaggaaaatgggatgaagttttcgacttccgggtgtttgagtcttcaatcttcgttgaaagatgtgtgtagtttggaagatttgaggcagcgaatgcgggtttatttaagcttgggcggttgcaaggagatttttgatgttatgactcgggtgttcaaggtttggtttctcatttctctaacaatgtgattcacattcagtattgttaactatgtgatgccctttaattgatatttgtttttttgaatcagcatattgatgaagggaggttgaaaatgaaggcacactgccctttagtaaccgatgttggtctaagagataaagccatcagaacccttttgtgttacaatccaatttggcttcgtattggcttatacattattctcggtggagaatctttgttgtctgagggagatgttaaatttgatgaagaaatagcatttttgagaatggttattgagaaacagttctttatgcatgctgatctagcaaaatcatatgcttataacaagatggttgagggtgtatacaggccagggtattatgaagctttaggaagtgttgtactgaagagatttttgttgcttgttcttgttcttgatagagctaaaagtcagagcagcctgtcacttgagtatggtattgatggagttgatggaggttcccctctattgtttacagctcaatctacttgtaaatcaactcgtcaggcgatccatggtaattaccatttggttctcatgtataaatttaaatatttttctttctttattaatgttaatttatcctctgtaggttgacattgctctcttttctgttccaaattagattttttgtcatcggatattatgcttggagaaggtaatattcttgcacatctgatgatagtagggtacaaagtatcttatcagcaggtatgtggttttccattaacaatgtttatagttgcatttgtgttagtatatttttaggtctgttcattgacttctaatatttattaagttatttctaattgatgatgggcataggcatggggtcaactagatggttgtgaataatatgtgtactttgtttttcagaatcctcttgtcgagtacgattttcaagtgaaagatttatttgttgatcttcaagatggtgtccgcctctgtagagctactcagctcttgctggatgactcctccatacttacggttgttcctttgttctttcctgaatgtaaacaaattaatttttctatttttaatgttattgtttttttaatttcaagcttaattatgtgagcagagattggtagttccatcagatactcgcaagaagtctttggcaaattgtcgcgttgtgctgcaatatcttaagaaggccggtgtagctttatgtgatgatgatggagtggagattatggtagatgatgttactgacggcgataaggagttaactctctccttgctttggaacatgtttgttcatttgcaggtctgtgcttacatttattattgggtattatttaggtgtttattacctaactaatttttaccacttctgtaaaacctgcagcttcctcttttgatgaagaaagcagcgttaattgaggaaatttgcaaaattcgtggacctgatatggtacttgtgaatgatgagctttctatttatttttattttttttttgcattgtgtggtgaatgatacagctctatcatttttctacccaacaggaacacttgaacacttccagtaccactcctttggaattgttattaagttggattcaggtattggtctttcctcccatttgataaatttttcctgtcaggaaaagttcaaaattttgcctctcttttttgtttactagatttccattaccactctttttgttcattgtgacttcaggcaatttgtcagaagtatgattgcaagattgacaatttttcaactttagttgatgggaaagccatatggtgcttacttgattattattgtcgcaaggaactttcttgctcatgttcattaaaggtgttgtattgtattctattggtctttgccttatttatacttagacaattgaagcttcccttgttctatacttattttggtaatttgtttcaggattcttgtagatcaaatacagaagagtctattgttttagttgctgattacccagatgcagtccacaactttttattatcgcagaaattgacaactttgttgggaaactttcctgaggtaagtgtttaagctccacatcaattaaatacatatggtgaattaagtcatattatgttgaagctagtgaggtttctaacaagttaactagtgtcaggaaatgatgcaccgaaagctttccatagctgtacctgcttcttatagtagctggaatctgtttactattcttttcaacattctagtgattctgttaagctgggaaacaaattaatgcttgttgcttttagtgaatattgtagattaatgctggattgttcaataatacttattatttgttttgttcaacaggttctacaaatcagcgacatacttgaatttaatggtgcatgtaatgataagagtgtagtgatcctattggtgttcctagcatcacaattaattgtcaagagaaatatggtaacactgaagtgctagtgttgtgatttcagtttctttgtctcatgcttaagatatttaaaagtattgtttcattgtcaggatcaactgaattttcataaactcttgggttgtaactgtcaaagtccagggagaaggtattcttgtgtggagcagtgtagtcctgaagtagtacaaaccaaagacaatgctcatggccaaaatgctgaaggttatatcattttttataactggtggctttttttttttaagtgtaactcattattatgtagtatctttcttaccttttttacagtttcaatcaagtagttactattaaattttttattccttgaagagccactaggccaagtaccatttccctttcaatcaaggtttttttattgatttggattttatattcactttcaaaaaattatttgtgtttcacaggccataaatttctatatttatttaaaacctgcttagcctttatttaatctttttgctttcctactaacagatgctgcaagaaaatttaaagccatccaggcttggtggcaagatatgacagagaggaattatccttctgttgcaaaaccagctgcatctatttttcagcatttatcagtaaacatagacaacaccaactctcagagaggtaataattttaattgtaagctaagaagcaggactcagtgtttgtgttgtgggctacttgtcaatgtcatggatcagtttatcttttattattatatttataagctttgttctgttctttttcttatttggcatcttgacctttttatttccatttgagttgatgtctctatcctaagttatgatctttctccttccaactgagcaatttatgtaatgccaacagaaaatgctgccaaaatcatacaatctcacttcaggcgggtgattcagcggcgcaacttcttaaagatgttaaatgctgcttcacttttgcaaattgtttttcgggctttgttaattgcgaggaataaaccaccatgcataagttttacttctgttcaagtacaggaatctccgcgtggtactttttcatttccatttggttcattattaacagtatgcattaaatatcttacttaggccatttggttaattagaaaggcgcaagcagaatatcttactaactcacgctattcggttaattagaaaaatggaagcaatctgaatactggaagagatatgccccattcattatggacaggcatcattttgtcaagctaaggaagtcagcattgtttatccagcacgtggccaggagttggattgcccggagacattatagtcctgatattgtaattagtgatgtagcaaatcctgatctagtcaatgcttccatgatcattcaaaaataccttcgtgggtggttagcaaggtctaggtacattcgtggggctgttccaatagagacaccgttatattcacacctagagaatggtgcatatgatcttcagatggtttcagctgctaatgttcactttgctatggaggaatctaatttttgcaactctttccaaaatcaacactttgcagcaacccaaattcagagtcattttcgtggttggttgttgagaagaagttttcaaagtcaaaggcaagcaatattgaaaatccaaagtgcttttcgaatgtctagatgtttgaaggcttatctacaaaacagaactttaattaaatcagcaactattattcaatcttctgtgcgtcgatggatttcccttagggaggcttgtagacggagacatctcattgttacaattcaggtaactatggtttgctagtattattttgtacctcttattgacttcaatcttgaatgttgttagctaaccttgcaattgtattcatcatttctagtacttatacccctttgtatgagtaatagttgtaacatgtaatgtttctactttgcttaaattattttagagacattgtcgaggttggctggtaagaaggaacttcttgtcccagagaagggctgtattaatgattcaaagtgctattcggggtttgagatgccgcaaggaattttatggccacaaagaagcttgtaggcgtaggcatatcattgttataattcaggtaactttgcctcgctagtgtagttgtggagctctaactgacttcaatcttgaatgttttaggcctaaccttttatgtgaaattgtattcctcgtttctggtatttatactcctctatgatgtaatagttgtatgtaatgtttcttcttggccttaataattttagagacattgtcgagggtggttggcaagaaggaacttcttgtccca

SEQ ID NO: 227324 - DNA, 3177 bp, Cannabis indica
tttttttaagcttaagcttacgtataataaatggtcactattttattaaattaatctggctgaaattaaaaattaaatttggctaaatgattaaaattcagatcggatattactaatatatttgttttatggcgacaacatgtcaaatttcatgactctcaatctagaccattttcgactattattagttcaaagaaccacaaaagccaatttatcgtccagattcagctttagcttctactccgagtttttgcacaaaattcccctttcccctaataataacatctcaacccaacctgtccaaaaaactgttccgtttttccaatctcaccctttacattattaggctaaacttactttcacaatggatagtttagtaaattcactgttcttaatgtagccaatccgattaatatataagacgacaatagaattaatagcgtacaacgaaggacaagtgttacaacaacgcttctgatccgacccaggaaaatcaaccaaataaaattgttcgtcgccgccgggaatatgtcgccggcgagtgacgtacacgctccacttctctcgccacacggacatccaggggtgaatcctgcgtcggtatctggggccgtgttcaacatcgcaactagtataatcggcgccgggataatgtctattccggcgacccttaaagtgctgggaattataccagcttttgctcttattgtcatagttggtgtgttagttgaaatgtcggtggagttcttgatgaggtttacacattccggtgagtccattacctatgcgggggttatgaaagagtcatttggtcgggtcgggtcagtggcaacccaagtttgtgtgatgatcactaatctcgggtgtttgatcatgtacctcattataattggtaaaagtttaatattttctttactttcacgaaattttctttttgtttattttggttgacatatcccgatagtgtttgatttatttgatgattaagctgatcccgtatttagttttagttaataaataaaagggcagttctttatttccatagcaaacacattgagataaagatctaatagtctctctctggttcatatataaatttaaagaaataaatgtctcgcgttaatttcagcggatgttctttccggaagtcaacatggggaaactatacactttggcgttttgcaagaatggttcggaagccactggtggaactcgcgtgaatttgccctcttggttactgtcatcgttgttctgtttcctttggttttacttaaacgtgttggtaagtgagtaataaaaaagaactctacacaattacatgctcttcttttgatgaaattttctgatttgatcatctggggttgttgcgttttttcagaatcattgaagttcagctcgttcatatctgttcttctagctgtgatttttgttggcatatgttctgtaatggcaataattgcactcgtccaaggcaaaaccaagaatccaagattagtacctcaattggacgaacaaacatccttctttgaccttttcactgctgtccccgttattgtaacagccttcacatttcattttaatggtaaacataatcaactaacaaagaatttaatgaccaacagtgtatgcaatagctaagccaattcttgtactaacggtttcttctaccaaccaatttctacagttcacccaatcggtttcgagcttggtaagccatccgacatgatctcagctgttcgagtctcattagttctttgtgccgccatctattttgcaattggcttgtccggttaccttcttttcggagactcgatcatgtcagacatacttgtgaattttgacaagagttctgacactgcaacaggagcattgctaaatgatgtagttaggttaagctatgcacttcatctgatgctagttttccctcttttgaacttctcattaagatcaaatattgatgaattcctcttcccaaagaagccccttttggcctcggacaccaaaagatttgtggctctcacaattttactcttggtcttctcatacttggcagccattgccttcccaaacatttggtacctctttcagtttgtggggtcaacttctgcagtttgccttgccttcatttttcctggtgctattgctttgaggtgaatatactttctctttttatgtatctgttttgaaaacaacatgattaatcaatctgttttttttttttttaaatttgttctgttttgaatctttacagggatgttaatggtatatctacaaagaaagataggctattggcaaggataatgatagtcttggctgtagttacgagcgttattgctatctctacgaatctatataatctgcttggaaacaagaaggaatagagattggttcccataattttttggtattgagttgacaagattttgtatttgtaatatatgtttttttttctttgacatctttgtttcggtgtagagtgattgtaatccacgggcttaatttatatgtatttatatcattatttagatagtcaagcaatatttagtatttacacattagaccacaacatcattacgatgcaaaacaagttatggcatgtttggtttgttgtaatcggaattgtaatagaatcaaattatccattataatgtttgctttgcttttaaaaatgatgtaatgggattacattgtaatcccgaaaagctatataatgaaaattacattgcaaaagactaaataaagtaaagctaaaatgactctaatatcctttttcatataaatataaaaattaaagtaaaggataattttgtcaatttatcacttattccaatattcattccaataacaaaccaaacattttaatcaattctcattactattcttattccattacattactattacattccaccaaatcaaacatcaccttaattcatattaactgtagtgagtgaagccttaggaggctctcaaagctaagtgggagaatatagtactctagagtccttggttttgttttgttaatgcacaaacagggggcagtccctatatacaaggtatggctttatttgagaaaaaaaatttaaaaataaaataaaattggcaattgtagtatctataacctatataaaagtgtcaatgtttttggtacttatttatattgaattacacatatac

SEQ ID NO: 227325 - DNA, 2461 bp, Cannabis indica
gaataaaatagttagcttagctcatcaaaaacctaagagtgaatgaaaaagaatcagtgcctactgcctatccaatttagtcccaagtcttttactcttgcgaggaatcatcattctatatgcataaacatgtttaaaggtatgtatttctccaaattagagagcaaaaatacattatttattactttataaatctctttggactgagggtgtgaatcatccccagccaaaaattcatggaattctccctctatttctatcaagctacgacctggactcttcttgacccccacctctctcatcatgctcctaaccatcctcacatcaacccattttttgttattagctaaagtattagccagcaatacatagataccactgtcttggggatccatttctaaaagcttctgagctgaaagcttagccagctcaacatttccatgcatcctacaagcattaagaagagcaccccaagctgattcacttggtaacattggcatatttctgatcaaatcataagcttggtccaacattccaattcgaccaagtaaatctatcaggcaagcataatgctcttctctgggctctaatttataatcccttaacatgcttttgaagtgctctctaccttcagagactaatccaccatggctacaggctgacaagacagctacgaaagtgattgagtcgggttcgaatcctgcatttttcatttgctcaaagaggataagagcttgcttggcataaccatgtgaagcatatcctgcaatcatagtattccaagaaaccaaatttctaagtggcatttcattaaagagacttgcagctgtataaatactcccacttttggcatacatgtctataagtgcattacttaatatgacactttgctgagcccctttagggttgatgcaacaacggtgaatccactggcccaaatccaggcaacccaattggccacaagcagagagaacacacactaaagtattctctattggaaacaaacctgctttcatcatgtcttgaaacaatatcagagcttcctttggttgattattttgagaataacctgcaatcattgctgtccaggatatcacattcttttccggcatgcagttgaagaagcttcttgcagaatctaaatctccccatttagcatacccattaaccatgctagtccacgaaaacacatccttggttttcatattatcaaaaatcttctttgcttctatcaagagaccaaatttcacaaacatatccaacgttgcattgagcaaattaaggctgcaatttacgttctgtatcgtaatataatcatagatttgctttcccataagaatatcccctttactactgcaaacagagagcattgcaatcatagtaacctcattcggtttaacattacttaacagcattgactcaaatacctgcttagcctcatccaggcaatcatgggctgcgtacccataaatcatcgtagtccaagtaacgacatccctcacagagctttcatcaaacactttgcgagcagctaataaacaaccacgatcggcataataatgtataagtccatttcgtaccagcaaatccatatcaaaccccatcttccaaatcttacaatggaccaagtttccctctgaaattcccggaaaattcccacacgccttaagcacccaaacaaagctaagcccgtccatttcgatgccttcccggaccatctgcccgaagaacgaaaaccccatttcaggaaattgagctttcaaatagcctctaatcattgtattccacatataagtattgggtttctcaatctgggtaaagaaagcgtgcgcgtagcgaatgtcgcctgaatcagcgagagcacagaaagccaatacccggctagccggaaaagtgtcggtaatgagaccagtgagagtcatttgagcttgaatttgcttcatctggagcatggtggagcaagactccatgagtaataaagttgggttggtaatgatgagagtggtctttggtttccatttacgttgatatgtggaggttgaggaagtgagagagcgggaaagaggttgatatcctatgggtaatgacagtggtagtagagttggatgacatttcataaggcgtttcatgagaagaaggtgaagacgggtacattacatacatactcaaagaaggcctgttgagcttgaagctcgctcgttcgttggtttagctcaccaaagctcaaacagacagttcagagagagagagagagagtactcctttcctttggtccaaacatggatctcaaaatctctccctgtgctttcttcatttaattgaaactaataataatacaaacaatctttcaaaaaaaataaataaataataatacaaacaaaactatgtctcactagtttgtgtgtgtgtgaactctgaatagcagagttcagatcgaaacagagagaaggaaaaagggagc

SEQ ID NO: 227326 - DNA, 5350 bp, Cannabis indica
gagataattagacacgagttaaaaaaatgagtcgacacgcttgacacgaaatataaaagcagatcacataaaatataacacgcacgacacgatgacacgttttgtcactcctactggcaatgcatagacctcaaaacacactaaattgcaccaccaaatgcagtatagtgcggtacaatgtgagatttacacctatctcaaaacattacaataaagattcttcatacacaataatttgaaagctaaagttataatatacctaaactaagattagatatacataataataataaagaaaaatattcaaaaaaacatatttttaattattaaaagaaaaacaaaatcacttgtcccaatatacacctataggcggacctacatagagctttaattaagttggtctattagattctgtaagggaatgatggttttcatggatcctatagttactctgaatattcgatgactcaattttatttattatggtgattaatatcaacaaagacgtagtggaagacatgatctttaaaacaaaccttatgactgcatggaacaggcagaaaatattgaaaagtttgaagaatactataaagtgattattaggcaacagaatgaagaagaatggattgtgaatgaagaagacataaaaagctttggaagacaatcgattgttgacaaagttttttcaaagagacgatgtacgggaaaattcatcaaaaacatctttagaggaattaaaaaccaagaagcctttggagagtgaagggcttgaaagatgattcgatgagctcatttattggaataacatttgaaagtgaggaggattttgtggatgtgtaaaaaaagaatatgtagaactttattggggatttatgctagttgaaagatggcctgaaagtggaaatcgggaggaggtgaaaccagacagagtttcttgcaggatacgaatggtgggattcctcattattggttttagtctgtctaacgttagaaggattagagagctagctggagacgttatgggggttaaatgaaccagcaataataataggtcctatgcttattacaaatgtggctaatggggcataacaaaaaggatttccatgaaaaagaattatgattagctaggggtcttaatagagaaaaggcaacaccatatggaagctagttgagtagggagaatatgatgatgtgatgttttgattacaacaatagaaacatcactaaggaacaaaatgaggaaagggcagaagaatggttgaacttagggcaactgacgaaggtgcatgatgatcggagcttgggaagaggaaagggtgctggtatgatgcatgaaggaaaacaaaaagtcatcttggccaatggaacatgagttatgggaaaaaagaatctagaaatagctaagacagctaaagagattcatgattgagataacaattacattaataagtgcgggaaaaaataaggagtgaggaaagggtaatcaacaaaatgttaaggttttatgtcctaaataaaaatcaatttaaatgtaatcttatttatcaaaagatcaaaaattattttattacttttgtatattgcttagttcacatgttatattcatgattatatgtttaaaatataaattatgctaaatcccaaacatatagctattcacgattataatattgtcaacacagtagaaaatattaatttgttcgattggatgttggatgtattgaatttttagacactccatccaacatccaaactgattgggttgaatgctactaatgttgttttgatttccaaaaagaagaattcgcttgatatgggtgatttgcatcctatatcccgatgtaatgtgctttataaggtaatttctaaaatgttggctaatagattgaaggaggttctttcttgggttatttcggatactcaatgtgtatttcttcaaggttgccttatttttgataatattatggtggcctatgaggttatgcattatcttaaaaggaaaactagaggtcgagatagtttcatggcgctttaactcgttatgagtagcctatgataggcttgaatggggatatcttagagctatattggagagaataggctttgatgggcgttggatcaatttgataatgcaatgtgtttgctcggtttcatatacattggttcatgttggtaaagaaatgggaccaattaccccttttagaggtattcgccaaggtgattccttatcctcatatctgtaagtcttctcaagccttatccgtaattatgagacgcgtgggttactgaggggttgtagagttgcttggggagcgccagtagtatcctaaatgttgtttgtggatgatagctacatttattataaggcaattgaggaagggcgcaatgtattctcaatttgttacatacgtttgaactagcctctagtcagagaattaatttctccaagtccttagttttctacagttcaaatactgaggttgttatgagagataacatatgtgatttgctgggtatttttaaggcagatgagaatggtacctatttaggcctatcgaataccatgggtaggaataaaatgaccaccttaggctttttaaaggataagcttcgtaaaaggatccaaggttaggagggtcatttactctcgagagcaagtaaggaggttctattgaagatagttgcacaagctcttcctaactatgctatgaatgtttttttgcaacctgtggatacttgaaaagaattagagtgtcttatgtctaaattccggtggcaaacaggttcatctcaaaaaagaaacattaattaggtgagttgggagcgtatgtgcaagcacaagtatgaaggagggttgcattttagaaacttgcgagactttaacttggctctcttggggaaacatgggtggcatctcctcactcaagaatcttctctagtggggcagatttataaagctcaatactatgcgcatggatcctttctttcagcaacacttagtgataacccaaactttatttggtgaagcattatggaggcacaaccacttattttgagtgggattcagcggagtatcagacctaggcattcaatgagcattttacacgacccttggctcgattgtgtgaaaaatccttatgtcatttcctcttaccctgcattaattagtaaaccagtaagttctttgtttaattttggattctcaaagctgggatgaggaactggttagagatttgctcgaggttagagatcaaaaattgattttttcaattcaattgagcaattttgttgagtttgatttctgttcttggaagtttgacaaacatggtatctacactattaagagtgcataccagcaacttcgtgaattaaaagggtgttgctctgtgaataatgcagcatgtttttggagaaagttattgaacttaagatcccacctaaagagtaattttttgtggcgtgcaacatctaattctcttcctacttgtgctcaacttcaacatagacatatatcaattaatagaacatgtccaagatgaaataatttttcatgcattggtgggctgttcttactctcgggcttgctaaaatcgtgttgcaactaacataagttcttggaatgagactcgatttttcgactggttgctggttttatttaatagggataaggatgatgtgttagaagaagttgcaatgattagttgggctattttaaaggcacaaaatgagtttagttggcaaagaaaaaagacttccttgctgcaactattaatcattcagtaagaacaattcttgatcaatttaagtttgctcaatttagaaaaggtttatctttttcttcatctcttgatggaggaaaggaaacaacgtaatggacttcactagttgtcgatgcgatcaaggttaatgttgatggggcaatctttgaacaagaggaacgttttggcatgggtgttgtagctcgtgacttttttggtgaaattattgaagcttttatgacgagtgttgttggaaaagtacaaccagagattgcaaaaattgtgggcatcaaggaggctttgagctggattaagaaatatttgtggcctagagttgtccttgaaatcgatggtctcttgtatgttcgagctatctctagttgtgccactttttcttctcagtttggcttgttagttattgattatcgtgtgttactttcttctaatagtaatgttactttacgttttgttaaacaatctgcaaacaaggtagctcattgtcttacaaaaagctcttatttctttactatagaagctattgtaatggatgaaatttctagttaattgaaatgctgattttattaaaaaaaaaacattgtataaaaattattaattaaaatcttattgcattttaattactcaattatcataaaataaatacataattttattatatatgatttgaaatttatatatataaaatggagagataaaatagtgacttgactctttaaaattactgaataactttatttattttctccttaactcattgcatagtaattaacttataatgactgagacataaggcgattaacataatgattttcttctatagtagtttatagggccgaccctgaaacaaagtgggccacaagaaaaaaaaatatttttgggcccttatattagaaaaaatctggtattttttaaagtcagtaaaaatatatatataattttaaaagggaaaataattgagcccctgggctaagtgggccctaggcacaggcctattccgcctatgcccagggccgggcctggtaaataatttattgttagatttattttatgtggaaagtaagtctaacaacaatgataatgctgactacaagcgcgatacagtgataacattaattttgaatgtaatgatcactataaatgaaatatagtgattacaattattttaaatatagtaacaataacaaataacaaataagataagaattttgaaatcatatgatagggtttcaatatatagatttatgaattattttttaaaaattttattttatatgagaatttttttagctaacatttgataatatctttatttatttttatttttaaaaattgtttattgaatttttttaagtaaacaaatttatagaacaattattcttattatttaaaacaattatgtcaaaaatattaaaatttgaaaacaaaatagcttttttttttttaaaaaaaaaaaaaaaaaccaacaacaaaatactaaatagcacaggattttctagttttttttataaataaaaaagtacaaaaaaattcaataattaaaaaagggtaaattgtggcataaatacttaatgttt

SEQ ID NO: 227327 - DNA, 3107 bp, Cannabis indica
tttttttttgacaaaaaaaaattgtgacttacggtaattatccctaaaaaattatggtacgcttgagtttttattattgaaaaatgtcgctttaattacacgtaaacttgcttgaatcgaaaaataaaattatttaaaaaaaaaaaagctatgtatgttgtatccatttcgtggtttttgaatatcaatcaacattacataatttctgagcacaaaaggaaagaagaataaaaatcactctattatgtagaaagcaaagatataagtttggtaagaaactacagtatcagttggatgtgtattaatatcacagaagtcttagtgttttgtggtaactaatatcacagaaggttgcagctcttgcagcaacaacagtggttaagtgtaccaaccacaaagcttggagcaagaggttgttggtcactggagcctgagctgcttaaagaatcgcagcagcagagacaacagaagcagttgttgattagacattttccccgaccatgatgaactttttgagctcgtttttgggcctctagaagggcctgttgagcagccacctcgaacgcttgtctttcacgggtgagttcacgaaatggatttggcgccatgtgttgtcgatcatgttgtaataactctgagaaagatggctctggcaggggttcatcttgatcagaacaatcatcaacagctggctcaatctccgagggaggctcaaagatgtcaatcagtccaccatataactctccaaccgtccaccttagtgggaagttccactgcatttcttccatctcttcctccaacgatctctcggtagtagtcaccacttgtttaccttctctttgttcaaatatttcaggagggtcttcttcatgttcaggttgtaatactatcccctttcctttatcagctggtctctccaagctcggttctctagtagccaccacttgtttaccttctctttgttcaaatttttcaggagggtcttctacttgttcaggttgtagtactatcccctttcctttatcggctcccctctccaatctggtttcgctagtagtggccacttgtttaccttctctctgtacaaatttctcagcagtatcttcttcttgttcagttgtgtaggtaatacatcattgaaaaatagtatttcggagtactctgattcagaagtttcagacccagactcttcttgcaccttccttttgtcttatcatcagtcccaggaaaaattttcaatttcttgctcagcttaatcatacggcctacgcacctctgaaacaccaaaaaaatgataataagatagtcttcataatagaataaagggagaacagggttttacctgaatcaacctttccgtactcaatccacaacgaaaggttgcatatatgcggggatacaaaaaataggaagccgcaataagagctgatgctgcaataactgatggtttctgtttcttcataaaattgcctgtgtggaagaccaaggactaaatgttataagcctaagtttaataaagcatagtaagaagaacagagcagaccataacataacgaaacgaaacaaaacagagtgaagtatcaaacttactttgatgtgaatttatgatgatatcatggataattctcttattaattctatgagaagtaccaagaaatctagtagtatataacggcacaaagcatatgggtgtgatcacacgcaggtcccagttagtccttcgagaatcccaaactccacttccatgaattgctcctccgtaatttgccttagatttggcatctctgcctgtttagacaaaacaaatcaatcataatatatctagagataataaaaataggaccattatgggtaacagaggtttaaatttgacctgatattcagagatgttgaatgttatgtttctcattttccatgcaagtgtgaggcagcatataacggcgagttccacattgtggataagacaactcattacattctgagaaaacaaatgcaagaattattactcaacaggaaaaaatgcagcaaagctgagaaaataggtataaagattccaagattgttcaattaataccggtacacgatttccattatcaagatagcgatcgaaataattcagagcaagataagaagccaaaggatcatagcttttgcaattggaatactgccgagaaaccaagaaattttttaaacaaaagcacaaaattgaaaattttgaagaacaagaacttgcgtaaactactggtaattttttttttccctttttcaaatcaaatcaataaaagaatataaattatgctcaggaaaaagtaacaacttactttgaagatcacaattagagcacggcaacgaaacttatatcgggatttccttgtgtcgtaatcctcagggtccgtaacggaagattcaagtttaaagtagtaatcaaacttattacgttggtttccatggaaaggaattggattgtatggatcataatcaggtactctcagcattttgcgatgaagctgtttgaatccaaaacaaaggagagtaattactgaaaagcgtttgctcagatgagaaaaaagaaagaatgagccgttgggaatgattcactgggtttataacgaaactgtgattttggcgggaaaccaaggtctggacatttgcgagttgccacatccctccgtacaacccaattcttaccgtgatactgggatattcaatgttttgttttttaataaataggaatatttaagtagtgttttatttttataacaattatttatttttttaatcatacaggttaaaatatttaaaaaataataaaaattatttaaaattgttactaattttattcttttgaaattcaaaatcaaaattttaaaacaaaaataaagttactaaatgtatttgttgtaggaatgttcatcaaaccgctcaaactacccgcactctgcaaaaaaaaaaaatacggtttgaaattcattgtggtgcagtcgcagtttgattcttcctaaaccgctacggtttgcggcatgttaatatgcggttcaaactgcaccacaccgcacattatataaagggtaaattgcggcataaatacttaatgtttcagattttat

SEQ ID NO: 227328 - DNA, 2444 bp, Cannabis indica
aaaaaaaaaagcaacaaaataacataccatgagaacaatgtttagccatggccaacctttggtcaagagcagactgagcgacattgtttgccattttagaagtacaattatgaggggaagagattgttgcaaatgaagtaaactgaaaatagctctaaatggctaatatatattggtttgttaagctttgaatgaattgaagttgtgagatttggacaaatatttataagcatttttgagtgagaaatagttggtggggggtaggacttaggagttgatggtttttcttttaattctaaggtctataggtacctgttttcatcaaagcaggtgatatggtcggtttactgttggagtgttcaggtttcgttccctaaatgtccctgacctttgcatgtgagatgtgaagttttatgaagggtctcatggtaatttaattttacagatgttggtatttggtcacattatccacttatgtttctttactgacacaaaagaatctttaaactaacagagttactttactaaaatgtgagttaatattacactaataagtaccttttttgaaaaactcttctctttgttatggagattagcaaaatccaccggtttaggagaaagatgcccaaataccatgggtagccctttaagtttttttttttttttattaatgagatagccctatttaagttgaagccccatttagttgcattaacctgaactgtgtgattcatgagatgaggcacgtgtcccgatttgaaggaagcagatctgtctttattcgaatagtacagtaacttcttaggttcatggttttgagtggcaagacagtggctggtattggaccctcttatcaatttcatcgttttcttctgggtttggccagttttacttttgtatctttcttcttcagaattgataatgataatgataagggcgttcaattcaacgctccctaacatcttgtatctttagatattgagcaccgtatatctcaatctaaattagagtacaataatctgtgtacaacaaggaaagtgaaaaaaaaaaaaaagaaatagagtaaacaagaagaaaagaaaaaaagagagcaaaagttaactgttctgttaggatctatatttatatacataaattatataaggattaagcaaaagactgctacaacaatctaacagtaattacttaactaatatctgacaaaaccgatagctaacatcaaatcctattgaactatactaacatctccctcaaacgaaaatatgtagcagccatttgaagtttagactttaggaacttgaatcgattagttgagagggacttgatgagaatgccagctgtttgattcggagaaggaacatactgaacagatagttgttttgcaatgatttgatctctcacaaaatgcagatcaatcctatatgtttggacttggcatgaaagactggatttgctgcaaaagttatagcactgtggttaccaacccagttaacagggaagtaggcaagtggagcttgtaattcagtaagcagagatgtaatccatcttagttcagctgcagcattggctaatgccctgaattcacttttagtgctggattgagccactgcactttgctttttagtagaccaagatatgatatttcccaaaaaaaaagacaatatagctactagagcgtctgtcatctacacaacttgcccagtcagcatcagagtagcattcaatggtcattgcagcagcatgtcttaatagtatgccatctacataactcaaggggaaattgtgctttttcatgatttgttttgaaagacaatgcatgttatttgccatattgacatgcctcacaaaaatgaaactcaatgtttttaaaatttctaatattcatttgattcaaaacaagacttaaaacatgattggatgggtggccaagtttcctatgtcacttatctttgattgaactaacaccagacacactctcagtcacaagctaagttacattttgatttaacacagaagacaaagcagaaaaataggttgctttagactttagagcagggtaggctaaggaattctttttgtgagatggcttgacccaggtggagcttcccttgaagcactttcttctttgtttgattgtccttcacacaacaattatcagatgagaattcaacattaacatcattatcaacaattaattttgaaatgctaaccagattcttagttatgttgggaacatgtagcatttctttgaaaataagtgttggaattttatgtcctaaataaaactcatttcaatttaatctgatttgttatcaatagaagattagaagtcatttatgtttacatgtagttttcatgtttatggtttgatgtgtacaaaatctgttaagtccagagcatataattattcacaattacagcgatgtcaacacagtggaaggtaa

SEQ ID NO: 227329 - DNA, 4576 bp, Cannabis indica
caatttttgtaaagaaaaaaaaactatattttacaagaacaagtttaagtctattttttaggagtgtgagcagcacatgcagttttacaatttcttatattgcaactgcagtgcaaaatctcaaaatcgcaaaaatatagtgcggtgcgggtgatctatactatcatcaaataaataaataaacaatatattaaaatttaaccaacacaataaaaatacacatgttaaaattttaataacacaccaatttaaaatacaacaaaattcaaactaaaatatacaatcttttaccacatgaaaaaaaaaagaaatataatatttaatgttttaaactcaccaaatacggctactggtggacaggggacgggtgatgcagcagtggcgccacaagacatgattacaaatgttacttctgaggtgggtatttcttctttttctgattttccacttctctcaaatgattctgaagcggcgagccttgatggtcaaggccgccgaatgcaatgaaaatcatatgttggaatgtccagggaatcgggaacccctggacattaagagctttgcagtcccatgtgaaggatttggatcctagtattatatttttggctgagagtaagttgaatagagttcaagcggagagagtgtgtggtgctttgaagtttactaattactgggcagtggatagagttggtatgagtggagggttgcttttgttatggaagtcggatttacagttaaaagtgctttctagttcaccaggacatgttgtggcatctgtggggggccaggggtttacgccttggttttttactgggttctatgggaatcctatggcttctcaacggaaattttcctggcagttgttacgagatttaaacaacgaatttagggggccgtggttgtgtgctggtgattttaatgagatagtgagtttgtcggagaaggtagggggccgtgatagaccaagtggacagatggaggacttccgtgaggtcttagatgattgtggtttgattgattttggttctaataaaaccgaggttacatggtgcgatggtcataagaatggaagtgtaatggagcggcttgacagaggcctttgtaattcagaatggcttcatatgtttgaaggggctgatgtatccttgttggattggtgggcttcggatcacagagccttggtgattaatgttcccattcgagcggggtttgggaatggtagtaaagtacgccggaagggtcgttttcactttgaagaggcttggtgtgaggaggatgagtgtcgaaatattgtggagcaacagtggggaggagtggaggagcctagttctgctggtgtgttcagaaggaatactagggagtgtggtcagaagctacaacgttggagcaggaggaagaaaaaacaccttgatggcgaaattaagagggtgaaggattctattgcttggttaacaaatttacaacagccggaggtgtggttggatatccaacaagaggagaggaagctaaatgttctactcgagaaggatgagaagtattggaggcagcgtagtcgagctttgtggttgaaatggggagatagaaacactaaattctttcaccataaggccacggcaagaaagaagaagaatgagattaagggacttgaagatgatgcgggggtgtggcaggatgatgtcatggtggtgaggtccattgtggaacattattttagttctttgtttactgcatctactattgatgaagatgtgttatcggatgtcattggggctattcctttgaaggttacagatgggatgaatgctgagttacttaaagagtttcaagaggaagatgttgtgcgggctgtctcggatatgaatccggctaaagcacctggtgaggatggtttgccaggggcattttataagcaattttggtctaccattggggataatgtaaaatcggtttgtttgtctattcttaataatggttcgaatgtggggtgccttaatgagactattattgctttgattcctaaggtggataatccgagaaaggtggctgagtttcgaccaatcagtttgtgtaatgtgatatataaaattgtttcgaaatgtcttgcgaatcggttgagggagtcccttaatgttgttatttccgatgctcaaagtgcttttgttaaaggtcggttgatacatgataatgctattgtgggctttgaggggttgcactgtatgaggaagaatagatttgggaatgggtataaggttgctcttaagttggacatggctaaggcgtatgatagggtagagtggaggtttgtggaagcaatgatgattcggttggggtactctagattgtgggttgacaagattatggcgtgtgtgacgtccgttcggttttcttttctaattaatggtgagattactggaagtgtggttcctcaaaggggattgcgtcaaggggatcctctgtcaccatttttgttcttattttgtgatgaagctttttctaacttgattaagcaggaggaagccaatggtaggctaatggggttgaggtttgggaggtcgcgtgtggctgtttcccatttattctttgcggatgatagtttggtttttttcgaagcttctagacaggagtgtttgtgttttaaagggattttggctaagtattctgctgcttctggccaacttgttaatttccaaaagtcagaaatgtgttttggccgaaaggtgggcatgaatacgcggcgtcggctggcttctttgatgggggtgaaggtagtggataattatggtaagtatctcgggttgccgtcttttgtgggtcgaacgaaaaaacaactttttgaggtgatcaagaaccgggtttggaataaaattagagggtggaaggcgtccatgttttcggtggctggcaaggaagtcttgatcaaggctattttgcaggccatcccggcttatacgatgacgtgctttaggttgcccaaagatactattaagagtctacatcgtatggctgctcggttttggtggggatcgtctgagcataataagaagacccattggtgtaagtgggattatttgtgtcggcctaaggagaagggtggtttgggctttcgagatttggaattgcacaatcaagcacttcttgctaagcagatatggcggtgtattcgctatccggattctttatgtagtcgggtcttacaagctagttatttttcggatggagatgttttgaatgcgaagtgtgggtcgaaagcgtcctttgtctggcgtagtttggtatgggggaagaagatcgttcaaaggggctaccgttggagaattggtcagggggatcgggtgagggtgcttgaggacccttggctgcctaggccggtttcctttagagtttatgataagccggtgctgcctgatcaaatgcgggtcatggatttgaagaatgtggacggcacttggaatgtaaattttatccgaggtctgtttaattcggttaatgcggagttgattctgagcattcctagtggggagtgggagatggaagatactattttgtggcattatagtaggaatggtgaatattctgtaaaaagtgggtatagagttgcagctgcattacgggaggagattcatcagtcaaatgtggtggatggggagaagtggtggactgaaatgtggagattgaagataccgccaaagatcaagcattttgtgtggaaggtttgtcattcttggcttcctacttatgccgttttgtctcagcgcaaggtgcctattagtcctttgtgtcaacgctgctctttgggtaagaatgaggatgtcagtcatatgttgtgggggtgttctgcgagtattagagtttggaagaggtgcggcttgtggtcggatatcaagaagtatgctgtggctgatgttgtttcctttcttcagcagttgttcaaggtatggactaaggacacttttaatttatttctggtcatctgttggtatctttggttcattcgtaatagtgttaatcatgggggttgccaacctacggatggggccatagtggagtggtgccatacttttttgggtgattaccaggcgggtaatagtaatggaggtgttgctgggcggacgttgggcagtcggaggtggtgcccacctgctgctgggtgtttttcaatcagtgtggatgcggctgtctcggtaatgaaaggaaggtgtggccgaggcgtggtgttacgggatgagaatgggcagtgtgtttttgctagagttgtgccacgggttggggcggtctctcctcttggggctgagcttgaagcgattttggatggtatttctgttggtgttcagcgaaggctggtgcggttcatggtggagtccgattgtcttcaagccattaacttgatccagggtgctccagatgggtgtagggatgttgatggcttggtctttgcggtcaagcagttgcttagctcaacacctgctgctagtttgaggtttatttatagggaggcaaatcaatttgctcatagtttagccaattatgcattgtgtaacgatgttagtgctatgtggattggggttacacccccttg

SEQ ID NO: 227330 - DNA, 5757 bp, Cannabis indica
taattttcctcgtgttttagctttggcaaattcctctcatataaatgtgtaaacctatgatccagtaacaaagttctgtcatactgtgagcatctgaagtatgttgagttgagattacgcagaaaaagaatttgggcagttcagccgataaaatagtacagagagcactgtgaattgacaaaaactagagatatttacaagccacattatttgctgaacacccaaaccccacatcccatcaatgaattattttcaggagaggatctaatatcacatctaattaattacaccaacaaagattgcccttaaattgttttgtaaatgagcttaactgtctgcaagttgagtgtaaaccagtgccaaaacttttaacactcttctctaatagagctttattcttgtctgtatatcgctacgacaaatggggcacaggtcaagatcttggccgcactcgcaacatgtctgcaaataataaaacaaaaatcatatcttgattccaccatctaattcttttcaatgcatgacaaaaacagttaaattttcagcatagatcactcacctggtggccacaaccaaatgccatatccttcggatcggtaagacaaattgggcaaagctgtcaggatcacaaaaattaaggttttaagaatccgatatcatcaacactctacttcggagactacaatgatgactaatatgatattgaaaatagtatagagaagaagtacatacatgattatcagaagctgaactggcaggagttgccctgctaacacccggatcatttcttacagcagtaggtgcacttgggcgataactgtttggacgttttgaggcactgcctgaagccgatccatagttaggagggggaagaggaaccctgtctatagccttccctctgctacagctgtttgagaaatgaaaaagaaaaaatatgtatggaattgatttttttaggtatcaactctagtcgccaagtacaaggacaactaaaatgaaaagatcgattgttaccccaagatattgagctccagtgttgctttatactgagatggtatttccatcagtgctccaagtgcgaattctgtttcttttctggatctgtccatattcttcgacattatatctgtaaaattcacaaactacaagagggaaaaaagaagacaattttaattcaaaatttgacaaaaacaaaaatatgaaggaaaacgagattaattatttccataaggctagaagtacttgcctggaagttatcaaatgcccgagcagggatgttatcatcgaatttcctcatcatgtcccatggtccatctccaaccccaacaagtataattgacaatggatattcactgcgaatggagtagcaaattaagaagcttctttgcaaagagctaagattacaggaacaagcaaatcaagcaattaccttgccttcacaattgcatcaatagttttcttttcctgagggcttaattctccacgctcagtatcaatacttctagtcacctgtaatgacacatcataattaataaaattcaaaaattgagagacaagacaaacaagctgggcattgtaggatagcaggatggaagatagccagtgtaggtcttttttaagtatatatattatactttatttactaattattaagccatcttagtaaaaatacactgctaggcgaaataaaattgttactttctttaaagaaacaattttttaagaaaacgaaaccaaatttgaaaacaagatacaagggtaacattgtcagcaatctaaaccttaagaccatatggccaactgtcattgttcacttaaaaataatagcctcactaaatgtttgaattcggactactcacacattaacccatctgtgacaaaacaaattcgtatttagtaacaatacttgatgagaaacttacaaaatgatacagaatagaataagtacctgtccatccgctattattactagaacatggtactgactgccactctgctcaacaacagtgatggccatttctattattggagcaaatgatgtgggtcctgttaccgaaacaaaaggccaaaggtgcacaagagcaatttaagcaaataatcaacaaggtaagaagaaaataataaaagaaatttcatgtcaaaatagtaacctgcaagtcgtaactgagggaccagttctctatatcggctcaatacttcttcaaatccattacaaaaccgctcatccgggtagaaactgaaaacttcctggtcatgggttgatgctgccaacatttgggatcacataacatttcagatgttgaaagggtgataaaataaaaacttcaacattcattcaaaggaattaccgtctccgaatccaaaacatggaatcatgttatcctcatcgaaggaggacaatgttttcccaataatcgaaatggcttgttcatagggattttgtgtttcactgatgtgatgcaagcttttacggtggaatgaccttgcacctaatgcaagagtaagttaaacatcttatttctaacactttggaaaggaactattttacacctaaatgagaccaaacctgtccactcattgctcttcgtgaaatcaataccgacaataagattggaagactccagcccagcatgagccaatgcatcagttacctgaagaagtagaagttgattattgcagagcatgataattaatatagtgccatcagcaaattcagcagtaatctacttgactttgactttaatttttgcaaatgccatctacaatttcacggttttttacctttttgctgctataaacttatgctatcactaagagcacagattaagtccagaaaacatagatgaaaaagcacactaggtaaaatcctcatacagaaatgaaattgagatttcaaccttgtgtaattcgaaaaacttttgttaaaatgacctgagttgcacaagctaccatgagaatatagcctaaatgttttggaaacattaagtaaactacataacaagtgagaattatagaatcatttaaatcaccaaaggtatatcgtgccatttcagacaagggcaccacatagatacaaaagactaatactccagctatcttacctgctcaaggctactgtagttatcatctattttcgagtactttctctctagcttcttttttgtagcgggggctcggccttcactgtagctatgagactcaggtgcatgatacggctgctggctagcatagtatggctgatgagcgtactcttggcttggctgagtatatggagactgtggataacttggataacttgaagaatatgatctagacccgtaagaagggtgtcttggactctcccgtttcgagagtatcccacccatcaaactctatttcctacagaatatctgcaataaaccaagtgactctaaaagtcattccaccatagatggtcatgaaaccagccaagtaataagcaattaaggcaaagtcaacaacttggcaaggcatattaaactccaaaaagagatcagttttatttaatacaagttaatagcattatttacttcaattgaatcacatatataaagtttcataactggcttaacatataagtccatacatcccaaatgcaattccagattctatgaagataagaaaaacaggtaaagtttcccttagaaattctcagaaaattatattataaataaatataaaaaaaaaaactctgaaaaagtaagcttaagaaactttagagtaacatggtgggaataaaagaatattcagtattcacaattgtcaaatgtcatataaatgaatctttttatttattaatcgtctttctgaagcacaaatggtgtattattccaaatctaagaattgaacaccaagacaaaattaaaccccaattaaagccaaaaccgttaattatccaaacatacctcacaatgcatatctaaaagaaatcccagaaagcaacacataacatattctatcacatttcttttcaagatcccacatagcatcacacactcacctcactcaactctgaagaccgcaaacaacaaaaatatcccagacccacatctcaaaatccatcctttaaccaaaaaaatacaaaaattaagcaacaaaaaatcctcctaaaatacccacaaaaacaaacaaaataaagttttgataccttaaaagaagtaggtcaatgtaaatgcagcatttcagccaagcagcatgtgaaagatgatgacaaagaagcggagatgacaatataaaaaaaaaagttatagagagttgaaatgaaaagtagagcagtagatggagaaagcttacctataattaaaaaggttgggttgggtctctctctttctttccaagaagtttccctttcttttctcttttctgttaaaaaaataaatactaaaataaatttcaaacatagatagatataatatatatctagaacaatgaacaggatgacttggtttactttgtcacttgtcagtgctttctgtttttggccgatagtgactccgactttcgcccgccgtttacctttatggtttttccattttcaccccactactgttattatttattactgtgaatgaaatcacattttgtgtactctcttttctatattggatgtaaaatgacaccgtttcggttagctatacgaggtaaaaacaaatgtgttaaatttgctaaaaaaattagtaaatgctatatggcttttctttcccaattgtactctaatatataataacaaattaatataaattgacataaaaaataatataataactattattattattttttttttagtaaaaacactattttttttcaatgaatccattacaatatctgagtagattagagaaggaatttcccccaaccaagaacaattattatccaatcgaatagcgaatctcgctaagtgacgagccgctttgttagcattacgcttaacatgagaaacataacccataaatgaccctttgttgatggcgtttgcaacaataagtgaattcgtttcaagtagatcaatgtgcaaacaattattaatcaataaattaaatatatttttttaaaaaataatggtgatattataattaaaaaagtgtattaaagtaagttataaacattaaatgataataatataaataaaaaatatatattaattgtatattaaatttggtacaatattatctcttatgataaatttgtttcaactttttactatatattaaatttagcactaaatttttagctactattagaaaaagtaatttttttaacaaaaatattaaaatatagcattgcagcactctatcaatcaaagatactctaaaatttaaaaattccttttagtgtttggataaaaaaatattagaagtcaatttttaattaagaagtcttttgggagaagaagataagatttgtagtctttttctagacttttgagaaataattttaaaattagaataattaataaaattttacataaataaagatatttatataataattatccacacccttcaaactaattttttacttagttttgtttatatttttaactataactaaaattaaaacttaatgattataatttattgtgagatttatttatttggaatgttttaaaagagtttgaaaagctcatatctttatatattaaaagtgcatatctaacggcattttctggttttaacagaatataacttaaaagtaaaagaatattctgttaaatttaactttgatctaaataaaccc

SEQ ID NO: 227331 - DNA, 3174 bp, Cannabis indica
ttgcacagcttacccggtatttccccttacagatcacgggactattgactgtcacatatggattaaagaagtgtgaggtgtgtatttgataaaataagcctacaatctaatccaagaattgaatagtaatcagagtgctaaaagttcatctcattctggaagaagttctggcagctaaaggtcactctaaaaattaaaaatttggtttggcgtgcttgtttggacactctgtccacgatggtgcagcttcgaactaagctgtggatgttaatcttgtttgtccaagctgtcaaagtgaggctgaaataattcaccattgtcttttgtcttgtccagctgcctagttggtctggaactaagtaggaataggttcagggggacgaacaatgcagattttttctgctagtttgagacttgttttatgcgtctacagcaggagaagaaatgtttgttggctgttacgtgttgggcaatttggcgtgcttgaaatgaaaaggtttggaacgaaaagtgtgttagtcctttggaaataatatcctctgttgttagctatcttgaacaatggagtaaagccaaaaaaatttgtttgaaattgtcattttctagtttgaccgggaatgatggtgcagagctttggactgttccaccatcgaatagtgtcaagattaatgtagatggagctatttttgaggagctaaatggtttgggttatgacttggtttctcgagatgagaaagacttcatcattgaaggaccgactagtttttttttgggattagtcgcggctgaagttgcagatgttgtgagcatttgggaagctctcaattggattaagcagagttcctggcagcaggtttttttagagtgtgattatctcgtggcagtgcaaggttttaggagttcaatttctatgatttctttattcggtgatattattaaagattgtaaaatattgtttgcggatttatcttttgtgaaagattgttttattaaacgatccgcgaatgtagtggctcatagttttgttagagcttctcattcttcatcctgatcgtagctttagttaaaggatgtcccaactgatttttttatcagttttggtaaaggaatttaatggttaataaaatttaaatctatcattcaaaaaatagaaaaaatcaaaagtgaaagaaaagtaaattaaaaattttaaactcaaactaaataattaaataaatatagtatttaaaacaatatcagttatagattttttttctaaaaaaaaaaaagaaagaaaaaatatacaagaatttttttgttttaaaaattatatattttttttgtaaaaaaaaaaaaatcaatcaaaaacaaaaaataaaaaaaaaaagactcgtcaaaccgaagagcttgacgaacacaaggggataacaccccaatccacatagcactagttttggataacaaagcttgattggctaaaatgtgagtcacttgattggcttctcttaaaataaaagataaaccagcaacattaggatgttgcattaaacttttaatctgatggagcagtccgtcaatgtcgcttcaactagcctctttctcttgaaatagttgagcaactctttgacagtctgatttcaccgtaaatttatagaaatatcgttgtatcccaacctgaaacccatttttaatggccaacagctctgccattagagctgcataattttggcagccgcagaagttacatccccttcatttctacgcactacacaactaacagcagcataaccttcctaaaccctcaaaccaacatccacattaattttgacacagttcacctacgacctacaccatctcgcctcctccctggctgaaccattctatttcttaccaccatttgcctccttatattctgtcaaataccgtccgcaccattcaaccatatccctcactcttgggcaaacaccaccatgactaacacttgtacgtatattccatatatttcacgccacaaccagaaaaaatacaaagtgttagagtcccaaacctgtgccattgtacttcatgtcccaaacttgtggtaatgtctgaacttcttctgtcacgaagttgtttcaataattcacacttcttccacaccataatactatagtggcatccccataaaacgtgaattatatcatctctttttcttttggagcattgagagaacaaaagttccacttgaatgccacgtttggataaagcataattatttaggagccatgagtgacatattttccacacgtaatgctttattttcggtggaattttcatttgccacaaaaatttccatcacgctttagttttggatgagtcggattgaagtgcgtcctcacgcattgcaataaccattttatatccacgcctaaccgagtactctccgttcttgctgaaatgccacataattttttcctctagaccccattcaccactcgacatgcttagaataaaagcagcatcttccttattaaatagagttttaatgaagttcatatcccatgagccaccagcaagaagcaaatccacaactctcaaatttttagcatgaaatggcttgtcataaatcttaaaagtatgcagtcttggcaactacagatcctccaaaacccttaccatattcccatcacccactcgccagcgatagcccttcaatataatctcttttaatatttaagtttttaaactttatttcactattatttttcgtttaaactaattatttatattttacattaaactatattttttttatattaactaaaatatatttttatttttttttgaatttttttttattaatatttcatttttcaaatcaatataaacaatttttcaaaataataaaattgataaattatattacattatgtgtttgttaagttagcactgaaaatttcagttaaaataagtgctaactacaagatactgttgtcacaaaaaagacaaatattggatagtaaataaattgagatactgctcgaaaagaaataggaaaattactttatatactatttttttaaaaatttacggtttaggtttcttaaatggtttttatgtgagttgttatgcagattttagttgcgatttatgttactccgttagttgctataagtgtttttaagtgtaattttataaaaatgcaaaaaaaaaaaa

SEQ ID NO: 227332 - DNA, 4732 bp, Cannabis indica
tttattcattcctattttcattcccatttttgttcctatatttttattcctcccaaccaaacgccaccagtgttcaaatcaaatctataaaattctataaatgttgatatgtatagttggtatagtagtgactttaacatatagttaattgattataaaatgagaaatgaacaaataaaataaaataaaatgataagtagacatttatgtatatttaatttgctcatttcagttcaaatagaaaactatattatcttaatattaaggcagagcgaaattatagttagaggagaggcatgtttttggtgagtggaggcctcatttacatccttaccatcatacacaaccaccaattaataatatatcattgcaattgaagaacaagccaatgtgtttgtgttttgaggtaatttggattgtatagtgtgaggtgtaagagagagatcacataaaggtggttgtggtgtaattaatgagttcacattaggagaattgagattgacctactaatcacttctttggttctattatatatattttagatggagaatcttcttgatgtaacaatgtaattaaatattattgagtaatactattactatatgtactaatttcaacatatataattaaaaatgatgtaacatacataattaatttcacttaaaattattaacaattaatcacatacattgaagaaaaatttatataataaccataaatttaaaaataattacaaaaagaggattttttttagatatctttcttttatatatatattttttatttacaattttacgatctaaaatttttaattacaaaaatatacttgtacaattttaaaattacaaaaatacagttcgctcaacaaaagcaaaagtaaaaaaaatactaaaacactacgagaaaccaacattacaataactataaataaattataaaacaataaaaaaaaaccagaaaaaacaatctcaaaataactataatacaactataaataaaagatttttctccgtacagttagtggaatgttggaattctaacgcgggttgtggtcttgcacgtccatggtatgggtacgaatgagcagcgattgtcctttgtatggtgggaacgcgacgttcctagttcggaaaggtgcaacctttttaatttttttagggttttgaaacctgcctattcctatcctgtaatagaagatactagtctattaagagttcttcatacatcctgcattttttctgaatattatcagcctttggatttcttcccctcatatacagagtcccttttcacctctcttctttcttttttgaagttctgtaaagtgccacagtaacttgggattgttcaagatgactacggaggagtttaatattgatacagttgaggaagttgtgagcttggttgagaatgtgtctatggaggatttctctttagatctgactccggatgatgttgtggctttggatactatcaagaaaacagtagtgggaaagttcttcattaagagaaagattggaaacgggcgacttagatccattttttctgagatgtggaacgtgagtccctggtggcgcctccaagagatcagtcccaatattttcacttttagattccccagagaatcagatgccttgaaggggattgagaatgttccctgggctccctgtggaggtttcatgctagttactctgatgctggacgatgaaaagtaaaagtcggcagatcttaatcacgtcaacattaggactagagctttgggtgtcctttatcgttactttttgatgaaaatgtggaaaaaattacgaacagagttggtaggtattgtcgaccaacaaaacgcgagtcaggggagtgcttcgaagcaactatatgcgttttcgggttagccttgaccttacaaaaccccttttggctggtgtgggtctagacgatgcaggtggtgagaaagtttggagttatttcaagtatgaaaggctcccccttttctgctacaagtgcggtgttattggccactcagatgatctatgctcggctaggaaaagaatgatgtccttggatgatggtaggagtgtcccactgtttggtccatggctttggtttggctcacgcttggaaaatggttttgctgttctcaatgttgaggatattcaggagagaatccatatggagcaggatgatgacccaaacttgtcccgtgatggtcaccgtggtggctcggcgggaacgaatgaacgtattattcaaaaagatgacaatgccttcagtattcattcttctgagaaagcccaaccccaaagacccatttttccgtctgttggattgaagtttgggcttccttcgccttttaacaaacttaggggtggggcctcttctttgattcataaaggtgggccaaaaatatccaaaataaatatccactttagagctctagggcccagaggggttctgaagaaacccatttttggaaatagatgtgaccctgaagataatgtggtggggacaaaaagaaagaaaattacccatcatggggttaataagtttgacgacaataatttaacggtgaatctaggtatggtggttgagggaggtctcaagaatgtctttgttgagggtagctcaatttcggggctcccttgccttccgacggtggaagctcagatgcccccctctttggttaatagagggatacttaaagctcaattaagagttaaggatggagaggttcagtggggagatctaaaggaagggggtgcaatgatcaccttttttaggagattagatgtacaaagccctggggtagaaaaaacgacaaaccagagagtttggtggctttagaacaagatgacggattgtttgaagatgaggaggtggtttcatctaacactcgggaagactctacttttgtgtttctgacaggtgaacatttcttaactatttcaggttctatgtcacttatttcagatgctaatgttgcaagaggaagagtcactcttaatacagagattgataaagaggattttattgtggcagaggaggcgagccttatcaagccccttagggcaccataaaaaccatgtcttggaattgctggggcttggggcaagcttggccagtggaagccctacgaggtttggtgaggagggtggacccggatgtcctattccttatggaaataaaagtaaacaatactaaaatggagagtatttggaggcggttgagttttttcaatgctgttattgtggacccgatggggtcggcaggcggcctttgtctttgttggaaggctaggattgatgtagtggctttacaaacagaccaatataaagtggtggttaggttgaacaatatttttagatgtgctaaatggctttgtctcttcgtttatgctccttctgtcaggagtgagcgtaaattgttataggaaaatttggctcttgaagtggctgctttggataggccttggacgcttctcggggacttgaatactttaatcaatcattagaagaaatttggtggtaattctgggtcccaaggtgattttgatgctctttcaaactttctgatgattttgggaggtgtggatctaggaagtgtgggaaatttctttacctggaccagtaacataaagttctcggctctaatcaagaagcgactggacagagttattgaggatccaaagtggattatttcttttagttaagcagggggttaaggttctcactatcagagagtcggatcattctccagtgttgttggatctgtacctggagaatgatacactgcttatagaccttttcgatatcttgaggcgtggatcatgcctcctggttcgcaagttacaaggtatgtctcgtggtcttctctcttcagggtcaggttgattttgggtattattctcccgtgtcgtcgtggcagcggctgtctcacgctccaactcggtattccgacagttttcctcctctaggcggcgcctgagttggcagttttctaattcgacgattggtatatattttgtcagatcatagacgccatcctcaccaactggattggaaagaggtctacaaatgttcattctaggttcttcataccctgatcccgaattctgggttccctctgaacttgtggaccgtttagattgtgagttaaaagacctccaaggacccattggctcttttccaggtcagtaagtggtttctccatggggtgtgtcaatgttttctttgttgctagccatggagaattttttttttgtatgtaaggagagtttttttttttttttgagttttttcacaaatattctcaatgaaagccccaaactgttaacgcagattttcgttaactatatttgagcctaagttgtgataaatatgcacatacattaaaagctggtaaagaaaaagataagagcacaaaggttttttttacgtggttttgcagttaaaattttgcatagtccacgagtcaatcttattagatttctgacatagctctcaggattttttctctaatgatctttttttttcgtcccctttttcattgtaacttgctcctatttataattacatcatccgacagttaattacatagttgactgatattttacaacaattctcccctaaaattgtgacagtcagtagtcccgtgatccgtaaggggaaataccgggtaagctgtgcaatcccacatcgcctggggaaggtcaagtgggatgattctgagactgtgtagg

SEQ ID NO: 227333 - DNA, 5167 bp, Cannabis indica
ctaggtaagcaaagcaattaaaaacataacatgataacaaatcatctttatcataaaactaaaaagaacacaaccactagtaactagttacttgaaaaccaactccacaataacataacataacatgagtttgtttgctaagttatgtaatgtgttgtgttcaattgattcaagcattgacatgacatgttgtttcttactaattaattggttttgcagatggagaataagtaattctcatgcccctcatgagaatcgggtgtaattacaatatataattactaaaaactttttattattttgccaaataagaaatccgaaattcataagtaattaccacaatatatctaaacacccataatattttaaaatacaatgtaattacacaattacttccaaacgcaccttaagaatattgaggtgtctcgagtcttgttggagtaagaatcacaaagttaaacatcattagaatttactacaacacccacggacgatggaaatacgaaccttccatacataatacagattcatctttgttggagcagagcaaaccacatgtctgattctttgagctactcctcttagtctcagtctcttcggattcatctgtaaattattccaaatactgtcgaattcacatgaaaaaaatcgtattttataaacagaaccaacaccacatctatctgtttccgaaaacaaatctcagcaatagatatgatctgttaagattaccagtgttgatattacctatcccacaagcttctcatttggttctgcatacacaacaagactgttttggagttcctgttcccatggctgccggaaaccttttattaaacttttgttgtagctgtgttatcaacaacaactaacatttcagtactcaaaatcagattcttctcaaacattgtccaactctgtgcgatcgattcacaagacttgttgttgataatagaaatctgcaatagtttaataaattaatagagaaataatatgttactatagaattagtttagaaaagtggccaacatttcataccaaggatacaagtatctggataatcatggatttggtcatatctcttcggtctgaaaatggtacaaaccgaaattgaaataagacatttcataaaggaaagtgtatctacaaacagtcaaacaaagctcttcaaaaaacaaaatatcaacttttaattgaagttattccaaggatttatacctcaaagacagtttagagattagtaagttgagcaaacgttctcacattcgggtcgcagccactaactatcattttcttgtaaacagcataggcatggtctggattcccagacgtgctgtaagctcgaattagagcattgtaggtgaaaacatcgggtttaagacccttcacctgaagttcttcataaacactcactgcttcatccaccattcccgcaatcccaagattgagtattagtttgttgtatgtacaaagatcaggaaaaattcctctgctctgcatttcattatacagacacaaagcttcttctattcttcctgatcttccaagtgcttcaatcaatagctcataacaaaccgaattaagactaagtccagtctgctttagttcctcaaagtaatacaaagcatcatcaaatttccccgaaacacacagagaattcacaagaatcgtgtaactcttcaagtcgggtcttattccctttaaccattcttttaaacaacctacgaacagtttccacatctccggtcttcccaaacccgttcataagaatattgaaagttgcacaactcggtttgcatccatatcttcccatctccttgaagaaaagcattgcttcttcatgtcttcccgacttaaaaagtccatcaattagtggaccgtaagtacaagaggacggggtgaaatcatgaccaacatgatcgtagtagaaatcgatagcctcatcaacattattgaatttcactaaacttgaaatgagtatattatacgtgacagtgttaggcttgcttcccctactacacatctcttcatgtaattcgaagagtttattgattttacaagccaaggaaactggcacctcaacattgttacaaaggcgatttgtgttcgggggacaaccgtgctctaccatattcacaaatatttcaatcaatttgtggacttggccttctttcattaaaccaacaagtaatgtgttgaagatatcaaccgaaggaacgagtttcatatctctcaatccgtaaaacatttgccatgcttcctctactcggtcgttcttgataagcatatcgattaaagaattagctacgaataaattaggctcacaccgttgtttcaccatctcggaatgtaactcaatggcttcatcaactctccctaccttaccatagcattgcatcattatgttgtaagtaactgaatcaggagaaagcccactaagtttgatcccatcaaaaaattcttttgcttcttcaactctctttgtttcagcaagactatataaagaagcattacaagccacaatattcggaacaatgcctttacttttcatctgctcaaatgtctcaatagctttaacagaatcaccagacttaccataatagtcaatgaaaatggtgtatgtataagcagtagtcatgacacccatagattccatactaccgaaaagttttagagcctcatccagtctactcgcccttaacagtcccccaatcaaggcattgtaactatgagcactaggtgagatccctctctccttcatcacaccaaaagtatcaaatgctttgtcaacatttcccgttttgcataaagcatcaataagaacgttgaaagtaactgcgtcgggagcaaaaccatcagcttccatttcatcccaaatttctatcagagtttccaattctccacagtcacttaacttgtccaacaaagtagtgtaagttataagatcgggtttatgactgctagctttcatctttacaaacaacgcctttgcttcaccgagtttacctgcattacacagagcatcaatgagaacagtataagtaataacattaggctcgcatccctcttcatccattttcttcaatacaccgaaagcctcatcaattttcccagctcttccaagagctctaatgcatatgttaaatgtatacatattaggcctcaatcccaaatgttccatctcttctaacaaacacattacagtttgagtatcccttctctttccgaacgctaccataagcgctgaataaatcttcaaccccggcttcatccctttcatcaccattttgttataaatctccaaagcctctttacaaaaccccgattgaagaagcaaatagatcaacccatcatacgaataagcattcaaaacgaaccccgcctttctcatcttctcaagcgcaattggtgcttgttgaattccaccctttaagtaaagacctttgaaaacaacaagataagtgttcaaagttcgataaaccttgttcttctgcataaaatcgaaaacaacagtcatatccttcaccctcttatgaatcatcaaaacttcaagcatgtaattacatgtttcagtggtgtgaacaacataaggtaaccccgcaacatccatgaaatatgaaaaagctgaatttgggtctgttgtagacttaagaacccttataacctcttttgaagatttcccaactttcttcttctcttcaattgggattttcataacaaacccacataataaactcatttgtttgctcctcatcttcaacctatttcccaagtacccatatgtacaaaactgtaaatttctaaagtctcttcctttagatgactcactaaaagcacaaccacaactgaaactactactaacacaatacatactccaagaacaacaaaacctattaacaaaaaaacccatcaaaagaattagcaatcaaattaaaatttaggtcattagaaattgtgttcaagaacaaaaacaaagaaaaaattacatttttgggagggcacattataatagcagcattgaatttcaaacccaagagaatatcacaaacaattaacctgaagatttcattttccaaacaaaagataaaacattgcaaaattgggaatttgggagcaaaaaagaagagtctttggtgccattaaacaagctgtaaagctctcatcaaactcaccaaagtttattaaacaaaatactggaaagcaatagagaatttgacatacccatgtaaaaaaacaaaacaaaattgatagctctgatgaattttctcaaccaaacagaagaagaagaagataatttattaaaaaatagtaaaatgaaaaatgaaaagctgcaaacaaaaccaacagaaaggaaattgaatgaaataataatgggaaaaagggtggattttgggtggatttttagagagaaagagatttgagtgtgataaaaattcattcttgagagtagaatgcaagcacaaggggttgtcattaagggttcttacagatgcaaggtgtaatcctctgggacttttcacggtctcggcggttggagaagaagagctacactcactctgtactctatctactctgtaatgtagttaatagaggttgaagaaaggtttttagtttgggattctattattattattattattttggtagttatcaaaaaataatgataataaatggctaaaaaaaattaatatttatttttaatgccataagtattaatatttataaaattataattttatttttaattttgtaaatacaaatttttttattatcttaaacatgtcacatataaaatttttattagatttaaataaaaaatatattgtatcgattactttcaaatattcttttaataaagagccttactatcctgtgataaaagttagataccctgtattttgaataatacttatttagtatcttgtattttaaattcatacatatatagtaccttaaatttgaattttttttgataaaattttatcaatacaatcaaacagattaaaattttatgaattctgaattcgaatttaattatttttttttgaataaaaaagagatttattaattaataaactcgttcaaaacaatagaacgcactccagaggaacaatcctccaactaaagcacacaacctatagagaaacaagagtctcttgccaagcaa

SEQ ID NO: 227334 - DNA, 2487 bp, Cannabis indica
attaaaactatctataatttcattactaacatcacagagattttaattggcgaataagtaaaaaatgtgtcaatgctggatatgatttcagtatcgacatcttaacatcttaacctaagactaacccacccaaaatcaaatgggtacctagcacaataatctgttgaaaaatcataactagttaataaactaataatgatatcaaactgaattcaggcagctgggacattagttgtagggagcattgtcagcaaacagacaaaagatttcaggagtgaaactgaaattaagttccaatttattatgagaaaaatactttaacttcgtcaaaataaagttatacatcaaatgacacatgcctgaaagaatatataactttttaatgaaccgttagaaaattgatgcaggacaataatctatcgacttcttgaacctttgatgcagaaaagactgtcatgggttctgatacaaaacatacacaaagattctcttcaacaactatttcgttactaactccaataaaaacttaatttcatcaatacattatttcactaaatccaatagatcgaaaagcaaaaaaaaagtacaaatccagagcaacagcatatacttccttacttttaaaaacaaatttgacaaaataccaattgcgcagcacatttgtcaatcacagaaaaaataattcaggtacatacgatacaatccacccggaaattcagaatgaatctgtaaaatgtaccatatggtagctggaaaaaaaaaaaaaaaccgaatcttattacttaaataatcttatccaattgactttgcaccaaatgatgattaaggaataattcatcattttctcagcaaataaacgtacatttacacaatcaaggttagggcagttcaagtaggcattttcagttaagaaactagccttatcattgttattgaaaaggaagaaacaacaacagaacgaaacttctccaaaacgaaagcatcacctctaattatacgaacgagagagaaagataaaaggagatcagatcagaaacctgaaccagtaggcgatttaggcggtggcggagaccgcttccgcggtgcctctggtgacgacacgtaagatgactctgtagactccattctcttcttactgcctctttcttcctcttcctcaacctttaactcctcctagagaaagagatatagcactaatttagaaggaaaaaaatgcaaaaacaaacacagagagagagagaaagagagaggatgaataaactaacaccattttttccaacagctctcaaattcccgagaaacaaacaaacagaaaaactcaagtttcagattagcttacttacagttacagcgatagagagaaaatcaatctggaaggagagaatgaatgagatgaaaggaaggggtttttgggcgttggtttcgttcttttgtgtttcgacttttattcgcaaaagcgctgaagtgaaatcttttaattttaatttatttaattttatttttatttccttttgtgtgagctgtgttgtatgtgagagaagctcttctttctgttacctacctatccatagctatcaacctatccatctaatccatgagcgtgtctacacgcgcgcgtgggcgaagggtttgcttggccgcgagaaccggcttttctttcttccacagctacttgttaatattataatctcgttagattttcaggggttataatcgtatgcagagctgagattagtaactggcttcccacgcgcgctttttaagacttatagtatgttataaaagaatatacttctattctcatttttatttatttttgttaactctttggatctgaagacttttttaacattttgaaatatattttataaaagtctatttttgacaaataattataaatattaattgctattatgttaggctgtgattgtgaattcaattattagaagccatgaatgaagcagatctaattatttgaaggccatcaaacagatgcaaaagtgggaagtcaattcatggtgcatatgaagataatattaagtaataataattggtttcgtggtttggagtaggaggagatgcatgtgatttttattatgcaattataattttaagacaatttgcacaagtggttatatatttatttgagtattattatatgatgtttatgaaatggtgacattttaattaggatttaggaataatgatatgtgcatacacctaatatttcttctaatttatttaagatgaaattcattattttaaataattgagtcaagttattccttttttttattgctttctaataaaatcgcgctaaatataatatttatttaattactaaaaattttgtcgaagaataatatttcgttgcatatttaagtgcaccctgtaattatcggtatttgtaaaaagaacataataatattactatttttgaataaaaattataacatctattaataaataaattagttcaaaacaata

SEQ ID NO: 227335 - DNA, 1798 bp, Cannabis indica
acatccaatggatagaaccgattcaatccaacatccaatggatgttggatcgattggatgacagaaattaatttgatcggatcagatggtaaaatctatcatccaatatatgattagatcggatatggataggcctaaaaaaattaaatgtgatcctatgaacacccctagtaacaaagaattggcatccattcgtaatgtaccgtaatagtgagctcctcatcccattcattgagaaatgatactctctctgacagttattgtgacagacccacttcaatcataactcgagcaaaatttagacgctctttttgttacgtgtaatcatccaacataatggggttttcaatctgcccaataatcttagacaatgcactttcactccaatacttgaaatcaaaaatcaaggatttgaatccatgttggagcaacttgaacattctcttttttaaagtccacagatgcatcctaaggtttcatcacaaccagatttttttatcaaaaaagatgaatccatttttcataatttcatccctactctccacatctacaaactaaacaataaaaataccatgaatgattcatcctactttatcaactttgtcttttcataaccttcgaacaaacccaaccaggacaccgattgggggattagccccaagtacatagcacaccaaagcagagttccaaaattggatctcatctgctatgtcatccattttgattttgactctcagaactaccttgctcactgtctttccagtttcctcaaattttgaatttatgctttgaataataggtccagatctaagaattgggggaggtgtaaaattacctgaattcaaggcatcttcagacctagttgatgcttccatgaagtgagaaaattcctggcgaacctcctccttcctctagatcagtcgaagcgaacctctctgcgtcaagacctctgtttcccctgcctcctcatcttcatcgtctgagaagtcgattggagcaaatccaatcaactctgccatggtttttgttttcttcactgtgtctgacgacgtcggacccctcttcctcgttgcatgaatctccaccttctgaggccttcccttcttctcaggtccaccctgtgccatagctcagtaggtcgttgagagagaactttcgaagggagagaaaacatttattccaaaattaattattgcggctacattggtgtgctctttagatttgattatatacacgtattttatatatacattgaaagaataaattccattgttatacatattttatattaatctctctagatatatataagaattatattagaaaatattttaacaaaatatgcgtttgattagagaattaattactttcaaaatacattttataaattatgtctaaacatatatttttttaaaaaataatgatagtgatagatacaatattcttaatttgtagttcagagagtgtggttataataaagtgtataaattattagaaacatatatatatcattaattctttttaaaacaaaaagttatacgtaaaattaaggtttaaatatatatattttatatataaatgttattatatataaatgtaatttttatttttaaatatatataattaaattaaattttttatataaaatatttacataatttttatttttaaatatatgtagtaatattataaaattaataaagaatattttgttaagtaattgggatattctattaaagttgacgtgaaaaattaaaaaaattccgttaaactaagaattctgttagatagccacatt

SEQ ID NO: 227336 - DNA, 3362 bp, Cannabis indica
ttaggttgttaatccaacatacatgatagtaaatagatcctggtaaaataatttccaacataagagccttcaaaatggtcatgatggtgaacttgtatggaagcctttcgaagatgataagttctatactaaatcttcttttctctcaatcattaagaacaaaacaagtctatgagaggagattttaaaagatttgtggaagcttaaagtccatgagataggttgaagctattcctctggaaacttgggaggcatattcttccttttactatacgtttagggagaattttcagtaatgtggaaaagtgttctatttatgattttctagatgattctttcttacatctcttttttcatcgccctttagctaagagcctttggtttgcccatccttggtcaattaagagcgattctttggtgttctctaaccctctaaatttgttgaaatggttgttgaagcccaactttcttggttttcctcattgggacacctgaacttcattcactaactttgttgtgtgtctttgtgtagacacaaaaaattagtcaacaccgtctcgctagattggtgataaaagtaatagatgaaagaaattaaataagatagacaccactatttttagtagttcactctccacgtcgcgatgataatggaactagaaagactctccaaatttatggagacgtagtagaatgtgaaaaatgagctagtggaactctccttttataggcaaggaggtccattaaaatgttaataaaataatacaaaaaatatgaaaaattattatgggctaatcttgaccattggtgggatctaatagttaaaatgactccaaatgatgatcgtcaattttcatagcacgaatcacgtctgtcagatcgtttttaggctttttgtagacaaaatcacacttacaaaatcacacttcaacttggggataatttttttacttgaaaacttcagaattgagagatgaatgtgagcatgtgtagaaacagcttggaaatagcttttcaatgcacttggaatcacgtcaattgaagtaatattgagtgagttatggtcgttagactaaaggttgttcatcacccacatccagcgcccaggttgacattctaacgtcaacttggacgttgtatgagtggtaaatcgtgtcagaactatatttttttttcgaagcctaagtgatattatgatatcatttggccaatttcttgggtctggtgaaatcgttcaccagttctcagaggttttgtatttttacagaatcaacagacttgaaactacttgatttgcaatagttttgccaatattttactttgccgaaaaggtgaaatatcgaagtttgaatttgacttatcacaagttgtagctctcgtttattatgaaaaatagttatattctcaagacagaactagatttgaataagcagaattcaacacaccaggtcatatttcaacctgggagttgggtggtcattgttaagcttcccgagacttgttttgatactttcgtggaatttagaattacgaaagagatctcctatctcaatttttaccaagataagaagaattcgcggagcaaaatttgcgtttgtgcagcagaaccatgtgaaccaactgaacgttaagcttagcgcaaggactagcaccattgtaaatctgggcgctaggtctttgttttggtccccaaatgctttcatttacttttggagaacacttgtatgttcattattgatgatatcggagaaaatactcgggagacttcctgggaaaaatccttggaactggccttggttgacaaaatgtcaaccttggtgctggaaccctagccctaggtcaacttgggcgatgtgtcctctttttggccactagaaggctccatttgtttcccaaaagcacatgtatcataattattgatgaaaatagacaatatgcttggaagaatttgttagaattatcgttggaaatggcccaagttgacaaaatatcatcttgggcactggtgaccaggcccagtgttaacctcgacgttgggtcacttgtttgacatccaagttgatctatttttttttttccaaaagcacttgtttcctaattttggatgatgacaaagaatatgcctaagaaatatcttcataaatgtggttgtaagcccccaagttgacaatatgttaacctaggcgttaggtgcaccatcagtcaacctgcgcattgggtgcactggtgcttcaaatgagaaatgtttcaaaagtgattttggtgcctctagtgtgcttgtgacaactcttattcatgtctaagtacaaattttgagcaatctgcactaagatgaagctaaaaattgaaaccttatgtccagatgtcaacttcggcattgggtgaaaccctaggcgcctaggttggcttccaattgacatcttccagttcccaggctcgcaacttgaaggcttctagtcttgttggctcaaaatattgaacgatggtgactcgaaaatagcttggtgggattcaaatacccattatggagctcccaaagtcaacatgggcacatgactagggatccttcctactgctatgacttgagacatttaactccatgaatattttccttcttgccacaagtcaaacattgatgtccacgtcatcaggattagtttctagatgaaaactttgttataagcttttgaaggttaggaatagggcctttcatgaaaaagtgatccctactgtgactgtgagggattcatgaatcaataaagaacactttctagggtcttcattttgtggagaatgatagtgctaacaatggtgatattttcaatcagtctcttggtgtttctgtggatgttccaacaagttttgttggcgtctactctgatattacttgcaagggcttgtggtgagtaggtgctactactttttgaagattgttggttgcattcttgagggttttactgccaggcttgattgtagagaccttattgatgctgaaactcttgcactttggcttgctgtctccttgtgcttgaaaagggagttgtctaagataatcatggtttcagatttcaagcgtttgttcgatggtatttactacaataaggctccaaattggagattcaaatccaattttctgcaatttcttacagccaatagttccattttggagtgttgtgttcacccgtagaacttttaatgttcaagctcattgtcttgcagcttgggctactactaatttatgttttttttctctttttgttaggaagaggtggaacctcttatcttcaataacctttgttgtagaaactttgtttactctctgttttaatagaagttttcactactaaagaaaaaatagaaaa

SEQ ID NO: 227337 - DNA, 5492 bp, Cannabis indica
atttaatcttttatgtatcatttaaatttacaatattacatgagcacttgatgaacttcatatctaatggaaacaactaattcttttaaataattctagcaatagcactaaattattataggccaattgtttaaaatgattaaatatttagtctgcaattctttttattcatgggttcgcagaaaacaaaataacaaactttttgcaccttcaaaaaagaaaaggaaaaaagatgtaggaaactaatagtaataaccctcataattcttgttaaagcaatgcaattgagggacaaaagcttgcactgacacacacaaatttggttggtaagctgctaaaattgcataccttgtttggcgaatccttcacaacatctgtaattgtatcgacagcagccattgatttctcctgatcgccagtctgcatgaaaatagtaactgtctgaaaacctgctacataaatggtaaccacaacatacctcagaaaactgcaagcaggcagtataaagtactagtgcatctaaaattagcttttgttaacagcatattaaaagagaatcatgtcctagaaatcaaaccaacattttagttaaaataacctgttgtggtttaaccagtttcaatacaatattcatacagaccatgcatgcataaaacttccataaccaagtagtgatcaaaaacaacaaatttaaactacaaccactaacacacttatccacccaaccaactgatacatctacaggacctgaaccttgaatcaatcaccaaatacactcaaccaaccacttgagctatcctcgagtcgtgataatgaacatgcatcttaatttgagcaaatgtgaaagttcaaagatatgatattattcttgattgtttttaatatgcaaatgcaactaaatgccataatacacattacaaaccaaactgcaaaattagaatcaggattaaaaaaactagttagctaatatcacttgcaaccactccttgagcttctgccaaaggtcaaagtcttagtcctaataaattaaatctcaaccaaagtttcattagttttacatttcgcatttcacatttcacattccaaggctctgtgttctcctcgcattctaccatttaggaattagggtccatgtttttcctcagtgagggtcatcttaacagataaaatggcttcacctttagaattactgtgacttcaggggtacaacttctagcgtgtcattgactaacaaaagtaaaaatgaggagtcatcgcagcaatataagccaaacacatatatttttagataattaaacaaaattataaaaactagttgttgtaacaatatcacataaaacttagcacagaatcaggaaaccaaattcaaatactgcatactcaatggatcatgcatcaacaagataaaatcaaaacagcaacaaaatttgtttcaaaaaatgatgagaataagaaacaaagactaggattgttattcttactgccacttcaacaaagtccttaggtcgtctaattttcaaaatagaaccagaaatggaccttccatcaaaagcaagagcagctgaagcatcttcaggtgtaagaaattccacaagagcttggcccttgtctttgttaatctacagtcaaaataggcaatacaaatgtgcatgaacaaaatcctcatgatactgaattcatgcaaatattgaggaacagtgcaagtgcacataagcattacagacttacaatacagctaagacacggttgggtcccttggatatgattagcagctgaagatagcaaaagatcgttaagccagtccaccaaagctttctcagtcgttgaagagggtatattttctacataaagtctcctcataggacgtgtagcttgtgttaattggatggagtcaatggtagcaaatcttttattggataaagaagtagcgaaaaatccataaggcaactctctaggaattgaagcaatagcagcagcactagccaactcttgcacacttgcaggcacagcaatgtttgatgactgaaaattagtaggagctaaaccagataacatgttttcagctcctacaggtgggaggtcccacttggcacttttcttctcagatgaatgaataggtggaggagtcttctcagcagtctcactcaacctcttcctcggtgaataaccaccaagcccactggttgattcatcatgccgtcgatggtgactagtcaagccattacttgataatctactcttgtcaacataaagttgtttttcagacctatccttagaaagatgggaagaatcctctttattagccaccctattatgagaagcacgtttgtgagccccaagagaggcagatctggaccttttatttctatcctcacgatctctgcttctagaccttccccttctcatctttgtatcttcatgatgtgattttgatgattcttttcccttgcttttccctgaaatgtctgtgtcataatccttccctgtatcaagtttctttgcaacatttctgtctttaggtttctcattatctccattttgatattttctcttgttttctctttcagatttccctctttttaggtctgaatggctctccttccctgttgagtccctcgaatgcttctttccagcttcattttgtgtgctatcagtcaaacacttgtccttctctctcctatcatgcatttgttggtcatttcttcctccatgcctgtcatgttccctcctaccatgcatttgtttgtcatctctgcctccttgcttgtcgtgttccctcctttcatgtatttctttatcatttgtacttcgttgcttgtctttttctatcctctcatgtgtttctttatcatttctgccaccttctttgtcatgttctctcctttcgcgtatttctttatcatttctgcccccttgcttatcatgttctctcctttctcgtattactttggcatttctgcctccttgcttgtcatgttctctcctttcatgtatttctttgtcatttcggtctccttgtctgtcatgttctctcctttcatgtacttctttatcatttctacctccttgcttgtcgcgttctctcctttcatgtatttctttgtcatttctgcgtccttgcttgtcatgttctctcctttcacgtatttctttgtcatttctgcctccttgcttttcgtgttctctcctttcatgtacttctttgtcatttctgcctcctttcttgtcgtgttctctcctttcatgtatatctttgtcatttctgcctcctccttgcttgtcatgctctctccttccatgtatttctttgtcgtgttctctcctttcatgtatttctttgtcacttctgcctccttgcttgtcaagttctctcctttcatgtgtttctttatcatttctgtttcttttagcttccttgctcgtataattattgggctttgtattcaatttgttttccaattcacaatctcttctatctttccctttcaaatgattgtcttcagatttattatcaacagaagttaacttctctttctttctggagcttatcttcattgtttcctctgcaacatgcacttcagcattgggcgaagagcctttgtgaaatctgtaatccccatcagattcaaagctatgaggtgcatccttaacaatatcttcctttgagattgtttcagcttcaacaactcctatgacttcttcacataagctcttcttcttcctccttagcataatctcttcaaagcttaaaggccttgttcgagcagcacttccttcatctccattatgcaacgaggaagcattgcttttgtcatacttttctttcaatcgatgtgatgtgctcatcttgctaatcttaacttagttggtgctttatatatgatggaaaaacttaacagagaggccaactaagaagatatcaccacatatctgcacaagaaagataataggatttgagggtcaataaccagaagcattagttgttaaaacttggatcaatacttattaatatgaaagaccaaatagaaccatgataagaatggtaagtgttaactaacacataagaactttgcatacctaaactaaatctacaacaattcaagtacccccaatggacaagttgatcaaatatacacctcaaagaaattcactccaatgcagggaaagtaaaacaacatatcatccattccaagaacaccaatttgggactcaaaactacctaaagctcctctacttacaataataaaatcaattaagcttaattcttctgaaacagaaaaacaaaacacataaatgtataacaaaaaactcaagttgtcctcagaagttaaatgaagcaagaaacccataaccaaaatccagaaacattattagcaagaacaagcaagttgtataattatattcagatttgttgttcattctttcatgaggtggaaaagataaagattaaagagccacaaaaggagtcgtacgtagtacctataagggcggacatgatcatgtggcggcgaagcgaagtgataggattaggccggaaccgaaggaagaagacgatgagggaatcttgaaacttgaaatttgaaaatggcaaaaatgaaaactttagggaaattgggaaatgggtaaaacctagaaaagaaaagacaattgctaaaacctctttcccatctatgatttattttccctcactttttcttacggcaaattctcagaaataaaagatgtgttaatattaacatttgtatatggaaaaacaaataaataggatatatagtcgagattatttggcaagaaaaactaaagtgactatcagtaatatataatttaatatcaaattttacttattttatttaataaatattataaaaaattaaagtcaattatacagctatactttattgtgatgttaggcacttatgttgcttcatagtaatgcttttatttagtaaattttttttgcgattagttaataatattttgtaaaaaaaaaaaatattgttgttagatacgggtgtgctagtagtagcgcttcgactggttaacaatgctccacaaaagttattacgttaaagtttatgagacatgatatttagtaggtatacattgaaaggtgttaaggtacattttagtatttttctatgttaaattatatgagaagtgatctttaattgaattaatagtgatatgacatatttgagggtgttaagtatcattaatgtcttttagtttttctctatttagtttcgagtattttgtttttgttgtaaaaatttatcgtaaattatgatgtcgtttggtaatacttttattttttaattttttaatcacaaaaataaaagtaaaattttgtttttgaaaaataaaaaaatgcggtcggtaatcacaattagttttttaaatttaaaaaaactaagaaaaataaaaagtagtattacttgtaaagtttatttttactttattttatttttttttattttttatttttaaagttc

SEQ ID NO: 227338 - DNA, 3294 bp, Cannabis indica
tctattatttaataataaatatttgaattttaatcgttctaatttttttttatatgattatgtagtattattaaaaaaaaattgtttaaaaacaattagaattatgaaaaaaaaagtacatataatttaataatcaactcacttgtaaaaataaaatataataaaaagtaaaacccaagtttgacccgtaaaaaacaaaaggatcagctcgaataaaccgcgactcgagttcgaattaggtcatgtcagacttgcactttaaaatattgacataacacaagtcaacatgacaatacatatgattgcaagctttttaaaatatgaaccgcaccaacaagtattaacaactatacatcttaccatacactcactcatccctattttcatcctaaaacttacaaattctaatatgtatgaaagccaaataaaagagtattccattagtgagcaaaaaaaatatatatattttttaaaataaataaataaataaagtttatgctccatttaggaaaaatgctatagggtatacatgggtgcccggcatccttaggtgatggcatttatttactattccaacttctatcctacaccaaacatcaaacataataatataataataacataattcaacacaaccctgcataacaaatgtgcccttaacttgcaagggaggctgtgtagtgtactgcaggtcagccaactgtaaccaggtttgtaaatatgacaagactcatcactcgtactactccattaaaataaaagttgtcattcccaaacaaccacaaaacgacaccacaacaacaatgaacacagtaacaagtagtatggtatattcaatagttacaacataacagcaccaagcgaacccaaaggatccagataaatcaacaaactattaaagcattgtaatttagccttcagagctggaagaagtttccccagaagacaagctctcttgttgtagacgttccaactcctcatatgcccagtcaaggccgggacaataatgaagtggggggttgaacctgcaatcattaatatcgggtggtaagaatgctccattctcaactaaaaacttcaccgctgctctcctccgttctttggctgcattgtgaagtggagtccctaatttggcatcgagagggtgacagtgataataattagatataaccttacaaatatttaaacagaaggaggaggggagagggggaggagagaaagaaaaacttcatgaaaacactcacatccacaggcacccttagttctagcatcaatatttgctccacgctcaagtagttcgtccataactgaaaggtggccaccctcggcagccaaatggagaggagttgcccctttcgatttggggccccaagttggcacattcacgtccattccattatcaagaagacgctttacctgcttgaagagaattaccacttatcttaatcgcaggaataaacatcaaatgagtcatcacagttaccttaggaaatatatttcattttacttagctcctaatagaaaatcatactgtgaagaagtactaagggctggaatgcagctacctgagagagaacatgctcaatccaaacaccaagtccatcataactttaagaatatttaatcagactgatacataacgaccaatttctataatagatgaaagagaaaaagaaagactttactttccaaataaaacatattggtggtgagccttaaatgaataacgttaattggttccaaaagctcccaatgagaattcagtaaaaacttttaaaacaccaaaatacaaataaatctgagactatagctgattaatttggactaaaaagagaacaaacatagtattagggtatagctatactatctagctcaccgaacacccaacttcacaataaaaggcaatatcagaactaaactctagtgacccattaccatcacagttaggtgacatcagcaatttactcctaacatctaaatctatggtctccccaaattacaatttacaactctcttaacacagcatactcacataagtactctgaagaaataattttatggaaaatacccaaatagaaagcccaaaagaactaaaaaagacagcataaagggaaagttatttacctgtttaatatcccctttacgcgccccaacatgaagcaaagtccaacctctatcatccctgtcgacctcagatcgaaacgagcgcctcctagacaaacttcgtcgcaaagcactaatctgatcctgatcttcaaccatactgttaattttcgtctaaataccaagctgcaccgaaaaagaaaatcaagattctatcttgaatcttgaataggaggacaatgaaatcccaaaagggttgatcgaatcttcacagaaaagaagaagaaagtaaaaaagtaatagaaaggatcaatatctgggaaagcacaaccttgcacaagattctaatggaagatatcaattgataaaaaaaggaaaaggggctgagaaaattagcgagagtgattggcgatgcagtagttagaggacaaaggattgagaccaggaccgaagacacggaggttctgaagagaaatcatgacagaaatgaccaactgcgatgagatttcgaacataattgggagaaacctacgactctctttctggtgataaatttataatgcgaggagaaaccctttagaaaaacgcgaagatgggtttagagaaactctaattccattcggaaagggagagagattgggcggagagattgggcggattaaatagaagaagatcgacgcctgcgacgagaaaccaatccaaaccaaaccctagaatctcccaattcgaagaggagacaatcgagagaaagacaatgtgtgggcaatgtttttcctttgctagattttatttcgcttactatccacgcggccgcgttgtttttttttttattaattattattattttatcgtataaatacttaggtttaattaaatatgtaagttcgcgtcaaaaaaaacttatgttaagttttttttttttttttttgtagaaaagatacctgttattataaattaagatggaatgtcatttacaataacagagtaaaaagaaagaggtaaatcctctaaccatgagcaagtctcatctacccctaaagcaaacttagctaaaatatgcgcaaccatattggctgaacgtttagcatgaacaacattcacttgagggaaaaaggataaaagactagttacatcaattattaaatcactataagaagtaatagcagaagagccatttcggatagcattggc

SEQ ID NO: 227339 - DNA, 3086 bp, Cannabis indica
aaaaaaaaaacaacaaaaaaatctcaatttcagcaaaacttctattttattttatttgttgtctaaattactcatctgatttaccatttgctgaagtggtgaagctgaccaaatcaactgatttagcaaatacaaccatatttaattcacccaatatcttcttctctttttttttcgaatttgggatggattttttatttttttttaattttggaataaaaataatagcacgttggaatgaacaattgatttataacaattaattatagaataaacaaatacaaaaaagtgacaaattaatcggttagctttttttggaaaaagtctcataaatcttcaattttccgacacgtcgtaacgttaaccctcactcgtgccggactcagtgggttcgcacgtgccacgacgtactctaccgtatatatttccatcttccatagcccatttacacaccattccaccgactcttctcactcttattatctctcttgctctgctctaacaatggctgccgcagcgtccactgctgcaacaccccttttgacagatgaacttgatattgtgattcccactatcaggaaccttgatttccttgagatgtggagaccattctttgagaaataccatctgatcatcgtccaagatggtgatcccaccaagaccattcatgtcccagaaggcttcgactacgagttgtacaaccgcaacgacattaacaggattctgggtcctaagtcctcctgtatttcctttaaggactctgcttgtcgttgctttggatacatggtctccaagaagaagtacatctacacaattgacgatgactgctttgtaagtttttttctttttcttttcgatctgaaatcttgagatcgtctttggtttttcttggtttcgatctttacctttcaatgattattattatccaaaattgtttttgactacgagagctctccctctgtttgagttaatgcctcaatggtaatgtagttgttttattatcattcattcttgaaaatgaatcacttgttttgatatgatatgatctaccttatatgttaccaaatttattctaatacatgtatatatgtattatatttataggttgcaaaagacccaacagggcatgatatcaacgcacttgagcagcacatcaagaaccttctctgcccatcaaccccatttttctacaacaccctttatgatccatacagggaaggggcagattttgttcgtggctacccattcagtctccgtgaaggagtccccactgccgtttctcatggcctctggctcaacatccctgattatgatgctcccactcagctagtgaaacctcgagagagaaactccaggtaaacaaacataaacagtttcttaaaaccaatttaccattttcacatgatgcagtgtctcaattctatgttttgttttgatttatcaggtacgttgatgctgttcttaccattccaaagggcacccttttccccatgtgtggtatgaatttggcctttgaccgtgagctcattggccctgcaatgtactttggtctcatgggtgatggtcagccaattggacgttacgacgatatgtgggccgggtggtgtgtcaaggtcgaatcttgaacctttttctttgtcataattatttaaagtaagaaaattgattttctttattctgacagtgatagatctatgattaatggctgtatcaggtgatatgtgatcatttgggattgggtgtgaagacaggtctgccatacatctggcacagcaaagccagtaacccatttgtgaacttgaagaaggaatataagggcatcttttggcaggaggagatcattccattcttccaagctgctacgctttccaaagaatgcactactgtccaacagtgctatattgaactgtctaagcaggtcaaagagaagctcagcaaggtggatccgtactttgacaagctggcagatgccatggtcacatggattgaggcctgggatgagcttaacccagctggagattcagctaaagtggccaatggaagtgcataattgacaagtttttggttaacttgaaatcccatcattcttatttcacattagtttatttgaattatttacaaagtcactgtatctcttttattataatgtactggacccacgtggtcaactcttgaatttgcatttcggtggggatgtaattttatttattagcttcaaccttatgagagcttttacagcaataataaaaaaatatatagttgttccgatgctttaactactattatgagatttgcttcgtttgatggggatatattataaaggaataaaaggtgtcccatgataggcataaagcttttttgcatttgaaagattggatcttctgttttgttcttctcatcttttcatataatcatgctgtaaactttttttttttttttttgagttggttttcaaataattttgaactagaagcttaccatgggaataaatccaatagtaaaagaaaaaaaaatgttaaaagattaagaaagtgatgttcagtttgaaggggaatttagtggactttattaaattatttttttttttgtaggttaaccagtgaatcattatcttttttgcactaactaaaatgaatttaaaatataaagaaaaaagttaaaaagtttcgccgttgccggggatcgaacccgggtcacccgcgtgacaggcgggaatacttaccactatactacaacgaccttgttggaaatgcaacaccgtaatgactatataattagtttgtaagagttcactattgtcaaaaatgaacatcaaaatgggcttaggccatcaaaacactgatttctgatggttttgtgcaaattcatacaattttaatgcctatgcatttttaacaaacctcattacagcatttttactgaaaaaaaaaaataataaattgtgaacatggtgtgggtttggaatttcatttttatagaatgacatgtttacttaagggagtcagaatcaaaataagtttacagattattgtttacttgtttactgaattttgtaataagaggtctactttctttttttttttttt

SEQ ID NO: 227340 - DNA, 3925 bp, Cannabis indica
caaagaagcagaagaacaacggacacactagcaaaacggccaaaatggagcaataaataagggttacaactaaggggagtggaattatgggagaatgatatcaatttgggaaagatatagctgcagtacattcttctgagattgagaggatagatttatagggtactttctgactttggcacttcattttctaataaattgacagttcttctgttagtaaaaagttccttatgagtctgtgacacagttggttatagacataattgcaattggacctatgttagtttatttttgtactttaaatggttaattgtcagggcgctgaaaagggtaataaccttgtgaacacgacaaaatgtgatgtttggacggagtaccatgaaatgggtgttgggagtgtcaaggctattgcagattacaaagcttacactgttacagaaattttggatctgcttcattttgttgccccaaagttgatggcacgaggaggagctcacttttcttacggaattgcagacgatttgaaggacccaaaatatcaacattacaaatactggtcaaaccctttggaaacagagtgagttctagttttatgaatccctttagtttgattaattgtgtgcttaaaatattggttcagaggtttgatttcatgctgttgtcttaactaaaatcaaacatctaacttgcttatcgcctgccttgctgaagaaatttagactaaactgctatcaaaatttgtgtgcgcattaatttaaggtattgagaagctatcctccaatctggaaaaatataataagttgatcacttatgtgtgttctcttattagactaaggtaaccaatatatctatgagctggtgattgtggacttgtattatccaagtaatgcgacctttagcctcattgttgttaaacctcctgaactgctttttcagattaccaaatgcgccagacatggagatatatacaatgtacggagtaggtattcccacagaaagagcatatgtgtacaagctaactcctccttcagaatgctacattcccttccagatagacacctcggcagagggtggaaatgaggacccatgtttgaaaggtggagttttcttgagcgatggagatgaaactgtccctgttttgagttcgggtttcatgtgcgcaaaaggttggcgggggaagactcggtttaatccttctggcgtccgtacatacataagggagtacgatcatgctcctccagccaatcttttagaaggccgaggcactcaaagtggcgctcatgtcgatataatgggaaattttgcactcatagaagacattataagagtagccgctggtgcaactggcgatgagttaggtggagatcgagtgttctctgatattttcaagtggtccgaggcaattgatttacaactctaacatattacacggtgagttttctttattaggtttctatgcataactacctcattgcaaattttgagcctttttttctttctttctttcaagttttcagtaatggctacgttcttacttataccccggaacttcaaaagcaagacacgcatggtgaattagaaatgaaaatggttgctgtgttgattaaagctacagctctcattacatattttagaaagaaaaaaatgaagacagtgaagtgagagagctggtttcagaaacaagttcatcacaaccagtagtattcatctatagttgcagtcttcatttttttttttgttggtgggggatgcacttaattcctcattgatatctgattgaaattcttatattcaattaatttattctcacaggtggttgcatattcctttcttcttatatattttcttggattatataccatattaatttttactgtttaattacctgccttgtctagtataatacgtttttaggcttgatcaaaaacaagaccaagactaagaccaagaccatgtccaagtccaaattctcatttgttaaaacaaaattaaacaaataaagagagttgaatattcagcaaactttgtcctgaggagacaaccttaattaaataaaggtatgaggaatgtcacgttaggtgaaacgtttctatccaaatgtgactaaactttgtctcagttattggtaatgattaaaataaaccgtaaataaagacctaggcagacactagctaggttgagccccaacttgattattggcatcttatcatataatatattattatcacatttttgcttaaaaaaagtacatggcttgattttattattaaataatactgaggaaatataaataattggtttttcttttttgtctttttgatacgtataaagagtcaaatatgtgtaaaataaaagtatccatccactttagataaatgaattcccttaattaaatatctaacaaaatgacataatatcacacttttttaataaacatgatcaaagccattaactttactgttatttttacttttatcatataatacttaaataactactttaattttttagttccacaattgttttttaaggcataataaaataagattaagaaatgtgttttatataagggtttgtttggaaagtaattgaattttaagtgtaatttgagataattacttaatttaggtgttgttggaggaatttcaacaagactaaatatatacaagtactaatttagaatagtaagtactcaaaaaaatattgtaaaattatatgcaagtatataaataatatataaaaaatacaaaaaataaaaataaaaatatagtggtccagctttgaggcttgaactttctctacttttgaatagtactcttgatttgtattattattcagttcattttaaatggaggtagatgcaatcatttatatggtagtaggtaatcgttacaaaatgtaaatgtagatataataagatctaaggatgtgcagaaagtcattcaatctagttataactgatcgatttaatttcaactgatccaatagaatcagatatccaatcataattggatccaaaccgaaacggtggtggaaaagacatctgatccaatggataaccgaccaaaccaatctaattatcatccaattatatttatatatttttaatataataattttatatatttaatatattttatttaaaaatatatattaattgatttaatatacatttaacaaatgagattaaaaaagaaaaaaaactttaagatttaaaatattaatttttatctttctaaacgctaataaaattgtcaatgcgtattgaatcaattttattttatatatttttttctttttaatgaaattaacttaaatggtgactaaaatagattggatggatctaatccaatcaaataaaaaactagttaatgcattcaatagttggaaccaatccaatccaatacatctattggatcgaatgactcaattcgattgtattagatcgaatggcaaaattcaatatccaataaataattagattggatcggttgggttgggtctaaattcattggacgtgatctaatgaacacccctattaagatcgttacaatttatcattataattggcatagtaatcatattgattgtatcagttataaaataagaacattcactttaacgatatttgaatgttgtgagcgttatttttgttgtttggtcgtactttttctgttaatattgtgggttttacttgatattacaaagtctctttttttaagttcttcttacaggacggaatttatcacattaacagttgtagtattataagctcgtgcgtgccatgttggctcaacccgtatttatccgtcgtgttgtgctgtgccacagaaaaatatgggttgtgtcgtgtcataccaatatttttaaagggtaggcccagtattttcgtatcgtactttgctcgtgtatgcccgtatttctt

SEQ ID NO: 227341 - DNA, 2356 bp, Cannabis indica
tttttttttttgtgaatgatgagcattccctaaaaaagttggtgagtttagtggagggcttttgtgtcatttttggtctgaaagttaacttgaacaaaagccaactgctagggttgtgtatgaaggatgaagcggtgtcaaaatgtgcttccttagttggatgtgaagtgggtggttggccaatgacataccttggtatgcctctagggggatcacctaggaagtggagtttttgggaaccaattttggagaagtgtgcgtaaaggttagatgggtggaaatgctcctttttgtctaaaggaggcagattgactcttgttcaatcagttttatcttccctccccacttattatttgtccattttcaaagccccaaaatcagttacaatggctttggaaaaattgatgagagacttttttgggaaagtggggagttggggagtgggaaccacttggttgcttgggaggaggtgtgtcgaccccgagaagagggtggattgggtattgggggattggagctgaaaaacaaagggttgctaatgaaatggttgtggagacttccactagaggaaaactcattatggcacaaagtgatagtaagtagatatgggaaagcggacaatttttaggagtcaaaggagggtgctcggatgtctccaaaagggtcgaggagagatatttcagatctttatggtgtttatttggagctggtaagcttcaaagtgggaaagggagatcgtattcgattttgggaagatgtgtggataggtgatacatctctgaagagagacttcccggacttagcagtgatctccaaagctaagaatgcaagtatccaggatttagtggtggacgaaggactaccaggtggttttgtgaggagctgggtctttaaatttaggagaaacctcttggacagagaagttcctagtcttattagtttggtccaacggttggaacacgtcaaattgctaaatgtagacgttgacattaggctatggaagcctgatccgggtggtatcgtcacttgcaagtccgcttttggttggcttaactcactcaaatcacagtagacttttttggaccaaaacactatggaaaagctcagtcccgtcaaaaattaaggtcttttgggtggcttttggccctaggcaaagtgaatgttcatgagaaaatgcagaagagatgccacctatatttacatctcccccagttggtgtgtgtgctgtaagaataatggggaagatctggaacacttgtttctccactgtcatttcgttcgaagaatttggatgaacctggtgacagagttcgaacttgtgtgggtacttccaggtgatgttccgtcaatgttggttagcaagttaagtagcagtaagcgtaatactaaactatggagaacaacgattttgacacttctttgggctgtttggatggaaaggaattccagattttttgacggatgtgaaagcttagcagaagatcatctgtgggagaaaataaaattttggttagctatgtgggtgcataagtccaaatattttgaggatttctcgtttggatttaagtagagagtggaaatatcttgcgtaagaaactttacactgatgttgtagaactagaagagagtttttttatgtcctatattgtaaagagtgtttctttgtgttgcctttttgtatactacggttttcctccgccacaagtgagggtattaatttctataacgggggaaggtcagtctaagacaaacggcctctttctttttttcaaaaaaatcgatgaccatgttagatattttgcaactattggtaagaaggcataatccatgaccatgttagatattttgcaactattgcgaagaagctgcaatagaacctcattaaacctacaaatattgctggggttggtgcattgattaaatgtgttaacatggtccataagttcatttttaggctagtttgttactttgtttgttgttacttatatataggtaaattaagtcaatttatgtgaatattgttaccacacggtttcctccgccagtgacgctccctaataaatttggggaaggtcaagttttgacctttgtctctttttcaaaaaatacaagtcaatttatgtatttctcttttcaaatttgataatctgaattggttatctgtaaaggaacaatttttgtaatgtttctgttttctggtttgtgtgttttgtttttggttgtcgtttgtattgtatttcttgctaaaacgtatgtaaccacggttttcctccgcaagtgagggctctcaatatatattgggggaggggccagtctaagacatgtggtctgtttctctttttacaaaaaaaaaaaa

SEQ ID NO: 227342 - DNA, 1889 bp, Cannabis indica
agactttaaaaaagagggtaaaaatgaaagaggacaatatgaaaatggtatagagtataattattgaaaaaggccctaaggcccgtaaccagatttgtttgaaagaagcgaaaaatagacgtgttacggttgagctgcagtgccacaaccaagaaatacagtaataagaagaagacgaagacgacgacaatgaagggtcaagcatcaggctactggaggtcctcagccgtcaagttcaggatgtaattcttcttctttttcttttaatattagctttaatcgaataataataatctaaaggaatgaactcgaaattgtcattgattgggttggcagcccaaccgcccagaatttggtaccaatcagattggacatagaactcgacgatggtcacaagttcaaagacactttcacttggaacccttctggtatttttgcttataatccatctttttcatatcaaaattactcctttcttcttttgcctaatctgaatttcaatattttgctttctgccttgtgtagatcctgattctgaaattgttgtctttgccaaaaggactgtcaaagacttgaagctccctcctgcatttgttacccatattgcttcctccattcaggtaacccaacaaagctttctcttttttctcttttaagggattttttttaaaatattattatttattatgatgatgatgatgatgatgatgatgatgatgatgccactactaactcagctttaccttgtttactttccattatcagtcccagttagctgaatttaggtcgtttgaaggtcaagatatgtatgctggcgagaagatagttcctattaaggtattctttttaattcaattttcaatctaatcttattatcgttgtcttaacatctaattttaaccacatgctatgctcatcatcagcttgatcttcgtgtaaacaatattcttataaaggaccaatttttgtgggtaagttgttctttcatcctgtgatttttaagtggtatgagactgatactacttgtaatgaacattgcttctgctattttccaggacatgaacaactttgagagtgatcccgaagagtttgcaaaaaccttttgcaaagatttaggcattcaagaccctgaagttgctgtaagtagctactctggtctatgcacttcagaataccttgtgtcaatactttctttctatcctaaacttaagaatgttttgtttcagcctgcaattgctttttcaatcagagaacaattgtatgaggtcagattccttcaccttttagagttagcaatagaattatacactctatgtaaactcgatttccattctttctgtttgtttttttctcatattgccttgccatcaatgtacttatgatatattatattctagactgcaattcaaagtgtagcttcagcaagagaaagccgaatcagcaagaagggacgccgagggactgatcacacaccaaccaggttgtattttgtatgttaacagtgtaaaagagttgtgagccgtgaggaacttagtttgtctgtcaactaattcaacatgaaattctttcttatggcagagttagtggtgttgctttggacttagtgaagttatttgggcataaatccagtgttgttcggtatgtcttcatattacttgttatacttaaatggcatatggataatatatttatgttagaagcttgtagcatatttgctttatattcaatactagagacaccgccaatactgtatatgctatcagcgcacaatttacatccggtacagccagccacagttgcaaacctcgagttactcaagttatcatctttttctacttaattaagatgtttatttttctataatctaaagtcattttccattcattgct

SEQ ID NO: 227343 - DNA, 2556 bp, Cannabis indica
gaaatttttatattttttgtgttgtttacatggtaacagtgtaaaggaaacaattttgccattagactcacatggtattggttattatttttttttggcaaggcaagattggtagacatttggaatgttggggttctgcggggtatggtttttgaccattttaatcctaggcacttgttttgcttaagtgttacgtgaaggggcaatttagtaaatttccatggtttggtttatttctccttgtttgtctttagctagttttattagttggtttttaaagattgattaattaagtaaatggaaataaagtaggttttatcttaagtaaaggaaatagaaaatcaactttatccaacctatcctttttctctctctattcggttctaggagaactaaagaaactagagcaatcaaacctctttccttgacgatttacaactggttttgaagagcaagtagttggaaggaaaaagtaagactctagtttctttttcattctttaaattttagtttaaagctaggtttcaggttgtgtaatcctaggtttgttgttgttaggatttaggttgtttagaatctattttgggagcttaattaaatttgttttgatgattttagttgagatttggctgatgtggcgagtgttgagcaagctagagtttttgagctcaaagtttgctcaataatggcaagttttgattttgtgatttaattgtgtttttatctattggaatatgttgtatatggtgtaaataggtgttctggaagtttgtgtctgatttgggtttattttggttgagaatgagatttttggaaattctatagtagaaaatagtagactggtctaccattttttactggaggtcacccaaaaagtcggtctgttatttttatagaaacgacctaccattttttgggattttttttgaagtctcatttttttgtgttttctcgatatttagggttttgtcacactatttattgatagggaaacctctagttttgagtttaagatcccaaaagtgagttagcaagttactcacctattttatgtaaatgtgacatagggtctctgttcagtaagtgatattccactcatgttgaccgacgcacctaaatataaaaatgaggttgcactagcataacacacatacatatgtatagttttgtgtttgcctttacatgacatatcgtttagaacgatagttggtgtacgtaagattgtatctagatatcgttgatatatatatatgtttggcaactccataatgaatgggttgatatcgtagcggtgcaatcatcgtgttgggtccccactatggtcataatgtgggcagtggctgatatccaactctaagaaatatgaattgatacaatagcggtgtaattattgcaccgggtcagtagtacgagcatagtattggttttaactaatatttagttccataaagtattaattgacattatcacaacattacgagcatagtatcgagtcagtagtacaaacattataccagataagagtgatattatggtcaattgtacttttaagtatagattgatgctatcatagcagtacaatcatagtgtcggctccccaacgtgaccatagtgctagtaatggctaatatcatggtcacgcgtagcaaatgaaagaacgttctatgtttattcattatgacttgttgataggtgtatgggctcttagtagtaagttggttatatattcatattttatgcttttcttattgggtctgtcagctcacaaatgctatgttatgtgcagatattggtaagactgcagttgagcaatagtgagtctagagctcgattaagattttacatatcaagatagtttgacctagggagttggatctttgggatagctaggactcttattttgttagtcgctaggtggcatttatgtttcataatgtttgaataattaaacccgggatcctatattttgtaaagctatgatacagttgatattattgtaaaagtttaaattaataatgctttttcaataaaccctttgattagcaaaggttgcatagtaattgagaaacaactataggatgcctaatctagatggatgttataattttggtatcagatccgctaggttgtttaccaaagacaataaagatatgtacaatcatcatcaaagataagctcgactcacagttcagtaagtctttatatgttttaattggtaagcatgattagaaaacgtgataggtagcatattagttacattttagttgagtaaatgcatgtttaaattgttggaacgtgttttaccaggatctagatttactaacatgtgtgattgattataatctataatataacatcctaaacatgaatttcctaaaacaatgaaataaacatatataaagttgtagaaaaccttacattggtggcagaggaatattatgggtcctttcgtttagatctctaacctttgttcctttctgtcgcagagtattgccaagatctgaaccaagatttcctttagtgatggaattcttcacaatcttccacactatgatt

SEQ ID NO: 227344 - DNA, 3549 bp, Cannabis indica
gctgcctttgtgttcccaaatatagtttgaaactcttcatctgaaagataggcctgaagggaaaaaaaaatagaaaatgtcattaaattgaagtaccgaaatgaaatgaaacatttgcaatgggaatgagactgacctctcttcgcttgaaatcaattccagtaactggattttcagatttggctttcagttgatcataactgaatgtactaaggttactttcaccatcgttttcaaactgcactgtttctttctttggtgactcactgctgttttcagatacagctgctacttcctctgcttctttgacttccccaccatcctgagagccctctgtttcggaataggtagtttcacttttggcttcagctggaagaattgaaatgtgtcgagatctataatttcagttacaagagtaaacataggtttttttaattcagaagtgaatggctcttaccaggggcactggtttctgagggaggactttgggtaggagagtcatcaggtgacttctttttcttttcggctgtaagaacttgcgaaagagcagcaactgctgctgctctttgtgagccttgactggggccagcaggcctaggagcagaagatttgtttcctgatgatgaaccgaacgcagatgataaagcagctaaagcttcagctctttgccttggtccttgaccagaaccattggatttatcctggccctgattatagcacatgcattaaattaataatattaatagatacaaaatcctctaccatcatatgcaaacatgaaaaacgaaaaacaaaaggcaaatgagccatgccggaataacttgataggacaagttattgtttttcatgaggaaatatttaagggaagtcatcaggccatgcaccacaaagatgttgcagttaacaacaagttaatgagacaaaacactgagcaaaaaacgatttgaaacttattagatcaagacatgataacatcataaccagaatggggatatttagttaccgggggtgattttccagaggatggactaaatgcagaagataaagcagctaaagctgaagccctttgtgttggtcctccttgattcccattggacttttcctggttaagcgtaaaaagagagaatcagttacatttatagtaagaaaaactgattttgcaatgggtacatgtcctgaataatagatgcttctgcaaatagattaagcaaattttgtattgctcacctccacagtactaccaaacccaaagaagatagacaccttcttttggaatgagttgccctgaatctgcatttcataaaaaccatgcataagagatggtgtttaaagagcctagaacatgcaacaaacatgaaagagagaaatttggctacattcgttacttgcaaaagataattcaagaacaagaacccttgtgatcatttgaccaacatattatgggacatccaagattacagatgctctaagtttacatataaaaccacttaatttaaggaattgcttgtaggatttcaatgtaacttggaaatatagttcacacatgatctagtcaagaaattcaaaattttataaaaattaactgaatattaagtgcaactaaattaagataaggtggaagaagtgacatgagtttagaaaagcttaatgaacaaaaagaacagtgcttttttatggcatcttgcatcaacaagtaataatgcctgtgaaatttgaaaactattttttttatatataaatagcatggtgttcccctattaagtagggaagccatttcaggtattctgttccccttaattatagacatcaagttagcagccataaaaacaaaaacaaaaaagcataaaccaagaattgactttgtagattttgcacatacgctggcttttgcaagatcccatgaaaagtaggtagtgaagaagcaaggttcatttccttcagtaactttgtacagaggcacattaggagacaatccctccagagatgcagccatctctatgtatttctgcaaatgtattaaccatttatgaagcagttcgtaatagggaaaatatgagaaaacgccaattggttacatattacctcgccaatttcaaaaacactttgcttttctttagaatctacacactgaccaacccagataaacacttcagcatgtgtgtcaagtatcaagatgtcttctgttaacagatcatcttgtgagaagttgtatacttcctccacctgccaattatatacaaaattaattataaccacaagcactttgaatcaaaatacaatgaagtttgagttgttttttatgtccaaactcacctgaaactttcctgggtgatccatgtggcaaggaaagtgatggaaaaaaagaaagttagaaagtactcagctggtaaactagtaaaccaagatatcaattcattatctcaagaaagaagaacactgcaaacgatttgacaggattgaacgggaatcactacctttattgaatgagaatgtgaataagtgtggatctctgactgtctctgtagaaacttttttactggtgtagctttgttttcctccaagcgcaaaccagaaagctgagctttcagttccttctttagcatgttttaaagtaactcctggctgaataagtaggaataaacaaataattaaattgatatatcatcaatatatgaagaaactctagaaacttatgtttcagtaatgctcaagctttaagaggacctacaattgtatgactccaatcaaatagatatctgctaaattatttaattcatgtcattaacatttgcctagaagtataccttcataaactctgcaactttcgaggccaactgttgctgttcaaacgtgcattggtttccatgccaagtgaaaaatgaagagccagattgtaggaggaaacactcagcagagttcagtgatgctgctacctaaagaaaaatgacagatatattaagcagagaccacaatttatagttacttgctggacatagatgaaaatatccacatattttgcaaaacgaatgagcagtaggtttcatgaacttctgaaacttaaattttgaaaggtaagtgtatcatttctcttctgttctctaagcttttcggtttgacttcctgtaagctgaactttgtgaacatatgcagatggaagtgaatttgtgtgcactttgataagagaaagaagagatccatatcaaatgtaatatcccgaatagtacaattaaggataggctcttgcgatgcaatacactactgataaaggttatagtttcttatcttattgagaaaccagaaaaatattttatggtactctgtcattgaaaactttcagtaagtattctagctaaatgacagttttgggaagttaattctcacaaccgacctgaggccaacaatctctatagatatgggaacatcaaatcctaatgacaaaatagtctagattatcacggggataggcaacaccatgaaacttctactggaaagaaaacataccgcatcaacttgcactactttattattatgaatggaagttccagaaat

SEQ ID NO: 227345 - DNA, 1316 bp, Cannabis indica
aaaaaaaaaaacctaatttaatatgaacacctcatccatctacaacaagatgatatgagaacattgccaaatagggtcccaaactagtaaaaatcataataatattctctataaaatcaagcaacttgattcctcaactcaactactaaacactaccattttcatcataatcctggttttttttttcgtttgcgattgtctcgcactcgatttcactttgatctttgttagtttcgcttcgaaattttgtagcaccggcctaatctcaaagcaaacttttagatccgtttttatcattgccaacataaacatctctcgttcactttgatgaacgattttagtcgagtttgatcgactgactgaccgactaatgtttttccttcagcaatggaatttttagatgattctacctttttctgtctgacatggatgaggagactatcatagtggtttttagttcattcattcatgtcaactcaatcttcgatttttgcaacagaacttggtagtttcagctcgagaaagaaagagctcgaaaccacaaaaacagggttgctcacaacttgttaatttcccttaaaccaattctaacacttttatacatccagtcgaattggcagcaacaaccatgtttgatttccttctccagcagacgctagaaacgaattggccattgtcgtcattagtttcctttccggaaatgggatcaatggagccaaaactggtgagaagtaatcggcataggtagagatctatagtaagcaaaaaacctggtgaaagtaaaaagagaaatacaggtaagaagatgcatttagcaattgaccaatattttcaaggtaatatgttcctaactaggagaaagtcgattcaagtacctcattactttctgaaccgcatgttatataaccgtcgttaactgacaaaccaacgaagttctgagaaaaagaaaacatttcaaatggctcaggaacagatatttaggatgtcaaagcaaaagagcaaacattagggaaaaattaaaaggattctagtatatatatagaaccttttcattatcgtggccggtaagggttaagctgcaagcatttgcagaatgacttctctttagatcccatagctttaacgtgttgtcggtggaggcagaaacaagggtatctgagtccaagaatttcacatagcttacagctttgtcgtgaccagccaatacacaccacggtgttttagcatatcttagatcgtaacagtaggttctgtaatctgcagacccgaaagccagtaagtgggtcgaatgagcagagaactggacacagcagaca

SEQ ID NO: 227346 - DNA, 1540 bp, Cannabis indica
tgataattagggcaatcaagcttacaaggagaaacagtttcataaggccatcggtttttacactgaagctatcaaactttgtggcgatagtgcaacatattacagcaaccgagctgcagcacaccttgaagtcggaaggtattgttattctttctcaaaggttgttaagctaaactagacttcttgcaagtgtttgaccgtgtattccttcgtaaattcagttttcttcaagccgaagcagactgcaccaaagctatcgaacttgacaaaaaggtaaattgattgtttggtctcattttaatgaaacttgcactatgttcagaaaacaattacattgctgttctttttcgggtgcagaacataaaatcatacttgcgaagaggtacagcgagagagatgcttggtttctataaggaggctattgaaggtaagcaaagcaccattgttttatagattccaatcgaaacattatattcaacaagacagaattgctgttggggtcttcattttttcctcggtgtttttatcttccaacttttacgggatctaatgtaactttcaacgttgcagactttagatacgcgcttgttctcgagccaacaaacaaacgagcagcccttactgctgatagattaagcaaggtgtttcagtaagcagttataacaaaagcttctctctctctcgggaagtttttgctatgcgatttacgtgcagattcttggcctgggattgaagaagattgccatttataaatattagaccgaaactgcagcagcagatgaaaaaggggttgcgattcttcttcttcttcacgagtaaggcgtaaaatcatttttcgttgtattttcgaggttcgataaaaagccatttttaattctctagctgctgattattagttttgaaaatccaattttgtttactttcattataatatggatggagttgtaattctttcagttgggtcttgaaaggtttttctttggagccaatgcatcatcatcatattatttgtgaacaactttgtttacataaagttccttcctttgttctttttgtaaatggtttagttattattgttattattatgggttgagtttgttgctattcccatcttatttttgataacatatgggaatgaaatttgtaactatatgttaatttaggagacttatattaagattaaagaaaagaaaagaaattaaaaaaagaaaaagggaaataggtaacttttggtgtataataaacgtttgagagttatgtttataatttattgagaattgcatttctcaaatatgtgtataataaaagtgcaaggctagaaacacaactcaaattctacacactaattacacacttaaaaataaaaatggttaatatttaataatattgtgtgtaattagtgtgtgcaatttgaatgtgtatttagcattataagaagatacttcatcggaatgctaagcgtgatacaaaaaaatttgtaaatcgcctaaaccgaataacccgcccaaaccgaaccgaaaaaaccgataaaaattataaa

SEQ ID NO: 227347 - DNA, 1601 bp, Cannabis indica
aaaaaaaactcacctgtatgagattatttatctcaccctgctggatagaataaataatcctagacagatgagtgggataaataatcctagacagatgaggttagctggattagttatccagacttctaacatgcccaaacactggattggacaaattagcctgtctaatccaatccagtcctgcgtaccaaacgggcccttagagataaaatgtattacagcaattcaatgtagaagattttagtaaattaatataatattttcttttattttattaaaaaattaatgtaataataaggaataatttcttagtgtaatttatagtattatagttggagtaaaaataatttttttacaccaaatttaatgatattgtgacatcaaatttggtgtatggattggaaatactcctagcccacactactcaatttgataaccaagaaattattgaagattgtgctcttctcaattttatatttagattcgaagttagagaaaaaagatacaagttatacactgctcaatttgatagctaagaaattgttgaagattgtggtcttctcatttttatattcagattcaaagtcaaacaaaagacaagtccagctctggacataggcgggctaggtcgatgcctaaggcccacctagcccaagagcccaaaaaatgtctttttttttcttttaaaagtacatattttttactaatttgaaaaatatcacattttttttaaataagggccgaccaaaaataattttttcctataacccactaaaattcagggccgaccctgagaaaaaagatccatgttctacacttgtttgaaactttgagacaaaaatgaataaaatgttagtgttagaacagaatgagacataatatttcgttgcaacccaatgtgagaaatatcaatttttacgtgtttaaattcattgtttctgtatatgcatatttaggatgttatattatactgtaataatcaacatacttgattagtaaatttctcagcgtatacacccacaaatttctcaatttggctttgtgagattctttcaaatgtcacatttgaccttgtggtctcttaaagatcgttcattatacctacacttttcaggctcaaaagtgaggaggatgaatgtattagaactatatagtatagtctcacattactaatgtgtaaaaataaaatattgtatatatttataagatgaatattactcctcctattatcaattagttttaaaataaaactatatgtatcttataattctaacatactatcagagtcaaaaccaaatttaaaaaagtccaattacttttaatatgaaactttatacaccttataatcacacctcaccaaattctatcaccacaacatccaaagagatcaattatttaaatttaatccattactgtgttctttgtaagaaaaattaaaacaaaagtttttcataaatatatatatctggctatctatacatggaaaaaaaaaaaagctcttaatttggtgtgtcaagggtatatcttgtcttggcatttgtctcgagaggaagatgggcagccatggaagacagagatgggtagctagccatggacatgga

SEQ ID NO: 227348 - DNA, 3571 bp, Cannabis indica
tattttatgagaagccttaggtcctccttcactacttggattcttggctgctggttgactgttggacaaactgccttttaatttcacaatggtctgcaaagatgtacccttgacagatggctcagaatgatgtttgttctgtccagtctttttagaaattatagcaggcctttcaatttttttaactgcagcaacgtctttggaagcatgttctttccttgaattttctggaagcttattctttctttgaattttctgtaacccattgttgattggagtaaccaacggagaagaacccaacttattctggcacgactttttacaaatagatgtatatttacccattgttggagttgctgctgaacttcctggaagcttgttatccgcatggtgtgctccttcctacagatgagtataattaaaaactgaaatcacaatcatataaacacttaatgtgagggggaaagaggaggaggaagatggagataaaggcaaaagagctcactacctcattacactcaagcttgcgcagctttttagatgtatgccatgatgacataaactgatgcagggtatatttgacaaatgacaatttcaattctttaagaacatcctcgtgcaacctttgtcggcacattgctgtggtaacatactccccaatcttaggaatacgttgattggacctcgaaggtctaaatttgtttacatttgaaggtgcaaaagttctagaatcatcttcaaaaccaggaggtggtggctcactgctttcttggtcagccaccagatcatcaccatgtacacagagttccttaaacactgccgagaataactcaggcatatggttttcaaatacaatcccatgagaaggtttagtcatcattggcaaagatgggcaaacgttagatgaagttgtctgtgcagaagtttcattcgaacaaatcttcaatttgtcacactcctccaacttaggggtaagattaacctgcgggaacaggagtaactcattaaaattacagtaaacgtgagagtacgaccagtacatagctttaaaacctcttttggttaccttatttaatctgtcatgttcataagacccaattaatttcctcacttcaccctcaacgaaaaaattgacaaaatcagtcaatgataccattgcagatgaatgaagttcatgttctacgctttttacaatgcaatcaacatcctcgtatatacaagttgtgcatgaagagttcatatgtgttgatgactttgatctcaaaagtgctggagaaggagaagacatataagaaccatctgcatgatcatttgattcctttctgaacggcccaaagccaggagggcagtccacatcacaagcaaggtcgttcctttctgaacactgcaacaaccaaagaaatattacgacccataaacagcacaagaacaattcctgaactatgctaataacttacatctacatcaggtggtttcttaaacattgtaacacaattgctcaactgagcaggctttctgacaaatggataacctgaccaaagttttgtctttctccaagcagatgaatactctgaaataatatcataaaagacagcattccaagtaacttgcatgcaatagtcaagaagaaatcggcggacaactgcatatgacccccaaaaattttcaatgcttccagcagatttagtgattataaaaggttctatggagcctttattagtgttctggtcagcaaaatggttagatatggtcgtgtcacgagaagagcgactgttaatatccttgacttcaaaaatttctggctgccaaaacaacgcataaatcataagatgcgaacattaagaaaggaagaaaaacatcagtaatgtgttggtacttagacacctcatacctttctttggtgagtggaacaagtggtggcagcctcgttagacgctttcttcgtagaaacaaaatcagctataacacaactaataatttcatccaacacaactctacgagcagcttttgtaattccaaggtgcaattgatttgaaacttggtcacaaatctcatctaggaagcttggagaagagcttgagtgattggttagggaggtaacaggtcgtgtgaaaatttcaggtttataagttttacaagcgtttataacagagatcaatctaaagggcgttttgtcagcatggtatacctgcaatgcaaacatacgaaactatattcagaagacaaaagaacatgcatgcatggcctagaagtctaaacgtgagattttgacatgaaaacttaccatggttgaatcccggagatacccacattgatgccaagaacacaactcttgaagagaatggggacccattttcatcccttcatggtccagatagaaccagttgcttaactaatttgaggataatacacaacaaaattattagacagtagagagcaaagacaaaataatcaatactgattgttgaaatgcgaatatcaatacctgcagaggatatgagttgggatcaaattgcggcaaatgggtggaggggaaggcaggagaaagagtgggttgcgtgggtgtgcccaaacggagaaatgcaaagccagtggaaacatggtcagggaagtgtttgaaatatgtgagaggaacagaattgagtaaggcaccattgagaataggatatacaggaagatcttccggtaaaaaaccagtggagagaccctcgtatagctgccgctcgatgtatggaccgcacatttggccacactcgttgatatacatccatccggtggccagaggaagagcaccgccacctccgccgccaccagacgggtcttgcaaaccactgctatttccattagactggcagctcatctcgaattcaatggaagacgattcttgtgaggatgatgtatcatcgcaaagctttagtctcttcttagggaatgaagagtgtgaatcgtggagaaattccgtcgacgaaaccattgatcgatcgattatatctctcctgattgaatttcaaaatcaaaagaagattagggtttttactatcgtaccatatcagctccagtctccagattcctaatcctaaaccacgcaaatctattttctattctctttaattttatttattttaacaaacacacacaccctttttatgtattacactgttacctaccgtattttacttttaagattcgacgtaaatatatgcaacaacgcactgaaaaataaataaataaataaaataatttacaatataaatacttaattcaattttcagggaatctttaataaatactagttgggtctaacgtgcgaagcatgagctcatagttcaaatattttttcaataaatttacaatatgttacttttttagaccgttgtaaaagttgatttatatttagtacaaataatgattgtgtgatatttttgtatcaatttttactattatgctccaatttattattataaattttaatgcaaaatttaatatatgattaaatattcatctaacaatttattaaaactataaaataataatacaaataaacatgctaattaaacttttataataaaat

SEQ ID NO: 227349 - DNA, 7298 bp, Cannabis indica
caattgttatattcaaaattcgattgccatctcagtggaggacacgtgtcaagataaagggaatatggatcggttcaatcgctttttatggaatacctcattaattacgtaagtatcagagtatatttttaatctatagattgtaaggtcttaggcaaggaactaatatacaaactagtacttagcatataagcgagaaaccatatgtcgctgaatgcgaattgcgaggcatcaaggacagtacacattagaagacgaaaacaacatatattaattacgaaagtccttagtgtacaaactaagtgttacagatggatcagctcaagaccaagtaagcaaggtgcccgtctcgttagtggaagacctcatgtaacttcatctcgttagcattagtgaggctcacaaccttggcaagtcgagaagctaacattcaaatgagcttcgaagaactctttgtaaataagaactgtgatcgacacaaggcatgcatcgtcgacctcggaaggaaaaatggccccagctcgctactgagatcactggaactaagcttctgtcgagacaactccagaaacaataattaaagacatgtttaaaacacgatcattttgacccagtaaaagagggaaaatcacagctatatgattttcaaatcataaactgcatttacattacacgatatgcaatccaatcccatgattttaaggatgattgttgtacacatattacagtcaactttgtaattaactgtccactatgtaattataaatggtgacaaagaagttcgaaaaaggggcgaaaaaactcatacaagagatgccccaaaataatcaaaaatcttaataagattgactcgtggacttgtagaattttaactgtaaaaccacgtaaaaaattgtttcaatttttatttttacagcttttatattttctctatgaaatcactgctgtgaggctcaaatttagttaacgaaattctgcgttaacgactaagttttattgcagtgtctattgatataattaattccagtgatttgccctctttgtgttgttcgtaattagttttggtcaaattaccattttacccttcaaattacttatatatcatttagtaccgttagttcactagtaaaagtataatttagatccaatctaaatttgtgcacaacttttcatttctaaaattaacacttaaagggaaccaacattcgatctatgaggaaagtttagattccataattgtagatcatgttctcagccatccatattattaaattctcaaaacaaaaattgtaagaatcatctctactggaaaaatattgagtgaatcaaagaaactaataacatgaataggagttcattattactcatgatttagactggtctactattgatcatcattatgatatcaattcggtctttataataaacgacatgtttgataaaagtagcttaaagacatatcgatccatgtcatatttaatctctattatatataaaaccttcacttagatgtcatactacatcaacaatctaaatcgagattgcttacaccaaataacaggcataagtgaaccatactagcaacaattgattaaagattccataactttaatatgttgctgctattttattcatggctaagtgatcttaattcttcttacaataaaagtcacaacctcatttataaataagaatttttttgatatttatatgtaaattatttaatattcaagcatatatgtaaatgttcaacttatatttataaataaaaatatctttacagaattttcaaggcataaaccctaataataggtagctatgttggatgaatatggcatcattgatacgaaatatatattttgctgatagagacaaaactcattatcaatgggaggagactttattcagagggacgttctatggtcatgccaaccactcaaaggtgtgagttgataaattcacaattgaagatattaatactacataattactcactgcgagactttgtgtctcaaattgaccattccatcagcacaatctggtacaatgaacatgccaatgatttcaaaagtatggatgtgtctcattaacttatgaccaaacatttgctaccttattacaaaaaggctgctcaaatttttactataaatatctattataaggtagatgctcaaattgatgaacaacaaccatatttaatatctaattgagaggaccatgccactcaatgcatttactctttcgtaagattcgaacatggtccatcaagacacagaattcaacacacaaaatagaccaatgagtttaattattcgtgtttgttgtgttgagagtgaaggtataccatgtaagcatatatggtgtgtaattcaaaatttggacgaaaaaaatatacccgaatctctcactcttaatcagtggcgaaagggtgtcaagacttctgccacagtagaatccctaacacaacaactggacgacaaaagctaaccctaaaattaaggtgatcaaatatttatgtgacattatttttattttcaaataataacattattatatgtctttataatcttacatggattgatgaatggtggttggtaattaatagttttaagataggaacaattatatatagttaactaatctaaatgttttatgtactacataatgataattgagtaacacgtatagtgcacttagctcatattcaaactttaattaatgagctattatgcatcacacaatgtagatgctttcaaaatggaaaagagttagattcctaggtcggtaagcatattcaaagagaaataagaaatcgttgaaggtgaacaaacttgcacaacgaaagcaccaaggactcatcatgacaatccttatattatacaagatccaattaaggtgcaaataaaaggatccagtactccaatcaattttttttaaaaaaaaaacatcaaaaggaagaggacctatttcaaatgatatgctacaaccaagtggcgatgcacagtgtgtggtgtgaagaaatgaaggtgacatggatgctgagttgcctatgatttggcaatccttctgctccaatatactggaaaaatatccctgaaaggatattcactaaagtacaaattctgttatacctttttgtatattgttagcattgttttcagaaatattccttttatgtaatctgctaccatctgtccttatatccaatggctgtaatcatttgtaaaaaccttaaatagcaatgaatttgctcatgctcattgagctgagatttatcatttacatcctctgtatttactcttgttttctcacttggtatcagagcaaggttgagctcgcgtcatcgctactgataaatctcagactccaagaaagacactgggacaagcctcacaagtcaattcgggatttgtgtctgcaagatcgttctctgcaagttcttcatcaatagctactcctttcagcaacactctaagtcagccattcaccatgaagctcgacataagtaattttcctttgtggaaaacaatggttctaaccattattagagggcatcgtctggagggttttctcaatggtttgaaaccatgtcccccagagtttcttccttcgaaaaacactgaagcagaaaccccggttccaaatccagagtatgaactttggataacaaatgatcaaatcttaataggttggctcgttggatcaatgacagaaggcattgcctcagaagtcattggctgcagatctgcagcaagtctctggacagctattgaagatctttatggagctcattcaagagcaaatatggaggatctgagaaccaaactgacaacagtgagaaaagggtctcaatccatgacaaactatttgaaacaaaaaaggctttgggttgatactttagctcttgcaggggaggtaatgacaatccatgacaaactacttagaggtaatgttctatctgatctttgtgctgagtatctaacaattgttgttcctcttgaagttaggtctactctctcgtgggaagaactttccagcacccttctcagtttcgacagcaaactggaaaggcttacatctctctccaccaactctaagcagctggaaaatcttactgctaacattgcacaaaagccatatggtctaggtttcaattcgaaccatggtcgagggagatttaggagtaacttaaatcatggtcgagggaaccatcaaccctctggtgcatcgagaggaagtggctcaagaggtagaggaagaggaagcaggcacaataactccaaacccacatgtcaagtatgtggaaaaatatgggcactctgctgctatgtgctacaatagatatgatgagaattacactggcctgccacccaacaatgacacttctcttgacaaacaacagcagtatgctatgattgctacttcaggaacactacacgatgaaggatggtatgctgacagtggtgccagcaaccatctaacatcagaagcagggaagatgagcagcaagagtgactatggtggtaaggagaaagtgaccataggtgatggaagcaaaatgtctatttctaaaattagtcatagcacactcaaaactctcactgattcacctttgattcttaaagatgttttacatgtgccttctattgctaaaaatctgctaagtgtctcaagattaacacatgacaataatgtttcaattgaattctttgctggtttttgtgttgtgaaggatcaagcagggaaggtgatcctaagaggtgctcttgaggatggtctctacagtttgggaacaatcactactccacctacttactgccccagtcaactcgatccttgtcctttttctgttcaagttcagtcacctaggaatgttgtttcaacttccctaaaggatacctagcacaggaggctaggtcatccatctttacttgttttaaatcaagttttaaagatgtctaatgtaaagaattttgtccatgaaaatctttgtttctgtgatgcctgccaacttggtaaatcccatgcattacctttcaatatctatcacagtagagccaaaaccatgtttgaaattatacatactgacctctggggtccaacaccattagcatcacacacaaactacaaatattacattaacttcatagatgatcacagtaggttcacatggttgtttcctttaaagcaaaagcttgatgcccttgctgcatttattcagtttaaagcccttgttggaaacaaatttgaaagaaaaatcaaaatcctgagatgtgattggggaggagaatatgatgctttctctgacctagtcatcaaaaatgggattgagtttcaacactcttgtcctagaacatcaactcaaaatggtagggctgagagaaaacataggcatatagttgaaatgggattaacactcttggctcaagcacatatgcctttgaaatactggtctgatgcatttcaaacttcgattttcctcattaacaggctgccaactgctgttttgaatggcaaatcaccttatgagctggtaaactctaaaacaccagattacaaactcttgaaaatatttggagcagcctattttccttgtattcgaccctactagcaacataagtttcaattccactccattaagtgtgtcaatttaggctatagtgaggtcttcaaaggctacaaatgccttagtccacatgggagaatttatatctctaggcaagtgatttttaatgagagtgaatttccatttgaacagggcttcttgaataatcataaaccagaaaacacaatcaccctgaacacaccacactcttggttcaccttgccatccatgattcagaacacacctctcagcccccaaagaactcaaactgagcaccatgctgaagatcttatcacagaatctcctatcctgccatctgttaacaaccaggtcagtaacgattttaattcagatgctacactactgttacttctactggtgcaaatgtgagtgcagggaatgatttgtctctgtcacaagatcctggacaaacagtttaacaacaagttacaccagttgttcatcctatggtgactagagccagagcaggtatcttcaagccaaagatttactttggtcaggccaacttcgatcaatccatccatgagcccttgacacttgaagctgccctgcaatataaaggatggaataaagctatgaaggatgaaatctgggcagtggagaaaaaaaagacatgggtgcttgtgcctttttcaaacctgtacaacattgtgggctgcaaatgggttgataaaattaaactcaatgcagatgtctcccaacaaaggctgaaatctagacttgttgccaaaggttttcatcaaaggccaggtgtagactttaatgagactttcagccctatcgtgaaagcaccagcagttagagttgtcttaactctagctataactaaagattaggaaattaggcagcttgacataaataatgccttcctcaatggcacacttgaggaggatgtttacatgatgcaaccacctggttttgaatcaccacaacatccaactcatgtctgcaaactaaacaaggcaatatacggcttgaaacaagcaccaagggcttggtttgatcttttcaaaaatactctactgcagtggcattttgaaaactcaaaggctgacacttccttcttcattctagagaagccacattatgtcatcatgttactgatctatgtggatgatataatcatcacaggtgacaattccaaagaactcaatctgtttattgacaagctgaatcaagttttctctctcaaagaccttggatctctcaattactttcttgggattgaagtgtttagagacacgactggaatttacctttcctagggtaaatatatagctgaactgctacataaggctgaaatgattaatgtcaaaccaattcctactcccatggtaacaggaaaacctctatccttgactgatggagaattcctcaactcacctacagcctacagaagcataatcggggccctacaatatctcagccatactagaccagatatctccttcactgtgaacaagttaagccagtttctcaaggccccaaccacagctcattggaatgctaaaaaaagggtccttagatacttgaaaggaaccatgcatcatggcattcacattattccagggactcacttaaacctaactggtttctctgatgccgactgggcttgttgcccaaatgacagaaaatcgattggagggtactgtgtttttatgggagaaacctt

SEQ ID NO: 227350 - DNA, 11384 bp, Cannabis indica
tatcgaaattacaaatatacccctaacttaaaaaaaacctttcacttatgtccttctctcctcctccaaagccaaaaacagaaacacatgcgtgctcaataagccattttttttctttttctttcttcactacaaacaattctcacattttcacacgctcacacacacaaagttccaatctttaatttcatttgatatttcaattccaattccaaaccccaaaccccaaaccctagatcttaataatcactcgccccatcttcacggcaccattcaaagtccttccctttcttccttccttccttcccctactagccccccctaatttcccccaccattaccagtaccattactacttctactacggtactaccccttttttccagatctgcttaattctctcaaaccaacctccaatttctgatcccggttccttaattcccatcaatttgctcaattttcgtcggatcggtacaaaatttgaatactttaaaacaaaccccattacgcttttctttcatttttttttgttcccactgaattttgttgaattttggatctgagtatgctttattatagttcttggtagttgtagtggtagtggtagtagtagtgaaaattctgttttttttttccggttcactggttttctcatggcaatgccatcgggaaatgtgatactatcggacaaaatgcagtttccgaacggtgccggagccgtaacaggcgccggcgccggcaccgagctacacagacaatggtttccggacgagcgtgatgggtttatttcttggttacgtggagaattcgcggcggctaacgcgatgatcgactcactttgtcaccatttacgagctgtgggtgagccaggggaatacgacgtcgttatcggaagcattcaacagaggaggtgtaattggaaccctgttcttcatatgcagcaatacttttcggtggcggaggtgatgtacgcgcttcaacaggtcgcgtggaggaaacagcagaggcactatgatcctgtgaaaattgggtcaaaggagtttaagagatcaggtaatggaattggttcagggtttaagcatggagtccataggatcaatgaagctgttaaagatggagtccataaccataattcgaccgttgaatataataatattattaataataacaattcctttgatgggaattcttcgagtaataagagtgaagaattcaagtctgggaatttggatgagaacgacaggtttaactctgatgtgagataaaaggtactttatttcgggttgttaatattatatcatcatcatcaaccatttggggattatcttgttttttgtttgttagattttgtttctttttgggaaagtaaagctttttagatacatacatacacatatatatatatatatataatatgatttattgcgttatgtgaaagctttggttaattgattacgttatcctacccaatctaatccatcttgtgagctggtaagaggaaaagttgcttaaatgattttgagagtttcatttgggaccaataaggaaggtgaaaagtactaaacaaccctttgaagaaatttgaatttgttttaataaagtttgaacgataagttatctgttcttaaatgagttttctttttaattttttacattaaattgctattggcataattcttctttgattttacaaagatgggaagtccaaagctcaataatttagattttggtcatgccattttttcccttaaatgttaaaaaaacagagtcatgaattgctggatttggtttctctgactgggctgaaaacgacggcttgtttgttattacaaaacatgtcattgttatttataagtatgcacctaaaatttatagagatggacatttttgctattgcctaggatgtattacaactactatcatatcttttctatacaaatcatgtatcacatgaaaaaaaaaaattatgcaattaaatgtatacaaagaaatcatacatggttattggttggtggggtattgatatttttgattttggtttctttggcagaagaatctgtaccaaagaatcatgaagatggtaacttgaagagttcagggaattctgaaggagccgtatctggaatttcagaacaagatgttggtatagatgatggatgcacctcaagttctaaaggtaaatattatatctttttatgatatatagttgatttgtttctgtatggcacagttgaagaaatcagaatctgtcccccaattggataccttatagctaattatattgggtctttagcttgtagtctcaatggtatgtttattttctttgagtgatcattttatatcttagataatgacctaccctactctctctcatatgtatatatatatatatatatattatatttgttaatctgtcacacttgtttgatcagatattgtaactgatatctagtaatttttttaaattattttgatcctcatttaatgaatcactcctcaaccaagtgacaaaatgctatttaatttcattatgatcttactgtgtttgttaactaatactactctttgattgttacagaaaatgattcgcaatccagcccaaaccaaaatgagaattcaaatcgtactaatgttccaaaaaccttttttggtaatgagatgttcgacggaaagatggtagtattctatttgtattttttaatgagaagagctttatttactaacttaatgcttactcttcttcttgaaactactggatgatttttctagcttttattaatttttttaaaaaattgaataatttttgtcttctacttctgatctgagatttggttatttgttttctaggtaaatatggttgaaggactgaaattgcatgaagatttctattctaacaatgaagtgtcggaactcttttcattggtaaatgatctgagagctgcagggaaaagaggacaatttcaaggtaaatgatctacagaattaatataatttttctaaatcttaatttatatattacatagaatacttttgtcttagatatagatttgatataaagtttgcatctttttacaagatatgttttacaaggattcaaatcccagaccacacatgcactcacacaaccaactacttagcccaatctcaagtggcatgtagtgttgccatttcattattgttatttttatttagttatgaaaaatgaaggcaactgagagagattcataacactaaattttacatgcacaaatttatttcacaaatattacatatatacaatcaaataacaataaaatacggttgtaagaaattttaaatatttttagtttttaagatttcatttatagtaaaagtgtaagattttaccaaaaatagtattttgggtagatttctcatttatttttgtatcacataaattttacaatattgttagagttttaagaaatatattaaacatttattttctgtattttcaatcccccaaggatttctcaaaatccatagaaggagaaaaatgagaatttgagtaggccaacgggcctttaaagctgatgtttgtatgcaaatgcaaatattaacttgcttgttatggaatgcaggtcagacatatgtttccctaaagaggcccatgaagggacatggaagagaaatgattcaactgggtcttcccattgcagacgctccttttgacgatgaaatccatgcaggaacctcaaaaggtaggacctcatttgatcctcagaatcgaatgcttttcttgaccaatattaaaatttgttgggttttcctttgtttaaaacattgcagaacgaagaatagaagctttacctcccttgctgcaggatgttaccgagcgcttgcttagcatgcaagttacaactgtgaagccagattcttgcattgttgatttctttaatgaggttggttattgtgagattttttgttcgtttttgttgatgtctttttgagaagcatggagtattgtgctaagcaagtgtaattttgtggttggcgatcgtaaagggtgatcactcacagcctcacacatggccaccttggttcggaaggcctatttgcgttctattcttgacagaatgcgatatgactttcggaagagtaataacaatagagcatcctggggaatataaaggcgcacttcggctttcgcttagacctgggtaacgatttcatcctttctttctagagttatttatttgtagcattatcctcattctagagttatcataggccttaaaaccttaaaagagttttatgttggacaagttcttagtacagcgtagtaacagaaggtggttaggagaagcataactgttctgggctaaataagaaaaattaattagagaaaaggtaggatacatcatggttggattttattaaccagaagtcctgatagaaaggcttgacattgctttctcatgatctaaaattgtaacattacagagcagggttaggacagagtaggttggttccttgaaagtaacttaaagaaatgctaataatgatgaattgcataataggttgttgcccttttaaattcattcagtgatgttaaacattggtggaaccatgatctgtaattttataacagcgatagcattctttcatggtcgggcgggatttaattcttgcacacttctcgtgtttcttgttggttttgaaactcattactaattttggatgctgctataaacaatgacacaatatgtgttccctacaacaatgcagatccctcctttcggtgacaggaaagtctgcagagtttgtgaagtatgcaattccttctgttcgcaaacaacgcataattgttacattcaccaagtcacaaccgaagaaatccttgcccagtgatggtcatcagcgtatgccctcacccggtgtgactccatcttctcattggggtccaccaaccattagatctcctaatcacattcgccattctggtcctaagcactatgcaccagttccaaccacaggtgttttgccagcaccggctattcgtccccaaataccacctccaaacaatatgcagccgctgtttgtgactgcttcgattgcaccagccatgccttttcccgcacctgttcctcttcctcctggtacaagtggatggccagctgctccaccgaggcatcctccacctcgcttgcctgttcctggcactggagttttcctccctccatcgggctctggtaactcatcaacccctcctcaacaggcaccaagcaacgaaacaacaaaccatgctgctgacactgtttccccacccgaaaaagaaaatggaccagggaaaccgagccatggttcggccgcttccccaaaggacacattagacgggaaaactaagaaacatgaatgcaatggaagcgttgatgggactgaaagtgaaaagtcagggacaaaggaggacaacacagaaatgagcaattcaaatgcagtttagaaataagggcatacatatatatatttatagagagagagagagagagagagaaagatagaaaaagaatgagagaaagaaacagagagagagagagaggattaattgttggaaggaaataggctgcaaagtgggaatgagtttgaagcaaatgtaaagagcggcaagattgaagacttttgacatgagatgatatgaagcagaggtttggggagacattttagagggaactcttcttgagttgtcattgaaatctcctcctcctctgttcatcttttcattttttctttttttggtacttgtccaattatataaatgaactcttacacaataggtccaaagcacaaccttaatttaatttaatcttcccttcttcttcttcttcttcatcttatttttccaaagattttttgattgatgtgatggtctctaaattaatccttattcattcatctcccacataaatttcatcattcactttctctctttgttcataaagaatgtatgtttattttgattcataaacaagaacatgttggacatcattacaaggatcaccttgctaacaagaacatgaaaagactaatgaaacatgtcataaagtattgcctattttgatcctctggaagttgaaatagaactcaaaattattttgtcaagcttttattagaattgctcaaaagatgatttcttttcgtcttcttttgtatgtgtattgatatgtaatactatattcaagagaaaggatcccatacgacccactgaacaaggtaaaacagagataaaatatttgtttaaataaaatctgtatggtgatccactaatttatttacttgaaaagtaataggcacatcaaaactagagacttaaattacatataatgatatatagtcacacaatttaaatgataacatattataacatttttttatttgaatataaaatgcagttttttattttattttttattttataaaatgtagttttttttttggttaactctttgtgttatttttataataaagtaataatcatatttttttcatcgtccaactagattagtaggaactgatattggcctagtgcaagatgcaaatgttgtctcctattaatttttgggtgtctcatcgataatttaaaattattttagtgagaacatcttggttttttttggcttggtggttagaatcagagaatctccaaatctatattgaccttttgttatgtgttctaatatgattaagtatcataacatggttaatcgtgttatttcttttgtcccaatttttattagagaatgattggctgataatctttaataggtagattttatgaaatgtttatttagtttggaagcataatatgcttctcacttctttaattgttaaaattttcttctatatttttgtaaattgcttgatatgcctattttttttttttatgattttgcactttgagctaaatttttatataatgaattttgtctcatttaccttttaatatttattttttaaacaaaagttcatattttgtttttgcccattttataatgttattgctaatgatgttttaatgaaacttttactatttttgaccatgggttttcttttcacaaatattattttagggtttgagacttttaattatatttctgtttttcggacttactccatagacaaattatagtgcaaatattatattttgtaaaaattaataatcaagactttttatttcgttaaatgataaaataaattttgtattttttaaaatgatactaataagattttaaattgatttttttgttaaaataaaaattattgtctaattacttttttttttctaaaaaaaaattatcaaatcaaaaatttatttttaacttgattttgattttttaaataataaaataaaattttgattttgataatttttgtaaaacttttgatcagtacaaaacatgatacaagtattgcaatgaataaaaaaagaatcttcggatcagtacaaagaaaaaaattgaatctttattttgcgtagtatcctattggctatggtggtcgacgaagggaaagaccccgaggcggaggaggcccagcaatctcgactgatcctcaacaatttcctttcccccaatcaatgcaatgaacttgaattcattcacaagagttgcagcacagtgggttacagacccaacgtcttctccaccactctttctcatctcatcgccaccaactctccccattgtctcacacccttcattcccattagaggtatgaataactattcatcactacccacttctcctttttcattgttttttatgtttaacaacttcaaataccattatgatgacgatgatgagtgaagagaggctaaaggaaaaagtagaggagttcttcggctgtgaatatgaactctttgttgagttcaccggtttgatcaggtttctttttctttttctattgtttggactgtttgctatgtgatgtgatgatggtaataaaaaactatgtgctttcagttggagcagaggagcaagcattgggtggcatagtgatgacaataggccctatcttaaacaaagacacttttctgtgtgtattcattcaagcttgttctaaatgtctcagctttcactttttatgattatatatggtttttccttttgcccattttttaaaggctaattaggattttccttcacccaccgtgtttctaaaacttttcaggccgttaaaatatcctcggaactattaagattgttgaattttagacgtccattcaattttattaatggacatctaatgttaggcgtccgttagtaaaattgaagaaattagacgaaagtccttgaattcgataattttaatagatcaggataatttttaacagtctgaaaagttcgaaggcacgatttggttcatgttaaaatttgggataaaaaaatcttaattagtctttttagatgttcaccctttttatgtagctgtttgaaatatgttacttggggtacttcagactgaatgtttttcccatttctgattgtgaaaggcagtttgttatttgaacaactatggggatgatttcagtggaggacttttccactttcaggatggtgaaccacagactattgtacctttgagaggagtaagtaaaataccctttggaagtgtttgaatgtctcaaattagaaataaggaaagaaataacaagagttgcttgagatttagtttcagttatttgctcattattcacttagcaattctatattttcaggatgttgtgatatacacagctgataaccgcaacattcattctgttgatgaggtagctctctctttagattttcttttgctacatacatagggccgtgatttcgtttgctcattttatattgtggctagaagtttgacattttaaagagtctatttgctcattcaattatctcagattattgatggggagagacttactttggcattatggtttagtcgtgagagttctcatgacgaggatgctaaacttatttccctcctctcagagagaacactacatagtaacaaatggctgccacttccagcatccagtgatatgtattggttttcactggaccaatcttctgaggatcacttgggttttgatatatgctgggcaagattgcatgtaatcggatttgacatactatatgctgaagataagagctgctgctctgatatctcagagttattaatggagccagttcaattagcaagaggaaatgagttgtttgacaaggaatttatcaatatcttgcatgcacttcaggtattaaagtaaagctgatgttgccattaattggtgttacagagattaaaactattttcatttgaaacacttattcttcctaattgtctgcttagttctctaaagttgagtcctagctagaagctttgagctgcagtttagtgttgctcctttgacctctttagtgtttatcaaagcagaattggtaacatggaaagacaattttaattcagttaattaagaaatctgtctccgaacttttacatgtaccaaatcaaattttttgaattttttggaacgttaaaattttttcctgaacttttgagattattggattcaaagacttttgtctaattttacaaatggaagcctgatgtggatgaaattttaggaagcacgatttaatacatgaacaatcgtcctgttagtaaaattgaatggaattggacaaaagtcttttaatctaacaatctcaatagttaggaaggaactttttacggtttaaaaaatttgagaacataatttggtagatgtcaaaatttgggggataaaaattctaattagccttttaaatcacttggatgttttctttgtttcattttttgttatcttgactgatggcatctatgatctacttaaaaagaattgaaatggcagaagaattaaataagtcattataacacaaataagttcttttttgagtaattggattttcttttggatatcccttcagatgaaagatatgcatgtttttttttacttccacagcttgtaatctgagggtggcttagtgttgaacttggacaccattttccatcttgtaaatttctctttaaattatgattaacaggttgtgcaatactactgctggaaagcctccgaagtggaagcaacaaaggttgaagtagaaaccagcaaggtgttactattatcagaattccagcaacacagaattagtagccttaagactttgtttttgaaggataatcacctagcagagacggtttttcgtcgtgcaacaccaacatgtagtgaaagtatgcagcagagtttcgattggacaaagttcgctgctactatcgcaatgtgggaaggttacgctcgcgattgttacgagggaatactgagaagcttaccatattggaaagtacaagagtctatattcaaggtgtcatttgataagatgtaactggtacgtacgtctacttgttgctctttattagatttggtaaggaaactgttatatgaactggtacattatgaatcaaacacatgtttttgaactgttatatctaagcaaaatatgttttctatttggggtagtggggatgttaatgacaaagtagttgttaatgtgagctagagctggaagagggcggtgaagctttcctcgcgcttagctagtttggcttgtgccagtggatgatattcttcttcattaggagtagccactgagcattatcttatacttacaaacagaatcttgaaaggactctacatctgttcatagattggtttaatccggattttcatttttttttcgaatcaaactagttttacggtttttgaaaaattcaaaaaccaaatcaatccacttaggaacagattaattgggttcgactctgattaagtttataattcataaataacaataaaaaagtattcttaaaacaatatttattctactcaggaaagattcttctcaaatatcaattatattatgaaaaaaaaacatatgaagtatatataaaagtattcagttgtttggtttggttttaaaagctgaaattctaattctgtgactgaactagagcattacaaatggtctggataaccaaactattgacactgaattcatttgattcggtctctaatgtttcggtccagattagttggggtttggaatcacagattacagattatatcaacatccctactaatctaatagtaactaatcaccttctaccttcatttgtaacataattgcattattcttcctctattagaacaactatataaaccacatttagtaatcagagagtgattttctctacatagatgagtgcaaatttttgtagaggctgtctttgtgcaagacattcccgaagatatcgtagaacgaaaagttggctaccgtctcggttat

SEQ ID NO: 227351 - DNA, 1505 bp, Cannabis indica
cactcttactctttgtgggccatacttggtgctcttttgggcatcacccaatataaaattaggtcagtctaccctaatgcatgacctaaccatggcaataaaagacaccaccttaaccataatgagtgatacccaccactattttccttccacaaagttgagtaagctatcaatggggagcccgctctactgatattttctttagcaaagtggagaagagctctttgactggctacaaccaaaaagatgagacaatgttgttatgagtacaaatttagctatcattaaggcgtagactaaatgaatttgtgggcaagcaaaaaaaagttattaggccctttctctttcctttttgttttgggcttttttaactttactgaacctttctgcactggtcaaagtcttggtgctctatcatcattgggatctcaactgctttttccaaactgtttcatactagcagacttgttttctcccattaatcatgttcaccaggttattttaaagctttaggaaacttagaatatattaccaaataagcacgtggggagcacgtgtgtgatatgttattgatgttaccataaaaatatgtggtgataatgagcctatctatcgaaatggcaattacttgctactactatctttttctgagacagtggtgaacaagtttcgatcataactaaagttaaaaagctattaggggcttgtgtagaaagccagcttctctaaaagaattacaaaatcaccttgccacatgtatatgatgatgacaacatatataatgtacacttaaatgtgagaaaactggctactgcaaaaaattgaaatgattgtaacatatcaagtattctccaccgaaagggaaagaaaagaaaaaaaaaaaaaaaaaagaaccaaaaactacgtaaaaaatcactttcattacttgtgtgtgctcatttgagtcatttgatcatcaaaattaataattaaatgcaaataagcagtatttgcttaatatggaattaatcaagtacacgtacatttccagggaaggttcgttccccaatgaaacaattactggaacagtatatatgtatttcatttattcttagtatatgagaccgtggtccaggtgaacaatatagaattacttctttttcatcgctataaaacaatatgtattaatctagctgtaatttcttatattttagaggcatcagccgtgactcggctcaaggcaatagcagtctttgaacctgatgggcgactcagctgcttgctgatgaaatccccagccttcatgagcttcggaagatccacatttgtcttcactccaagtccattgagcatgtatacaacatcctcggtggcaacattccccgaagctcctttagcataaggacagccacctaagcccgatatggaggaatcgacagtgctaattcccatctgttatttaagaaactcgattctattaattaaattaattgcttcacaacttcaaaaatataatttcagtggca

SEQ ID NO: 227352 - DNA, 2838 bp, Cannabis indica
tttagataccgaaataaataaaagtgtatcaaaacatctaaaaatgtattgtaaatttacacaataatatatacatatattaaaatattcatatatgatagtaggtataggatcaaatcaactatctcttttgttaaaccaattattttaagttgaaatttgagacataaatatctttattatgaatttatttactaatcaacagtaatgtatatgtatgtatattatataaaattattccacctcccgacatgggccttccatttcttaaagaaattattatttaaagtgggttggtttgatatatgattattatacctatttatttatatatttttagaaatattttatgtatattaaagtatatatttttcactttcagttgctaacaacaaaattctcctccaaatggggccaacaacatgtgcctgtctttccaaatatgtatataaattaaatggtttgaattcaattgtgttagtattctaccaataatcaaacatgtgcatgcaaccaaaaattgaaaataaataaaaccatggacttctgattcttaataaattgcttaccaatttaatatatttttctttttgaaaatgtctgcatttaagttaacaaaaagagagagagaaagagcaatggattataaattaaattaattattctctttgttattattttttatttaagaaaatgaattaatgtttgtgtatatttttatatgtatagttgaagccgttgaactagagcatctgataccaaatttttaatttaggaaagccgactgccgattggttcccttgcattattcaatgcatgtgtggaaatgaaaattaattagtaaataaaggtattacatttatttatgctttattataaataaatataattaccatatatataaatatagcaatatatatactctttgaatatttcataataaaatgtttattctttttcttacaaaatcaaataatcaagtccatcagcatattttgaataaaattatgactagaaatataactaataattctattaatttaaatcacaataataattttgaaaattttattatatcattgtaaaattattatgtttgataatgtaaccaattatgtaggttttacgtatcgaaattacaccttcaacttttaatatgaatattcctacacttataatatctttctaatttttagatgaatagaataaaataaaaatagttactcttttatttggtgttattaaaaatcaaaataagtataacataatatttgaggactagccagtaccttattatataaaaaaaatgttatgtgtaaacactacaagatttgacatatttttattgatacattttaatatcacgctctacatattttaatttaataaataatataaaaaattactaatcaattataaagcgaaatgctcagcttaatatatatgattttggtaactaaaataatattgataatataaaatatttgtttcaccatataggaattggacgtatacataattactaaaactttttattttagatattaattattaaatattattatttttctatgtaattatcacatcatcacatctaaatacatattgtatgtatttaaaatattaatgtgaaattattaaaagatatataaatgttaagtaattacataataactttcaaatatgttcttcaatattagatttatagctgttaaggaatagcaaattacctacagtgcacctctgttctatatcctgcaccagcaacttgttttccatcagcatcagcacgtgtgcaaattccttctcctcaaggattgctgacctgtacaattctgttaggatttatgattgtgtaatcattacaggatcaaggttgttagaatattctctctgtatttgtgtccagctgtattgagccgtttggctcctttctctgtattcatcttttcctatataaatgaaatactgagcagccatttccttgagctgcatttactaaatacaatacctgcatatatttaaacttggtatcagagcactcaggcccgtgccatgtctacccctaccaatcaagatggaggaaacaacgcagctccgactgctgcttctgaagaaagctctgcagtccagggacctacatccaacagaaatggtggttcgtcttctcaaaacacacacacacatcttcctccactcacaaccctcaatcagcccttttccctaaaactcgatcgaaataactacaccctgtggaagactatggtttccacgatcgttcggggtcacagactccatggccatttaaatggcactcagccatgtcctctggaatttctaccaactgaaaccgtcactgtcgatggcgtctccagagaaatcatacaagttaaccctgaattcgaacactggatcattaatgatcaattgctcatgggctggctttacagctccatgacagaaagcatagccaccgaagtaatgggctcagcctctgctgcagatttgtggcgtgacctggaaagcttatatggagcatactcaaaatcgaagatggacgacaccagaactctgattcagacggttcgaaagggatcgacacccatgacggaatacttaagacagaaaaagaattgggtcgacatactcgcgcttgctggagacccctatcccgaagcacaccttgtggctaatgtgctatcgggccttgacgctgagtacctttccattgttgttctaatcgaagctcgacccaaaacaacttggcaagagctgcaggatattctcctcagctttgacagtaaaatcgaaagattacagaccttgaactcaaacaac

SEQ ID NO: 227353 - DNA, 2243 bp, Cannabis indica
ccagctcgatcgctcgagtggttgaatcgagtcacttggttaacccatatataggtgtggtgcagggtttcaagtcctctagttccaatcccatcgtttggaaggttgcatagtataaggtattcattagcttccattgtcgactaaggttcgatccacccttgtgttggccaatttgatggtaagcaccaacgaatcattgtgggggaaatgcacaccagttgcatcttgtccagtgaatgtaactgagtcattctctcctttgaagctcttttgtggtctttgctctaggcttaggactagtggttcttgccttgcctcttgggtgtatctatctcttcatttgcgagtatcctctctgatgctcagtcttccaatgacggttttgaaatctctcaatacctctaaagcttcatcaagggtttctcattggtgcatatcttgcgcctttagtcctctccttgattttctcttcgataacctcccaagtacccccactatataagctcttcgatttcgaccttgaggtgcttacactcctccatgaggtgtttgatatccttatggaaccgacaatacttgtttaggtctcgcttggccctatcctttctcaaggatagcgacttcttgaatgggacttgatgctcgttggtcaagaaaatatgttctcttgagcaattcaacatcttgtagtgcatgtatttacggtgttgtgccttcgcttatgtttttgccttctttctccgatcatctccttcatgcccgaactctcttttcttttgtggttcgtcttcatgggttctcttaaacctctagtctttccctacatcaagattttcatgtccatctggatgtacttcttggctctctcatagaactcctccaaatcatccagttccttcttaagcatgttgttccataacttgcttttagggcggactcctctagctatagccatcttgtgttcatctttggtcagattcccgacttctgtccttcggagttataatgttagatatagctttttaggtcgttcggttgtctcgggaggcatggtgttgagcgaagaattcatcagtaaattatttccatgaggtgattgatttgggttccaaccgcttgaaccacttgtatgttgcgcctctgagcgtcactgtaaagcaatgacatcttgccttgctagtgaccctctcatcttcattatttgttgaaatcatccaagtggtactttggatcggtaattctctcgtgtggtggcatgttaggttctttgaaatcggaaggaagtggttcgacttgaatttcctataagaagggtgattcatcatcaaagtcgtcctcattccagttgcactctttggaagcggtcgacaatatcctttgtcggagatcattcatctccctatcaagctcttgtctttttttgttcaacttttctcggaggtctggcaatgagtgctttggtccttctttatggtaaggtgtaatcattaaggaaactctctttttgacagtagccttttggttgagtttctcccttaaatctccatggatcgtcttcaattcggacttctttggtcgcaatgaaggttccaggtctttttgagattcagcttttggtggtgaagattctagcgtgttacttatttaatatttggacattcccccttcccttatttcactcccacctttcttccttacttatggctctcttcacctaatcaaaggtgcctcggaatgaccttttaggagttcatcaagcacttttggcatgtttgcaatgatttctttcagccgtaagttgtttgtcctcaactcgttcatctcctcattatgaatacgagttcaggagcttgaactcaccgagtaaacccatttctcttttccatgttggtggtgcgaggttctaggattttttagtattggcgacagtgggcaccttataggcgacagaactcgtttgcctttttgatccattttcatcatcaggtgtgacagaagcagtcaccccatctcgatgcatgtccactgggacctcctcatggtggttgtcttatcctcttgcttgagatcttcgaccattaacaccttcttctcttgcttaaggccttttatcgttcacaccttctactcctgcttaaggcctttgatcgttcacaccttctttccccaatgacgagtggtggcaggtcttgccttgaagcgatcagttgagtgttgtttaggcgaacttccatactttt

SEQ ID NO: 227354 - DNA, 5128 bp, Cannabis indica
atggaatttgttatttcaatcggagccaaaatagctgagtatacagttgcacctgtgggtcgccagttgggttatctgcttcgctacacaagaaatgtagagaaactcaaaactcaagctcaagatttgaaggatgccaaagacagattgcaacatcgtgttgaggaggcccggaataactgtcaagaaatcgaagctgatgttaagagatggctgagcagctttgatcaaatctctgaaaaagttgacacatttctcaaccacgaagaccatgcaaaggctgcttgttcttgtggatcccttcctcatttggtgactcgacatcagttgagtaggaaagcaaagaagttgttaatcgaggaggtattcgtgctcacagggaaatgcaatttcgatacgatttcttatccccctcacctacatagttcgtctacagcaatagcaacaacaacaacagcagcagcaataacgaaagggtacgagagttttgattcaaggagagtcattctggagaacataatgggtgctgtgagagatgcaaataggagcaggatagggttgcatggaatgggcggacttggcaaaactatgcttgccaaagaaatcgctagacaagctaaggaagagaagttgtttagtacggtggttatcaccactatttctcaaacaccaaacataaaagagattcagcaacatatagccgaaaagctagatgtaacaattttcagccaaattgaaagcataagcaaaagagcagaagtgctacaacaacgactgaagccggaaaataggattctcttaattctggatgacatttggagggaactcaatctagaagaaattggaatccatgatgggtgcaagattctagtaacctctagatatgcacatgttttacacaacatgggtatggctgagagtgatgtgttcttattaaagctttagagtcaagtgaagccataagtttgtttaagaaaatcattggagacactaaagttgagaacaatgcatattacaatgctctagcagttaagattgttgatgaatgtggaggcctaccaatctccatttcgactgtggcacatgctttgaaattcaacatggacagtttgttcatgtgggaggatgcgttgcaacgactacagagttccaactttaccgggattggggagatgcgtgacaaagtctacttgagtataagattgagttatgattttctcggaagacatgaggaggaggccaaatcattgttgttgctgtgtgctttacatgcggaagatgaagaaataaaagtggaagagctgatgagatacagcattggttggaacttgcttcaaggagtgagaacagtgagtgaagcaagaaacagagtgaattcattggttgttaaattgaaatctcattctctgttgttggatggtacacataaaaatgatgaagtgaagatgcacgatgtgattcgtgatgtttgcatagtaattgcaaagggagatgatgatcatgatgaccacaagaatattaagaggatgaataacattaccagtgttgcttcctatgaagaatttgttatccacgaaagacataaatcatctaaagcaatttcgtttcttgactatgatgattttgataatctccctcaaacattagaatgtcctcagctagaattacttcttctatctaccgggtctaatttggaattgattccagatgagttttttgaacaaactagacaacttaaagctttgatttcaaacaatacatatctagaatcactaccgccatcctttcatttgcttcaaaatctccaaacattatgtctgcgcgattcttgtctaaaagacatagccatgattggagagctaaagaatttaaaagttcttgatgtgtcctggtctgaatccatagagcggttgccaaaagaaataggagcattgcagcgtttgcaagtgctagatctgcgaggatgtagaaatttaagagtgatcgagccaaatatcatttcgaatttgacacagatggaagagctctatatgccacacaaatttcagggatgggataagattgaagaaggcggaataagaaatgctagtcttattgagataaagagtttgcaacgacttacagttttatatttatctgtatcaagtgaacatgtttttcgagaggaattgtttactgaaaaattggagagatacctaatatctattggaggtggattttcctccgatttttacacaaacaaattttcaaggtggttgcacctaaacctctctcaatcggatcaaataatacatggatgtggacttggatcgctgatgaaaaggtgtgaacatttatcattacacagattaattgatgtcgccaatattgttgttggtgatcttagtgcagagggatttccaagtttgcagtcattgaggcttagccagatgacaagtttggaaaggattatttgtcatggttgtaatgaactcccaagagggttcttcaatgaattgagaagggtggatgtgtggtcttgtggtagattaaagtatttgttccctttgtgtgtggccaaactaattcatcatattacaatacgaaaatgtgagatgatggaagagatcattgtgagccataacattcatattgatcatcactcttcttctttgcaattacgctccttggaattatataatttaccaaacttggtgcaattctatgattgcttcaagttgaaaccaactacccactcttcccctgctttattcagcgaaacggtacacttctttctactatttctttctttttcatttaatttgccgaattatattgtttatttatgtgaatctactacagctgttatatttgcagctttccttttctatgttggaaaagttgattgtgtcgagattaaacataaaaaagttatggccagaccaaattatggtatcatcatcaacttcttacatgcaaaatttaacaagcttagaagtggaagggtgcaataagttaaagtatctgttctctttctctcttgctcaaaagtttgtaagcttaaagagtatacgagtcgaagattgtaacgcaatagaagatataataagagtagtgaaacttggagaagaagaaagtattgatgatgatcatgatcagatattggaaaggattgatttgttccctaaattagaatccgttacgcttgttaggctttcaggcctccaaagattttgcagcgcaacaattccatcatcgtgtatggtatttccactcctatcagagctaatcatagaagactgcccaaaactcagaacatacattagctctgccacttctaattctatgccaacacatgtacctgttgaccatgttttatcaacacaaactctcttcaatgaaaaggtaattatttacttaattaatttaccttaacatattaaacataaatttattaaactaatataaatatgttttcaggtttgtttttctaattacatggagcatttgattgtggagggagtgaatacaaaagagttatggccagaaaagactctatcaagttattcttacatgcacaacttaacaagcttagaagtagatgaaagttgcaatagtctaaggtatatgttctcttttagtgttgctcaaatgtttgtaaacctaagaacattaaaagtcagtgagtgcaaggcaatggaagacatagtagtgaagcttggagaagaagaaactcagttacaaaggggctttttccctaaattagaatctcttgagcttaatggcctttcagccctccaaagattttgtgcaacagattcatgtatggtatttccacttgtatcggacctaattataaggggctgtccagaactgaagacatttgttagctctcccactattgtaccaataagacaagtatgtattgaccataaagaagagaaacaacttaatccatcaacacaacatttcttggccgccgaaaaggtatctaattaagttgggtatattggggttccatagcccatctttttatatatggcttaatattttgaattgaaagctcactaggaatatagctcaggtgataccatgttgaaaatatggggtttcatctcaaaatagcctatgttcttatatatggcttaatatttttacatttaattcgtgtgggacaatgttcttaagaaatgaatatggtggggagtcctaaacaaagtctcctcttctaatttttgttttgtttgttttgtaggtaatttttcccatgctaaaggtattgagaagtgattggagtgaaggaattaaggagatatttgagatgagtagtaattcaatagtattgtttcccaaccttgatacacttgacttgagctgcacatctggtgatgaaccaattggtgtaccagatttgaagttattcttatacaaatatcatacaattcgtacacttacattgtggggctcctttgtgaatgacgatggtagcggtgatattactacttctacttgtaccacttgtttggagaaactatggattaactatgctgatatgcttgatcatgtgtttggggaaccattacatactatcgtgtttcaaaatctaaaagaagttgtagttggggattgtaaaagattacagacatttgcagccccctttatgtcgttccacaacttggaagctctgacagtaatgagatgccatgagctgaggtatttattgtcttcctcaacagcagccagtctgcttcaactgaaaaaaatggtaataacagattgtgatgaaatgaaggagattattattaatcataatggtaatgaagaagaggaagaagaagaagactccctaattgttttccagaatttggagaaactagagcttgagcatttgccaagtctcgaaagcttctactcaggaaataaagttatcctgagttttccaaatttggaagaaatatgtatcaagaaatgccctcagatgaagagattttcgcatggtgtactaaatatggggagtcattttgatacaactgatcaaacaaagtttttggaggaaatttcggccaatttggatgaatcggtaatttcatttactaacaaccccttcttttatccatatgtatatcattctttctaagtatggaatccc

SEQ ID NO: 227355 - DNA, 3321 bp, Cannabis indica
aaaaaaaaaattatgagcatttttttaaaacaaaatttattgaatttttatgagcattttgctttttggaaaaagataattaatattattgaaatgaaaaatgtgggaggtgatttaaacttggatctatttttttattagaggtaactaaatttaatgggtattcagctatacatgaagggaaacaaaaaccattttatttttcatatactaaaacaattatatcaaaatgtatattcatatattaaaaatttgaaaaagaaaaaaaaatagtctttatatataaatataaataatgtaaattaatttgtctttggtttttgtctttcaaatttaatataaaattgaattttattataacttgaaaagtatagtctaggtatgtgttgataatattatataatgttactttcatgaagaaaaaataaataataagtttagataataatgactcaaagagttatatctttacaaaatcagtctatttatgtattcaattatttgaagtatattattcgtttcacatatgaagaaaataaattaatattaggaattagtgttaaacatagtaagttactattttgggaaagtaattaaggtctaagatataatagagattagagatagctatagtagtggtacaagtgcttcttaaaactcatataaaaagaaattaaaaaagtaataataaaagtaaaagattccaatcaaaacgtgtttggccacacttttatttttcttgagagggattgtttggacaacacttcacctactaccaaacaccaaatattgtctcaataatttcatattttattttatatatttttaaatatgatgagtgtgaatgaacaacaaattatgatgtaggtgaaaattaatgaaagggaaatattaactactatttaccaaatcagcattgttattgggtagtatcagtgttgttcagtatattttataagtgacgctttataaggatagtatcaatgttgtttagtatattttataagtgacgctttataattaattaatgatattctttaaaagttatatgagactcgatatttaattacactaatagcggtatgacattaaaaaaatatattaaagaatagtaccttttatcatttctcttaccaaattaatcattttcactagttttaactacatgtattttttttttaataaggaaagataaaatcatcaaccaaagtcaacaaatacaacttgacttgataatgacattgtatttgctagtagaatctatatgcacaaactcaaccataaaattgactaattttcttatttagacttaagactcattattaattttattttttttttcaaaaaaaaaagacaataataataagtgttagttatgtttggtaatatgtattaggtatcacttaaaagatgcagtacttgatggaggaatacctttcaacaaggcatatggaatgacagcatttgaatatcatggaaccgatcaaaggttcaataaaatctttaatagaggaatgtccgaccactcgactattaccatgaaaaaaatcctacgaaacttacaagggtttcgagggtcttaactcgattgttgatgttggtggtggtactggagctgttgttaacatgatcgtctctaagtaccctactattaagggtattaacttcgatttgcctcatgtcatcgaagatgcacctccattgaccggtaagaactactacaagagtctcgaatatacaaaaaaaaaaaaatattttattaattttttgggtaataatttgagttagaaaatatgaattttaaaactaataaatattgtttatggttattataataggtgtagagcatgttggaggagacatgtttgtaagtgtaccaaaaggagatgcaattttcatgaaggtacataattagagggttttcaaaaatgacattttctttatttcaaaattacaattttaccataaaatgtattttttatttcttatgaaaagtaaaagaaaattatattgagtgcaaattttttccaaatttcaaatagtttatgtacaatatctcaaactttagaaaaatatcactttctaaacaataattacaaaaataccatatttcattttgggcctctaataatgccgttttcgcgaaaaacagtggatttgccatgattggagcgatgaacactgcttgaaattcttgaagaactgccacgctgcactgcccgaacacggaaaagtgatcgtggcggagtgcattcttccggtggcaccggactcgagccttgccacaaagagtacggtccacattgatgtgatcatgttggcccataaccctggtggcaaagagagaacagagaaagagtttgaggcattggctaagggagctggctttaaaggcttcaaagtccattgcaatgctttcaatacccatatcatggaatttctcaagaccatttaattcataatctatatatactatacatatacttttgctatattttggtttggatatattctctctcattgtggtgaatttttctattttgacaaagtggggtttaatgtatgtttttattaacacccttgaaaagaaaaaaatgaaaaatgtgttactaaatttgcttgtaatttgcaaaaataaaagttaaatgaaatattccactgaaaatttgagttttcatccaatcaaataagttgggtttttggtattagatagaattataccactttgttgagtttcaagttgaaaatgccacactttctaatacattatgcaaataccaatttattagtttaatattaaaatttctagtatgctttggtaactcaattttcgaagaaattacactttatacttattttttattttttatttattttactattctttaatttatacaaagttttatatgttatattcccattatgtgtattaggaattctaatttcaataagttatgtgatgttatatttagtactttgattatgaaaaatggtatttattaattaaaattattttggaattatatttagttaatataataaaaagtggtagttttcaacttatccctcaattttctatataattattgggccaagttgaaaaatgcctcttttattaatcaattaatcaaatttacctctaattttatatttatttgaaacatacctctttttatatgtattgtacccaaaataccctgacataagagaatcacatagagagtatcttgaagtgacagggacaaaattggtacaatgttttaaaaaagaggtaaaaatgaaagaatttaaaaaagaggataaaaataaaagaggacaata

SEQ ID NO: 227356 - DNA, 3322 bp, Cannabis indica
atggatatcactagaaagaacattggatttttggaaaattaaggtgatgatattctactttttgggatgttatttttcatttttttcctgtgattgtaatttttatgacttgtaatttattttcttaatggtatataatttttcaactgaattagatagaaggattatactattccaattgatatattttagggatatttttaactacacttataaattaaggggcattatagtatagtgtcataagtacaggaactaaaaaagctaattattcaagggccaatgacatttaaagaaatttacactggtcctatttttcaccgtcaatctcttcagaattgctctatgccatggagatcaacgacatctttctctctgcgcatgtcccaatcattgttgcctttgaatgtgctcagcgactcgatgacacatgtttagggttctcactctttcacaaatggtttattcgacgaggctagagagactagatatgggtcttggactcaaggtatcaaatttgctttcacactttattttcaatgtgttgtaatttcacattttttacatgttttaatatctgatttgaagggttgcataaatttttatgcatcttcaattgtgttcataaatttatatcgcctttgcttacctgcgtggagatttgttcataaatttatgtaagtgttgtaaaatcttacacgtgtagagattttttgaattcattttggcttttactgaattacagagttacagaattaatctttttggttatgaatttactctaacagggttattcattcgcttttcgtgattttgtttaattggggaaaaaaattcgattttgataaactgatgatgtgttttaagaggtatttctttgaggaggagagagatcaaagatgaaagtgaatatctcaattaggctattgagaattagatagaatggtatttcatattgcttgattctttcattttgatttagataaaaaaaaattgtatgtttgaaacttgagttttattatacagttttatgaatcttgcaggttgagtatgatcctaagctgattacattcaagcaatttgtggaagttttttggtctagtcatgattcgaggctagtattttcttacttgataatctttatggtttgatttttaatgtcttagactgatatccaactgatgttagaaagacaatcgttcaaggaatcagcctagaagctgatctagtaagcatccaagccatgatccatctattatttacaaactaaatgtagcttcaagtaatagcttgacatacaaatttatttttgacaggcactccccatcttggtttctattttgttaaatttgttccttttttttttccttacacattttacagagcaacatgtatggtgtaaagatatatgcgttcatatttataaatgtttgtcttagatattcagtggtagtattgttgtttcttagtatctcttttattggttgttgttgaaaatggtatacatttgtgttaggtcctttaaaagttccataccattttcattgtcatttgaatcaaagatgaggaacatttctgtcaattcttattatttcttttacatagtaattatcaaaatttgtttgtagtagcagatttgacatatatttttatatgaaaaataatactactgtatgatctgtttagtttttcttgtaattttatttttattgtgttaactcttacttgtaatactaataccttttcttgtaactcttattaatatttgattggtggttttgtgtttggtgtagctatgctggaagattttttgttaggagcacattatctttatcttagctactaccgtatcaaacagagcaagttgcagaagaagacttatttggatgaaaatgaaatcattacatcatcgggcaagttgtaaaatattgaagaaatactagaaagtagggttgtacaaaaaaattcgtaaattgtctaaaccgaataatccgtctaaaccaaaccgaaaaaatcgataaaaattacaagccgaaataattcgaaaaaattacaaaccgcccaatctgttaactgggcaggttgaaaataggtccgatctacagatttcctcatcctccaaaacagcacactcatcctccaaagcacgaacaccgctgacaacaaaaacacaaagcaaaaacactcagattactcaccacaccactgactcacctgcaaggttttcttttaagtataaataaataaatcaagattttactgctatttatcttaaatacagcattcttaaaatctatagccaacattatcatgttgcataattgtgagtggattaaaggaaacaaatttgtgtcaaatacataaataatctacaccaaatcatcatcatcataagaaatccaaagcacttactcctccaataataagaaccattattttcccattgttactactgttattgcttccccagttttgtccatcctctgtaattccatttattaagaaagtgacaatgaataaaaacttatgaattgatgattaaaaagtaaaaactggtgttataacacaccagatatgctatgaggataataagaataactcaggagtcttgtttacacaaatacaccacactcacagtcacaaagcttctatttccacatcatgagtattagttccattctcccatttgaaggatatgaaacctcagattttcttttgtttgtttggagaaaaatggttggtgtggaatccgaatcatattgcagtcgtctcactcactcttcttcatgtgtcattcattcattcaaattaagcaatttcataaaacaaaacctctaaaacaaagccaaaataagtaaaataaaaaatccactgaagccaaatcacatagattgcgacacaactaagaaaaacattcaatgatgcactactacagttacactactataatggctcaacctttgttttttcttctgtcttctcaacacaattgcaaaacatggctactctctccacccttctcttcttcttcttcttcttcctcttcaaaatccactctgccaccatctccaatttcccatgtaacccacctcaccatagctcctaccccttctgcaacacctcactttccatctccgcaagagctcactccctcgtttctcttctcacccttcaagaaaagattggtcaactcaccaataccgctgactccatccccaggcttggtatccctccctacgaatggtggtccgaatctctccacggcatcgccaccaacggcccaggtgtctccttcggcggtgtcgtttcgtctgccaccagc

SEQ ID NO: 227357 - DNA, 1982 bp, Cannabis indica
ttttttttaaaaaaaagccatattgtataaaaatatcatttgtataattgaatattgttctaatgaatattattaaagaaattttggggctaaagtacatgtggtatgtgaccaattggaatggtattttgtgggcaactttgtgggatgtaactgtagttaggagctccatcgaaagggttacaaatagttacaaatccagataaatagtcattttctgctactccaccatcaaatccaagcaatttatagtagtctggtattttagaattcaactgaaagtagaaaaaaaaagtaaccaacatattaatacaaaataaaataaaataaaataaaatggagaaatatataattaattatgttaagcaattaattaacctgagttatgaaagtgtgcactatgtagcctatttgggccatcattttattagagtaagatgaatccatgcatgggagcattgtgcttagactactcttttctgggttattcaaaatctttgaaagcataacatgtatcttctgcaaggctgtacacatagacatacataaatttgtgtatagctaattataattctgaaaaaattaaatgtatatatagagagtagaagtacactcacgtgtgaaggaagaaatcaaagcctgtcaaaacccagagtagtgttgttgatatccagcacaaaaatattaaactgatcgtcataatgttatgagacaagagggttatacattttatatatataattaacataaaattagaagaaagggataattatataaatacattttgtatgtatataaaattctagaacttacaagacaaatgctgggtaccaatgaagcagaatgagaactgatcagccaaattaagcagcaatccattagtctaaccatgttatcagattcagcagtttgtttttttaatcaacaatggtttgggtgtttaaaaaaagagtaatgaaatacatgtgtaaaatatacatgcacatatatatagtaatgtatcacttgttttttaagtgtaaactcttttaaaaaaaaatagcataattttgaattaatttctataatttccaattccacataacataagttgaacatacctaatgcagcggtgattaagaccaagttggttgccacaaccacaatatgtgctacataactacaaattaaataaaagttaaaaaaaatgtgtgcaataaaagcatatatatataagattaattatatgtcacgcgaagaatatgaaaataaaagatctgtgcatacgaaatctgaatagctcgttcaatggattggccattcttgtcaacaaaatattggacaattcttgactcacttcctaatcgatgagttgtggtgttcaaagttgaagccatagttggatcgtaagccaccaaaagatattgcatatgtgtcattgctttcattacatgttttacggctccttctaacctctcctcctacactcaatatggttccctttaaattttccattttcttcattgagctttggtttgctaacagcaccaaacttgatgacccctacttcaaaaaacaaaaaaaaaaccaattatatttatatatagatattacgtacattatatgatgagaataattgatatgggacttacatggcaagaatggtaaagaaaaggatcatacagaaggttagaagatagtaattatccaataagtctttaattggccaattgttcatggtcttatgcttcacactcatgaaaattcctattccaatcccacatactaaccatactcctgcaattgcatacccatgaactcctgtaaatgccgtagactgaaaaaaatgagaaaaattaaataataagataaaccaattattatcaattttttctgttattctatgtatatatatgaaatgtcatgtgaaatatatgtatatttgaacaaatttaaaaaaaaaaatgaaaaagaaataaatagaaacgcacagcccagtaatg

SEQ ID NO: 227358 - DNA, 2886 bp, Cannabis indica
aaaaaaaaagtaaaagttattattatcacaattgtaagataaaattaaattattgcaataaataaataaataagcaccatgacgatgatgatgggcgctttcatcgtagagactagagcgactctcgcggttgtaaagggggcgatacattactcgcttgctataaattttaaccgcatcacagttaaattttaaccacaccagagtttaactataaacccttattatttagaaccaggatatatacctatatatataacagagcaacccgtctttcccaaaccagtttcttattattgcttgtccaatatgatgatgggagaaccaaacccctcaaatcccaccgtccgaattcctcaatgggacccatatgaagatccaatggccggtggggtctcatcacctatttccgtcaacagtaatgccggtaccggagatttctatcatttattggagaagttttcgtctctctaccgttaccttccctcgaacgagttcttgcatggtgagtctgattcgctgggtgatgagttggatgttcatgccgactctttctcttgtgaccatttccgtatgtttgagttcaaggttaggaggtgcggacgggcgaggtcacatgactggactgaatgtccgtttgcacatcccggagaaaaggctcgccggagggacccccggaaacaccactattctggcatagcatgccctgagtttcgtaaagggaactgcaggaatggcgactcatgtgagtttgctcatggggtttttgagtgctggctccaccctgctcgttaccgtactcagccatgcaaggatggactgagttgtggccggagggtctgcttttttgctcatacagcggagcaacttagggttttgccacagcagagtccgagggcaaatgggccttgcgagtcttatgatggatcgccgattcgtcactcttttctttcgtctccgcctgtgtcaccaccgtcagactcgccaccggcttcaccaaatagcccgaatgaactacttgcctcgatgaggaatcttcaccttggtaagatcaaaatgagttcttcagctccttggggtttccaaatgggatctgggtttatctctccacgaggtggttcgatgctccgacccggattctgcagcgctccttcgacgccgaccccaaaccccatcacgctccagctgggtgccatggatctttgggaccagaccttcgaggaggaaccgaaaatggagagggtggagtctgggaagaatatccgagccataatgtacgctaaactcagtagggagaactccctcggccgagacgactcagcagctgcagcacctgacgttggttggatttcggagctagtgaagtgaagctgagtgtttattttgactaaaaaattttggggtttaaaaaatcagtggcctttgatctttctaactcttgtgaatatttcctaattaatttcgagttttcttggtgtatagtcatgaaaaatcgtcttgaaaaaaaaaagaaaaaaagaaaaacggaacctttgtatagacactaatggattttatcagtgctgctgatgatgatgatgatggcgtagctttttcttccatcgaaatttggctatgaaaatgttttttcctttttaaattaatatttaatgtctccaaaacaatgtccattttgcttgttaatcgtatgttgtcgcttgtcatgaacattgttcttaactctttaccattttctttctttcttgttctataattatctgttttattataattaataacagtagataccctttgaatattaattcaccaatttacgtaatttatttttatgtttgtgaagatgatgctaaaaaataccaaaaataaattgttcaaaaaaaaaaagaaaatactagaatatggaaaaggtttgattttgtttttcttcattcgtaagattaaaaagaggatgtttcctggttcttaaattagattctcttattcactccaatgcaatattcgtttgggcatatatttggtatcataaattaaattgcattcattattctttattttgctggggccgggaccttattcttaaagcttaaccagaagcctaaaataatgagttcaaattttatattatattatattataagagttcatataaatatataagtgtgtcttatatattacttatctttatactctctctgccagtaaattagttttagttttgttatccccagcgtctgttaccattctcaaaatccctcattcgtccatcctcacttacccgtgcatctattggtctatttgctttccaaactttttccacacctctctaaagacaatttctctgcaatcacagcttggtttttctctgttttgtgtcttacttcacactctttttgtctgctcaatggatgatctaacctcctctctctctgttgctctcaacttaacagaaactgaatgcactatccaaaccctccatgatcacactcctgcaaatacccctgaaaccgagcctcaacacacgcctccttttcttgttgttaaagtgctcactgtcaagtcctacaatcggaagaattttatcgaaaaaatgacaaagaattggaatcatatctctaggaatcctgtgatcattaccgagcgccctcatggccttttcctagttgagtttggttgtgatggagataggcgtcgggttttgttacaacaaccttggacctatctcaaccaagctatccttatggacatcccgaactctttggatgttctcaatggggatagcttactcaaaatccccctttgggttcaagttttcaatactccatttctcaaacgttccgaagagttggcggctcttgtctcctcttcactcggccatatgttggaact

SEQ ID NO: 227359 - DNA, 3390 bp, Cannabis indica
ttatccgttttagtatctgaaataattttttaatcaagttttttatcatggtcatgtaaattatagttattaagatattctccaaaatttttaaaaatttgaaaaagtttaatacgccaaaaattatatccaaatagtgtgttgattattttattttataagcgtgtaacatagattgtttgaacattattttctatattgtaaattattctatatttctcaaaattttataaaatatcttaaatagctataacgtacatgaatataaaaaaaaaaataccgaaataaatagagggtacatgaatacatctttttaaagatgtgcattgaatcactctatatcatttacttatatttttaagctaaatttaatacatttctttgaattgtctaatactaactatttggttccttacgaaaaataaataataataataatactaactatttcctttgtttgttaacttcataatctctacttagtgggcattagaatttgaaagtgaattatagccaagttcctaaatcaccataattttgttaattttgaaagggaagttagtttaatttgttgttcaccttgaattaattactctgtttaagcttttcaaattaataaatttgtttacaatttgctcctcttatttttcaatcctcccattgcatggccatcactttatgatactggcaatatcttgttttaaatgttattacaaacatctttgttctattattaagagatacaaaaaatgtgcattatatatacatatataatcatataataatgtgcattagagcatatatatatatatacttataataatgtgtgtgtatatatatatttttggcgtaggagagaagttggtttgtgtggttatcataataagggcagggcaagaatctgatactaccaaaccatgctttttaagattaactcatgctctgtgtgatcaaaaaattgatcagtgttcttcatctcatctcggggacgataatgctttatctgcaaatattcctgtttgttatgctaatttgactgggcaaattccaaactacatgggaacttatatagattggaatcatacctgtctcccttcagaattctacaatgttaaagttcaccaaaatggatggggatcactctttccaatctaatgtttcttggtttgagctttgccatcttcagattttggacattgctcataacaatttatttagaaagcttaaaggcatcatcaataaaccagtttcgaatgccatttgtgacgagaaaaggaagcgaagatcaatacagtacaatcttaagattggtcactggcttagacctttcaaacaacaatctatcagtagaattcccaatacaacaccaacactttattgtgttggtcattactcactatataaaactaaataaactaaatttggttttatcagaaaaagaaaaatctgatatttcataacacttttgatttggagcacacacaatatcacagacaaaaacaacacaagtccactgatctataccatggtgtttgagtacttaggctttactaagtcagtgtaaaagtattctctcttattattaaagacttcctatcctcattttaaatataattgattattattctatcacaatttcatctggggttcttggtttcattatctctaatacacattcacagttgtaattgtcctaacaaaccttatgtctactagtccattaaagctaaaatattccagagaagtttcaaaaactaattatagtacttaatcttcatgaacaaaacgaaaaaagaacaaactttgagaacataaatggatatcccatataacatagcatatatatatatatttgttttgttttcaatttcattttcattttgaggtaattaaactaataaacaaaaggaataaacttgtacctaactttacttgcatactcaacatagttgtccccaaaagtctcaaccatcaaagcctcttcaagctttgccctctgctcatagtaccacaagcaaacagctactacagaaagtgaagccaaaggagcttgaagagcaatacagtaaccagcaaagagaagcattgttgaagcatatatgggatgacgaacccatctatatggcccaaactgtaccacagcagttggcaccacaaccttttctgagtactttgcaaggtacaaggtggagttatactgcattaacaatgtcaccaatatcataacccaaatgcccacattccttatcaccccaccactaatgaggtgaagctcaggtccttcgaatgctgccagccaatgggagagcatgactccaatgcagaacagaaggcgacgccacctgggtggtttcacatcccacttagggtcgtgtgaccgaaggtagtaatcaccataaagccgtttccttacactcacattgaagaagaagaagtagtgataaacgaagaagaaaacaaaaggccaaccttcaaggaagccattgaaatgggcaggtgggacaagggtgagccaagtgaaagttgaggtaacaatggcaagttgctcgaatatgtttgcctcaccacacacatacttgcggaagcaatataacccgtaaacggccaaagcgccggccataatccatggccaaaacatccaagtccagctgaagtacatccagaaaaaggggttgagaagaccattcgttgcccattttgtggctgcgatcgttacggataagatagtagagagcttgataatatcgtaaggggtcaactgcaaaagggtgtttttcaatgaatcgaaagacaagtttttcagggtactcaattgtgggttttgggaaaaagaagaattgattttgacacaactaagaaaatgggtatttcctcttttagaggatgtagagagttggttcgggaaaaaaggaaactttgtctgcgttgtgaggggtttatgggtcagatgggaatggcgaatgggatagatagagttgcattgtaggtgtttgttagtatgtctaacagaaagtttacccccaactgtcaacccaaaggaaaagggtgacactttcgagtgtataagcaggttcgactgtaaatccatggccgtcaacataacatagcacggtgactcagtgagtcagggtgtatgtgactcgctcgggaagtaaactctgttaagagtaagagagagaagagctcactttgatctttccattattttgtggactagtgtgccctattgctgaagtcatatattcttttatttttaaaaataccatttttattgcgattcttacaaaagtattcatatcttctaattttatattttcactgtattaattttatacagacttttaacattatttttttcaccaattttataattataatgtacataattat

SEQ ID NO: 227360 - DNA, 4733 bp, Cannabis indica
gataattctccttaatttttttttcttattttgaaaaattttaaggatgtcaaagttaaaatagaaaaaaaatggtaatttccattaattacttttctagcataggttccaatattttaaaagtgaagtaattaagtacacttattattttttctataatggaaaatccgttgtcaattagttgaagaatttttttacataaagtactttaaataataatttatttgtttatttattttagaattttacatatgtgaagtattgacttctatcctttgggcaaattagacttatcggtttggccaaactaacaacaaaataacatattacaatataaaaataacataaatgtatttttttgtaaataaaattttataaaccatacaaatgtttaaaatttcataaaaccttatttttttttactttattttaggtatttatgaaaatatcctgaacaaatagcccaacttacgaaacccaagcccaaggaatagcccaacttacgaaacccaagcccaatgaatagcccaaacacgaaaaccctggggtttatcattcccagcagccataataatactccattttttcctttcacaaccttcttcttcttcttcactgcccgtcgttctcgccggaagtggccaattctggctgtactactgttgaagaaggtaggaatttagggttctcaatgcctttgccaataaatttgaaatttcggattagttgattcttttcctttttctgaaatacgagggcgtagtcacttttttcagttaagaactacttgattgacggttgtgatcacaagcacttctgttttcatgttcttcttcaactggtttatcttagcttttacatattactccattatattcccagaaatcgcaacttatctaagtctgagatttgtgtcttttttctgtagaaatatattatggcaccgtcaaaggctccatcgaagaagcaaaaaaagggaggcattgacttcaaagtaattataaaattgattgataaactcgtattgttactttcaatctgtataagggattatatgagtgaatgaatgctgatgatttggtatattcttgcagaaaataaagcgaaagattggtagaaaattgcctcctgcgaagaacgctacaaatactgaaattaaatccaaaggtattgactaaaattccatttgtttttgcaatttttgaccaagtttcctgcttgtttttcctgaaacaaaaaatggaataaacccaagtacttactttaacagcctaattgagtaagtagttattagtaattacttttaagaaaacttatgaaattcaaaatcttctaattgatatgaaagaggcagcagttttgaattctaaatgtcttggagcgtagaaatataacaagagtttaatattgctttttgaacagcaattattcttcctgaacagagcgtggcagcagacaaagttgggttagcagtgaataaaagaggcttaactttgaaggaacttcttcagcaatcttcgcatcgtaatgccaaagttcgtaaaggtattctcttgtaacaaaatccttgtatagattaggattcaatgggaggactcagttttagaactcaaactcgctaagccaactgaggggttgatgtgaactctaaaactcaatattagaagtgggatgtggctattcaagctaaacctaatagcatggtgctaacttatcttttatttctatttaaagatgctttgatgggtattcgggatctattacttgcaaatccattggagctatccctgcacaagtacgctgttattgaaaaacttcgagaacgtgttggtgatgatgataaagcagttagagagactctatatcaattatttaagtcggtgattttcccaggatgtaatgaggtaaaagtttttttgattagcaaatatggttattgaaagcaagaggttttttttatttagcattcaacttctgaacatctagaaaacatttttattattgctgcttgaattgtggctcttttcactgctagctatttcgctttcaaataaacattgaataagtaattgtgagtggatcattgtaccggtgagatttacatgagataattagcttaaataagctcgttgatgtgtttattgttaaattatattaaagttgctggtatggtctttctccctatacatgtaatttggaagagaaatgctaaagagcaccatttgaccattgtgcccactcacccaatgacactattgtcacaaacgaatatcggctcctgcatatttgaatttaaaattttaacttgtagatatgtgggacctgttactaaattgaacaaaattgaaccaatgtcgatatgccatattctagggtgttgggcaacccaacccataatgcgacacaggttacccttttacattccacacatactgtcgttgtctttatcatgtttctattgtaactttcttgtattaccaatagtttgttttgaatttaaatttgactattcattgatttaattgaccaggaatatgaagggatgtttgtttccttgttgatgacctacatatttcatgcaatgacaaattttgcagtggaagttcgggttacagcttttagatttcttgagcttgttgtccaacactatcctgattctctctttcaatatgctgaaaaggtatctggatttttttccatgcacatttttgctttcttttttcccccttattgtattttataaaatttgcaagagtaagtgaaaaaaattgtcatatattgcaatgtttgaaatagagcttttaagcctcgcccttgcgttttgtatttgtgaggcaatgagtaagcctcaaatatataattgaagaaatatttttaaaacacttaaaaatatcaaagatgactccgtctcataaaactcgaaacatagaataaaatgtatcagaaagcataccataacatttttcataaaactgaaacattaatatctcataaattgtctagattctattgcctcaccatcgtgtgaggcatacacctccttgctgcataccaaggctatgccttgttcgatcttttttccgcctcaaaactgttctttcaaacattgatatattgtttggaaattacccgtttcttagtggacaatattctcgtgctccaaatgtttgctggcttgcctttttatgtttctttgattcaattgcattcattattttattaggcaagggatcatggttttttttggttagatcatcagctaactccattatttatctcaccaactagcctattttccatttgccagttcttttaagactactttttattgtttggttcaggacagattttccacaactacggggatatgttgcagatgaacaagttttattttcaagaaaagggaaagcttaagactattctttctgggctacttcattgcttgtcgttgttgcctcctaataaggaaaaggatgcctcagctgaaaaagtagctccttatttcctgattgtcatctatgttgtttcttacagaatttttattatattttattttttcattgcacttgttttgtagattcaatgacatgtactgatgctgtataggtgattcaatgccataatgaattaaatacaacatttattaattgatagttgattatataacctttacatagattagggtgtgataggttcataactgatttagtttgtgaagatgtaactaactaatagtttgctgagttagctgttagagttagggaatttgaagcgtataaaatggctgcaagtagatgataataaggagttttagactcttggagagtgtttctgtttctttatatgttctatacttaagtctctcattccaagtttgtgaaataaagagaggagcttcagagattgattgagagttcttgtagagttctatcagattttcattccataaaccattcttgtttagggcttatgttttgttttcattttgcctatatggtttgttcacttcactattctcttttgggatgtgccaaaataagtcaatttcaaaagtaaatgcgcatgatatgtttaacatgttatacttctcaattttatattacataatttctttagcaaattgaggcaaagtctagctggattgatttcttatgactatttttttttttttgttaaatgtttactgctaattcttatgttattaatttgcttttatctgtgtttgtgttttgttactttattttttattctctcttttaaactgctacttattgctttctgttgatttagaaggttgttgaacgaagagtgttgcatgctttagagcctgatacatctacagaatctgatggtatgtgcaagttcctggaccgtgctgttgatattgctgtttgtgtgttttgtttgattctccgattggcttgtcatattgcccaatttttttatggaatggtttcagcatctatatattcagagttatatggattttacttataacttgtaatgtgtgcacgtctcaagcctttacattcctgcacttcaatcacatctacgctccttgcattggtcgtgtcttatttaaagaattctttattcttttcattttggggcagcagtagttgttttgtggcatggtgattttggtcctacatttgttagtgtgcacttctcaagcctttacttgcccagttgcccacacttcaatcacagttatgttgacttgcaattgcatt

SEQ ID NO: 227361 - DNA, 3599 bp, Cannabis indica
gtatagagtctaatttactctattgtaaagtcattttttgataatctatcaaaatattatttaatttattataaatatttaatgtgaattaaatattaatttcttgtttgtatattcagttttatggctgtcttttatcattataaaaaaaaattcattatagaaaataaattcactttatggaaagtttgtttaaatgatttatatatgtggtataattgattctaaatgatggtaatcaatttttttctgttttactatgaatatgggggatgtataatccttttaattatggcagaaaataaaggaaaaatcgtgatcttgcttttatatggaaagggtgttgattttatctaaggtctcatagtagagtgcggatatgtcgcagcaaatcaggatttaatttaggaaagtcttgtataactataaaatcgtatttgtagctatctctaaggtttctgtgtgttataaataggacttagagtgcagccaaacgaatctatctcttcgatcaagtcttattatttatatttttatatttgtgtgaattgtgtttcttgtgagaaaacctagagtattctactaggtcttagtttctgtatttttattctttcactattctcataatatagagtgaagagcctcattgaagaagataagaagtcttcgagagaaaatttttccaagacttacttcaagagaaagtaagcacgctcgcattaaaagttgaaagaagttcactctttggtgtgttcagaagtcagattagtaaagaaaattacaaaggattacggcaaagctttagagagagtctaaacttgtttaagtgaattgtatttgtaatttttgtgactttactaattgattttattctctggatgtgatcacgtggactaatagtgtttgaatactgataccatgtataattactttgtgtcaagttataaattctgcaaaatttatttctgtttctcttctgttacaaggagtgtgtgttctactacaaaaacattatttttcaaaaacattatctgtttctcatctgtacaagtcgttacattcacattttaattacaattttttaagaaataagttggtatatgcaaaaacattatttttcaatttttacacatgtacagatgtacttgttcatactaaaagttagactttctctttttttctactctgcgaaatcaccaaaattagtattagtaacctctctcctggctagattaattgttgaacataagtactattcatcaccttcaagataactaagaacaaattgttggaattataggttgtttgattatataattcttcagttttttttttttggttcttaatgatatgattctttagttattatctagaaaagtttttgatgaataaaatattttcgtgaataccattaatatatgtcacaaaaaccagtagaaatactatacgcgtgagttttcatttttatataactaacacttccataccaaccaaccatcaatggatcatatcattgtccacattgtattttcgacgtggtgtagatagtgtcgtgacacactttgccacgagcaaattataatagatctcttctccaaccctgcaaagttttcttatatatattttgggagagtacacatgttttttttatatctatatataaattttgtatttattatcgatggagttttgaatctgcaatacatatacattctctctcctcaaatcctgagatccatataatgatttaattttgctggccacaccggaccatggtggtcctgttccctatcaaacactctacgccatttctctttcataatttaataccctctcttaaatatagcaaagctagtggaccacctgtatataataataataatattttatttatttatatattaatattttgttataattattttccataatttgagctcacaaatctcatctaccatcttatgggtacgtttcctttctcgaccatagataataaatcagagagcaaagcgagcttttcttggtccgagtcatggaccgcaacaggtctttatttattgtaatgccctaattcgtagctgcctcactcaactgtttttcttgtttaattatgtcatttgtttttgtgcatgcacgtatggtccgaataaatccacatcatttatgctcataatttaattaattactctcatctcaacaatcttatttatttacaaattagactaatactatactatatatctcttccttttattaatcacctcaaaatatttgttttatttatatatacaaacaaataagttagctagattggttgtataaatataaatatattatgctgactacattagttgacaaatgtctttccgcatatgctcaaataaatgctaccaaaacaagtctttacatattactcacaaaacagttatatacttcattaattcgttcacataaaatcctttttagtttgagatgtaaagagtttttctttctttcttaattacatgattcgagaataaccttaaaaataaaataaaagaacaggagactacactaaataaagtggatttttggggtaccttaacttgttaaaaagttttctaagccaaaaacccagcaacccaccccaaaggtgataggcatataagagacgggtttcgttagtttgtaatttgttcacattttttttttaatttaaaattaccaaataaatacaaataaaaattgttcaatacacatataatgaaggcaagtatagtaggagtgttacttttattttttcgaattgtgaactcaaatctactgtaaaaattttactcgtttgtaaatatttttaataatacaatacttactgaaaatagagttgaaaataactaattacatatgcattaaaaaaattaaaggactcaaatttaatgtcaaaattagtgtctcaaaatggtgtctaaccaactaatattagagaaaattaacttttttttttccttttcaaataaaagaataattccattaaaaggtacaaagcaataaattaaaatgatcaaaataaaagttaaaaagcaaggagaagactcgggctccaaactttagtagtatccaaagaaaaaacaatacgagcaaaggagtgggttaatccattaaaagactacttacaattgaaaagaaaaatactagagagagaaccagacatttctaatatccttaataatagccctaacttcagtgaaacgtgttgctttactcaatataatgtgtaccaagtgaaaacaatcagagaatagttaatgttgttgaaggaattttaacaacaccaaaataaaatataataataatatgaaggggagtttatgcgagtactcaacctagaacggcgagtattcaaattaaggacacaaaatacttaataaaaattggaaatatcaagaacacaagagagtatattggttcagtcagatcacggtctgcttagtccactgttgcaaggatttcgtcttgttcatttcacggtggatcactcctttatatacaaatcaagtgtccttttatttacacagagattgaattcattatcaatccgtttgtacattgaattacaataa

SEQ ID NO: 227362 - DNA, 2154 bp, Cannabis indica
tttgtactattttagaaaatacagggtccattttgtcatttaacgaaatacaaggtccaattggtaacttttgtaaaacagagagtccaaaatagtatttaccctatatatattattggttgctttattagcccttacaaatacccctttattttcctatatccccactttttgactcccagtctgccacatcttgtgtagactatgaactaaagtatatatcctactaatacacataagatgacaaagcaaataaaatttcatgtcgcaaaagatttttaaagtggtttaaaaattaggggaatcataattattgtgacctatatgcatgttatatgtatagtactataggtctgttttgataactttaaattggccatctcttagcatgaaagttttgaggcaaggagtacataattgataagaaagacaaaatacacacatacacacatatttactgtgccaaaacagtagtagtggatatacagatgcagcagtataaatatatatagtatatataataatgggtttcattcatgcccatatgtattggttgcactatttcatatagctataacagtttagaaagctgaaataagatattataggacaatgagagagaatcacaacgaataaggtaatatttatacacattgtttgtgtattaattaattatataatatgctaattaaaaaaattaattattttatatggtcagtgggcatagaaagcaatatggaaagcatggcccccaaagggttgggttatttcatgaccctatataataagcttaagaaagcacatattctcctgttatttgtcttcttctcaagacacatgacctttaataaatcctgcaactttagaccctccttttaagggttttgccaaatttgacctaaaaagttcgatttacataaagcagcaacatcaatcaaggacatttaattaattatattaattggggaattaattaagagatgaaaaacacaagaaaagttataatctatgcatgcatgtattatgtaaatgttaatactattatcatgtgtactcacaaataaattcatgattaaataaaagaaagaaaaaaaaaataataccaatatatactaatgataatgaaatgtctctaccaataatgatttttgcagcactaaaaacacattatactaattgttatatatataaactctcaggagcggttgacccaaacattttggaggccttgtgcagaagattaaaattgggttttttattaaaaaaaaattatgtacattaagacttccattattagttttttacttctttcttttatcaaaaatatgtttctaaacttttaaatataatttttataatgtatttataataataataataataataaaaacattttctataaaaaaaaatgggcctttaaaattggaggccttgtgcaatgactcaagttgtccaaagcttgggccaaccctggttaagagaatatagctagatatctctcctttttcttttatgaaatctttcatacaaaaatctcaatgaaggacaattaataattgttagaaaatcaaataaatttaaaatataaaatttgtatataatataaaatataataataatagataataagtaggtatacatatctgattgatccatagtaattattttaatttaatggtacaatactatcaactaagttttcttctctaaatctctaaatcaaatgcaattttatttatttgattatcaaaagtatacaattgtaatgagataatatgtatttatagagttgaagggaacttagctacgtataaccctagttggacaggacctgctcatcaaatgtttcagttaactagaaaagctcacacttttacttcaactagactttatacacacagatattaagtcaattaactattgatcattaataatatgagctaacatagcaaagaactatctaatcaacctatattatattaaaactaataaaagttaatgtaagtccaaataaaagtctaatattctcctacttgtgttacattaattttaatacatatgtattatatatcaaaataattttaaaaaaaatggatcatgggtagaacaacaggaaaatatttatggtcactttaaaaatgatagttctttgat

SEQ ID NO: 227363 - DNA, 5363 bp, Cannabis indica
aaaatgagcagcgtaatagctctctcaaacaaaatgatttgagatccttttacaatagaattgctccactatttataggagatttttacaacaggtattagtttctcgaaagctgtcgatccatgaaaataggaaataaatgacattcttaaattatgagaaatatatataaatggaaatccttttaaattgagattttattacatattaaataggaaactatattaagtttcttctatcacgcattttttccttggtcagatcgtatgatgttcagaccatttctttccgactaggtcaactcatgtttatattgtgcgacaaactatacttggttcatctgttattacattcgactgagtgtatatcttgggcggacattttgcaggctttttcctctgcccaagctttgatgcgatgatatgtgtcacccagagaaatgtgccacgtcacccagattgaatttgggataataataatttctcaattataaaaatttattgaattctagatgtgtcatggatgttatttatgaattttgttgtattcttgttttaagctcgacaacagtagaattcgatgatttggcctttagtgtcacttagatatagtttagcatcataaaaatagcacggcaagatttatggacaattagaatataaaaattgtgtggggtaattagttattatcattttactcctaactttaaaggttacttagaaaccaagtaagagcatttttggaatttttctatttgtgtttatttaattattattaagctgatttattttatgttacaagttgatttattaattagagtagtatagttagaaaatacaaattaagataaaaacaaaaacctaaagctaaatcactctctctcctcacctacctacctctctctctctctcggcctcatctcaacccaaaataaaacccaaattttaatgagtaattcatccatttccaacaatgattttagaaggtttaagtagagcattcaaaggaaagaacaaagtaaacccttaagctcactttctttttcattttggaaggaaaagcatggttttaatgcttgagttttttattctgcttatgttaatatttggggatgattgatttgagttttgggattgaattaagattgttttgtgctagttttgtggaagtcttgtagctataatatagtttgagtttttgaactcgaacttagctcaataatagtgattttgatttcagggctttaatgatgtcgtttttggttgaattgtgtttgttatgctgtaattaggtgttctggaaagtttgttaaaatttggggtagaattaaagaagaaaactcgaggtttatgttttctactatgaaatggtccaccaattctgtagaaacggtgaaccgttttcccgggcaagaccctaagatatggtgaaccatttggggatctaggtaactggtttgggtgatttttaggtactccaattttaacgttttctcgatatttaggatattgccacactatttattgatagggaaatttttagttttgagtttaagtctccaaaaattttttagtgagacacttaccgattctatgtgattgtgacttaaggccactaatcgtcgagcaaaaacttccactcaagttgaccggtacacctgattgcggagttgaggtaagattggtataacacctgcacatatgtatatttttagcgtacatattttatgtttgctagttagataagcggtattagtgtacatatagttgtgattagatatcgacgggatatattttaggcaatttagaaagtacaaaatagtgctagcaacactagtacgcctagagtactaagtgcatgtggtattattgttagttgtacttatagtatggactgatgttatcaaatcagtacgactagagtattggatatagactaatattatggtcaatcatgctatagtcaagaatgttgactcacagatatgctttttatgtgtaggtaaaggcaaggcaaaggcttaaaagcagtgagtctagagctggatgaagattgtacatatttagatggttagagctggatgaagattgtacatatttagatggttaaacctagagtgtttagatcttcatcacgacatagactcaaattttgttagtcgtagggacacttttggatatgttgtattttgtttgtatttcaaaattagattcgaatctcggaatttgtaaacttcagtgttgtttatgcttatttagtgaagttatattattttaaaaaaatttaactaaacacagttttacactaaatcctttggttggcaatggttagcaaaagttagcacagtaattaagaaaaacagtatagcgtgcttaagctagtagggtgttacaattaaatttattgttccttctacttgggcaacttgatacctggaaagtgttagtagtcatgtgtcatgcgaccactgatacatggagagtgttagtggtcgtgcaactctatctttccccttttcttgtgcaacttcaattttagagtaagccttttatcgtattctttcaatatgtaaccgctaacactaggaaattgtcaatggtcgtgtataacactttaccatttggtgatatcatattttcttttgtacttttaggatcaaagcataagcaactaacgtctcttaaactcgggtcaaccacagttatccccatttggaaacttactttgggtcaagaaagtatgtagttctaaagggaaaacgacatcattataacgtaagaaattaaggtcgttatcataaaacgacacatggcttacacatgacaatttgcttgtttcaattgtcatttaagaggaaaatgatttttcaatttcactaataataataaattaattaattaattaataggtcgttcaatccaatatacaatgtattaattgatgtgcttgaatgtatatttgaacgacaatactatgtgtgccaagaatataaaaagaaaatgttgaaacgctaaggattctaaagcaggctgttggagagcaaatactcaactgaaaaagaatactctggtgaaagaagcccatccatgccgaattccatccttgacaaatacactaatgataaaagcatttactgtcttccattagaaacacagaaccgaagtatattttcctttcggtatgaactttgccctttgggcactaaagatttgaagacagaaatgcatgctgcagtcctcattgatacgatttgaggtgaaaaacttggcaggcaggcttgtacgatctcttaattgaagcttgatcaaatttggtcgatgctgcttcgttatcttctaagctattttggagaaaaaaccttatccaccaagaagagcttctcaatttagcctgcacatagttaaacatattcaagtttcaacgtcataatctaaatcatcttgacatccaaatcacaagttcattcaatatcataataaaaatgaaacttactggacggcaaatttggaaagctcagcaactttagctctattctgacctggatagcctacaattgtaaatacaagtccatagttccttacatcagtcaacttattttaaagtaaaaaatcaataactagacaaataaagtaatgaactggttaatatactctgcttcagatgtctgcataaatgaggttaacaactactacttctggtattaaccaatagcatcgacatggtcactatgtaggaaaatgattcatgaataagtgatggaggaagagagattgttgtaggacgtcacacagaaaagatcttcaaaataaaaaagtaacaagagatttaccggaaaatataacaacaccgtcagtagacaccctagccaactctggaagagttttgtttaggtattttggagacaagtaatccagtgcatcagacactattacaagagaaaatgactttgtcctgtatggcagtgggaattttatatcagccattcgcacaatgcccttgcgcacgagactcttgcaattagtgtcgacatcctccaagtcatatggttccacaccccaggcttcagtatcctcctctttcagcagtttagataccacagaacaagtctccgggcccacatgcaacactttacgcatgctgtcaccatatgctttcttcagaacaggtatggctctctggacttcatacgtgcatgaaacaccacctgcgtattcataatatcttaaatggaaaatgtttcttcatttactcaagactctgctgatgacaaatcgtgccaaataaatattttccgagaaaaataatatgcaaaaaacaaaaagaatgtgattaaaattaggctccatacctaactttacaatattttgagaccagaacactataacaaccaaaccacatatttgaccatataagctatctctgttgggtgaaaccttttacatttagaactgacacaaagtagacagtacacacttccaaccttttctaaaaggaccatacttattccccaatcagatagctccaatgatctcaatcaaactcttcatatacccaaaatattgagatgatgtatattgtacgaaatgctacataaaaagtattgattattttgaagttaatttacaccttacatcctaacatactgcactatcaaaaatgaaatattcagaaagatggcactgtgaaactcaccttcaaatttactcataacctctttactgctcagtccacctgtcaaacaaaaacccccaaataggtaattagaaaaactttcaaatgatgtaaaacaatcagaaaatattttttccaatctcgaatatctataaagtggcttgaattctattctaaaataaaaataaataaataaagctaccagaaaaaggaaaaatatttttctccctagttttcttccatctctaccatgatgatagagctcaatacacgagaggataaagaagcctctcatctgtttccgacaggattttgaatgatttaaagaaaacaacaaagttgttaattaaattcattttccacaataatattaagaaggagaccaaaatacatacctgaaccactatagctgtagcaaagaagaagaattgcaccctgaagtttccagtaaaagaacaaattaattacattcactagacagaaacaagtcactgagaatccgtttgttcaaatttatattcattaagaacttgtgggaagaacaatttaaagtcacgcaatagatctttgcataaaatgacaggatatgatgagaaacaagaaaaaagaagtaattggagctagtgagtaagtgatatataacagaaaggaaaagtaccaagactacgaggtccaatagatagtaatggtga

SEQ ID NO: 227364 - DNA, 2582 bp, Cannabis indica
aagtgcgattggatcggatgaacacccctatagagcaatgctaaacagattataattatgaatacaacgaagtggtgaactggccgaagcctactgcagattcacaactacaactgagtacctctatcacaccattttcttttgttttctcatttcttccaattgtcagttgaacaaaaaaatataaaaaaaaaacctttgatgacaaatggataaatactcatttataaagaatgcacaaaaaagtagtagtagaagaagaagaggcaattagaaaattggagtagatttctatgttacaaggccaactaccattcttaattggcccatgctgtggattactgctatcaacttggtttttttttttttgcctatagggcctatttagtcatggtgaaggtcctcagcagcaggtgctgcaaatctaacattttccggccgagcaacaaccactgcatcatctgcgaatagtgctttgataaaggatggcgtctttagtgggtaacgaccagtcatttgcgggtaaacatctacaagaaagtagtaagcatgaccagcaatcattccctgaaataaaacaacattagttgatattacatacaagaaaattgaagattatattggggtatgcaaagtagaattttcattgctgtgtcgggaatatcattgattaataatgaggattaggcttcgtacatctataacagataataagttgctaaaaagaggtacaatacaacatcgaggtcatgaaatttttagcctttttcctatactgattgtgtatcacactaattcgagtacgtaccaacatgtcaacccaagcactggctccaacaagaacagaaaatccgagaagaacctggaagacagaaagtgaaaactactgtcaacaagatcagattcagataattaactaaaacagttgagtactattactattaactgacccatggtaagtaagctgctgtgaaagtaaagaggcccaagaaactcatatgaataaaaggattttgcttgctccatacataaacctataagcagaaaatgcaaccatataagaaacaactgtatcatatgcaagaaaatatgcctattttctggaaaaagaggaatgactaaccatcataaaggtaagtgagttgctaaggaatataatttttgcgaaggactctgatagatacggtatcattcccccaataagaacaattccagttaagacagaggcaccgaacaaaagcatgtaaaagaaatcagcagttcttcccctgaaggagttctcttcaagaagcttgcagtatcgagcaagaaagaacatgtggaacataaaatccaagtctggcaatgccacaatataattatgttaaaaataacaatgatcaacaattaattaacttcaacacaaactgtttttttaggaaacacattccactaactttcactagagttacataaatttccattttgcttgggtgaaaggatatctaacagcgaggagtttgtagaagagaattgactagcaaaggtgtgctattacataatcccaattaacaataaaccttttccataataaaatgttaaggaataaacaaatacccattttgcgaaagtacaagaaattcgtgacgaggcgccagaattgatactgcttgacaactagtttaggattcagatacaaattgtaaggagagattatctgcaaatttcaacaccagaaaaatcatccttagaatgagtcccggaaagcgattatcaaccttataaacatccaaaattaaatcttttttttcctaaatagtattgaacaaaagaaaaccgattggaggagaatttaaagaaaaacccaatataaatcagatgaaaacaaaaacaaataaaataaacaagattaacattttgagcaggagagttagaaacgaagaaaggggaaagaatcgaaaaaagtaaagaaagaaaattcaatcgatcaagaaacatacatcgagggagcaaccaatggttgtaacgatggccgcagtaagatatgagcgagtgatgataggcatctgcttgtaccattcctccactgcttgagccattgattttcgcccaaatttcgatcagggacgattacaagacagaggctttaggtttggattcgaacaaacaaacaaaaaaaatggattttaagcttcaggatttgggtataagagaaagaaatgtgttaaaacgatagagaaatgaagaagtcgaagaacaaaatctgaaagaggaacagcaaaacagctatatgtgtgagctcttgcctttgttcgacgaagctatacatgacaaagccagacgaataagaatgcgcgtgcctttcacggaccaattaaacgttaacattgtacccgacaggacaagctattccttaaggcccagctattgtacttaataaagacgagacgacttgtagttgagacatttggaacggaccactcagagcttagttatattgggcctaaacaatgggctttctttacataattacacttgtacgaaaaaataaggaaactttacaattatataccacaatataaaatttatgggtaaatactatt

SEQ ID NO: 227365 - DNA, 6456 bp, Cannabis indica
ttcaaaatggaatagtcattccaccaaaatgatagaaaaatcattctattggaatgacatttcaatacttcaaaatgcaaccaaacaaaggaatggaataaaccattggaatttcagtgaaaagtggaatgaaaggtcattccattgcacaagtaattttttttaattattaattttctcatattaaattttattccattatattcgtgttccctttctctttcccgttcatattactctatttacattacccccaaccaaacacacttctatagttttctgcactagatattttaaattggcgcctatagtcatataactgttctaagtttacttggtaggatgtttcctttcaacttttgtacataaagatggctcctatagtttttgtttgtttattttttggacaacacccttggaaatactaaggtagtttttaattgtggctgttataactattaatgtagaaatgcacagacgggttggttaaaacactaaaggatgttgtgaacagtccttatgcccctgagtatgatgttgctggtatcacagatcccttcctgcatattagattactacggcttttgcgtgtgttgggtcaaggagatgcagatgctagtgattgcatgaatgacatacttgctcaggtaagctttatccatgttctatctcttatttttcacttagctgctcagcagttttaatgtaacatattagatttttcaggttaatagtgttgacataaataaacacaccttttgaactgttattacttttacagtataatgttgcagtgtatctcatttgctacctagacgtgataatattggatataatttatgacatgcatttattaatgcttgtaaataggcatatggcaacattttcaagactattaaccactatgttgtcaataatattggtcacttggtctaactaagtatgacagtcttatttaaaaaagctatgacaattttattgtcagccttttaatcatttccatattacctgcatgtgcacaactgcacatatgggtagctgtttgttgtttgtgagtggaagtaggatcaagcaagtgtaattgtaaacctatgattccatgatactagggaggtttcattacagtaaagatcagaaagggaaagagcgtagctgggatacctgtcaacattacatacaaatagctgtttgcttatgaaaattcattgtttttcactctcgggcattgtaacttgccaagcttactaccatttgattattcatacagaattttctctaattttggtctctatacatgtgggtttctcatttaatgttccagatgaatatttgtgcttacaattattgaatgttagctatgatttaagatctgtcaagttacctgccccctgttctctttgtacttactgttattgtattatctcccaggtggccaccaaaacagaatcaaacaaaaatgcagggaatgcaattttatatgaatgtgtagaaaccatcatgagtatagaagataatggtggcttacgtgtacttgcaatcaacatcttgggaagattcttatcgaaccgtgacaacaatatcaggtttatatttatcatattgataaaaccattttgtatcttttaattggcaaattgattttatcacattataaacatcacctgatttttacagatatgttgcattaaacatgctgatgaaggctatgacagtagatactcaagctgtacaaaggcatcgggcaacaattttagaatgtgtaaaggtatatgcggtcatcttaatttgcccaggatctaataaaactgacactttttttttaattgaaaaatgagacccccttcctctggttctttgtttatatagttttcatagaatagttattttactcttccttaaatacatttttcactcttccttaaataccacactagttatttttctcctatacattttccatatcttttttccatatttctttctagaagtataggtcttctcattttcttattgttatattcagctgctgctaattggttggtttgaatgaatggctttacatgtataaagttaggtcgttttgtcttatatccatgttattttgaacttgtgatgtaagtcgtagtataaattatcttctatgaatatgatgaatttaaggtcaagtgttgatattgacattctcttgtgatttgatgcactgtcataattgttgaactctgctgcaccaagaaaacttgtacacaacttgagaagcatgtgaacttttccccccttatttacaggattcagatgcttctatccgaaaaagggctttggaacttgtttaccttcttataaatgagaccaacgtcaaacccttaacaaaagaattaattgattatttggaagcaagtgatgaagaattcaaggaagatcttacagcaaaaatatgctccattgtagcaaagtaagtgacatggttcatgattttataattggaatcctcttacctttggaaatttggactgggttattgttacacatgatatactttggaatgctctctcgaggattaagatcttgtgatgcatcttgactgattttcagtaaccactctaatcatacttatgctgtcctattggggctactgcatcaattaattctaatatgcagtttcctgttctcattattatgtgtaatgttagatgggtcttgattaatttttagtctaatatcgataatatttgttgtttgacaaatgccattttcctcgtgtttgtacgattttgggtttaatttgaatgaagttcactgctcataaatattttaagttcttaaaaattgatttataccaatatcttgattaataatcatccatacactgctgcttcaggttttccccagagaagatatggtacattgatcagatgcttaaggttctctcagaggtattaataacaattaatactttatgttgctcttctaaagattgcttggatttttttttatgactgattgcatggtgatggtgtgatccaaaggtcattggatttattattttgcacagctgcataggtgttgtttgtgaaattgtgtcgtgcttcatgctgttgtatgtgttattaaataccaagtgacaccttcaatactgacaaaaccgtttatcaaggcagcccatttattatttttcttttacataaaatatatattttatatttatactcgcttttacctattattttcttccatctcacatttccaaaaaaaaatacatttataactaattaaaatatattttaaatatcaagattttaaaaaaaaattaaaactaaaagtatatgaaatccttttaaactaaaaataaagtaaatatacattatttatatatgaaaacaagataaattatttttattaaagttagcacaagaacgtaaaagaaaaagtattagagagtaaattttgaaaactaacttaagttgatatatatttttgttaatattgggaatttgggatgcccaaatatattcttgggttgtaaataataaatataatgtcccgtacaatttttgcataacatgttaaagtatgctccttataatgttaaatgtcaatgtcaacatatatgttaaatatttaattgtcatcctaattaattgtacttcttgtttttactaagaagctactgatctttatgctatgcttagtaggctggaaattatgtaaaagatgatgtatggcatgcccttattgttgtgataagcaatgcttctgatctccacgggtatacggtcagggctttgtacagagcattccaaacatcatctgaacaggtgagcaacagaaagattgtatcattgttattactgaagctcgtgtatgagtgacattattatgctctaagataattgtttctacttgatctttttcaggaaagtcttgttcgggtggcagtttggtgcattggtgaatatggtgacatgttggtgaataatgttggcatgctggacatagaagatccaataacagtaagtttgagcttcttcagattaatgaaagtgctttgctgtaatttttcattttaactttggtctcagaaaatattctttttaagttaggttgagtgtaaaactgtcttaaaacttggctaaacatgttgcaagttcactatatagttttctcagaaacttctttgtaaagtagttttctgaattttaagatattgataagtttagtgttgtgttacacaactagctgcacctgcagtattttgtttatatttacatgccactttttcttatgtatgtgaagcaagaggtttcattgaaatgaaatattattttgtaggaaatcctcgaataatgctataaagcgtttatttatttctttgacagtttccaatataatctagttttcttgggcaggtaacagaatctgatgctgtggatgttgcagagactgcaattaagcgtcataagtcagatcttaccactaaagcaatggctttgatttctctgttaaagctgtcttcacgttttccatcttgctcagagtatatagatacttctttctccgcctaattttatacgattttttggatgatttgtttattatccttgtgctattttggttaagcaaatttaaaactttaagcgaactatgtttctgttgtatgaacttgtaatttgataatctttgtgatctcttataaaaattgctatttgaataccttctgtaggaggatcaaagagataactgttcaatacagaggaaaccttgttcttgaattgcagcaaagatccattgaatttaattctattattgcgaagcatccgaatattaggtatgcacttttaaaattgatatcacgaactatgcagctgttatttcttgttttttttttcttctctagatattttatgttccttctcttggttggagaggatagtataaccaaactagtatatttgaaagctgatggatggagtttgtgcaggtctgcactagtagaacggatgccagttttggatgaagcaacttttatgggcaggagggcaggttctatgccatcttctgtgtcaacttccactgtgtcttctatcaatctaccaaacggagttaacaaaacctctgcggctccactggtggatttgcttgatctgagttcggatgatgttcctgcacctagccctgggggtggtgattttcttcaagatcttcttggtgttgatgtatcaccatcttcaaatcaacctggttagttttggacatgctatatcatattctcagatctcaagaattgacttgttctgttttcaagtgattggtgatttgggtcgaatgtcatgcttacaaatttctttttctcttacctattgtggaatatccttgcttcacatgatacatcctaattcctatatagctatatactgtctatttatatggtggtgctttttcggtacattatctctgtatgcaattttaaaactttatttttttgtgtctaggtacaaatcatgctgtgcaaaatggcactgacgtccttctggatcttttatctattggcacacctcctgctcaaaacatctcatcaacacctgatatcttttcctccgttcaagataacaaaacaccattggcgccactagacttactcttatctccatctcattctacacaagccactcctccaagagatgcttctgtaattgatttgttggacggctttggagctaagcctccagtagtacctggtaaaatttggagtcattttcaagtcctttttcagatgattttttcattgtagtaaagtaataaccttctttttttgtgaacagagaacaatggttcagcttttccatctatagttgcttttgagagcagtaacttgaaggcagttttcaacttctcaaagacacccggaaacccacaaacaacactaattcaggctacatttacgaatctgtcatccgacatcattaccgattttattttccaagcagcagttccaaaggtaacatatgataatagccgttgctgctaattctagcgtactttgtcctctattctaagttaatataattttaccattatatccaattttacatattttaagttaatatcacttagtttatcataaatcaattggatctgaatcatgacatgattaagctttaaactaattctgttattcgagttctttgaattgttcattaccaacttactgatattttcttgacttcatcagttttaaaatatgtaaaagtggacttcctctctaagtggattatgctcttggtgaaattctataaacttcataacatgagctatggttattattatctcaatgctcatacattgcatagggtgcccatgtttccgtgtggcagctaaaaccttcaggtgctgtttggttgtcagtaatcataacagaaaactaggaatgaaaacgaaaatgtgaataggaatgaaaatgaa

SEQ ID NO: 227366 - DNA, 2835 bp, Cannabis indica
ttgggcacgaggttgctgagctggcaacgaaccccttggtgaacgcctggtacgcgggtcaggacccgagtttcccggtggagattgctgatctctgcgaaggtatttatggaaccggtggtggcgggtcgtacacaggtcagctaatggacggtcacgatggtgccacgtttaacatgaacgggatcagacggaggtttttggttcagtgggtttggaaccacctgttgaattactgtagtggccccaatgcacttgatcagtaaaattaaaaaaatttgaattttctcagataatttataaatatatataatattattattaatttttttcttttcttcttttgggttatggtttctgagctgatcgggtctccctgggtttggcttttcatcttgtgaagctttgtttgttaatgcgtaattataatcagctgttaaggtagtttaagtttgttaattattgtaataatattatttttcgtatactatttttgttataccaaaagatcatgtcgttctctcttttaaatccaaaacgaattgtcgtatgttcccgccttattcgaagtatgctgtttcctttttaatttacatttacatataacgattaacgaatcggacatttatgtatgccaatcagttaatattgatgttagattataatttataacaataataaataaataattaagaatggttggtgtcactctagctggagtatttagtgatttgctccatataattaattgtcttgttctaagatttaatggttttcatttcattgttggccaatttcttccctttcattgactgatctctcaaataaagtaactaacgaaagagatttttttggttcctaattcaatctttttgtacactatataaaatatatcgttgaattgatttcttgtcttcttaatatatatatagttttgattaaaacttttgttgttagtgaaattgagagactaattaattataaagagcaacaaggtgaattctctatgaaaagacagtgtgagtatgagacaacaagtctactaatctaactactcttggcagcacctttggtagagaatctaggggcccgcttcttctcttttccttcccaatttttctttgcaaactttattgggatttgggtctcgagacttgatgaataattaataattatgttttgttattattattcttattattattttctaattattttatgtagttattttgttttcattttcggtgcactttcttaaaaggggcacgttttgttttgaactcaagacatggggcactaaaacctagttgcttcatactaacccagccaaaaaaagacacgaaaggggcgcaaagtgctctatgtttccacaatcctttgcattgcatctcaagttttatgagatttaaacgctttcataccaattcaatattttttttcttgaaaggggtattgttttttttcctttctaaacttatattatttattttatatgcactactaacaattcatttttatatcccaacgatagtgtaacattatcaaaattcgaaccttaaatcggtacaataactgccatttaattagttcatattatgctgtgaacgtaataaccttttagttagaatattactaatgttcactttatatgttcggcaaaaataataatgtttttcttttttaacattaggagattcattatattgtgaaaaaaattccaagtactgtatgatttacattatgtctataattggtattattagaattgaaaaatataagttatataacattatacattaataaatgcataagtgtgtaggttaagagaactcctattaagcatcacagtgtttatcgatatttttataagggtttgagattgggcaggctttaagaaaaaaaaaatatgttttcactttattgaaaaaaatatgcaatattttcaaacactactataaacattataaaatatggatataatatttcaaaccaggagatgagcatttctctttttttttttttaaaaaaaaataaataaataaatattagcctcttttttaaaaagatatgtatacacaatattttttttaaatgattgtaaacactatttttttttagggtaaatttacatggtatactaacttttgttatttttttactaaaaatactgccagacggtattttttacttttttactgtgtttttttattagtttcatactgcagtatactgtgttaagttttcactagtgttctactgttgttttgagctattctgctttgtgttttactggtgttttataaaaacacaatatttttgaaaaaatttccgtgtagcagtatttttgtaaaagttaacccaaattccagtatttttgtaaatttccctttttttttactcccagtagatttttaggcacaactgcttttaaggttcgactctaatttttataataactagttgggtctaacgtgcttcgcacgtgagcccatagttcaaatattttttcaataaatttgcaatatgttacttttttagaccatctctaatgagaaatgtaaaagttgatttatatttggtacaaataataattttgtgacattttttgattcaatttttcactattatgctccaatgtattattataaattttaatgtaaaatttaatatatgattaaatattcatctaacaatttattaaaaatataaaataataatgcaaataaacatgccaactaaacttttataataaaatataaaaaatgaataatagtaattataaaatcatagcattcattgtaaatcaaaatttttacattatactatattgtgatc

SEQ ID NO: 227367 - DNA, 1843 bp, Cannabis indica
gggatcattgaatctggatctccatttcgaatgctaagagctgaagtggaaatggattcatctttggcaatgtttcctggtgtttttctcatgaaagacgtcgagctaaaataatgcttaattgtcttcttcagttgcgtgtaattacgttcagtaagatcttgatcttgtactctattcaaatgggagtagaacaaagataaccacattagtttgagtttatctactcatttttgtatattgagacttactcatgaaaagatagtacttggaatgtaacacatactttgtatgcacaaaaattggagcagccatgtagtctccatcttcacgaaccttatctttatctttagcttctttgtcaggccctggagtagagccctgagaaggggcaggggttaacaaagacggatcaggtatgccatgtttcagtaagtcaacctgtggtgacaaattatgttagtgatcgtctgtaaaagaatcttaacaaaatatacattttaagaacaacaatgtagtaaaggtaacaaattgctgaaaaataaccaaatgggaaagataccgtggacatcaaacgccacatgttgtgatcatgaactccatcagatacaaccagcaaagtgtggcaaatggaagtcagaagaacaccaagctagaaatattccttgcagcaaccatggaataaacttcattcaactaaccattaccaaaaacaaacccaacaacaatattgactcccttattctacctgaatactcataatttcatgagctaactcagcggataaagattcaccacttagaactggaacagaggatgacccatcaggcctcatcatctcagctagaacagaaggactaaaaacaggctgcaactctcaaggagaataatactgtcaagtaaagaaagtgtacaaaatactacaaacaaacatacatatgaatatgatagatatgttttagcataaaatcaaaacctgggtatcaagaagaataatgcgttcagcagaaactctgggttcaatccccatactacagtgcctcgccattgctgtaacatcctctgactgtatcgtatatggcggcagcattcctgtgcactagcgttaatcgcaaatacacaaatataaatggaatagaataggactgaaattgagaagctcaccaggagaggtggcgtcaaacccataaagctcgttcataatcgtggacttgcccactccaggaggaccaatcaccccaaccaccgtaaaatcggtattctcagtcaagaactacaaaattcacagaaaaattacaatcaaagtttttgcatgtgagatgtttgaagaaatgaaacactttaaatgcctacaggaaggaagcggtcgatgtggaagtcccaagaatctgatagaagattgagggatccgattgaaggtagacgggaccgaagcgacgccgtatcgtcctctccgccaccgccggtacggccgaacttagccgatacaggagctccggttactaaaccgggttttgctaagagaattttgggtggaagaggagacgacgaaccagtcccgccaccggaccctgccattgatatattttcctctgcttcagcaagcttcttctactctcaaaagtttcagactctcagctcaaccaaactctgtcgttttcagccattatatagtcaatccgactcaaaaatacgacatgtcgtctttatggttatatagtgactctgaccgactaaaattacgacatgtcgtttttatcatttatatagtcagacaagactaaaaaatacgacatgtcgtttcttgtaccttattaagaccattcttgttgttaaaggaaag

SEQ ID NO: 227368 - DNA, 1426 bp, Cannabis indica
tttttttttttttttttcacatgattggtttgatctaggtttttaggtcacatatttaaacaaagcaaaaaaaaaaaactattttttaaaatattgtgaaccaaacaaataaattatacacatatacgttgatcttctttgaccaagaagaatgtccaattataaacaacaggtcttttattaatcaatggataataagaagatgatgaatgagtatatatattattattataagtaaattatataacaaaatgtatggacacaaataattaaacaaataaatataattgcatatactcttacaaaatatatttatatataatagtatatatattattctgaaagattctccaataattgagtaccacatatgtacgtttcgatcaatcccatattattaccaccctattttttttcataaataatagtaagatgtgattaattcttttttattagtaatttcattaaaaatgggagttgggagatcatttatatataacttgtaatatgaggaaagaaagagaaaaggatcacaatattgtaaacaaaaaaaaaaacagtaataataattaatgagatttaaaaaaataaaattattttaaatttcttaataatacaattaaagtattctatgccaacaaaattatagtaaattaattaactagatagaatcattattaattacaacaacatatttgtattatttcttataaataataaataatgttagctattttaacctactttgaattatagttgttcaaggttcaattttttattattttttcaaatcaacccacacatgcagtttttttaatttttaaactgtacctgcaccacgaaactaaaaaaccgcagaaatctcaccacaaaaaatggtgcggtgcggtttctctggtttagactattaccaaataattaaactatcacaaatacaataaaccttgagcaatacttgtaaaaaataccataagatttgaaaataaatatgaaaaaaaaatttcaagtttcaacaatacaataattagtgggctttgagctggacacttattacatattggacctaaataaatttaaaatttgtatttttataatatgtggtacggtacggtttggagcacacattaacaatttaaaactgcaaaccgcaccgcactgcgcggtttaggaaaattttaaactgcaaccacaccgtaaaatattaaaaccacattttctttaccgcatgtgcgatttaagaggtttgatgaataacccttatttgaaccttaaatctgccaaatcatttgactattttttttttttttaaaaaaaaaaaaaaccaaatcatgtaattacactaacaaaagctcttacacataagtatcatatttggtggctgaaattcaagtttaacaaaaatgaatcttcatttaaaaaaaaaaaa

SEQ ID NO: 227369 - DNA, 2803 bp, Cannabis indica
aaaatcctatataagttacaatcacacatcgatgaaaaatgaaattagaatcaacacacctaccaaaaagaatataatatccatggtcatgtatccagtccaaattttaatttcctcaaaatatagaaaaatcaacataactccacaatttatgaatgaacactccataaaaaagttcgacatgcgtgaaattttgaataaaatgacagtgacatttatacaggctagttgagaaaacaatataaacaccatagcaaattgttgcccggaaaccatgccaaacttaattacatgagatcagttactcacatagctttagggttagaaatgtccaaaaagtccttcgtatggggttgcaatttaacatatgtccccttcagaagagtcacattcttcacacgcacaaagtctccctctcctaagagcatattttgcatcatctaatagataaacagaaccaacaaaacactaatgagtgcaaatcaccatgggtcaaaagctagataaaaatggaccagaaaactctgtacaggtgaatatttcgcagaaaaaccaatccgtacccaataaggcatatatatcatgccttcctcagcaataaactccaagacaccacagtgtgagactttatttgcagagtcattctgaagcttaaacagcataggataatcaatatgtagagacgctgcagaattgctataatattaaccccttgaattttattcaattgaaagcattaaagataacagtaacaaaattgaaacttaaaacactaaccaagacggtcaagggctgagggaggcattataactgaaaaattcaatagggatcatgtatcagggtgacatataaaacaatttaagcatgaaagtagtaagaagtagaatgcttacttttatccccactctcaagttgtggctgcaaaatacatgagatgaattagaataagaataaacattgaaccactaaagattatagaaggaaaagaaatatgcacacacaagacaaatcgattaatgtaacgtttcaaaggattgcacccagaatgcatgagattccaccgaggctgatcaaaattcaaaatatttagttgacttttattgacaaggaaaaacaagaatacattcatctcttttctctttcctcttatcttgaagataacaataaaagatgaaacttaaaacattgtattgcagcaaataaagaataacgatcaataactttcatagaagttaaaaggtaatgcttatgaattctgtgcacgcattactttaatattttaaattaataaaggtttggtaggctatcctaaacaccacataaaacatcaactataaaagagtagcctataaagtggttgacgaaatataaaaatagaacatctaacaatgaccattttaaaagtctaaactgtgaagttaacaaaccttttcaataaatgatgcagagtaacatcgatatgtctgctcaaatgaggttccatgatacccatatccatcgaaatactgcacaaataaagaccaaagcaatgaagcaaaaattaatggcactctccaaaagtccaccccacaaaaatccgattatctaatatagaaaagaattacaatcttcacacttcgcatttgaaaaaaaaaaaacccaactactaataataaaataaagcaacacagacaccctctaattcactgccccaaaaaccaaacagcatgatatctttaaaccaactgttggtggagaattcaaatatatattaaggtgaaatacagtgactaaagtaaccagtaaactcatgagaaaagttgggatgatcacttcataattatatagtaaaagcgtaccatctttacagtgtattaggttgttgctgcctcaatgaggatagttaaccttccaaagatccctatatggaaaaaacttagtcaaaggactgaaacactaaaaactaaagtttgataaatttaatgaaatcccaagagcctaaatatcagtcttaattggagtcataaaacagtccttaatcacataaaaaattataaataaattaaatatcataataaataagaactttcaagaatagtcttaaaagaaattcgaaaacgaagtacacaaaatcacataaccaaagcatcaaataacccagataatagaaaacaataatagactagaggaaatatacattaacaaccacagtacaaaatttaagcaatcgagaatcatactgaaattgaatgactggaaattctaaagactcaaaatttcgctaagttcatcaaaacccaaattgaaattcatcttaaaatcaaaatcaagagaaaatcttgggaaaatacgcaatgatttgagattgatacctcagttttcaggtaaaccaaacaataaaataattcatatttagatctagaaatcgttcgagcatgaattaaattagtgtttgggagtagagaaaaacaagaaaataccttgttctggtggttgattgatccctgagaagtgagaaagtgagaaatgggtaaggattttcggaaattgggtaactttgaggtttgagctatttaaagggaaccgaatcactatacatcagcaggtgctgtgggggctgtaccacactaagatgcgccactgtgcgtagtgcgcacgcaatctgtttattcgccaagtaatttggatacttttgggctttgggccttggtttgggctattttaataaaatttatttgagaaaattacacttcataccctttttatattgtcctcctttatttttactttttttttaaagtctatgtcagggtattttgggtac

SEQ ID NO: 227370 - DNA, 821 bp, Cannabis indica
ttaaataatagtatggcaatttaaacaattcatttttcctcaatcctatcaacttcacttcatgtaccaaataatataaagaacaatcactactatcatctctatcattcataaattaattttttatctcttaaactttctctccttcctacctataataggttaatatataaaactagaagaattttactcgagttgcatgttttcgatcttgagtaagtttttttttttttgataaacacacttacatttaagttacaccaaaattttcaaccaaaagcaaaactcaaatattgttttctactttgtaaaaagttaccaagacttcttaaaaattatatgcactaattggtccgaaataacattataaaatggtttcatgcagcaattactccatattcataaacacaagtatgatgaaaaatctatagagttaaatggaagaaagaaaagggctcaagcaacagcaacaacatatatggaaaaagtaagaagagaaaacaacaatcctaatttcgacacaatcaacaaaccaaaagatgagccaaaaattcaaaaccccattgataaagataacttttttaagggctatatatatgtggcctctcatctttcaaaagtaaggcccaacttttgggtgcatgctttgccttccaaagcaatttaattacaacattttggaccccccaaacacacacttgtacagtctccactatatcatccatctacatctttcattcttttttatttttaaatatttataattaatttttcttgtggtaagatgttggaaacgtgccctagacatggtcgatatgtgt

SEQ ID NO: 227371 - DNA, 3331 bp, Cannabis indica
tgatttagtctgttgcagaaatttgatggttcatggttgaatatcattatttctttctcaatttgggttctttcttatcatataggttgataaattattaaagtagagacttaggaaactatagcaatttctatttgaggtgtctaggaaggaattaaatcttagatgttgtccaatcacatatttgaccatttgagtgtcatttggaataaaactaattatttacatacaaaatgacttgtgctcaaattagttatggtaagttttcagaggacttcatattgaagaactagtctgtttgtgcaaacaaccctcattcgtgattcgtgattttttactttgatgggttgtctgtgagagaaatatttgtatgtgcagtgtttataatgttgctaatgcagaattagtttcaaatctgtaaataaaatcaatttgactggtaaaagaatatctatggagtatagacttgggtatgccccctatgttttttcgtatttttgcaaccttgttcttgagaatctgttttctgcagctaagcccttgagttttaaaatattgcaatgaatcttatacagtaacaaaatgcttagattttgaagagcatttgttacttcactatatactatacatcccaaaatttcttggaaatcatgccgtacatgaaaattcaaattaaaagactgatcattttgtagaaaaaaagaagaagaaacaacaacaatttttaaaggattgtactagattgcaaaagttaaagagacatttagactaaactatctaatctttgtacggccatatcatgtcatatcaaaatttactgcttgtttatccaattactctatttcagagcaatttgttgttaagttgttgaggattataatttcttcagtgtttaacttatactaaaaagtttcagaccattgcatcctattcatctcattaggtgatattggcaatatgggcattaattgttttacttgttgtgacatgatcgacgaattttcacgtctgtcactatcttctctactaagaactagtttatattactcatggtttttagtagacttatcaaacattgaactggattaacttagtgcaatttaattattaatcatacggttcgagcttaggttaatgaagttgtcatttgatagattttctattcttgtttgaatttagtactgttgtttcatgaaactaagaagcattatccatattctcacagggtgttagaagagaagtaggagttcatgcaaagacactgaacgaaatcctaaagcccaaatcacgagaaagctcaactcatgccgagggcatagatggctttgattgtcaaccaggaacatcattgcccttgaactactcatccaaaaatgaattaaattcttcaacatcaaaaaccagaaacgcccttttagtaccaaagtcagagagcaagactcagatgcagaatccttctggtttagcagatgacactggggcaggattagaaagaatttttagctattatccactaaaagaatcaattggtcatactgaaattgaggtcattgctggtgctttacttggcttcttggtaagccttgttgtagacacccttatttgatgttaaatacactcttcttacatatcattttaattcggttcttatagaactaatatgcgttttagattatagtcgagttgcacataaattaattttgtagctagctaggttctacttctgcagcatatagaggtgaatgaataaatagtgtaataaaatcaatacattccataacaaatataaaattctctgtcatattatattctattctgttcgattcttatcttctttttcattttattttagactcatttgacgtatttgtaaacaatgcttaaattgatatgtgagatctgctactattctcatatcttccaagtatatatgcaagtttatagctttttttgttttctttcttaacaaagttaatatatatgttaattaattaccgactgcctaaaaatgaatctgatatataatagatgtgtagagttagtaaagggcagttttatttttttagatttaataacttggcatttggatagcattatccaaatattgtgacatagttaaaatattaactaatgagttaatgttaattcaaagtgcaaccttagttagactataggcaccaccaatgttacaatcccactgaagaagaaaaggaagagaatgatatataatacattcttaattataatagcacaccacttttctataaatgacttactaaaaatttaaactcaccaccaaattctgctgaccctcttaacattttagctaagtaaattcttagaaaaattcttaaatttttacaactttattcgttcaaacttttttttctcaaaatgtaggataggtccaccacagttcataagtttgttttttgcggttcgtaagttcatttttctacggctcgtgttttatttttttgaattttattttttaattaatgagatattttttcaataaatattttaccatacaatcatataaaaaaaattattaaaatttaaatatttattaataaatacttaaattattattattattaaattataaagatttaaacatgtacggacttatttatgtttgttacgatttaactctcccactcgacaattattttgctctgtagtccttccgttcattttggtctgttaagtgtcccagtatacacaagtatacacgtggcaaaattttataagtctaccttattttaataattaaaaattaaaaaataattttttttctttccttttttttcttttcctttttttttctttatgcttcttcttcacactggccagaaaactacccccaaaaacacacaccagcccaccaacccccactccaaaacccaacaccacaccaccccggccagaccccaatcccataaagatcacatctctcttttccttctctccatcatctctcttttgatcccgacaagaccaccacccaaagaacaaataacccaaatctgcaacccacaacccattaaaaagaattctttggtctcttttatttgacagggcacggggggttcaagtttgtaggggagcaacgacgtttgggttccaggggtcgacctgtttaggttcgaagggggtcgacctgtttgggttcccagggggtcgacgacgttttgatttgtaagggatcgatgacgcttgggggtttaggcatttgggtctgtaaagggtcggagcacagtacacctaatccgtccctccccggtgatgcacaagcagatagaaaaagattaacgagagagagagagag

SEQ ID NO: 227372 - DNA, 5155 bp, Cannabis indica
acatatatttttgagttgatatataactaatttgtagttgcttttaagttgtttaatattttaagattgtttgtgtagtatttttctaagttactgcaatgtgttgatgcctaattgatttttatattagagtgtagttgttatcgagttatttattcattgttattgtcaaggacactgttacataagttagttgcttctaactgtcctaactgttttcagttagttgttgtattctttctgttatgagttgtaagttttgttggttctgttagtagaggactgtgtatataaactctgtaattcattttctgcaattcaatgagaatacaactctgttcatcttctctttctctctcaagattcaacactgtcatggtatcagagctccaatcgttctttaagggagaatccggtttctggaataggaggagcatcaagattgaacaatgctcaaacacacaacaatcaacaagtttctctacctagatcgtatccaatctcattcaaccattctctgtcaataaagctcgatgagaacaattttcttccctggaaacaccaggttctagcctcaatcaaaggaagtagactccaaaagtttcttgatgatacacgtgcaccagaaaagttcttaacagaagctgatcaacgatcgaacatagtaaattcggagtttgaagactgggaacaacaagataatcttcttgtttcttggcttttatcctccatgtctgagaaaactaccaatcggatgatcggatgcgacaccacaactcagatctgggagaatctcaatgaatactacacagccttgaatgctgcgaatgttggcctctacaaaactcagcttcgaaacacaaaaatgacagggtcacttagtgactatcttctcaagatcaaaggcatcgtagatcaacttgctaccattggccatactcagactactcaagatcatatagagacgattttcaatgggctaccacctgaatatgatgtttttgtcacatcgatcaccacaagaaaacaaacctatacagttgctgaagtagaagctctcttaatggcacagtcggttcgaatagagaaaaatgccaaaagtcttgacatttcaaaagctgaggtgaatttgtcccaaacacgttattctggacccaacaattatggtcgtacaccttaccatgcctcaactgctccaccaggctttaccaatggtccaggacgtgcatcaggtggtccccccttcaacatcaacaatggatcatactacaaccctacaactagaggaggccagtccaacagaggttgaccctcacaaaatgcaccaaccagaggaggttctacatcatatggcaggggtcaaaacaacaattggggccaaaaggtgcaatgccagctatgtcacaagcttggccttacagtcaaacaatgcttttaccgttttgataaatcttttacagggccagaatgctttgcaaatttcactcccacggccaatatagctgagatacaagccctctatgctacaccagaatctgttggtgatgagcagtggtaccccgatacaggagcaacacatcacctcacaccagatctggcaaacttgagcacaagcagcccttactctggcaatgaataggtctatgttggcaatggcatggggttaaacatcaagaatattggtaattcttttatccactcccctttcaattctaaacaactgagcattcgaaatctcttacatgtcccctctataactaaaaacttgttaagtgtttctcagtttgctcaggataatggagttttctttgaattttacccattttattgttgtgtcaaggacattgcaacccagaagaccttgttggctgggaaccttgaaaatggtctctacaagttccaaaacagtcagctcaatcctacactcaacacacaacctgtgcatgtctcatctcagttcactacccctagcatttctcaatgtaatagtcttgaaacagatgtaaataactctgctttctctttgtggcatagcaggcttggccaccctgctgctaggattgtcacaacggccctatccaaatgtaatatctctgtttcaaataaaaagttttttgatgtctgcaaagcatgttgtcttggaaaatctcacaaacttcaatttcctacctccaccacaacatacaatgcaccattagaactattacactcggatttgcggaaacctgtacctacaaactcctcaaatggatataggtactacataagttttgtagatgcctactctagatacacttggctatatttgttaagaaccagagatgaggcccttcctacctttaccaaattcaaaactcaagttgaacttcaacttggaacaacaattaagactttacagtctgactgaggaggggagtttagatctttcaccaacctcttagagacctctgggattgttcataaacttgcttgtccacacacacatgaacaaaatggggtggtcgaaagaaaacacagacattgttgaaactgggctcactttacttgctcaagcctctcttcccttgaaatattgggatgaagcttttaggactgctgcatacctcataaatagaatgccaacacctatcttacaatactccacacccattgaaactctgtttcatacccccacccaattactctatgctcaaaatgctcgggtgcttatgctaccctaacctcagaccatacaacagaaacaaattagagtatagatcaactccttgtgtctttttgggttatagcctctcccataaaggttacaaatgcatgtccaagaataaaagactatacatctctagggatgtgatctttgatgaaaagagttttccatatgcacacactgttgccagtaccaacaactccaatcagtttctgcactcttcaatatctggtacaccatctctgtcctctcttctcacacaaccaccaacaccatccactcaaccaactcctctcacacctccagttcccaatacaatgtccacacccaactcacaatccaccactaccaacacagaaaatcctcaatcatctctcaataataatcctgtcaatctccctgttcagtccattcctactgagtccaatcccatcataaaccacaacaacagtgccaacaccacacctgtcaccacaaaccctgctacatccaacacctccactcaccctatgcaaaccagactaaaatctggtattaggagacccaaagctctgtcagccatttgtgaaccaaaaacagtaagagcagcctttcttgaaccccattggaacaatgccatgaatacagaatatgttgctctcaagaaaaataaaacatgagttgtagttcctcggcctgctgatagagttcccattggatgtaaatggattttagggttaaactaaacaaagatggatctctcaacagatataaagctaggcttgtggcaaaaggttttcaccaacaagctggctttgatttctctgaaacgtttagtccagtggtcaaggctgtcactattcgggttgttctaaccgtggctataacaaaaaggtggacaatacgacaattagatatcaacaattcttttctcaatggagatttgcatgaggaaatctatatggaacaaccaccgggttttgttgatcctgaatatccagaccatgtttgcaaacccaacaaggctctgtatggtctcaagcaagcacctcgtgcttggtttgaaaagctttcaaatgtgttgattcaacatggctttcaattctcaaaggcagatcagtccttgtttgtgaagtgttccaacacaagttgtatctacattcttgtatatgtagatgacatccttgttatgggaagtgatgatacccttgtcactcaactcatcactgaacttaatcatatctttgctctcaaggacctcgggttggtggattacttcttgggcatacaagtgactcgaaccagtggtggaattctgttaactcaaaccaagtatcttcaagagcttctttgcaaggctgagatgcagaatgtaaacacacagagcacaccaatgaacagtggtctggaactgtcgaattatgggagtgaacctgtcaaagatgtgactttgtacaggtccattgttggggcattacaatatgccattgtcacaagacccgatctagctttttgtgtaaacaaagtgtgccagtacatgcatcaacctttgctttctcactggacagcagtgaaaagaatcctaagatatgttgctggcacattagactatggactactgctcaaaccagtaaaggatttttctcttgaagtgttctgtgatgcggattgggcatccgatcctgatgacaggaggtccaccacaggttattgcatttatctaggacgcaatctggtcacatggaagtcacaaaaacaagccaccatcagcagattttccactgaagcagagtttaggagccttgcaagtgctgtttcagaagtcacatggttacagtcccttcacagtgaactgcatataccatgttcaacagtcccgtccatctggtgtgataatcaaagcaccgtgcttctagctgccaaccctgtcgtgcatgcccgaactaagcacattgaaattgacttgtattttgttcgagacaaggtgctacaaaaccaaatacaagtcaaacatgttcatgctctggctcaactcgctgattgtctcaccaagcctatatcgagctcccgtttctctaatcttcgaaccaaactgtgtgttgattctaaatccacactcagtttgaggggggctatcaaggacactgttacataagttagttgcttctaactgtcctaactgttttcagttagttgttgtattctttctgttatgagttgttagttctgttggctctgttagtagaggactgtgtatataaactctgtaattcattttctgcaattcaatgagaatacaactctgttcatcttctctttctctctcaagattcaacactgtcagttattaagttgtttaacaaaaaaaaaatatattttttaagttggtgtaaaattgttttgtagttgcttttaaatttattttatggattattggtgtttttttttcttcttggattgcaattagtgggg

SEQ ID NO: 227373 - DNA, 3180 bp, Cannabis indica
atataataaaaaaagtaaaaaataaattttgaaaatcactgttttattagtatataagaaaaaaaaaacttattaaaattttattatatttttatgcaataattaatttagcagccgctagaatatataaattgtattaaacgtgtgcttaattaagtgtacctatcattgatcatttgtataaattaataaaatattcatcattaaagtaagtaacatttttatattcattcaaaattaaaatatatcaaatatttaggccttgtttggatctttgattttaataagagggaaaaagaatgacatacaaaggattgaatcaatatgaattaagaattctatttttagaaaaattgaaactttaataattaaaatagtatagttttattgaaaaaggtcttgtatcaaattttataatatttttttaggaaacttacaaaataactgaaatttaagttgatttttacaaaaatactgtcacacagaaatctttttaaaaatactgtatttttataaaataatagtggaacacaaaacagaacaattaaaaacaatagtagaacaactaaaaaacaattgtagaacaacagtgaaaacttaacacagtacattaattgtatataacttacacagtatttttgaaaaaattccatccccacagtataaaagtaaaatatacttaaaaatttcagtatgtgatgtaattatccattttttttttcctactataaattgaccaattaaaatccaaattcaaataaagccttatagtttaaatgaccaattaattaattgacttattatgacaccaacaatatactaggttggtgtaagctaaggcgagttaggtacgcgcttagggcttacacgggctcaaattaatagaaaaaatcttttgaaaatgcacatatttcatcaataatttttaagataccaatatgtattcttataataagtagggttgaccatgggatgcggtgagtcaactgtacgctttggggtcccaaacgtttagggctccaaaattgcaaaaaaataattataattatgtagatcgataaaatattaaataaaaaaaatataacgaaatagtttttagtttagtagtagagattgttattttaggttaagaagtcatcacatcaatttccaactttcaacttttaaactttttttcagaaatatttaatgtgtaaacatataaaggattgaatcttaaaactcgtaagttttaaaaaaattcaccactacacaaaagaaatattgcaaaaaaaattttctttaagccttatatatactttaagaccgacctcgataatttgggcccaaaaattatttttggacccaatacaattggttagctatctagttgaattgcaattagaaaaatagagatgtatagatgagtttcatagttatttatagacaagaagttgaattagaaaatagaaggtacatatcatgctatttaggaatatatatatatatatatatatttatcatgatatctttcttcgtcgatgggaccatgaatgatagctcagtatctccgaccccatacaatatatacatatgttaatgtttttgttgttgttgttgttgttgttgttgtcgttgaggtggttgcacaagtaaaagtagtgacgttccacagagaattaattaaatagattagaggtatatatatatagtgtctatagtgagaggtgtgcttgttttgtgggatagtggtggtttcacatgttcttttcaaatagatattaagctccaaagtcatagttaagatgtgtccatcccctctctctcccactccatccatcaaacctttttcctattcacaattcccatattattatgttttatgaaactacgttaatttggtgggaaggaatgaaaatacaaaaattaataagaatatataataaaataaaatttaaaatatataaaaaaatttattatatcactatatataacgaacattcaatgcagattacgttcattttcattaccttgaatttaaatgaaacctaaaagtattttgtgataatttttaaattaaaatatgtttattcttttttttttttggtaaatcagaaaaaatttgttgatcgcaaacaacatttttacaagataaagttacttacaatactctttatcttttctatttaaattcttagtatttaactagttcaatctaaaataaatactataagcaatacaattaaaagtgaccttaacagaataacactttcagatacctatacacaactattttagcagtctaagagatcgacggaaagcactaaaccgaactaagagaccaataagaaattgtatcgaatgttattctccgatcaccaatcggagagaggaactgtcctaattgaactttataactcctcaatttaagaagaacgagctccttaataggagaggttagtaaggtacaaacattttccaaggctcacactttaccttttagcattactcatatataatagggtttaactcttttactacatatacttacacacaatggaccctactatggaaaaccctacatactctctagttttttctttttcctttttttttttttttggtggggtcctttgtccctcctagctagctatatatatagttttaggtggttggctcaactagtggaccccacctctaagtacactaatggccatgataccttaagcttttcatgcaattttttggaccctagcttcaatcccattataaattatcatgaccttccttacccctttatgcacatctatcttttcattattttctccttcttcattctatctctctctctctacttgattattatgttcatttcttatatagaaaactaactttaatattcacaattggtggtggtgatcatcatcatcatcaaagtatattaattctaatttcttttatgtctgaagatatgaatctatctattaatggccagtctcaagtgcctcctggcttcagatttcatcccactgaggaagagcttcttcactattatttgagaaaaaaagttgcttttgaaaaaattgatcttgatgtaattcgcgaagttgatctcaacaaactcgaaccctgggatatccaaggtacgtacttaggttaaaagaaattgaaagatttcgttgaaattgtttgttttgaaat

SEQ ID NO: 227374 - DNA, 1669 bp, Cannabis indica
aattaccccaaatgcagtattttgtaaaatgcccattcattatagtgagaggacgcaagagatttggtgcatgtatatacatgttttgtgttagtctctttccttcgctatttctttcttaatattttaattgatttgatacatttggattcttcaacatgttgtctatacctaaatttatcaatttatatccaataacaaaaaggaatttcaaattatttcaccaaatatattttgcacgagttacttatgtagtactctttttttttttttttgtaatcggtatattactattgactttgttcctcatttttcatgtttcttaatggaatattctccaatttctttgtataaatgtagtaaacacaaaaagggcattattttgattatgaatccatgaaccaataaggaccaaaggcaagcagagacatatattatgaagctaatgtttggtgcacttctaaccccaccaccacccatgaaatccaaaactgaaggattctcttgtgctcccctccaaaatgactattccaatttccatgcaagtgggaaaataacttgcaaaatacatacaagattcttgtattaattagggactaagtttgaatgaattatataaatgctatcttacgttttataaatttagctacgaataaagtgtagtagagaaagagaaagagaaagagactattggaagtggcatttggcgtcattgtgcaatgagattttgtatgtggtgtttattttttatttttctttccaaggatagttaattatagagtccttttctgtctcctactatggatctctatctctgcatccccacacaaagtggctctaattcaatctctactcttagctgtcttttagttatacataggcataacccaacaaaagcaatgcacaccccaatattttcactcccactacaaaacaaaccttccatatattttttctttctaaaaagccctactgccttgcattatacaatcaatatcattgttcttagaaacacttttcatttttcattcctaattaatataattattacatcagtaaattatacaaataatatattatgtattcataatgagacttgatttcaaacataaattaatccagaattctgtaacatgacatgttcagattatttttaaaaaaaaatccactaattttattgtcttatattgtcatattagacattcttttcacttttggggtcttttaatttagaatgaactaaaagatcttatgaatgtttttttcatggaaataaatattaaggcttttgctcggagttgggattttagtaggaaaaaaaaaaatagaggaaagaatgaaagaaaaggcatagaaaattcatgtttgccgaggagtggaaaaagtgagttattttttgttctgaacaattactgtagtagctaatactcttgctaaatttacatttataactactgttaatacaacctggtggcttggatatcgaatttgtatcatgataggggtggcaaaaaaaaatttcgacacgacatacgaatacgaacacgacacgaatgttacagactaagatcaaaaaaatcaaacacaggtcgacacgacttgatacaaaataaaaacatgtcaaatacgacacgattcacttaccgcgaatttggagaacaataaagaa

SEQ ID NO: 227375 - DNA, 3543 bp, Cannabis indica
aattataatcagcatacatgttagtaaatattgaattttgataaacaatttccaacataaatggggataggttggatcacactcttaagaaggacctcacgccccccatagaatacaacttgttctttcaactaaataattttttgcacacctcctctttaataccatattacactcttttttctctatcccaacaaaataaaggaaccccaaatatttctcatggcaagggacccaaagacatagctagcaaaattttctcaatatttcctacattaggacacatacacatggcatatttctcaaaattaaccttttgcccataagctttgccagaattaaagggaatattcttgaaccaagccacacaatctttaccaacatcgaagaagaaaactcattcatagaaaagagatgagaggtcacatgtcctaacttgccatatggaaaaccattaagcaaatccctagaagaggccttacacaccatataagacaatccttcagcacaaataagaaacaaaagcaatactatttttggattcgtcaaaagtagcatcagtatttagcttaagtgttcctgtaggaagagctaaccattttggcttaggatgtctgccaagaggtacacctaattcagcagctccagtaatagtgcgcgattcatggtgttgtataatggctctagttgatttgtaatcaacgaggtatgaggatgcaaacataatcactacaacaggcttttttagtaacttgtccatggtattcgacatttctttcaaactagatacaccagcaaagaacaataaactcttcgaattgtgctgtaggaaggttgattgagagatgcagcagaaaatcttcacataatgagaagcaagcactactaaaatcaatacttaaactagaaagacgccatacttccttagctttgttgtagaaaaataaggcatgagttattgtttcaggatgtattctgcatagagggcaaataggatcaatagcaatgtgccttcgatggagctctgcagcaactggaagagccatatgaaaaattctccgcataaaaatccaaaccttagaaggaagagaaggcttccaaaatgtggtccaccagtgatcagttattgaagagctactgttgtcccctagatcagcatcaacaatgctaacaacaaaagaatagcctgacttaactgtctaagaaactgtggatgaagaattccaaatcaaagtattagcagatggaaaaatggacagtggaatactgataattctgtcaatatcagcttgggaaaatttgattgcaatgccactaggtcccattgtctattctgagtaatcaaatcggcaacaatcaaattcgggttagctcctttaaagtaaaaaaggagtgaagcacgtatggcctagtatccaaggatctgatttgcagcaaatatcacaaccattaccaactctccatcttaaacctttttgtagtaattcctcaccccagacaatgcttctccaagttaaagatggtgaattaccaagtgaagcatctagaaaattcccatttgagtgatatctttgctgaagtattctactgagaagagaatgtggaaattccagaagtcgccaagctttcttagtcaagaaagcttgagtatgaaatttcgaaagcctaatccaacatggattttgtctttacaaaggaaattctaatgtttccaatgaatggaattaccaaatgacgttgaacccaccagaacctagcaatcctgctttcaatttggcaacataaagtgactgggagcctgaaacaactcatggcatatgtgggaattgcttgaataactacttttaagagaacttcctttccaccaattgagaagagctgctctttccatgaggtaagaagtttccgaattggattagtaataccactaaaaagtttcattttttcatggcctgcaaaagaggggagcacgaggtattgttcatgacaacgttgaattggcaagccaaaaagttcttggaagtatctttgatcttactttcttgtgttgtcaaagaaggagagaacacacttattagggtttatagcttggctagaggcattgctgtaagtatccaacgatcgcttaattgcctgagcttattgtttagtagcacgacagaagagtacactgtcatcaacaaagaaaaggtgtgacaacgagagggcaaacttggatactttaagaccttgtaaagagccaatgccttcctcatgttgtaaaagtctagagagacctttagagcaaataaggaaaaaaataaggtgaaaaaaaatcaccttgttgtatacctcttaaaggaatcaagtcaccatataccactccatttagcaaagggaaatttcacgattcataaaatgccccatatcaattttgactccccttactaatttgtaccaattaattccttcgattacatgaacttcccattttaccctttttttaatataattttcgctaaaatcgcgagatatcattttgtggagtattctatgtattcgaatatttcttgacagtttctcgaaacattcttgatgggttcttgatgcgaatgtctcaaggtcaggaatgacctttctcgacgagttgtcgataagttcttgaaaggttcttgactcaaatgtcctaaggtcagggaagacctttctcgaaggcttttcgataggttatcgaaaggttctccactcggatgtcccaaggtcagggaagacctttctcgaaggcttttcaataggttctcgatagtttgtcgaaatggcaaatgattttgcatttccaatcatgattgagatgtgttttagcaaaaaaaagtcattcttggcatgttatctttgcgttctcaattgtttgtcgatagttttttgatagtgtgtatagttgtgtttttaaactttcttgtcccatgttattgatgatttctcgacatgttatcgactgtttctcgatgattgactgattattattttccacgattattgattgcttttctacaagttctcaattggttattctgatttagttgttggtagtttgtattgaattgcaagatcacttgtgtttctggttgtattttatgatagtgcttagagtgttgaaggatttaattgggtgtataaaagcgaacttgcagagtttcattttttttctttgttattagtgttaggctattagctctaatatttattttgttgaatttatcatctatcaatctacattggccaaaaggagttcccttcatccttgcaataatctactgaagagaaagcaaaagtttcagccttccaaaattgggcaaaaggggttcccttcatcctttcaattaatccttcatgttttttaaacttttgaacgatttaagtgaatattccactccctctatatgccacacgacctgaaaaaatgggctgaagttggaataataagttctggagccatctgtaaaatataaacaatacaataattaaaaaaaaatgtaagagaaaacatgataaaaaatactaaat

SEQ ID NO: 227376 - DNA, 1892 bp, Cannabis indica
gcactttcatcaaattgtcactccccacactaagaaacaatcattttctctttctttccccatacaacggtaaagatcctttctttttggtctctcttgtcttgttatagaggactaattcattttcataacttctcatacttcaatggacaagaaaagtttctgggtgtttttcattttgttttctggcttttgggtacttgctttatctgatattaaagatggtatgcaaattttttgttctcttttggtcattttaagtactttttgagattgaaactaatgcttgatatataataatgtataatggggtcttatttttgcaggtttcttgagcttatcttgtggtggaacttcaaattatactgattcatctggtgtgttatggatcccagatagtgattatattagcttaggcaacataactaccattaaatacaatcaaaacaacttcacaacaactgtttcagctcggtattttccagttttcaaaagtagaaagtgttataggataccattaaagaatacatcttctttggttcttattagagctaagtttgtgtacaaaaactatgatggtcttggtaagcctccatcattctctgtttcacttggtacagccattgttggcactatagaccttgccaaaaatgatcctcagatagaagagtttgtatggccagttagtaaagagacattgtcgttttgtttgcttggtgttcgacgaaaaggcgcgcctgttatttcttcacttgaggttagaccacttcctcagggagcttacacaagtggtgttgaagattttcaacataagtctcttaggaagaatcatagaattaattgtggttacacaaatggttctcttaggtatgaacctttcactttcaacctcttttacattagattcttcaatatttttaggctaaatgacattttgaattctgtgcttataaaagttattgattagacccttgttttgttaaatgacaaccagtttagtttattttgtactattttaaaaaatacagagtccaaattgttatttatcaaaatagatagtccagtttataatttttacaaaacacagaatctgaaatatttacctatgtttttatggtagttttcttaattgggtttctttcaaaacaggtacccttttgatccatatgatagaatatgggattctgatatgaactatacaccatttcatgtgtcagctgggtttaagattcaacatagtttcaatgtgtctgaaagtcttaaggagagtcctccacctgccattcttcaaactgccagagtcttggctagaagagatgttttgacttacaacttgtctcttgatagtcttggtgactgttacatcatcctatattttgctgggattcttcctgtgtttccttcttttgatgttttaatcaatggggaggttgtacagtcaaactatactgttaaaacttcagaagttagtgctttacatgttacaagaaaaggactaaaaagcttgaatatcacacttaagactgctagcttctatcctcaagtcaatgcaattgaagcatatgagatccttgatattccattagaagcttcatcaaccacaggtaattgtaaacaattttatctgctgcatacttgtatactattaggacttaggaaccacattgaccaagtatgagattggttagtagtagtacataactactctaattctagcttttgggagtgagttctacccaagctgttgtaccaagtggtatcagagccatccactctcaagtgggactgacctcgcggaagaggtgatatgctccaaaaggggatgtatccaagtatgagattggtttgtaatatataactatttgggtgcccttttcttttaggcgagttct

SEQ ID NO: 227377 - DNA, 2300 bp, Cannabis indica
aaaaagttggattggatcggatgcccacccctactttcacgagtcttgtttgtaaccttaaatttcagagccaaacattgacacaattactattttacctctcaaataaatgtcatagttataattacctttttacccttattcttccctcaaatgtctacataattaacttgcatgcatgaaagacgttttactcaatttattataacataataatataaatactatattacccttatccttccctcaatatcacataatcatgacttttcccaagttaaagattcctctttcctcataaaaattaacataacacaactttctcatgccctctatatataccactccctaaccctagtgcaagtgccacaacacttaacaaaataaaaaacacatagaaaagtgcaaaatagagagagagttagagtttgtaacttccatcaatggcgtccaagcaaacaccacactacatagggtacgcacagctagtgccatcaaaccaagtccaatcgaacaggggagcgaccgggaggcaaatgatcgagtcgactgaaatacaaaaagttagcaaggacactatacaattctaccaaggaaataaagtaaccacctttgacaaaaaaacttatagctcaggagagtttgtggacaagagaagaggtctagtgggatacaaagaagagaaaaagtatagtcaaataagaaaatacaaggatgtggatgaaggctacactcatgagtatgagactcaagttaagttcaagcatgttgcttatcctaacaagcctactactactaatcatcattattatgattttggctctaaaaacaagcatattagttactatgaagatgatgatgaggaggatgatgatgatgatgatgatgatgatgatgtggaggatgatgatgatgatgatgatgatgactactagctagctagggtttctttcttttttatatgtgtatgtgtatttgttgttttatttatgttttattagcgtttgggtttaatgttttcttgttaaatttgtttgtttgaagatgatgatcggtttagatctctctatatatatctatctttaattatgtgtttttttaagaagaattatgtgtgtttttttaacgtaatgattagaatcactcatgaatttacgatgcacacattcgcaaacagtatataaacctccttgcacttggataaacccaagagcatgctttaaagtcagcgagcatcatgacaaaactatcccgataatttagatagtaaagttataaagtcatcaaacaacacaccaaaagagctagagtgttagcttgtatcagtgaatactacacactaactcattaacatatcaagattaatggtccccaaaatatttacaaaacaaaaaaataagaaaaaaaaaattaatcctctagctagctatgatattaaatactaataaaagaaattctcaatagttagaagataacaattctcaaacaaattgtatttaaataaacttatcggcaaaatctctgtaacagttggctctcctcaaatttgacctacaaattaataataaataaaattctattaccacacaatttaataaaaaaaataattaatgtgaataaagatggttaaacaatccatattataatgtcatgaagactttaaacatttatctgttggatctgaaaagttatttgtagaaggcatgagtataaaatgaaacatttctcatatacctattgaccatatcgaaaatctaccttaaacaattaaggataagctataaaaaatgaaaaccataaaaaaaaatgaaaaaataagcataattattgtgaaatgcagtttggttattactaattagctttgaatattacatgtttgttaatttatgatttattttagttttacatatttgttttaaaatacttagctaagtttaatttttgtttacaaataaatatttaagttctatatttgaaattctcataggtattagatgttaattaagtcattattaaatgttattttttttgttagtatatttaaattaatttttaaataacaaataaatatttaataacatagaccaatcaaaatgttacatgtagtagttcaattactcataaattactcctatatatatacattaataaatatatattatatataatatgtatataaatatataaattcaaaatagaaaaacaatcacctgactacacatacatgtcatgatgacaatgatgaaaatgaaaacaaagtccaaaactaatatgagctcatataataagtattatatata

SEQ ID NO: 227378 - DNA, 4915 bp, Cannabis indica
tttgagaaaggaaatcatggcctgcatctaagagcttgggataaactctgccttcctaagtccttaggaagccttggttttaggaaaacgaaagaaataaacttggctttcttggccaaatggggttggaagatgctgaatgattgtcaatctttatgctgcagagttcttagagccaaatatcttcgatgacaagattttctcaactgcaagtataaagattctgactcgtggttctggaagaatgtgatcaaagctaatgcaattctgaggaagggggcttgtaggatagtgggtcatggaagagacacctgcatttggagggatccttggattcctcatttaaaaggtttcattccgaaaccaatgggagaaatcccaccaaatttgacttgggtggctaatctcctcacagattctggttcttgggacaattctaaacttagaagattgttcgatagagacattgtctctactattttgaaaggaggcaatccttcaggccaaggagtggatagatggggttggactttagagtccaatgggcggtttacaagcaaatctgcttaccttgcgcaagccctggaaagagccagccattgtgaggtggctccatcgctttcgaacaaactatggaatagtaaaattttggagcggcataagattctttggtggtgcatcctctcaaaggcgcttcctgtcagagctgttattgggaggagattccaaatagaagataccagttgccccttatgtggaaagggggaggaatcttttgaacacatttttctaacttgtgatgtggcgttacacatttggcgatcatccccttggggcatttatccggtcagtggcaatgggattcgagtttgggactgggtgaaatttctctggagtcttaagaacagggacatccgcgaagaggaggtttttcttttcgcatcgattgtagttgacactatctggagggcgcgaaatgacaaagttcacaataacctttccccggatgtatcaaaatgcattgaccttattaacacttcttttgcagattttcatgcttctctagtgccgtcaccgactccgaccttgacagaaaactggattccaccccctgaggattggattaaactgacttgtgatgttcgagtgggactggcaagcatgtgcacaactgttgttgctaggaaccacctgggtgaggtgattcggatccatacagctcagttggacttttcggatgctttgtgcggagaagcagcgacatgttgttcagctatttctctggcaattgacttaggtttaaagtttattattattgagagtgactcgagactagtgatcaatgtcctcaatgggaaggaatcccattgggcccttgagaactatgcctccttttgtttgagatcaactccttcttttattagttgtaactttttgaatattagtagacagtgtaactttgctgcccataatgtggctaagtgggcgctttcccaccagatgtttggatgtattccggtctccgctttgccggagaacttactttgtaatgaccgtgaggtccaacttttggttttatttaatgaagtactacgttaattttcaaaaaaaaaaagatatgtaaatcattgcataattctagaataataataagttttttcaaaaaaaaatatcaaatataagtttcgtttgtaaaattaaaatcgaaaattaaacctacgagaaacaattttatataatttagtgaaagagttagattttttttttatcattgactattttaccattgatgcaaaaatagaatgacatatttgtgttttatcttacgaatataaaaatatcatatttgtgtgtagttcttaattattttacttttgatgtaaaaatagaattacatatttgtgttctaaacttttaatataataaaaattcataaccaaaatcttctctaccgaaaaaaatagtttcttcttcaggtaatcaatcttaacatatttgagttgttgtaaataattaatttgaaattttttattaagtggtcaatgttcaaaaagaaaaaataattaatttggaatagttagagagaaaaaacagaataaacgacagaaaatgactaaaacgacatcgaaattatgcaaacctaaaaccacctctaaaaccctacaacaacacttgctttgttagtctcagacccgatcattttcatttgcagaaaccctagaaaatgtcgtcctcaacctccattcgccatcttcgccatttttcatccaccgccaaatctgcaatctccatctccaaagcaaagttgaagctccgaagcgagtatgatccagacaaagctctccaaatctactcctctgtttccgatcactacgcctctccaaccatatctcgctacgctcaggacctcaccattcgccgcctcgcaaagtcccgacgtttcaccgatatcgaagctctcatcgagtcacataaaaaggatcccaaaatcaagcaagaaccttacttgtctactctcattaggtcgtacggaagagctggaatgttcgagcaggcgatgaagaccttcgaacaaatggacgaattgggcactcccaggtctgtgatttctttcaattctcttttaacggcttgtaatcattcgaaactgtttgataaagttcctgaattgttcaacgatcttcctaagaaatacggcgttttgcctgataaagtgtcttatgggatattggtccggtcgtattgtgaggctgggacacctgagaaggctttagagatcgttgcagatatggaaaagaatgatcttgaggttactgctgtaacttatacgaccataatggatgctctgtataagaagggccaggctgatgaggctgataagttgtggaataccatgcttgaaaatggttgtgaagttgatgttacagcttacaatgttagaataatgcatagccatggcggtgaaccagagactgttaaggctatgattgaagaaatgaggaatgctgggcttaaacctgacgctattagctacaattacttgatgactagttactgcaagagtgggatgttggatgaagctaagaaagtctttgatgggcttgagggaaatgggtgtaatccgaatgcggcaacatttagatctttgatatactatttgtgtaggaatggggattttgataaagggtataagattttcaagaaaagtgtgcaggttcataagattccggattttaacacattgaagcatttggttgaggggttagtgaagaagaagaagattaaggaagctaaaggaatgattcggactattaaaaagaaattccctcctaatgtattggtttcttgggggaaagttgaagagagccttggtttggtttctgcttcttctgaggctcatgcagctactgatgatgaggatgaagaggctgcagcatgagatgatgatgataataatctgtttgaattgataagtattggcagtgcaggatatagagttttaatctttgaattgactatggtatcatgaaagtgtaaaagctttagtttttctttatctgtgatgggaattcagagttagctttttttccaatgcttattctgccattttgtttagagcttcatcattttactgctagtgaaaaattacattctttttttaacaccattaatacattctgttgtattcgagtcacgtcaatgcaattggtgtggccttacttaccaataagcactttttggtgattgaattcgtaagaaagatgcaccttgtaatgcccttaaatgttgttcttttgttttttgcaacaaagtttgctagaattacaaattttcatccttacattgctgagtaaatatagttatttatgcatttaagccatggaaggagtgagatggtgggtcttggaaagaaatatgggtgaaggagagatcaaccaatctaatataattctttgtgatttcaaatatgttgtagtagaagtttttaagatttatgaagatccaaattcactaaatcaagttacaaagtcaaaactaacgagcttgataactgatatagtaatattcaaaaggcataatgagaatgagaaatttgatcaaatgtgcataatcataatccaaattttaaattccactttttaaaatcaaaatgctttagttctgtgttgaagcttttcattttctttttatataaataaataaacacaaaatatgtgatttaccaaatatacttgggttggacatgaatattttcttttgtcactcacttttaactatgctgcctattttcattttttcttacaaaaaataccactgttggcactgcagacttctctctttgtaacaaaacatacacaggaaacttacaaaaatactgaaatttagattaacttttacaaaaatactatcacacggattttttttcaaaaatattgtatttttataaaacaccagtaaaacacaaagcagaacaactcaaaacaccagtagaacactagtaaaaacttaacacaaagcagaacaactcaaaacaccagtagaacactagtaaaaacttaatgcagtatactgcagtgtgaaacttataaaaaatacagtaaaaaagtaaaaaataccgcttggaagtaattttgtaaaaaaatggcaaaaattagtataccatgtaaatttcctttgttttattataaaaacagtaacaaccaaaaacacatattaagaataagaataaataggattttgctctctgaactattacgcagagttttgtccctgaattattttattatttatttattttttggtaaaaaatctccttgaattatagaaattcttatcaatttgtccttttaattgtcttttgtttataggtgttcatggtttggtttggttcgaatttttatttttatttttgtaa

SEQ ID NO: 227379 - DNA, 6824 bp, Cannabis indica
gagagagagagagatgtaaacttaagagattaacccaaatattattaaaacttcgtccctgcccccttcctacttttctcaaatcaagtaacactaaactccaaaaaataggcaataagatttaattacatatcctatttacaaccttaggggccttaggcaatcaacgtccatatctattttgacaaaggaagaaggatcatgcacaaaattacaaagctcgcatctttcataattttttccccttaaaataaacaaagctggtatcaatccacatcctccgtacctgtaacacactgtatacagggactcctttttcttgtaaaacagatggattcaacatggtaacaagctgaaagagcaaatctggttccgcatcaaagagatccggaagacagttacgcattacctagatgaaagtacacatagttagctatatttcattaagcaaaaacttgaggaggggaggagagaagagggggtggctgtggcactagcgccccaaacatatttcacaggcacctgtgcaaccagatgaccatatgcatatgtatacatatatcgaaattaatcttaataaacaaaaggggaaaaacataatgctcaagtacttttcacatttttacataaatattcatttgaaataaattatatgtaccttctcaaaagcatcggcttcattacccggaacactataccaacattttggctctcccctgaagagatactagaatgagtgagcagaacattaatattataaatacaaaaaaaacacgaacacataactcaagaaaaagattaaaaataaataaaacttatgacaatagaattaaagaaaatggaacaatcagaaaaatcttctcattctttatagttttcccacagttcattttgattacactatacataaagcaacagccaatcaaattttggagctaatgttttacataatgacatccagctagaaggccaaacaaaccaacagctatttgcctcctcctaagcaaacttacgagagcttgcgggacatgtctacacagtagtagttacaaacacgactgatatacttttactaattaaaaattacaggtgtcacattttatgaccagcgtgtcgggattctacccaaaaaaagaagaaaaaaatcccaactttcacatacctcaccaaattcagactatcttgataactatgtggtaccttatctcaacttgctcaaaagttacaggtttacagatataaaaacacaaataaaatatcacaaaattgtgtaaaattaagaatatcaccatacataccagtggtggtaattcatggagtaaaagcaatgatcttcaaagtgccagcaaaaagatgagaatagcattccaatatacaaccaaggcaccattactcctgcaatgttgtgatgaacagctcgtagcacagacccttttaacttgggcaagttattgagattccatgggttactacaatattcatcccaaaccttagcctcaacagactcaggtctctggtcatctacacgtggaaacccactcccatagacagaagtatctaagtcattaccatacataacctcaacctcaccaagagatccttccactatttcccagaattttttttctatttgcatccgggaagcagatcctgacccaaaccatttcttcttggctctatcagccatgcgcctaaaagattcaattgagtaatgcttgcccgggacaaaaccaaagctatctttctcagaatttaagcaatctaagcaataccagtttccaagtggtatctgctttagaggtggagagagacaataaatatgccaccccttatcacacctatcacataaaagcatcacttctccatgcaacccacttttgcattgctcgcaaatctgatcacgctcttcctcctcctttgccttaaccacctttattttgtcgccatcaatattcatccgcctccttttagaactagaattttcaatcctacattgactcctcccctcgtgcattaccctcttaccattccgacctggctctcgatttaactcattataatggcattcataatcatacaaatgttccctgtacaactgagataaaacatgctttgcacactctgaaatctttcttgacgacctcacaaaccgagaaacatttccccactttttgtccttcacaaccttatcataaccgccataccgcttcacagcattaaacaatttacataaatccaattcatccccctcaaagactaccctccttctcaacttcttaccagaatgatcctccaaaaacctattatactccaagtcaaaagtcttggaatcacatgcagcagggcgagcctgcaactggtgaatggcctgtgttttagtgggaaacgtaaacgaatccaaattcaatgcaaatgggggtttccaatttttaggtggaacaatcttacaaatcccatatggctcagcctctggcctgatcttataaataaaatccaaagggtctctaaactcatcctcagtgggataatacacaggcccagatggtatactcaatgattcagacgatgaaacgctcgaattctgccccaacactcctttctcaacagccctaggtttacctttccccattaaacaccaccaaaaatgtcctacacaactttctttttcacctaaaccataaatagaagcacctaaataaaaatgaaagttatatacataccatcatcaaacaatcattgttctccattaccctaaataaaattcaaacttaaaataaataaacaatttctagggtttgcagcgtacctgatatgagagagaaaaatcaagtaagagagtggttctgagctttcctctcactacagtaattataataaagactcaagaaaaggagtgagtttcgtgggagattttagttgaaaaagggcgaggattaacacgaaagataataaatcagtctttattgcaaattagggtctgatattttcttaaattacgaaaacgacaactgactttttttgttattagatttttattcccacacacacccccccatgtggccgtacctttcgtcttcgttgagctctccactcacgcgtgtcttcttacaatccacgtaatctaacggcctacatctcatgttgggagaaaataacggcttggatttattgtctgtaaggaacgatgtgtagagcgcgtggggttacgaatttaagaaaaggaaccgtactaatcggttctggttggaagcacacgtgtcgatcgtgtgtaatatatcggataccccaattacattcaaggttgtttaattgacggctgagattgcattatctattcggatcttagtcgtctacgggttttgacttttcattcgaccattttttttattttactttctgattagacatacagtaacaagttcatttccaaaaaaaaagaaaaaaaaagaaatagtaacaagttctttttgtattggtgcacacttggtatattgtaacgatcaacggtctattggacaaacaagttctattaaaaaaatggacaaacaagaatgtttcgtgtcaataatttgtgttgctaagtttggacaattctcaattatcttttttttttttcttaacataaacattcattaccaaaagacaaaacggtaagtggaaacaagagattccaaaaaccaaaaaaaattaagcagcaacccacgccgcaagagcatggacaggaaagttaagagtcttgtgaatccacactacctattagaggttattagttgtctgttattttcggttggttaggttagttataaggttgttactcttggttgttgggactgttatcctagtcttgattgtaactaactccttgtgagttggctgtatatataccgtgtttccttctcataataaaatcaattaagcttttgatattgtttacattgtaatatggtatcagacgtttaaaacaccttcttcttctctttttctctctcgacaaagtttcgcaccattgattcacccattgattcaccatggttagaacacgggctactagttcaagacactccggccgaactcctctgccgcacacttcctcttcgattccaggtgcttcgtcgattgacacgccgatcgttactccagctataaatccccctatagaacctcatcaacagaatcttccccctgttcatcggcctgcgcatgaagacagctccagtccatattatctcagctctggtgaccaccctggtttgatcttggtcactccgcccctgtccgatcataactttcaaccacgatgtcgtgatttcgagctttctgtgggtgccagaaacaagactgcctttcttaaagacactcttccctctccacctgaaatagatcctctccacaaccattggactcgctgcaatcagatggtcatgtctcggatcctccattctgtgacttctgagattaaaagcagcataatgttcctagacaccgctgttgaaatgtggactgagctccattcaagattcgatcaagaaaatggaccttgaatttttgaactccgagaacattgatcaccttacgccaaggcgaagactcttcttactttactaaactcaaatgcatatgggatgagattcaagaactctgacctagaataccctgtacttgtggtgcttctgcagataacttggcttttcttaaccaagaacaagttttacagtttcttactggtttgaatgaatctttttccctgtccgtgctcaaattctgttagttgagccctttccctctctatccaaagtgttctccatgattattcatgaagaaagatagagaaagcttaaaaatcctcatattccccttattgcatctgtccaagaacccaatccttctgttgctcttgcccaaactccctcggcatcaacatctaacaacaataccaataatggacacaataagaaaatgagaccctactgctcaaattgtcataaaccagggcatttaaaggataaatgctacttccttattggtttcccctggctatggaaacaaacgacaatctaataaagaacatggtgctcataatgctactgtatccactaataaattgctggccaatttgaccaaaaataaagatactcaagcactcatttctcttctcagccaaaagttgcaaccaactacttctgatgcaccaccagctttttccttgaacatatctggtaatgtctctaattcttgttcttgggtaatagatagcggtgcaacacaccaccatttgttgcaaccaatctctgttcataagtatacatcacaatgtcatagctctctttgtttctcttcccaatggcaccagaatccccgttcataaatcaggcaccattaaactttttgacaatctcactttgcataatgttctatatgtacatggttttcaactcaatctttttagtgtctctagctttctcagcaactttaccaatactatatcttttactcacaattactgttttcttcaggattcacagaagaggaagattgggacagctaaacggattggacacctctatctcttgctgccattccccaatcctagaataaaatcacattgtaatcaatcatgtaattctatctttttcttggcattgtagacttggacatccgtccatgacaactaccaattttatcaataaaaagcttcatttgaatacttctcacaatgtacttccttgctccatttgtcacttagcaaaacaaaagcgattaccttttaattctcaaaataacattgctaactcatgctttgatttaattcatcttgatatgtaggggcttttccacatccatagcattgaaggttttttatatttccttacaattgttgatgaccatagttgatttacttgggtttacatgctcaaatccaagtctgatgtacaatctataatccctcaattctataatctcattcacactcaattttctgcaaatattaaatcagttaggtgtgacaatgcaaaagaattgaacataacttccttttatcttcaaaaaggcatacaaatctacaactcatgtgttgaaagacctcaacaaaatttagtagttgagagaaaacatcaacacattttgaatgtagcaagagctttgtgattaatgtgtaaaaatatacatttattgtgtaaagaatgttagaatatcttaagtcataattagtattttcattattttagttggatatatttttaagattgaaaatatttaattgtgacttgatttattttattgtgtagaaagtaagcttgatttaaagaagaattggaaggcacgttacttttctcaagtttactacccaaagttctatatactattttggatttgtcaatatttccattgggccaagtttaattttcgcactttgcaagcccaataattaattgtccatgtaattggactcaattactgtccaagaatgaagaggaaagccagcgtaaaagcttttccagtgcacaacaaaggtggaacacggtccccttcaatagccaaactagtcatcgtggcccacgtacctgacgctggcaacagaagcgcgacacatgtcctacttgtccctctttcccactccgcctgacgtaaatgggacattttgtcccccacttttctcagctttttgtgccatttatcccactaaatggtacacgaaaatatcatatttgaggagcaaatttgcactataaataggactcaaattcaatgtagatgcatcagattttagtagtgttattataccaaaattttatcttcttctttccttcttctttattttactt

SEQ ID NO: 227380 - DNA, 3636 bp, Cannabis indica
atagtaaatattcacctctactctttcaatgtaagagttctatatcttgcataagttcatgcagattttccatgtattttaccaaatatagaaattgatcaatagtactattaataagcgcttttcacttgtacttgttaattaggtaacacgaagcttggcagcaaaagctttccagacttctcttccactctgtagagagacatttttctctgcgaatatggaggatcaactggttttacggtatgcttattttgacacccaccataattatttatttctatttaaatataagaaatttttctgctaatcaattttgggccatgataatgtcaattcaattaaatcaagcatatgatgaactttcaatttcatggaacatttgtagtcacctcattcactgtaccttttaactatttaaaatgtttattgattgttcaaatagttattctaacaagggaccaaaacctgtgaaatctggtttctgaaaagcagtagagcataattttaatttggcattcatttaagtaacaattatattcatttccgtttgacgaatgcttttgtgcaaatgagttttctgaagttgcattactaatttcttttgttttctttcagttatcaggagctaatgaaagaaagctcgagaatgccattgtttgatctgaggaagctgaacaggtcacttccagttccttcagttccaaaatcttctattgagcttcttgtgttgggtgcaaagaatgatttcatagtggtaaacattctgactttgtgattactatatcttgtcataatctctagcagtgtcgtaaaacattaggttagatgtttcacttacatgcatatggcatcttcatggccacataataacaaccatcaaacactactaatagtatctcagttgaataacttaccgatacgttgtcatatggtttacattttagtatcattttttggttctgagatttgcttgaaggagaggttatctaaatcaattggtgctggcttttttatatttttgacaggatactgaaggcctcaatgaaacaggcaaattttatggcgtgtcaccagtatgtgtggaaggggttgcccatgacatgatgttggattgttcatgggagaaaggtgcaaaagttattctatcatggctaaatggtctgaaggaaaatgtaccaccttagtttagatattctttttctttgggttaattgcaggcaaatcagctggttagctaaacccatgttttagagagtactatgtaatattttgcttaaaccagacaagtgaataggtcctaatgaagtaataaaataacttaatcatacccacccctgaaaaggtatctggttcaagcccaaatatatgggaagagttgctgtatatagtctattttgtaaatagggttcttaaggcactaaaaggccaattcttccaaagaagaaaaaaaagacatattcactttcattcagacccgaaccggagaactatccacaagaccgcttcatgcgccaaactcgagaagaagctttcgaaggcgcgtgtaccattacttgttattccactagtgattttgggcaagatcaatatatagtgatcagttatgattgccggtacatagtttcaagttaggccttacttaagtctggtctcctctcccaggtctcagcttcaggctcccactgatgaacgtatgaaaacggcaaggcaagcaaatgcacgaacgtattggaggctttctctgttgcctcttgatgatacttctctgtattttttgtactaaattgaccagggacactgattgcatgtaccaaatacagtctactaaacaccattcccttatactccctccatttgtgtgtgaaacaattgacatttcaacattgtcttcatcactctctggggcttgaactgttataaaatgtcgtcttaaagggagacaactcttgtagctcaatgtatttacctttgaagaaccttttctacacgagtactttggagccaagatggcttttatcatgccaatttcttctgatgttgaagccaactttcctctctgcaagtctcatattagttatataaatatttcttttaggctctccatctaatcctacaataaatcgcaattagaaagttatagtagcggatatgtaagtatctaagagggacttgaaattaagatctcatgggagtaaattatatgtgccatttgagctactttttttgggtatttatttcatcaccacaattctgaatttgaacttagcatttgagtactattcaaaacttcacttttgcttcactaccaacataaccctttctcgtttttttttaattagcatgtacacaatcgtcagttgcactcagagctctaaatacaggccaaccttttagggtttataggctatattaggcctactttttaaaatataagtcgacatgacatgaccgacatttaaaaagataaaaaaaaaattagcacaattcaatacaaatttttggaggtacataaatgtaggtcgtgtcgggtccacctgactcacatttacacccctagttgcacttggtaaactgcatttttatcacgaattgattgaacaattttttttggataatgttgacaattcccaacaaccattgtacactataaatagtgaagttcttatgaaagcataccaatcaaacttaacactacaagagtaatttgcggcataatctccataagtccctaggtttttgcaattaaccccaattcttaaattttggtggtaaaaccacataaatctcaataccgttagcaaaaatactcccctatctaacagaccccattttctgtttatgtggctcggcagcccaagtgccaagtggacttgcaagtgccaagtcaccaaaataccaattaggtggcattatccattgaaaacctagaaatataacttacaattaaaattaattaataatgttacctaaattaaaacaaaccccattaaaattaaaagaaatccacaaaactagaataagaaccccaaacccagatctcacacccattttcgttttaaatcaaaggaaatcgagagaatggggtcgaaatcaaagaagaagagtaagaatataaagttcgaagggttgaggtactcctacctggattcatcctccattgtcgaaggggaagaacaaagctagtgaacatgtccacggggcctcacctctgccgatgtgatccccctaaggttgcagagatgaaaacatcttggacgaataaggttcgttagatgcccattccatcaggtgagatcttattggcttgattatttgccctattttttgtgttcttcttctttcttcttcttttttttttcttctgatcagatttttttttttttggttgtggcagcaagtacaagggtgtagtttttggatgtggtatgacccacccatgtgtgaacgatcctcggttgttattctctaactgctaaggaagattcgaaatttagagatggaagtttccaatttatttgaagcttttaacagcaaagaaggacatgaatttgtggagaaccatattaacaacaaagaacaaactgaatgcgtggagagttgtcatgatagtactcccaccattgatggctatcc

SEQ ID NO: 227381 - DNA, 2736 bp, Cannabis indica
catttattatcaatttctttaaataaaaaccatatacacatttttgagaaccgaggcagggtcttctttctatatatataaagtttataaaccctcaatccaaaagttgggttagacatgtactactataataggtatataaataattttgtacttttttatactctaccaaatattaatattatttcatatatcgttttgcttgactaagtgtggcccatgtcgttttctattatggtttttcaggtgtaagtgtgtaaccctatttttattgaatctgattggtttgtttaaaacgattaaataaaaatattacaagttgctaattctaaaagattaattattatattgttatactcgggtaagagttattgtattatttattttttttttatgagaaaatttagtattatttttaataccaacgcaagagaagaacagctaaaattcagtcgaaatgtagttttctaaagggtactagacataacctcattaatatatgtattagaaggttgaaagggaaaaaacagaagaccaggaacaaaaactatttacaaatatttctgtgtatattatttattattctttgcatgggaaacaatactcaattgacacatatatttcaaatttaaattttcgataattatctttgaatttttttgaaagattaaaatagaaaaacacctgtgttttgtgctgggaaatagacagcatgtaccaaggataataaatagttgtacttctgtaccaaagatgcttctcagttaccatttattattcaacattttcaaatgaccaagaatctgtggatggtaaaggttcttctactgacctaatttgaaatataacattaattgttgatataaaaatgtacataacagatgattatttttttgtgatgctctatccaattttcaagtaaatgtaaccaatggataaacttgggttatttcgaggctttccctttttcttctttctttcatatattgtgaccaaaaattctgaggatagccagccagtttttcatttcagggcccaaaccactgaaaccttctatggagactcatcataaggttctttcattcttgaagcagaacaaacatttatgtatacattttcattggcttaacagataagttaaatgactattataatatttcattatcaaattaggttaggttgatgccattagcccttaatatattatactaagaatattatttggcataaaacagaaaagaataaaaccaaacctcaaaaaaattaagtagaaacaaaacagaataaaagtaaagaaatcgtttgaatcaaagcgataatgagaagaacaaaacaccactactatttctttccttggaaaaagaaagaaacatgtttaatttttccttttagaaaaaaaaatatatcaaaatactatactcactcagaaaagaaagcaaatcccgactcttgtaatttcaatttcaacccccactcccctccccaaaaaataaaataaaaagaaaaaaaaaacaaaaaatcccacgactcatgtaaaaaattacaacgacgactccaatgaaaagagattaaaaaagatcccaccggcacaatcaagaaatctccactaacacacacactgatagagtggaagagaaccctgtttatgctttacaatatagaccttgagttttagacatttccatatttcattggtactaagcagccttttaaaaaaggaatgctgcaaactcagacagtcaatcatgcaaccattgatcccaccacaccaaccccatgttatttggtcacagtggcatgactgacttaccttggcacctctttgaccacatatggactctggacagactggaacccgacgacacggcgagatgcctgacccttgacccaacccaacccgactctacccgacgaccccaacatcaccatcatggtgtaagtaacttaacttctgctccatgtgatcctgaatttctgcaagtgttttgaagaggcccaagacagattattcaacaggaaaagttgtttacttttacaaccctttttgtagataggatttttgctattgtgtcatttgcttagtgaaagttgaaaaacattttagtttaccttcagccaaagttgaatccaccagacggtactggaagttcattccctccgaagcggaatcctggctgggaagcatcaccaccttgaggtaatgcctcatcgtcctcctccagccaataagtctcgagaattttaactgctttttcgtaaatctcggtgttgtcgtgactctgaagattttcaattttttctaaaccctcagcatcatcaatcatctgggcatataagttcacttctccactatttcccagattcttctctgcttccccaacctttaaaatgttctctaatccttctaaacagacagtgactattcttgcatctgggcagacaaggagatcacacaatggctttatacactgttgactgacaaggtacctaacacaaaaaaacaaccggtcaatccatgatgacagaacaaattggaaacaaagaaaactaaaaagaaaaaggataaaaagtaaagattacttacttaatttgctccgaagttccaccagaagtagcattggaaattgcccaagcggcctctttctttatatcaaactcagcattttgaagaagattgacaagagggccaattaaaccagcttcaataacagcctaaagtattttttttttaaaaaa

SEQ ID NO: 227382 - DNA, 5722 bp, Cannabis indica
aactgtcattgaaattttatgaagatttaatgtacactacgacctctgtacatttaaatttacagtggtggattttatcaattaaataaatttaaattaataataaaagatccacagtgactagtgactacaactatatcctaacacataaatcaaattttattttatggtcaaatttgatttttgacaattttgacactgctgtagaagcgtttgagatcctttattgctttctcttctatctgaattgaacgtattgatgagggtgtgtccacctctggcttgaaccaccggttcatggctggggtgtcggatggcgagccctgaccggaagtaacggcgaatcccgatacttttgtctttggactgtgggaaagactttgatggtgtttaacctgctcgagacgagtacagcgaatcattgacatggctatcttttcaaaattgaaactgagagaaaaggaataataatgagtacctgctgcaattggatgtccctaagagatggtcgagaatgacgaggaggtgttcctgatgattgccacggtggtgtgcttctttctacatcttgtgcctgtgatgtctgaggcgagaccattggtataggcttggaagccataaacgaactcaacagaattttcccctcgcttttgctatccccgagatcttcctccttgtccttagcgcgaattggctgagtccctttgattctgctttgctcactttgaatttcgcgaagagatgcaggtccttttgaaattttagctccaccccatgcaggaccctcggtctttttgggtgttggggagggggtgcaacatctttcggtgcatcatcgagggcaccactcaagaacatggagagccctcccttcctgttctttttcttggaacctgtcattgacgggctcttattctttgacgaatttgaagtctcctggacacagaaacctgactcttttgtgacttcgcttgtcaaattcatttcaaacatatcactcatatcttcctcctataagaaaattccactagtaagtaaacattaattaagtttaatatttgaatccactgctttatcactgcaattggtgagaaattcaaatattttaatgtatcacttcattagaataaggtttaagtattatcttaaacaaaagcaaccataccaacaaggagaatttcaaaaaacccaccttgagttttaaggcctgagagacttcaacattgaagaaatccttagcagtttcggatacaacttcagttccagaaacaccagacggtgcctcgatttctactgccctttgtttgctcttctttctttgtttctttgcttttttatttcctttgccatcttgaagagctgcggacgatgctgctgcatccacctgctcggttatgactggagcaccaagtgcagcgagtgagttctcaagcactggtcttgttttaagctttgcaatttgttggtcatcgagaagatgtccttttgattgctttacttccagcatctcaatctgctgcaactttttccgtaacgctcgaatttgtttatcaagatcgagatcatccctaggctgcagaaaggaatccattcttaggttcatttcatttttcgagatagatatatggttgtcacgagtcctctggacctcattatcactatcttcctcttcactattaatgatggcaggaaaagtagctgtgggagttgggagacgacggtaactccaagattcagatgatctttggtccaacaagttttcaagtttaactaaaatttccagagaagcactagcaacagcttgtgaagacactgtgaaaatgtagtcaaggttgcggataacaatttcctgaaagaaacaacaaaaagagcttccgtaagaaaaatgaggatgaaatgtcatcaaatgcacaagaaaaaagattgttctaaccatcaactgttgcatataaaaaaataattttaaaaaaaaaaagtttgaaccattacaaccttcgaccctttcacaaggaaaattttttgtaaagaaggaaaatattgaagactagctaataaaatggaccagaggcaaaagttgcatgccgccatggccagaattcagatgatcgccaatgttaccttttaaaaaagaaaaatcttaaatttaaactagtaaggctattagattcaatgaaaggtgagcctgtgcaatgtggaagagcgcaagcctacaatagaaggttttgctgcagttatgtattagagtttgaccaagcaaaaaagagggagggagacgggtatagaaggtgacaaagcctaacattgttagtagtaaatcatatgtttgacctgattgatagtttgatacaattaataccactgcaataagctataataataaaaggccaatctaattcaagtcaattaaaaattagtcatttctaaagagattgaggggaatacctcacaatgcttcctcaaaccctctgcatcaagtgagtcagcaatttcaaccatctgaatagcattccgtggctccactagattttctgcggccactttttcacataaactttttaagcttggtacgagcacttttcctgattccgcatctgtactaggtggttggctaaaggattccatgtcattagtcatgagatattcactaaactcttctagctcatcactgacatttgacttctgcttctcgggatccttcaccatattgtggggatagacaggatgataaagagaaccaataatcaacaaatgagtttcaccaacggaaaccgaactagcccgcttttgaccatgtaaacgagttggcataggtggtttatccttgcctgtcttcccatcccacatgtaaacatcacctgttgctgtgactgctgcagtccagtatttcccggcagatacatttacaacattgtgtccacatagagaatatagctgaagaaaaccaaagataactaataaggcttttcatcaaatgataaagacaaccaacaaagacaataagtacagtctagtaaacacctgttgacatctatgatcagtatctgaggagacccaataaaatagcgcaccgtcgtcagtaagagctgagctatgtaccatccctgcagctatagcgaccacatgaagccgttcactacgatgaaacttcagagcagcacccccacccttctttaagtttctagcaatgacaacacgtttcggggtaaccaatcgatgaccccacgtgtatacctgccatgcatgtcacatgactaatttagacatcattaatcctcaacaacatataagtcgtataattttggatgaaaactccaataaataatccataagaatgacctaggcatccacctagttagtacttagtggttagcaccgaattaaagcccatggtataatgaccaagtgagtactttatgtggttaatgttacctctccatcacctcctaacacgagtgtatgatactttgcagcagaaactccagtgaaaacctttcccttcaaggattcaaccaatcttggggtgtaattcgatgctgaatttgatgtaccataaccaagttgaccttctctgttacacccccatgtaaaaacttccccagcctcagaaataacagcagtgtgcttatttgcagcagcaacagccacaatttttgatcgaagagaactcactctgcggggtgtgggctgtgtatccacagatgtgtagccgagctgaccctctacagaagcatgtaaaaaggatcagagtcattaatttcagcataacatagatgactaaagcacaatttgattcatattcatttaattgttaacttaaatcaacaatagataatgttcagatttgatatgcacactagtccgtattacatagaggtttatgttctcttttcacgaaaattggagaagacttttaaacagttttacccagattcagtgtggttcaattaaaaatatttttgaatcaagatactatctttcaattctctatttaataatttaaattatctttctgtagctaagatgatatggaaatataccactgtcctttaggtttgttttactgagtattgaggtttttgcaaattgcaagtggtgttgaaaatagaagaaaatggtgataggcccgtggttagattttcagttgccagctttgaataagatcagtacacatatcataccattaccaagctctccatgaaagaatctgaaaatgtgaaccacatgcttcattcattgtcaatttacatcagtctctgtgatcaaagtgtgtgcaagagtttagaattccaagctgtaatgattttatggttcatgattttgttggggatgtacttaatacaaaagataattttaaattgtttagagatagttgttttgtggacagtttggacttttcaaaatagagagaattctatcaattattggaaacaggttgctcctttcataaggttttttggcagtgttgtggcttggaataagatagacacgcttagagccttcatattaatgtccttaccaaactcgtcttccggaattgtataaaagaatctgagaaagtgagtcacatatttgttgatttttgaatttagcttctctctgcaatcgaagtttctgttaagaattttgaaattcatgagttattccaataagttgtcatgattgtaaagtttgtaattttgtggggggtacaattaacaacaaaaactgcttcaaagttgtgaggagtgatatgtaggcagattggttggaaagaaataagaggattttcaagataaggagaatctttctttcttttttagtctttcaccgtattctcatcttttgggagaatggaggttctggtgtaatctgtttctattttatgtggttggtcctacagcgttctattcctgtcaagtagcttttgtttcaggtaagtttgattggaaggatttttgttccactgaggctctttcaattttgatgttcaacctatagccatagtcatgtttcttcttaaccaaacaacttataaactgataaagaaacaatatttgcaaattttgtatatgcaaaatctcaaatccccgtataatttacctctgttggatccccaggtgaacacttcaccaccttcagtagaaacaacagtgtgatgtttagctgctgcaacagccttcacccgacgagaccctaaaccggaaatcacttggcgaggtgtaataactgcagcttgaccgctgaaaagataataacaagttgcatctaaaataacaaattaaaaatgagaaaggtaaacagccacagcttaaaatttcagacattactttctttaacctcaacaatagcatatggctgacaatctacatcaaattatatagaatttagtaagaaaataaaattaggtttgtttctatcaaagattcttccgtgtacaagtcagaataattacacattcacctttattccaacaaataaaaaaatcacacagtgaacattgttcatgcatcaacatgttgtatataagaacaaattccagattgattttgttacaattatatatacatggaaagaaaagtgaaagacaagagggacatagttcaaatacttccagtacaacaaatggatagtgtgacctactacatcattgaatgacagaaccaaatgaacaatacattatcagtaaactaatagcgtatacaaacaatgtattagcatcctctacctgtgtatatcaaagtcg

SEQ ID NO: 227383 - DNA, 3807 bp, Cannabis indica
caaaaaaacaaaaacaaaaaggaaaacctacctaatataattactagaacgtaaacgtactacaatttaaaaaaaaaaaaaactcatatatatatatatacacattatatataatactacttactcttatatggaatttaaaaatctttaacatattattatgtgaaatatataagtatgaaatagagattttgaatcaaaattatgtataaatggatattaaattgatagaattaaaccaatacatatgaaaaaaatgtacatatttaaaaaaaaaaaaaaaactcattttttatggtccagcccaacttgaaacccgggcctcacccacccgaactcgtcccaactcgagcccagcccacccctatccaaaaacccgcactccacaatgggcggtttcggtaatagtattcccacacacccgaaacccaaaacccgaacctaaaacccgtaaaatccacccgatgtgacgtgctaaagaaactaaaagcagaaggtaaaaactcagccaaatatagctatatgcatacatatactaccatgatcaactttataattggtactatttgtagaaaagaaaattataattagtactactacttttaaacaatttttacgtagatggcaatgttccatatttttagtttgctattatatatatataaactatataagcaagacataataaagaagaagaggtgtatctatagctaaccatgtttttgaaaccaaagctaaaagtgtcggcggtaggcttgttgtgagtatcttcgggacgcaagctcttctttatgaactcttcaaaatctaactccgacgggcttcgtttcatcatcatcatcatttgatgatgatgatgatctccacggtgggtcgcgaacctcaacgacgatgatgtcgttaggtcacgcccactcaccgagttgcatgacatgaccacgtggctagactcttttggctccatattaatttctagcctccaacaattctattattaattatgtttgatcttagatagagagttgtattgtgtgaggaaaagagagggaaggtgaacaatgcaactcaagtgtattaataggcgataaaaaggaaaagaaaattatcaagatataataatattaaaagaaaagaaaataataataatatttataaaggtggggcggcacatgaagttaagaaaagtttggacttttttctttttcctttttaatttcaaatatacccttatagtttcgtagctaattacgagtttgagttctggttttgttactcgtaattatgggtgatatggtaattataatgctctcggcttcttggcaacgaagtaatctctactttttaataaatataaacagtatagtaagagaaacaacattttagtaacgatactttaaggttatgttacattaaattatataagattcaatatttaatgaccaatagtgatattgaaatttaagaaaatactaaataccactagtaatttttaacatttctcataagaaaaatactattaatattataattagtataataaaatattaaatcttatataaatctatgtaattaattttaaagaatatagcaaacaaacggtaaagtaacacaaagtaacacgtctaaaatatactagacattagtatatagtaaatgacaattgttgatttagatttgcaggggacatgatactaccacgtcatatagtggtggcaggaccagccttaaaaataggcaagttagacccgtactcaaggcccaaaataaaaaataaaaagtttcattagcttttcttttaagtaaaatgaaacgtacatgtattataaacaataaatatttataacttagttggttgaggtgtatgatatattttacgattacaataatctcatgacactcatttttaaccctcttggatgaaaaaaatcatgtagagaaaacttaagagtaaaaacacaagtcataattaactttacaaacaagaccgaaaaaattcaagcgccatcatcatttcttctatgaaataccatttgattgtgtcaaaagcttttgttaaatccattttaaccatgtacgagagatgtgcattttttcttgcaaatcttggaaaattataacattttgaggaataaaccttctatagacaaaactcccttaattttgtgctataagatgcgtcaggataatgcaaagtctattacatatcattttagtagctattttataaataacgttacaataagcgctaaaaatcacttatttgttacaggcaattaatttttgacaccaataattattgtagtagcattcacttctcggagtattttcctagtgtagaaaatatttttgtagagtaaattatgaattatatataaagtattctaattttaaaattaacacatctcaaaaatatttatggagaagctagctgttggactttgttctatgaaggactcaagaaaaaacataatgaacttgggaaggttaggaatagactgtctatatactaagtataaatacaatatttgcttagatgagatgtgtccgatttgtggattgtatagaaaaattatagagtatttatttttcaattgtcacttaagcattcatgtatgttttggctggtcttagtattgcagatacagttaattaatatattattgtggtcagtggtcgcccattatactttttttttagcatgaaccttttttgggttcaaacttcaaaggagtattgcttaggattcaagttaaagaagaatggtaactgagtatagtagtgtctaacactttttataagtgacattttatgattggttaacgacattttttaaaaattatcattgtaaattaattaagatctgataattaattacaccaatagcactatgagattgagaaaaatactagagactaataatccttttaaacgtttctttactaattaataataaagaaagtagtacgtacgtacgttcgtgggacaaggagataagggggtttgatttggatatgcaccatgatcgatcgatcgactttaaataaaagatgctttctttcccatgcatatatatatatgctacagagaagaatagttaatcttctttttctgtctgaatttaaagtaataatcacctttgcctttgccttttcttactttttcttttgtcattgttattattttttttatcttttgctttactttaattttcttattaacagtactttctataaataattttcaagttaagtattaggaacctccacgccctcatctctcagcctcgtataagggtatgcataaatttatccaattacaacgatcgctaaatattggatatattcaattagcagatttgattggatgttatttttgaatatccaattagatcgcattaaatattggatggagtgtctaaaaattcaatacatttaacatctaatcgaattaattaatatttttatttaatttagatgagtaattaaattttatactattataaagataaagcaaatatgtacttattaaaattaatattattttttttattagataatacatactagatctaaaatattagatgaatttgatctgatccaaaaagtactaagtttaaaatattagataaactcaaattaaatcaatagatattaaaatggtgggggtccacataagaattcttgattggttgagtgtttttaaaaacaaaatttgaatactattttgagttttaggctaaaaaatgaaaacaccatttttatgttttttgtgttttcaaatcattgaatccaaaaactctctaattat

SEQ ID NO: 227384 - DNA, 2635 bp, Cannabis indica
aaatataaaaattattaattatattattgagtggaaaaaaaataatatttattgtagtataaaatttaacctatactatattatatactaaatttagactatattatacaccactatattagagtttaaattttaggaatatagactaaaaggtaacacttcatcggagatacttgattaaggtaatgataaaacacattttaaatgaacattcaaatctacctattatggtttttcaaaaaacataaataaatcacgtattaaatataatgtgattttttgcttaaaactaccttttcatgataatctttcagtcatattttccgactaattaaatatgacacttttattcacaataaaaatttgttagtgattaaaacttagtatttaatacgtacaacaagttattactaatttcatttaataagttactaaatttgtgatttttataattaataattttagcaacaaagatttaatttagtcatgataacatagaaataattttaagtcatcacaaaatttgctgttgtgtataaattacgtgaactaatgtagaatgtaactgtcattagtactgatgtaacacagcactagtaatagttctcaatatcatcatatataatatgaactagtatagtaggttataataaagaatggtagctgtaattaaaaacttattaatgaatggagctgaaggtgggatctataaataaaaagatagagtaatacttacagtgacaaagcaatcagaataagtgaggcgtaggagctttgcaacgatgcttttatcagatttccatgatatttgcacttggtggttgacataagcctctgcatctttacaagtattgtaatacttgtaaaagctacgcctcaacttcatcggcgtttgaagtcctatcgctgcctccgaaagctgacacaagcttagtactacaactattattagtattgacagaaaatgcaaacgcttcctctcttcgcttctctccatttctctctctcttttttttttctctctcaaactgatcttttgaaacagagctttttttgatggaacaacttttgaagcagagcttgcaatatcactctaaccaaatacaaatattagtagtagtacttgatctccaattaataagcttgtgtctacttcatgtgacctaaaatctatatatatagcttagaattttggggttattttccattgcacacgtggcatgaccgacaatgccaagttggatagacttggttaatttacatcttgtaaatgtcaaatagtttttttaattataaattaagttaacttagtattaagtaaccgtgtgactcaagtggggaatatattttcatagtattaattatatatatatatatagagagaaatagtgaaaggaaaaggcatggtgcctagcatttttttttatagcatttcttttaaagaatatcataatacttaataacataacagtactcatatatatttagagaaatactaaaaggtaacaatacgtattggtgcctatagcatttttttacgtattaatatcgatattggtccaattaaatatcaagtactatatagattaatacaataacttttaagaagtattgctaaccaattgcaaaatgacacgtctagaaagtgctaagtaccaacaataatactaatcgtatggttatataaatatatagggtgttcacatgaaccaaagtttgttgttataacttatatatatgctgtaatatatcaacattcttgcttagacgccatgtaatgtattttgtgaagcaaacagttgttattatggcgaaaggaacgtgcatgcacatgggatctcggccttgactttagggctttttatttaatatatgtatgagttttatggatccaataattttgagatcataacctaaccaattaactaattaattaatctacatttctacgtacgatcgatcagatatatactgcattataatggaacaccaaatcaacttaattattcgactaataacattaatttccattgataacattatcttcttcttcttttgtccgtaatattggaaaatttacttggtttgacgatcatatctttatcttattggaccacatctagattcaatccaattatatattgaatgttagactttaccattcgatctgatccagacatccaatcgatccaatatctattggatgttggattgggtcggttctatccattggatgtatttcatatatatttattgatttaatttaaatttattgaatagtttagacttaatatttttttttggatcggatcggatccatccaatattttaaattcagtatgtattggattagattaattggatccatcccatgcatccaagaaaaaaagaataaaattttaatgttaatttttatatacatatatattttacgtataacaatataaaacctaattactcattcaaattaaatgaaaatactaattagtttgattggatgttagatgtattagatttttagacaacacatccaacatccgatccaatccaattgaatatttaaaaataacatccaatctgatccgatcacaattggatatccaatattaacggacggtcagttgtaattggatcg

SEQ ID NO: 227385 - DNA, 3348 bp, Cannabis indica
tcggatccatacaatattttaggtccaagatgtattggattggactggatccattcaaatccaagaaaaaaagaagtaaaattttaatgtttaattttcatatatacatataattttaatgtaactaatttcatatgctaggcgtctcactttaatcaagtcaatcacttcttcaatgccaagttatgcaatgtccactacaaagattattccgttggctagctgccgtgaacttgacgcccttatgagaaaatattggtggttaggaaatgttgagaagaacagatttctggctctaaaggcttgggatcggatttgtcaaccaaaagcttctggtggattaggtgtaagaagatgtgaagacatgaataaagctttattaacaaagttggcatggagtttggcaacaaaagaacagaaaccacgggtctcatgtctgcttaataaataatgcaggtatgattgtttccttaatgtgagcagtaagagtagtgactcttatcaatggaagtgtattttggatacaagatcaacaattctctgaggttcgatatcagttgctgccttgggaaattcgattgacttttggcatcaaccatggattccttggttagagtaccaagaatttgtggaactaatgaatattggtttaaggaatagagggtatacaatcaaaactctggcagacatatcgataggcaacaattggaatgaagagatggttttgcaaatttttgggagtgaaattggaaaccaaatcttagccattcccaggattccctctccttaccaagaccggatgtattggaagagttctccaagaggtacgttttctgtcaaggctgcatattgtgttgagcaattttggagatttgcaccagtaaaaaacatttggaaatggatatgggaggtgggaattcaccctagaatctcgatcttgttgtggaggattctgaacgacgccattcccaccaagaacagactgcattttttaaatgaaaaaacctgtaatttgtgtgaagtcgaagaggaaagccccctgcatttgttttttaattgtagctttgcaagagcaatatggtttgggggaagtatgccaatcagagctgataattatacaggagacaacttgattagtatagtggaagagttggtgtctacgttttcatcctcagcttcgggtgttagtagatgtcatcttcttaactacataggttgtttccttgctgctatttggaactagagaaatgctttctgcatcaacaacgtccctgcaaatccctccttggctttggcaaaagctgaaaaagatttccttgaactccagaaggtaccttttaggaaggatcttgaagggtataatcatactaacgacaacatgaggaatggtgtgattctgattcctgcaatcaagcaagtatgccatgttcttttcacggatgcatcttgggtgaggggagaagcaggtatagctgctatcagtgtcaatacatcatttggctgctggtttgtcaattcacaaaagcttcaggtggtttcagctttggagggtgaattaagagccatacttcttgcactgaattgggcagttgagtcaggttggaaagaggttctcattttatctgattcgaaagtggctgttcaagctttaatatctacagaagttcctgattggaggatatctaatgtttttttttctctattgtcaatgtttctaaaaagtttgtagtatgtaattttcattttattaaccgtgctctaaacgcctttgcggatggtgtagccaaaaatgctagagttgctagtgattcggttgttttgtatcaaggggagggtattcgccttgtgattcccgtccactttcttaattaatgaacaagtagttctttaaaaaaaacatataaatttgactgtataataatataaaatctaattactcatcctggttaaatgaaaatacaaattagttcgattggatgttagatgtattggatttttaggcatcacatccaccatccgatccgatctagttggatatttaaaaataacatcaaatccgatccgatcacaattagatatttaatgtttggcggtcggttgtaattgaattggtcaattctcattgaattggattgatttatgcacacccttaattaaatgcactatttttgccgaaaactatatatataaaagtgtacgtatatttattattgaaaattattcaatgctaaatatcgccacaatgactcgcaagttgcttgttagcttggtacccccagttttatttctctaccaaacaacattaagaagaaaaaatatagcaaaaactggataacgatgcaattgaataaaatagaaaaagaaagtccataacaaaaatgttactgtcaattttctattacaattttttagttaatttttcgtattttataaaatatacgttgaaatatttttttttaaaatttttttatgacggtattcgttatacttataacatcattcctgtaaatttttaaaatttttcgaatagtttaaagtgtcaaaaatacatttgaagttttttgaatgcgcgtggtgaactgaaatatcaagaactctatttttgatatagtaaattattcaaaaaatttcaaaaatttactgaaatgatattgtaataataacgaatacaatgtaatttcgagtatagatgtcgattaaaaaattgtaataaaatattgtaattattatctcaaaaattgaaaaagagaagaaaatcttaatcacatcttgttaacaccctaataattgcaagtgctctaataataacactactcttatttttattcttcgacctcgttgacatctctacctaattattttgcaaatatcataaaaaaaaacaattgacaaaaacaacattggtagcattatgtagaaatatttaactttaattaatactaccatggaggtacgtatgattatgatatatatacattcatatcatggttggtaatcttatacaaaaactataatgtcaatacaatttcctgaaagagaaaaaagtgtatatatatacgtaatcctattaacacatcaaaataagattataactaatttaagaaatataaatttgttttttttttgtaaagaaaaatatatatatatttgtttattgagggattatttaagaaatatatgaataaatggaatctaactttttatattattgaaagtttagttgtgttttttttttttttttattgtaagtattatactgtattgttgtggtcaaatacgtactatttgaaacatcaaagaggtccaatgacagttccacccctcatttcgaccacgtggcacgcttta

SEQ ID NO: 227386 - DNA, 4463 bp, Cannabis indica
caatcaactgaatacactatcagtatgtcaagtaagttgcatgacaaaatgatgtttcttatgtattctgagattctttaaatgccaaacatgtagggcaattcccaaaatgaaccaaaaaaaattacagaaagaaaaaggaataactaatgctttcttcaatagtgcaaaactagaaaatctagataaattggatttcagctacatgggaggcaatggtaacatgtataccaaatttttcatgaatatttacttctttatagtaaggttgatcctccctgattaaatgaaatctgagaaagcttcaaacttatagcctcaaactctgcactattcctttcttcattggttaaccacaaggataagcaccgatcgattacgtctttgttggagttcaaggaggaacctcctttcaaagatggtatccttgcaaacttcataattcttgctaggtttgattctgaagggtcttcagcacatttctctaatatgtctctgatggcactgtgccatatgggccgagctactttgagaaactcatgcagaaccaacaccggaagatttacgctgcctagttcagattcgccatgtccgcctcgtccgtgatagtctgaccctccaatcttcagtagaccataagtatcagctagatcactgtagactgttaatcaggaacataaattaaggagacccctatatagatgagcactcagagactgaaatggtttgcaaatcgaaatcatatcccaacaatatagatggcactacatgctaaagcagtttcatacaataataataaatttacaaaagtatggtgaaaaagagcaaatttatcaaactatgataagcaaaatgatgcctttcagaaacacttataagttacaaaactccctgttgtcataaacatccttaattgactacaatagtgcttaatataccagttcttactctaaaaccagaaatatatcctaatttagctttaccattcggtttttacacatttgatgcatgtagaagatattgataaagatacacaatgaaatcacaatgcaggagaattatttcactgaaaatgaggaaaagaaaaatgacataccagatagtcttccatcacttctgaaaacctctatcccatgaaggccggcttcttttaacctcctaataatggccacgggatttttcaatgcccaaggatgagctaacactgccacacctcctgtttcacaaatcactttcactgcttcctcggcaagcggctcacttcccctgaacagttatatgtcacacagatttcttcttaacttatttttttaagagaaaaacaattaaaattggaaatactaaatactgagctatagagcattacgtagaataagcaggtccaccatcaaaaagatatcgactaaaagcttctttcagattcaccacatgacctgcttcaaccatagcacgcgccacatgcactctcccaggagcaactcccttgcctgcaattctagcaacctgttcccacgtaagagatagcttgagcttgttcaatttttcaatcatattcttcgcacgaatatatcgaccatcccttatattagctagaaaattttccagcttctcacaacctgttggtccacagctactgtagtatgcaagaacatgaactggttcatccgattcagagtctcctctgtaagtaccaaaaagaacaattggaaagactaaataaggaaaagagataaatcagcatttgtttttctaacggaacattattaaaagaaaagggttaaaatagtgttcaaaaaaaaaaggacaggcaaccacagatgcaaagagaaaacaatataccgagaatcagctttaaaacactatggtaaagctcttcaattaaatgcaaagataaaaaatgcctgaccacttaactaacccctcaatgttccttggaaaaaaacttctttcgaaaaaaataaaatgaaaacttaacaagttaccttggggagaaaattgtgctaacttcaacacctggaataatcttcatcccaaatctgcgagccgcatctagagcctcactgatgccatacattgtatcatgatctgtcagagcaagaactttcacctgttatgagcacattactaattaaatttcatgatctatttaggtctacaggataagttgctgttgaagccaaagaattttctagataatttgtgaggttattcttattcacagtcaaaagctcccatgaagtcaaaacaaaggcaaacaaatagagatagaagtactaaacaaataggaagagtttgagagaaataattctacattcaaataatttcattgttcaatgtaaacttaatgccgacgcaaactcaataagaaattcaaaacattcctcaaaccttattatatctcctctcttctaagttctgatccatacaaatcctaacttttttcctttcaattagaagcgaacacttaatgaaaattctaaaagagtgaacagccttagaacatgtcctaaaaaagtacagtaaaaagaaaagtcaatctagcttctaaacattatgtattgtgtatatatatactaaaaacattgtcactgtggaacatcttaatgcctggaattgagatatacttggttacaagttacaaatgtaccaaaaaatcaaatgaagaaaataacttccaatgcatggtcaaatggaaaaatatatatatattggtacaagcacattgatactttgcacaatgagctactacatgaaaactacagtggtctgaagtcaaaggaatgaacagatgaggtagaaattttacttttagacacaccggtagaataagatccaagacaaataattatcataacataacagtcaatatatagttttcttatgtagtcatttctcagaatttcaaagaaaagaatgattattcgatcatttaaccttcaaaagaactaaagtgcagcagcttttactcgcacatgagacaaaaatatgggggaaaatattaaataaatgctgtatcctgaacatgaaaagaaaggaaaaaataacatgaaaaaaaaaattgaaatttcacaaccacaacaatagatgatacacatccagaaataagtcgaatgacaatgattaccttttctgcctaagcagaaggaagaggctagtttaaagctaaaaactttcaagtcactattcttattagcattttcatatcatggagactcatattgttaatggtttcacaattttgtgatttttaagcaagtttccaaaacaagacagggaagccatataaacacaagtctacaaacacacaataaagttattaacaaagacgttattatacaaaaagagttaaagacagcatttttaaggttttcatccacaaccacaaggaatagaaattgtaccaagtaagattcaacaacagagttatcgttcatcactacaccatgaaacccaaagtaaacgaagaaaacccatatagaaaaaccacacaaactaaagcttctcgtccaagaaaaccccaaacccatttcagctcttcatccaaaaaaacaaaaacaaaaaggactaaacaaaactcaccccatttccatgagccctttcgacaagcttggaaggcgataaaaacccatcactgcatttagaatgagaatgcaattcgaagaccagcttctccccacctctgccgagactcttctgaaccccaaaatcatcaacaacgcaagaagcagcagtgacaaaagaagactggtcctgagaaacccactcgctcactgacttgaaagccagagtctgttcaacggtcatcttcttcttactaccaccgcgcttcttcttcttcttcctcttctctttcgccttcttcgagctatccttactggcaccgacgctgttggaattgggaagcgcgtgcaaatcacccgccatggattaagagaaaacaatgaacaaataaaaaagagatattttgatgtggggtttgaggcttttaaggtcgtgaatatatatagatatatagatagagatatagggacagaggagatggagcaaagggaagagagagagagctatgataaacacttttcttaatttaatttttttttttttttttggtttataaaaagggaaatcttccattaacatataacaggtgctctcagctacggttggtactttttccttagtcaaacaaaagtactgcctatacaaatgacctatcccatctatttttttttttttctttttaaggaaatgtctaaatatattttggaggatttaggttttttatttttgaataatgggatttgtccactgaattaagaccgcagtgcatgtccggattgtaacatcttttttaaaccaaagggtatatgtggtttttgtaatttttaaaccaaactacaattgtatcacaagatctcaaaaagttaaaattgtaaaaattacactataaaatggagaatttt

SEQ ID NO: 227387 - DNA, 1625 bp, Cannabis indica
aataaaaagaaaaaaattaaccatagacgttgctaagcaatatacatgttacaaccaatagagctcattcttactactggtacaactacttactaaaacaattggcttagcagttagcagagaaggtgtccaagcaaaagaataatgcaaagtccaagcttctacatttgtgaccaaatataaagaataatgcaaagaagcacttgtggtactcaacaccacaccaatatgacaaagaaaaaccaccttttcctaatttctctatctgtacccagcatgtcccttgtaatataatatgctaaatcattctatttttagctttaaacattaatagaaacttaattaatacaaataatataatgtgacattcaagcattaagtggtacatgctgggatagaaaattagggacagaagatttcaattcatcacatttgagagaaaccaactacttcagttgctgaataccaaaagtgcctcttagcattgcttaaataatgactgttagcatcataattaagtaattatcaaagttatttgcaatactagtacaagctctaacttagttttgatcgtatataatctaaattcatctaattttatctgtaagcttgtacaaacatcgatagataaatccctttgaacttagtcttatcagtaaatctaagcttaataagtctaagtttatagcacatataatcaaacacagaatacatgacattcagggatgaatatctgaacctgaacatatttgatcgattcacagctcgcaatttgctgtatcctaatcttataagcaagaataacttgaccgatctccaacggagacaaatcgccgagctgaacagaatgcaccggcgactcaatcaccacgtcgtggaacccaaccccgtccaatgcctgagccaaggaatgatcatcatcatcatgatcaggaactcctctggtgatggcagggtacagattctcgataacccgaatcttccaatccgggtcgtggggcggaaggcggaagatctcgggggcacactggtgctcgtggccgatgcagaaggggcattggtggttgttggggttagggtttgcaggggatttggatttgaaatcggagggtcgtttggctctggcgggtgagaaaatgacccagcgatttgtgatgacgtcttttctgagttgggggctccgagttggcgagtcagactcggaagacgccatctattctgttctatctctctctttcgttcttagattattatcgttttggagtgtcccacacgtgtcttatctaatttccacacgtgtgccgtgtgcatgggaatggaatctaatagatgaattgttaatatatattacataaaaaataccttttaagaaaatatatattgtaaaaaaattatttatttagctaaaaatttgttatccaattaagtctttaaatagcatatttttgatttattgtaatcggtgtaagaatttttttttgttcattttttagctctaaatttagatgagactcgtgtttagtgactagacctatagatttaattatttaattttgcatatcttttatatctcgattttttttagatttggtgtattctaatggaatttcttcgttttttttttt

SEQ ID NO: 227388 - DNA, 3822 bp, Cannabis indica
gttttacctttgaaatcttctatgtccaatatgagaggcagagagttgacagatgaagattttgagagcttatcattcttaaatccatcattgctctctttcatctacttcaaccacaaacaataaacgaattcaacaattttttaagataaacaaaaacaaaacattactgcaaaaagattaacaaaactattgcttggaaaactgaaatcagaactataaatctaggcatgaagtcaacccaagattaactaatatgagctaaaagcataaatgaagttgcatctacaataaaatatcaacctgtgcatctacagcaaaacatcaatctgtgcatgtttactaaaccgctagggatttccattcctatgttcaaacctcaactaagattaacaaatcatgtgtaaaagttgatatgggtcctctgaataaacaatttaaagccaatgctgtacctaaaccttagataattttattaataaactgaggatagtgaaacctaaaaccaaaattcattgagttcaaaaaataaaaacataaagtgctattaatttgagagtgaaaagttcataatttcttttaaaaatgcgttctttattctacaaatcaaaccagaatacactcaaataacataatgcaatttaacaaaatatagaaacaaaattagtacggtaataccccgctgagttgagttaataactccactctcattgtcctattactttcgtctgtttccacaatttaaatatatatatcatgattctatcatccactaaaaccatactctaattcccacaaaaagtaactattccaaatcaaaccacctgaaattcgataaattaaaaactctactccatccaaatcttttcaaagcttaatcgaaattcaagaattatattaagcaaaacacagaatgaacttttggaataaaagttcttcggaaaccgatcttggggaacaaaaatggaaaagggtataaatggaaaccagacctctttcttcgaataaatagagcaaaggcgcggaggaggaggagaaggtagaaagaatagagagtagcagagttcggctcttcaatcttcttcgtcttcggtttggttgggtcagatcgaagtgatggagaaggagagatcttcaacgacgaatacaatgaaagatcttttagcatagttagccctctaatttgtgttaaattgataagccggtccttcaaatatagcatcaccttttctttgaaaaaaattaataaattaccaattagactttttattttcttattttattaaatgacataatagaatttatattttctaaaatagtaaaaatagtactttaaatttaaattttagtaattttatttattaatataactaactttaagacaatttctaacacaaataaatacaagaaatataaacaattttataataacatctctaaatcagattattattaaattttattttgacaataaatcggttcagaatcctatttgtacaattttaaaaaatacaaagtctattttgttattgaacaaaacagataattcaattggtaacttttgcaaaacacatagtccaaaatagtatttaccttaataataataataatgcgtacaatttattacaaattgtacaaaaacaaatcaacgaaaattaaacagatgattttttttttttttttgaaacaaaactttcaatacaaacaagcaacactaaggcacatctgctatcaaattagcagcagcacaatctggcaaattgtttgtccaaacaacagacctttgagacaaatgagcccacttagctaaacaattagcaactttattacactttctcgggtaaaaaataaagtctaagtacttgaatttgtttctcaaaatgctaatctcctgcaccagaagaccccaatccgattgagtctgcaaacctgccaccagagctgtaattacagcttgacaatcagaagccagatgaacactcgaaaaggaccaacgcaaagcgaagctgataccaatttagatcgccacagccccagtcagcaacaccgagagacaacgaggaagaaacttagtttcagccaccaccaagacaccttcatggttccttatgactgcacctagaccacaacccagagtgccccgtaaaagagaagcatcagtattgatgaggaacaaaccagtgggaggaagcgtacaagtcttcaagtcctgggattgcttggaattttttacagtcaagacacaacccagatgaacatccaggatctccattgcccaagtaatcaggtaatgatcatccggtgctttgtgttggaagacaaattgatttctccgttgccaaaccagccaagaaaccccaataaatggaacatttctctttggacagttgctcaaccaaaagaagaaggaagttaagagccttatgcataatagaagaaataaatttggagaagccaaactgattccatatattttgcaccttaagacattgccataaagcatgacaaatactctcttcctgaaccttgcaccaatcacggagaatgtccctggacataccccatttgacgagctccacctttgtcataatccaatggctggacaccctcaaaataaagttcttcatttttggagtgagacgagaccccaaacaaatttccaccaagcttttaaggttgtattgtcagaacagtcagctatatccgaattgctaaaacgtaatttatacccactcgtaactgaatactaaccattgggagtcaagctccaagagaccaaatccgacctattaatcatggggatgatgcctaacacctaagagatattatcttgatggaacaaactcataacctcattaatcttccaattcccttcattattcaacaaagcatggatagtaactccttccggaagcttaaccttagtatggagggtgaaaggagagcttttaggaatccaattagggtcttcattaattcgaatactgcgcccatcttcaacacactagcgagaacctttgaccaaaagctcccttccccataatattccacgccaaattgtcgagccaaagtggcccaaactagcctaaaaaaagtaccattaggatagtaaagcgcctttcatcacgctatccaaaagacagttgggcatagcaagcaacttccattcttgtttagccaaaagcgcctggttaaaatcttctaaatcacgaaatctgatactcccttgctctttttgcctacatagcttcctctaattactccaatgaagtttatgtttttagaagaagatccccaccaaaagcgagcaatcatactttcaatgtcatggagaattccttttgtaattcggaagcaactcgtgaggtaacacggcaaagcttgaatcattgccttaagtaattaccaacaataattccgtaaattatttattgtttacgtggtgggatgtaactattcttatattaaaatgatcgttttgaagaatctgttgcaataatattattttttaattaaaataattaatggtgtaattataatttttttaaaattgtaagaaaatagaaatagagatagataaaaaaaaaataattaaaacttagtaagtcacctataaaaaaatgtggcaaaaattcaaaagaaagaaatgaactgagggctaatatatatttggcacaacactaatagtaataggtaatatagtttattttttttttattttcatcaattaaaataacaaaatatctaatgtttcagattttatacacttaaatactttatctttatttttagaggcaaaaatacttaatgttacaattttct

SEQ ID NO: 227389 - DNA, 4184 bp, Cannabis indica
attaaccattaatgctacgacttcattatagcaatgcctaaccattaaccaatcaactttcatgtaaattatacctaaaatctcccacggccacagtatttagtatcttaatcaattacattgactaactttaatttatacgtttctagctagtcttatatcatttaattaatgtttttctattatgaacagtatagtaattaccaagtgcgtttatttctaacaaattagtggaagctgtatgcaaatataggtgttacatatttacttataatagtgcaattaattaaataatttattcattattaaataatgagaagaatttatgcgtgtgtgggactacagttacttcatacatagtatttcgcaattaagtaattttttttcacacatatatcagaatagtcattatcattgttttttaaagttgagagaggggcttagaactagtcactcaccagtagtgttccatttattattattattattaatttttttggtgaagtaagagaggtatgtatgagtattaataataatatgacatgtggtattttgcattggttactccttagcaatactctcacttgaaataacaaaattaaaattgatgtctaacctgtggaattggaagaataacaaaagcatcaagccaaaaacccttaaaagatcgcacgtaatgaaatgcaatctcacgtgagtcccacacgagtttcccgcagccaaccaccatggattcactggacacgtaagcaagccgaaactgaagccaaatgtaagccaaatgaagcgcatccaaacacgtccttacaacagtcaccgccgccgcaagtggcacgtccaagtaaaagcaaggatctcccgccgcgctcaacgacattacgtacaagaaaagagggtctacggccaacgccatcccacgcgccagcagcaccacgcgattccacctcttcacgttattgctacgtgggtccactatcccaccatgggccgccttcggtctggcccaattggaatgggcccgcaattttgtaggccttaggctggaaccggcagtggcctcccagtacggttgctgtgaagggtagcatcgatgggagtggaaaataggtaatccaacctgagtacatgcgaagcattcgttggaatcgaaaatgatccgcttctgttcatctgagatttcgatgacgtttctgctgtttatttcttcgctgtaaaaagtttaaaacaaatgattaaaaacccattttatttttcatctttattataattaatgtcgtattggtatgtattaataattgatttaaaccttggaggattagacatggtgagtggtgtctgagatggagagagctgatatgaagagaggaacaatagaaagaaaatatcagaggagaaagggggacgagctatggcccaggggaacaggctgggcacgtagccaatgcgcatgaacgtaaagtgtactgtggttttcagtatacgaagccacctatggttttatttataaacgtcatttttacagcatttgcatcttaattaattattatatattatattataagaataattattctattaataaataattactgattgttatttatttcttcgctggcggataactttgaaaccttaaaggtaagctttcttttgctttaacgtttagtgtgttcgaaagtatagtacaggttgcagaaatcatctggacatttgggacaaaatgagaattatatttatattagttaatgtatatatgtatccatccatacatattgatgaagtgtgcatagtttggagctattattatataaatacatgattataatccttttttatcatgaagttatatattcaaactcaattttatttatgtagactcttaacaattttttcatcatgttgaatcaagccaaattggtaatcggaacttttagttagttctctactttctgataagttcatataataaagagtgaagttgagagatttaaattcccctacccgatagtgtacatgaaatactacgaagatagtggccctgtaaacacagggtatcatctctggctacattcgtttttctttctaaaataactgttttctttatataactttatttttccttgtcctttttttcctaaaaataatgacttttaaataagaaagagtgatacagagttttacattgttaatgtgtaaataaatgcgctagccagttaattttgagataccatatgccaccatattctaccttcttcagttcttctattattatataagataatgaactactctaactactagttaattttaaaattgaacttttataggtacattctaccatatagttcacgaccttattttatctaatcaagttagttaaattagttagtattagttgttagttagtgatgagctgtcctaaggttagttagtgagctttatagctaactcaagtgactataagtagctgaaactatattaaaacaaatgatgatttgagcaataatacatacacatccatctctcttttttcatcttttgttcctttgctgaagctttgctgatattcgaccaagcgttggtagccttgactctcttccgtaaaactattgttttaaatgatcatgtgcctccttttaaaaccacgtgagtgcgcatgttaaagatgatggctcacatttttttcatgcacgacatggctttgaaaggcttgacttcctctatgcctgatgacggcttcgtagctaagttcagtgagaggccgcctgtgctaggggttaaacgtcgtattctaccagtgtcttcggttcatggggttgctcccaagggaaagaaagggatgatgggaaaaatggtagtggatcgggaagctagttatgtgtctaaggggaaggggggaaattaaaattatgggaaaaatcaatttcattttcttagtttatgctcttaaactggtgaaacagaaagcaagaagggatggtttggatcaggatataaaattttggggttccttttgttgaggaagaggaggtggtgagtgatgttgcctcagacgtagttgcggatatgattggtgttggttctcttgggtcacctgttgggatgaacaacgatgttggagtgatttctattgacttggcggtgcctgtggcacagggccacctctcattatgatgtgttagcatggaacgtccaaggcctgggcaatgagagaaagtttcgagtactctacgccaatattatttgagaggtaaacccgatcattttatttctttcttagactattagaactgttgctcaaatggaactcttacgaattcatttaggctttgcgagtaaactagtggttgagaaaggttggagaagttgtgtcttttgtctcttttggttggataatgttgatgttacgcttttgtcgttttcaaggggtcacattgatgttcttgttagtattttgagtttcactccttggaggtttactggtgtttatggccaacttgattcttctttgagacacgttttctggaacttgcttcgtcgcattgcttataataattctgatccttggatttatggaggcgactagaaagagatttgggttcaaaatgaaaaagcgggcagggggtcctctttgcccttaatttttgatgaaatatttatggaaagcttttgacgattgtttcttaggcgatatgaggtttgaggggcctaaattcacttagtgtaataaacattgagattctacttttgtccaagaacggttagatcgctttgttaataattcttcatagatgaattattttccaaactctcatgtatctcaccttactttttgagggtctgatcatagacctattgctttggccacgacccaaggtgttggggaagcaagattatttttcattttaaaatgtttaggcctctgagattgagtgtaatgacattattgctaatgagtggagttccaacgctattgaccctctttagaatgtgatgaaaaatgttggtgttgttggtgaaaaataacaatcttagaacaaggaggtttataaaacatcataaaactgttattgacaaaaagttgaaagatatatggctattcttgatgctaatcttgatcaagtttcttgtggggagctttggaaattagaaaaagaattagatgttcttcatgagaaagaaga

SEQ ID NO: 227390 - DNA, 1695 bp, Cannabis indica
cggaggtgactttccagtactgtgcgagaaggagaacggaaaagagagggcgtgtgggtggaaattagggttacaaggagaaaaatgtaaaacaaagagaagaagtgaacaaaaaaagaaaaagaaaaaaagaaaaaaaattatttttttaaaaaatatttaatcaattaaaattatgtggaccactaaaaatttttcacgtgtacacttatgtacattaatgtgacatgtccaccgtgacacttaacagaatcttttggacggaatggataaatagctaacaaaaataaaatttggagagttttactaccaaaaattaatttatataattaagtattcttaatcataaaatttaaatcgttttgccgcaaatatcctttataattatataaaatattggattgtgaataaatgtgttatttgcgttaaacatgacctatgtattatttgtattacaaaagtgcatatcaactcaaaaatatttattaaaacaaatgtttattatttcaaattttagtcattatcatatgattcaataataataataaataaataataacctaggtataatcattttaaatgtatgttatatagtagttattgattttttcttttagaaaatactaatgattatttatatcattaaatatagattctactaccaatattattcgtatcaatttttagtcattatcatattattaaaaaaaaattacctatcttatacctggtatatatacaattttacatgtgtaatactaattagtaattattgattatatctttaaattaatataggtcctacttggacgtaaggatagcctagtgtctaaagcttcgagtgtagaaggaaacattccaaggccgaatcaaagtatggaccaactcatcaaaatttttgcaaggaaaggtcttacaatctacgacatggtggcattaaatggtgcccacaccattggattctcgcattgcaaagagttctccgaccgattgttccatttcaacaaaaccactcccaccgatcctgatcttaaccccttattcgcaagcgcattgaagattacatgcgaaaaaattgtagacctaggagtctcagttgttaatgatctggaatcaccaacaacctttgacaatgtgtactacaaaagcttgagcaaaggtttggggcttttaaagtccgataatgctttgttaaaggatccaaggacaaaaccaattgtcttatcatttgcagctgatcaaacattgttctttcgtgcattttctagagcaatggagaagttaagtatctataatgtcaagactggccaacagggacagatcaggagagtttgtgatgcttttaactaataattattatcaaagctttaaagcaacaagttctgaatttaagattaatattgtttgattgttggctttttatgagtgactttatgtattcatgtatattgtccgtagtagtgggtttgatatatttgagagaattcaaatatatgtaaagttattatttatttttgttataataataattgttttgatcaaaggaatagcgttatatagctttggaaaaaaaaattaaaatataatacgcaattgatgatttcagtttataaattctcaattctcaaagccttaaactctataataaagttttagtcttaggacattgctatatttgacgttcttttttttttt

SEQ ID NO: 227391 - DNA, 4699 bp, Cannabis indica
attctgaaaagcagtcacaaagttacaatatcggagctttcgagaggctcgtctctccaaatccccaatatttcaagaggattgttctctctacaaagagtctactattttctaattccaagctagttgaaatgaatacacccctacatttatagggttcagtcatagtacaaaaagacaactcagccccctaacttaaaacaaccacagaaccactaatacaaaaatagggaaaaattactaaaagaccagaatacaaaataactccctgccaaaagccattccctcggtctcatagagtaaacaaagtgtattggggcttatcagatcatcttaccaacattaaaatccaatgcattcaaattcatttggctaaaaaaccagcaacttcaatccatcaattataatattattttactcatttactggtcacttgcagtatgtcatagaaattaatgggtatccctctcttctaatttcaacttaaaaagcacaaagaataattggtacccctctctttaacctcaactctgaatctgagggccacagagggcaatgggaatccttctccatatattggtatttctgtctttaacttcaattttcaggtcagggccatatagaaccacatttacagatcaaatctactgtataaataacctaaataagaaagaagagaacgacaatttaaagttatccatcccttagttctgtgctagtatttaaatactcattatatgaaatcagctaaaactcactcaccactttgagccatcattgacattagaaatactgaaagaatccaaagacttgttccccaagtcagaaaaatcatactcaagctgattccccaaataattaaccggaagtagcacaaaaattccaacaacagccgcaaacgtaaacactttcaaactgcattttcagaaaaacaaaaatcccgatcggtttcatttcaaacaaaaactgaattgaagaagacaagacaagacaagacactaacctgaatacaaaaatacgagtaaaaacgacagcatccaatcccaaagtggagatgagttgttgatcggaaggctcccatgcatttctgacccaaccagcagtaggtaagagcctgtcgaagttgaaatcatgagtttgttgagattgaccttgagaaaccaatcttggagcgtagacggcgacattccacggttgctttcgaagaatagagtagagagtgaagaagagaaagcagagacctagattgattccgacggaggttagcagagcagagagaatcataatgaattgaagatcaaagaagaagaagaagaagaagaagattaataaatggaagtggtgtggtttggttttggttatgatttgatgaaatcgagtgtggtgtggtgagtcagtgtcgtacttttttgggattggtgtgacgataatgcccttgaatagattcatgctggccaaccacgtggcggtggtgcaatcgggtattatcattttgggaaaggaagacaaaatactttcctaatatatatacacacatcataatcatatttgtttgttcctcaattttgacaacttgtaatattttgagattttctttttttgttaaacaaaatcttgttaatctcctgaaaaaatagaataatttgcggcggagcgtggctgatagtgtcgactgattaagttaaatttaaatatttataccataaattaatttaaaaaattacaaaatataatttcttgtaaaacataatatatttacgagctagttaagcttatactgtttttttaacttttttgttttttttttttaaattaactttttctaacttttttttattacaaactcgtgccttaaaaatcataaagaaaaagtaaagtataaatacctttataaaatataataataataacaataataatgttttctgattttattgtacaccttcctacttcttttatccaccattatataacaataataatttattttcttacaatgtaccctaacatggataaaatggaattttgtttgtctaaaaacataaaccaaatcttattttctaaactttttaaatcattaaaaattcctttttaaatattaaaattgtcacattcaatttaaaaagtctaatgtaaataaaaattcacagatacaatttagtacacattaaaatttaaaagtatgatttaataaatattaaatttggaaatacgatttggtacctaaacaattacctgttagtaaaattaccaatctcaattgttcaaaaaaaaaatttaacgactaaaaaattcaaaacatgattcattaaaatttaaaaaacaaaaatcacaattagtccaaatttaccttgaatttctcagcataagatgtgctacaaagtatagtgttaaaatcaaaatctgaactatgttttacttttcataaaacaaagtcagcctttggtatttggtaaacctcatgagatggccaatcaactatgccttctcttcactctctattcaccgcttacgtcatcttattcgacaatgctcacgtcatcactcctctcccgacctcgccaccaaactccacgcccttctcataaccaccggcctcctcgccttccgagacacttttctcggcaacgccctccttcacctttacgcagctcgtggcagtttcacctatgcgcaccaactgtttgatgaaattcccaactcacacaaagatgctgctgattggactgccctgatgggctgctttgctcttcatggaattccccaaaatgggcttcgtttatttgttgagatgagaagaaaaggagtgagagttgatgatgtggccttggtttgcgtttacaagacttgtgctttgttgggtaatgttgagtttggtaaaggaagccatggttttttggagaagattggtttgagttctagtgttaaagtttgtaatgctgttatggatatgtatgttaagtgtaggctgttgagtgaagccaaaagggtgtttgaaaatatggatgaaaggagtgttgtgtcttggactgtaattttggatggtgaggttagtttgggaagtgttggaagtgggagaatggtgtttgatgtgatgccagagaagaatgaggttgcttggactatcatgcttgttggctatattgccaatggatttactcgtgatgggttttcgcttcttgttgaaatggttttcggttgtggtttggaactgaattatgttacacttagttcaacattgtctgcttgtgcattgtcaggggatttaatgatgggcaggtgggttcatgtgtatgcacttaaaacaatggagaagaaggtagatataatggtggagacagctttggttgatatgtatgcaaaatgtggtagagtagacactgcaaggaaagtttttgataacatgtcaataagaaatgttgtggcatggaatgctatgcttagtggtttagctatgcatggtaggggtaaagctgtcttggacttgtttcttcatatggttaaagaaaccaagccagatgatttaacctttacttcattgttaagtgcttgcagccactcaggccttgttaaagaaggtcaatattacttctataatcttgaattactatatggcataaggcctaagatagaacattatgcttgtatggtggatctcttaggcagggcaggtcatttagcagaggctgaggttttaattcgaaaaatgccaatgcctccaaatgaagttgtactgggttctcttcttggatcttgcactatccatggaaagctagagctaggtgaacgcgtcatagaagagctaattcaattggatcctcataacacagagtaccatatattgctttcgaatatgtatgctttagaaggaaagcgagaccaggcgaattcccttaggcatgttcttaagaacaagggtataagaaaggctccaggcataagctcaatttatgttaagggccaagttcatcagttctgtgcaggagataagttccatccactgatcacagaggtttacgccaagttagatgagatgattcgaagattgagattggcgggttatgttcccaataccgcttctcaagttttccatggttgtgatactactaggaagaataacacagatgatgaggtagaggagatagaacaggcattgttctctcacagtgagaaactggctttgtgttttgggctcttaaccacaagagatggctcaccactttatatcttcaagaatttacggatatgcatagactgtcattcagctatgaagatagcttccactgtttacaatagagaaattgttgtgagagatcgaaaccgtttccattgtttcaagcaaggttcttgttcttgttctgattattggtaactaacttttgttagactaatgtaaagcttggttatgttgattaatccatggtaactaaatttatttccaatgaatcaaaaaccagaaattcaaatgtgtttatatgtataggatggccttatgtatgggctacttttggctagggctgtggatatcattgtacttatcttttattttcatcaatttattttgattctgaatattttagtaaatgtgataacactaaaaaaaaatgaaaaattatctagcattaaagaaaatgtaagagcaaaaaaaaatcatgtctaacttagcatttataaaatcttttttaactattagaattaa

SEQ ID NO: 227392 - DNA, 2829 bp, Cannabis indica
caatacgacctaatacggcgttccaaacgagccctaaaatgtttaaaacaataaaaaatacaagttattgcatttattgaaatcacagcataattttttattgcttactttgagcctttatgaagtgatgatcagttagttcttctatttttggacaatcataactattcaaattcatggttggaaagtccataaaatgattataataagttgatggaatttaattagtatatatattaaataaatttgtacatgacgaaaattagatttgataaataacaatatatatatatatatatatatgtatataaattcaaattagaaagcttctgtttctatgagcttaatttatttttcataaaatttatactaattatgttttgaggtaatgattaataaattttatatctacactataatgtctaataaacttttattgaataaataaagcataagcatatacattattttattcaagttttatatacatgtgtataatcagcattaaaattataaggaagaaatttaagaatttaaaacataatataggtttttttttcaaagaaaataaaaggattaatattgttattaaattataacaaccctttaaaattacggagagatgaaaaaataacaaaaaaaattgtgagaactgtttttaattattgtaacataaaacttaatttattttcctcttaaaacaaagaactcagaaattatatatatgtggtcccaagtattaagaaaaaacaaatcatttggatgaaaaattaattataatttttgtgagaacaacataaaaaatcattttaactaatcgatcattataaaaaagaaaaagaaaaaaaagatttggaaatctctaatataacgtacatgactcatgcatatagcaaactaattaaagaaattacaacatagagacagatgtgtaacttaattaagtccctatttcactttgcactacttctcccttattaaaggtcttgatcttatttacacaaattagaactacaaaaaatttgtacacaaaattatatagttttccctctttatttgagaatatgggaaatttattgtctcatgtagtatcaggcctttttttcctcatgattggcttatggcatctctacaatcacataaaactccatgctcttcacccaaaatcctacattgcactcccatggtttcccacctccaaatcaaaatacctagaactcatctccaccatggttttttgctccatctcgctattcgaagagctttatcttcgccctcacaaccaccaaattctaaaccctaaagacggaacacttccatacccccacctcgcgtacatggagcacagttccatcttcttcaccttcttcatctacgcgatgtttgccatcatactcgattgccttaaatccccagttcgctacgagctaaccctattcctcaccgccctaacctatgcacaatcctttggtggtttgcactttcacaccgcagaccacatgggaccggagggccaataccaccttcttttccaggtgctactccttgtagctctctcaacaacactcttgggaatcgggtttagaaagagttttctcgtcagttttgtgcggtcgctcgttgtggttttcgtaggaatttgggacattttcatgggtgtgatgttgtggacaccttctttgttggccaaggactctgttttttgagtgtagatgaaatcacaggtcagaaagtggttaggtgctcaggagaagagtcacttcaccgagctaaatcaattgttaatcttcaattcagctggcttgtgattggaatggccatatttgggatgtctctatacttggttttgttcaagatttatgatggaaaagttgactatttttcactagacatgatggaagagcaagagatagaagaaaaagaagaaaaagactacgtaagctatgatatagaagataacaacaaaccacacaacgtccaaaaagtacttaatgaaatgttgccttataagtgtacattataaacactagaaattattgtgtaatattttctacaaattagtatgatacttttattaattatttaatgactattaccattttatttcgtttatatatgtctatgtgatattaattgtggttatataacaaagaaaagaaaggttgagataatatataatttaaatttaaactcattacacatatctctcttatatcgtgtattttatattaaatgttgttatataatataaaatattttttttaacattccaatttaaattcaaactcattgtacatatttaaaaaaatatttccattatttttttttacccaatctacacatttaaaaaaaatatcactctatttttctttttaaacaatttgttgtgcaaaatagaacaatcaataatttacaattcagtttacattaccaacaaatacgcaacacaatcaaaaaaaataatataccaagagatttcaagattcaagtaatgaattcagtaagagagaaaagaatataacaccagatttaacggctttgagtcatatgtaatgccctactgtttaggcacgctacactgacttagttactgtactcacctttactaatcaaaatgtttctcaaaaaacgtgttgaatttatacttcttatttaaacttaaacttttataactatatacttatattcatacacaaagtcggattcccgcttttaaaaagatatgttcgtattcaaaatccactttacaaaaatatcgcccagcgactacaaaataaagccgaagttgtcccgagactgaattcttcaggtcgaaccatcttgacatgt

SEQ ID NO: 227393 - DNA, 1417 bp, Cannabis indica
tttatctggtccttggtaagcttaaaatggctctctttaatgagtttttacatttttgttttaagcattttctcctatgatcaatatcatcacattagaataaacattacataattgtttttaagccagttcatggctcaatctcattgttaatgaaaatcatgctaatgtttgatacttcaatgcaattaaagctttttgaagagaagaaagattggaactaaataaaaaatgcaaagtcttaccttttatattcattaatcaaaaatactctcaaattatatttcattaaaatatacccacttttatgagtgggttgctcaatacaccttcactctctacttaagtcttaacacacaatttgcattaatctaagggtataatggggacatcatctataaaagtgagtaaattttaaaaaaatatagaaatgagggtaaaaattaaaacttgtaaagtaaagtgggtatacaatgtaatttccttaaatttttttaagttttagataagcttgtttccagctattaataatgaacagaaaacactagtacatattgtttatttattcactttttgaagggtagaaattcaagatgagaaaaagtgaattctaaacaagaaaagtaacatatcattagaaattgcattaaattttggtgaaaggaaatgtggaatggtttttaagactaaggggttcttacagagatgcttgtaaacattaaacaatacacagactaatttcattccatactattcgaagacaagttcttcatttttttttgtactgttttcatgattacaataactgtattgatgtatctaattatctcttatgtttagtggggacttgagaggagatcttgtttcatggaaaacaatttaatgataatcactcggttggcatctgggtatgtatctgtattttcttaagtataaatacctcttacattaagtatagtcatgccataaaaaggagctctgagtttcttgttgcataatacagctgttgtaatttaataattcaatacctgttatagttggtatagttgttgggagttgggagttgttatgtagctcaggtctttggaatggaacaatcattctagtacagtggccattccagtgtttggtttgtaaattttaaaatggaatgacaattccaatggaaattatatttccattattcaatagaaacaagtttccactcttatatcattggaaaccacattccatatgagatataaaatacaatctttattccattctatttctatcatccctattactatttttattttattccaatatactattactattactattcccattatcattctaatttcattccaattaagtggggacatttttttggttgttttggaaggagagaacctctcgtatcactgtattcatt

SEQ ID NO: 227394 - DNA, 2819 bp, Cannabis indica
tttttttttttttttttgcgttgttgccttttaaagtgagccttcatttcgtgcatatagaattatgtagttgttacttgttttgcattgctaactgtttttcttgcgctcttctttgtgacagcatggaagaagcaaagaagaacatgtatgcttttagcaccacgacctacactggattccaatgtactgtatctgaagaaacatctgaaaagtttaagggtatgtgtccctgttttgtatgtgtcattcaactttatgatttaatttggagtttcatggtattcttcctgatgtaggacttcctggggttctttgggtcttgcctgattcatatatagatgttaaaaacaaggattatggaggttggttttctttaagctaataattacaatatgatctacattttatctaaagtaaatgagattatttggtcaagataaaaaatgtaaatgagattataagttgcctccaattgtcattatggatctcataggtgataaatatgttaatggtgaaattattcccggtaagtaccccgtttatcaacccaagaaacaaagagaaccaaaatatgagagcaggaggtatgaaagacgacgagatgggcctcctcctgaccaaataaggcaaagacaaggagcaacaaaatcagaatcagcatcttcataaggtattgaaaatgccatccatttttgcttctaacttgtgctctaattaatttaactgttattattatttgttgtttcacttcggcagttcatcaaggcgagaatctatagacagattatactctgaactgcaactgatgttggtgttttatcacatttatccatggatgttggtgacatttgttggcagatttttgttggtcttgtcataacatgctttagaattagtgctatacgagcttgttgttgaggacattgagagaaaaacttttagaccgaacatgtgtaccagaattgagatgtaaccttagttatcaatattagttggtttgtttgctttacttagtttctcgattgtctaatgtcaataatgttaatttattttttaaagatatttttattttgtagtttctaggggcaaacttattgataacagaaacagtatagggaggaataaaacgttgagtgcctccatggatgggactacaggactgacgctctaccaaccactgagatatagaggcccttgttttataaatgcatcaaatggtctaatcacctatagctctattttgcaaaatctccattttatcctttaatcactggatgataaaccgttcgtctgtaaatacttgggcttgcctcaaagtaattcttctcttggatagggtcagttctatttatggttaaattttggtgggctttataggaaaagggttgaaaatctattagaaaaatgggtcaggtctacataattctaagttttttagcgcctatgatttaaactccagttcaatttaaactcttggttttttactttggggcagtgccaacagtaagtggcagtttgatcttgccggatggaggaatgctagctccactaaaactatacatgagttgttggtatgattccaagttttctaaagttaagcccatcctgagtggggtttcttttaacaggatgtttaatgacactcactcgtcgatcattaccattgcctctatcatattagctatttgaacctcaacaactagaggattgttgtgagggtagctgacatgataagagtctgattctctaaagttgattggttcacatccgtaacgttgagactttggaagacgttctgttacctctaggactttagctcttagttcatagttaagtgatcttgcatatatttttgaggccttccttgagttcccagttgtgtgagggctccaatcacgatctccaacttgcctacaactggcgcaggctggagaggtgcattgcccccacttagagcttcaggtcgtacataccgttgaagagtagcatgtttctgtctgacaagaaattctatctcgtctcgcaactgattacactcattagtatcatcaccgtaattgttgtggtaacaacagaatttgttcatgtccctcttctcccactctttgaaaggaagaggtttgcgatacgacactgttgactgtgtggtcgtatacatatcctctcttggagccaagagaatggagtaggtggtgaagcgaggctcataatctcttaagggctcaccgccagtcttatgcttctttcttctgggagagtttccttgcttgccactgttcttggccctctttcctccatttgaacctccattcttcccatttccctctgccacaataggcggggtttcagtgtctgatgacttctttttgccaccctttgagccttttcttgggtgatggcttcgtcgagtttgataaatccatctactctatataagaagttgttcatggtgtataccaccttgagacgaaagttggaccacataggaatcatctccttgagtcctttctaagaattttggcttagcggctgcctctaagaaccattgaatgtagtcattgaggggctcgtcttcctattgcttagacatccaccaaatcattgggcttgatctggcattgttgggaaggagtgagctggttgccaaaagcatccattggatctttccatgagttgattgatccaaggggagcttaatgtaccacctttgagctaggcctgttagtgttgtagggaagattttgcacctgacattaaactctcggaagtccaataaatatagtattacaatacatataatgatcaaattaaactaa

SEQ ID NO: 227395 - DNA, 2358 bp, Cannabis indica
gtagttagacagtgtaaaacacaaaaaattaggacaagaatagttaagatagtatctgattaaacacatcatcaaaagatgtgtctttattattgtagtgtttataataacactctcaagaacaatgatcaaagaattttatcaaaaaaataaataaaatgatcaaagaaatgaatgcaagataatgagaatcaaaacttaagaaaattaataacaaaaacagaacaatttacttggtttagtagacaaaagcaatgggcttttgcgactactatcatccaaggggtagaacagcctcagattgatatttatacagagatcaacaaagtctttcaaaacagtagaaaataagagactaaaatctctcagcacctcactcaccaacttttccatgaaaaatgagtctgagtttctcttttataagcctcttaatcaaactgattccccaaattaaccaacttctatgacacaaaagctagctgtcaaactgtcatacgaagactaaaaattctaaagcactacaattaaaaatctgaaaatggtaatgatacctcttatcttagcaatatccctcactcaaatttgattgctgggagaaacatcgctgatttgtatatatttattgaaaattaacgatataataaagagaacaagatgccaaaccagtatgatagagtttcatgcttcataaccaaagtcctgtctagtatgcataaaatttcatgacaatagctagagttaacaataaatttggtcattacttaaaacttgtaataatctgatgtaaataacatgatcttatatgataaactataccatacaaaaagaaatataactaacaaaatgatcttataagttatatatatgagaaattatgcatacaaaacgaacacaaaccaattgggcttttcaaaagtaaaataaaatggtatatcaataatagtagctcaaaacaaatcacattcccattccaatttataggacacaaaatcctgatttacaggggaaaaagaaaacagctgttaaaaatttctttagtcttgaaagggaaacatataccttatgaatagcacaaaaatgatggctaaagttctaacgtcgaacgctcaagcaaacacgagaagaaaaagcctatgaatagccttccaacagtggtgaaagagaagagccctctcaaaatcgattttgtcctactgttttttcaagcctctgaatattgagatcgaacaattggagaaacgggaaggaactggaagagagagacatcggcagaaatatagagaaaaaagacaattaattgtcacaccatataatgttctctgaagactaaagtgttgctggtataatatacaagaaaaagtgatgctgtagataagttctttgaaaaaaaaaattaatcatttttctttcttcaaattatatagtattggtcattgctcattgtagttggactataatggttgatatttatatttgttaattgtgtgaattacaatcaaattaattaaactttaaaccatcaaataattaataatgacaaaattatcaagtcaaaaataataatcgacaaaaaatatagaaaaaatagagtatctaaactaaaaaacaataactgcataaaataaagaaatcaacactaagatatatgttggttcaagtctaatagatcgatgtgatttatggttctactccaattttggaacactactgttatacttctttattgattgagcaagaatagatacaaaacagacgagacgagattctttgttgagtccttacaaagtgtttcaactctcacactttacacccaagaatcttcttcatctacagtagaatcttcttacaaaacctaaaccctatctctctctttactcggtacctctctctctacctcccaatctttttttctctctctttcaaactctcaatctcgtctggacagagtctaatttctcgtgttctatatctttctgaaaagacaaaccaaggtggtatatatagccttaggatcaagatcctaaagttagtgactgcaaaaaatgaggttgttaagttagttagaaaataactaacttaaccaactcctcatttagcgaagtctccacatcagcatgagcaccagggcctccaggaacatgaatgagcttccgagctcgaggatcacggaccctagttgaagacacttcttgataggatataagtctactgaagtcgactattcgaaactatcaatgcaggagggataactagccagctggaactcctttccagggagagctagttatcctaaaaatgggactcggagtggacatgatagacatctgggaactcctttctggacacgactatcattcc

SEQ ID NO: 227396 - DNA, 1967 bp, Cannabis indica
ggcaatttacttaacacttaacacccaggtccctacaaaagttccaaaattataacttaggtattattaccacaaaaaattaaacttagatatttatttgcaacttaaaattaaacttaagtatttaagctgcaaattgctctttataaatatatatttaaaaaaatttatatatacaattaatattttaatgtaaataattgtactttaaaagtttaatacatctgatatagttatattttaaaatttaatagatgatcaaatatatattctattcttatttaaaaaaaaatgtaattcaaaacaaaattaaatatttatttaaacatacaaatttttttccttctttattttaatttgttatttgttattttgattattttaatttgttgttggagacataaaacaacaataatttgattcattttgttgtaagttatgtgataatatttttaaataattcaatattaaaaagtaataaatctatagtaaccgatctaatctacacttttacagactggattgaattagatttggattattgcgagaattggattggatccaaaatataaaatttgtacttagtgtggatcaaatatagtataaaaaaatagtacaaattagatttgataaacacctctattgatgaataaataaattaatttatttagtcaccaacaaatatttaggtgaatcgatgataaatattgtactaattgtagtagttggaatgttgcatctaatgagtaaaatcaaagcaaaaaaagaagaaggtatttgaatttcaaaccacatgattcacttcttatgctgaaataagttaaataaaatcaagattaatttgactttgtatttctttttatagaaaaaagtcatcaaaacaatagccaaaaatttggcttttgtcggaatatttttttataccttttattttaaattgttttaatagtaaatacttctaaatggtagcaatttagttgaggcatccccaaattaaaaacgcaatctatatatttatataatgctgttgtttggacagatgatgtggcaacatatatgagctctcctcacatttctttattttcctattttttctaatttttcaaatattatttcttctttaccaattttttcacatttaattatactaaaaaaaaacataacagcccataaccgcacttttgtatttactattctttttggaacaattattacaatataacagcccataaccgtatttttgtatttactatttttttttgaacaattattacaatatcctttccttcttcccctactctccaatctccatgtgtctccaacaaaaagtgggcttgaagtggaatatagattcaagtgaatttttagtaaaatatattttgaagtgggtgttttgtaaaacaaattttaaggaagaagataatagagttgaggcgtagtaaagggcttcgaaatggtatgggattctatcttcattttttttctctttttatgcatgacaaaaacctatattttcatcctcttcttcattttttttaattctaatttcaaaaagaaaagcataatggattcaggaagtcgtcacagcgacaagcttcgaaatggtaaggatttctctcttcatcatcttcttctatctatatgtgacaaaataaggggatccttaaactattccccaaaataaagacttctcaattcatttttcaaatggtatgaactcatcgattaattaaaaaaaataattaaatttatagctttacgctcattttttttaattcttccttttacttctctcaaatttgttgcatatattgttgttaaactttgataaatttattgttttatatataaaaaaaaattcccttttacttttcaatgattttgaaattattgcttacgacgaatctaaatcaaatgggcacgatcaattttgtaaaaattttgcatcatcactatcagttgtctcg

SEQ ID NO: 227397 - DNA, 1246 bp, Cannabis indica
tgacgtactcgtgtataagagccattattccgtgagtgtatgggcctaatggaggcttgaagcggggacgttacatttgtgacacaggatcaaatgttagatcactaaatggaaagagtcttattccgttgtactacacctttgtaagtattccatactaaatttatgatattgatgttataagaaattaatatttatgttaaatattaatttatgtgaattacaaatcgatctcattacgcatatttttctaacagttatatgtatgattttcttaatgagttcgtcgactcacaaatatgttgttatgtgtaagtaaaggaaaagccaaaattgaacagtagtgtgttgtgagcttggatgaagattgtttatatttagtctaaacttagagggctacgtttctcgagacaaactgctaacactcttttgtaaatgttgttagacaatagttttatactttatgatgtaaaatattttgtaactagagtttaggattctggattgtaaatacttattaacagtgtttgtttttaataaggttttaattattaagaaaattttgttaaatacatttttaatttcaaaacccattgattagcaaaggttagcacaataattaaaaaaaaaatgtaatatgccttagatattagggtgttacactagatatgaaaaatatccatttcatggcactggatatcatgtcatgcagaaaagtgacatcaaagagttttcatgtccaacttttatggacatggaatggggttttttgaagtagtgttttcaaatatatataaataggtaggattggacatgtagatcggtatctaatccgcacaaatgcagattttaaattttccaatccaatccaatctgcacaaatacggatattatcacttggtggattagattgatttgaattgagtattttatgaacaccctatgctatcacattttggagtctttagaaagagagctaacttaggagaatgagcaacaaattagccttatagtacaatgcacaaatgaaacattagtgaaagagatttttacactaagtatcatttttggtccaattttaacatttataccggcaaaataagttcttttacattactatcatgaaatctttttttgttcttttacattactatgaattttttttttctttcaattttatgatttttttaattactagtttaggaagtcctataaaaacaatgtgaaaaacaataaaaaaaaaata

SEQ ID NO: 227398 - DNA, 3735 bp, Cannabis indica
atccaattataattggatatccaattttttgtaattggatttgattgaattggttcggttcaattggattggattggataggatattgcccacccctaatacagtacacttttttaaaagtttattatttgctatgcttacatttatagcatgttaataattttcaattacaaacaccactgctagagttgcacattggatggattttgttgggtttctaattttgatgttcaggtttttaggtgtgtagattttgtgtacagaacccaccggtgtgggagaacatgttttttgggttttgggctcaggtgggttggggtcaagtttcgagttggactatgccacttttttttgttttgaaaaatatcattttttttttatattttttaataaaagtacaccatagagagggagattgctgctcagttgaagaatttcgtcctattagtctttgcagtgtgatatacaagatagtatctaaatgcttggctaataggatgagatctactttgtggttggtcatttcgaattctcagagtgcgtttgttaaaggaagattgatacatgataatgcaataataggatatgaggggctgcattgtatgaggaagaatagattttagaatgaaagaaattagctttgaatttggacatgtcgaatgcatatgatagggtttgagtgaggttttatcaaggtaatgatggaaaagcttggctattgtgaggaatgggtgcaaaatatcatgagatgtgtgacttcaataagcttttccttcttaatcaatggagaagtacaagggaaagtgattcctcaatgagggttacgataaggggatcctttatccccattcttatttttagtttgtgctgaagttttttctaacttaattcaatagactaagaataaatgtcacttacatgggctgaaatttggtaaaagggagatcttagtctcacatttatagcttggcgttctttgatgcaactaaagaggcgcaagtggagtttttaaggatttctcacaaagtacactcttgcttctggtcaacttgttaactttcataagtcagaggtctattttgggaggaatgtgagtgtagatgatagagaagagttggttgaatttttggatgttcagatggtagaaaatcatgagaagtatttggtgttattttcttttatggggcacaaaatagaaaaattatttgatatcattaaaaataggatgtggaacaaactcaaagggtgaaagagatcaatattttccaaggtgggaaaagggttattgattaaagctatcattcaagcaatcccatcttacactattggttgttttaggctgccaaaaagtaccattaatagccttcacaaattgacagcgagaatctagtaagatcgtcagaaaaatagaaaaaattaaaaatgcattggtgcatgtggtcttatcttagcaagcctaaggaaaatagtggtttaaggtttagagatttagagttgtttaatcaagcacatctagccaaacagatttggagatgcattagactctaaattctctttgtagtaaggttttaaaggtaaactattatcctagggtggagtattggaggctaagtgtgcggcacatgcatcagtggtgtggagaagccaagtgtggggaaaaaagtttgtattaaatggctacagatggagaatcagaaatggcactagtcttcgaattgtgaaggatccttgggtaccaagaccagtaacttttaaggttttttataaaccaagcttcccaaagctgttgtatgttgttgacttgaaactttcaaacgggttgtgggatgaggactttattcgggccaactttaatagtgatgatgctgaaatgattttgaagataccatgtacaaggtagaagttggaagataaagttttttggcactacaatactggtgagtgtactgtaaaaagtgggtatcaaatggtgatagatttaaacgacaaattaaataatcagatgatagtcatgtggttgcttagtggaagaatatgtggaaactcaaaattttgtcaaagataaagcattttatgtgaaagatggcacattcgtggctactaactaattcagtcctttcatctcagggaggaatagttgatccttactatcaaaggtgattagggggtaggcgataatatatttcatgctttatgggggtgtaatgctaatagagaggtgtggaagcaaagtaggtttaggtgatatatccatcaagaaggtaaagaagatattctatcatatcttatgtgattgtctaaactgtggcagcatgaaacttttgaatattttcttgttctatgttggcgataatggtttattcgtaataataccaaacatggtggtaaggaggccgggaagcagaggtgactaattggtgtgctcgattccttactaagtacaaggatgttcacggaaggaaggaaagatgatgtgtaaggcaggggtagcttgggttccactacctactgggatgctaaaaatgaatgtggatgtggggataaaaagggtaagggctattttggtgtggggagtgtgatttgaaatagtggaggacatgtgatgtttactattgccaaggtgttgccacaagagtatttgccgctacagggggagttattagctatacgaaggcttgcaaattggaatccagcgacaactaccaagatttagcgttaaaattactgattttctaaaagctgtccaattaatccaaagcaaggaagacgactatctagacgttgatggagtgcttgaacatattagaaacatgtcgttatctagtaatgttgttggactttcttttgtttttagggtagctaatgagttagcttacgttttagttgatgaagcttttacaaaaatacatcttcagtgaaaacataaaccgtcgctttgattgttttatagttaatttataattgttataagattttttttcttgttgtttttgattgttttataattatcgtgagcagtggcggacctagaagttaatgtaataccctacaattaagaaatagattagcaaaaccctaattagatagttatgaatatttgaggaattatattattatatagttcaatatatgagaatttatttaattaattatatgtgaagaccccgttggtgagccagaggcattttggtaattatgacccgagaagggtaaaatgatgaaattaatttaattacgtgcttaatggaactatattattatatagtatgcctgtattttcttttcaggtgtgttctgacaggttggcgcggtatagtcacaaccgggtatttcgggtcgaactgggttcgggtccgaaatgcgaattggattgaaatatttggcattttatttattgttgtgaaatctgaaaattaattgggtttattatatgtgaaatgtcatttttgcccttgtgtgtgaatatgcatgctttatatatagcccttggggcaatatggtctttttggacccttgaattatgttgaataaaagattggatttttggataaatgaaggaattttttggcttttgtttccccaaacccgaacctctctctccctccttaatctattttctaaattggagaatttcttgaagaattgcttgattgagcttggatttgaagctttgtgtttgtggaatcttaagcttgcttttggattaaaattaaggtagctttctatggttttaac

SEQ ID NO: 227399 - DNA, 4244 bp, Cannabis indica
ggtatgtttcaattaaatataaaattagaggtaaatgtgattaactgcttaataaaagtggtatttttcaacttaccccataagaatatgaataaaatatagaaaacaaaaaaaattgataaaaaattattattttaaaatagaattgtcattccactaaaatagtaacttgttttcttttgttctgttgcatgttgtatgttgtgattaattatttgtgttggtgtttttcataacaatttctttatttgtttctttttcgtttgtagctcttatttcttaatataagtaactcttcttctgagttcacaatcgtctcaaaaggggtagatagggttaaagtttttttacttaagaaaatgttcattatgttttttttttaaatattataaatatatatcataaaaaaaggatattgatgcaatactatctgaattatactatttgtgacacttaatcttacaaattaattttttgatagtaaaactctccaaactcacatgtgttttgttatttacttttccatccgaaatgatctcttaagtgctaagatggactgctcaagtgtcaatatacatgtggtaaaatttaagtagtctacacaatattaattatttaaatattataaaaataatttaaaaataaataaataaatatatttattatattttttttttctattcttttaatttttcttcttttccttttccctaaagtgaacatacacgaaacaacctaacccaacacccaaatacagttttggcaataaaactccaactccagcaccccttcggcgacaagaccccaacctcaaccattgaccggtggcaagtcttgaacccgaccgacgagaccccaaaacttctccctccgattctccctctctcgcttagatccctatatttttgagagatctctcaaaaatttgatccacattcccgacaacctccaaccacgatcaacgggaccgtagtacccaaaaaccccaatgactgacgccgtcaccgacgagatctctatatcccaaccagccgaccgacaccatcaccgatgactaactaataccccaaattaccgaccaacgacaatcccgaacgactgattaggggtggtggtgtctagccctacttgtttaggcctgctacagtgattttttaattaatgtagacacctttactaaccaaatggtttcttgaaaatcgtgtcaaatttaaacttttataaatacataactatatatagaagtcgagatcctatcttaaaagtttataacatcattcaaaatacattttacaaaagtgtcattttgtgactacaaaataaaggcccaaatcgtcctgaaattgaatactccaggtctaaccatcttgatatgtgcaatcatcttcaagctctagactcactatttctcaaccttgatctttcctttacctacacatgtaaacatatatgtgagtcgacaaattcagtaagaaaaacataaaacatattaccgacttgcatctaggcccccacacctatttacaaggcttaacagatgatcaagaacgttcttaatagaagcacgatctctataccacatgcactaagtactcgtcccgtactagtgttggtagggctaatcgcaccttgagtacaactgagtgttgtaccacatgcacttcgtactcatcccatattagtgtttgtaacgctgtgtgatacaccttaacatcatataatgtaccaatgcactccgtactgcaactgtattagtgttggtagtatataaatcacattatacatcatgcatataatatacatacacatacatatacacattttataataatctcaactcgttttctgattcaaatgtgtcgatcagcctgaatagaaattacgtgctgaacgaagaccctatgtcacattacataaaacggccaaataacttactaaaaatcttaacatataatgatataaaatatataatttttgtaagcaaataaatatatatttgatcctaaattaataatacaatctgtaccttgttcaaaaaaataaaataaacacaatacgtaactaatttttgttttatctttattttatgatatatgggaacattttcttgatgttaagtaattgtttttctatccataacgaaaattaacaaaaaatcctaggaggaggtatttcctctaaccatgaacatttagcattagctagtggagtactgtcctttgacacagtatgagttttgtcttttggtcattgatttattgagatttctttgtaattagtgttcagttttttctatgttctgattttgatatggcttctgcaagttcaagttatcctccaggggagattgacgaggaggttacgcttgatgttgaagaatttggtggactgtctttagacgtagaggaagaagaggaagagtatgatgtgcgttggtgtcttgttggccggttcttgaatgttagggtcattgatgtacaagccatgcaacacatgatggctttcctttggaaaccagttaagggtctatatgtgaaggagttggagcaaaatagatttttgtttcaattctatcatgaactggatattaaaagagtcattggagggagtccatggacgtttgaaagaaagcaattaattttcgaaagactcaaggttggcgataatctgagaaccatcaccctcaaccgacttgatctttgggttcaaatccacgatcttcaacatggatttcgaacagaaaagacgatacagagaataggcggttatatcggaaagttcgtggagtccgatagaataatttttccggtgtggagggaatattttaaagtccgtgttacgattagtcttgatcaaccattgaagcgccgaatgaagattcgtcgattgaatatttcagattggttttgggttaactttaaatatgagcatgcccctacattttgtttcatatgcggattgatcggccatgccgataagctttgtccaagattgttcgagacatcggaggagtcgatcgtcaagccgtacggagtcttcatgagagccacgacccaacgtcagaataaactgattcgatcgcagtggctacgatcgggacgcaaggagaaatacggggaggagcaatcgtcggcagccaggaggaatggtggtggagcagtcggcattacaatggaggatgtcaaggtgcatcggtcgggcagtaatggtgagaattgtgggagaggagaaattcatgggattgaggaaccaataattgtgcagaaacttggtcctgaatttgaggagaataatgagtataatattgatattaatatgacccatgttggagagggtgacacacatgctttgatgagagaggagctgactgtatcagaattaaaaaggaaaaggttgggttcggctgggccagggatattgggccagaatttaaatggtatttctgaaaatggagaagaaggtgcaccaaaaaacttgtttggggcgggtctgggtatccaggctcgccaagagccatgagtaccttgagttggaactgccgggggcttgggaaccctcgggccatacagttccttaaggatattgttgtccaaaagaagcctaaatttgtttttctttgtgaaacattatgtggcaaagctattcttgaaagggtccgagtatctttgggctatgagggcttatttgtggtggaggcccgtgggcatagtggtggacttgccatgttatggaaatacaaggaagagggggagattactgatttttctgacaagcatatcaatattctcactcatattccaaatatgcctacttggaggcttattggcgtttatggtgaagcaaatagaagtcaaagagagaacacttggggtcttattcgtcaacaatctgaaaatgctcgttggccgtttgtgtttattggggatctcaacaatgtcactagtcatagtgacaaaaatgggggtcgaccttatcccgagagactgatccagggattttgtcatgttcttttggagtgcaatcttgttgacatggagcttcatggccacccttacacgtgggagagaggaaggggtacatctaattggaccgaggtaaggcttgatagagaattggcttctctttcttggcttaataatttcttgactgccaaattatttaatcttcatgcatcctcgtcagaccattgtccaattttttttggaccctattattcgaaacatatttaatgaggtgaaacattt

SEQ ID NO: 227400 - DNA, 1969 bp, Cannabis indica
gtaaccattagagatggtactaaatatacacgagaagaaactattgattaggggtaatgaatcattttaatatatttgatgtgtatctttcacaaatcaaagattaatcattttattatattttcttaatatatttattaatatattttaatatattttcttaatatatttttaaaaacttataaatataatgcaatgacaattgaataacaattgaaatcgatttagtttggtttttattggattggattcggatgttccatctaacaattgatctgattcaattagacttttagaatttatatttgatatattcaaattataattggatacccaattctatttgatatattataattgaatcgatcatttataattaaatcggatgaatatttacacacttggaggtagagtatttgttaaagttaatggtggtataaaaaaaaaaacttggggtacactttctttttcaaataggcaatggagggtatagttataaaaaataaaatagggtaaacttaattttaaggttttattttttgatgtaaatatattttcctttataagttttagcttaatttggttttttaaaacctaatatagctttctattttaaataaataatatttatagcctttttaaagtttttgcatttgtttaatgacaaagtaatttggcaacacatttagaatttatactatcaaatcaggtttctgcaagtttagaggaataacaacaatctttctcttcgaacaatcccaagaattggttaaaagctttttggagtataaatctacctttaaaaattaaaattttcgcatggaaagcactgcacaatgcccttccaacaacgtcaatccttcaccgaaggaaagtcatcgacttgatagcttgctcgatatgcacaaatgcttaagaaccaattgggcatgctattttctgttgttcacaagcaaagtcagcttaaaaaaattcaaatttcactattaattatcaaaaatctcaacactatgtataatggtgattacatagtccatctttccacattacattcctatgctaaattggaacttatcatctatgtcatgtgggtgatatggacggaaagaaacaaagtttttcatagtggaaatagaactaatggtgcccgtatttatgcttatgctatgaattacatggaaaagtttcactcagtttctaaccgcatccaaaaaggacattctgtgattatttctgcttctgtgcatataacaagaactgccaccagtaatataacaggagaaacatcttggaagcctccaaataacagggggcttaaactaaatatagatgttgccttaaactttgcataaaaaatactgggtgttggtgcgattgttcgagatcataatggtcatgtgatcactgctctttcaaagccaatacaagattgttttcaatctgatgaaattgaagccaaagccctttttcatagccttaattgtgtgtttcggaagcaattgcaaattacacatattaaaatggatgcattgagcgtctctgatgctttgaactttacatcaaaggatgtatcttgtttttcgaatttaatattcgatgttcgttgtcttttatcctttttccttgaagttgttgtttctcatgtaaggaagaatgttaaccaagcttttcatgatttagcaaaatatgctttagagttggattaaaatctttagaagttggatcaaaatttttattagatgagagacatttcttatctttatttttgctgttgttgtaaatcattgttgatttataataatagtaaaaacttttttttttttttataaaaaaaaaaaaattatattttaaaattatttatgtttccataatttaaagaaaattggccaaaaaaaaaacacgatttacagtgaaacggacgcatgcgaaacggccctggagtttagaagaagacgaaggccgagaaaat

SEQ ID NO: 227401 - DNA, 3823 bp, Cannabis indica
taggagactaggaaataggaaactaccaacaaaataggaaattactaaatacaagttatcctaattcttttacacctaatatacagctaattctttaacactatatatcgattccttgcttttaatgattctgtactacagagttctttctcttgagaaaaacctcttgttagggtgtatcaacccaagtcccacattgaaaagaataggcaagagttgctttgaatataagtgtttcacctactctattagtacgaggctttttaggaaggtgcttaaaaacaaatccgcgagagcttttaggcctaaagtagacgatatcatactaatgtgggagtgaaagtgagcctgcggcccaacaaggtaatggggcccaacacctccaaagccacttcatgaggaaggggtttatttcagaatattcctaatctctagtgcttggaagtgggagttttcttgtcatattaactactgtagtatatcatatacacatagaatcttagtatgaagtatggttttgagtttcccgcatcatagggatgtaattcatgtgtatatcataaatgctctgtagatgcaagaaaaaatttcaaaacatgctttagtctgacaggactgtttgtgtaaacccacagaaaggaggagtcatacttatcaaattgaattcttgttcaagttttatgtgaagatgctgcagcgacatctggatcaattaagcccttcaaaatgttgggagtccatctgcgaggggctgcaagtatttcctttcaacactgaactttgtagtgctttagtgcatattgggaacctatacacaacaccaaataaattacggcggatgtttgatgagtacaatcaaaagtgagttttctttctttttgttttgtttatagaaatttatctgtaggtgcacatgagattgccatgacaacaatttagcatttacactttggagaaggtggcaatgtcatggacaatatttaagatttactgcttatatttgcaggaaacaatctgtggttatctggatttttgccttgtcatttgagataagtagaggtggctcccagcacagggttcgtggattgtttgagagagcattgggaaatgatacacttcgtcggtcagtattgctatggcggtcttacattgcttatgaggttaacataacgtgtgatccttctgcagcaaggaggatatttttccgggcaatacatgcctgtccatggtaagagctcgtggcaaggttataatgcctgtgtatttgagaaaaagacgtggtttatttatgttatttgtcatgttttttggatgaatgattgttttgtgatttggttctgagtgtaagaacccctattctctgcgcctagatatagaagtcatttttcctataatttttcatattgaatttttttaatggtgcattttattttcaatgatgatacaatcatatacctttttccagcattgaaaaaatgttacacttgccaattctaaagtccttttgtagacttcttctttgagaacttgaacaaatttatatagttttgtattgctatttcctaaatgactacatttacaaatgaagagtatatcattttatttctcaggtccaaaaagctttggatggatggttttgccaaactgaacttgattctgtctgcaaaagaactttcagatcttcaagaagttatgcgagataaggaattgaatctgaggacggacatctatgaaatcctcctagaagatgattttggagtatgatattagtgataaatgccaatggtcaatcctagagtatgttgtttgtatttattttattgttcacaacaatacctaatgatgccatctttaggtagaggtgcctgagtatgtgagtgaatgatttcattgataggcccctatcaagctccatgaaacacgcctctacatttttcaaggtaagtgaagaacttgtacacaaccttgtttttgatgatgtacttgtaaattttgtagttataacaagattgtcccatactccttttgaaaatagtgatcatgggtgaataacaataccaattcccatgtattgtatttgtttgaaggttataacaacaaagacaagagaacacatcaatatgctccttcagttctggtatcctatataaattgaaaagggcatcaatgattttaacatcatatcattacattgatatgtttgtacattgacactcctagtaatttcgcgggatgaacaagaccacatgaatatgtggttgaatgaggttattgatgaacaaggcatggaccaattcaaaaaattgaatttctataaaatttgaaggtttttacaagagtttaagatgaaagttatccatctcgctaagctatctattggactgcaattatgcccataacttatagttacataaataaattatttaaaaaaaaaaagagcaaagtgtaatttaagggagatatttataatttatataatttaagggaaattttcacaataaaaaaaattcatagaacaaaattctacaagagtcatagatcagagacaaaaattctatttattctttatttgaaaacaaaacaatagtcacgtaaaaaaaaaaaaagtaaaaacaaaacaataagaactcgtttggtaagtcatataagggtcgtattgtaataaataataaaacaacactatgtttgaataaagtaatgtattgtattaattattacgacttaaatttttaatacaatgtatgttgtattatttaatacataacaaatggtctgtattagtttgtattatgatatttacaaaggattcgggatcaacatttatctccgaccaagattcggacccgaacccaaacccaagacccggacatggatccgaactcgaactcggaactcgaaccccaaacctgaaccctagaccctgagacctggactgtagatcctgcacccggacccgacccgttgttggtgcaagagtcaagtgtattaaaaatatattataactttatacaatctatcaatacaagtcataccaaacataatattgtactaaataataatacaatccaatacaatacaatacgacgtatcaaacgagccttaaaagaagaatattaaacttttgaaattccacattcttaggtgatgttttgtttactaaaatgtaaatcgtgatgataatgaaagattcattatattgtttggtttctattttagcttttgtactcaagttattacattgataataattacatacaaaaactaatataatcttccttgcaattacactatattatagatttatagagtaatataatattttaataaaaatattagtaaaaagaagataaaggtctataaaacatttcataattataaaaataaaacaacaagcatactttggtcaatacaccagttattctattggaaaattttatttatacccctaaatttttaaaaatatacccattttaatagtttttattttatattaaatttatatctttgattgtattaagttttttaaacttttttcttttaattcatatttttaaaaaaaatatacctatcaaataaaataaattatattttaaatattatgataaaaaattaaaataaaaaattatataaaattttcttagaaaaaaaatatatatatataaatttgaaaaaaaaaaataatagaaaataaaatcaaaataagtaattcaacaaaataaatgtagaggaaaaaaaattaaaaaaaataatagaagagtaatttttaaattaatttaagtttattttttttaactaataaagtatacttatactattttataaa

SEQ ID NO: 227402 - DNA, 4430 bp, Cannabis indica
aaactctaaccacataacgagcaacttaattaacagattgtttgacaaattttaaagaaacatcacttacaaaaacaataattacaatcgtcaacaacacttccaaagatggaatgcatgacattgggactatgaacaacctccaccagcaccagacattggactcaacaactttaaccaccagaaaatcacgcttcaaccacgacagcacctccttaagcgccatggcctatgcaacttcaggcagcacaagaccctccttcatccccaagataccagccatcaaaaaactcagatgatctctaatcacaccaccataaccatactacgtatcctcctcaaacaacttcaatattcactttaaagtaaattacaaagtaatttttttgcaataaattttaggttttttcgtttatatattgaagagatagattcgaacatagaattatttttgtgaaaagagataccttatgtctataattattttgaagcttctttttcttattgtaacgattaatactattatttctttgaaaaggaggtattccccataattatgaaagagtagaggagaaactttatgacacattaatgcatggcataataagttaaaagatgactcttaccatacgggtaacccatctattttacacatccacacaaagcactcaaattggacctaccaaaaatatatattgattgcttttaaataacttatgacattaattattgcctaatcatgctttgtttaaagaagttatatttccaaccaaaaataaaagtcccttttatcatattcttttccaaacttttgttagtttccggccaaagacagatggactcaaaaagttgaaaacccaatttgaaagcaatttagtattgtttttcaactcttcaaaatcctattcactccgcaacttaaaaacctcaaataacaaagtttaacggcaaaacaaagaaccttttaaattttagttttagttttggttggcaaaacaaagaccttatctcacttgaattgtggaaaaagttataccacatacaagaccaaacgacaaacaaaacagcaagccaaagctaccaaatggaatatgtctcatgcttatgcaaaagatatcaaggccattctcaaatgtcatatatacacaccacgtttgttaattgaacataaccaattttacaacaaagagacaacaaaaacatttcaaaatattaaaaataccaccaaaacaagccaatagatatgtcttggagaaacagaactagtggagctacctctgttcagccgagaacaactaaccgtcccatttatgaagatttccagccacggattgaaaatttcgaacaagaagcagctcacattgcaattgtgcatgttcctggtctgtgttttaaccaactataccataaattaacttctgtctacttacttgtttacaatatagatgccatcaatttttcatttatagcacaattaagaatcaataatttggtacgattccaataaatctaggaaactagcatatcaaaccatatactatttgatgaccaaatacaatgaagttgatttacaaataactattacatcatcaaaattaacaataatagtaccatgtttgtataataaattcatttctaatattttacttatttaacataataccatgtcagacaagatataaatcctaacaaaaacaaaatccagataattaattagcattatccttaattttagcgttttccttaattgacttacaatattatttggaattgcctcaaacttctcttcaggttttgtgaaggagcaactgaagatcacttacgaggacggtaaattacgagtccaaggacagcgacctcttctgaacaacagacggagtcgtttcagccaccttcttccactcccagaaaactgcaaggagggaaaaatccatgccaaatttcacaatggaattcttaccattaccatgccaaaggaggttccccaaacaacaacgaacgtgtctcctacagaagaaaagcctcctgcagagaaaaaaactcaagcaaatattaatgacatgactccttccaaagcaactgaaactaaagaaactccttctacttctgcccctactcgaaaagctgcagttgcagctgaggcaagagcacaaacggatcagaagaagaaacttccaacagctaccaacgacattaatgctgagaaaatatctcagaaaacttctgctgcagagaagaaagcagaaaagggtcaggaaggagttcctaaaacagttgcttcaattgcagataaagatgaaaaacagagaattgagaaaacgatgggtggtattttgagccctcagaaagagccccttgagccaaagaagcaaaaggatattccacagggaattattcctaaacaaagagtggttgatagtgaaatacgggaggtagctttgattgattctcaaaaacatactagtgtggcaaaatctcgaaaagaacaggaagtaagttctccaaaggaaagagaggaaaagcagaagaccgcaaatgagaatcttgggaaaatagtaaaatctgagaaaactgcagacaggggttcggagaaggaaactgaaagtaccaagaaagctaaagaatcatcaggacccttagctggagcagtgaatgtgtccaagattttaaatgatggaaaggaaactttccagaaattggtttcaggcactgcaaaagaagaaaagtccaaggaggaaaatagcagttctacaaatgaaaataagatgggagtgaagtatatggcagaaactgcaaaacagactgttacaaatgtagtaaagaggctaaatgatgacgataggcaattattaataaatattggtgctgcagttttggtaattgtagcacttggggcttatgttacctacagctacgggtcctctccaaaacgcgaaaactagtcttcttaagttgtcaatgtaattgtctccatttatgttgtaagtttaatttatcctagctttcaaaatcaagtatcaggtgttcctaatgttgtaacatatatgtacatatgtttgtcttttaataaagacatgaaataatatacaagtggtttgctttaacttttaaagtcttgcacctattcacttatgtcaaggcttttaaagaacgctttctctaaatagttattttccaatagatcaatattttacccgacgagatcacggaaaaatggagaatgcattaggagaacacatgtgagctggaaatggaattgctattcctgtagctaggttcccctccttttcaagcttatcgacaacacctgtaacactagcattgacattggcattgctaccttaagtagttagttgagtgcttcttaagagatggagcttttctcggaaccttcatttctttggaaatttcgatgatgaagaatttgaaaaggtgtcaaaattaatcaaggttttcaagttatgacccttcaatcaagattctgacaattgcaagacatagcaagtagaagattatggtacccaacaagcacccaatcctcttagtttccttttatgaggaaaattgtggtcccatctaaggttaaagcttttaacatacttttttttatggggaagttaaatactaatgacaatctcaaagaagaagacaccttcccttggcgttaaccccatatcggtacgttctatgcaaaaaaagcaacaagccctcgcctcccaagaccatcttttcatacactactcgttctcaaatttaatctggtccttccttgttgttgggggcttttggtgttttctaagtccaacaaaaaccttggaatgttgcttcacaagcgacttgtcgtgagctttggttagaaagaaataggaggcctatgttgattggggaaactttttgtattaattgtgttttagtttgtaaaataagagtatgtgtttcttaataaactttggaggaggtcactcatggacatgtgtgacctttgttactttttcaaaaaagaagaagaagaaataaataaataagaaaatttttcaagattttgaattgggtatcaactttcaacttagggagtgtattacattttgggtggtttagatctttagaactaaggattttgcattcttgtttctaattgatcgttatgatttcactattgaagtatttaagcaaagtataattccaaacaaattatagaacaatggagtaaaccgagtagaaattgtatacttaagcaagggaaaaactattacactaatggccccttgggacgacagtgatgcaaagagattgatcttaattcttgcatacccactctcttcccttgctcacttatttataccatcctacttactactcaaactctcctcaatacaatgagtcatacccctttttatttgctacatccttccacatcctactaatcctag

SEQ ID NO: 227403 - DNA, 2862 bp, Cannabis indica
ataattatgttttttttattagtaggaaattattttattaaatttaattgttcaagtacatatataaatggttttcccctgttaaaaaaaagtacataaatggttgtgaagttgtgattaatgtttttgcagtaaatatatcatcgaatgtaataatttaatcaattattatttttttaaaaaataatagtattattaatttataccattaaaaaggacaaataataataactattaacaattaaataagctcatgaagacactttgtgatttcgtgaaacttacgtaagtagacaattcttaaagatgtaaatacaaaatttaattattatcttattcactttgtttgaggtgagaatatttatatatatcattaattatttataaaaacgttaggaaatcaccatcaatgaaatttaatacaaaatttgtctccatcaattttgaactgaaacataatatttcatctctcctttttgcctattacacataaaagtaatataatattataaaatttgagttaattaattaacaattattcttttaaaaaaaaattaacaattattttttagtaatataaggatgaaataaattaaaaaattattaaaacatactattagtgtctaatatttttttcgatcttatattgttattggtgtaattaagtatttcgtctcatataatttaagaaaataacgtttacgaatacttaattgtctgatatgatattttaaagggtgttaaccacaattgatgtattttaacctttctcataaaataattataatttattatattgagctttaactaatttattattacaaaagcatcttttgttattataccattaaacatttcatgggcaaacatgatcattattcaacatttagttctaaattaaataatcacaaattatacccctctatgtttctttggtcaatcttttataggttatctataattaattaaaagaaggaaaagaaaaatacatttataacaataataactctactatagataattgagagtgatgtatctaataactaatttaaattattttaaactactaccaaacatgccattaatgaactttgatatttttctataacattatttctttcgatatattaataatgattttaatagttattttatgtgtttttttttataattaattatttcattacaccattgtgtgaaatagttaatgagtgaaatttacaactcaacagaaaaaatattttgacgattgcacatgtaaatttgatttgttttccaaagttgacataatacatttctcaagttttcatattttgataaattatattctaaatttttaatatgatgttgtatattgtagttgtaatagatatttagttcgtttttgaaaactacaaaatactttacagtgtctaaaataaagttcaaaatagtttattacacgtgtgtaaaataaaatgggtacgcgatcttatttttaatactgtaaattatttataatttttcgaaaacagatagaatatttagtataactataatgtacatctatatataaaaaaaattcaagcaataatttcttttttatatggaaaataaataatgtccctacaataaaaataaaagtgatatcaagatgctcaaactaacaggactttgagcgaaagtcaaccttctttagtaaaagggttgagtggtagtcatgctactaattacaactttctctgactgtcttcgtttgatctatgttgacattggtaaagaagtgtcataataagttttgtatgttctcaatgatatctcttaagttcgatattgtaatagatcgttaaatactattggttattctcttgctaagaggacgtttaatttagatgagttcaatatttaatagtcgagagacttctttaaatttctctttctactctttgagctcctctttgtatctgaaatttttcatgctcaatttttttttccataaatatatataaatataaatatttacatgtaccatcaccaactcggaaaataaagaataccaatacaaatgtatacaaatattcctttagaaaattttgatcttttgactttcaacttaaaactcatgaagtccttcatttcccaaaagaaaaaaaaaaaccaaaaactcaaccccaaatatgcccttctaagttctaagagtagtgggcaataactattttacctatatatatttattcaaattctaatataagaaatttgggtttacacccaattttgatcaaaaaaaaaaaatctagtataaatggatatttatgatattattccattttataagttaataatttggccatttttatttctttctctatttggtaaagtagaactctagtcgctacatttaattgctatgttatattccaccaaaaattcacttctaatactatactatatttattatttattcattttgtaaaatactattgtatatacatttgtgtctagcataaatgcatatcataaccattccaaatttatataaaattcaaaattacaacttttaaaaaataaatagcagtagatgatcacttagcatttttatttttcaaaaaaaaaaagtgactttaaacattttgaaaaaagaaaaaaaaatttttttattttctcttgaaaatggagataagtagatatattgtgaattaggcttgaaagaacaaaaagagagaacaaagctttgatcgtactatttccaagttcaaagtaaaccactaactctaataagtaagtttaaattctcattattgtgatatattattaggtgaacaacttatttaatgatttgtacagattctaatattaatgttgtaacaccctaactaccttagg

SEQ ID NO: 227404 - DNA, 5484 bp, Cannabis indica
aaaaaaaatatcatgtagccattgtagcaatacttcacataaaattagtcttaaaaattgaactacattacatatgtggcaaaattactctaatggacaacccccattagagatgctcttagtattaaattaagtgtattgctattagacactagtggtgcctaatattttttacaattggcattccagtaatattccttaaaagttattttcttatattatataagatccaataattaattacaccaataataatgtaacataaaaaaaaaaaaatagtaatcataggatgtcttttagcatttctcttacattaacattagtactagactagttcatcgaaaaaaacattactactactagactatagactagacttgagtctttttagcttaccagctaagttactttcttcaatcactcactcacactctccacttctctttctctcatccaaatttccagggtttcactttctctctcctaaatcactctctctgtctgaccggttcaaagctttttttttttttctgttttggacaacaccaattcaaagcttgagctccaaggtttgtcagtttaaatccataataagttactcattgatcagcagcatgaaatgaagcttttgatcattatatagatatatctgcatttagtacctatacatgttaatcattgtaatgaatgaacttgatatgaatgtgtatgttataatgtgcttttactacatactcttttttttggaaatctttgcaaggttgtttaattttcagttttttgggatttttacatttttgaaagaaataaagaacttttagcaaaagttttagagaacttctaaatacaaaatggttaatattagcaagccctaattaataagtaaaagtaataacacaagttttgggttctaatcatccccaaatgaattacttatatctttaatatttttattacttgggtttaggacaatgttgaaatgtaggacaacagtgatttgttcaaatatggaattttttgtagctttaattgatatgcatgctgtaataatcttttcctttgaaaaaacttttttcttccatgaaagtatgaaatttttgtacctctgtttcaactaccacgttgtattaacttaccttattatgatacagtgttggtatttggtctctgaaaattagtttgtagagagagagagaaagagagagaatggattgtgagtgtattctagggatttttgtagttgtttcttcaattttaacctaaattttattgaaataattttttttttttgttttccctaaattatttgatgctattatatttaatctgagttagttttccactgtcatttgaatctgggtttgagtattgaaatctgccgttttttttaattaagtaaaattcagtaggtactagattcaagtggctcgatgcctattcgataattgcttgatgaattcgatagtggtcagttttaattcaaatgtgtaggttgaagatgaacatggttaaagtttgataggatttcgataggaacttgataggggtacaatatgtttgtgttgtttattaagatagtagaattcaatgttagctcgatagggtgacaataggatttcaattgttttacagttttactgctctattgcttttttgatatttaatcgataggagttcgatggaactcaatataaactcgatgcatataggcagttttttttttttttttttttccaatatgaagtcgatgaagtttgatgtaaattcgatgtatatggcagtaattgtttaattcagttttctatttttcgtttgtttttgcagatggctccgaaattgataattcctgttgagcagcattttactggtcgtgtcacatatagggggagtggatttttggccaagatcaaagagaagtttgaagcttacaatttgataggaagggtgaaagaatctcctttaaaacagtttttcatggccggcgagctgaagttttccggggtgttgttgcatcagctgatgctgcacaagataagggccgagagagaacaggaagtgcaattttacgttggtaggacaaagtgtagattcggattgacagagtttgctcttataactggtttaaattttaccgaaggaccatcagaagcagaggttactgcccatctcacatcaaaccgcttgttgatggtgtatttcaacagttcctcaaaagtcactttagatgcccttctaaaagaattcacagattgcacagttcctaatgatgtctataagttgggactgtgtttatttgttgaaggtgttttgtacgctcgtgagggaaatcgattggtttggttggacatgattaagctcgttgatgatgttgagtttttcttcaagtatccgtgggggaagttgtcttttgagaagctaatccgctcctgccagaaagatatgcatcacaagaagaaaaactttgacaaaaaggccgacaagaaaggagttcagaaagagtcgaagtatagcgtgtatggctatgccccggccttacaatattgggcgttcgagtccatattggagctggccaaaaggtatggtgtcaaatacggcaaccagatccctaggatgcttagttggacaagcaagacagacattgcaaagatagatcttgcccccttgtttgccaaaaaggtaacctaatttcttgctgatttacttgtattatcttcataattttagaaaattttacattttttttgcattctgttttctgaaaaattaataggaatttgataactattcattgcatgtttgattctatattttctatacacttagatttcctaatctgtttcatgaattcgataggagctcgatggggtttgataagaggttgattatgtatctatgattgcattagttcaatatgtgctcaatatgttcctgttattgtatttttttcaatttgacttaatgaactcgatagaattcaatacgtgcttgataggttgaccaagaggttgagccttgatctgaatttgatagagtttgatcagaactcgatatatataaatattttatttttaagaggatattttaccatctgttttttggaattgtttttttttcgcagttgaatgtcatggcttgcttgtttccccgtccagcagagtcggaatatgtccagggccttacagttggtgatgccccactctatgtggacatgggcgtcgatgagacacagggtgatgatagtacaacccaccagtccgaatttcaaagacaggctgcaaaagtagctgagtttgcacagtcaactaacatctttcccgttgatcccccaccaccaccaccacctgcaccagccacaacagcatcctccagtcaggctgaccaaccaaactacggacaattggcagataggttggaaagggtggaagggcaacaaagtagaatcttgaacggtcaaactgagatcaaggatactcaagctgctattatgggacaaatgaagaccataatgagcatgatacaagatcttcagaggccaacaacacagccatgtgatcggtctaacgtagaagacaatcttccagaaaattacgtagttgatgacccaggtacttctgctttgatggagattgtttcacttggtgatactcagacaccggtgggtggtcaggactgtgatgttgaagaagctgagccttttgcaaacagaaagagaccgatatacttggacgactacacctcaatgagaaaaaaggcttgtgcagctcggactgtggtgaatatggatcctttgcaggttcatatgatcaaacctgcgatactgacacccaagttggagcataatacgatttcatctactcttactttgcttcttcaggaccagagttcaatgaatcgatttggagtaaactatttcatgtccatggagaaaaagaaaaaggtacaagtgtgtgaatattatgtcacttttaatttacttccaaagtatatgctgtctctgtcttggcttggattcaccattacttttcactggctttaggaagggtagattttcaggtttatttccaaagtatattctgtctccatctctgtccttggtgaacacatttccagttggatttcaggtttcatatgtttcttttggtcactgcaggtccttgaagagaagatatgtaaaattggtttgacaatccaagcagtggaagagaaatatgctaagttaaacaaaaagagggaagaaattgagcaaactataaaagaattgcaaggtatgctatagctaattagcttttcctttttatatgttggattatcattgtaaaggagtgtgatgtagctaatagctatacctatatggcgatggataagacactctttttctttattgcatggcctggaccttttttactagttgtaggtcatgtttttcctatattaagattgtgtcaattgaagtataatttacaatatcttgtatttgctgtgaaatttctagattctaccgaaacacatcaattgggtttcttaaatcatttgtcaacgaaagaggaagtgatcgagcaaatagaaaagataagtaactcttctactgcagttcttgtcaatatttctaggggagttccattccgagagccagagaatcatataatgaaagacataataggggtggttgctctacttggtagagttcaatgtggccagcttagcaggtcaaacatcttatgtctttctattttttctataaaaattctgatcggtttctttattctgttttaaattgtggttttgtctacattttaggatattgtcggaatacctgggtgcagaccaaatgctagctgttgttgctagatcgtttgaagctgctgctcaatttgaaacttacacacaaaccggtgaagttgatcgtagctatgctcttcatgctgaagcagccgttcttgggaaatccataaattgtcgatttactgttatatgcttcgacaaaatttggtaagcttgttgttgttgttgacttcaatcaattctgacacaacattgtttttttgtctaattaaaagttgaatagaatatcaagatacaacattggaaggaatctttgttacatttatctattattccctattgctacagtctatacaaaggtgggtttaataatcaccctcagaggaggctggctttaccagttccttggtttattgatggaaccattccaaaaggttttctgggatttgctgtaaatatgattgatttagatgaagatcatttgtccattaaaaacaactcaggctatggtcttagagagacggtattctatcgcctatttggtcaactacaagtttaccaaaccagagaagatatgctcgctgcctgtgcttgtataaaacatggcgctgtatcactagacggtggaatcttaaaagaaaatggggtactatcttttggatttaggtatatgcttctctattctttcttctccatttctac

SEQ ID NO: 227405 - DNA, 6715 bp, Cannabis indica
taatcttataaccatgcaggtttttctgaagcagcatcttgtcagtgttattattgattccaatttcagtgaagaaggtacaatttcctcctttgtgttattcttcccttaaacactcaggcctgcaatgatgacaaggaaaggattatttatgaatgttatgttattatgaaattgtatgagggcagtacttagcagggaggaagagttgtttggagagagattgagggtatatttttggctaggcaatatttgtctaatgagcatgagactactctaatccacttcccgccttaacatttcatttcacgaaatgtgggatattcttcacccgcatattatctaaatgttaaagggtttatttaccgactttgtagcttaaagtgtgaacgaacgagtccattttagtctgttcaccaattatgcttataaacaaagctatatgttcccagtttccatctctgcaccataacacctaatatcttatcttagcagatgttgcctactctagaagagatcctgcagttgaagaagcaccaactgccaatgataataaagatggagatgagcaaagtgaacaagatgtggaaaggaagaaaccttcaaaagagaataaagcaaagaagggaagtaaacaaaaaaatagaagcaatgaaacatctacagaggatgaagaaagcaaaaaggtaagtaaaaagaagaaaaatagaagcattgaaatgtcaacagaagatgaaggaagcaaaaagctttgtaaaaagaagaagagaagcaatgaaacatctacagaagatgatggaatcaagaagctaagtaaaaagaaaaatagaagtaatcagatatctacagaagatgaaggaagcaagaagctaaagtccaagaaaaggttaaagaatgaggtacttgattaatttgggactcaacggattgaaatattcttgttatcaaatgcaagcctgccgtacatcaaagtggtgtgaaaacatgaaattttgagagtgcaaggacaatgaaattttgttaggagagcgttgtaatttattctgaaagattaaaaaccattttttttttcatcatatgtaggtgacacaactggctcgattaatttttggaaattaatatatcatataattaagcttcatgtaatgtcaagagtacaaaatgctagtcaaaattttgttgtcattttgcctcttctattgctcgagttgattcctttttactaaatgaacttaatttgattttgggcagttcggttttatttgtttttcctaaaaattctgaacgtttttttgttatatttgtcttcaatatttaggtaacatagttaaaaatttgaaaacaaagctgtaaagattgttaacaaactcatttcaatattaaacgtgcaattcaaggaactgttggaagtaggaaatgattttgagccaattagattttatttattgggaatttgggaggctattcctgtatcctaaacacccattgcttattttgtattccatggcgttgagctgattgcatttgcttgtgcgcaattagtgccaaaattgaagccataagtatcatacgatttatttacttttctcctctttcaatcactccccttttaacagatcgatcagtaattgaacaccattccaacttttcaaagataagctgcacctaatcaatatggactaactcaaaagataacaacctagtactcgtataatctagcacgtaatccacatagactaactcagcaagggctggttgaattgcactatctggggccttcaaatgaggtaacagaatttcgatgaatttggtagaagggaagagattaagctatagggtttcaaatctgcaattaaatctatgtttgatcttacattgcaaaggctcaagtggctgagtaggtgagtgcctatgtgtgtgagcattcagggtttcgattcccctcaatgtatttgcacaaataatggaaaatcttatgagaatgtagtagagtatcattctccaacaaaatctcgcaatttcttccacttctcctcctaagtcccaactatcaaataataatataagatttgatcttcttttcctttcatactaacaagggaagggtactcggtttcctctctttcacctggatgatatgtttcaccttacttctaaatgccattaatatacaattgctagaaatagaattctaaaatattaaagacataggtttggagtgttgtatggtctcccctccaccatgatgatccatggctagccatctatcaatacgattttttgaactccttatttgcatgtcaacttccccttatgttcttctagtcctatcctctataaccagaaaaatgcaagtactttttgttcactaattttatttcttcctttgagacactatgggacaaatgcatcaaggatgtaaatcaaggttcagcaaaaaatgggatgctcttttgcttatgcaggcagttaaaatgaaagcaatcatttcaaaacataagagaccagtttcgatttcagagaaaatcaccacccaaaacatagaaaataaaactggaagaagcatcaagttactgagactcagatttttctttttcttctttctctactttcttctccgacaagtacctgtgtgatttgaagaacaaaagttacaatttacactatatgtattaaataaaacattcatatataagactgaatgataaaagaagaagaaaatatatatgactgaatgataaaagaagaagaaaacaaaggtcaaaataaatggaatctactggaaacatgactacaacaactcaataacagttcagctaaatgaagatgttaatgggaactggagaagacacatatctcaataattttcactaaaccagaaggcatgaaataatgaacaagcaagaaacataaacagacagagctctcggaaacctacccctgaccctttgcccagcgggataattgataaagctgtacagtttcatttgaagcatggcaagccaaaagcaaatagttacgaggctgtaccatccatgcaaatctcatgaacaatgctgaatacacacacattgctgcaaaacaaaattccaagtgacatgagaatctggccatctaactcgcaaaagaaagaatttaaatacttaaggcaattaggtttttgaacctgcggtcatattcccagaaatcatttctggtggtttttgcatgtccactagcccctgatgtatccataagacatgttgacaagctaagagtaatgccataaagcaattaacaaataatggattcatatctcataaaaacataccgcagcaacgaacccccaattagcaatcgggccccaaaaatgagttgttttgggaccaactggactgttcaagaatgcccggaatgaagccatatccgtttactacctgattaaggaaaagttctgtacgtgtcaagcaggaaaccaatacatatataatttcgaagaaaataatgatacaagtagatgaaccttatcttttaacctcatcccaccttgtctttctccaatcttacccacttatgcaaaatggttcttatgcaaaatggttttatttattttcaacaaaacaaagaaaattcatctactaccaggaaatgtactaatgggaaagagatatccattcatcccctaatgaattttaaccaaaatatttataaacttagttacttaggactttatcgagctacaaaaatatcactcacttcgaagctcttcagcttcatcataatcttccctttcatgaaaacccaacaacgcttaaactaattcgtaccccaaatgcatccctgatgtaaattctagggagcaaattaacgtactagagaagaaaaaacaaatcacaaaagctagaaacaagtgaaaacttaataggggacaacaactgcaacaaaacaactccgcttcaaaattaacaaaaaaaacaatacatattacatgtttatagaaatgattcagtaatgatctaaacatacaaagtttttgaaccaataagatcagagtaaaatcttacatattaacatctccaaaagaattgggaatttcttacaataaatgggagcagcccaaccggaaccctaaaaacctaaccctagtctcagattgtcgataaataagataaatgatcacggtaaagctttgtttggaagacgtacctttgctcagagaaaatgggtcgggtcgccggagtagatgatccgatcggattgaagtattgaacagagctaacacagcaccaactcctcaaatcaattattctttccttactaataataattatatggttttattcgagagagcaactcagctgagctgcagaaccaggaggaatagctatttgtccattaaaatcacgccacgtttgatttaagctacgtggaaatgaatggtagggtcagcacggttaattaacttgatttatatgtggtcttgcactcaggagaaacaatgcctcagactcagagtaagtccaccaaacttttgttaaaagaaattgtcaatctagtatactcctattttctttagcatttaagaaagtttttggtaggttggttttaggtgtatttataaagtgttttaaaaggtattttttaattgattatatttatttagtgcagaattaagtttattttttatttattttaaattcaaatagtaaaattcataatgtaaattgaaaatgagaagaaatatggcaaatgagatgaatatgatgaattatcatagaatttagaagtctaagatataagtagtgaaaatttttaagttttgaatactcaatacgctccgtttgtgattgaaaatcaagtctgaaactgtaagtgaattttcgactatgatatgttcactttgaggaaaaatattgtgaataattccaaaagtcaagtgcccaaataaggttgctgactttcggcctataagtctttgcaatgtcagctataaaataattgcaaagtgcctcgccaatcgaatgaaggacagcctagaagaagtcgtctcagaaaaccaaagtgcgttcataagtggtcggctaattcaggacaatgcgattttggggtttgaaagcctccattgtatgaagaaagggagatttgggcatggaaaaaagatggccctcaaactggatatgtcaaaagcctatgatagagtgggttggcggttcattgaagcaatgatgatatgcctaggatatgaacaacgatgagtaaacaaaatcatgaattgtatcacttcggtatcattctcaatactcatcaatggggaagtgtgtggccgaattcaaccaaattgtgggatccgccaaggagaccctctttctccttacttattcttactttgtgcggaaggtctatcttgcctcattcaagaagcggagagagcctatatgatccatggactcaagtttggaaaagaaggtatcaagttatcccatctatttttcgctgacgaaagtttcatatttgtggatgcaaatcagacggagggtagaagattgagagctgtcttggatgagtactccatgctttcgggtcaaaaaattaacttcaccaagtctgaagtttgtatcggctgcaagattaagaaggaagagggagaacaactagcggcggtgctcggagttaaactagtagattgccacaccaagtacttggggatgccggcgactattggtaagcggaaaaaagaagtttttgaggacattcgaactaagattagaaccaagcttcaaggttggaaagccagccttttctctcaagcgggaagggaagttcttctcaaagccattatccaagcgattcctacttatataatgagttgttttcgtcttccaaaggagctcattaaagatattcatgcgatgacgacaagattttggtggggttcttcggattcaaaacataaaatccattgggggaaatggcacaaattatgcaagccaaaggagagaggaggtatgggatttaaaaacttgaaaaagtttaatcaatccttattggcgaaacaaggttggaaaatccttcacaacccccattcattaatggctcggattctaaaagcttgctacttcactaactctagcttcttggaggctaagataggaggattcaggtcgtttatttggagaagtataatttggggaaggcaaatcatagaaaaaggaataagatggagagtcctatccgggaaagacattcgcgtaaatgaagataaatggctgccccgtccttcaacttttacattgagaacaccggctaaggttcctaagggtacaatgatggatacactaaaggaggaaaatggagagtggaacctggatctaatcaaggagtgtttccataacgatgatattcctattattctaggaatggccccttgcaaaaggcactccaatgatgaccttatgtggcacttcaccccggatggtttatatactgttagaagtggatatgaggttgccgaaacagacaattgcaaagctggcccatcctccgaagcaacaacaaggaaatggtggactagcatttggaagattgaagcccctcccaaaatccgaaatttcttgtggaggttatgtaatggtgttgcgaaaattattaattactacgcaagtgcacgcaatcaagtagtatactcacgcaagtgaggtcgaaccacagggaattagattaattactactaaactat

SEQ ID NO: 227406 - DNA, 3476 bp, Cannabis indica
attattttctttgacaaactctgccaacctgcttggtccccgcaaaagccttaatgaatttcttttatgatactctcaacttttgctcataatatacatcgaagtaaatagtatcctcttcaatacaactttttttttttacaattatgtatttaggtatcttgtacatgaattctccctcttcgttttgtctgatgggagtttgtcgtttagtagataattcatgattggtgtcatccaagttagactcgcatcaatcatttttatgtttgtctcttccatcttataagtacttggttcctgtaacttttcaatgggaactaagttgagatcgttgaattcagaatgcgatgttagattgaccaatgaatcaacgttagaattttattctctcagaatttgttcaattttgaagtaactgaatttttacaagtttcttccaattttttccaaatatttggccattctaattccctttgcttgatattctccaagtacttgattcacaatcaattattgagaatcactaaggcaatgtactgcatggcttagcattcactatttttgtcattattaagcgtactaaaagcactttgttttcagcctcgtgtttaaagctgggaattgaaaccttaaggcataataaaacataaagtttcctagtgagacgattatgcctgcccccgagtcattgtcattcgatgagccatcaacaaatagtttctagatttttaggtttgagatttcctctgtatcttagtatttattccttcaattaacaaaatcttatagtacttgtcctttgatagctgctcgtgggtgataagtaatgttaaactgtcccaattctattgactattttattaatcgacctgatgtgtcaagcttttacaatacctaccttagtgaatgattggtcaataaatggattagatgcacttagaaataaggtctcaggttccttgaggcatgaattaggcttagtgtgactctttcaaggcgtatcttgattctgccacaatagaaatttattaacgtagtatactagtaattgagttttcctttcctctcgcactaatgttatgcttattgtattttttgaaactgacaaatataagtacaagatcttgccagttatagttttgaaagcacatgtggggtcaaaaagtatactttaatcccctgaaatgctttctcatattcttctgtctgttcaaactacttgctacctcgcaacacagtaaaatttagaaggtacttgtttgttaatttgagatgaacttatttagtgccaccatttttcaagtcaaatactgaacctcttttgatttctttggtgaaggaatatcaagcaaagcttttatttttctccaagttggcctcaattcctctcgcattcactatgaacccaaaaaaattaatttcctaaagagactccaaacgaacacttctttgtgtttagtttcattttctatttccttaggaccgagaaacactttgcgagatcaaccacatgatcattatttttaaccgatttaactagcatgttgtcaacatatactttcatgttgcgaccgatttggtgctcaaacattccattcatggggcttgagtaagtggctcctgtattttttaagccaaattaatgacatgactaatttataacaatagagcccaatatttgtgatgaagttttgttcttgatcagcgatgtgcattttaatctgattatatcctaaataggcgtccatgaagaacatatgcatgagttcatgcccatcagtgacatcgacgagctgatcaattcttgacagtgaaaaacaattcttaacttaattagattttctaagttttttggaagatgttttcttaaaattactaaaatatttaatagtaaatttaatttaatataacatataattcatatactacgtactggcacgtgaaatttcactatttcactagtttttattaaatctgatatggtctttgaaattaaaagagtacaaaacataacaataaggccagccgccagcaacaatacattattgaaagaaaaagaaaaattgtaatttgatattatacatcatcatgatatatatatatatgctttctgtatagaaacttttatttatttactgtatatgtgtaaatgaaatcttatagaaatctaaaagtttagttggtcctctcctttagcatctttagcccaagataactgaaaaaagaaaacaaattaagaattaaaaatacattataagtacttgttgatataaattaattaaatcatcatgacacaatttatgaattaaaactacaatatatataagcattaaaattaaaagtgtggtatatatattattttagggttgtgacttgtgactgacgcactttatatacaaaaataactcaccttattatgtaattagtattattcatttcatcataccatatttaatattgttatagacttcaacatatccttacttaaaattaagagaatttctatttaactaacatgttggtgatgcactataattgactaataatttcacacatattatttattaaatcaaattttataaaatttaatattaaaatatactaataataatcaatacaccactaagttttagtacttgacttaaaatcttaatacatatattttgtttaaagagtatttataaaaatattggattctaggctaaaaatttaaaattttattatcagatagaattgtttataagtaaaacaactaaaataaacaatggaacaactaaaaaataactgtggaataactgtaaaaacttaacacatagtatttttgaaaagaaaaaaaaattaaaaattttagtatgtgatttaaaaactcatttttctacattataaaatataatgtgtgtagcattacgtatattcataataatatagtaataataatattaacataccggccaatcatcattaaagtagcttgaggattagtcccaggagagataacaaaagttgatccatcaacaactcgaagtgaattagttccaataactttaaaatcaccatccacaaccttcccaactagacatcccccatgataatgccaaaatgtcgtaacagagcttcgacaataatcttccatagccgaattatctgactggttggcaggcaaaggaggacccaaatacatgaaatccctagccccattcaaatccttgtacttaaatcgatctaaggattttgtttccaacatctcaccgacttttctcatcgcgctaacacaacgagcaagatcgatcgggttagagaagtagttgaaccgaacatgtggggtgattttaacatctttggtggaagccaagctaagtgaaccggttgataaaggtcccacgattttttcaactatggatgctaaactaaattgtggtggagttaatggattggggtaaaagctaaaaggtaatgtagttggagcaaatggt

SEQ ID NO: 227407 - DNA, 6218 bp, Cannabis indica
atataaatactgtgccctacttcattaacttctcttttatcttcctctctctctctcggtccaaactcagatccagggtttatcccgagcctttctcctctccctctctcagatttttagggttttttttgttgttaattatttttgtttgttttttccacagagaagtccaaactcgcacaagctctttcctattctctccgagttcaaaggtatgcgataaagttatagttttctctactgccttcgcagttttttttctttttttgaaatccctaaccctaaccctagaacttgatttttttaatctttcgtcgttcttagatgggtgaagttaaagacaacgatggttacgaagaagagctcgttgactacgaagaagaagaccaaaatgcccccaactccgtctccgctaagccgtctggcgaatctgtcaagaagtaagcttttcatttttttttgattcgtccttaaattgaactatataattttagtaaaatagactaccggtttgtcttgtcataatttattgtttactgttaattaattttgaagttctcaattcttattcggaaattttttattttgtggtgtaggggctatgttggtatccacagtttcgggtttcagagactttcctgttgaaaccggagcttctacgagccattgtcgattcgggattcgaacatccttccgaaggcaatttttttatcttggtttcattttatatatgttttgaatccgtatatatacacatgggcacttgcatatttttaattttgaactcttcgtcattttatatatgtactctttgccattaatgtcatactatacgatcgtactcattaatggtagactaaatgcgtcttaaataaactcagggaagtatgattctaggtattgtttgcatatctgaaaagatgtattaaaaggtttcattttagtatgaccgctgaaccacgaaatttcacaagtatctataacttggagggcttgaaaattggttataattggaggatgtgaaatattttgctgtatcctttctattttagaatccttcatattaaacaactaccttaccagtaacccaaattcatccaacaatttttcattcttctcatttcttccccttttttacttttaccaaacacactctagttttattgtgttctgtatgtgaggctcggcatagtatatgcatacatggtctagtggcatactgattcctatgtttcaatgcttatgattacttgcatccccttattctaattgttcatttgaagcaaattgtttgttattcttattgttctgattcctaatatatcaatatttattgttgtgttcaggtaatcatcactacttccatattcatgattctgccaggaaaactggtttggtaaacctttccattaaaaggatctggaagatcatttatacttactgaggtttcgtccggtacgattttgtttcattcttcatcagtgcaacatgagtgcatccctcaagctatcttaggaatggatgtcatttgtcaagcgaaatctgggatggggaaaactgcagtctttgttctttcaactcttcaacaaatagaaccagttgctggccaggttgctgctcttgttctctgccacacaagagaattggcttaccaggtatgcctttatcctcttttacaatttctaatttttatgactacattttatgcatgtagatagatttgtcttgtatcatttcttaatacctgtaccattctggttattaacttaataattgacatctataacttccctgttttttcacagatctgtcatgaatttgagaggttcagctacttacctgcccgtacgttaaaggttgctgtcttctatggtggtgtcaatgtcaaggttcacaaggacctgctaaaaaatgaatgccctcatattgttgttggaacacctgggagaatattggctctagctagagataaggatcttggactaaagaatgtgaggcatttcattcttgatgaatgtgataagatgctagagtctctcggtaagtttttcttgtttaagcattctgagtttcaagatatgtttctgaagtatctaatttttttttttctgttctgaaatttaacctattatgttgtttttccttctaatcaatatttccatttgtttgtgtctatatgtattgcagatatgaggagagatgttcaagagatttttaagatgactcctcatgataagcaagtgatgatgttttcggcaacactcagcaaagagattcgccctgtctgcaagaaatttatgcaagatgtaatatctagattgttcttgtgggacaaaaatatagcatgttatgtcaattgtgtatatatttacattttaataattatcttttatgcaatcataggaatatgttttactttaaccggatttttaaaatatttaaattatctttctcttctttttaatggtcaataattaagctttattcaacacccaggttcttttaaagatgtagtgaagtcctttaccttaggaacttttgggtcttttgttcaactactgaccaattgtgaagctagtcatttaaagctttggaagtctatttcaatcggagttttaagatgttttgatttattttgttgtttgtttcagcccatggaaatctatgtagatgacgaggccaaattaacccttcatggtctagtacaggtgcattggtttggtttcaaatgttgaatttactgttggaggaatgtttttttctctatttgtgctgatccttactttttgttcagcactacattaaattgatggaaaccgagaaaaatcgcaagttgactgatctcctagatgctttggatttcaaccaagttgtaatttttgttaagagtgttagcagagctgctgagttgaacaagcttcttgctgatagtaatttcccatctatctgcatccactctggaatgtctcaggaggagaggtaaatcattttattagcttcacacaaaatttgtcgggtcatgtaaaattctttctccttttatcttttatttctgttccaacaaacttatatgggagagctagagcttctttatctaaattttctcccaagcttatatttcctttgctagataatggtaatatcatcaggctttacattgattcatcaatttcaggttgaagcggtacaagggtttcaaggagggacactctagaattcttgtagcaactgatttagttggaagagggattgacattgaacgtgtcaacattgttattaactatgatatgccagattctgccgacacatacctgcacagggtataagtttgatatgcatttgttttgatattttggacagcttatagaatagttgaacaaactagtatataatattggctttttgttactccttttttaggttggcagagctggtaggtttggtaccaaggggcttgcaattacatttgtgtcgtcagcttctgactctgaagttcttaatcaggtgagtaaattaattttgtttgacatgaaaaggttgattgttttgcttctcaactggttatgttaatcatttatattttataccttgtttcaggtccaatctaggtttgaggtggatataaaagagcttccagagcaaattgatacttctacatatagtaagacttctctcccaataaatatttcataattttatttatatttatcactgttctacctacaaacaataattatagaacgatactaaatcttttaacacaagtaagaagcataaataaaccccaaagagtcttggcatgctaatgtaactcttgcatttttatgttgtgcagtgcaagtatgaaggtgttcatccaaagaaggaagcctacgacgaattgagtgttattggaaggattttgattttggtggcagctagttatcatagatttgtttcaagttgttgaatgtagaatatattaaactgaagaggtgactagaatgttttaagtggatgatgatgatgatgatgatcttcccttcctcccctttgattcttatttctctatagattattagcagcaacaagagaactttgggtttttgtttctcctattttctcattatgctattttatctgcattaatttagatctttttttctcttatagaattgtgtcatcaatctctgaggaattattttttgtacacgaattgagtataggaggaaataaatggcacgacttatttttataaatcagaaacaaggtaaaatttaatagtatgttttactacgtcagctgttaatttttgacaagaaaatgtaatagaactaaactataatgttgggttaatgtttttgtttatgttttgtttgttttctgagatgaatatctttatgcaataatagtcttatttcaacatttttgctcttagtttttgcatttaaaaatgcgtattgtagtatttctgttattttttggtgtttagttttaacatcatatttttttttgaaattactatactaaatacagtatttgatctaattactagaactttatcttgatatttcaatttaagtattacatttaaaatgcatattttttggtggtgtgttttggtattgaaaatatattttttttaatcacatcaaataaaatatttatctaagatatttcaattttagtaatactttaattctataagctcttttcactatttaattgtttaattaagaatcatgttcatggttggagccaaggccagagttttgaggcaggggtttggaccagggctagggtcccaaggttggggttgggggcctagattgggacgctatttagggcctcagatttggactcgaccccagatttgaacttagactctaacctatattaaacaaattcaacaaataaaaaaaataaaatttaaccttttttttttttaaaaaatatactatcatttttgtgatttaataatttaaaaacataaatgttatcaaatattacttaatgtgttgaaaagaattcaaatttatcttttaattgtgcttgcaccaaaacaaaagccactatggtttgcacaatataccaaactacacatcttctacaaagtttttgtaattacaacattttaacatttttttactttattattttttgttatgtaacaggatctattatttgagattattattatatacatagtggccctgatttgcaaaattccaaactacactatggcaacttcaagtgtagcaaatattttgaactatggagctactggcaatggagttacagatgatagcttggtatattattataaataataatgttatttttttttttttacagttattggatttattttctattatttttatataataccttaaaaatgtaaaaaaaaaaataaataaacgaaaaaatttaaatataattacctcttttttaaaaaaatgtaggcattttcgaaggcatggattgctacatgtaattcagtggaaaagaatcctagcttgttggttccaagaggtcatacatttttggtccattcactcatcttttctggcccatgcaaaccctctaatttcttttttctggtaaataataataatgatttaattaatctacatgatataaatggttttaattatgtatttttattatattaataaaaaagtataatttcgttgcagatagagggagggattgtagcaccaactggtcctagtaaatggaaaggaggcactgatagtttgatattgtttgagaatgttaatggtctcatcataaatgggagtggcactattgatgggcgtggtcaaccatggtgggatgcctcttgtgctcgtcatcctcaatttaaggtatactactctatacatacacctacatattcagaaatgataagagaatattattagtgtctagtactttatttgatgtcatattgttattgatgtaattaagattcgattctcataaaacttaatacaataatttttacgaaatattactaactaattattagactgtcatctataaaaaatactagacactactaatacctattaacaatactttatatatatttaaaatttttgctttttaaattataatttatatattattgtgtctcttatgtttttaactatcaatatttcacactataataaagtggaacttttgttaatttttatgatacgggcaaataaattataatttaaaatttgtat

SEQ ID NO: 227408 - DNA, 3529 bp, Cannabis indica
caaaatgaaaaatatgacacttcaaatctaataataccaccacaaaagatacacctggtttcattattatttctgacttaatgggttaacagtacttccaagttcgatcttgttttttagtactacttccaataccactagcccttgtaatgtatacactaattaaaatttagttttctacataattagttttagaggttaagttttcagtaggctttctacttcagcttttcatagcttactttctaaaaggggtttttaaatctaaaagtcaaaacatataggaaactcaaacagctttaaacgtacatttagagtttcaaaaatccaaaagtagcatataaaagatcaacaacttgcatgatagattaatgttacatgtacaaaattaataaaaaaataataataatcacatattattataaagtaactattataaataaaaattagaatcataccctagtggagcagctataaatgataatcagattttgatggccttagtttagcttctaggattagaaaaatcataaaggtatttgggaaaaaaaaattaagacctttctaaacaaactaggaatcttaaaattaaaataatttacataatttaatcacatccaaacacctcgaacaaaaaaaaaacttttaatttcctattttagctataaacaaaaagcaaacggggttgatgtgtgctaaagggattaaggataaaataaattaaaatttatataagactgtgtaggtatgagactacgcagttaaagtgggtttaaatgacttgataggtactacctatgatgcatattcttttcagtggtccatcacttaaagaactctaaagttaagcgtgtttgacctgaaacattcttaggatgggtaggaaattttctgaaaaaatgtgcgagtgaagacaaaacacgctagaaagactcatgttggttagtgtcaatcatcattctaacgaaagaaagttattttcttttaactatgaaggagaagagaccaacaaaataaatgaaagttactctgtacataatatgttaagtaagactcattgacgaaaagaaaagaagagttaaaatcaattctcaaacagatatatggttttttttatatgcatccatgtgatgcactaatttttttttctttcttcttttgtaaatttttaataaagcctgaactttgattgagatggtctgttttacaaagataagtcctgatcaagtaagaacaacaagcttctgggagttgaaatcgaattgtgaacagatccttcttggttcaactgatgctaccacaaaaatttggaatgatcttaagattaggttatctggtaagtggtaaccgttttactggttcacaaaatgtaaacctgtgtagaggaactttggattatgtcctagcacttagatacatgactatttcactagaaacacttgggacatcgtgcttgtattgggttcaaagaagcttcttcgtgacgagcaccaatttttaaaaaggcaaggttaagtaccaaggtgttttgtcttgctaatgagagttgtattgaggcgcaagcctcaaacattgaattgaaaaagcattgtataaagcataaatagttaaaatcaacaaatcactcattctcaaagtcaaaggtgactagatgctattactaataagattcacctattctggacagagtaacacttgggctgatgtttaaaaaaaaaatcaagcaatttgttaatcactactaggggttgtttgtataaaaacagagaagcctagctcatgaaaaaaaggtgcctagaggctattgttgttttggtcattctaaaaagaaaaaagcaagcctctcaaatacttggcggatgtggtttgcaattcgtatggtcatataagagaagagcaaataaactcttagttttttaaaatgggacaccgttgacaacttcccagtcaaaaacaaaatcaaagatttttatctttttagaaaatcaaatgccatttctccatcttgcagaactatcctatagatcacaaacctattcatccttaaaaaattctacctcaatccaacagataattagcctatcaccctttgaataactccactatactccaataataagaatgtcaaccaacacacactcctgaaccacacagcacaccctaatcttatccaaaagataaatccaaatcacatcaacaccaacgaaaaggaacctttcccgcttcctattgtttttaattttccaatgatactaagactcatagataagaagaggtgcaattgtgattatagaaataaaaactgcaagcaacttatattttatcttctctcttttatatcctcaaattgccaatgtagtttttcagccataataacgatccaacatgaacatcatagatcaatcaatccataataaattatgtcagttgtgattctactggcatataactcaaccttatgcctattgatcgactaaacataaatttgtccagctggagtaacatgcaaatcatgtcacacatttgcagatatcatttaaatgcaatataacatcattaaaaagaaacaaaagtaaaaaatattactcagatctcttctaaaataagaagtggctaatatcactaaatatagctaaagatggtgcatacaaataaacaagtacgagaaaggaaaaaaaatcttacttgctctggagtatgaaatatttcaatgaatggatactccgttttctgccgtgaaatacagaaacccggatattttggacattcaacctgaaattgtgttgacgtaatgataaaacaaaatttcatactaaaaactttgactgaaccttttgacaattcgttaaacatacatgacacaataataacttacacgtataaattttacatgtggatagaactcagatgcagcttcctccagtaccttgtccaaatgtctagtaagattacatctgcagtattcaaactattttgatattgagaaacaattaaattgaaaaatgggagaaacagataagaaccgaatccaaatgacctgatagtaaaagcagcaaccactggataaccttcatgaagaagatgaacaaagtcacgctctgaagtaaaatcaataactcgtgatggcccaagatcctttggataaccagtataataccttcaatcgcaaacaaaattgtaaggggttagaagtacgtcaaataaaaagaaaacctgagagaaacacacataaacttcatttaaagaacaataaggaaattgtctacatcggcatcccaccatatctatccgtatgttaaatttgaaaactaagtcagctcaaaatacggtaaaatagataattatcaatgttagtaagaaaaatttccattgcacttccaccatatcaaaacttgattcaaatgcatttacaaaagaaacatagaattctcttcttcttttttaacaaaatggacggtagatttgaactctaagtctcaacaatggaggttttctaactccaaggggtggtctagtggtaaggaggagt

SEQ ID NO: 227409 - DNA, 3398 bp, Cannabis indica
tacattagaaaattgtttgcaaaaatgaataatagaaggcaaaaattatatttaaaagaatccaatactataaaagaatagatgatgttttataatttcatatataattaattagattaaaatatatagaatctaatattaaattatattaataacaaaatacaaggcttattgtgttgggtttctcaaaagaataatgtcatttttgtaagttgaaaccgatttgtattattgtccaaaaccacaatgtaatctaccatttctttgaagtttcatttcgttatcattatattatatatagttagtggccccaacgtatatgatcccattataagctttaacttaaagtgtatgccactattctattttgttttattagtcatcacactaacctccaaattatattttattgctaaaatttattacacatataatctgtaaaatcaattcaattttcattaagaaaagaattttttttttgtttctttttgcataaaatcaatttacaaaattaatatagtaatggggattgatttgatttaatccaatttatgggagactgctattaattaatttcataatacttaagaccaggttttatacattaagttcagaaacagctaccaacagaagaaaacaacagtgaaaacgtagaggaagaagaactgaaaatgtaaaatggagctcgtgacaacctacgaaatgagtggcgtaacctcagagctatcaacagtagccatgtttaaatcatatgtgaacaaaagggaaacaaaaataaaagaaaaaatcgttaactatttaaagtaaaggatcaacccttctaagagtggtggcaaactgttagcatttggaatttgacttcacgtgttaggccgggccgaacggaacgaacaatcatcaaagccaatacccccaatgcgatgtcgtcgtcatcgtcgtattgttaactgcaagcaatgcatcttcattgttgtgtctgaccagcccacaattggtgatggtacatctgttgcatactatggagcggttgaccattattgttattgttgttgaagaatgcggggcctctgttaagagggctgccgttctcctcagatgactcgctggactctccctgcgatggagggctgccagcggtgctaggtacaccaaagtttaacatttggggcgcaccagtgcctggcgcagatttcacggtgttgttggagtgcgattttttaccatcagcaataaagctaccgacaattacctgtcaatagcatattcaaaattaaaccagtggcattacaaagattattctttttataaaattttcactgacctgttcttgaatacactacaaagtaattgaattactaagctttctgttctgaagtcctataaatattcatggatgggtggtgtggcgaatatgttatggatgataaagctatgtgtactttggacccaatcgattacgcagtgtataagtcaatactcttatgtaggcatgtataccatagaatatatagcaaatgccccgagtaatgataaatatacctgaactggtgatgcggccattagggttccggcaacgctgccacccacaactcgaccatcaggtcctgcaagtgacacacttaaaccacctgtcctgctgcgcttaccattgtcatcagaaaacaagtaggaccctgataatgaaataatttcatagcggccctggaaaaagacaaggaacaagtatatcacatgaaaacaaagtataagaatgtgaaaatgaaacttgaaaacgaaaatgaaagggaactcgtcaacaggtctagtattaattatatcacttgaaatcgcataaataagatcagataagaaactcataatcataaggtcgctatcaaaattcacactttggagaaaatcatgtacaaacatgaagaggcataaataaatagcacaatataggtcttgccattttatgacaagtaaattttttcaatgactaacaacaattaaaaagatgcaaaattgcaattaaactcccaacaaattataaatcaaatgatatgcaaaatctaaattggctttgtggacatagattagcctgggagacatactaaaatgaatccacttattagatcctttacccgatagtcattgatcactttttctaagaataatgtcttctttttcattttcttctttccaaagttttttcactgtacaagtcattgatgccgagtatagcagacataatccattacaccgcttgtttgttatttattaattagatatcaacactacaaaggtatgtaaagaaattactcgaaagttccacattaggaattaaaaccacagacccgaccatcaacataccctcatgggtgcaacaaacaaaattagatgactttaccttttatactgaattttaagaagaaaagaatgaatgaagaatttacagtcatacaagactgtaatatgttaacacatatacaaatacacatatacatatatatatacatcatgttgtaagtcttatcctttcttccttcagcattagttggcattgccagtatcagtttatacatccatttttaattaacatatcttgcaaacaaaaattaaatgatgtagtgggtacctcaaaatatgaaggatgtacctcatatgaaacattgccaccagacatggatggctgacgaagagtagcattacaaactgcgccatttgcagagagaatacaaactgtgcggggtccttcctctgaaaatgatataaccttggatgctacatcctgcagaacaatagcctcaatcagaagcacatctatttataataaatccttatgtaggttaaggatattatgatataataaaaatcaggcataagcaaaaatgaaaagaggtgaacaattttccttgcattgattaaaaagaaataagaactattttattggggaggagggggtttgcgaccaaaagatggtctggtatagtcattgtttacaagaaaggaaaaagtccaactcccaaaaatctgaaaataaacaattcttagaaattttagaatcattatcaaaacagaagcacatgaccgtgtcccaaacagaatttaaatccacacgactccacaacttcaaagatttttcctgttccttttgaaccaaagagaccagcagataacagtgtcccaaacagaatttaaatccacacgactccataacacattgtcacatttacttggccagacacaagaaacttcctcttagaaaaattattttattacatatacatattttttaaaaaaaacaaagaaaaaagaaaaaactcattagatgggtaatcaaatgagctagaaagtatgtacagaaaaaagaaaaaactcattagatgggtaatcaaatgagctagaaagtatgtaca

SEQ ID NO: 227410 - DNA, 1930 bp, Cannabis indica
ttagtttaagagcaccctgacctgcttgttgagttttacacagttttttttaccccatttaaacggacacatcagaagatcatctgaatgagaagaatgggttccatatgagtaaaatatctttgtggaatgaagggcattttcccaaacaggtgaagagttgcacccccagctatcgtcttataccaatagattatccaatgccttctgttagccataggtcagagttgggtgctgaagtattaaatgacaattgggttttattcagttcaacaagtgatcaggagtatcaatcatttaagcacagaccgaaaaacaaatacgaagattgtttgtttcggtgtgaagatgacatgtttgaattagacatgttgttagagtctgtgaaagcaacaaccaagagtgtggtggaactcttagaaaagatcaataacaacacattaacagtaaagggaaatcgtccattctgcattgaagatcacttaacagctatgaatcttagatgtattgaacggttgtatggtgagcatggggttgatgttgtgggtgagatcaggaagaatacttcttatgccttgcctattatattaaatcgcttgaataaaaaacaacaagagtatgcagaatgtcgtgttcgtttgaataaaatttgtgctgatgtatatgcggagaaccatcacaagtcacttgatcatagtagctttattccaagcagcagaacaaggaggcagaggacaccaaggcagagatagaacaagtaaaagagaagaatcaaagcggcctataattccaagcataagtttgtatacaagttttttggggtaaatgaagaagtatataagtgggtgttcaatgttcatacctagctagctagcataatttttgtttgtaaacgtattaagagtacagtttatggctttttgattaaaggtaatatatacaaatagagttttcattatattttgatcagaacttagcagcaaaaatgttatatcatgcaccttctattgtgttactatatttgggattcttattggtcaattatcatatacttttcaggtgatttggatatatctaattgtgttatttgatgtttatgtcctctacatatattcattgcaaaataaattacaaaacatgattttggaactctaaaccagattttgaaaaccttaaatgctcccatgttgtttagtatataagttaattatatcatttggtctgtgtaactatgatgatcaagtttgttgtccaatttagttttcacatgaattttgatgtgtagaaattatttaactatagcatttgtgtttgattttatgtgctgttggactgtctgagcaaatgatcggattgtgaaggcaataaagacataattgtctgagaggaaatggatcgttgctcaagatggcactcagtgtccattgtcaattgtctatcagaaaaatttggtgaaacttgatgggtcggaactgatccattactactctataaactatggcaatggttcttacgaggtaatatcatcatattacacagaatctgctgcatcatatttattttttcataaaaccgtttttgttatgtttgagtggattttgttatgtgaaaacttgggctgcattgtatctatgtagttgtgatatcattatttgtcttttttcacttatctacacatttgtcttcatccaatgttagaccccatattagtagagtgtggtggagtataggaaaaaaagggtgtacgactctgactcattgtattgagttgagtagtatgaagtgagaattggatagtatatatatagaggtgattaaggtgtgcaaatgattgagtatttctctatttgcataatggagtgactattctcctcgctgtaatcctattctctctgcaatatcagttcattggttcttagtgctactgtta

SEQ ID NO: 227411 - DNA, 2857 bp, Cannabis indica
gttgatcttgtgtgttctcttttaatattgtcaattgggtctctgttgttttgggtagttacctgtaactgtaagaacatcacaggattttttgggtttagattttcagattgaagaatgttttggtgaatggtgttgtgggaaaagtgtttgggagaaatgggttggaggagatctgtcttgaactgcaagaacttgaagatccatttacagttgctacttgggttagtattgatctgcttggcccaagtgtcggttggtatcacagatcctaatgatggtaagaattttcttgggctatgcttttagtattttagtttgttctgttgtttaagtccagagaaaatttgcaaaatgagtgttctaactttttgataatgtcgtcaaaagtttttttttaacttctcttaaactgaaggtttcttactgttttttttttaactggtgttggggttcaaaattttagttaacagaagattcagaaaactgtggcctaaacccaccttttttttttttttacatgtatgttatgagagaattggtgattagttcaatctgttccactagcatgacttgatttttttactttaagaaatatcttcatttttttccatccaaattgtctacattgtttcagttgctgcaattaatgacttatatattgcactgggttctcctgttattcctgggtgggttgcgtctggaggggatccttgtggtgaagcatggcaaggtgtacagtgcaatgagtctcaaatattgagaatgtatggtaacctctgttatcaaattttttattaattgaatactgcttagtcttgtgacagtgcaattttcttatggttgtatgggatttgtagagttcttaatgctgctaatctgggaggagaattgggtggtaatcttggaatgttcacttctattatggtaatgtaagtggtaccatctttcccactctctgtgcaaacgggttttcattatttactattgcttttttaattggaaaattgtgttaatttatacattttgattcagcttacaagataccaaagtcaaaagacatatctaaggcagttggtatttactatcattgcatggtctttggtcttttgaagttgactatgatttgtttaggtaataggggttttgggggtggacacctgaaagtggcctgcctctgatatctggtgacactaagcatcaccttccctattttttttcttttccttttctctcttttatgttatgctttgtaagaggcagaaaatatatgaaataatgaaaggtgtattttctaagaaggtaaagggagaaacaaaaatctcctctcaaaagtggcaacaaatgaataaattttgtgtgtaaaatgacacttcgacaagagtggacagtgtcctcctaaactctttccaatggtggaagatagaagtgtattaaaattgaggatttgagatccagagttactctctttgctccaaatattttgttaaacaacccctttaaccccaaaattatacaaaaaactctccacccctctaccaaacacccataaaggagaaaatagaaaaagaaacatcatatagatgctagctgaaaaatataagatttttattactcgtataattatgtgcttcatattggaaaatattaactaactaattttcttttgaagcacctgttgattataatcactaatgtgtgtgcgatctttcttgtaacagtgatttaagcaataaccacattgggggtagcattccatccaatttgccagctacgttgcaaaacttgtatgtttgactgtaatacagtaacatctagatcttaccatctaaaagtaatgagtgatttaaaaatattctacttgttctcatcaccttatgcaacttgtatgattccatttcttggcagttttctttcggctaaccaatttattggaagcatcccggattctttatcaacgttgaatcagctggcagccatgtatgtaatttactttaatatgtcttgatacttggtcaggcgccacccccaaatttgccataatcttacttgagctgttttgcctttcaggtctcttaacaacaactttttaaccggagtaattccagattcctttacaactctcactgggctgataaatttgtagggcttcattctaaactttttgactctcaccttcaaatggcctattatgtctatttataaatgacaaggccacttgtcatttttcagggatttatccagtaataatttcagtggggagctgccaccctctttaggaagtctgtcatctctaacaactctgtgagtgtttcatatgtaatttatggagcacctgttatgttaccaactcaccaagattagagctaactattctattggcaggcgtttgcagaacaatcagctttctggaccactggatgtcttacaagatcttcccttgaaagatttgtactcctctaattcacatttcattttggcattaaagtaatattattattattattatcattattattgcttagacttatactttgttcccttgttcaacaggaatatagagaacaaccttttccctggacctattccacccaacttgctcaatatcccaagcttcaagtaagagcgataaattatgacactcttagccttttagtttctattagagatataacaagagtttaatctcgtatatactaatgctaggcactgaaaatgttttcatggtaaattttgaaaaatttcccctataattgtttatgcaaactgaaattttatcactttgcagaaaatgtaagaaaagtgataatgaataaatgatacatgtttatccctgtaaacgatattccaagttaaa

SEQ ID NO: 227412 - DNA, 1575 bp, Cannabis indica
cttatctagaatctatttctatattatagcttttaataatccttgcaaaatgattagtaaaacaactaaaatttactctttcaaccacatttaaagttggtgttaaaaaagttttacaaaaaaaacaaaaatcaaaaacaaataataataataataaaataaaataaaataaaaacatgtaatcctacaaaaagagtgggcatctcttctcgtaatggcttcttttcccatcgtctagtattcctactccatttctgatgggtaaggtgaagagtcatggctgcttttagcacttcaacgatgaatggagctatttccttatcttcttctccaccctttcactatctcactatcctctcttcttcttctccatcgtcatcgtcatcttcatcatcatatgccccgatacgacgtcgtgtgtatcgtactggctctcctctcaagcggctcacctcccgcatcgtctaccttactcgccgcagacagcttcaccaagtaggtcctcttatacttgcttaattttttatcttaaaccatgcattttcatacgtagctatgtcttcactcttgtcttttattgggttgttggtggtgttgttgttgtggtgatgatagatactggaagaggtagatatagcaaaacgacaatatgggaagctgaacaccatagccatgaacgcagtgttggaggcatgcgtgtattgtggggatgtccaaacagctcttaagatattcgacgaaatgtccaagccagggggttgtggggttgacactattacctatggcactcttttgaaggtatctaaatttagagagctgatataatgtatgatatacaaatgagcatctatatccgccttaattcaagccagcaagcaatattagtattactaatccttctgtagggatacaactagtgttgctaacttgtttatatcatagtttggagaaaatcttgatcaggagaattggacattttgtttaacaaaaggtcatttggtgtttgttatgcttttaattgaagggattaggtgaggcacgaagagttgatgatgcatttcagttgcttgaatcaattgaacgaggtgttgctgtggggaggccaaagttatcagcacctcttatatttggtttgctaaacgctctagttaaagcaggtcggtgtgttactaattctgttaaaaggaatagaacaaagataattatatttctttgtacatgtctggatggtgttatagtgttaaggtgaaaatttgagatgcatgaatatgaatttttcctgagctaataagatttcttggaagaccttcaagactttttggtgcaaatgaaaaagatgtgaaatttgtatttcttagcattgcattgcagtacagtaagttatgctcctcttgactggcaattagtaggatctcttgttgaattgaacttacttgtggtttgagttgaatgattacacttggcttcttgaagtatgtactatgtaactgtaagttctgccatagaaagcgatatactgttaatacaatatgttcaaaattagtataatagaatctagcgtttcttcctcgtatc

SEQ ID NO: 227413 - DNA, 2838 bp, Cannabis indica
cccctcaagctgtagttggagtagtccaagttcagcttgtgacaaagaaactcaaagcgaggagatgtgatcggtttggtgaagagatcaactggttgctcttcggaaggaatgtaccgaacttcgagttttttgttggtgacttggtctcgaacatagtgaacatctatctcgatgtgcttagtccgagagtgaaaaataggattttgagcaagagattgtgctccttgattgtcacaccatagaaccggaatcataggtggaactttgatgccaatttctttgagtaaagattgcagccaaataagttcagtagcagcagaagcaagggcgcgatattcgaattttgtggttgatcgggcaacggcttgttgtttgcgggaaccccagctaatgagattttggcctagaaagaggcaaaagccacttgtagacttcgatcatctaaattgacgcccaatccgcatccgaatatgcctctaaagttcagtatgggggctggtttaaagtggagtcccaaatggatagtgccctttatgtatcgaagtactcgcttgcaagcattccaatggttgatggttggagctttgttgaactgacttagtttattcacagagaatgctaagtctggccgagtgagtgtgagatactgtaatgcgccaaggacacttctataggcttctggtttgtcaaataatggactatcaccaaggcatagtttattgcctagaatcattggtgtaggagcttcttttgagtcatagaaattagtcttttgaagaagctcagtagcgtatttcgactgtgtgagatacaaaccagcagtagttctttttgcttcaaaccccaagaaatagttcacagagccaagagattttagagcaaactttgagttgagatctttgatcacttgagcaataagagagggctttgctcctgtgattaggatatcgtcaacgtaaacaagaagaaataggagcgtaccgttaatagctgtgtgaaacaaagaagtgtccgaggtggaacacttgaatccctaatcaagtagagcactttttagccgttcaaaccatgctcgtggtgcctgcttgaggcaatagatagctttgtgcaacaagcatacatgatgaggtttttgagggtcaataaacccaggaggttgggtcatgtagactctttcttggagaactccgtttaggaatgcattattgacgtcaatttgctgaatatcccagttgtatgtaacagcaattgaaaagatcacccgtatggttgaagcacgtaccacagggctgtaggtatctgtaaaatcgagaccagcagtttgttgaaagcctttagcaactaggcgggctttgtatttgtccaaggagccatcagctttgagcttttttcgatatacccatttgcactgaacaacatgcatgtcatccgaaggaggtaccaaagtatatgttttgttgcggagtaaggcatagtactcggttgtcataacattattccatacaggaatggataatgcttctttcacagatgttggcacacagtaaatatgtgttgaagtagctgcatagtaaatctttggtttaacgatgccggactttgaccttgtttgcattggatgtccactaggcaaaggtggaggatgttgaggaacaatatcgacatgagttgtgtcatcaatagggtcattttgaacaacctccagagtagcatgagggtcattcggagcatcagttgaagcagtagtagtaacaacttctggtattggtgcaatattagataaaggagcagcaacttcagtagtgacctcaatggttgatggagaagacaaagcagcaggtggtacctcatcaacaaatggattagtatataattcatgatgtattgtattataagatgaattacatacctgtgtgttgtcaagatcagtatgttatataggtgctacttcaggatggacattgtgtgtagtggatgtgttgttttgggtgggttaacatggtataatgaatgctggagacagaatattttgacgaaaaatagaggaagaagtaacaggggagtttaggaatagttgtgagtaaggaaattcatcctcattgaaattgacactccgagcaatgtatatgcgcccagtgggatgaaggcaacgatatcctttgtggaaggggctgtagccaagaaagacacactttgaggttttaaactcaaatttgtgtgtgttgtagggtctaaggaaaggaaagcaagaacactcaaagactttcaagaaattgtagtcaggggtaggattgtataggcattcaaagggagatttgtaagcacgtgtttatgtgggaagacgatttatgagaaaaactgccgagacaaaggaatcccaccaaaacattaggggtaattgggctttggcaagaagagtgaggccaacttcagtaacatggcggtgttttcgctcaacacggccttgttgttgatgattatgaggacaagggtgtctaaataagatcccaagttgttgaagagggttttgaaagggacgaaactcacccccccaatctgattgtaaggcttttattggtaaatctaactatttttcaaccattgttttgaactgtaagaagatgggaaaagattcatttttgacacgcataggataaatccaagagtacttggtgtaatcatcaacaatagaatgtagtatttagtatccctcaggagaaggatgtggagatggaccccataaatcagtgtgaaccaattgtaaaggtgacaggagttttaagtgaggaactagaaaaatgacatcatatggtttttagccaatattgactaagt

SEQ ID NO: 227414 - DNA, 2206 bp, Cannabis indica
catcaaagtagtagtcacaaaggaaaccacattccttaaataacccactgattgcacctttacacacctagtccaacctgctaaagaatccataacacgattcatcgataaaaaaaatttgagaaaagattacaatttcaaaacacttacaaagtttaacacaggaataaaaaattggataagttccccaagcaaaaggcagaaaggcactcctaagagcaaacacaacaaccttcgaattagattgaatgtgtaactttgaaatgtccctctcctttgctttctgaagagccacttgtatcacgagtagttccccttccagtgctcctaacatagtagcaaactcagttgcaacccaatagccatcccgtacttctccagtaagagacaccgaaacatcactttagaaacagaaaaagtcatcctgtacttgtatatcagacaaaggactatccttgacgcacgactcacctaaatccctcgcagaccgcattgactccatctcaacacatctggcactgatttcaatgaatgggagaatgacacttccttccataaagcatctcatatggagccatgcccaatgtactctaataactattattataagaaaattcgatttgaggaagatacttgttccaagaatgagtgaggccattaaaagatttgagctcgtatgcttgcctcacagagtagacaaaaaagctacgcagatccaaagcatagagatattaaattccgagttggggattatattttccttcgggtgtccccaatgaaaggaatttggagatttggaaagaaggaaaaattgagtcccagattattggcccgtttgaaattcttcaaagggtaggtcaggtatcctatcagctagccctggccccttctttatttggagctcacaacatgtttcacatctcgatgctttgaaagtatgtatctaatacaattcatgtattaagttatgaagatattgagcttcaaaccaacttatcatacgaagaacaacccgtacacatcctggacaggaaagaaaaggtgttgcgaaacaagactatttcgctagttaaagtactatggcggaacaacaaggtagaagaatcaacttgggagttagagtcgtatatgcaggttcaatatcccgagcttttcaagtaaatttcgagtacaaaatttctataaggaggggatagttgtaatatctcaaaaaataatatggtatttaattgggcatattttatttaatatgtacttattttggtaatgaagtaagatcatgatctcacataggttaattagtgtgaatttaataaatggttaaataaagcgtaatttattaattacaaaaattatattagattatgtgggtatcatagataccatttctgaaataaaatgttttcgggctcggcgacattggatacaggacagaaaggtcgggaaatatcataacaacataagataaattaagttggaggtataccagactaggttagaattttaagttagcgattgggtagaatcggttagaaaggactaaactacccttaggagttgactttattcttaaagatttaaaggagaaaaaggttcatttggtgtaaaaggatttgtttatcttatattagattgtgggctaaaaagaattaagttattaagtttatttagtattagattaatagggattttattaacttaagaaacaataacacaaaaatagctttttctacatttttctctctccttagaagctcttggaactcaatagaaaccaggggagataataccaaattcaagcaaatctttaactggttagcaagatctaagtgttgctcaatcttaggtgtaagttttacatcccttttctttggatttttcaagatttaggttaagttttgattagggttttagaaattaggggatgtgaagtttaatcgaggttagaatatgtttttagttttgtttttgagcatgttttagattgaattggttagagataggggctctttagcttgatttgagctagatgaggtttaatattcacttgagtatgcaattttggttaaatggttgaattattttaagggcttttttcataaatgtacaacaaaaacaatataattacaaaaaatgtgcaaaaaaaaaaatattttaaaaacttatatattttgaaaacttattacatcaaaccatacattttaat

SEQ ID NO: 227415 - DNA, 2408 bp, Cannabis indica
agcaatgacataaaggaaccatagcaaggactagaggagtggtgaaaaatgtaagagttaaaaaatctttgataggagaaaacaatatcaagagttgtcaacggaaaagaactgaaggaaagcccaggactcaaattttattttgttttattactgcaatgaaaactgtaagtacagaaggctaagatcagaacttgatttgattccaaattattagctaccaattcatggcccgcaatacagaatcaacatggtgagaggacaagctttcttcaccttcctcctttctggttactgataagaccacctgagttggccttctcacgtttttggaatggatcctacgtgacaagtgaaaataaagtcaggtctttactatttcattaactgaatgtttacacgtggttaacaatctgtttaatatgccatacaaaacccaagtcccaaactaaaattcaaaccaatctttagagcacattccattagaaacagatattgagaattgaaaataaaatagaaatacacaacctagcttagtgagtagcaaatgattcagagacctctgttacattataaagcatagcgagttagattctgtcacttggggctagctcaagtggttggatgtgtgtatgggaggagagggattcaaactcacaacatttaaaagaaagaaaataacatgtaggatagccagtaggggtatcaaccacaaaattgggttaggattgatggaaagtgtaaattcatcattaatggaagtatctttaacgttcttagttttggtcattgagaaagggtacatgtttacacgtaaatgtagaaaatcaaacaagagtttgttactaaacttataaattgaagcttataaaaaggtttgatttagtttgatcagtaacaaaaggggtattttgtacaccctaatcctcaagacatcattcaactttagaaaaacttccaataccaaagcagagcatatttcagcactatcccatttcatattaagtaatgcttaatcttattaaccaaatattatattttatcctaccatctttgaaaggaagaaagctctaaaatattttgtattaacccccctgaggaatcaaaccagtacatggaaggaaaccatagtgtgatcactaaacctacccatatagttggtaatgtctgacattgaagtcttacaccccccaaaccaaacgaaatcgaaataagagcattagaaagagcacatgcatttaattacttccacaaatcccaaatataaatctcaactggataattggagctctctagctacatcaattttggttagttaaactaatcaatcacaagaaaaaaaaaatcatgggtgggtcgcataaaaaatcttaagaatttatgaatacatacattcagaatcaaacaaacgaaattctctaagcccatctattatccccctactttctgggcatccaaacaggctactcttagactctgataagaaaaaaaaaaaacctgcacccgtaaattccgaaaccctaagtaatggtaaaaaagcaagagtatcgcatagcctaaatcagatgattgaatatctactaaaaatctacacagaaaatccgataaaaattactccaggaattgaatctacagagcagagagaagcatcgtctacaaaaaatataactaataaaagaaaaatacgaaaaaaggaagggattaagggaaatttacgttgtcaaagaagataaagttggccagtacgacggctcccacaacgccaccgacaacggcgaccgggccggttagcaagctccatttcctgtaaatcatcttcgtcgtcttcttcttcttgactccttgatctctctcgttttcctcctgacgagtactggtgtattctatattattagtatcaggccctactttcttacgccattctggggcctgggcttacgattgggcttggatttaggcttgggcttcaataaataaagagattgtttacgttttctaaaggtaatttgatttttacggaaagtacatttgtttggcaattaattatgaaaataccaataataatttgtaacaattttgtgacagtttttaagtattgtaaacaacagtttcatatgattttaaatttttaaattttaaataaaaaggcctaatttattacaaatttatagattttattaaaaaaaaaataaacttttttataatcaagaaaaaaagatcttattactcaccaacaaatttcacacaagcagagctacaaactccttttacatattattaataaattctaaaatagctaattatctcctcttcatccttctattagctatgccaagaactcttcaaaaaaaaaaaaaaaaaaaaaaaatatgtttggatgatgtaaaataaatgttttctgaaacaat

SEQ ID NO: 227416 - DNA, 2130 bp, Cannabis indica
ctgccacacctttctcaatgaaatagcccaagaaagttgggtcagctacgcgaaccagcgcattatcgacaccatagcaatccaagtacttgactcctttggtggacatgtcttccaataagttagacgatttaagagctgagtagactcctccattcccatctggggcctccgctactttgtacggactctccattataaacctaccatcttttgaaatacaaggaatagtgccttgttgaaagaaggtaacttgttctggttcaagcccaaaatacttatgaaactcgaaaaactttcgtgtgtcctcatctgtgaatggacttgtcataatataccaatgtattatcactgaattaccagttgttgaggaagccgaatcatttttggattgttcagctaatctctggacacgtagaatcctctcagcttgaagctgaaacagagattttccagaaggaaggccaatgttgaagcaaccttttggatcagaactcccaagcctagttccctgcccacctgacaataacaaaacagccaatttcccttctgagattgctttcaaacccatcttccaccatcttgctttgtcctcaggccgccgctcctccaccgacgaaacgctaccctcaggtaccggctcaatcgccgccgtcggtaagctatgagattggagcgagcaccgtatgatccgatcaatcctagaaagatctagactttccatgtctttaacaaggagaagacgttcttcaggggaaagctcatcccagagtgcaaatgcatcttcctggccatagtccttgagtctctctagaagagcctgaggtggttgctgtgacaatggcgaagcctccgccattgattcactcatcttaatcttcttcctctctcgaaatttctaaatcttttgtttctctctgtaggagagtgatatcaaatgagaaagtttatcacagctcatataaagactccaacaacagacagtagttgatgagatgaagacatagaatcaaactagagtaactgcctgttccacttgaacttacctaaatgcccttcctttactattttaaattactttaatttgctcttctttggttgttcaattctaatttcaattcaatcacccatccttgaaagctcaatctcaccaaaattattttctgcataaagaaaaaaagtacttacaagatgtcaaattttcttagcatgagaacagaatttagacatttttcccacccaaaagaagaagaaagaaaaaaaacaaacaattaaactaattgataatgaactcgtgcctaatcttctttatttggggaaaaggtatttttgtacacttttaatcaatgatggtaattaagttatcattacttgttatttattttacaataatagcaacggatgattaaatttagagaagctgtaactctttctagacataatctaggttggaccatacgagttattgaccatatatagggaagggttttaaaagtaatattaaagttttaggcaaggttgaatttttagagttgacgaacctgtgaaacatggtgatcgacaagagtgggagagggagaggagaattaaagttccaccggctcaacgaaaaaaaaaatgtcaatatagaaactgaggaattaggctaagcacaaagactttgtatatgaaaggaaaagcagactcgtgtaatacgcttcggacatattcaatctcttcctctatgtaaagtgttaattctccttttttttttctttttctcgtcgtccaggcccattttctatgtatggactcaaagccaagaatactgtccaagtcagttagaatgggcaggcctattcatagttgtttgcttaatttcaccttattcattttttttttaagtattttttttttttcttttttgcttatttaaagaacttaaacactttcatcttgagaaatgctgaatgggagtgtgatagcactaagttgtcatatcactattaatgtaattaaacttcaagtctcatataattaaatctaataattatcgtaaaatatcattaattaattataaagcgttacttttaggtggtgctaagcactactggtgccttatactttaatctttgatacttgagaaacttg

SEQ ID NO: 227417 - DNA, 1973 bp, Cannabis indica
gtaaaaataggaccctgagcttaatttttgacaattttttttttatataacaaacttgaagaaaattcctaatacgaatagatatagaaaatgtaaataattttgtcataatacctttagatcaaattattgttaaattttattttgacaaaaaattagttcaggatcctatttgtaccattttgaaaaatacagagtccattttgtcatttaacaaaatagaggatctaattggtaacttttggaaaacacagggtccataatggtatttatccaatactaatttatatatacttaatttagatttagcttaacttaggagcaaatattgattttaacttactctcaatgttagctcccattctttgaacaactccaagttgacgacaaaagttttcaaactttccaatactcaatttttgtgagcaagtctccaacttgctaatctattttcacttgtctcattaaaatctcgtcttgtagaactttctctcaaagaaaatgaaagttcccttccacgcgcttaatccttgcatgaaagattggattgtttggcaaacaaattgttgattggtagtacaacagagttgcataatctattagttggtacaaataattcattagttgtatcaaccatgtactctcttgagttgtcattgctactagaattgaacatcgagcagattgaccgaattttaggctcacatatataaacacttacaatacaaaataatgaaattcgcttctcaaaatgaaattttctatcacatggcaaaaaaaatattataaaatttagcgtcatataaatatctagcatctttataaaagaaaccatctcaatacatacatacgccctcaaagaatatatttgctatcagtattttcagattagtgacgtgtgcattttaaagcccaatatcaatcaaagcaggcccatgtttgggcccagtcaagttaataagtcaacccaattatggagtcaaactcacctccatatctggatataagtccagcttacaaatgcagcaaggtcagaccacttctattcgagaaatattgtttggcctaaaaggcgaagggtccatcaagatctatctgatactctcatgggataattcggatatggaaaattgaagagacatccaaaagtccctggatatcatcctatctggcatcctccaaacacagacccccaccatctcaagggtttgtctcctacgtcaaacacaaggagtgtgcgcaccaccaaaagaaagccacttttttgtctaataccatatcctctcacattctcgtactgacacagtagctcacgacacacggtgtaacactctaatccatatggatgcctagatttattaatttttcatctactttctaagaaaaatactttcagaatgaaactaaaaatatttatcatcgtaaaattacgattccatacaatcatcaaatatgcacatacaccagcatgaatacattcaaatcaacacaaacattgtgttaagtccatatttcatgaaagtaaatcattatcatggttctaaagccagttgttggggattgttttaccgtgatctagatttactaccatatatgttgtttaacatcctaaacatgaatttctaaaataatggaatttaaacacatataaagttcaaaaaaccttacattggttgcagtggaattaaatgactccttccactcagatctcttacccttgttccattctgtcgcagagtgttatcaagatctgagccagacactccttcagttaattggattcttcacagtcttacacactatgattgagtaccaacttgctatgcgtgggcatgtactctatcactataagggattagaaaattgaagagagagagaaagattcgaaaatagagagagaaagagaaggctcaaatttcaccgaaggctcaactttcactgaaggcttaagttgcatctgttggaaattattt

SEQ ID NO: 227418 - DNA, 5993 bp, Cannabis indica
ataaaccctgttttttgtagtggcagtattttttggagggaacttgatctcgtggtctgctaagaaacaaaaaatgatagctcgttcaagtaccgatcgatagtgagttttatgtattggcaaactcaacagcagaggttaaatggataacttccgacttctccaatcatataggtcgataactagggcactgcttctttagctacgaatctcgtgttctatgcacaatcaaaacatattgaaattgatctacattttgtctgtgatcaaattttagcaaaggaaatagaagtcagatatgttccctttatcgaccaagtagcatacattctcaccaaagcattaagcaaggacatatttacttatttcaagaacaaactcaaagtgcattcaacaccctttggtttgagggtggatgatatacataatgatatattattcaattttttttttcttttttgttattgaaaaatatttttttaaatatgtgcaatggatttatatagtcatactaattaatataaaatacaagatatatatgtagagtagtttaaatttaaattgtactgttttgaaaaaaaaatagcactttctattatatagtcacatttaaaataacagttacatttaatataacataaatatatatagggacacgattttgtcctgtgatgtactttcacggaatgtatttcgtggtacattagatgggtctcaggatacattagatgagtgtcagggtacgtgactattttttaaacctaattacccctagatcaatcttatccctcagatcaaataactccctcatctaacggctgtcgtacatcacggaatacattccgtaaaagtacaatcaagaaacaaaatcatgtcccaatatatatttatatatatatatatctatatgtatgtgtgttctagttaaatatacaaaataactattgcaactcatcataatgcaatgctcacatcaactatgactctaatatttccatatctttcagttgcaaactcaatctttgtggttgtctttttctttaattttttattatccttaaactttattgtgacatattatattatttcttctctgctttctgtcaccatagtttcttttgttttatttcaagaaataagagaaatattttatgaataataagattaatcttgtctaaagatgatcttcccatatttatgtcaaataataaatcttaaataaaaaatggatacatattataacctatatgttcaagtacttaattaattgatctgggaaatacgtaaaagaccaaatatttatgctctttgtctgataatgatggtatatatataataatatatatatttatctatattattctattacaccaaacaaatataacagtagtaaatccaaatttcaggtattttattggagttgagaactgaagattaaacataaaccatgtgaagatgcatgctaattatttttaatatggctgtatatatatatgtatgttaattatttttataagcaaaatatcaaatcttttgtgttgtcttttcttagatcatattggttatgtaaagttattttggaatcaattttccaaccacatatattgacaataagttggagaaaacaataatgttataatttctcatcactctcattatttgaaatttttttcaacaacattcatttaatgtagcagataattctacaaatattatttctgttaattaaccattctcttataagtggagggtccaccatgatcaagctttgtaacaataaaccatgcaagttctattaataagtggtgtctaattttattcatatattcaatttaatatttggttgttacaagagtacaacacatgtgattctattcaaataccttcagtattaattgtcttttcaatatatgtctcacttgacaagacacaagtttttactataaatataacaatctttagttgtgtcaaccaacaagtgaagtagtactcatctaattatctctataatctttttctttctacatttttcttctacaatattcataatgggtttctatttgccaggagttgttccaactaagaaacttcttcgacgatctttgtctaacttgagcaaaggagcatcaaataatgtcgttcatgtcccgaaaggccatttagctgtttatgttgggaagaacgaaaagaaacggtttgtgattcctttgtcaattttaagtcattcttcatttcaagagttgttagttcaagccgaagacgaatatggatatgatcatccaatgggaggcctcacaattccatgcagagaagatatatttattgatctcatatcaaatctgaattaataatgttattcataaaaatgtggcacattcttttatatatttagtaaaactagaaattcttttattaatcttatcatttttcctcatcatgtggagtgggaaaagagctcccagattgaggaataatattatacatggatataatgttaaatgttattgttatacgagtttaattttaaacatatcttcatgtgcttgataattattgttacagaattgaaatagagtaaatttgatattgtattttgctttcttttgaaattattcccacaaagctcgctatatatatataactggccaaaattactcaaatgaacctttataattaggatatgctttatttgataagagagtaataacaattacaagagattaaacttttcccatatttgttaaggtattttagttaattattgtatgtgtttaaacttaaggcaaattaaaaacaataagatcttgcatcccctccagtatcacttcagttcgaaagaaatccttcacagaatttataacaacgtttctaacaatatgccaatatttttgaaagaatttaggattcataccatctggtcccggagacttatcagggtgcatttggaaaactacatctttcacttcttgatcaacaatggcccgaagcaaactttgcttgtgttcctctttgactcttggcaccacacactcaagaatatctccccatacaccatcttcagccttaaaaatttcattgaagtaatccaccataacatctcccaaaccattctcccaagttctcaaaattcctgtagtatctctcaaatgaataatttgattgttgcgtttacgagtcgatgctttagcatgaaagaacttgctattgtgatccccttctttcaaccacaattgtttcgaccgttgtcgccaaaagatttctctttggttaagcacttgaaacaactgttgctttgcttgtttgaacctttgcttcccttccacatctctcctctttttaaattgcttcatggtcttgttacattgctttatttgagaagaaattgattcctaagaaaaagaaacctgatctaatgagtgagttacgacccatctctttgtgcaatgttgttgccaaaattatcaccaaggtcctggccaataggatgaagagtcttctttcaaaggttatttctattaatcaaaatgcgttcattccagggaggcttattactgataatataatggtttcctttgagattttgcactatcttaaaaggaaacaggttggcaaagatggctacatggcgatgacgttggacatgagtaaagcatatgatagagtggattggaattttctttgcgctatgctttctcggttgggatttgctgaaaaatgggttcgtctcatatatggttgtctttgcactgtgcaatacaatgttgtgagcagtggctacactcttggccctattgttcctagtagagggcttcggcaaggcgatccaatctcaccttatctgtttttggtctttgctgaaggactctcagctcttatgagaagatatgaagaaaggaaatggattcatgggtgtagagtggcgaatggtgctccggtggtttcccatatgcttttcgcagatgatagttttttgtactgtaaagtaacaaatgaggaagtctcccacatcattaatcttttggagagttttgctaaggcatcggagcaacaggtgaattttgacaaatccactgttttttatagcagcaatactacatctacaatgagacaagcgatttgtcaacgtttgggtattcatgaggctgaagagcgtagcaagtacttgggtctcccaagtactattggaagaaataagaaggcgattttcagttacttgactgataaagttcaaatgagaattcaaagttgggataacaagtttctttcaagagcaggcaaagaagttcttattaaatcagtggttcaagctcttcctgcttatactatgaatgtcttcttgattcctgttggtatttgccaagatattgaacgatcgataaccaagttctcgtggcgttccaacaacaataaaggcatacattggatgagttgggataagctctcgaaacataagagcacgtatggaatgggctttcttgatttttcgtgattttaatattgctttacttgctaaacaaggttggaagttgcttacttgtgaacatagtttggttgggaaaatcttcaaagcaaggtattttgccaatggtaatttccttacgacaacactaggaaataactcaagttatatttggaggagtgtcttggaggctcaagggttggttcgggatggagcaagaagattagtgggtaatggctcaaatgttagcatcctcaatgacccgtggcttatggatgatgttaacccttttgttaagtctcaacaaatgtgccttgtggatagaatggtcaactccctaatgaaagtcgatgtgcgtgaatgggatgaggatgttctaagggatgtgctcacggtaaaggaccaagaactggtgtggaagatacctttgtcatctgatgttgaaagtgatggttattggttttggaggaaggaggcttcgggtttgttcactgtgcgaagtgcatatgcaattctgcagcagcaaaatataaacatggagcagtcgactttttctggtgcatggacaaagttatggcagctcaaaattcctccaaaagtcaaagatttcctatggcgtgtgtgcacaaatagtcttcctacccgatttcagcttactactaaacatgtccctataaactctgactgtcctatgtgttcggttgccccagaaacatctttacatgtccttgttcgttgccattttgctcaaagcttctggaggcaggctcagatccctgctgttggaacgagtgcaatgatgttttgcagctggtgggaagaaggattaagagaatggaatgaggccgagtgcttggaggcatgtatgatcttatggttgatttggaagattagaaatgaggtagtttggaatgagaaacagcctaaatctgaagaagtgttacttttggcaaaactaaactttgttgattggtataatgctcaaaaccaagagttaggatctcctaatgaacccaatcaggttcgaactgagcattggacccccccaattttcctaaaatcaaagttaatgtcgatggtgcacttttttcaaatgagaagagctatggtattggcttggtagctagagatagtaatggtatggttattcaagcaagatcattaaagaaggctggtgatttacaacctcatgaagttgaagccattggaataaaagaggctctgagttggattaaagacaacgaatgggctagtgtgatagtggagtcggattgccttagagttatgttggatcttcaaggaaataaaaatatggcctctccttatggtcatataattctagattgtaaggctttgttagcctctattgttgatgtttcttttaattttgttaagcggactgctaataagattgtgcattatttggcgcgatcttctcttattgaggttgatcgtgtttttagtcgtgttgagttacctactgtaattgcttcctttgttttggaagatttgatttaatgaaatctcattatta

SEQ ID NO: 227419 - DNA, 1860 bp, Cannabis indica
gtgaaggaattttaaattgggcaaaagaattaagtttggggttgaagaatgctatctagttgctatagcaagggctcagcaattttatttggcagcaaaagtgttctgatatgagggtttaggaaaaggagtattggtctgagaaaaaaatttggaacagaacatgtgatggaaaattagttgaatgaagcaatcattgggtacaaattttatgttcagtccaatcatttgggctgatgtacttgagttgactatcttttacctaaaaatgccaacttgatataaacaaagacaataaatacaagttgagttagttgtttatggggcttcaatttgtagtcaatatggccccatcatgttgttgactcagcccaattgatcaatgattagcccattagctaattccaaccctaccaccatcactgttgtatatctcctcacaattctcagccgtgtgccactctaaatcaaaccaaacctccattcgaccacaccccggattcaccatcaccaactccatccccgttgactcaaacagcaacctagctgctaacccgcaccaccatcgaaccaccaactcaccctccattcgaccttcaccagatcaacacaactcccacctaaaatcgatctcaccagcctcacttcgcccgcatcagcttcagccacccacgatttcaccagcaaccctcattcaccaaattgcacccagaaaatttgaacccacctaaaaccgcatcaccacttcgcccagatcataccagcgagaattcaacaccctccatcactcacggttccccatctctgagccactgcccagtcgacctccacctgaagtcactcaccaacccgaaccagcaactccatctccgttcactcacacagcaacccaactactaacccacaccagaaccaccagttcgtccttaccatcttcaacccgcgccacattcagctcagcccatcaccaacacgagaaacaacaatcacaccaaattcgttcaaccactcatccaagctcgaacccaaaacccacattcgattcttccctgcacaatccgagcaaaccacgaaccaaattcagccaccgcatatcacttgctgaagctccactactgtcagtttttgctagaaaccgaggaagccaacaagaatctccatttcaccattccattcacaaacacaaatttaagagcaaggttagtccttgtggttgcaatgaaccgtatgtagttgtttaatccaattgaacttgctaaatttgtgaatttgcacattgcgtttaaagaaacagagagatctttagtgtgatttgattgtggaattgttagtgtatggagttgatttgagaagaatacatagtgggaatgtacaatagatgccaagtagtgtgtggtgttgatttgtgcgggtgatgaaatttggatttcagtggtacttgagaatagtttgtatgattgcaaattttggtgtggttgtgagctttttctggtgtaaatttagaatcattgttgttgttgtttgagtagtttaaaattgaaaagaagtagggaaattttgttatggctggcgagggtgaaagaatttggtgtgaatgctttaaattttagttggtgtggttcagaaagagtggtgacttttgagcaagattggagtgtggacattgtagtgtattgtaagaattattattgtgttgagaggcagcagttaaaaagaaaagaagagggggaatttgctgtggttgtttagtgtgcaagtgcaaaagaagagaaaatgtcgaatatcaagagggttgccaacagaaaaaaaatagaaattacttcatgaaattcctaaatttcattgcaaggcagccgagac

SEQ ID NO: 227420 - DNA, 7634 bp, Cannabis indica
gatcttatttttagatttttagtattttaccattttcatatagaaatttcatggtggggatttatttcttgattcagcaaatttctaacattatagttcttcaaaggttcttataattatcatagaataaccttgttgtggattgatatttaagctagataaaataccattcaatctaaaatttcttatgagattctcaactgggttttgattaaacatgaatttattttatggtcatttggtttactttgattaacatggctttgatatcacattgtctttagttcccattatttaaggacattatgtaaggggagagagaatttatttcattgagttattcaaaattgagatagagatttaaaatataggatggataatcttcttttgatattgaaaattaatgccaacataaaatagtcacagaaccatagatatattattgacattgaggttactttaaagaaataaaatcagttgaaatagttattcttttggttgccatgtcctttggtggggattgctctcatgtgtgtgtatgtatattgctgggaatgctaaagtttttaaaagggatagcaaactccaggcagtattgtgagctattgtgtcgaatattgaatattccggttttaatttttcgattaagagcttctgttgtttctgccttatttatgtattttgtgtgctgcagttgtgaaggattttaagtatgctgactcccatgaatgggtgaaagtggacggaaattcggctactgtaggcataacagatcatgctcaagatcatttaggtgatgttgtgtatgttgaattgccagaagtaggggcttctgtatcacaaggagaaagttttggtgctgttgaaagtgtcaaggcatcaagtgatatttattctcctatatcaggaaaggtggtcgaagtcaatgaggagctcagcacctcacctggtttggtgagtacataccatcatgttttttataattattatcggttgcacattgctgctgtgagaatttggttcctaattgagttagtgttcctggattattcttgttaatttttttttcctttgctaaattcaactcattaagaaaatctcatatcgagttaaggaacctgtgccctttttattcttcataatatagtttgacggtgtcaataaattgagctaaatttaagttgaacagtgaaagattttatgaaattagatttcattttgataaaagatgtgctgtagtgctagacaacctattctttctctgtttaaaaaatggtataagccctgaaggttttattacaattctaattagtgatactgagtctttgttcgagtaataagtttgattccctagccgcattgatactactcaacagatagagttatgaactgaatttatatataccaaacccatgttgaataatttcttagctgtatgactgagttgttgcagttgtagtttcggttcttacaacttgctggtgcagcatatagaatttctctcttgttttggttcttaggtcttgcctgtttctctcaaatgaatttaaccactagttatttacttctgtattgattctctcctcctgttcataacatacgaatcatctgaatgtcttctttctgcttgtgttcataacttaaacatcttatagagcttctctctatgttttgttcttgaccaaaagtaagaattcatgctgtcatggctgattaagttcttatctatcaatccctcaagtaattatatttaaatggtttaaaaaacatctaatcttagcttaataaaaccgcaggtgtgttttatcatgcctgagagggggcacagtttaattattctctttcatagttacttgattttgttgacaatacaaaatgagttaagcccatctaactctcttctgattgagattcttctgtcttgtgctttaccatcctttttatttccaacaatagttaggcgcaactgttttctcccccaacaataacttacatttttcttacattggatttcattgacttgcttacttaggctcacattgtagtaaagtgttaatagagcctaatccattcacctcttttgtttgtttttgtttcgactctttggagtagttcaacaatgccttgcaagcaaagttttgtcatgcagatttatgataaatttccaatatttcatgttgttgatctaaccctcaaacataaaatggttaaaattaaattcaccatcgcctcgttgccgtttcccgatacagagtaaattgaaaaaaaaaaacatcaacataaagtactttgctgcttacatcattgggggcctaattcatcatttgattctttcttcgagtatctcttaaggcgaaatttatctttctttatattattcagtgtaccacctagaatcattgcttcattttcttaactattttctcattcgctcctcttttctttctttctggatataggtcaatgcaagtccatacgagaacggttggatgatgaaggtcgagataagcgaatcgagtgaagtgaagaagttgatggactctgagcagtactcaaagttttgtgaagaagaagatgcaaagcactgattaatgcaatgccatatgccccattcaatgcttattatggctttgttattattacatccatcaatctaagaagaagccaaaaagtggagtttttctaatttttattatctgtgttttcatttcattacttccatgtgagccatcataaaaaagtaagcttaatgtttgcattcagattaagaatgaatctgtctttctaacatttcataaatgtttattgcataacattttagctttaccaaaatattatttcaaaatttaaagcatttgggatatcttagtctagagcatcttgtgctataaattagtattgttaaaatatagcttattttagaaaataattactttaaaaatttgtacatactaaaagtttgtcaatttcatagttatagcacgtgtgtttttaagtaactgtgtaattactaagtagagtaattactagggtagtaattacattatatattttaaaatacaaagtgtgtttggatatgagatagtaattatgtatgaattcctaatatcttgtttggcaaaatagttagtaattacaggaaaaataatatttttttagtagctaatgtttaatatgtaaagtttgtagtaattacagagtgtgattacattcaattctcataggaggccatgagaattggagagtgtaattggaacccctcaattacttctaattacacaggtgcagtgtaattacatagtcagacaaacatgccaaattgtgtaattacttccaattacacacaaattcaattaattgtggctttccaaacgcacccaatgttatattttacattttatatattttaactatcaataataaaactaataaaaaatttacatttacataagatttttttttttttggaaagatgaattctcattaaccaagctcaaaatcctcatcaaaataaataatgggccaccatatttttttggaacaaaatgacatgaataaatatgacaaaaatgtaaaatgttggttatccctaacaagaatatcatctacataacaattgtaaccccattgagtagccaagatagcgtttaaatggtcactttcaaacaaatcaatctccaagtttttcctaaggcaccatttgagagcttcattgatagacaataacctcagtcatttaaaaaactttaatcctctttccctgatgtaccaacatttatattcattttgagcttttcagaatcaaggttatgagtttccaaacaactataatcatctacatttgatttctattgtggtgcacacaacttttcaactttgaattaattctaaagttttgatcaacctcttgaaagtcatataacaaaagaggagtgttaattgcaatctcctattacaatcttttagtcaatctccacgtctgaaatcacatgccgaaatatttttttcatagcggtattcattatagttacaatatcatctctgtaaatttttaaaaaattccaaataatttacaataccgaaaatagagttcctgatattccagtttacctcgcgtgttcaaaaaactttaaaagtattttcagcactgtaaactacttgaaatttttcaaaaatttcctgaaatgatgttgtaagcataacaaaaaccgccgtgaaaaaaaattaaaaaagaaaagttattccgacatgtttttgaacgtggaagttgacttggaggttgtaacatgagagcattcctcataacaaaatacatgcatccacaattatttaagttggtagcttttgtattttgcccatacttcaccctatttctttcaaaccaaagtaaccaaaggactacaagaattacctcaacatctccacatggtttcaagtcaaccaaaccaacaagaaaatcagagactaatttcccactccaactggtccaaagattttcttgagctgactgaatacaaaccactaggtgtgaaatgccaaagcacttgatcttcaatagaatgaaaactaactaaaatgttgagaatgtgaccacaatcaacctcccaaaaaatttgtttcacaaagctattattccatcttccatccacaatgaaaccccccaccttccaatcattcccaagttccttacatggcgtaataagcttaaacgtagaaagcctagacagccacaaatcgttctatgggtgaatttgcctccatttagtgcctcacaaccccacaaaatgctccttcaaacaaaagaaataccctcattttcttggtgtagtgagaaaagagtcatgcttaaaatattttgccttaaccacccttgccataagatactccgggtgagtcaaaatacgtcagtcttgtttagaaatcattgcttagttatgagcagggtcggctctgggcatagacaggttaggcccgcacttagggcccattcattttaggggtccaaataaaaaaaatacattttaaaaaatatacttatttttgtaataattcatttatttttatagtaagggtctaaaattttatttttgcctatagtccatttcaactcaggaccggtcctagttatgagtcttaagatctcggaaccctaaaccaccctacccatttagtaagcacattggttcccttttttctagtgcatttcatgtttttcatcattggatccccactagaactttgcagccatggtctcaagctcctaagaaatacccttttttttttttatgattaaagtcatttattgaaagaaaagaacctagtaaccacaaaagggggttacttcccttaacaaacccaaactgttacaatttgaaactctagcccaacgggcgagttcatcagccaggccattctcagtatgaggaataaaagtgacagcaacattaacaaaaagtttacataaagtttgacattgtttaaacaaagggtaactatgccatccaaaaggaatggagcctatctcaaaagcagtagcagcatttttagaatctgtcttgatgtgtatggagtttgccttttgatccagcgccgattggagcgccaatttaatcccgcataactcaccttcgaacacactttcaaccttagatacctccgtagctatccagtaatcacacggtggctcttcctgcttatgaacaattgcatatcctgcatacttttccacgacaaacgcgtccacgtagcactcccagtacccctctagatttttcgtgttatcactcttcactggtgtttgcaacttcacctcctcctcgcaccacacacgattgcttaggaagtcttcagttctcctcttgcaatcttgaaaaactgtagtcaattccaccttcacatctctgaatactttgtcattccgccatttccaaattgtttcacccgtacacgcaaaaagagtctgcatctctatgtcatctagattactccaccacctctttacttcatcgagattttgccattggaacctttccagacgaatgcctttcctaaaccagatggcccttgtaaatgaacactggcagaacaaatggaaggcggacttaacctcagattcacaaaagatgcactgttgttgatcacttgggagaattccaattcgagatttagtggggagtatgtccgagaaaagtttccaactaaataattttagtcggggatgtattttagttttccagaatcttttccactggggttgggactcattgaatctatttttttgactgacccagtaagcacttttgactgtgaacttgcccgactttgctgccttccagaataaaatgtctcaaccctcatcgattggtttgatcctaagaatctcctcagcaatctgtggctcaaaacagactgtaatcagattttcattccataatctagtgtcctcttgaaacaggtctttaactttacagaaggtctgatttgggataaagtgaaaactatctcgaatcccatcaaattctcgtccgggtatccaaggtttgtgccacagctcacattcaccatccgcaatcaaaattccagccccctcgagacacactttcctaagaaataaccttgagaaggtgaaatttacattagattttacaataatgaattagagttgtgctaaatatataattgtattgaaattttgcattaaatattggtctaaatattattctatattttcactatatcaaatattgtgaaaggttgggtgggtattcaaaacactagtaaggtaatgtgtttcaaaaataacaataggagatcaagaagggaaagaaaaaatgaagataaaactgatattgaaatgtgatatggtatttcataatcactaacattatgaagataaaacactcaattatgatcttctagcacttgtgtgcgattgcaaatcaacaccatttttaaacattattaaatcatttggtaatataaacgtttaaattaaaaaaattaaatcatttgatatgttgctcataaaaaaaaaaaataaaaaatcttttttgggagatcaatttgtactttttttttattatttttgtatgaaagatcaatttgtactttgttactattttggacctgaaatgagttttgtctgattaccaataccaaacaaacaataaatttttgtcatctaacactgttttttaatcgaaataatttgataataaaaaaaaaaaatctaaataacagaattgggccattgaaggcttggctcgactgcagttgtggcccgaaatttgtgggcccaatagatgttttggaaaggattcagtatatttggaaatttagttaagtattatttttggtaaaaattttacacttttccttttactattcaaaaatttttaataagaatttctcaaaaaaaaaaaaaaaaagatttttaataagagaacaatatcaaaaaaatacaaaaaaataatatacaaataacaaaaactaataacacaaatatatataatgggaattttacacttttacgatttaattttttttttttatatttttatagtgtattataaaaataatacgaaaaaaaactaacatataagtaacaaaaaataacatcaaaacaacacaaaaaa

SEQ ID NO: 227421 - DNA, 2352 bp, Cannabis indica
caaaacaaacatcgaagagaaggacaaggaaccttgagtagtactagtaggagctggaggcagtataatagtcacagttttaatttttcattttgaaaaagaaacacagttattttcaggccaaggaaactagtaattttattttgttttcttgcttaaaaaatatttcgtttttcaaaaacagttatttaaatctaaattaattaattataaaatcttcattttttataaaaaaaaaaaaaatacttaaaaaacaaaataaagataatttagaaaaaataaaagaaaaaaaaaatgataattgtttttttaggacagtaggcgaagtacatggtgtgggcccactctaactgtaagtgtgtaattgtaaaccgaaggcgtcgtcaaaaatcagcagcaacaccggtaataagagagagaaagagatagagaaatattttaagtcttaaaaagaggcccacttggggcaagattaaacggctggtcacactatacacaaaggtatagggctcttcttacactgaagaaaagtataaaaggagggtcttgctgagccaaatttccattccattcccatttcttcttcttcttcttcgtcttcttcttacttgggatagaggattctctctcattcgttcaatgctcgttgactttctctcatttttagcttccccatatttcaatcgtactacttacatacatatacacgcactgtgatactttcttcaccgtgtgtctcatagtttcttcaccctgtgtcgaagatggggggtgacaaagcaatatcgttggaggagatcaagaatgaaactgttgatctggtataaccctccaccatttttttttttcttttctctttctttccttgcatatttttgtcgagaaaaattttatgggttatttatgtttgtgtatatacgtgtgtatgtacatgttcattgtatcgagtaaaaactacagtggtgatttgggttttgttagtttcggatactctttttctttttgaaacccagatcaaaacaatggatctgggaagcttttttgcaatatgatataggcacctcattttttttcttttttttttgactaactactctcttacaggagcgtattccgatcgatgaagtgtttgagcaactaaaatgttcgaaggagggtttgtccgcagaggaaggagccaacaggcttcagatttttggccccaacaagctggaggagaagaaggttatatgtttttctaatgatctgttgaatactagaggttatatgtgaaactttgattactgatcattactgtgtgtatttttcttcttcaaaattaacaggaaagcaaggtgctgaagtttttgggcttcatgtggaatcccctgtcatgggtcatggaggctgctgctctcatggcaattgttcttgcaaatggagatgggaggcctccggattggcaggactttgttggtattgtttgcttgcttgttatcaattcaaccatcagttttatcgaagaaaacaatgcaacgcagctgctgctctcatggcaggtcttgcacccaaaacaaaggtaatacgtatacaagaatcttatgttaggatcccaagaattacaaggtagtctaatttaaagactggtgccgcctcttcatgaggcaccttaataatttcattcaattattttctattatttggatgaatatgatgctgtttaaggatatttttccctacaaatacttacttcgatatttgaaaatgtgttattactccaatcttcaagtggaatattaaagttgatggcgatttcttgatgtaattggattgatgatcaatctctgttaattcattagccagtataaggaatagcatctcatattctttctttttgttttatggtggtatctacaggtgcttagagatggtaaatggagtgagcaagaagctgcaattttagttccaggagacattattagcattaaattgggagatattgtcccagctgatgcccgtcttcttgagggtgatcctttaaagattgaccaatctgctctcactggagaatcacttcctgtgaccaagagtcctggagatgaagttttctcgggttcaacttgcaaacaaggtgaaattgaagctgttgttattgcaactggtgtccatactttctttggaaaggcagcacatcttgttgacagcaccaaccaagtaggacacttccaaaaggttctcactgcaattggaaacttctgtatctgttccatcgcagttggaatgctgattgagcttgtagttatgtacccaattcagcaccgcaaatacagagatggaattgacaacctcctagttctcttgattggaggtatc

SEQ ID NO: 227422 - DNA, 1722 bp, Cannabis indica
aatacatggcagatacaacccaaaaataactcttgacaactcaacacgcagatcggtagggtcaatatgtacattgttggggaagactgtcacctcatggttgctttagctttcttagcctttacttgcaccacatagcacccatgagtcacaaggactcatcaaaaaacgataataaaagataatatatggaataatcaattattgatttcactattatggaatgattgaacaataacattcaaaagtggataacataactagccatacacatggaaattgaagtaatcatatattgcattgcctaattaggcaattctatatcataatctggcatcgtatatgatgtcgctgcatcatctaatcagactatacccataccacaatctggcaccatgtattccttcgtctaaccagaagagcctgtgccacaacctgacaccaatatatcacattgcctaaccaggcgagctagtgccatacccatacacctatattaaccattaagttttttctaagttctatcccagatagagttgaataagctaactttgttatagcccgcaaaacaagagtctcaagtaagtctcatgacaatctacactaacaactcccaataaggccaccaatctatctctctcaagactcgcaacatggcacaagcacactgcgaatttagcaaagttgactagttgccgcgaagcttcactataccactgcagaagttgctcaaatctcaacacacttccgaagccttgaaaagaaaaggttgtcatcagcaagcaagaggagaaatcacaagaccacctctcccacaaggaaaaccaaacaataaattattgtcacaatcacaattcaccaaactagacaagtcctcgcacaatgcaagaatatgtaagaagacataaggtctgattgtcaaagatcacaataagaagtattaaaaccaataacgttatttgagtgagcattactcaaattaaaaaggacaaaatatatattgtattggaaaaaaataaggagcttttttatttttacactttaaaacagatttttttatttttacagaattctacatagaaattcctattgcaactagagctgcaatctaaattgcaacaaaaaatcgtatataaacctcaattgcaactagcgctgcaaccactttagaaacccaaaccttaaatttgaaaaaaaaaaattaaaaaaataaatatatcagataatttcccaaaacataataacactatagtttatttttgggaaagaaaattaacaacacatgcatctttatttttttttaacaaatattaataaaaccaacgtgatgcacataacctcaaatatgactatcaatcctattaggtgtccttcaataagtaaaatgaaatcctttacttgttcgttctgaaatatatcaaaaataaatcttcatagagattaacttgtcaaaaataattatatttgattggtataagaaaaaaaaaacagtcaaacatttgaaaatacaacctttcttattatttttagatagtacaaagatgacttcgtttcaatgaagggaagaagacagaatgatatgaaggtgaaatatttttgtaaggcaaactgtacttgcaccacacaaccacatacaagcaacgaaatagtccatggctgtaaattacaaataaaaaccccaaaagagaaccaacaaaaggggaaaaaaaaaaaaaaaaaaaa

SEQ ID NO: 227423 - DNA, 5988 bp, Cannabis indica
aaaaaaagtgtctgattccactgtgtaaaataaaacactttaatttgcaaaagataagaagaacgctggtaataatatgttaaaaaggttccaacatgtgccagcctttaaaaccacatgcgaagcattcatcaagaataattgcctaatccaatttggccctttttgaacctcattttttggccccaaaaaaccattaaacctcaattttattggcaatacttctacttcaagtcatcactttctacttttaattccaccccttttgataatatatatggctgatctcatgacaaaatttacttaaaggtttcaaacttcaaatcatactccttcctctattacattgtctcaaagatttcaaaagtataagaagataattaattctttttattattcaactcattcttgaagacccttttctttaaaataatcatgtgatgtgttaagtattcacatggggtaattgttttatttatttattgattaaaccaatattcttcacacacttactaactactctactcatatgggtttaacctatttctcaaattatatctcactaaacttaaatttagtcacccaccacttgggttaagttgtactaagctttaatctaagaatttaatttctaattaagttgttttatttattttaaaattacataaacaaagcatgcatactttaccaacttgagtggcacccatatgctcttaatattttagtgatgatataattaaaaaaaaaattaaagttggaggagtaaccttcaaggattagtagcatgataacttgtaatttatgaacacacttgtctaattcattctactaaaaaaaaataataaaacttcaaaactcctatgttttccctctcttttcctcccttagtggttggagaaataagtacaaattagaactgcataagatatcaaaataagaaaaaaatcctaaaacaaaaattaaaaaaaaaagggaaaaagaaaaaaaaaatcataagaaaaatataataatagatatgatatttattaattatctttggttatgcaagattatgtttgccataatccaaaaaggtgatgcttgccttaggccaccctatctttttcccttttctagacaatttcttcttgccttggcaacctaattttacttttccattcacctaaaaaaatattttaaaaataataaaaataataattaccattatttcacttttgcccatttttcaagcaaaaaaactatataaaattatagaagaataagaaaatccccacccactttcaattttactttatatattatttctcacaagtcaccagattccaaccaaaacccaaatatctatattttttaacattaaaatattaaatcaccacaacaatattcattaatgcccatcattcaatatttttttttctttattttatttatttccttattaatttaattaattattatgtattttaaattcggacagtaggaacccaattagctgaacaacaaaaacattattattatcttggcattttccattcaatacacaaaattagaaaattacagagagcctatgaaaaaaaaaagaagaagcaatctttctttttcaaaatctcattctctcctgtactgaaataaaaattaaaatatatatatatatatttttaaagaaaataataataataatgaagctattatcttttctttaagctctattttttcagctaatcttccctgaaaaaacaagttttagcagaaaataactcacagtgaagctctccttgtagtttaagtttatttgatccttaatacttttatttatttatttttaaaaagaagtttatttatcaaaagctatctaattattattatttattattattaaattattttttaatttttttttgaaagtctgaaaaattctgggcttaaaaatttattttattttatattcatttaaatcatcaaactttcttttgagtttttgagattaggaaaggaaatgaatgagtttttggtagagagctgaaaaagaaaaagactatatttttattggggggtgagaggggtttaagtatggagggaagagaagctgtgagtagtggggttacagtggtgggatcagatgctccctcggactaccatgtggctccgaggactgaaatcccatctcaaaccggtggatcaacacatcaaccagccgtggctccggcggctgctgcggcggcggcaccaccacaagcggcgccaacaacaaccttggctgttgctattcctgcaactatgccggtgaagagaagagaggtaggcctagaaagtatggaccagatggaagtgtcactatggctttgtcccctaagccaatatcttcgtcggcgccaccaccacctcccataatcgatttctcatctgaaaagcgtggaaaagtacggccagctagttcggtcagcaagaccaaatatgagatggagaatttaggtaatgggattaaaaaaggttgtgtttttatcaattccctttttgagttttgacatgctttatttataggccttggtttttgtctcatggttggagtcctatgatgttttgtgttgtttatatgtaatggacgggaagtgtttgtttgtgtggatacccttttgaatttaaggtatcttgtgattgtttcatggctcaggttgaagtcttttgatgtttatatgtaagtggtgagcgatttaagtgtgtgttgttgttgttgctatgtggggattgtgtgactataaccctttcttttaggagagattgaatttatgagagtcatacttactaatagggttcaagtgattctttgttgggtaatatgtgggtcctctgattggataccccttattgagatcttggagtgtgtggtagttctgaaaagataagtagtctaagttagtgattttcgtgggttggtatgggaatgatggaatcttctcgttatggctgtctcttgccacatctctcaccttttcttttcttttcctttttttttgggaagaaaattttgtacatggtactaattttctggtgcttggaagtgatagtgaacagacttggactaacttcaaagttgaaaactttcttctgaatatgtttaatcggacttaatactggtttctttgagtaaaacgtatttattagtggtttaatgatatttccagtcttgtcgtgtattactattgcttttttaggttttaccaacttggacaagtgttgaataaacatccttctactttaaattatgcttagtcactttatggaaatttaagccctcttagcaaaaaaacatggagaaaatatctggaatctcgagagtagtatttttctgttactgactattagtgaacattattttcttaccaaagtattttatcttatttttatattttgactgaagttgaataagcagttgtaaactattaatattttctctttctaatctctttctgtttcatactgtagataagttataggtcttttcttaaattgtattacttcattttcacctgtatttttgaacaatatggttaagtaaattcaagaagtctttttctttttttttcctgcagcaattctgtgctgtggtccctaatcttatgatcatttttatatgtaggtgaatgggttgcatgctctgttggtgcaaattttacaccccatatcataactgtcaatgctggcgaggtaatcatttaaacctttctctgccttttggcttatatcccttatgaaaaatctgtttcaagaagcttatgatgttgacttgacttaagttggtgtgtttgagaatttgtaaaatgaatgaagagtgtggagacacaactactggagttttgtcagatgttttctctggctttttcttttttgtcagtagaaacttcaattttctggtttgaacatttacaatgagttgtagtagtaacactaacagttatttcccccaacctcttgttttttttttttggtctgtgtctcttaggatgttacaatgaagattatatcattttctcaacaagggcctcgagctatatgcatactctctgcaaatggtgtgatatcgagtgtcacacttcgtcagcctgattcttctggaggtacattgacatatgaggtaactctctttttaattccttcttcaaatgatgtgtataaatagttcatagtttagcttctgaaaagaaaaaaagtaattgagaattttcttgtactactttttatgaagccccacaacaagaaaagttgtctgatggttaaattattatcattttcactgttgaactctttgttacttgttcttgcagggtcgatttgaaatactttctttatctggttcattcatgccaagtgattcgggtggaacaagaagcagatctggtgggatgagtgtttctttggcgagtccagacggacgagttgtaggtggtggggttgctggactattagtagctgcaagtcctgtgcaggttcggctttttcttttccttttaactatggaattatagtactttgagttataattttcctgatgtgagatctctacattgtgattctgaaatgtattttctttgataaactttaggttgtagtaggcagttttttggccgggaatcagcacgagcaaaaaccgaagaaacataagcacgagtacatttcaaatgcgatgccaactgcagccattcctatttcaagcgcagatccaaaaacgaacctcacttcttcagcttcctttcgtggagatagctggtcagcattggctgctgattcgaagactaaggcaactgacattaatgtatctttgccaggaggatgattctcaaaactaaaacataagaagaaaaaacaaaaaccagtttcatgtagtttcaggtagagaagtttgtgcacactgaccacattggcaaaaatcaaacttcaaactctccgaaactctcacttccctcgtttatgccgtctgtaaaacttactgacacttttagttaccaccagcagcatgttgttgtttttccatctggggttggccccttttaccatgaggcagtattttattttcaaattagctgtttaggttaggttctctctcggctctgttgttgtgtcatgtaaaagtagagtagtttgatcttgtaatatttgacatctgaatctgtctttctttgaacttgtgcattgtgatgatttggaagttgaaaaaaaaaaagaaacaaaagttgtttggcactaatgaatgaaagttctaaactttatttacaaacttgtaccgaaaaattacaaaccattcgaaaaagttatttacatatatggcccgacccgggatgaactccatttctggccagaaaactgaaagtgatggaatatatttcttactatgaaagcacaaatactagattttggttaggagtgtggtcctcaggttttcaaagctgttttttgttttcaatctatgaaaggtatttgaagccatttacatgtatggcccgacccgagttgaactcgatttctggccagaaaactgaaagtgagggaatatatttctctcttaccatgaaatcccaaatagtagattttgattagtagtgtggtccttaggttttcaaagctgttttttgttttcaatctatgaaaggtatttgaagtcaaacagtctcaacatcaagaactgtaatcaaacaatataaaaagtcaaagggggtattacatcatatgactaatatgattaaagaattaaacaactcaagtccaaggagcctaacctaggcaatggccttttatagttactttatacgtagttatgcctctttggctctattctatgggtaaaatgacaagaaagagcacataatctctccatgaaagatgttattactaaaccttcaaggcttcaactcattttattatgtatatatgaagtgtgatatgttagataaattaacaattaacccaagatctatttgtatataacatagaaca

SEQ ID NO: 227424 - DNA, 2200 bp, Cannabis indica
tttaatgggtcccaacccaaccttagctgttgatcacaaatgggacagttaaagttgccaccatccttgtttatgaatcatgacttatggtagtagaagtagtatagtactagtattagtactactactattactatactaacccacttattgtcttatcttttccttccaaatattttgtttttgttttaaattaaaatcaaaattacccataaaaaaaaagtgcttttcaaaataatacaaaatataaaacttaataataacctaatcaaatattataataagactaattatattttttaggtttttataaaaatattaaattttaaaaagtttacaatattacttaccacacggaattttttataaaaatactatctttttataaaataaatgtaaacaacaaaatataacaattaaaataatagtgggacaatttaaaaataaccgtggaacaatagtgaaaacttaacacagtacatagtataaaaaatatacagtatttttgaaaaaaaaatcgtcccacagtaaaaatttcagtatgtggtgtgaaaattcttttattttttctatttgttcgtattaaaaactggcttaaggttgattatgttaaaaaaaattgaccaaaattatattcaaggtttatttgtaccattataaaaaaaacacaatatttaaattattatttaataaaatagaaggtacaactaataatttttacaaaatacaaaacttacactttaaaatataagagaaaggtgtaattaattagtggtaataataaggtagttatttcatacaaaaccctttagtgagtattgagtgaattgttattggatttatatatatatatataattaaacaatttagtaggaagagcatggactaatgttttcaaatgtttgaaagtttagtgaaagtttttggacttatgtgaaataagtagacaattttcatttggtcatatctttaataataatgttgctaaataaattgtttaataaaagtattgagacaatttagtccccactttgagtagcgacagtaacacccaaaagcaccatactttgtgtggagagatgaagccatgaagagaatgaggaccttcatgatatttattatattcatttatgttatttcatctcatgaaagctaaacattatgttatattgtattattattattattattatatatgtgtactttttttcaacattaatataatataaaagcttacaaaaaaataaaaatatctttgtaaagaagtgtgggaagaaaatctaatgtaaacaagcactacttttcatggcttctaaatcttgtgaaactattctatacatgcatatggggtcttcccataatggaataaagaaaattagcatactaaaggcactatgggtgctttaaagcctaatttaatatggagtgttatttattttaatttaataaaaatttataaaaaattattaactaattataaaacgtctcatttctacgagaaaaatattaaaaagtaccagtagtgtctaacattcctcttaaatatcatataacaccctcttaaatatcatatcattattagtataataaagtatcgaatttcatataatttaatttaataactccatcaattaaatttttacgaaaaaaatactaaaagatactaatagcacctaacaagctcttaaatatcatattgctaatagtataattaaaaataaagtcttgctcattttaccataatgtatttttcttttcctttttctcttctgcacatcaaaactcatctagactaaaacatgtgtgtggctgataattcgaatcatcttttttctacaaaaaaaaaaaaatttgaataagttctcacctttctttttcacaacattttagataaaaatttgaactatgaccaaaaaaaaacaatattattacataattaatatgctataaaaatctgaaaactctatatataatttaaaaagagaaatctcctcccttatttacatctaaaattacccacttcaataaaaaaaaaaaattaataactatcaaaacaaaaaaaaaataaaaataaaaaattacaacaaagctcaagtaaagcttttaactttttcccacctctttaaccaatttcaaaaccactcatttccccccacgcgccgccgtcctccgatcaaaattacctcttgtcttcttcttc

SEQ ID NO: 227425 - DNA, 3139 bp, Cannabis indica
aatttatgacaaaaaaagagaaactattattaaaacacataaaaaaaaaagtgttccaaaatatcgtaaaataaatcgcaatatatcgcaaacaaagtcaccatatatcgatggtaatcgccaaaaacatacacataatttgtagaaaatgtagaaaacatcccctaggtatatctcgcgacatgtcgacagacgagtcgtcacatgtcaccaactacaaaaatacagataccaaacatacaacacaaaataccttatacacagtccacgatttagcgatatcttcgcaacatgttcgcgacacaagttaaattttgtatgtagaattgtttttaattaattttaacgaaatctagcgacaatattaacaacatcaagactgaacatgttgtagatagaaatcacatgatgttgtgaaaaatcgcaaaaaacatacacagctgctacattttgctatatctagaaaagaaatcgataaacatcgcgaacatcgtcgctaaatgttgataattggcgaaatggcagatcttgaatcttaaacatggaaactcaacccaaaataaaaaaaaataaatctaattcttaaaaattaagcatttaaaatccaaaacccatttaaaatcaagtaaaaatttagaaatataccttcttcttggcgatttcgttatgggtttcttgattatgttgtaggttttgcgatttcgttgtgggacttacgattgtctttggtttttgtggttgaggttttgtcagaggtcgtgggtctcgtcggggtggttaggtttcaagtgggtttcgtctggtggggtggtggagccaatggtggtggatattgtcggtgagagttagagatagagggagggagatttagatgagagagaggataaacagagcgagagaaacttttcaaatggaaagggtatttttggatttaagagtttttggagtattatgttcctacattttctaaagtgaaatattaatacaccatgtaccaattttaagcatgaatagtcaaatttccaaaagaaattctgcagttgggcacgtacccatactcatggccggccagagggtggggcactcgaagcgtaggccccaggccccacaattttggaggctctgaaaaattaaagctaatattatatatataaaaataaaaatataatatatgtatatataaattttggttcaataattttcataaaagaacttacaacacaattggtaagagagggattttatgttgatgtgtgggtgttgggtttgaaacctggctccctcacattttgggtgttttaaaaatttaaaggtattaattaaattttgtaaagattatgtagagtttcaatatgtagggcttcaatgcattacctaaaatttatagcaattgttaggatttttcttaaaaaaaagtacattataaatatttttggtaaggactaaggagcaaagattatatttagtaaatagttttttaaaaattactcttcgtgcaatcaaatagataaaaatatttattgaatactaataaataaatcaaatattttaaaaaaataactaacaagaatatcataactaaaataaaagtatatttattaattattatttatcttcttaaatttaaaaaaacttctaacatatattaaagaaaaataatataatttttaacatactgttgatttttttttttttttacaaaagttctaaaatatatagcacttcaataaaaatgctattaattataatcaaatattacgttgagttaagttatgtgtgagaaaaattatttattatatggagataaaaaaaattaattatattgtgtcaaaattttaataataaataatatctcaaaataaaaattaaataatatttatttttttagaaaaagatccaatttaaatttcggcctctcaacacaacaatgtcctacccatactaggacataatcgtttggcattttgttttgaaaattagattccaacaaacatcaatttcctccaactccaagttctatgtatgaaagttttaaaggtgatgaaaattacatgtaattattatagggcatgtgtgtgtttggttgtacgagtgatgtagaaacgagttgcaggctgcaagagaaacagcaccacgcaagcaaaaaaagccacagttcatctatctgtcccactgccacgtatagaatgccaccaccccaaaatctaatccaaaatccccacgtaatcatatttatatatccaatccaaacaaagaaaagctatatttattccaaaattaaatttctatttgcgtcaccaaaatcaaaagaaattagtacaccttttcaaaaaaaaaaaactatatatatatatgattgggcacttctatagtggagacccttaaaacagacacaccaatgaacactccttttgtcctcattttattggcggttaaatagatcccatattattatgttgttgcaacacacaccagattggtaagaagaaatatttatgcttgttctggactcttcaactgtcttctaatcgctactggtctccagggctaaatgtttgaagatttttatttactaagtaaatacgaccaaatttatgtttactattatgggtttgttttgaggagatatatttctatattttcttaaaagagaattgtattccattataggcattttttttattgtttgaatacattttcagattgtacctattaattccttgcccactattttctctctctctctttttttttttttttttttccatttttcttttttaaaaggatctttcttcaatttttcattagtatgtaattctggaattttaatttgaaaattatgggtttttggatcaattgtataggatctttggtttaatgagtttattagtagttgaaacatatcagattttgttgctaggatggagtcttaaagatttcaaatggtttcaaggaaacatcgagattcaaaaaaatccctccatgaaatatcattctgctaaccaaacccttatttaattatcaaattaatttatttctaaaatttactgaacacgacaacgtgttccaatcaaaacattaactaaaggacacaggggtatacccttctcacagatggagtaatcacatatatatgcat

SEQ ID NO: 227426 - DNA, 2340 bp, Cannabis indica
aacgactttaaaagttcagggagcatgatttggtacatgtcaaagttcagggggcaaaaatcctaattagccttaaaaatacacatgatttgagatcacacaaaagctctatcatttattattttttttattctaattttagagtttttatttatatatataaataaagtaaattgtgccttacaaattatgggatcttgtgcaataattcaagctgcccaatatttaagacgacattatatatatattattgtagttattagtagatatccagttttaagaaaaaaaattaaaataatattgtgttgtgaaaaataagatttaaatagttagttgtatgtgtatttttttttatttatttctattttggtaagtaaaatatttttattgcacaagatgaacaaattgactcggttgctcaaaccaatcaatatcaaccctactctctctctcttgatgaatcaacttcagcttaatatactccaacaatcaacttttatacagtataacaacaccaaaaaggcctgattaaactcattctatacaaaactcttggagtaaaaaaaaaataaacattttatacaattacaattgcataaacaatttgcatctactttcttcaatttcttcgaaagaatcaaagcagttctactcctaacatcttgctgaattccttgacaacttacagtaacaatttgtacactttgaagccaaaaggctatatttcgaaccatccagatgtgatacacgaatgcagcaatagaggcaatatatatacttgtttgcaaaacttagaaattttttatctgtcaatccatctcacaatagtaggaaaactagatcccatacatctccatccaagccaatttttaatcatttgttaaaaaaccttgccaaaataacagctaaaaaatagatgctcaatagattcaacctgaaccccacacatcaagcaagtattaacttggcaaatattaaatgtcattaatctatctcttgtctacagcctctttaagacaactagcagaagaataatatgatgctttggaatggaaagtctctcccaaacttgtccaatccaatttaattaccttctcaagagtacgaagaagagccttataacctcgactgatggtgtatcgaagaaataagaaatgttgctcacttgtaatttgtttaatcttgtctttaattaacatccattatttgcctccaataccaactactctgcatgttaaaagtttagctccaccaattttgatctttcaaatacacactatgtacccatttcacctaaaggttatcttgctttgttcaaatagcctgcacatactttgccaagagctgcttggttctaaagtaataacattcgaaaccccagcccaccttctttcagagacttgcaaagatctgcccaagcgacataccttagaccattgagctcttcttttccttttcaaagaaaagctctacatactgctttaatttgcttcagaatcttctttgagagcaacattatttggacccagttgcaatgaattaatggacattagaactgaattaataagagtgactcttccaacaaaagatatattccttgagctccacactctaatgcgaaccaccatttctcaaagatacatgagcattatgcagttgaaagtctattcgcacaaataaaaatgcccaaatacttaaaaaggcatattactccttgtaaaacccgaggcatatagaactctttgaatttcaacttattattccacgacaataaatttttgacctaactcactaggttgcaagttgaagagaacagttttaatccttgaaacatgaaatagatagatttgaacaatattttggcatccgttctactacagcctagcccgttccagagaaaacataagtaaacgtttatctattagaagatctagcaaataacgatcaggatctagagttcgcgggcataaatctttttatttatagattttataataatatttaaataaaaagatataaataaatatatatatatatatatatccaacttcacaagctaccctttctcttgatttgagcattctattcctagttgcacattcattgtatataatagtatgtcacactgtcctttcctattaatgatatgtgaaagatgattcctataatctgagtacacattggctctcttagccaagcatttttaaatctaaatcttttcttagtagcaacaaaatcaccaatacaggtatcaaggagaataggacaatgatctgaactagaccattccaaattaaggagtcttgccgagttaaaaatgtctagccatttttaatttgc

SEQ ID NO: 227427 - DNA, 2016 bp, Cannabis indica
tttaacggtaataatacgtaagtaatatttctgagacttccttagatacctgatagttatgtgttgtgtcaagttaatatccacgagttattttttattggtatattaaatttaaaaacccgaacaatcagggactgtcatatgtccattgacttgacatttaatggtgaggtacatacgaaaatttcagaaatataacttaagcattattaccgtcaaaaattaaacttagatatttatcgagaattaaactttactttatactataaaatactcaactaagaagagaacaagcaagaggaaacaacacataccttcaactatgcctaaaaatccactaaaattagtatcttgcttcacaacttgaattgtagctccatttagaatagttggatctgagttgacatcttcaattgcagcatctattgccactttagcaactttactaacaagagactcatatgataaaattgccccaatatgtatcacacttggtatggtaatgtttgaattttttgaaacattagtagtaaccccatttgagacaaacccatttgagataataacagctagtaccaaataccaaactgaaaatatcctcataatgaaacttgtgaaaaattacacaactccttattcaggtactaacaaacccatttctgaaacacctgaaatatcaagatgatgatgatgataaattaaaacttaaaaatgttattaaacaaaacccaaaacaatgaaaagataagtttcaagagagaaattaccagaaccagacaaaacccatttgcaaactgcttagccatcacctaatcaagaataaagattaaaactttacactaagttatgaaccagaagttgcagagtgagctaaagttactaactttatacaccaaaaacaaaaaaggaatgaaatttcaaggaaataacatgtagaaaagaaaacccaaatgaacaaaatagtaacttacagaccagaatggttggaaattgaaaaatggagtctttactctttactattttgcttaataagaaagaaacaaaggattaaatagaaccccaaatgagagcatatttcattaagccaaggaagtcaaacttttctcccacatatctcaccttggattaaaagtgaacagagaacaataaaaagagaaactttagtgtaaattaataaaaaaaattaaaagctaaaatacataattaaagtatatacattattatattcatatatatagacagtggaagcatttttattagcaatatctttaatggtgttggcccaaaacagcatttacagaaattttaccaattactatggggcacacacataaagagattcttcttcagttcccactaaaccatttctttatgttattatattattattgtataatatacaatatataatatagtataaattcatgaccagttatatggagttgttctagatttgtttattttataattattatttttctgaaaataacatattcttctagactcaaaaaaagttgagagtgtaatatttcttttaatacccctgaaattgaacttttttgcattaatacccctaaagtttgctaaatttgacaaaatttatataatgacaaatatctatctggttttatatacacattaatgtactgttcaccatacatttcttccaaaatctaatccaaataaatatataaatacatatttttatatatttatttaaacacagccattgaaatccttttccacagcatttggaaacccactatttattattcatataagttattttttaaatatatttatgcatggttttgagtccaaatctcatgtataaagagaataaaatcatataaatagagaatctttataatcacataaactcaaatacaatctaagtacttaaaatataaagctataaattgtttagtttgggtacatcttatctggtacttttaaaaaaaagtgtgtttcagtagatttttttatttattttggcatataaaagaggtttttagt

SEQ ID NO: 227428 - DNA, 5964 bp, Cannabis indica
aaaataacatccaaaacaataacaaaaaataacatacagataacaaaaaatcaacaacaattaacaagaatacaacatagaaagaccatattttctgtaataaaatcataaaaatcataaaaatatttaaaattccatacaactatatttttgtattttttttttttttgttattttttgtgtatttgtgaaataatcccaaaggaatatgatgtaaaatattaaatctataattgaaatatataccaataatgaaagtagattgagcttgttcaaaaaacatgaaagcaaattgagccatttggcctgtttgaagggttattggcatatgagttgagagaattcctcgtcaagtcaactagcatcacaatatcacatagccaaataatacaattcagcaaatggctacaatgtcaaatgtaaaagtaatactactccaacgaaaataattactttctcttctacatttttttccctcctatccaaaccttagtgtagtaaaatttgatcctaatctgtgctgttaatcttagtactttcataagtagatggaactcgacgaagaagctaagattatttctgtgttcgtatgcatctccacaagctaaatgccaaaagggtaagaccagcaagacccgctaatatctgccataaccaataaaattaaacaattcaataaatgaactaaagacttaagatataccgttaattttcaattgtatgattggcgtggctatcacaagtgtaactgaccttagcatctcttccaccagtgatctgcttggattggaaaaatgatgttatttgtcggagacgagatttctggggcattaaaatcacggctgtatactgcttcttgcaaggaaaaggaataattctttgtaatgctaactgtgctgtagatggtgtcagggctttcctaactttggagcggccttcatcttgaatctgcacggtcaagacaatatatatatatatatatattaactattggtaactcacagggaggcatctagaatgaatttattcctctgtatactgaacaagacagttcagtaatgaaattgctgaaactatagctaaactctgaatcaatgaaaggatattaacccaaaactacacaaaggagagttggtaattctataacaaactaataattttagtaagaatctgagaagtagaatttttttcttgacatgcattatcgatcatgtagctgtacgcctcaattagaaattaaccttatcaactccccagttcatatgcaacaatttacaggacatataattaaaaaagaaaggaaaatagatcaatcaggcggtaaacaattgcactgcagcacctacctcaaaagtagagccaagatcaccagaatagacccttgactggtagctgcgtaaaatcctatccagccagtagtaattttcctgaaagagaataagaagattacagtgagactgagagtgaataacagtatcaattcctaaattcaagaaagtactattaatggttgttccaaaacccaacacactaataagagtttaacctgaagtccattttcatgggctctttgctcaatttcaagaacagttgaaacatcttgatctgaaggtccttcctcttggagacgtaatatttcatccaaagcaagatcaacctgtaagcatcaatgaggtgatttaactagcaacgttagaactaaatatgggaagaaaaagaaaactgcagtaccattagcacctaccagattttgctcaaaaaataatataaataaataaataacacctaccagattcgaggagatttctggatcacaagaaaaatttatgcttatatcaccgcgaacgtcaccagttctggaaggcttattaccaccaaggaatacagaaacacctgctgcatagatctacagcacacgagtgatgaagaaagagtaaatgcatggatgacagaaataatgtacttttattattaagaaaagaaaaacataaatgcataagaacctgtccgtgcttgaaacgtagaacttgtgttatttttgtttcaagaagtctgcttaggaacccaacaaaatgaatttcttctacctgccatataattttccaccatcaaaaaaacaactattaatcaaaacaaagcatcttggatcatttataaaagctttaagttgacattagataagagcataccatagttccattctttagttcaacagggaagcatatctgaaccaagcattgtgcttctaccatagggctgtagaccgcctccctgaaagtacaatcgatatgtcaaggaaaccctaaaagaagtctgtgtcaacactaaggtatacgcgcatttgagagattttatcaaggtttcaagtcaaatggtatggagctgcagcttatataagtggtctgggaaaatggatggtcgaatgggagacaatatgaatgtttccttctcataccaatacatgacaattctctaagtaaagagaaaatgagaacaaactaagcaaagtgaagtttaatcttatcgagtcaatacaaccatttgaaaaataataattgtactgtatggttgcattcttaaaaatcctttattaatgatgtaaataaagcatacaaatatttctcattgctttggagcaatagcctacctaattatggttctaggaaaagtgaatggcaagcctctgagatcatcacgattaaaatggagaacaggttcaggaggcttaggtattccaccctgcatgacatacaacgaacccaatcaacaaaattttaaaattaatcacatttaaatgaaatcctagtgaaatttctacgtaccaaatactgcaaaatcagaggaagagctgtagaaggatcaatattcccaacaattacaacagtaaaagtagagggatctttgaaacagttgttgaaatattcacaagctttcaagggatcaacttttcgaagatcttttatttttacaggctgcagaatttcaagtataacaaagttacaaacagaccgcagcccataagaaaagtttaagtcttttaaagtatcatgcaataccctaaagaagtaggagtttccatagttgagctccttcacacgatttgcaaatgccgtgtagggatccctctcttgagcatggactgcttcttctgccatctgcatcactattttcacatcttcgtctcccggtgttacatttgttgtaaaaagctggtagacaagctgccagagaaaacataaaaaataagaataagtgtgtagctagtaagcactttagagcaatataacatgacaaagacaaaaacattagtggtgaaaaaagaaaaagaagaacatttacaagcccaaatgcaacttgcaatataattaccaaccacgttgaacgaaatttgcatgccactcatgtccacatataaacttttgaattatttaccataatacatttttgaactatttaaaggaattgtgctgctgcaaacctgcaatgcagtttccatgtctgagggagaacagtcaccagaaaatgttctcatatatgctccaatcttgtttccaacttcagctctctttccagcaagcatatccataagcattgatggtctataaccatatacaccaatttctccagcaatggtcggcccattgagcaagaaagtaattggtttcagggagttcagacagacctccgtatgagaaccctgtaaacataacctgtcgaatcaaaatatggataagaaatctagactgcacatcaaatcatgtttaaatcattcaaacaatccgagaaaatatatataaatgtaaagaaatattattgcttaaaagggagtagaccttagattacaataatgagtattatgcattgtcaaatggaaattgagtaaagggaaagtaccattaaggataatatgacagagcgataattatagttagacttccttctagcaccatgtagtaaattgcaataaggcaaagggaaaatttaaatggagtttaagataaaagggaagaaaattttgagcatggatgtcactgcatcagtctagcacctaacgctcgtcaagggtatctatcccaatccagcaagaatgaaccaaatggaaagaaatgaacaaaaccaagaaatacttagaaaatcatacaagacaaggaagtacacaagtacctggtcatcaagaaaatctgtacacttgtagcaaacacgcatgccatttgataaaattaattctgtggctccaatgtttggatattcacactgctgcactatctctctgaaaaataaaagtatatgaacaggcgaagaattaaattatgtatggcacactgtagcctgaattctcataattaatacaaacacattggttgacaatgactttcacactacaacattacaacaaattactcaatactgagaaaagtaatactagtcgaacaaagggaagagcgaaatgaagagttttctagatagagtgaaatgagagtaggatgtgaccaactatggctataataattcattttgtttatcaaagatgcaaaagcaaaaatcaatttagctcacagcataaaagttgccatagatctaatgatatgagacactatgcggttagtgagggctcattagtacacatgattggactagatagttagttatgattggattgaaatcgaactggattatcttagtactataaagaataaatgtaaaatcctagtagtcacattgcagaagcaaacatctaatcttgtaaaaaaagaatagaggtggctcactcgagggaggaaacacagaaaatgcagccaatagtaaaaattgaaaaaaaaaataaagagaatagaaaaataacaagtgagtttaccctggatttggttttgtacaaacaatttcttcaggaattttttcttcatcccatggtgcaatttttccttctttttccgcagcattaatcttcgatacaacatctttaagatcatctactactgcagaagctcgtggctcaattgtcttaattacacagctacatgatgtttgaagcttctctgcgtacttggatagatctgatgccaaaatatctacaggtggagaaagcataagtatgtgtttatacccaagaacaagcatttgctacaagattttatttagaaatgcagcaaactcacgtggcaaaatagtcttctgaagttgagcttcatactcaatcccgattacaggttcatttcggagaaaatgctgccaaaagaaatattaatgcttcttgtaaatgatatgcatttggaaactgttcatgtactttgaaattaatcagatatacctgtaaatattcatcccgcaagcttgatgattgcatttgatcacgttccaaatacgcagattcaatctctgacataagctgagatcgaactatagacacttctcgttctgaaaatccgtgtatccgtaccctggcgacctgatacaccgatgtcattaacaataaaagagcacacattatattatataataatatatttgttttgaaaggacgaaatcttgaagtaaatcaagaatacctcaatcagcattgatttcagggcttcaatggtccctcccttttttgcaagatgatgtcattatataagcctttaatggatcaaccagaatttctgcagcagctgagcatgagaaatgaggtggatcctttcttcgagagattttaaaaaaatctctggttcagagcatggagaaacatggattctgcaagtaaatctttatagtccctcactgtcttcagttcacccacttgcaacttatagctaatcattactgcagactgcaatatgcataacaattaaaacacacaagatccaaatggcatagttcgagatataacaagaatgcttctatacaaaagtaataaagcaagcaaataaatatagatattcatgttgtactaagttactaaccccagcagcttcagattcaacaaag

SEQ ID NO: 227429 - DNA, 2172 bp, Cannabis indica
aaatttttatgtaaaaactatagacattaatgtatgtagagtcttaaaaaagttaaaactagtgtgagtcattaattgtaagtcttgaaactatagacattaatatatatgctattgtaagtactaatcaattatcaaagaaaaaaatgagggtggcttaccattaacgttattcctgttgaagagatttaaactaaaaaaattgaggaggtagttagattgctcttgaagctccttttgttgaagagtatggaagcaaacttcttatgagggtggcttaccattgatgttatttcttcttaaagaactctggcagcctactgtgtttaggtttgtgtgttttactcttccatccgagcattaagataatggttgatccaggccttagtgcgttatttgaagactcagttcaagtatctacaaaagacattacatgtgatcttcatccaaaagaagttgacctcctgaaggaaccaaatcgggttttgttgggtaaattagtttgtcataccaggctggggaagaaggcaatccaaggatcactaaacaatgcatggagttcaatctcgggttggagctggaaggagtgtgatgatggtctcctgcagttctccttctagacaaaatttgacgctgacaatgtcttaatgagacgcccatgactggtgtgtgggtatcttttggtcctgatgccatggccttcatggttaactacagtagaagtttgtcttgaccgcaccccccatttattggaaaggtttcccctgtctatgaactcccaaaatatatagaaaggaactttgaaaaaggttcatttgggatgggaactctgagattcagagccactgttgaactatctaaacccctattctcaggtttcttcctaagaaggaaggggattaaagacttgtggatccaatatcaatatgaaaaccttccttgaatttgtttcaaatatggagtcatgactcatgagcagaaattctgttttaaaactcctatggtgattaaggatggtaatggagctttcttcccaatgtatgggaattggatggatgaggatgcagttgaaaggtcaccattttaacaccccctacctaaatggttcaatgaatggattatgcaaaagatggcagcaaaggacctgaaagttcgtcatcgactccaaaaccaaagaatctcagattatgtggctgaatcagagtgacgtaagttgcagttgcaatatccaggtaaacagagataagttgaagtggtcattgaaaataggaaggcgatcggggaagtcatcttcaataggttcctgacggtgactttgccaaggatcggtgaagttaccccttttgggaatatagccgaaaaatgtgcttgaaaaggtcatcccaatgaagcctattgtggtgactgagacagaacaggatggcttggacattgttaatcagaaaaagacagtagacatgcctaacatgacaggggtaaaggtacttgttcaaaattagaggctagcattttgggcgttaacagtggagcagagatgcttacctgttcagaccttcttctagaggcttctttgtgctctgtcttgagtacttcctctgcatccattaccattttggacaaaccggtgtaatgaccgcattttatagtatggattagtaaaggcaattagcactaattattgatatttttatagttatttgagaatttatctaattgtgggtcccattattaaaagtgggcattagagttataatttctcaattctagagattttattaaactgtaggtgtactatttaagttatatttgaaatatgctatttttaaaattttttgctttgcgacaacaaaaaatgtgatggatggctattttaatcacatgggtaagtctagaacctttttgttagtgggtttaatgttggagaaaaatagaacaccaagtttgagcggggttatgatttttgaccattttacccctaggcttgaattagctttaaattatgcaccaagggtattttactaattttatgagggggattaggtggtgtttattagaacatgaaagatgcccctttttgtgctgaatattgagttgtataatgcatttttagaaaaataagaaattataagaaaatcaaaaaaattagagaaattcaacctcctctctctctct

SEQ ID NO: 227430 - DNA, 2323 bp, Cannabis indica
tcattatggtgggttgtggctaaagaactgaacagaggatggtctaatgtatcgtatcttccatcgcaaagatcaataccaccaacaaaactcacaatccttctcttttgttgagattgagaccctatttgatcaagtaactcactgtcaacgacaacagttttttgatggtgagtaaacatggtagaggtctcaaatccctgaactatgcttctttcattatcaggatttcgagggcacaagaaacaatgtacatttgtgttgcgaaagtattcctcagtttcttcatcatgtgttgccattaaaccatcctttttaaattccataagagatgtcctgtcgtcccagataagcacaagaacagagacaccttgatcagctttcctcttaagaagctccccaagtgtaatactatctcctcctcctggtcttggcctacttgggtctcttatcaaggttatttgagtatagacagaccatccagttatgtaaatcaagtgtttggcattagtgattgcatcaaatatgtcttcccaacatctttgaggctgatataactttcccaaagatgcagccacatctgaatcgaaataactcggaacatgggcatcttggtaaagagttactttgcaaccttgtctttgattaaagaatgttctaggaactccctgaaattgggggtttctaattcctaatgaccaatttggttcatcattggctcgaataaattgcaatgtgacacgaatattcgaacctgttggttttcgttcttcatctaagattggaagctcttcattcaccatatgcctagtgaacatactttcagaaggtaaatatgctcttccaatcaatgttgcaccaacaagctcaccattttttactgtgaatatcaactctgaagtccaatgggcacaataaatgtaaaatgactcgttccaaatcggatggttggtatttttttgtaccatgctggtacgtgccaccctggccttatctaaatcaactgttgcatagagttttgttccaacaatcttcacatgcacatatttatacataatataatagtgtagttatgttagtgagtttatgatattgacattaattaatataaataaagcttaatatgcacatgtatagttatatagtaataatcttctcgcactaattaattaagatttaaagataaatttgtatgtacctcaggtcggcaaagtatagctttcttgactccagccagtaatccttttaggtgacttgcgtaataaaaataaaacaccaattccgaaaattagagaaaataagaagaagaagaaattgatcatcaatataatttacagtgtattaaatttagcaggaaaaataagttgttcaattggcaagaaaaaaaattcagttatatttagcatctcaaaatggagagttagcatttttttatctctaattattggaaattaatgtgtcttagtttgccacataatataaaccttactttttttttttttattgattatttagaattttgccacccctattattgtgtctctaaattttttaacaaattactatactcacgtatataatttaaaattaaaagaacaatatatatatttttaaaatatcatttaactaaaaattaatttaataattaaaaaaattacgtaaaattaaattatttttttcaaattaattaaacatgtgacattgacgtgacactgttgtaacaattatcgaaacatatcatcattttgtgtttgccacgtgtgatgacagaagaaacaatttacaaaagtatgaatagtttgaagttcatttttattgggctggaaaaaatcaaaagacacaataatatacataaatcatagttcaagtaacaaaaatcctaaatatttttttttatttatcgattttgtcactataatatattaacgttttctatgaacagatttttattaattgttttacttattcaataaaaatgaataagtgactttgtggactttttgagttaatttgtattttgtaaaaattaagaaaaatattgttttttcatcacaaaacttttacttttcattagaaatggtacaattattatcatagtattatattgacatgcattatagtacctttttttttttttttgtaataatgcattatagtatattaatataaaaaactactactacaatgttagtctttagtaggcagttttttctaaccccatttataataagggaagctaaagggtgtgaaaatacccgctatgttcgaaattgacatttagtaggcggtttttttgataaaaaccgtaggtataaaaattgct

SEQ ID NO: 227431 - DNA, 4562 bp, Cannabis indica
tgttggattaaaaatcctttgtgggcacatatgtataatgtatatgctattataaagtgtgatacaaaattaagtgaccaattatgttatgggtatcaaaagggtattaaagtgtcatggaattaatgtgtagataccataagttaatttataatttgttgaggggccaaattataaatacccaagagttattctaagatgactctataaataggtagtggtccccaagaaacactagggttctgtattctctccttccccatcagagaaaatactctagaaaatagtgtattcttggaagatcaaaaccttctctgcaatctccaacaatggcttcaggttagtgcttccgctcatattttatcatcatcttcttctttaatttagcaaaggttttatagatttatgatttagggttttctatattaaagcactttaggaatatgtttagatctgtgatttatatatttcttaagtgttttataaaccctaacatgttgagcataaattatgaggagatacattgttgagcatgtataacaagaaacgaggagatacattattgagcatgtataacgaggagatatattgttgagtgtgtactacgggaaaatacattgagactgtattgaatttttttttctcatttgcaaataagaaaatcatttaatttcaatattttaaaaatgcaagaaaataaaaattgatacatttatattttattacctctaagttctaaccaaacataccttaagagaatttgacttgtatgtagatagatttaggggacacaaaagagagaacaaaaatatgtacataaaatctcaattcttagatagatggcttctatgggaattgaattagactcaattcttataaaatctcttgaagagcataaaagtgatcatgagaacaaaaatatgtacacaaaccatatataatactagtttaaagacatggatattatctagtgaaagtaaatatatttacttacacagatgagaaaaagaaataataagtgtagatttttatccctccttgattattatataaagatctcaatgggtttattggcccaaaaattccacattatttaaaaatttctaaataatattgctttctcatctaaaaaatcatttatataaaagcaactttattacaatggaaaaaaggtacattactagaacataatattgacaactaaaaattgaagaaatgatgatcttcattttgttgtgattgtgtgaagctattgaaattagaatactcctcttgaaaatggggttctcgtacaatctcaagataatcactaaaattaggattaggataagaagaacaagaagttgaagaaaacaaggcaatctcagctcttgtaatagccaattgagtctcaacatttagtatttgttgttgtaactgagaaataattccaacacatccataaactcgattatccattctacattttgcctcgaaatgcatagtatctgctgcttcactgcgcaatttcaccggtaatcgctataaaagaaaaaaaagacttgttatttttgtcattataacagcaatgaaactgaaaacttactagttatagtaagcaccttgagcattttcccgacattgctggccccgaaaattttatgaacgaaagaaaatcgttgaggattgttggaaggaaaatatggagagaaaatacaatctaaagggcaactctttctcaaatacttacaagcagcacaacgagtatgatgagatgatgatgatgatgatgaactcatatttataaacaaaatctatgctaaagatataatatgttattgttagcctaaatctttttgaaaaaaatctaataaaagatttgagaatctacttagtttgatttgatttacaacatatagtttatatatagattatatacatctaagtaacggctagtaaagtaaaatgggattttgactaaaattcttgtgtttaaaaaggaaagtttacatataatgaatgtaaatggcaaaataattagcaaaaaaacatgagagatgtcatttttgtttgaaatgacagcaaataattttaaaaggatttgaaaattattcagcatagaagttggaacatttgttttctttgtcaaaataacatcaaataatagtgacataatcatatttctaaatagattaaatttttttaagaaaaaataaaacaaagtcacaaagagtaataaatttcatttgatcatacatttgacaatgaaaagtcaaatctttgttcatttgtaataatcaaacatgagaaaaatgcccattaaaaaaaaaatatataaacttgaactctttttcaatcttattccactataacagatcatttcttcaacagaaaagagaaagaactacttacaaaatcttcaagggtatagaatttggccggccaatgcattattgacaagcccaatcgatcatcgtcattgctccataatcagacttgtctgcatagttttgttgtaaattaatcatctccaataatgtgatggttttcaccaaataagagggctaatacaaaatttggtttaggtttaaaatgcatttattgagcttgaaaccaatgttgggatagataagattacaacgagaatacatcttgtgccctaaataaatgttagacaagataatgtaagcgtataatggtttcggttccaagctaaacatcttctttgcgaccctctcgccgagtttcatgtccatccaaaactaacaagccttgagtaaagctccccatacaacaacatttggtttaataggcatctctttaatgaactttgaggcttcttgtagacggccggccagactgcccgagtaggtcaactacacaagtgtagtgttctaaagtcgggtttaattcatagtctttcctcatggaatggttaactctcattcgggttaaaccagcataacgtcaagcacacataatagctcaacaaaagactaagttaacatttactcgcccttgagaaaagactaagttaaactaacgaaaaagaaaataaacaacgaacacataaaataaattactattgtaatctatactacattattttttttcatgaaatcttaattacaaatttttaaccaaatttttagcgtaactgcatcaacgttaaatcttaaatttaaattaggaaaataaataatatgactcactttccaacccatgcatgaattgttcaaaaagtaacattaaattattaaatagcaaccgatgttgattgttcattaaattatatattcttttatatagaataattaacaacttttacttttaaactctcgacaatactgattttgcctcctaaaatatacgacttgttattaattcttcctacaaacttttacatctacagaaataaaacaggcaaactttaagcaaacttataatataataagaacacacacataccttggaagttttttcagcaagaagaataccagagttagaggaacgatttcggccgaaaatggcgaagaggaattagggtttgaatttgaagagaaaagatgggagaatgaggaaagtgggtctgatggggtatatatatagaggcattagcggctgactattcgcggcggaatctccgccgctaatagttaataatttttttattttttttattattagcgacggactgtgtaaggaatgagtcgattcctatgcaatccaacacactgatctaagaacaattacaaaccaatttgaacacttagaaaaaccgtgagttgtagtgctcttttattgaatcaatactaatgtatttacaatgtgtgtctaaccaattaactagttacaaatgaattggacaaagctatttatagctttgtcatttggtgtcaaaatagacagttaacaaacttaactgtcaagtgttaaacttaacagaataaccgaccatcaatctaacaatctccaccttggttggaattctggtaagactaactctaattacaaacaatagacacaaaaagaactttaaactagcttacagacacttgacaaggatcactgttctagtttgtaatcctgagaagattcagacaatgtctaaactttgcagttggaagagccttggttaacatgtctgaggcattctctgcagttggcacttttgccaatttaacctttccttcagctagaacatctctgatgaaatgtaatcttacatcaatgtgtttagtcctctcgtgatacatctggtttttgctcaaatgcagagcactttgactgtcacacagtatagtgatggctccttgatttatccccaattctctagtgattcccttaagccaaatggcttcttttacagcttctgtacaagagatatactctgcttctgtagttgagagtgccactatggtttggagattagctttccagcttatagtgcaactgtttactctgaaaacccagcctgactgagaccttcttgtatcgatgtcacctgcatagtcagagtctacaaagccattcacagcaagttcatttccatcagggatgtacattaacccaacatcagtagt

SEQ ID NO: 227432 - DNA, 5859 bp, Cannabis indica
tgattaaaaaaaaaaaaaaaagctatagatgcactagcacgtgtagccaaaagttccgacctttttacctctgcaaataagaacatattcgtcttgtcattgaagaatctaggctgccgacaattctcagtctctacactttcagaaataaaggtgtcaaattttacataaaattaataaaattaagtcatttcttcagcacccgtttatttaaaatatttatatacgtatctttagttactagttggctgtgatatgatatataatgtgaagaacaagcactagcaagataaatcaaagggttgttgagatgtcaattagaaactggtaacagcacagcttggcaaaattttggacatttgggattaagaagattcttaatgtcgtttgtgtaattttatatacacaatatttatttattcttcaagtatattcaacgtaatagttgttgggtcatctttactctaaacaaattccaaccaccatagcttcttgaagacccagcttttttttttttttttttttttttggtaggtaaaaagcttgaggacccatttgcagttggtgttgtaccgttgagtttcttcacaataacttggttatttcgatctgggtttgtggaaatcgacttggcattggtcatgggtattgttctgatttagcttttttgttctggaattgggtcaaaagagaagagcttcaccatgtcttggaagaacagaggagtagagtcagcttcaaagggtgtggtgtctcggaaatggactcttttgctttgtattggatgcttttgcgttgggatgctcttctctgacaggtaacttttcccctgtaaagcttgaaacactcctttgctcttccaatcaattgttaagcagcctagaaaatttgggattgttcactctctaatgtacaagaaaaatattttgattctttgcataaaggatctgtgggttttagagaagatattgacctattgtctatcgagtataggttttagctgtttaggagtgccatgagtaatttgggtacttgtagtttgaccatgaagctggttttacggaagcttttctcactgtcttactcctctatttcctgttctttatggaccttactgtacaatcaaatatagttttgagtttatggttgatcttaaatttgcacagaatagtcctaaactattaaagtttagctggacttgggaacttttatggcgttgatgtttaaattcagttacacctctaatttagatgcaatagaaatgtagttccaaatttttaacacctgtataattttgttttggaagctttaaatttctctggtttctttatttttatgctagttctgttttttcttttgctggcttctccattttccaagcacatgaatatcgaaagtgttataaaatataccatcacatttatcagaatgatcattacgaatttacgatgatttcattctgtggccttgctttggtttcttcttttttatgcttatattttctcctatggaatttgaatacgatctctcattcttttctttttaactctttatgtgttatgtcttctccaaaacaaagaactcagtgccctgtgtttgccttactgagtaagctatttggtttgtagaatgtcaatactacctgaggcgaaaagcatatcaaggacaagggtggatgatgaaatgcagaagttggtttcaggttgtgatcccaaaattgtgagtattttatttttattgcttggtttttaagtgtgttattcttcattattgtgctctgacatggtcatggttagtaacttcctgatttgtttatgttttgcttacttgaagaatggagaacatgaagccaaggacatttatggagaagttacaaggactcatgatgctatacagtaggccaactattgtactaccaatatttatatttctactaaaacgctcagatgtaaattatttatgttactttcaactgcagaaccctggataagacaatttcaaatttagagatggaattagcagcagcaagggcagctcaggaatcaatcctcaatggctcacctgtggatgacaacctaagattatctgaatcaataaagaggagaaaatatttgatggtcgttgggatcaatactgctttcagtagccggaaacgaagagattctgtccgtgcaacttggatgcctcaaggcatgtggactttaaatatctatatattcacacttagaagcatgcatgtttagtacactgaatgattttaatattattacttttctgaagaatctttttattttgtaattaggtgacaagagaaagaagcttgaggatgaaaagggcataataatgcggtttgtgataggtcataggtaagtacttcgtgagagctaaaacctacttcagttaatgcattctcgaatttcattgtaactttcttttttcaaatttttcctactttagaacatacaacttatactacgtggttagaacttgtattgtttctccttttacctgtcacatgacaaacctcacaactttgaaatatagcattgttctagtgtagaattgtcactttctaatcctgtacttatcttttttctgttggtagtgctacatcaggtggtatccttgataaagctgttgaagcagaggatcaaaagcatggtgattttttgagattggtaaaaccatttttcttctaatatgcttaagtaacatatattttatcttcgaactacaaccttaaacaagtcatctttaaatctttatttgtattatggttttagagtaaatataattaaaaatcaactaaccatgcgaatgttttgcacaaatcatggaaacaggagcatgtggaaggttatctagagttgtcagccaagacaaagacatactttgcaacggctgttgctttatgggatgcagacttctatgtcaaagttgatgatgatgtacatgtaaatataggtattagatatgatatgtcataccttcctcatggtgctccagtgaatgcttgtacttttcatcatctttccccattttttccttcactaattcatttttggtaaatttacagcaacacttggtgcaactttggctacacatagggacaaatccagagtctacattggctgtatgaaatctgggccggtcctagctcaaaagtgagataatgctatgtgctcttaaagttacctgtttcagatcatagcatgaatcatacttttacttactttccctttctttttcataatcagaggagtaagatatcatgaacccgaacattggaagttcggcgaggatggtaacaagtatttccgtcatgcgactggccagctatatgctgtctcaaaagacttggctacgtacatatcaattaaccagtaagttgtcagtctgctgcaagttgattttctttttcttttcattccgtctcttaacaattctattactttttctccttgttatggatcatctaggcatgtgctacacagatatgcaaatgaggatgtttctctgggatcatggtttataggattggacgtggagcatattgacgaccgaagattatgctgtggaacaccacctggtaatctcatattttcacttcgtgatttataaattataaaattttgagttctaaggaaatttgatgagaattaactccctgattgactcatcttttaactaactatttgatgttgttaaatggaagatagaaaaacaaaatctcttgtgctgtagaaatgaaacaacataagttttttactcaaactatatatgtgtgtttaagtaaataaaataaaataaggggacagtcctattataatttaataattttaaatataatattttgtgctcttctacctttttttctaccctctccaatcaaccccttgtttttaaccttttgtttttgtctcgcgtatatattctttccctcgttcttttttttttctctgttattttgatggagagaaaattaaagtggaaagtaaaagggagaaaaaagtgagttgttgtggtttatgaagcggaacaaatgtaaaaatattgagttatttataagaaacatgagtaactccacttatcactagaacctccatgattcttgtcatgaaccaaattcctaggggctcaagattggtgagaaaaaaaaagtctatcttcaagattggaacaagttttaattttaaagtagaatcccatgattcttgtcatggttgaagaaaaatggagatggtgataaaagtccgaaaaataaaaataagattgaacaaaacagatatttcactgaagaaaaataaataaataaataaaatttcctttttttgtccatatttttagtatctcttacattattttttgtcttgtatttatctttttcctagtttttttttttcctgtctcaccgtcttcacttttgagctatgaagaggatgtttttgcatttgcttctttaaaatatttgcacacaacactcacaagaggggaaaacatgaaaatgaaattatgaacaatgggcattggcttgttgcatgtgtaaaaataagatcattactaatttgaccaactctaatcttaccacagattgtgagtggaaggctcaagcaggcaacgtctgtgttgcttcctttgactggagctgcagtgggatttgcaaatcggtggagaggatgaaggaggtacaccgaagatgcggggaaggcgagaatgccttgtggagtgcagaattttaaagtgaagcccttctgtctcctcctgtacaacaaaggaagaaggatcgcctatgctgctccttctaccggtggaacttgttttgtaacatgtccgtacagatacatgtttttttggtaacaacttacaagtgtaaaatgagagctaaaacaagcttgaaattgttgatgtttctttggggatttccgctccagtttagatgagaacacacaaaaaggaactccacaaaacaaaaagagtgtattgtagtgagaagaaaaaaaaaattattctttttttcaagtgtttgggaagagacattttgttagtgtgccctggcatgactgatgaaggtccacaaacacaataagtgccaccatttgcgtgccatttgttccttaattttaaatataaaaagaaaagcagataaaacctttttgtagggtttagagttattttcagtcttgttgtttttcaggtttattgtataactaaatgatgatttatcattatacaatatgtcgattttagttacaattaccattttttttattggtctcatgtataatgacatattccttcccgacaataaaagggggaattatcaagaataccaaatattgacttgttattttttcggggataatagcggtaaagctatttaaattttatatttttaatacttaactacgaaattgatattttagaggtaaaattacctaagttttcatttcgttttgctctgtatccctccgttcaaaaattacaattaagtgtcacagtgaactgtttacgtgtacacacttgtataagtgaaatttttagtggcttatgtaatattaattattaaaattttataaaaataatttaaaaattatgaaaataaaaaattatgaaaaaattatttattttatttttgctctctctttttcctttttcttttcttcttcttagctgaaaaaatcctaacacccagccgcctaccccatgatcaaatcttctctgacccccctctcatacacactctctcacagtgcacaacgccagccttctccgaccaccccatgccagatcggccacagaactaaacctcacgacccagaaaatttcgaccccgatttgccctcttctctctctccttcg

SEQ ID NO: 227433 - DNA, 3897 bp, Cannabis indica
attattcttatatagatgtatatcttgttaatacgggacttataaaatgtataactaatataaaatttagagattaattttttataataaattaaaaattatttttaaataaaatattcttaaataaatgttctactgacctccttttgtaaagagatgtatgaaaccactaagctatgcctataaataaattaaatattttagaatttcaaataaattaggtttttattttatcattttaatttttacaatagctattcattagtaataactcaatgtgtggctatatagtaggtatatataaaaggccataaacatgtaattcgcacataattgccttaataatgcgattacatatatttttgtaaaaactagtgaattttctaattaaatttattttatttttaaaactcataaaaagtgcaaggtttgtatcccatcaatttttaaatagggagcccccctcccctattgtattgttagggacaaatcactacaatgtaccaccctgccaaatcgaatagacatccctaagcccaagtgagttgaccaaccaagctcgtcgagtcattaaaccaaggatgctggatggagtggtattagacagaagaggccgcgtggcaaatgtagtcaactagaatcaagccaacaaacctctgtctgagctcgaactaagtttgcataaaattcatcttttaacatgagctcgaagtggttccccatctgtattccaaacaaggaagcaaatgataagtaattgtatgggtttatcaagaatcattgtgtttgaaaagttggctacattacactatcttttttgcttataaaaatgctaattacacaatactaacctgtggtgctaagttgatttagtattgctctaattagttatttcctgatctggtatgaatttccgggagatacaaaagcataaaggagctagttgtcgggggaaaggcttgtcggttcctaactctggatgggattttcatttcagatgacatttgagagatagggagatcccataattagtacgcttgctccaatttcttgaccagaaaccaatctatggtttgttagaggactatagaatttggtctccaggttctaatggcattttaccttgtaagagtgcctttcaaagattagtttcagatcagcatgtgacaggaaaaatgggctaagttggtttggaaaagttgtgctccatctagagtcaaggtgtttggttggctgttaggaatgcaaaaagtgaacgttcgtgaggtaatgcaaaagaggtcatatcaggcactatctccggcctggtgtgtttgctgtaagaatgatgaggcatctcttgtgtccatttagccaatatctaaaaagtagattactgaaagaatttggtttattttgatacatgccacgaagctgtgctcagctcatgtcttggaagataagaggagggaagaggtctgctagactgtggacagtagcagtattggctattttctgggcagtttggttagaaaggaatggcggaacttttgaaaatatagaaaacaagaacgaagacttgtgggataagattaaattttggattgcaacatgggtttatagaacaaaagcttttgataacttttcgttacaagacctacttagagaaagtggatgttatactgtcctaagacttctccctagataagacatttactctgttttattgtttttgttttacttttctaactgttacattacttttgttatgttagtactatggttttcctccgccacaaataatggtcccaaataaatatcggggaggtcaattcttgattgacctttgtctctttttccaatatatatacatactatttatatatatatatatatataaatatatttaaagcattcccgaaaataaaggccataatcttcttagggacagacccaacagaaatttcccctaataagacaggatggcaatgcttgaatcatgctgcaaccccaagatttaaggagttgggttgagcttttattacaagagatttaaacgcttaagataaacagcaatgtgttttgatcacaaagctgatatgtctaacctcaatgactctgccgctgtccataactatgattctgtcagcagctttgattgtagagaacctgcaaaaccattgccaataattgtcaatcacataaaagatgtcaaagcaggatgagagaaatgagaaatttacctatgcgctatgacaataacagttcttttggaattcaggttattcctgaatgcgtgaataaccccctaaaagataaagagtttcatcaaagtgagcaagcagtgttaataaacataaaaaatgttgaaacaacttgccttcacataatgttcactttcagaatctagagcactagtagcttcatcgaggatcaaaatagcagggtctctaagaatggccctggctatagctattcgctgcttttgtcccccactgagtaacttgtcatcaacaagggtttcataaccatcagggaaagatgagatgaaatcatgggcatatgcctgcttggccgcccattctatgtcttcctgtttaatttctctagagcagccatatttgatgtttgacttcacatccatatgaaacagatggggttcctatctaacaagagaaaattagatgtaactttataggctgccaacaattctccagctaatttgtattctaacctgttcgaccatgccgacttttcccctcagccacctaatatccaactctttaagagggataccatcaatgtaaatctgcagttcagttgcacctttaatacgagagacaagttttcacattcaactcttacagtgttctttacaggtcacacaaaataaaactgaggttacctgaccactgatgggctcataaagacgaagcaaaagattgattattgtgctctttccactaccatttgcgccgaccttggaaaaatttagaagcaattagtccgagtgcttttgtgaaagcatcatgtagaaaaacaatagtaaaaactaaagataattcatacaattgcaatgacttcatttgcttctatagaaaagtttacacgatctagaaccggtacctagttaatgcagaagaaaaataaaaaatttagtctccaatctggaaagaattacaaaactaataccaatgaaccacttaaagaatcaagcaatctaaatgatatacttctataaagacctaagtctctctttctctaaaaactaacatccatgtattcgttcaaattattctcattatgtgataagaggtatagcgtactttcattctcgaagaatagcaaaacgagacattcacaaactgaatgtgtcccattatcttctgcaatttctcacctgtagacaagggaatgctcattaacaacatctgcaatttaatgagtatcaatgtggtcgacttctagattatagtttgtataatatatcaaacaaggaacctgaaaacatgttgcatagtccgaagtcattaaccagaagaatctatgaggtacacagagaacatgccttttgatgaaaactgattactgggcacaagattcattaattgaaaaacttcctcacttgctccaactgactgcactaatgttgatacattgtctgtcaccctccaagttgcatatattaaccattcacagtacaaaacatacttggtaagatgctcaagcgttacatgaccactaaaaattgacattcctcccaaaagaactgcaaaaacctgtaaagtgtgatgtttgataaactggaacttagattagaactagtttttatttttgatgcaaagattagaactagttaaatacaggatgaattatcctatatattacatatacaacacctttttagagtacttaaca

SEQ ID NO: 227434 - DNA, 1384 bp, Cannabis indica
cacaccttcgacatttttgcttcgggttcgcctgagattggtcgccgtggttggtcggggttgagcttcgacggcggtgggtaggtcgggttgagcgtcgacggagatgggtggttgtgagagggatgggttgaacaatttttggctgtgatagatgggtatcgtgggggacggttcggctgagcaagaggaagagagaggatgattgtttgaaatgtgaggggtagtttaggaaaattagaaaagttggcatataggaacaattttaataactatacatttaggaaaaataaaatggcattttaagcatagaatttcaaatttcccaattaaatggatttcccatttaataaaacctgtccagacatgcacaacattcctattatataccattcattacctttagaaaattaaaatagtaagtaaccaaataaaaaagaaagtacacattattttgaacttttaattctttctcagtttttcttttttaaattcttaaattcatcaataccacactattagcaaaatattcctaaagactcggccataactaataaacttacttctttattcaacattctctcttttaaagtgatgtgtttacaaacactagtttaccccctctcaagcttgaccttctaaaagacatactctaagcatctttcttagtttctaaaatgtaaataatttaagaggcttcgtgaatatattagcaatttggtcttcacttctgcaataagtaagatcaattatgtcttccacagtgcactctcttaaataatggtacttcacatcaatgtgtttgcttttaccatgaagaacatgattttcaaaaagtttaactgctaagctaatatcacaataaattatccctcctacttaaagtgtaactcttcaagaatcttcctcagccaaataaattgacaagcactagttgttgctgctacaaactctacttcagttgttgataaagagacaattgtttgcttctttgaagaccatgaaactgcttctgaacctctcataaaatcatagccagatgtacttcttctatcatccaaatcctcttgcataatcattgtcagcaaaactaactaaatctactttttctcccttttggtagaagagcctgaaatcagttgtaccgcacaagtacaaaaaaattctctttgcagcaagaacatgtatctaacttggacattccatatacctactaataagactcacaccatgcattatatctgggcttgttgtcaagtacatcatacttctaactatttgcttataaagagtgttgtcaatcttctttccttttgaatctttgataagcttcaaaccaacctcagttggagtgcccacaagattgcaattcttcatttggaac

SEQ ID NO: 227435 - DNA, 1619 bp, Cannabis indica
aataaatatactcaaagatgtttccctttcatttctttgctgccaaggctgagtagcgtagacatttggatcttcagtagtcactatcatataagtatatctaattttgtttttcagtaaatgagagtgtatgtgagtggtcttgagtatttggtaaatatatctcatgaaaaaacaaacaattatgtagcacaaaataaaaataaggtgcttgggtttgatctgaggaaacttatagagtgagcttaatacttaatagctcgaaggtttactttctcttttaccaagatttaataaccactgaaacaatttgtcagttgaggctagctcaactggttatgatttagctttcagaaaaggctagtatttactatgtccagaagtttataagccatctatcaaacttgcaaaagcaagcaggaatgcacaggcgctctgcatgcacacttttaatgtattgcctagtatatagttattgttatttcaaaaccaaatttgaagttttatagactcttggtgcctggctgtggtgtactcgttctctgttatggttactaatgtgaagatatactcttaaattcttaatggtaaacgattgtgatagcatagtgggtgttagcactttttttgtttctttatttcatcttgtaagatcaaatgttttaagatttaataagtaattactgcattgttaaagaaccttacaaggcagcaatgtttctcgaacaggtaccatgtgccccgttcttggttcaagtcatctggaaacattctggtgatctttgaggagaaaggaggagatccatcaaagattactttgtcaaggcggaaagtaactggcctctgtgctcttgttgcagaggatcatccttctattagacctgaagcttgggagaaagaagacagtggaagtaacagaaatgttccaactgtccacttgcaatgtcctgagaatacccttgtatctgctgtaaaatttgctagctttggaactccttcaggaaactgtggatcttataccaagggagattgccatgatcctaattccattttagtggttgaaaaggtaaggactgcatcaattccttttctatatattttaagcagtgtgaatagtggaattctagaatccctttcactgaaagtacaataaatatacaattaaggtgattacatttacaaatgcacctagagtttcagaacataatgccacaaaataagaatacttgcatacacttcaatatatggaaactctgttgtggtggcctcagtggttaaaaacttcaccctcttatagttgaaacatcattgtattttatgaatcttgggcgtgctttagtttgttaattataaaatgttttaatcggttgtgctatgtattattttgtatacttatggcctattttgggagatatagttaaattttcagagcaacttttttggtgttcatttcatgtttggcagcttggaaggaagaagaccaacaccagtgagactcatttgaactcaggtagcgggattaaccactctgggttaaaaaggcgtcagaaagttctttcagtagtatttctggtacgttgttatattctttctttctgcaacatgttttttcagtgtta

SEQ ID NO: 227436 - DNA, 6482 bp, Cannabis indica
actcactgtcgttgactaaaagcgaggtcaacaataagatagcatattatatagtgcggtggcacaagtaattatgcagggctatatcgtatgctataagttgatattatattttttattactatcttgttgggccttggttcattggttctctaatgtgcaagcaaatgtaaagtagtgtcgggtcaactatgagtttgagggcttgatgatggattgtacatgttctggccaggctaaatcacaagggttgggtcctatatgggcgattgtatagaaatctcattttgttgcttaggtcggctaatatgtaaaccacttgtgatattttgaaaagaatttataggatcctagatatgtaattatattattttgctttaagctaaaaattattattactactataagttgttttgataaataagttatttttttgtttattcacttggcttaatcggcccgattaacatgattaacacaatgtaatcacgacacatgacgttcttttaattaaggtgttacatcttgagtgattccctttggtttgagatactatgaaatcatgttaaaactaaaatgtgagcactagctttgatttttggctattttttttaacattggttctcttgtcacaccatttatttatgtaatatagatgtagtctttgttccctcctagattgcatccttggaggtctttagtattctcttggctgtgctgacaacataggtagtcttgattatctcctcgacttcacaccaagggaggcctttgttaaatccttagctttatagtgtaggaggcctttgtcaactccttagctttacagtgtaggaggccttcatcatctccccagctttacagtggaggaggccttcttcatctcctcagctttacaaccgaggaggtcttcatcatctccttggctatgcagtgaaggaggccttgttcatctcctcgtctttacagcgaaggaggtcttcttggtgatagccaacaaagtattgttgcagtcgtgggtcattctttagtctattgaagatgcgaccaactaccaaattaacatatccaagacagagggtgatgtcctccctatcttgagtgcacctttaagcaatcatagctgtggtctccattttttccttggccttaaccttagaggtcttcattgttgcttcaactgtattcacaacaggagagaccttttacgccccctcagttgttagcatagcaaagaaggtcttcttcatccccttggttattagcacaacaaatgaggtcttcttcttgaatgccaacaatgtggtgtatcatttgtatggggctctttggttgctaaggagacagtcgataccaattgcttttaggaacttgatagacagatggtagataaatgagaaagcttagaggttgtagagtgttgaccatctaatggtaaggatacttggtgtcatttactatgaaggtagtcacagtgattttttccacgggatagttttgactgtgagtggtaatctaattttaccatagggagcaatgttggctctcctgaaaccatacataagctgcttgaatggctacagatctcttagggagttactcattctttttagagtctattttaattataatatttggtgatgctctatcattgacaatcacctttgtcactattatgtttgaaattttgttgacattgtatgagcctgattgatcttgccccgcatcgttaattttgcagtaactggggtgaaaaactttgaagtttgtatgttgaagctattagctttcagagagataggccattgttgaaatgtagtgggttatttcttgtgcgtttggtgttcaagcataagtttatttcattagcataagcaaaatgaatcactagtgaagaatagtgtggaaaaatccaccaaatctctaataaggatgaaatcaattgtgttgaagaactttgcatgatgatttcaactcatagaaccttgttaaaggtttaaaataaaaaattccaagggagaaaaaagaaaaaagaatgattgtacaaaatctatgctaagtacaatgtcccatacataggaggattttagcaactaactgaagaccacaactggggtagcgttccattccaagagggtttcttacaatcaataagaaaatctctgatggacgcaaagtcttgcttccagagagttttcttaatgactaactatgcctttttttctttttaatttttgtgatatgcataggagcacttgcactagcactttagatttaaaaacttagtcattatattcgtatgtgacctcaaacatttatatattaaatcataatagttcttgactctaatgtaaaaaaaatacatagctcccgtataccatgtcttatgcataactcccgtatactatgtctttttgaatgctcatgtaacatacatggctctcatgtaccataatgtatgtgacatacatggctctcatgcaccatgattttttgtgaatgctcatgtaacatacatagctcttgtataatatgtcttattttcacctcaagtgattgaagaaataccttcattggtcacttgtcgtaccaaattccattggactttcttgatcatgggtcttagggagttgttacatgtgtgagaactcatccactcatacagagattcgtggattggcaatgtttaactcacttaagaaataactgcagttacctcaagaccaactctacaagttttgttcagcgcttgagatcgttgtcaggtctgtgagctgaaattgattaataataatgaagtgccaacaagacttactcaatgttttatcaaatagatattaaattcaataacatcatccttgtagctagagagaataaaaagaaataacattcgtaaattttcatttttattaaagaagctaagttgatccccactacacagacgctctgttcaactagcaatgtaggggccataacttggcaatgtacctcttgacatatagatgaatttattgcatctttttagttcgggagatgattgattcaattgcataaggtaaagtgaatctcaatgtgaagcaaactatctagggaacagttgctttattgatgatatcgtgtcaaatgcttttcgttccagttccttggtactgacactagattcaagtggcaatcatagtatgctcaagcctatttgtctcaagtttaaactattctgtgatgatataaggtcatttctctctcattgtgagtctttagtatcactttctatgtcaatatctttatgagattcataagacacatcttcactgttgctcccttgttcttgatcattgttggaaacagagggagaatcttcgtcactgccttcatctccttagtcatcttggaagtagggggagattctttagcaattctttcttgcttaagatcatcttaagaaatggcaggggattcatcatcactgtctccccactcgagctcactttgggaaatagaagagtattttattttaatggaagcattcgatgttgattcttcttcaaattcctgatcaatgtccctttgggattcaggaagaggataaaaagtgtattcgattacttctatttgagaaactctcttggccttcttgacagcttcttcgagcttaatgaaaccgtcagctctatctaaaaactctcaaatagtgtccactgacttgagttttaagtctctccagaatggactcaaaactgctagtccaactaccatttctatgaacttggcatcttcactgagtgttcttatctatgtggctgcctctaagaatcgttgcacgtaatcctttagaggttcatcttctttctgattacgcagaacaaattgttgggattgattagtctgtgcattgatggggagaattcgtcatagaatgcttacttaagtgtctcttaagaattaacagatctcagggaaatcttgagataccactatcgtgctgcttctaatagtgtggctaaaaagattcgacaacgagaatcgtcttgaatgctttgtaggtcaatttgtacttcaaagttgtgcatgtgggagagaggatcttctttaccaatgtacatatgcgacactagagtttttaatttggaaaggatctccaaagcctcgtttcaatctaagagaggagaaaatcgttctcgatctagcctgtaatctgttagctttatagtagtgatactttttaccaaggcgacaagagtatcaaattcattcatatagcaagaacgtgtggtgatgtgcatatcacctggatgcttctaattggtgtctctttacaagttcttttatcttttgaattgataaaaaatgatgatcgatctgggcgttgtggttgtttcctagttgtgtggccttcctagcaactgtggggattatcttgtatgacgatagggttttctctcgagcgttttctttgtgagaaactcctcgtagtactacactgaaaatttcccttaaattagtcttccttagagtggcatgtgcggagggagttaaattgattgttcaagttcaacacggctccatgcacccatgggtagtattcgtactactatccatcaagacctcaggcaaagtacctacaccaagcaccccgttcatcacaaaaatatttccaagtgtgaagcagttttctggtctttaccctctgaatctcatactcttcactttcatgttagagctttcaggttcatctcctaaggatgattacaggtccctttccctttgctgggtcaagggtttgcctagagtcattagagttgtgaagagaatctcgtggaggaggttagtttcccacctttctcaaattactttgatcgaatgggaactaagaactcatgtttcggctctcaatgagagcaccaaaatattaatgcttaaaagtggacagcactcgctcgatagattggtgagatgaaataagagatgagtagcatatataaagggatacacataatttatagtagttcactcctcatgttgcgatggtactggagctctgtttacttcaagtttttatttctcacgacaattataaaagaatggactaagtgtgaaagctctaaatttcttgagatagagatgctcagaccatatgggaacttttctaaacgtgtaaaatgagttagagaagctctcattttataaggaaggaggtcctattaaaattataataaatattcaaaaaaatgtcaaaaagaaatacatttaagctatttttgactattgatgatgatctaacaaggaaattgactccaaaggttttttgtcattaatttttagagcttgaattgtgtcagcggttccttttttgggtaagttgtagttgaatttcataactcccttgatgaaaaaatttggaccttatatcttgagaattgcgattggagtgtgagacatgacttattagagcattgaaatagcttcgaaacacaagtttaatgtcattagttagattaatattgagtgagatatgtctattttgttgaaggttttctgttgccagttcttaggttgacaacccaatgcccaggtgacatccagtgctcaaattaatgtatgacatcaacctggatgttggataagtgggaaactacccaatttacgactaatttactgttaccagcatcagagatgttgctattttgcagaatcaagagactcgaaactacccaatttacgactaattaactttgctgaaaaagtgaaaatatgtggttgtgaattaaaattgtctgagttcgtagcactcatttactatgaaaaacaagatgaacgcttgggatcgaatcaaaatcgaataagtagagcccatcgcaataggtcatacgtcaacctaggcacgcagtgcttttttttgagtttttgggatgtcttttttatgcttttagggtcttcaaaatttaggaagaggtctcctaacccatttttgaccatgccagagagaatacccagagtagaattcgcctttgagggacaaaaactagcgcacctgtttgattgtcaacctaggggttgggcccaacaccaagtcaacctgggcgttgcccttagttcttggccccttctggattctcattttctcctcaagtttaattgtatattagttatttttgatgaagaaaaaaagtgcccagaacacttttttaggaaaaataattggaatatcccaagttgacaaaatatcaacctgcgcattgggtccaatttttagccaccaaatggctctgtttgatccccaaaaatagttgtatcttaatctttgacaaaaatggagaatatgcttgttagaaaaattaataataaacccaagatcaatttttatataacatagaacacaataataatatataataattaggtataggtatgcgtacctgatccatagcaattacctcaattcgatccatatcaattacttcaatttgatagtgcaatactatcaa

SEQ ID NO: 227437 - DNA, 7085 bp, Cannabis indica
aaatacgacccgaaacttagacaaattttagcctaacagattatctctccaggatttgatattaacgctgtcgaatctaattgcttagcaattgtatctgcttttaataatagacattctaatttcaatgattttggttcattgttagaggatatagtaagcttattttccagattttcaagagtgtccctagtccatgtacgaagggtgaccactacggctgcacatggattagttgtgcataatctttggatggatgaacaacttgtttagctaaatgactttctatttttcctttagaatgtatagtcttttagcctatatgacattatttgattttcaatgatattaatcattgcgtgcaatatatatatatatatatatatatatatattgatcctccttctcgaagaataaaaacaacatatatttctcatatattaaaataattattttattatttatctctattttaaagaaaaaaagtttttttttttttcaaaataatttcatcttgaacatataatttgtttcatagttaatttcttttttaaattttaagttatattatattattttattatttaagatattttggtgttactcttaatttcaatttaatagttttcttacctattttttttgttggtggcaaaaaaatataaccttctcacatgtttaaataattaccttaaaaaaataaattgcaatgttgcaatttctgagttcaaatgataaatatgtggttgaaaatttttttaaacttaaaataaaaaataaagaaagagaaacaagcagtacaatatgccacctttattcacataaaaaaaatcaaagcagttgattatatcaggtaggagagaaaagaaaatgtaaaagaaaaaacaagagagcagagaaagaaaaaaatctgatcaattttaatttcaatgcgcgtttagtagtatttgaaataatatatagtttaagataatttcataaataatttgcaatttacgttaacatgtgtaatggtttttttttaatagggccctattttcgttgttttaatacggctcatacaaaattataactaattacaacttcaaattcattacaattttttactttacgatgttggagctgattctttttattcttttccgctaaaataaatcttattattcttataaggatgtttcgtatagaatgttattttccaagagaagaattatatttctgaaaataaagaaaaatgcatatcattgtagaataaatagtttgcttttaacaaccaatggtgagtggggatggaaattgagatgagactagatcaacttttatttgggtgatgagactttttaagttctaaattgatgagtatgtagttcaggcctctgaacttatcaagtatgggtcatccttgaattttgagtacaatggaagatcaagagctctttctgcaattttcctgtcctcgtgaatctttgctatcaagctgtcgagggttgaaaagtttgcctgtttcatatcaccatcaaacatttggtccttttttttttcaagtttacaatcaatattaagcagggaataaaataaacttcttacagactcgtacctcgggacgaatgtagccaactataacaagtcgcaaatcctcgccgtaaaaatcttcatcaaagtcatgtagcaaccatggctcctgcattgaaaatataattaattaatggaggaaaagaaaaagttcaagcggggctacagaattagactcacaatagtcttttcagtgttgttgaaatatggattccaaccaatactcatgaccattttgtaaaccatacgacgatctgataatccagcccaaccaaaatatacccctgcaggatgttctgatacgagagctgcacatccatctgtggataaattagctgaaaaagaaaaaacatggaactgcactgatcagaatgacagataaaaatatttaagcaagtatttggtagcacgaaatttttagacaaaagaaatgtagcgagcctttaccagtagggattccaagcacttttgagccacgcccgaaacccttgattacaggaccaccaatgtgccaaggtgtcaacggcaaagtatcttctacccctgcagaaaaggaaaaaggcaattaatgagaaatagtttttacagagaaaatgagcaatcagagttgatataagataaagattttacaatcttggaatggagggaggccccacttttcaggtcgaaaatcaagtaaggaattgatcacctcatccgctgcagtaaaagagttggattgctttggaagggagggtacaaccaccacttccattccagcagccttaccagctgtgacacctggtctgagataacaaaaggtacatacacatgagtccttgcttatggtggaggaaaaccattgtttcaaaagatctagagaaaacctgttagaagtgaaaacaaaacactctactgactcaaagctaaaagcatgggtctcctaagttactaacttccaaaaagcagcacacatgaagactagtacagtaggctttcccattctctacacagatcttcaaaatcttttgtttaattaattgatgtagcaacccagaacttaactttctcccacaaagctgtcttgctataacagataagtttgtttggacctgttatttttcttctctacaaactaaaaaacactagtctattattaatcagggccgacctagacttaggtgaggttggcctaggcccatgcctaaaacccccacccatactttaaaattaatttgcaaaaatatagcatatagaactatattgaaaaatgctacacgtgtttttaaagaccggccctgttattaatatagagaacaatctactccaatcttgagtacaaaaacgaacaacccaaaactaacaaaaacaggaaaatagaaacaatttggaccttcatgttgtgaaaattgaagattatgcaacaaaagaaaagcaccatattggtcatagaggaattaaacttctgactgattacagccaaaattgcaaaagttgaacagtcgagatagagaaggcttgtgacgaggcacatggttattcttaaatattatgtagaaaaagataaaatgaattcaaaatttgacagaactataagtcaattgacatacagagaatcttcaatgacaaggcagccgaaaggttcagcatttagccgtttagctgcttcaagataccttcaatagcaaaactacaaattaaacttccatacactttgatattgaagcttccaaaaaaaaaaaatcttcagtgctatataaccattaaagaaaagtcaaaagctatgaaaagaatattgctgcaactaacatttcaggggaaggcttccctgcactcacttcatcaccaccaatgatgacagaaaaggattccttccaacctacatgtaagttgaagatatcaaacaaaatacctttccaccagaggcaaaagaaacaaacttatactaaggtttttgagaacgaataccatgatgaaacgaaattttagtttctatgctctctcttggagagtttgaagccaatgccaatggcacttcatgacttctcagatgtttaatcaacctatccgcaccaggaagagctttaatattgcaccagctgcaatcacagtcataaacatcacatacaccaccaatttcagcatacataaaagtaagtcgttgctgtaatttatcactaaatgtgcatttgttacaccgcattatattgagttgtattgtgtaacacatttttatatcatcacaagtcaataacaaacataatactatataatacaacataatacaacaacgggtacaaaagtgccctcattgtttcagagtcattagataacaaattaacaataaaacaaatatgcaaggtcaaccacttgaggctagctcaagtggccataggagggtgcgtctgtattggaggtcctgggttcgagtctcaggttatgcatagttgtaatatataaacgcttaaatcaaaatatatatatatatgcaaggtcaaacgttggtaataggaagtgctaatagatttccttgagcacaaatatatgtatgcagaaggcacagacaaatgaatggagaataagttgaaataagttttactgattggagaacatgggtgtgatatcagaaattaattcagttgctgaacaaggaagctcataatcttcaacaatggcaacagcagattcaaaaggtgtctttccaactattttcttagcctccctaccatcccattgctttccatacttaaccagaaaaattctcaaaacctcactcacaatgccgtctgcattttaatgtaagaaaaggaaaacaacacattcaagtaataaataacaagcattaattaaattattatgcaattaagtcttcataacaaacgagatgaaaacaatttttagagcagaaagttgacctgtatttagaagtgtaccatccaaatcaaggagaacacatttcgctagtttctttaaagggttgacagccgacatcctaacaaaagaccatgcatcacatatgtcaattagtgaagggtatactagcaaagatgtaaagaggacaattattattttatttgggtatctgaaaaggagaaaacatatttaagattgatagagaatacagccgtgtatccgtctctaatttgaaagcatgtattttctaatgaataaggaataaaatctggaatccactccttcacaattaaaagaaaggcagagagagggaggaagactgagcaactgaagtttttttaattttcaaaatgattataaagttttcattatgcaagaactgatgaaaacaacttttgtttagtactacctgctatatagttctgaaactactaactaatataagttatggtctaagaactaagatttttgttggtgggatgagacctaaattagtagactttgattagttcatatcatagtattactagaactagaagcaccaatttgtaatccatacacacatagaaaaagtggaaaagaaaacatataaaacagagaggaatatattctttaatgggacaagggaaactttaaaataaaataaaaaggctataacccattttcctccacacaaattactaaattttctcagcacaaacactctaaacacacaaaatgcagaggtacaaaaatgtttttcaaactattccattatacagaaacaccattcaaaaagaattgtacaatcagtgatcaagaacgtatcaaaattatacataactgttctgatttccttctccattaattagcacgaagctttggtatagcactctcaaattaattttgaacctttgaaaaccttacaaccatatgcagacacattatagccatctgaacttctaatcaacatttaagttaattaatccaaaatcaaagatataaccaaaaatccgaataaagaagaagggggaaatgggtattttgcatacatcaaacagatttcataattttaaaactaatagagaacccttaataaacgagagtttaccccccacaacttgccatactagctttggggaattggcatgtttccttctattcttaatcatttcagattgaaagattggtgggagaaacacacacttccattgtgtgttgtatttgtattggaatttttccatgactattctttaatgcataagcatccttttctttttcttatttcctctactaacttttgtttttcatcttattactcattctataaataatacctcctaaacaaaacaacatgcagtgtgattgaaaaggcaatagcccaatatatatatctatctattctatataaagtgtgcatatataactgaaattcttagtttatgagaaatttatgggtaacttttaatttttatttaataaaataataaaatattatttatatataataaaatactaataaaataaattctattaatatttgaactgatactaaatattttaaaaagaaaacaactaggattaatctcaaaaatagcttgcaaaaacacacacgttaaaattagataaaattagtacgttaaaatttaatacaattttattacttagttattattaaataaaagatataatttatttcatatatcaaaaacattaaaaagcttgcaaaaatacacacgttattaatctaaaaacacgaataacaattattaattttaatttatatctttaagatattattattattatttcaatcatgttggtgagtaattttgttttatataataagaatggtactggcctacatcacttttggaagttttgaagagtgaaatttaaattttggtagctgtttcatttctagcatagataatatttcatactgagattaatgttggtagctttcggtgcattagcagatctaagagaagcaaattccagcagcaagtattctcgactgttattgctggtttagtgtattttatatggcagcaaaaaaatgaaattttatggcagcagaacccgaagaatttacatataggagcttaaatggcaaataaaaacaagaatttctggtgtattaacaaagaaaatcaatcagaaaataggaggtggtttgattgcttgtaaatattgttatgtatagataatttgcattcctttcattaggtgtgtcttagattagtaaaaaagaagtttgtgctaattaaattcattgattcatcaaaaaaaaaaaaataagatttttaaatattgatgttatagttgtgttattagttcttttaactattcattttttcttattcttcttagttcactcaacaacatccttttctcattttctttttcttcttctcaattaatggtgtagagaaagcttagagtgtctgatactatcttaatgggaatattgaatcagcatattatacttttgaccataaagtctaagactttttttgaagtgatagtaacgaatggttcttccttggtcaatttagtgaagaaatctatagctacaactgcatacttcactcctccttgcctcgtgaataatgatccaatcaaatctattccccaaataa

SEQ ID NO: 227438 - DNA, 1144 bp, Cannabis indica
ggaaactgcattgatttcctacataaaataaatagaattagaaactattaatataaaggggctttttcttcttcttttctttaattaagggaaactgaaatttatttctatcatatgaatatgattattgttaatttatgtaattaagtgtacactaattgtattcttatattattaatctcatgaatgattgatgctgataaatcaagtctcgttattgtatcatttgcacgaacatattatcttttaatttgtaatgcaaaattatatcattgaaatacaattatataattacttgctaattaaaatttgtcaaaaaaaaaaaacacaattactattggagctcaattataataaaaaacttaattaatgggtaatatatgtagctcaataatatatattggagctaattaagcagctatattggttacagtggattaataaattccttaaaaactttcctttatcagagaagtactttgcatggggatgaaggaaatgttgcacgtgcgctgccatatacagttaatatttttttgtttttcgtggctgagtactggctactgcagctgtctattgagtgattgagattaattatataagagctgactttgaagccaattaataaatatattgccaaaaaccccttcaaattcaaataacaaaagaaaataagtagtaatgaattgaggtagagttgaaacattttgaacaacaaagtcaaacagaccaattatatatgattggtcgtttttataagtttaattatatttctggcgtccgcgtcacacgtcgatcgtatcctaattaacttgccgtcaaggcaagaaaattcagacccatcacccaattctatggtatgtatgtagttgatgacaagtcccttataaatatatatatatataaactttaatttattaaaggtcaagaatattccatatatttgttagaaaaagaacaacggcaaccatccaatattaaaatttaaatttagtattaaaataccactaaaacaatataattttaaaactaattttttgttattctatccacaatactaaaatttatattaaaaaatattttttattaatatattattttattaaactatattatcctacattataatatatatataaatata

SEQ ID NO: 227439 - DNA, 1697 bp, Cannabis indica
taaacaacatacttgtgagtagaactaagatcctggtaaaataaattccaacaaaaattacatgtagatacacttccagcctgtgtaatttccttcccaaaattttgtttcttccttgcaatttaataatctgttatccctgtccattcttggttgtgctatcaacacattatcttcattttgtcctttctctgtcttagtgaaaataggatatgccttctatagcatcatgtatttaagaatctatttctgttctttatccacgcgcttcttgtactgatgtttactgtacccaaaacacttaaagtaagtacatttaattggcttccattcatagaagatatctaagaagacaatctctcctttctcattcttaaagtcaataagtttaggtaattcctaaaacctaaaaatttcaagaagtaccccagcataggatagcgtatctcgattcctagtttcctaatcctgcttcaccaccatttctacttgtcctataaccctgctcaatgtttggtcacctcagtatttgaagtctaaattcagaatcttaaccgaaacttgcaccttatcaagatcatccttagagaatttttcttgagcatttcatactttcatcataatcggtttcttgtcaaagaagaggtagcctccatgtaaaacattatctttgtcttcattgttatggaactgaactaaaaaattctatgtgtgagaagagcaaacttatctaatctattgctaccccaaacacttcaaaaatatcccttcatcacttgaattggttgattggctcctagaacctaatagaaaatagctgagctccaatagcaagcctcctcctcgatattttcattctcaattttaattcatttcctcccccaaaataatttccaaaattagcctcatctataaatagcatttgggaaaaaaactttccttctcctctgtgcaatcattaggctcatcttttttaagaattaggggaacggataactcacttgagatctgcattttcttggaactgttcatctctctgattcacgagtatagattggccttcaccactgatttttcctctgctaaatttgaccaaatgatcatggtgataggacttcgctcgcttcattattttcatcttcttattcaaagaactcaatatcttggattcttattaattatgccatggactttgtaagcactagatctatgggagtttgacagtaattctttgctttcttaggaggattctttcacattccctttgcagaagtaacgttatcttagatttcttggcagaactcttccccaatccctgagcattgttcttccatagacgacctcgacccttcatggcaacaacacgaagctgaaagtcgatgtcctagtagagaaaattagagatttttcttcttattattattataatctaatgaacgtaatatatataattaatctatatgcgttgataggattacgtgcttctggcacgtctccatacctaaacatgtatatatttatatgtactagtaagttgcacgtgctccgcacgtgtttagtatgtaaattatatattatattaattaaatttatttcttaatattttactgattttatgagaatatttttcacaaaacttaagacctaattaattaaaataatattttttttttcaaaaatataatgtatatgtattt

SEQ ID NO: 227440 - DNA, 3554 bp, Cannabis indica
aatgctctgatacctgtagcaatttgggaatgatacttctaatctgatattattgatgaaaaatgtagcctttatataggctgattacatagtagaattaggcaacaatcaaggaaattaggaaaaaatacaacctaaactaagctgtcaaaaacaccctaaatataactgtacaaagctatttacatagatatatttctacatctacctagctgaatttcgagtgctatgttgtcaagtggagctaagattgtgttgttgtgttgtaattttttttttttttggtaatctcccacacagttattgttttactgagagaaattggtcatagagggactccatttatgagtcatgaaagtgcttcaataccatcgttttatttcttctcaacacaatttttcttttcttgttttcatatcagtaccaaagcagaggatcaccagaaaatgaaataaaggctgcctctatcctctcttcctcatcgtaattatgacaagtgaaaaacctttcagcttgcataatccatccatctaaattgtccccccatgaaaagtgggcattttcaatttcttcaattgctgtttgtgtctgaaatgtgagctcgactttcctctatccaaagaacgaccctcaaagactctttcttcggaatcctcctgctggtggcacttcagcagctttagtaccctgtttcagccgctgtccgctgcttcttgcccccattaaaggccctggaatcctagttgcagatggctcctggttgctggacattggaaacttagttgcagtcggttcttggatgattcttgaatggccttcgagcacttgattgttcttgcttgttcatgagcctttagaagacaccggagctgttgctgcaacagttgcatctggcgccccatctctagaatagactcattgactgagtcattgacagtgtctgtaatagccagcaccttcatcttcaacattgcaacttcgccgtcaagggttgaatctgaactgctcttatctcttggtttcttctgcattgtatctgtagctcacagcaccaaattgataagacttttgttagattagaaataatctaacttgcaaagaattcagacacaaatattgattttccaccagaatgctttcattaatcatcaaagaactacacaaaatggttctttgagaggctttctctcctattctaacctttcaagagggctagatctcttccaagatatttctctcaattctaaactctttccgcataactgaaactgagctctaagtttctatttatagagaataaaacttgtcacatcggcaacttaattaaaagtttctaacccaaaacaaaaagaacagctcagccaaaatcaactaaaacaaagactaaaacttaataaactgctgtactaaaactcatgcttggtaccaaaccataactccatgatagggttttgttcattggataaatactactttggtgtgattaaatgtatcaaaatagaagcacgtgtgattgtgtttgtcccacatcgctcatgtgtgagtaatttgtgggatttatattacaccaagtagctaccaagccataaccacgtgatagggtttcggtaattgtataaatgctacattaaatctaatcaaaaaaaaaaaactcatgcttggtctttatggcttttcacctttgttagacacatcagacttatcatgttatatctgcttcttttacaaaccaaattttacttcaaaaatatctttaggtgatgatcttgacaaactaatttttctttttttttttggaataagaccaactaatagagttgatttctcttttatccagaaataccctggataaagaattttattaattactgcctggagaaataattttattactgaagctaacagagttgaaaccttgtggtgcagtgcggtgctagatgaggtagacattctctttaatgatgaagattttgaatcagtgctacagaatttgatgagttcttcacctgttaccacacaatatttatttgtgactgcaactttaccagttggcatatacaacaaattagttgaagtttttccagattgtgaggtaactatgggacctgggatgcaccgaataagcactggccttgatgaggtcagttccatgattgcttttactagttatgatttctaagaattaaaattgttactaggaaatttgaagtacggagtcatatgcaaatttcatgtgtattgatcatgattgtcaatattcaggttcttgtagattgtagtggaggtgaagagacagagaaaactccggaatcagcatttatgaacaagaaatctgcacttctgcagcttgtggaggaaagtccagttcccaaaacaataattttttgtaacaaggtaacagaaaatcctccttaggcatggatacttctctctacttggtgtggtttttgtgaggaaattcagtaatcctacatcagttgtttccgtgtattaacagatagagacctgtaggaaagttgagaatgcattaaagcgttttgatagaagagagaaccaagttaaagttcttccattccatgctgctatggctcaagaatcgcggcttgctaatttggaggagttttccaattctcgtccagagaagggatcacagattttagtttgcactgataggtaactgctgtagcttcctccagtatttgtttgaaacaatttagaatttacaaacaaaaattttatgttctgattattttgcttttgcatacataggaatttctgatgaaatttattgcagggcatcacgtggaatggattttgctggtgtggtggatcatgttgttctctttgatttcccgcgtgatccatctgagtatgttcgccgtgttggaagaactgctagaggtgcttctggaaagggcagggcattcatctttgtggtgggaaagcaggtcttccttgcccgccgcatcatggaaagaaaccgaaaaggtcacccattgcatgatgtgccatccgcttatgagctctccagatgaagacatgttttattgcattggtaaataaagtaacaaaagatgaactagaggagtttaatgttttgaggaaaaagagaaacaagacaagttcgattctcatttaaaatgacgatatttagagcctgacatgaagtaatgaaaactacattgctttatttgctttaatgctgaaaaactataccaaaaaaaaaaaaaaaaaaaaaagaaagactttgatatagggaaggaagccaaagctaatatgaatagtgctatgtgcacatttttttagaaaaagtgtaaacatgatatttatgtctaaattatgattttgtagaattttacggtttaatgtatagtatgtttttggtaaaaaaaaattagtaatctttgtaaatgcaaaatatggtgattgaattatgtatagtatttgatagaataatatatatttaggaatatgattttgtctcgttattatacttttatggattgtaatccgtgatgtatggcagccgtcagatgaaggagttatttgatctg

SEQ ID NO: 227441 - DNA, 7459 bp, Cannabis indica
aaaatagataactaatttaaatattctattgggtttgattctttttcaatttcaatttcacaattcattattaggcattaataataaaagaattatcatatttttcttataagtaaaatctaattatcctaatttaatttatatattatgtatatttttttttctaaaaagttagggagggccatggccactccatagatacaagtagttccaccactgaataggagaaacaagatcaaaaggagtttacttcctgccacaacttccaacaaatggtctgaatgaatggtctcgggctatccaaccaaaatcaaataaattttctgcattgaaaatggttgcatcacaattaatcttgatagaacccatttcaggtttagtctagtactcatttgcaacagcagagagagttgagacggaatagaattctcctccattagattgaaccaaaatctaactatcaagataagtaattgcattaacaaacactctttctatcacagaaactttctcattccactcaagttcatttctggccttccaaattgcccaacaaacaacagagaccttctcaataattgcagcaaaattatgtgaacagaagtccacaaaccaactagtaaaattcatccaaccattttgagaaaaaccagcaattacttgagataaacattgcttggcaaaaggacattccaccaaacaatggaaagtagtttcctttcctcctctaaacattggacaaatatctttcaatgggacataactaagctttcaaattgttagtagtaggtaaacaatgagacagggttctccacatggaatcttttatttttggagaaactttgagatgccaaaatttgcaccaaaaactaaaactatctacataatccaaatgaccatttgattcttgaataagattataagcactcttaaccgagtaagcaccaaacgattctttactccaataccaagagtccctattttcaaactcattgagaggaatactaaaaatgagagatttatctctatcctcagaaagatcagaaataatttctttatcccatttctttaagccacttttaaacaaactagagactttatttccatggagagcaagatgatcagaatgcacaaaagggtcactcaaatgaggaagccaaggttgttggaggatcataatgtcactgcctgaatcaattctctaacgaacatcgagtcgaacaatgccttgagcttcaagaatacttctccaaatgaagcttggattagaatccaattgagcactcaaaaaagaactattgggataatatcttgcataaaaagctttccccaccaagaattgaggttgagtgagtaaacgccaaccttgtttaccaagcaaggctaacttaaagtcaactgaagtctgccaccaaaattgtctcatgaaccgttacttatccttacacaccccatccggaagaagaaacatgatcatagcataggatggtaaaattggactactgatttaatgagaatctcttttccatctctttatagtaatttactatcctaatttcgaactctttttctgaccctatccttcaagaaaccaaaagctaaattcttatttttgcctactgaacttggtaaacctagataagatgtaccttcttgcgcttctaacatactaagaatgtttaggaccccttctttacatctttgcaaggtgttgttactaaagaagacaaaagatttgtgaaggttcacttttttccccgaaactttttcaaaggtagccaacaactccaaaactttggaagcttcaaaatcattagctttataatagagaaaactatcatctacaaacaacatatgtgaaatcataggagcacctcgagccactttacacctatggatccacttcctttcctcataccttcgaatgagagctgagaagccttcaacgcaaagtatgaaataataaggagaaaaggaatcacttgtctaatgccagaataattagcccaatggactcacctccatgaatgatattataatgcacgatacttacacatttcataaccaataatacccattgttcgaaaaaactcatccttaataaaattttgctaagaaaactctattctaatatgtcataagccttactcgtatctaatttcaaaaccatataatccctagtcccttgttgtttccttagaagataatgtaaaacttcaaaataaatcataatattattagtaattaaacggctcgaaataaaagcactttaatactttgattattgttaagttgtaaatgataaccaactatacgactacctcttatatatgtaacatactattgattttatatattattagtggttttataggtttttatggtaagtatttttctactaattagtattcaaaaccacaacataaagtttttagtcaattttttttttaccaattctatgttatcggataccaattagtagttaacaaaattattttaataccatttagaaattaattcaaatatttagatactaattagaaatcattttttttttatttttatatttagatactaattagtacacaatatgacactattaaatatataattgcacattattattttaaatactaattagtaccaaattatatataacaccaacaagtagataaaagtagcacatagttaaaacaaaaagttcacaataaacacccaatctcattaaactttcaaataatatatatttttttaaaaaagtcttctaaagaaaaaatttagctaaatcatagttaattaaataaacaaaattaaaaaaggaaataaagtaaatgcttacaaaaacaaaaaccttattaataaaaataattaaaggtataataaaatagttattaaagtttaaaaattgaatagttaagctaattaatattaaaatatgaatataataaaagttcccttatatattaaacacactattgtgagatgtatagttgaaaaaatggaaaagaatcactcctatttctttctcataagacaatgatgttcggaaaatacatcatgttgccaagaaaaaaacatacccttgacattagtgttcctatacttacaaagttggcctacattctaacttataaatgtggtttcgaaccgatcacgatcatcctatctgtgtttctgtcaaaatgtcgagagaagctatctcatctgtcgtcataagagggtaatcgactctcaaatgggaaggaactatgctttttctcatgaagctaagtgaaaacatcaagatatgttaactaatatcttcaaaccgaagaaccatctacctcgattttattctcaaaacaatcccaaagaaaatcaaatcaaacaccagcacatacagctcctgaaaaacaaaagttatcttcagttatatcaaggaaattaatcaaactatgcaaaacaaaacaggcacgattatctctatgattttttggaaatgagtaagagagtgagagtgactgagatacctgatgaccaagatgagcagcaaaacttggcttcatcaacatgtttgacatcaagcccaataaaccatgatccagcactcacatcatcgtgtgcatacgtacgaagaatagctctgtaaaaccagttaacaagatataaatccttgaatctatggttacatgataatgatattgaaaccagtttgttaaagagaaaagtactcacctatttatcattataaatttcgccaaagcttgtgaaatgacatacaattcacctgaagcatgacggaaatatctgttgacaaccagagcccaaggctttgttttcaaattagataggaaaaataattcgaataaaaatgcttagacaagttaaaatctgttgaacactatagtagcaatatttcaatttatctttcaagaaaaacagcatttacaaaaccaagagtactataactggtatgttatgcaagtaccaaggtcaaatctcttagccaagaagtaatattcgtaaagtttataagtagaatgcatgtttaattaacgaattaccgcttcagcatttaaaaatgcagtgtttcattttcaatgtaatattatactagcatgttctgtaatattacaatatagcctaagaaggaacacaaacagagaaaataagagatgggtgtaaagcatatgacccaaaaagatgactgtagaaacaattagctaaacagaagatttgtgaatattccccatgatataggatctacaagagatttagattaagttctaggacaacttacgatcttttgtcaccaaatttccaccagtctggttcgtaccacttatggccactgagaaaagaaatgagattgcaaattataagaatcattgaaacttcacaacaagtcatttatgcttctcatgttgtaaatgtccttatatcttaaggtaaaactcacggttcagagaaaacttcgcctgatttcatgcagccaatataaacacgaggcttatccatatgggttgctagagtagctccaaaagcatctggggaacatacgaaataaatacgaaaccccaagaaagatatgttaacagtaagagttttaattgtgaaaatacttctaaagtaggtagctttcattgtttagcgtgcatgtgatacaagtaaatatactaaataacgccctctcaaacactaatggtgtttaacagaagaatggtatttctcaaatgtccctaaattattgattaaaggtaatagaataatttctgtatcatttcatttgctcaggaataggaaacgtgtggaaataggggagagtagggtagggttatatttgatcatgacagggttcaagaatcccaactccaagatagtttcatgtttctttactctatttaagaaagtgattcaactaaccaatatttaaaaaaacatcatcattgactttagcgtagaactcagcgtcccatttctctgcagcatgagcaaagaataatttagccttctttgaatattcctcaggtgcctccacatggtcatcctgccaagaccgcaattggaaaatagttaaatcattgcagcttatataccagttttaattacaggaaaacattcataatcaattttcaataacacaaaaacgcacaagaatcatgaaatcattagtcctcctgttttcactgtcaatggcttggtcaaactggtcgccacgatttgcactgcagtagaatgaatcattaggcagaggtctattattgataatcatataccaaaggaaatattgcttcaacaacagtccctccaaccaaataacagagaataaaaaggaaataaccttcgtccaatgacaaatcgtgcaattatgcccttctgattctccaaatttttcaaagcaccacctgcgaaaacagttaatcccttgtaagactttcaaaggaagaaatgattaacacttgtaacacaactaagctcacttacaaaatacaagcaagaagataaaaataaaatgaagctccatgcagctaagactttggtctaaaagactaattgacattacactcctttagctagtaaaatgaaatcgattagttaaatgaaacagcttatgttgctggatttgttcatatccagctaccagataaatgcaatcaaggcaaaaatttagtatttcagacataacctaaaatttaagttatctagcaacttgattgtaaaaatgtcctttgtatttgatccttctgtagaagcatatccgaactaccaaatagctagtgtggtttttctttatcaaagattttaactaccccaaattcatgtccaccatactagtaaatgttgatatttacagcaaaccctgatccaaatttaatgtttttgtaatttgtatcagtcatctaaacattgattaattagtcccagttagtaaggacttaacagattagcatatttgtaaaacagacaacaccctaccgctaagacataatgaaaaggtaacaacacaaagaaatgcataggtgaatacaaagactaatgagactgtaccactacccatccatgccttccgaattgcatctctgttgttgttgcggccaaaccttgtaagaattccaattactaccagtggccttttctttgtgtgagttccattagtttctgtcgagcgggtcgaagtaaaacctttttgtacagctgcagccaactccatctcaagggctgccaatttcttttgttgttccctaacatggaaaagacaaaaaacagactcttcaaaccccatttccaaaacactacatcacaaaaccaaatgatgctatttcttctacctgcaggctatgattttcaatgtatcatccactgaaatcgcagaatgaccctagaatcaaatcagaaatggttaatttaattgaacatagatagtcaagtcaaccatgtgcacatctgggtaatcaaaatttacacaagaaaagaaattcaattacacaatactttaatttaaacaaaatgaaaaaaagacataaatttgatttccagaacacattttcacatcacaagatgggtctaaacagagaacaaataaaaacccacctgaccagtaatcttatcaagctcttcaatcaaataaactctattttgggcatcctgccataacctatataacagaaaacaaccaatacatacatataaacataatttaatttatgaaaagaataaaaaagaacccataagagtcgttaaaaggtgtgatatataaaactaaccggccagcaacatagatggaagcgaaagtagcgaacatggaaagcaagagcgttgggattcgggatcgaaatgccatgccggaaagccgggcattcgaccccctactcagcattttctccaacaaaacggtgaaattccagtgatgtgattctgaaaccaaaatttggagataataaaagatgggttttgtttagtggtacagatccaatcggaatttgaatatgaaatggagaaagatggaagattcagagagagggagacagaataaggtgagactgaatatgagttcggtagttgaaatcagtttgctttgcttgtgttcaaatcaaagaaattgagttttattttgtgtaaatttttttctttttatgaaattaaagaaaaaaaaacatgtttttttttgtttaaataaataaaaaatcagaaaagattttgtttggagagatagtatagtttttacataaatgtcaagattgttttgttaggaataaatgtgaagattcttttgtcattaaggaaaaaaatatgtgaagattatttctttgatagaaaatgtgaagattttgtttggactaaaatgttaagatattcatttaatatattttttctttcttaacatgttgatttgatatctaattcctagttcctaccatttcaaaataaataaataaatcttattcctacaaaaacaataatgaaacgatattattattaa

SEQ ID NO: 227442 - DNA, 4141 bp, Cannabis indica
tttgacgtggtgatcaaaatcacacatgattaacaaagtaacaatccacaattggcaacggcacctcctcgaatcaggatagctcatcgtctaactgaatggtatgctttgccaaaccatgtgctgcagaattcgcatcccaagtcacatgagacaaaactgtccccggaagtttagacaataaagttatgacatcctcaagtagcacacccaactcattaaagaacacccttcctttgttaatagttgtgaccagagacaacgaatctgaaaaaatctcttttattgggattccgcatgaaagagcccaattaagtccaaccaaaagcgtcaaggtctcgacttgtaaaactgaaatactacgtaaaaacacaataaaatcaaaaaataccacaatatataacaagatataagtaaatactataaacaggcctcaacacaaaaacacaacccaaactagagaagaaaacaaagaaaaaacaaagaagaaactagccaaagggataaccctttggctagtgaaagaaaaccttgaaactcaatacaaaacatttttctcgaaaggagaacaacataaggcatgatacatcaaaaacttgatacaaaagtgctcaaaactgtataactaattgctaactaaactttctaaaaatgcctatccacattatataaaacaacaccaaatactactcaaacttgaagctagaaaatattttaaaatcttatacacatcaagttaccccactgtctaatctttgagaggttagcaaaaaactgaccccacccttttagcaattaaaatataatagtccttatgccaactgaacttgtaaataaagtcctaatactattcaatcttaaacccacaccatgtaaattgagcctaatgctgtcgaaaatttaaaggtttatacaaatcgaaaaaatgtttgccttatagttgaaacattgtctaacctttgagaggcttgcataaagctgacctcacccttttatcaactgaaaaaataatagcccctaagctgactgaacttgtattattcaataccgttgcatcaaccataagtattgtgtggctctgttcttcttgagaaactctaggtagaacttccaaaccattcctatttctttgaagactaatgctactatgattggctccatcacaaccagatacaatagtttcataacaactggcaatccaattaacaatctattgtggttgtcttaattgttgaccatgattaatttatttctctccgtccatatggcccaagcactaataataattttttcaaacaattcattttctaccacctcaaatgcatacagtaacacatttttaaaattaattacctctctcacctcatgtagaaaattaaaattcaagagcatccaaatttcttgtgcaaagggacaccagaaaatagtatgagcattggactcacctctaaaaccatagagctcgcatgaattgttaaagactatatttttattgttcaacccgttacgacttacgagtaggcagaaattcatgaatatctctccacgcaaaatataaaattttcttgggaatttttaaacctcaaaattgcttccacgataatgagaatacatcactagctgaagagggtaatgatttattcaaagtcatagcggtgttatatccacttcccactgtataattaccatgacgaaattagatgaacttcataatcaataactctacaatcatcaattatctattactttcaaacattgttctaaagacgtagggagatttaccttttgtgtaatgtttacttagattcctatactaactagttaataaaacaaacctcatttagaaatatggattttgttattgatttcattctatatagaaattaatattacatcgctgttgaatttattctataaaaactaactgcaataaatttggagtattattgaatagtccacaaataaatcctctaattagataataaaaatgtaagtgagactcgacaatatatgactatagaaaaagtacatatacgattaagtggatttagaaaaggtacacatacaataaaatatatcgtattgtatagttaaaaatatatattgtattttatgtatttaaatttaaattaaaatattcttaaataaaaatttctacataatttttatttttaaatatatgaataaaataataagatcaattaagaatattttgtcaaataatggtatattctgttaaagttaatagaaaaaactaaaagacaccgttaaaccaaaaattctgttacataactacattttatgtatacagatatatataatatgcgggtgtatatatgctactaaattttttaatcaaattatgcttgtggctctctaaattatttagagttcataagaactagtggattacatgttataattataaaatttagaaagggtctaggattggggatccaaccctaaacatggatcctggatccgaaccctaaccctgatccaaatatggacacgggactcgagacctaaaactggatataggacctagatctggatgtgaacctgtaccatggcttgaatcgggacccagaccccggatcccagatcccaaccctgaacttagctctagacccagaccccagacccatacccaaaccttggactcgcccctagaccttgatttggtcccaaaccccgacccctaacttggacatcagaccccagccccgaaccctggacccacccgatctgtacccaaatgtgaactcggaacctgactcgaccatgaccctgtacccagaccccggactcgaatgcggacccagaacctaacccgaccatgtccctatatctaagacctaaccccggacccaaacctcggaccttgacccaaaacccaacccaaaacttggacccagactcttagactgggtcttaatccgggttcaaggtcggggtcttgagatcgggtttgggtcggggtcgggttggggtctagttccccctccaaggccaaggtctgggttggggtcgtgtttatggtaacgatagtataattttacaacctattaatataaactaacataatgttaattatactatacaatatggtgtaccaaacgaactactaatcaatactaattataagagtattgtgttaaaataatacaatactatatattatacaatataatacaatgtgacataccaaatgcctattggtggaatataatataggttttgggtagtcgtggcctcttttaagttattttttttttaagaaaaataatatatatatatataaattattggaaaattttataatgcactctcttaaaagagatgcaccgatacatctctgtttattttagtagccaaaataattttttagtaatttttttttcaaatggtcatgtaaattatagttatttaagacatcctgcaaaattttaagaaatttgaaaagtttaacacaccgaaaactacgttcaaacagtatgttgcacgcgtgattattttattttatacgagtgtaaaatatactgtttgaatattgttttctatattgtaaattattccgaatttttcaaaattttataagatatcttaaatagctacaacgtacatgaatataaaaaaaattagactaaaaaatcttctggatgctgaaacaagtaaacggtgtatcagtacatcctttttaaggagatacattatagaatcaccttaaattatttaagtgaattatttgtattattaaaaaaagataattttgaattttattataataaaattctttttttaatggtaaaaaaccaataatatttaattccaaactcattttgtgtctggtagaatcatcttatatttttattattataccatttgtatattatttgttgaaacacttagttggattacccccctaattaatacaattatataaatatatatgtctagttccaccactacaaatgccccttactgtattaatcgtcatgatactttgtctacttctaaatcaaaatcaaatgtacttatgaataattatcatatataattatggtgtgatttgtatgctttattttaataataatgtgctctattattattagtcttattattattattattattatta

SEQ ID NO: 227443 - DNA, 2587 bp, Cannabis indica
ttttttgtgacagtacaagtgccataaatatctctaaaaaaccagtgcaacactcccgaactaaacacatcgacatcaggtatcatttcattcgtgatctagttgattcaaatatgttgtcaatatctcatgtgcccacaactaatcaaatagcagatttattcactaaagctttaggtacttaaacgtttactcacttaagaacatgtatatgtaatggctaaatcaatggctgattttttgtagccaataacagcaacttttgaaggtgcgcgtagctgtgctctgcttctcccatggtgaagaagaagaggatagttcgaaagcctatcatcaagcctcacggagctggtgtccgccctgaatcaccagctgaggatgaagttgaatctaccggtaaggtccctgagttgaataatgatactatcaaagatttggaagaggatttaggtcagagtttggctcgactttctccaagcattccggagtttcatacgcctcaggttagcatgagctgggctaaggaagtggaattgaagcaggaaggagattgtggataggatcaattctaagaatctgtcaagagcctttggaaatcattttccaaggaaaaggtaatatctcgagactcgaagctctcttttactaaaccaataattcaaaatggagtgaaaatagcacaagtcgatattgaggaagttagtgaacaaacagaaaactggaattcagctgtgatttgtatgatacttggggctaatctacctatagcaatttttgaaggctttattaagcgtgtttggggtcaccttgggatagttcagatagccaggatgtctaaggggctggttatggtgaaatttcatgatgaggcaacaagggatgaggttttggaagcaggtgttttacactttgataagaaaacagtaatcattagaccttggacaactgatttgaatgctgtaaaattggtaagatctgttcctttgtggattcggctacatgatttgggtctccaatattggggaaataagagtcttagtgctttagttagtatggttggaaaacctatcatggtagaccaacataaagattgcactagggtccagtttgcttacattttggttgagatggatataacggactcacctcctagatcctttcaataccttaatgaacatggacaacttcttgaacagagaattgattacgagtggctgcctatcaaatgcaaaaatttctcaggttttggtcatatcatagcggactgtcgtaaagaggatatgaagaagaagccagctgctaatgctaagctgaaaccaggaaaaaaacaccaccagccatctgcaactggtctattaactgactctaaagctgagccaggagatattcagcgggattacagtcattctcatggtaataccgaggtagctgtgcaggacaaggaatggcacattcctaagaagactatccaggggaaaattcagagaaaccatggctctaatactgattttcagcagcaagttggtaatgcttttagtgctttacaggaacaaggtagtagagaggaagaggaaccgcttcttgaggaacaaggtaacaagatttttactctaaattcccatggatagttgtaagattgcttgttggaatgttaggggaatcaacaataaagataagcaaggtgtagttgctgaattctgtaagattaagaaggtaggagttggtgctttcttggagaccaaacttaaagagaataaaattaaagagatgatggataataattttgtcaactgggattactattctagtcctactatagaaggaagactcttgatcgtttggagaaaaagctgttagaacttatgttattgctgaatctccacaaatggttcactgctttattcaaatggctggatgtgaagatgctttttgtgcaactttcatatacgggtacaacacagcagaagaaaggaaagctctttgggaggacttgtctaaacttaaatttcctgtaaagcctcggcttactttgggagattttaatgctgttctcaaaacatatgacggaattggagggaatttgttatagtgagatttctctcacctagaaactcgagaccagacccctacttagaggacacgtatactcagattttccaaagaaagctgagatgtccctgagggactcctcgaagttttaaacctcgcttacgatagaatcagcgagaggtggcgagcatgaccgaagtctaattgcatccgagacaagagagtagctcgcatatatcgaatatatgcgagcatcctccccgtgtccttgtataaaccaggagaacgattctctataaatacgagttggtcttaagaacccagcagcctttataatgtaatataggcttgcatgtctaggttctatcagcccgtcatgcgatgtccacaagaggcgactacctaaggacgcagacatcccgagcataatcgatgaacccgtgagtttatcaccagaatatgaacagccaactcacagttttagaagacgcatacgttgataaacctagtaactaccgttcatttattaatgttaacg

SEQ ID NO: 227444 - DNA, 2858 bp, Cannabis indica
ataataataataaaggaattttatactgttctgctgccgtgtgtttcgttcaagtgatggatttttggcgagtgggtctgagaaaggacaacccgttgacgtggagctgttaagctgagttgacttacattacacaaaaagaaaaagaaaatgagaaaagttattttgcacctttcggtttagtattattgattactaataaataataacaaaaggtcaaattttgtattgtatttaaattttttttagttgcttaataaaagaatttgaaagagagaaattttagtagtggaaaggaagtggccatttttttaccataaggacaggacagagatgctgattttttgtttgactaattcctatgtgatcatgcaacaacaacatattcaatttcgaccccaccttaattttaatcaaatgtaccaatcaatcaagccaaaattggaggtgaggcaagactgtggtattttaaatacaaatggaccatagccattacaatgatacactccattagacaaataatgtgcgcgtttgtggataagaaaacgggtacatatactattctaatggatttttaaaataacaaagacgtacgctacaattaatgctgctctcaattatcaaatatgttttctttttgatagaaatgtttgtttagtactcagttatgtgctaccagtaccactttctatttaaaaataagatacatacaaaattagtttagtccggttccaccttcaccaaacttgatacaagtataacactaaaaggcatgtcataattagttttttttcccttcccgcgttaaatactagactttctcaaggttgaattcttatgtgtagtgaaaaaaaatatatatacaaaaacattagtttagttagaattaatatgtttcaaaaccgcgtatgacacaccaaaactgattcaaacattggccttatttgataagaattgttgactagtactctttctttcatactattcattatcaaaggtttctctagtcacggatcaaaaaacgacattgtcgtagacctcacatttagttcaaacactccagtccaaccaacccacgagacaaattatactaaaaaatagtcacaagacattacacactagctcataattaccttacaattcaattcaagggaaaagtaataaaattatttcatatttttattaaaaaaaatgaaaatctgaaaattattcgattttgagcttttgggcttatgtttcacaaactaatcgcatgtttcacaatccatcttggtcagatatcacagaaaagaacagagcacatagaacacgaataacaacttgacaattttattaatcatcaaagaaaaaggccaaagacgtgagggctaagaccagaaattttgaaaagaccagcttgttctaaagtcaagatattaaattcgtctcctcctccctcgtgactagtactggtacatcctcttactccaattactgttcttctcatgaaagcgccaatttgttgggtgaaagtgaaattgtccttgttgtttggttaattagtctttcaagcttccatgttgttatgattgggataaatgttgattgatattggctcttacaatgtcacagtgataactctttatttttttaaaaatttgttaatattttgttacgacctctggctcagagtatagtagattaaagttgagcacaagaaaatgtgaagaggggtcttatccgttagtgtctcaagattgtgtggttatcatctctcatcactcttcttgttaatttgtccttgttggagtatgttacttcccaccttaatttactttgctcgaactgtgtcacagagtacatgtttaatactaatacatgtagcctgtaggtaaatgtatcccattcacattaattatcacaaggaaaacattacatgattacaaccttattttagcttgaaattacaattaacattttattgaggcctatatatttatatggctaatactagttcatcctcttacgcacataattccttaaaaataataataaattactatctaaggttaaaaaaaacatgtatgtacataaatagagtaaattaattaatggctccactaaaattaatgtgggtgcaacacttgagtcgactaaactccgaatggggtcagggatggtgattgattggagatacagctgagtgtatgctaggtttctctgtctttcacttgcatgtttgttttgatctttgtgtagtaaaagcttctgtatatatatactgcttcaaggagccccttctctgcaaacgaatgggtacagaactacagattgctttgatcactatttgttaaatctaggattcattgcagaacagaatcatagaacaagatgaaagaaaatgcagaacaaagatttatgaaagagaaagaacagagaagaaagaaagggaagaatggagaagaaagattaatctcattgaacagaattacaatccaaccttatatacaaagctaagctcaacagacctgagactaagccaaaacagaataaccgaatgagtaacaaccctcataacagaaaactaacactcacagtagctatctaactcaataacagaatgaacagtcaaaggtttaactgtcataactgtcatgagccttaacaccgcccctcaaactcaaaatgggatgatcagtaattctgagtttggctctaaaaccagagaacctttgactagaaatggctttggtgagaccatctgcaatctggtcaagagcagccacatgtttgatttgaaccatcttgtttaacaccttatctctgacaaaatatagatccaattctatatgcttagtgcgagcatgtaaaactggatt

SEQ ID NO: 227445 - DNA, 3281 bp, Cannabis indica
gaatcatattatttaatacataataaataacctgtattaacttgtattataatatttacaaaggggggtcctggggcaaaccctggccccagcctcgaccccgaccccgacccccaatatccccgaccccgccggacctaaactcggacatgaacatggacacggatcctagattcggactcagaccccggactggcaccgaaccccgaactcggcccccaaaactagacgaccccggacccagaccctgaccccgaactcagactcgaccccgaaccctagacctagacttggaccccgaccccgatcacggacccagactaagacccaagattcggactcagaccccgactcggactcagactcggaccagagtcccaaacccagaacccggacccagacctagacatgaactccagacccaaacctggagcccgaacccaaactggtacctggatcgggtctgagtctgtggtctgggttcaggtccgaggtctggggtccgaggtttggggtctaggttcggggttgaggtcccggttcgggtctggggttcgtgacatgttccgtgtctggagtttaaattcgggtccgagtctaagtctgagtccaggtcgtggtcagggttggggtcaagtttattattgtaaagaatttataattttatacaacttattagtacaagtcaatatcaaatataatattgtattaaataatactaatacaatacaatataatcgaacataatacaatacaatatattacggtgtactacaccacaccagcactaagtgtgtaatattttcatataaataggcaatatagcttatcctaaagggttacaaataaatataattaattaagggaatcaattacataatttttgaagaaattagggattattttacaaataaaataaaaatcttaaaaattttgaggactcttacatgtacctcgatcacatataattgttatttgcatgcacttgatcacttcaccagttgatctcaaagaaggtttgatcactatatataaacagttagagatattctcattaataatagtataaatatttggtgggaatatcaattattgaaagaatgtgcatgaaagcattaattatatattaaaatatatattactgatatatagtcaaaaattgttgacaataatatataagtaatattgaaatgtggtctatgtactatatgatgtccccacttctatgaattagaaaaaaaaagcatatataatgaattgataatgattcatgataagtgtccaaattacattacattaatactcaaaatatttgtattacgatacactcaaaatatacacacacatggttactcaaaatagcacacacacatggttacgtgggttatgtctttggacccatataccaaaccgtacgtaattagttggattccatagatttgatttattaaaatatatgtcattgtatatcttagacaatttcacactattatatattgaggatattatatttgataaatttttttgtcataataaaacttaataataaattgatctaaaaatgttatgaccaaactagctagttactttttctatatctattcgagttagaaattaccttaaagttgattatatatattaaaaaatgaaattgttgaaaattgagcttatggtcctatttttaccatttaacaaaacagaaggtctattttatcatttaacaaaacagacaatccaattagtaacttttgcaaaaaacacaagatccaaaatgatatttaccttattatataaacaatttattataaggacaacccagtgttctcacgtccacccgtctacccgtaaacccgaccaacctagttatctcacgggcagttaggtataggtgttttttttttagcccaaaacccataaacccaaaacttgtacacccaaaattcgaataacccgcccgatatataatcattatttaaatatttatatgtatatgcaatagatttttttagtgttcccaagtgagcttgtgtctttggattgtaggacttgttttggagtggtgtgggagccaatgggtgatgaaatgagccaatctaataaacaaaagaatataatgtaatgaagatgtagtacattgttatataatcttcttctttttaaataataaatatatttaaatatttttgaaaaaattaaatttattaagaggtggacaatggacatggcgttgagaatgagattgagctgctttaatatttatttgttattcctttgttatttggctaaacgacaccgcttatttcggtgccatcacgtgtattaatccttccatcccttcaccattaataacatgacacgtgtctctctcacatgacattattatattaatgacacttaaatacgttattgacacattatgtgaaaaaatatacgttattgatacaactttgaataaattcgattagtttcccgcaaaattatgatcttattgaattttttatatatttttgggtgattctacaatgcacccccttaaaaggaatatattggtgcacccttaacttatttcggcatccagaaaaaaaatttagtctaattgtttttcatattcatgtacgttatagctatttaagatatcttacaaaattttaaaaaatttcgaataatttacaatatagaaaacaatgttcaaatagcttattttacatgcgtataaaataaaataatcacgtgtgcaatacacagtttgaacgtagttttcagcgtattaaacttttccaaatttcttaaaattttgcaggttgtcttaaataactataacatacggaaaaattttgactaaaaaattatttcgggtgctaaaacagataggggtgcattaatatatccattttgaggaggtgcattgtagaatttccctattttttttaataaagagatgtatttattatttgttaaggggagttctattctcactcggtggccttagatattggatctaagtttgtgattgtggagagtgactcgagtgtggttatcaatgctctcaatagtaaggattcttgccaggcgcttgaaaactacatctcattttgttctaagtcttctcccttctttattagttgtaattttgcttttattagtagaacctgtaattttgccgctcataatgtggcgtatttgggtctatcccgatttcggttgtatattttgtgtaactaccgagaggtctaacctatttgaatctatgatatagacgccttttctcaaaaaaaaaaaaa

SEQ ID NO: 227446 - DNA, 5982 bp, Cannabis indica
tgtaacaactcacataattacatatttgtcaattgtgatccttaagttacaatctattttcagatttgtaactcatcatatgttacaattttatgtgtattattatactatatatgatataatataacctacaacacataatatatattaatctcttattaatatataatttgtcacatttaaatattttaatctatattatattatatcaaagaatataacatatataaatatatttttgagttacataagttagatttgctcataggaccccatactattatcaccttagtctgaagttatcacttaacactagtgttgctttgccagcactaatattagcaattttcttactttcaggggttgtttggtatgatataatgtttttatatgaataataatcttttacattatcatgtttggtgtaaggtttttcctattttaagtatgggaaaattattactttagaaataagattaccttctgttgggataatcttaaatacttttaaaattttgaattttaaatatttccgtaatcttaatatattaatatttttttatttaacttttttacaacgatttattagattcttatgttcagtcaaacaatataattcaattaacagtagtctaactagatattttcatgcataaccaaacactgttataagtttattaacaaatatattctctgcattattattccaattaatctaataattttaattatcgtaacatccttgcttaagcgtccattggtccttcctccacagactaattactcaggtgaaacacgcttaattttgaagttctttcatgatggactaccgaaaagaagattcatcttattgatatatgtagtaccaatcaattcatttaaactctctttaactgtgtagtatcatacctacagagtctcagaatcatcacacttattcctagacgatgtgggattacacaactcccaatctttcctcttacggattaccggaccactaactatcacaaccacataccaaacacccctagtatatttttttctcttacaaacgacatgtagttataaatggacataaaacgacaagtcgttaatagtattatttttctgagctcaggagtcagacactaccaatgattagtttgggatttgaaatcgtggctcaacgaccaacctacattaaaaagactcaaaatttacaaactttcttaaaccaaatgtcacattaaacttcacaaataaataaataaaaactcattccttgtttcgttatgggaatggagcttctggcaactaccaatattactacttcatcttcttccttgttcaccaccaaattcagttacttaccttctctgaacaaaaccaaaaccaatcacctttttctatcccatttccatggcaaaaccaagctccaatttcgtgggattagagccatggtcagagctaataacaaaaacaccaacaacaccataaaaatcagcaataatctaaatttcactcaaatagattcttgccttgtaatacctccccctattggagtgaagcccagggcaatcatcaaattcttgggaggagcctttttgggagctgttcctgaacttacatacaggtaggaaaatacccttttgtttaatacatgataaagcttcaatctatactgattatggttttgattgattgagtttccacgattataggaaaatacccttttgtttaatacatgttaaagtttcaaactttactgattttggttttgattaattgagtctccataattataggaaaatacccttttctttatagatgttaaagtttcaaactttactgattttagtttgattaattgagtttttacatgactttgcctttgttttccttatctggtttttctattttggggttctagctatgtcattgagctattggctaaggaagggtatgttattatatcagtaccatacaatgtgacttttgaccatgctgatgctgctaaacaagtttatgagagattcaacacctgtttggattccatcttggcaactgggcttcctaattcaaatctaactcctgcccaaatttctgatcttcctcttttctcagttggccataggtaaagtcaggtgaaaaaagtttgaggttcttttgagttagtttttttgacgtgtcaaatttagtcaccattttctgttgttttttcctttgtagtaatggtgcattgcttcaagtactcacaggaagctattttgatgaaaagattccaaaggttggttggttggttttcttagtcataatcttcttcttttttacatttactctgaatttcacttgagtggttttatgtcttgttgtgattaaggccaatgccattatttcatacaacaacaaatcagccactgaggcagtaccttactttgagctaggttagtagttttgcttttcttattagtgggttttgtctatgtaagtcaaagatgtttttctgtcaagaagatagatatgtgagattttatcatgacaatgttcttcaaccaaatataaaagacttgtcatcttccactagctatgaaaatgagcattgctatcaggctctggtgatgctaagcaaagaatggttaccgatattttataaaagttaatatatcaaattatatgggaaccgatacttaattatctcaataacgatataacacattaggtcatgaccaaggttgacatagcaaagatagattgttagaaaatttcattaaagacttgaaaaagatacaacagagaaaattgctgtatttagtcccttttgattctgaatctaatttctagttttactgcagttgggtcctctagttagacagatgatgccggttgtagaatcatctccagtttattcaatggctagaaatgcctcaggtattaatttatgaaaatcctatacttctgcaaagtttgttattatacaataccattctcatttactatacatgtaatttaggggatgcatggaaggtgttgcttgatgcagctggaactataatatcagataatgatcagcaaactttaaactctgtcactaagtttgttgaccaattaccctctgtgtttggtgaggtacatttttagaaaaatctaatggaataatggtaacttgtgtttgaatcaaactatgattagttaccttttaacacttccaagaatttcaaatgtttttgctaggtgactcaagggatatcagagttcaagccttcaccctcagaaaatcgctcccgatgcaagaactcgtacaatgtcaagcacacactacttgtaagtacgcgatttcgctccccctctcaactctttttcttttttactaaattgaggtcggccctagcatagacatagacaggtcaaacctgcttagcatgagttactccaatcattatcacaatagacgagatagctactagagattcaattcaagattgatctgtaacacggctaactttgtcatgtaggtaaagtttaatttcgacacaatagacgagacagatcttctcgaagagacattaaaacctagagtagagtccattggtgggacactagaaaaagttgagctaaatggtaaccatatcacaccatgcatacaggtaataagtcaccactacataattcacttttgaaaaatatcatagtttgaatgaacactttcatctaatactaaaagatgtttttaaatttgacattttcaggagccaaagtgggaagttggtaacttgtacactccagcagatgcattagctcaagggcttaaaaccctttctttgaatgactctagagttctcgtaagaaccattagcgattggttcagaaaaatcgaaggttgaagagccttcgatttaaaccctgcaatatgtcatcccgaccatgagcagcctcccaatgtggctcgggaggctgtttcattcggtatggatgtatttttttttcttaagttttaatagatacacacaattaatatataggacttggaactaaaacaaaaagatttgtatgtacacatttacataaatatatacacaaatattgattgtcaaatgtttgttgtaacaattgagactagttcaagtagcctttttttctttattaaaaaggtataaatgaggggagaagtattctttactaacttttagactatagaacacaaattattttcatttatttgtttcaatagaatgattttttaaatatttattttggtagaatgattattttattaaaaaaatataagaaataatattttccaatacacaaataaataaattatttctctaatttcgttttttttttcaaattatattctatcctattcttattccttaatctcttattaccccaaaacaaaagggagtaagtatacttttataaacatatatactactgatcactttttaattttatatcaaatttctttttatttctaaaattgataaaattagcattaattatcctctttacacaaaaaggaaagaaaggaaaaaaaaatgactcaaaggatattgatttttttttttaaaaaaaagaatccaaagctttattaacctttaaattctgctaccaaataagaaagcttttcagttaagacattctcatactgaaaaacacaaccaggatataaattagaagctcttacaaatgaatgagctactaaatttgctgaacgtttaacaaaaaaatagaaatattttcctactcaacaagtaatgctttacactttttaataactaaactaaaaacagggattattttaatagggtttcgaattgcttgtaccactaccaaacagtcagttttcaaggccacttgttgccagcttttttatttgatccaacttagggtctctcttacagcaattgcctttgttaattcgaaccgaagaacccctagtaaaaaggagtaacactctctagccaaaaactatattcatttctaaccactataccaaaatcatagccttgtgtactttcaaaaattgatacatcaacattaatcttgacactgtttgcatgaggcgcacactatctctcagcccatcaccagcagtaatcaaacggtattgaattgaattgaatttatttttaataataataatagttaaattttttgaacattaataataataaatatattaattttctttctgatgtaagcaaagcaagaaagactactttatttgtaaaaaggaacaacaattgtctgttgtgtttggttgaccctattcttcattaattgtcattttggcctactcaatttaactttgctaagaaaattgacaaatggttgattgattattcattgttaaaattaaaaataatggacccaaaaactttctagtttctatgataagatcacgattgaacaagtaaataaattttgggtatgaaccaaaagatttttaaaagacttttttaaggtccaattttgacactacaatataccatactacatataccacaccctactctagctatgttatggctatatattaaagataccaaagtcatatataggaagaaaaaaaatgaaattaaaacctctttggtgacattatacaagtgtggccctctcttacattatctgtccccacaacacaacaaaatgagtgtgtagatatttttgattgagtaatgatatatgtacgagcattgctattagatatcagcagtacttagtattactacaaggtgacgtcttgcgaataatttattgggccccatttatttattttgttgggtctaaactctcacagttttattttgggcgcacttatattctaggaaaatcttatctattcttctgatgtagaacgtgggttgatattccaacatagttagcgatattctataaaaattattatattaaattatttgatacacatatttaattacactaatagtaatataatataggtgaatattaaagggaaatttgattttctatacttagaaa

SEQ ID NO: 227447 - DNA, 3464 bp, Cannabis indica
gtagcgtgccttagcattagggcgttacaaccttagacaaagagattacatgaaatttaatatagccaccttatgctccaaaatacaaaaacttaaagaaatcatgtaagttagtacgtgattatcagaattgatattttttgaaccatgtaattcactttattgttttgaatgttaacatctgagtgactcaaaaggaatgtatcatggtttcctcataatctatatcactcttcgagttgcagaagaactcaaattcaaacacattcaaatccatatttttttccctttcgcatcaaatcgaatggaatcataaatttgaattggagtttttatattattttacatatataaatgaacatgaaggaaacttacaagataataacgaagattgaacaacaaagaaacgcccctgaagaattccatcaaactctacggtttattattattattatttacaaaaaagaatagatgactcttaagatctaaattaagcaatagatgatattgggagccatctcaatttgctacgtgttttttaaaagccatctaaagtttcatgttttgctactttagatgactcctacgatgagccatcataagcttggtatgactttttatagaaaaaattatagctctactaacagtagtttagaaacaatgactcactatataggagccattgtatacataggctccacattaaagtcatattttcttgtaatgatttatcattaatattttttttagcactctttgttctcttttgagttctttttttttggttttgttgtacacattaaactagccgtccccaatgcttctttttttttttgtttttttttaaaaataataattgaagaaaattatatttttgtctgtcatgcaacttcgtagagttgaaacaaattaaaaaataataacttaaaccatacaaataacaacttaatcaataaaataaattaatacaataatgtgaaggtcaaaataatgaccaaaatatataaaagaaacaaaattgagatagaatagagtaattaagaattgtgtcccatttaattcatttattataaagtcatgatgaataactcattataataaggaatgaatgattgattgttgtcgggatttatgcagagtcatcagtagtgcaaggcggtaggtttacagtgccagacatctcgggtttaacattcgtgcaaacggatttggctggccctttaatcttactaccagtagttttgagatcaatattattaagttgtataccttcgcacggatatgccccacaaacaagatacaaaactttaggagttgaagaagttcccttaatgtctttgaacaccacatcgctaaccttgatcttagatggcttctgtatacgtatatatacacacacaaacacataacatgtgaatttaacacagaaaacaatatatatatatatatatataaatatatgtattcaatataatacaataatctaacatatatatataaatacgaaccccttcaaattgtgtgcatgcgccccatggacaatatttctgatcaataattattggcgtttcaacattatccatggtgagtttctcaaagtgcatgcccttagcaacaccatcagtagacccttgccatgtcttgatcctgactccatttgaggttcctttgaatgtgcagtcagtgacagtgatgtcttctactggaagttcattctgatactttccaagactgccaacactgattccatggcccggcccacatgttaccttggtgatcttcaactgtttggttccgtctccaatagagatgcaatcgtcgccagttgcaatggtggtgtcagtgatagtgatgttggtcgaacgaccaaggtggattccatccgtggtccaactttcttctggagctattatcttaagatttgtgaataacaagttctctccttctaaaactgtgaagtgaaattgtttgctgtcttttgttgtgataccctcgatcacagagtcagttataaaatttaacctaatgttctgtttgttgtgttgaaatataacaagagaagcacacattattattaagtttgtaaataaagtaaataatagtaatataataatgtataataagtaagcttacaattgggagttgttcacaataatctgttctcttgcatttctttccccaactttgtccaccattaccatcgaaagttcctgtaccagtgatagttaggtgttggagcttttcaaaagtgacccaaccttctccatctttaaagcctttggcagcgctcggggccattagtataccgtccatctgaaacaccacaggagacttgcatggtcccagaaaaaatgctttgtttaaattgtatgtccctttaggaactactattgtcgccttagatggtgctgcacatgcttctttccaagcgtccgctaaggcctacgtacacattagacaaacacccatattttcttttaagcttaattgatatttacatatgtataaatatgaattaatttattattatgcaaagagagataagttgattaatataattaattacctgatcaatttgaccattaggttttgctccatatttggtcacatcaaaggtttggcaattaatggttgctactgaaattgctagaagaacaaccaaaaaggaaaccttcttgtttcgttgtagaaccattttgtctagttttttcctttctaattttaatttaacacttttaattaattggaatgaagaatgaaaatttatttcttgtttcgactaatttataggccacatacaattctaaagaccattagatgtcaacaaattgttactaaatttaacttttgaatttttcaaaagagtgatccatcaaatactcatcatgaaaatgaattaactatttttttttaggaaaatatatcataatatccttttgttagattgtgacacatttttactatatgcaaataatattaatatttacaaataatgccattagttgaataataataataataatacatactttatatattatattattatataataggttgtagtagtaattaaaattaatcattatttgtagtgatttgtttagtctttagatcttgatctaatggttgatattatgaataaaaatattaaataaataatttatttttaaaaaaaaaaacacaaataaataggtaacttatatagatagttatttttattgaattatatatttacttccaataatgattctttattttctttctaattcataaataattctaaaactaaattattaaaatattatagtgtcttttatataattttttagaaaattactatggagtttatttattccacacaaattgatcatcacatcctattatatgcatataagcatgcatgcataatagtaatgtaatattcatcatgaatcacatcctatttgtattatatccaaaaaaaa

SEQ ID NO: 227448 - DNA, 2082 bp, Cannabis indica
ttttcattaacattaaattgaaaggtggcagtggagatacaagtagagaccaattgggtgaaccgagaagggaattcaaatttacgaaggatggcaacaatgaaagaccacttcactctagcaaaggctttggccatgtcaagcttaaccgccatccaacctctcctcctgcgagatttaagctttatggagtgtgcaacttcctgagctataatgatattgtccaagataagacgacccggaaggaaagaactttggttaggagagatcagattgttaagaacaagcttaagcctattagctatggttttcgagataattttataaatgatattgcaaaggctaataggtctgaactccgagattgaggtggggtttttaactttgggaatgagagtgatagagtggtgttaagagggaaatattcccatcccgttgagaaagctaagagcaccaatgagaacatcattctttaggagagaccagtttgctttgtaaaaatgagagttgaaaccatcgagaccgggggctttatctagggggagctgaaagaaagctctctaaacttcctcaggggaaaaagtttcgtccaaaaaagatctatcaatgtcagacagggagcggtctataccctttagtcccgactgcatgtcagcactagaagggctcgaggaagtgaaaagcgagttaaagtgtgactcaatttcacggattatatcttcctcctctgaagcaatgctcccattcggtaaatgaagattttgaattttattaatctttttcctatgggaagcatagcggtggaaatttttgtatttttgtcaccctgagccaaccactgggttctggctctctgtttcctataggtctcttccttgtacaggagagcttccaacctggattgaagatcttttatttttccaattttacggtcatcccagttaggacatgatcgggccaattctagatctttctcaagtctgtttatgcgcttttcgaaatggaaatcttttttgtggttccatgtactgagactatttgcacacgcctcttgggttgcaattaggctaggaatggctgcctggtgactggccagatttatccaggacttctcaaagattcgagcccaattcgagtctgagagccacacattttcgaagagaaagcgtatgttaacgactcccgtattggtaacatgggaactggaggtaatcaactccaacgcacgatggtcagagccaaaaaaaccaaggtgagtgagaagagcatcaaggaagatgtcgatccaggaattattcacaattccccagtcaatgcgttcctgaatatttttaggagaggccacagtgttgttccaagttagcaggggccctttcggatcaagcgcgataaggttaaatgagtccaaaagatattcgaaatcagaagaaggacctctatcgggattacctccttgtttgtgttcagagaataggaaagcattaaaatccccaatgataagccaaggatctctagggttacccctcccgatcctatttagaattttccaagtttgaggtctaagcgactcgaccggggatccataaaagcaagtaaggtggaaaaaacattatttaaagaacaagagacataacaatcaaaatgactaatagattgcgaaagtaaagtaacaattacatcattagtccataacaaaatgaggcccccacttctaccaatcctagggacctccaaacaaaagtcaaaatgaaatttaactctaaggttatcaacagagttcttcgctagccgagattccataataaataaaatatcaggtctacaaacagtcactaaacgggagagattgcggaatgcaggcctgctctgtggtaaggcctacacttccagaagagacttcagcgacttgcagtttgtcagagcgagagcgcttgatttgttgacggagttcctgttggaaattatttaaccaggatcttagatctactcacaagtatgttgattaacaccctaaatgtgaactttctaaaacgatgaaacattatcaatatctaaacctggatctctttctctgaatctttg

SEQ ID NO: 227449 - DNA, 2280 bp, Cannabis indica
aaaattaaatttatagataatatattataacaaatatagtcaaaaccttacatatatcgccacctttacatgtatattttacatatatggggcttcatttacgctaaaagtaattatttaaaattatttaactaatggctaatagagcaaactggtgggttcagtgttccgctcacgacaggcttcacatttttgcactcggaagacattgacccttgactaccgttgtacttcaaattaatgtctgaaacgacgacgttttggcagggcatcccaccactgcacaccagttttatagctaatggtgtagaagaagttccccttatcctcttaaagcttacattactaatcttaacattagacggaagcttgttcttgcagccgttaaaggggcaatactcttggtcaattaacaccgggttgcctacgttctccatcgttatgtcctcgaaatgcatgtctgaagctgctccaggttttgagtcaggccaagtctttatccgaactccattctgtgtgttctttaaagtacaactcttcacgtaaacacccttgacgggctcctcatctttgtactttcctagactaccgatgctgataccgtggcccggtccacaagtgacattagtgattgtaatttgcttgcttccatccccaatagaaatgcagtcatcaccagtttcgattgtggtgttgacaatcttgatgtctgtcgattttccaatgtggattccgtcggtgttgaggctcttttcgggcgcgagaacgtggaagtactggaaggtcatgttcttgcagccaataaggttaacgtgaaactgtttgctgtctttgcttgtaacatcttggattacggagttggtcacaaagttgaaccgtaaattctgtttattatataattgcaaatattattaaaaaacaaaaaaaaaaagtttgtatacatgtgaaggcatttgaaatggtgtatggagaatattcttacaatgggaaggttaccacaaaactcattccaatcacattttttaccccaagcagtttgacctcgaccgtcgaaagtacctgtaccagaaatagtgaggcggtcgacataagaaaaaacgatccaaacattgccggagctatagctagggcccaatccaggtgcctgcaatgtgccttccaagtcgaaattaataggagccttgcaaggtccttgtagcattgctactcttaattggaatgtccctttagggaccaacactttacttggggttgatgatgcacaggccccattccaagcctctaacaaactctacatgcataaatacataaatacaacataaattgcacttgtaaagttttattgttaatattgatctaattcccacaagccaaatgaaattcaagttaattacacagtaattttttaccttggaaatatctgaactactggttgttgcacctttttttgtgatatcaaagacctgggccgtggcatgagatcccaaaattatgaataaattaactattccacataaaattggagacataatttgtttttgggtacttttattacttattttatgtgtacgtacatatatattatctctatatatcttattctgtctcttacaggtattgtctgacgacgctaagtaaaaaattttggctttattttgactccattatataaacttaacctcgacggctttaccacttaattagttattcttcgatcaatttttattagccatctattgggtcaatgattctaaaattggctttaagtacgattaatattacatacttcatatgtatcgctatttgcgttcttttgtccatatcttccgtacatgaagattcacctcttgttgatatttcctattatattatatttacggagcaaacttaagaaaataacgcaaactattgggaaagatggcatcaaatcaaaatatcatctagataatggttctctcactcttttttctctcataatctccaagatggcgagttcctccgaatatagtcggtatcatcacgaattttaagtctctaattcgctctccgcattctatgccatggcagataatatatatagaatttaataatagaagataaatatacaatttttttccatcttaacacctagagaatttttgaacaaattgcatcataaattcgtaatggaaaataggtgtggatgatatgttgtctcatagcagtaatgccctttgtcactcaagagagacttaaatattgctgtataaaagtcatataaccttcgcctagtatcaaagg

SEQ ID NO: 227450 - DNA, 1741 bp, Cannabis indica
taaaaagaaattattatcattattatggcattcacatttagggacggcaaacaatgttgttgggcaaaaaaagtaatttcagttatgtatgacatttgcatttagggacggcgaacaatgctggagctattcttgtagttggcaggggattggttgtggttccaaagttaattcatccattaccacctccgttgcaatcacctgagacatctccagaacgtgttatggaagacacatggatgcaggtgagactttttctcttgtatataaatatataaaattatatatagtattgatgatgatgtcctacattctgcttggcatggaaggagggattaatatttgatactctttacaatctgtgaagtgttgttaaattttttgatactttaatgaataaaagttgaacttactaggcttttatatttgttgctggaaagcaaataataataataatattggaattgtagttcatctgaaatagatcctaaatattggaaagtaaattgtgattggaatcagaagaaatgaatgggtttaaaatataaaataatcggaaacaatattttattattttgtttattaaactaatttgagagaaaatcaaaatcattttattttgtttacataaccaagaaaggtaatcaggatgttttgtttgactaaattgctattgttagaaaatgttattattttttttcataactttttgaaaggcatatttgtctttttactttgagataataaaaaaataaaataagttaggaaagagaatgacattcctaaaaaaatgagggagaattttcttttcttttctccctaaataaatgaatgagaatcaataccatacaattggttctcattcccttcaagtaaacatgccataaatgtaattcccatatccaacagtttgcgtaccacatatgccttttcccggaatttgtttagaacaagaaactgggcaaatttattttgctttacttggtgtttggttggtagtttcagtttggtcatctgtttatggtatgttgttgtactatactgaaagttatatcaaacttcctaatgctacttaatgatctaggaactaaaggatacctgacaggtgttcatttttaaacaggcatctgttattcatacatatgtttttgttgttctgcaggagttaaacattcaaagacctccaactccgactcgtggtcgtccacagcctgatcatgatcgcagttctcttgcttatatatgatagtacctttcctcttgctgctgatttttgcatctttgtaaatttcctgtatgtgatctcctcttctccggatgctcatatttattcttgattcaacctcaagcagaatgcctgtattggttctcctaatgtattcaagtaacataagacgaatgtaatatagattggaagtagtagaaaattagctgttagtgggttcatcactcaagatttgagtttgtaatacatgtacattaattttatttttaggcccatcctagagatgtattttctgctgtccaacatagagaaaacttacaggggagaaatttggtttttcagtcttcgtgtaatgtattataaattacaaaaaataattatgtataccatttgtttcttttaaagagaaaaataactttttgtgagatggtcttttgctcatagtcatagaatatactttcttcttcacaaagtttttttgaaccatattatattattatgtaacttggtggtgaa

SEQ ID NO: 227451 - DNA, 2635 bp, Cannabis indica
ataagtcaaacaaattaacttaccagaagttcagcaacaaacattggcaagccaatcatcttgagaaaaaaatgagaaatttgagtaatacaaaagatagaaatcatctcaatctctaaaactggcattgtatagttttgtacaggcaatgtcacattgccaaaaggagtcgatacattaagttgccatgcatcacttttattccatagcccaacagagtgagtatttgctgggaaagctgtgcatcgttttataggtactatattcctagcacttgtattaaacaattccatttttctttttcttttttttgttgtttggcttgagagaaaattatgagctatataggtatgaaaaaaaaaacttaatgatgagaactcagaattggaataatataaaccaactcatattgcttggggtatgatggttaatgttgtttttttgtgagtaattattattagaattattactatttttagtgtaaccccatactctaattttgagagtaagtagttgtttagctaggtatatgtgtgtggccagctttaagtttttctatattactaattaaatttatacttctctctaactgtttgtttttattccaacaattaaaacaaattgaatattattaattattattttatagaacaaaataatgtgtattatacctatactgttatatttatttgttttgaaaagatacatactgttgttatttactaaatattttattcttcactttaacttaatgaatatatacaaaataagaaagattcaaattctaaaaattttcaatcaaaagattaacggattatttgataagaaattcaaatatatctatataagaaacaaattattattgagttttattgtgaagtattgcgagacaaataatatgatgtgggatccacaatacaacaaatataatatttaagagcgatcaattttgagacaacatcaaatggcctctaataataagaatatgaaggacggcaaatgaatgtcgcctctaaaaaaatttgatttttttaatctgtccaacatgtcgcccctaaaactattagaagcgataaaaatcgctcctaaaaagttaaaaactaataattgcaaatagacgggaattttcccgctcatactactaggggcgactaaagtagcccctaatgccttgccactaacacggtcaagacattaggggtgactttgtcaccctaatagtgtgcctattaaaatctcaaatctctttctttctcgagccattttacattttccttttagatttctctcttcttctacaaaaaaaatcccttcttcaacccaaaaaaaaaactctattaacaatttcaatccaaaaaattgagcaagaagaaaaagaaaaaggaggtgcgatcattagcgcaattaactccatacaaggtttgtttttatttttagattttttttaatttattagttttaatttagggtaatctacagctttggtatactttaaataaatctaaaatagagttgttttagactttatttgcaagtatataaagctatgaatttgttaataattgtattaaaatttagatttttaatgtttgtgtatgtgtgagattatatatttatacaaatatatgcgtatatatatatttaatagttgtatatatgtatatgtttgtgtgtttatgcatgtataattatatatatacactaagcttttcatgtacttgtaattcactttcaatttcaagtcatactgcactttgtcaacatcgagttcttcgtacaaaagatcaagcaaacgtgagtaggtgacgttcgtatcaatcttaaatgtcaaaaaatttgctcaattttaaacccaatctgagctcacaaacaccattatacataacgaatgcaaaaacagttgaacctttgaccagatattaaaaaatacaattaattagaaaaaaaatctaacaaaaaggtcataaaaagtcctcaaaatgccataaatatgtcaagcatcagaccatattgggcctactattgggcccatcatccttgtccttaggtccacgatggatgaccgttagactagcatcaagccaatattgggcctattgggccttgtccttaggtccaagttgaccatcggactaacatcgggccgatatcaggcccgtcgggccatcattgttgtccttagatctaagaactctattgcactagcatcgggcccctatctagccccattaaattagatgaaaaaaaatttagaaaccagaaaaaccaataaaaaaccatgcagtaaccattttaacacaaaacaacaacaactcacagattaatcatgaaaataatattctaaactaaatataaaaactaataacataaagatcatttactcattgattgttccccaagtatgttcaatgctgcaagactaagactggagtcttacaccaaattccttaacttctagtactttgtagtagcttggagaggttaattgtatactaagaataaaattttagtgtgaaatggttaagagtgaatgagagaaaatgaggttttgagagaagagagtgaagagagaaagagagcggtagattgagagagtgaggagagtatacatgggcattttgggtactcaacataa

SEQ ID NO: 227452 - DNA, 2372 bp, Cannabis indica
cggaaatttgtcaataatcaatatctttttctttttgaactcatcaagaatcaatatcttcaaaagtactcagtgtactatatttatttgaaaaggaaaatttcacatctattattcataaataactccatattaaaattatattccttaatacatttatatattttaattgacaaacttccccttttacaatttattaataaaaaaaaaggaaaactcaaccacacaattgctcactctctctctcaacagctcacacacaagtagctcactctctctctcagcccaacaatctctctcaactcaccctctctcagtcacttccgtttcgatccctctctgtctatagtagacattgaacaacccgaccacactcaatccctcagaaatcattcaaccattataataagtaagttgtattttaactattttttagacattaagaatagtatgtaatttatttcctttatatatgtatgatgttgtttgaaatagtgttattttgctttattctgtccaaaacactaaatctaattttctctcaatttaggtttttttttactgtttatcaatgatttatcgatagtaatgtaatatcgatttcttgcaggcaaaggtcaaggatgaccattatcgatatgatgttgataagttgtcgacagtatacgtacttttaaatttaatcatcgttgtcgacagtatattgacatattgttgataatatttagaaaatattttctggtatttttttcgattatttgtcgattggttatccatactttgtcgatgtattggaatattttctagtatttttttttgttgacattttattgatagaatgtcgatattaatacaaaagagtgaaaacttttagacataagtaaagacaaaacaagtgaaaaatttgaaatataaggaaaaaagaaacaagtgaaaacttttaagcataagtaaagacaaaattatcataacaatcatgaactttaaatgtaacccctaaacgttaaatttaaaagtgtctgtagttcaggtgactcatgcaatacaccctcaaccacctaggcttgactggttcgcctttaacaaaacctactttgtaacgacgacacctttgggagaaccttggtggtaaataagcgagatacccattcttttgaattggaacctccattctttcgccaacctttcattttcaaaccgttccatacattccaattgctctttttgtagagcgtgacgatattcttcactacatttctatttgctctctttactagatatttacaacttagaagagaagaatattctagggttaaagaataagaaagatatgtaacttatgaagtcaaaattttcttttataaactagaatagttgttgggaaggtgagaaaaaaatgtcaaaaattaattagcattaaattcttaactgtacacgtgcttgtcatgcaatgtgcttttattgataatatatcgatacgttgtcgataatttttttgataggcaccgaaaatgacacaaaattaaattcacgacactctttattgatatgatatcgatgttacgtcaacattttgtcaagtgtttgaaatgcctcaatgtcatgacttttctatcgataagatatcgatagaatatcgacactctgtcaatttatctcactgctcaaaatcatgacactttttattaatgggatatcgatcatgttaaatatgtcttccatttataatgtttttgatattttttggtttttttccctaacctttttttgtttgaaattgcagtatcaactgtgtttcttgttatatcgtacgatggtgtttggtgtgttgagagttttaattgggtttataaagccgaaggcagtttcacgttgaaagttagaaccgacacaactatacaacaattgtgccaaattttatatgaagagttagaggttgatccgttggcatatgatttgaaatttgagatttgttccttgtacatgaaaggacaaatggttccgccagaggttattaagaaagaacgccaactaagaacgttcttagagatgagggcaataatatcaaacacagattttatgccattatttgttaccataggtaagaaaagtttggaatttggagccaactcaacctactaatccactcccttgaagtgtggtagagtctttcattcctgaaatagatgtgggtatttgggtgaataaggaggatcctgccaatgtagattaacaacaagaagtagcaggatttgatcagtttgaggagtttgatactcctttctataataatgatcttattataaacttgaatatgaatgaagaacctgatttggtagtcgatgaagccgtagaggtacattccttgaggt

SEQ ID NO: 227453 - DNA, 2475 bp, Cannabis indica
ctctctctctctctcttttgttgtaatggatttaggggtagcatggattaatgtcacaacaaacatttacaagaaattaatggataactcagaagacattgaaagtgaatcagaattagaagaattcttttctctgcttaaatctgtaacaacacttatcgagagtaaagatcttaatgcattcgaaaaacgatcgaaattcatagaattgatcaaacaagctctgtctcttaagaaacgtgtggacgaattcgatgacaaatgcttaggctacaacattccatcactatttcaacatcatcaatctttcaagaattacttgaaaaatttacaagagtttatggagaagtggaaggaagtagcgaaagatcaaagagcgaatggaggaaaaagcttgattgaaaagcttaaagaacatgatcatcaatctcaaagaaagagttcatttgattacttaaataggttgttgatttgtgttggtacatatttgtgtgaagtcaatgattttattttgatgattgtgattttgggtgataggaaagaaacaatgaagaatctcaaagatttcaagactatggtaaaactgctaagtttggagagtgataactctatcgtgattaagaatttggtatctacgatccaattgacaaaaacaatggtgaaaaagaaaaagcgtttggatattttttcaaaatcggggaaggtattaattgatgatggcgatgtagaatttgagttgcttcgaatgatactcaaagaaattttgtttgctcaaattgttttttgttgtcctgagatgaaagcaagttctatagatgatcgattcttattatcatatggacatgttttacataaatactttatgaagagattaagttctttgcatttgaagatgaatgagctgagggtgcaatcgagttgtgtgggcgaaatcaagaaggcggaaagaaattgaaaattcttcaagaaatgatggctcaagagattcgaaacatgtggaaaaaaacttgatcttaattcatcgtcgtcgtcctcatcatcctaagaattttggtattcgagtttcaagtattcgagttcaagataataataatgttgagtaatgttttttgttttagtacttgaaaatatgagacatggatatttgattttaatattgagtttgtcttccattattaatgcttaatttgacattattattttggtacaatgatagttatgaattaattcaatgttgtcaaagattctaatacaataattttaagtccttaattaaataattatatattttgatctgatatgagatagcagtaataagagtttggattggatcatatatataaaccaaacttgcctgatttaattagagcctaaactaagtttaaccgagggaattattcaattttcttaataatgatctcatttagtactaattcaagcataaaatcatatatttaatttggtgtttggggtaaattaaaaaggttgtgtgttacaaccaaaactttttcaaaacatcattgatataaaaagtgcaatcaaaatatttagtaatgttttttgaaagtgttaatgtttctcattctagtagtaagtttctttcaaatatatataattgagttttgtaagttttttattgttgagatttataaaccaaactttcactaatcttgaattcttacataaaactctctatttcatggctttcattctaataattagtgtccttagttattggtacaacagaaacggatcaaattggaaagagtagagactacgaatattttaaatatttcatcattttggtagaaaaatgaatgattggaaacactaatacagagtgatcactctgtaattcccttttaaaatcatcaatactcaacttgatcccatatataatacatacaatattagagccatttagattagtctagctgctcgaatagctgccactgtagttagacaacatggtactcgtcttcgggttcaagatgcagtaaagttggctgaatcttttgcagttcatattggtagttcgaattctagttcccctggtaatcttcaatcaaatatcggtcagatcatatagtaaaggtgcctaagattattccattttaatacattgtacattgaaccattagtctgtgtaggatttttaccactttaacctacaccaacaaaacacataatatcagtatacaaggtcaaaaccgacctttcctctgtctaacttaagattagacaaaaacagcaacgtttaaaccccacgacaccaaactctgtgtcctattgatccaaggcttaaagacttctcagaaagagtctcgaagccctaacactcaaacactcagcctctcagaatcgaaactagaaaccctagcagagcaagttcttcacaagaacttgctcaatcccagtagaaaccctaggatcctcacccacacatacacatatttaagtttagtaaatgaaaaa

SEQ ID NO: 227454 - DNA, 6637 bp, Cannabis indica
tggtaaaaaagaatagatgatgatgaggttagcatgcaacttccaatccatgtgttgccattaatttgtgtaaacttctcaaacccatatgatgaaaattgaatcatcattaatgatgaaactctctacattttttattatgagaaaattccaatataattattagtattttctgaaaacttaacaattgggcaatctgggaacagattcccaatgctacattatgtcatggtcctatggaggagaggtgcttgtcctttcatggtgtttcttaattattattattattaataatttaatcttttggttccataacttgtattatagtgcaaaccatagatctattcaagtaatgtaaattttgattaagaaaaaaagttactaagtttggtttaaattccttttacattaaagaaaacgaattacgaagtttcaatacaaataataatatgggtaagtactattttaaattctgtgttttacaaacgttattaaatggatcttttattttgttaaatgagaaaatggattttatatttttcaaaatagtaaaaataagacattaagttcaatttttaataattttattttttaatataaccaactaaggcaatttctaacacggacaaatacagaaaatgtaacaagttttatcataacatctctagatcggattatttttaaattttattttaacaaaaaatcagttcagggtcctatttgtacaatttcgaaaaatacaaaatctattttatcatttaacaaaacagagagtttaattagtaatttttacaaaacacaaggtttaaaatgatatttaccctaataatatagtaaaaaagtatctttcaaataattaagttttaactaaataaaagaaataattctataataaatcatttaattgtcaaaacagatcttaatttagatatataacttaaatttaacaaaaaaaaaccccatttaactaaattataacatcaaataaagtatgaatttgacatgtaaatttgggcatatttgtagattttatgctaaaaagtggaaagtaggtctattggttagttagttgaataaatgcagaagctaaaaagtggtcctccaaaagaaatgagtgaatatagcagaagccacagaagcatgcctccctacacttgatcaactcatttatttaaggccccctatactatgaatactatacaaagaaaactctttaaatttaggtaacctttggtttggtaacttggttgatcaagtgtagaataaataaagaaattgatgtttgttattagaatgaatactagaatgagtgataaattaacaaaattgtttcactttgattttctatatttatatagaaaaagagaattcataattatatattgtaatttaaaaaattatatattgtaattttacttagtgtaaaaaatatatgaacataacttgcaccaaaatatagcattaatttaaaattacgagtaatgatatgtgcactaaaatattacaaacatagtaacataatagtttttttaaccaatcacaattacttcatataagacttgttacttttatgagtgtgtaatatttgtgtataaaattacgagtaatgatatgtgcaccaaaatattataaacatagtaacataatagttcttttttaacgaatcgcatttacttcatatatgactcgttatttttataaatgtgtaatattttagtatacatatcattactctattgctttttaaaaaaagtatgtaaatatttttatgcataagtatagttcagacatcattactcctacatacgtataaacaaagtaaaccattgatgttgtacaacatatttatggggtcatgtgggacaatattaatattgtccaatattacatttgtggaaaagtatggtaacttttgctcccatggtaaaaagacatggaaagctacttgtattcaactgaactgaagtgaacatacaatttgtgtagtctcaatctcaactcatatctaaagtcactttttttttaataaaaaatgaaaaagaaaagaaagaataaaggaaaatgggttgggttaagtcaatatcttctaggcttctttttcagtgtgagtggctcttgcatgattttaaaattgggtagttaggttgtgtataatggaagattgactaaagagtggctttttgtagactatattgagtataggcatgttgttatagattagaattttgggaatgaaaagtgaagataaatatgtagagaagattttatgggttaacaaccatagaggtgatgccctttatttattcctttgatttttgattgacatactaaaagttaggtgaatagaacaaaaatcactagcattgttgaggtgatgtctcatagttaattgtactaataataacgatcctgtttttttacgtggtgaataaaatcacacatgattaatatttttgaaccttctcgaaccaggatagctcatcgtctaaccgaagggcatgtgtttaccaaatcatgagctgcaaaattctaatcgagagctacataaaacaaaattgtcctcgaaaatttaaacaataaaattataacgtcttcaaacagcatcccatcacattaaacaaatatcttcccattattaaaagtcatcatcagagctagcaaaacaaggtgaaatgatacatatttaaactttttttaagctttgacatgtataaatcattgaactaaatgaaaacaaggacaatgcatataacaataacaagaatgatttttcaaagaacaaaattctgtgtatataaattagagccaaaaagaagttggccataaagaaaggcaccatgtccaaaacagaagttaaaggactgctgtacattttcccttgtggcatatcagagagggaaagatttgacattaacaaaagagaaagaaacaatagaaaaaaaaaagaaaaataagaaacaagaatctccattatgtatttgattgattttccctacttcaactcattgattgttattagaacttgattcaatatctttaagaagtccaacaatctgttgcatacttggtctctttgaaggaagatcagctgtgcacagataaccaattttgagtgcttccaccatttgctcttctggtcctgtattacgaattttcggatcaatggctcttgcagcattgttctttctgaccaaccccctaacccaaccaaccaaatttccttccttttcatctggatagtcatcttcaattggctttttcccggttagcaactcgaaaagcacaacaccaaagcaatagacatcggattttgatgttggtgaatcgatgtctggcttagaaaactcgggaggcacataccctggtgatccacaagcgagctcctcatccaaaccgttcccaaaaatcttagccaacccgaaatcagataatctaggctccaagttgtcgtctagataaacactgctggctttaacatctctatgaatgattgaaggaaaacagccatggtgaagaaatgccaatgctcgtgctgttcctagcgcgattttatgacgaaatctccatgttgttagcaatccttcagagccaacattttggatgtcagcattctcatcttcttcccatgtatctgtgctccagtcttctgttgtttggaccccaagtggcaaatcatgtagcaaattctgcaagttcccattctccatgtattcatatattgcaagtctctgatctccagctaagcaatatccagtaagaggaacaagatttaggtgtttgattcggccaagatactcgagctcccttgcagcctcttgatctgtcaatgtagaaccgtggacaagaacttttaccgcgatatgtattccaccaggtaggaatcctctgtatacaggcccgaatttaccttcagccaaaagggtgcctcggtcgaagtttgaggttgctgacaagaggtctgcaaatgtgatattcaacaatggtttctcaaaaattactactggaactgatgttgcttgcttaacatcagccacccatgtagtggaatcggtctggaatgaaaagggacccgaaatagtctgttcttctttataagaaggttgcttaacagcccacaatctatttttccttctgcaaccaactgactagaaaaagcaaccctgcaagcaagcataccatggagagagccaaagccagggcaagctttagaccaccatggttcgaggacgatcttttcttgaagagggccgggtttgcagcaatggggcaactgtttaatgatccaatgaaggctgttttgagagtttcaaggggaatttgagaagcacaaagggtcaagttattgtaggaaaagttgaacctttccatccaaaggagtttttctaaaagataaactggaatgtctccagtcaagttgtttcttgagacatcaaaaatctggagcttttttgcactcaatgatgggatatgaccaacaagatggttctcagaaagatcaagtgtattcaaatgactcaaccttgagatttcactaggaacttgaccaatgagattagtactagacaaatttagatattctagtcccaaaagcagttcaatatttgggaacatctgcttagcaaatctgttgtgagctaaattgaggtgtttgagattttgtgcttgaccaaagttgtgtaaaaaatctccactgatctcattctcagacaagtctagataaactaaacttgaccagttatagctagtattgaattgtacctgagaaatgtgaccttggaactggttcttgctcaagtcaatcacttccattagctccttaaacatccccaaggctggaccttgaaataagttgctggaaagattaagagttgtgatggatttcagctccagaaaatcagtctctctgccatgaatctcattccctgcaagattcaagcttttgagcttgggaaatgcagcaccaaaaccatctggaagagacccacttagccgatttgatgaaagatcaataagaaccagtgattgacaactcagaatcccagatgggatgttctggtcaaacccattgttgttgagtttaaggctactcagactaagaagtgagcctatagtttcaggaattttaccagaaaaatcattacttgaaatatcaaagctttccaaaagaccaaagttgccaatgtcattaggcagtggaccagaaatcttgttagaagaaagattaagggttttgagtgagtttaaactccataaatcagcaggcaagccagtgattttgttgttgctaaggtccaaagtctgaagctttgtcagttttccaatagtggtatcaggtatagaaccagagaggctcaaaccagaaactactaactcaataacatgttctttcttagcatcacagaacactcctcgccatttacaaacaggtacagaaaagttgtaaatttgagaaaatgaggaagaatttgagcccatcttcttcaaaaactcagagacaaaaaacccatctgaattgggttcttgttgacaagataaaggctccaagaacaatgccataacaagtatcaaaccaaagaaacaagaacccatttttggaaagaagaaaaaaaaatcttttttttttgaatgagacaaacaaagcaaacccagaagcttatctgtggattatcttgtttttttttcaactaaaccatgatattgccataaatagtttctgggtctaccttagaaatcactttcactgcttctgcaactccattaaaatcaaaagatggttggtttaggctataactctacttatttggataacaagtgagattttgaggagtatgaagcatctatttgggggggactctaaaggaagaatgtgatctcaccttgtctggtttgcagattcatgaagagaaaagccaacagaaacaaacaattaaaggtgggaagcacttttgtctttcagtttctctgagtctctgaccatagaacatgtaaagttcaagtttttactgttttttttttatttgtaaaagagaaaagaaaaaaaaaacccaacaaagattttttaatgaaaccaagaaaggttttttttttaaggttcttgggagaaggattagtaaaggagaaagaaacaaaacatagaaaggtggttttatattgggaaggtaataagaaagaagaaagccagagcagaagaagaagaagaagagagagagagagagaatggtggtcagaggttggattccattaatgtcatgagaaggagttactatcaaaaatatagaatagctatttgggttggtgaatttatcaaagctttattggtgggaattcaatgattcttcattgagtgttcttcatcattgatcctcctttcctaatgccatttaaatagtttttatatatatatataaaaaaattactgatatttgaagggctttaaatatgtacaaaatattgaaaatgtgacataaaccataccatatgataatttattgtacaccccaaattttctttcagtcttttagcctaattttgtttatatatgcttatgttgcagtctaattttttttaaaaaaaatcaataatttactgtgttaaaataaaaatttaaacagctatatatcatattaaaatattaaaa

SEQ ID NO: 227455 - DNA, 2349 bp, Cannabis indica
atttttatttcttctaactaaacaacacctcaattaataaacatgtacagttatgatacacacaacctataaaagagtgttattttaattctttttacaaaaccatctctgcattaatacatttcaattttatttcatttcaggttcgtttcataaggtttcatttcagattattattgtgatataaaattaaaaaatagaaaataaaagaaaacacataaatttctcaaaattttacaatataatacaccctaaaagcattcaaagctaaccaagtaaagtgacttaattgcacacactatcagtgatctcttgattaagatggttgtaactgtaagcatactcctggaaactgggaagccttggctttcacgttcattaattgtacagtcaaatggatgcccgaggctttcaatacatgtgtatggagatacacaagttcatgagacgttttaatactttctctcaccgtctggagtatgataatcataaccatgatgactcccattctttctcaaatcttctcgagattttttgtcaccctctggaaaatccctcttctccaatctatttgactttgagtgtctcctatgacttgattttctgcttctccttgatctgctttctctcccactctcagcggaacattgctcgtaatgatcagagccagacttacttttagacttccagtgttctgaaataacttcttcagattctgaaggatgctcctcgtggtcttgataatgatgtagttctaaatcatggtcatttgacttttgctttccattgtattgacctgaactgctgctaaaactagttaccatcctagacttgtggggtttcttatcggaacactgttcagactcccatagatcatgggatctatatctctcatcatattgacttgaagtgccagaatcatagctcttatctttactgttaccagaatctgcttttacaatatctatgcacgaatcgcctctgttttccaagctattttctggttctccttgatcatcagaaacatttgatacttcattcgtttgtgtcctaatttgacaaaagtgccttgctacatcctcgcccaacaactcatcaccatagctgcctttgtcagacaactctcgaccagtatcatgacttctgttattcctgtccaagtgattaccaggatatctacagcgtcttgagctgctcttcctgctatcatgtgatgtttccctgttaccactcttgcctctcctattgaaatctatttcatgacttctataatcttcataatcatccagcttcctcactctcttatgataatttgagcttctcctagcacgatcatggtgtttctttctgtctccctccctcgtcaaccgttctccatctgaaccatattcatgagtgttgttcttgtattccttactcttccatcttgaggtttccctcatacaatcatgagattcatctccgcttatctttctatcgtcatcaaatatttttctatcagaatcagtatgacgtttttttcttttcttctgatgcttatcatcctcatggatatcatcatcaagacttctgataccatcacttgtacacctaaactgatctgctgttctcctcacgaaatcaacattctcctttcttctacctgaaccactatggccatggtccctgtaacttgttttagatccagatcttcttgagcaatacctgaaataaattaagcaggatgcttaattttttcaactcaacacaacattgaagaatgggataaaagagaagcattgagctcaagcaagaagtaaattatgaagaacgaaaaatacatatattttctctactgacttacatgcatgtctacaaacaaaactcaaatcataatatggtcattatacatacataaagcaaatcatcagctctaagatgacctaattaaatattctcagtatgtcacattacacactcaagaaacagttttattatagtctaatcactgaccaaacaagtatcaatcttctattgcatggataacttgtcaaaatgaattgaataagaagctacattaaagtattaaataacaatgtaataaaagagatcattttaaaacccactgtcatataatctgcaataacaatgtaagaaacccatctttctaaaagtgatactttatattagaataacctctcgtatggttctgaaaagttctaatccaacttgcgccaattataaatatgaataaactttactacaagttactttttcagatcccatattaggaaacttgcctccacatgggaataattgtctaaaatactttttaaagttgttcgggagaacgatttatcttttaaagtt

SEQ ID NO: 227456 - DNA, 3160 bp, Cannabis indica
agatagtactgtttggggtagtggtctcattcaacaatgaaagaactcaaaaactaagaacacaaagacaaagatcaatgcaaatgtaagaacaaatggattgaagttgttcttctcttgaatttgatatcttatttgagcatgtattcttgcaggcatgtttcattgatctggatttgaaaccttttgaaaatatgcaagaatattatgaaaaggacaagaaaatcgtaagctgctacacgcagatggtgaaatcagagcaagaggtggaaaaaaattaagggttgggaggtttaatacaatggcacgaatcatattggtgagtgccaatttgcttggtaaggcaactcttcctattcattgttgttgtaaatggtgtaatattatgagacttggaaggagttacaatattttttttcccttttgaaatggattctgttatctgagcattgtataatttataataagctaaggaaaaaagaggtgaattggcaagtttgtatgagtttttcatatcatttttttatttctaaattatttattattttgtggtaatttctaatgggctaaggtagaaaatggctataaatactaagggtgttcatccaattcaattcgtactattttgtttataatgtatttgatccgcttttatattttggatttaattcaattctaatctgcaaaagttagtgtggatttgatttattattttggattgattatttttaaatatttaattatttaatatttattgaaaaatatttttttttaacataactaataataaaataaataaattattattgttttatgtgtctaataataaattaaataaataaaacataaaataataaatttaaagaaagaaagaaaaatgtatgtaaaaaaaagtttttaattttgttttaaattataatttgagtgtaatgtaaatttggttaactaaattttgaatatatatttgtaacacatgttagatttttaaatttttatcttttacattaaaatattaattgtatatatactataaatatatatatgtggattagatcagataagtaaattttacatatcaatcaacatttagtcgtaaaatgcagattttagaatttccaattcaattgaatatgcacaaatgtaggtatatgcattttgcgaattggattgaatcgtggggtgtaggagtattctttagtgatccacgtgccttgagtatgtgtcttctgtttgggcaatatgtttatatgaggtcttataagttataactacatatttcatggttgaaagaaatctattaaatacaaagtgtgtcaatcataaaaatgagatgtattcacaactactacaacatttttccaaacaaaatacctcagaacatcttaattttacaatagtgaaaatcagtacaattgactctttggaatggaacaataacaaatcactaacatcatccaatgtaaaaggttccatcagttgttctttacagcatatatgtaagtagcttaaagtagataataatatatagagaaagggagaacagtgcaaacagatgctgccagaagatgagagccgaagcctccctaaccgcgtatcccctcaggctcgcaattgctcccagtaaaatggcacttggtgttgtatactgcatcaagaggacaaatctgtacattcgatcaccaaccaccaaaaaattgagcttatcagccattgccactattccaatcccgaatatagggagcaagaggagcctcgctacacttataccaatagttgttcgaagaccaagggtagattcacttggaccttctgcaagcatacccccaagaataagcatcacagaaggcaccattgctgcagctaaaatctctaaactatctgtaacgaaacctagtggaggatcgtatccaaagaaaaaacctttgaattgaggtatcaatccgataatgatagccaatagagaagcaattgttgggggctgaagtatgtgctttataggagtttgttccacaacaactctcattctcctcacaactcttggttcagccaaacacctaatagattttggactgctttcaccactttgttcgtagaattcagtatcaggtagagtggattgtgaaacattcgagatgcttttgaaaatcctagcaatgaaaggtgtcttggaatgctctgtttccttatcctcaatacctggccattcagcttcaacaaggagaggcctactgatattagtaacgggcaactcttcctcaatttccatcctttcctcttcaactatctcataatactctaatggaggctccatcatgtgataaacaagggtgtaaacaagaattacacaaacccactgagcaaaagaaacataggcaacccctcttgaattacagtgaggtccaaaagggttatctgaagtatgacatacagacccaacaattgcaagaggaagattgccagtattcccaaatgcagtcatgataatggtaaacctattcaactgcggaggcgggcgacatataatcaccaccaagtacccaaggaaacaaccaacaactgtactgatcaacacattagctggaatgaaccaccaatgaactaagttttcaagtgtcatggattcaccaagctcagtaaaaattaggcatggcaagaaaagagcaaaaacaagtttgctcaaaagcttaaaagtggatttagggatgatttgtattttgggatgtgcaataacaagtcccataagagtaagagtgagaagtttcatcaaaggcatcattgcactcatcacatcttctccacttgatttcacattattttggtacaactcgttcagatatctagaaatcattgtttccacaacttttatgatcaaaaacaatatacccttctctgcaattatgaaacaacaaactcaaaataaaacctatgactcccaaaaaagaaaaccaactgtgcaattgtactatgttggttctcaattacttaatatcaaaaaaattaaatttgtatataatgagatatcactgtatcaagtactctaagtccaattacgtaatagtctcatgcaccaaatgaaagatactaactcaattgcaatatccctgaaaccccacaattgaaatctctctttcatttcccagaaatcaaaaaaaaaaaaaaa

SEQ ID NO: 227457 - DNA, 4451 bp, Cannabis indica
gagtgtgatccccgtcccgccctatttaacattcgcggacaaaaataatcctcatccccattttgttccctatttagatggggaatccttgtttattaggggtgggtcctcactagactattctcatgggaaaaatgtgcatccctaacgttacagttatttaatacattttacaaaattttgaaatatagaaaatattgttcaaacaatttattttacaagcgtatacaataaaagaatcacacctagaacagacattttaaatttaattttcaacgtgttaaatttctcagaatgtctcaaaattttaaaataactataacgtatgaaaatagataagaatatatcagtagatagagtccatttgtaaaattttctaataatatgtattattatgaaataaaattaagattaaaactaatcacgaaaatggtgcgaattttccaaaagaagaagaaagtatgatatttctaaaacagcctatttaagtttaattaatgaaattagtattttccacgtaatagaaacaaataagtaaaataaataaacaaaaacactcaaaacgatggcgcgtaagccgcgggagatgccgcacgcgttgttgcaggcgcatgggttacacgctctcaccaccaaattcaaaattattcaattattcaatttctcttgtcggcgaaaccattccatttctctctctctctctataaatcctttaccaacatctttacaaactgatcaattcgatcaactgctttatcaacatctttctttctttccccaatcaacaaccaccgtccgatcaatcgattcgaatggcgtatgcgtacggcgccgccgcaccaagcaatcctccaatggcgaatccgatcgccgtagtaagccctcacttctgtgcaccttatccagtcgatttgatcattgcgaaaaagctcatgaccttatcggaaggttcttttgccgttacggatgttaacggcgccgttatgtttaaggtcaaaggctctgttttcagtatccacgaccgccgtttgcttcttgacgcctccggtaaccccgtcatctccctccgccaaaggttttttttttttcttttttaccattttgccctcttcttatcaaagtatctaatgttttgtttattcttaaatattaaattaaatattatgttcttaacagatctcacctgagtgaatatttatttaaaataaattagttaaagaaatttttgaaatctaattagtgtaaagttatgcatttttgactgtgttaatattattggaaattaaattttgaaataatacaaatatattgattttttttaatcatttatataaagtgaagaatatatatatataatatatatatatatgctttttacaaaaaaataaaataaaataaaaatatatatatgcctttttattgaaaaagtcaagaatatatagatgattgaggtagaacttaggactaaatccacttaaagaattaagaggacatggtagtttcttttatcattttattattaaggtaataagtatttaaaagttttattttataaatgtatagatttaataatattttttagcatcatatagttaaaattttaatttttgtttagttaactttacttagtttttgttaaaagaaaattttaaaaaaatttctgtcttaacttaatgatttaaaacatgtatcatgtttaagataataatagagtctaaacaattaaatacttatgctattaaaataaattattaaatttatatttattataaactctaaactttgagtaggtatgccacaattattttttattactctatttatttttatgtaattttttacgctttttttatgttatgtattactttaattattgagtaatttccgttataaataaatatttcagtttaatttttagttcggtaagtagtaagtaaatttttacgtgtcaatggttaattaattcatatcattaaattttttttatttaaatataccaacgagatgtggataatgattttctgaaaattccagaaatataattattacagtaaaaaattaaacttgcagaaaattttatgcaataaattacttataattaaacaaattaatttaaaatagatcaaaataattcatatctgcctaaccctattctttagaggtctattttcaagtgtcaactgtttaatatatattgtagtgtagacatagtatagttgtttaacaatatgtaatcgccctatgcagataataactgctcacagaagatggcaagtatacagaggagatagctcagattcaaaagacttagttttcagtgtgaagaaatcttctgtacttcaattcaagacagaattggatgtgtttttgggtgctaacacaaaagaagatgtacctgatttcaaggtcaaaggtagctggcttgaaagatcatgcactatatatcttggaaatacatccaatatcattgcacaagtaagactctatatatatatattatcaaattatattcaaaccatttatttatttatatttattataacataaaacataattattataacattgcagatgcacaagaaacacagtgttgaaagtgttttgcttggaaaagacacattttcagtgacagtgtatcctcatgttgattatgccttcatagttggtttggtggtcattctttatgagattaatgaggacagaaaagataatgactgaatcaaatacatatatatatgtatatgtaactttgttgtacttactatttcctagtctttaatcactacacactggttttttttaaaatgtttgatgttaattatatgaaggaaaatgtgcaagtattagtttgttatgtacttttgttttgatatatttcaacagcacttaataatcttacaagtagattgtttggatttggattttttttttttttttttacttgctcttatgctctataaattctaactgaaaatatttatataaataggtgttattacaatgcaccttcttagaaggggtttaccaatgcatttttaccggtttcgttatttgagaagatttttaagttatgttttttttatggttgtatattttgagagattcgaaaaaatttaacacatcgataacagtgtttaaacaatttgttgtaatgtcttaaataattacaatttaaacaatcatgaataaaattggactaaaaaacttttttaggtgacgaaacagataggagtgcatcggtggaccacttttaagggagtgcatggtagaatttttttatatatatatatttatactagtaaaaagttacgtgcgaggcacgtatactaaattttatgctagtttttttatatgttattaaaaagtgatacaattaaaaattaaagaaaaatattattggttattaggtgagattattattatgtgtacctaaatattatagtttataattttgtcaattaaaagtaaatacatgatgcaatatattagactattagtgtttaagaaagcttgataattaaaatatattcttaagttaatctaaaaataaactaaatgttccaatacttaaaacattacttaaatgggtgtaagataaaaaaaaattaaaaactaatctctaaattgttgataattgaagatagtatatgtctaaaaattgtagataagaaaactaatgatactcattggtgaatttcaatctttatttgcttcgatagagacaatagtataatttttgtattttgcacttttcattcataataaattatgataaagtaacatatttttaccctacagataaactaaaataagctttcaagtcaaaaacttttacggaagcattctctcattttactgattcttgaattgtcaactccaagagagcacatctagcaatatgtgcaccggctgattggcccattagataaattctattataataagtacaacaaaaatcgtcaatagaatacaatatctcatataggcatgaaagaaaaaaagaaagaaaatagttaatcacctgtcagtgtatgtaattgcatccattttttcctttgtttttaataattattttccatcttttttctagttgttcgaaatgacaatttggagcagaaagataacataaattcttttattttatcataaaaaaaaattcatttatctctctttaaatttaaatgagttttaatatggacatttttacattataacaataaatagagaaatatacatttatatgaacacagaagcgaccttaccttgaagaaaatcaggcataagtaacagagcataaaaatcaagtctgagtaatcttgtgattcatcggaaaaattgtttctcttgccactgagaatttctagaaccaacacaccaaaactgaacacatccgacttaaaagaaaatttcccatgcatggcgtactccggagacatataaccactacaaaa

SEQ ID NO: 227458 - DNA, 3123 bp, Cannabis indica
aatgttaaaaaaaagagagtagacaaattaatatgcgtgctcactcatgctactctgatgggtaactttcatcactccaccacctcctaagccattttacatttttttccccattttgtatcttctaaaagtcaaaggtaaagagagagaaattaaacactaaatacataataaatataaaaagcttgaagagaaaactggtgacatacattgatggggtttaaaccagttgatttaatgactgtttctgatcaagtgggactttgttttgtaaggagctgtatttttttcaagtgggtgggtggggactatcttttacttctttattttatttattttaactttattattattattagtagtagtagtatcattagtagtagcattgatgggatttaaaatgaacagatacagttttaatgagggattttatatttttatgggatggattttgtacactgatttactcaaaacctttcctgtaaaattcacttcctctccaaacacatacaataataatgcctgcagcaactggtgctttctaacatcactctttttttatatatatatattaatattatttttttacataaaactatttgccagaaaagcaaacgtaaaggtaacgcttctgaatctatcaatttcaatcactcttaatcttagagtacttttcttcttcttcctcctcaattccaacaacaaaatctctttttacttgtcttaatgatcttaatttacttcacttaacttcactcactcattcatttttaattttcatttcctcaaatcactcattttacagttttagtgtgtatatattaaaaattttcattttcttcctttttttttattttttttaattattatttattttcagctttccctaaatctctattctttttctttttcactaccaaagaaaataaataaataaataaaataaaataaaaaagaacgaggtagagagatagagagagagagaaacaagaaaaaccccttgtttctcacaaaattcaaagattgtattagaagcaaaaaaaaaaatgaaagagagaggcaaagctttggaagcttacaacagaaacgacatggaatattactcaacgacatcggatatgccatgcaagaagcatccttcttcttcttctgttgggatctgcgcttactgtctcaaagatcgcctcgtgaagttggtttgctccgactgcggtgaacagagactctcttcttgctcttgctccgagatctcctccaacagaaactcctgcaccgtcgaggttgggagcgttggccgagtgtcgtttctgatcgagaatgaacgaagcgacgtgtcgtttccaagtaatcccgtcaagaacgacaacagaaagacccaggtggcaaaaacagaggagggtctggtgctgaggaggagcagcagtagctgcgttgagatcaagcgaagtgggttttggagatttggcaagtttttcaacaaaaagagaaaggaaaaagattgtgggaacaaaagtgttggtggattcgatgacaaaagtgatttatggcttgttgatcatcatcatcatcatggtgtttcaagatcgagatctttgtgtagtttcagggggggtggtggtggtggtaatgggtggttcggatcagaggacggtggagatttgatggtttccggtgcccgtagctcgatttcgggtgcccggagttcgagtgttacagcttgtatggttttggactcgggaagacgaagtgggtttagtgaggcagagccgagaaagagtggtttcgatagtgaaaatttggtctctgagttcggtatgagaagaataggccttgtggaggttgataatactactactactaataataataatagctataacaatggtggttttaatggtggagggatcaacagacgtgtgttctcgcttaaggagagtgattttagtggaatggatgattctggtttcattgatttgaaacttgattattctgctgagtcaaattcaaagactgatcatcagttttcttcttcctcgatgaaaatgggtgttaacaacgtatcagattctgattctgcttttgggagcatgagaaggggtagtgagtatggaatcaatgaatatggagacccttttgggagtagtgccgccatgggagatgggattttcaatagaggaggttcttgtaggatcaccgttaatgacacaggattgaagaaagggaggaagagcttgaagggttggcgatggattttcaggcatcaacctagctggggaaattcacggaagaaagatgaagatcttatgttcaaatcttgataatttccaaaaacaaaaacaacaacaaaaattgtactagaaataaacatgagaaagagaataagttaaatttgttttattcatattacaacaacaatataattatctgtattcttattcatcttctacttcttgttttttttcccacttgtaacaaaactacacactcacttttttttcctttgaagaaattcacttctctatttagtttttctgtttttgtgtttatgttcttttttgagttcattttagatgatttgaattggatcatataattagtcttagatcacactattataatacaactaaaaatgtaaaatttagctccaaatttcaaaatacccatccatcagatactcttctataatccatttagcttgtgtttgtttaacttacttgattggcaaaaagagaattaatgtcattttcctcttaataaactcatttcttttttctttctatgtacattcaaatgtttgattaaaatgttttagattgcattgttttattaattaaaattaatgatgattaggctgagataaattatttcattaaataaagttgaagagtgggaatatggggcactcacagttgggaatcttaaacactattaaccaatattttaaactacttggacctgtctaattaagacaatttaacactatagttatgaaattctttatcatattctcaactaaatggaggtagcgtgcaaataatgtgtgttatgttacatgtacctatttttttatataatttttttttttcaatcatactttttataggttgaaaataggtgacacgt

SEQ ID NO: 227459 - DNA, 2832 bp, Cannabis indica
tacttgtgagtagatctaagatcttggtaaaataaactccaacaaagattcccttctctttgtgttttcaagaaggaaagtttttttttttttatttaagtttgaggaattcgtttctatacatttttggggaggttagaatttattttgaagctttaagtatgttgtgtatgagtgaactaagaggtttttttatagctgttagttgagttggagcaagtgttgagttttgaaactcaaagcttgctcaacaatgacaatttttgattttgagctttttggtttcagttacttgttggattatgtttagaacttaggattaaatttttcaaaagagtttggcagggtttgaaggagttttgggtaagatttgagaaattagggtttttgtttcatcgtttttgcagaaaacggttaactgtttctatagaaatggtgaaccgtttttcccaggcaaaagcccaaaaaaacggtgaaccgttttgggtaaacagtgaaccatttggggttctttcaggcacctaattttttatattttatcgatatttatagtattaccatgctatttatcgataagaaaacttctagttttaagtttaagtctataaaaaaattaaaatgagttatctaccgtattaccattgtagtcacatagggaccaagatcgttgagcattttccacttgagttgaccaacatgcttaaatttggacttgaggtaagaaaagtcaattgtacgatatagcatgcaatgtatgaatcgataattaccgtttatgagaaaagagttattactctactgggttatctcattaggaaacagtgtgaaatgggttgtctcattagatagcattgtgaaagagaaactactctaattgacattgctgttaagtttcctacttatcggttgtctcattaggcaacgatagtgacattggttctcttatttagaaaatgagagttggcggatactttatgaagtatcaagaatagtctatcttattagaaaaatacttgagattgtatatgatgtgttatacttcattccctattttgaattagggttgaatatatgactgattatatgcatattgttatttattgttatatgatgtttatgagtttgttttctcgcttctcttgttgagtctttgtgactcatgggtgctttatggtgtaggtaacgaaaggactagattagggcagctccgagttagaggtcttccctaaaaaatgtacatatcaacttatccgaccagtaataccgagtcgtcaaaattttagtttatggaaactctgaaaagtatgtgcttggttataaaactttaatggcacctttgtaaacatcttaaagggatccccgatcctaattattgtttagtaccaaaataaattttatgtattaaataattaaataagttttaattaaataacaagtttttttaaaattgttagtttattattataaactaattttaaaaaagcacacaaatagcgtccctatgggttagggcattacaacacggtatcagattagccacggttttaaaggtccagaagactggctagatatgtacatttactgtgaagacaagctcaactcatagtatattaagtgatatatatttacttgctatatatgtgactgtttacctgctatatgtgcttacttggaaagaatgagttaagtatatttgtaaaatgccatgattatatgttaatagtaagtatgttggaaatatatatttattagtagaataaatataaaagaaattcttataagcattattattttgtttgggagttctgatcagggacatcattgctgaaaagaaagttagtgtaaagaagattggaacaaaagagaaccctgcagatatgatgacaaaatatgtgagtttagccaagtttaggctttgcctagatttgctaaacatcctcaattgctaaatgaggatgcaagaccatttcagcctcaatcatcatccctttcctctcttaatgaccaaggtggataatttttgtgattggtcactaatagaggaaatagacatcttttactcaaccccctataaccaccaacggatcgggttatatcatcaaggctataaatagccatttgctgcatcattacagtagcaatcttgggagaatttttcaggagtttttgagagctagtttagtgtgcaagagaaagagagttttgagtgaagttgattgtaattgaagctatgcttcttgagtgattgtgtcaagaacacattgattatcaacattgtaatctctcttctagctcaataaagattcaagcttttggggctattctggccgaggagtaggcaagtgattcatcatcacttgttcgaatttcgtaatctggttgtgtttgattctttctccctatattcttgtctataattgctcattgatcattgttcatatatggtttatagttgctggtttatttactatttattttctggtttgaatcaatttgagttatgaataaatctgttagcattgttcttgatcgattcctagttttgttttgtgtatgaggtacatgatcaagcattgatcacaacactttttttacttacttaggtaatgaagacaactctgatgcattttttgatgattttctgacaacgataacaacttcgacgaatattctaatcctattttttactttttttgcgggtaatattttattttagtggacaatgactattttgggtagtgtagtgcgttgatggtcaagtcttgaagcttttaagaagtttgtaactagttttattttggtattgtattaatttgttcaatattccataca

SEQ ID NO: 227460 - DNA, 2968 bp, Cannabis indica
actgctggaatatatgcaataattcaaataactaataacttacattaattattaccttatgactctcggttaattctctttgtggagtgactgaagctcgtaaattctaacttggctaagtcagaagagcagggcaatggtttaattctttgccgtattcgtcgatgtagtttcgagcttctaatggtgccatcctcaggtgtctagggagctccaaggctttggcaacttgattttgtagcttttgggttatgaaaggcattgaatttttcagatgagatcttgtgaattccattgccttgaccaatgattcttcacaatttgctgcaaggtaggatgcctcatacaagcttagcatacccaatgtgtcttggcccattattacatcctctatttctcctttttggttgatgaatttgtcaaaaacatctgtacataataataatggtctaagaaaatgaatccagatcctctgtctaaattttctatctatttctctatctacacaattaaataaataaattcacacataacttcctttacatcattgtacacatactcattaaatattaattttcatttttttttaaaaaaaatgtaatatattgggacgaacattgactccacactgcacatttttttttggtttttcatttttttttcttaaactttttttttattctgaacgtagtttttaattttacttaaatgtgtgatgctttaaagacccactaaaattagactcccttatatataagatagcatttaaagttaaattagaatatttttctataaaaattacactacatttgagtttttttgcaatcccattagaaatggcctaatgcagtggatcctgctgcatatgcatttaagaaaacaagaattgatttaataaggaatgtgtgtgaagtgatataacggaagaagcttaataacttaacggtgtagttaatttattaattaacgtggcaatatttaattggagagacagaaaaattgataggaaatttggacaggatccattcctggtcctaagaaaattgagttttctttgttttgaaaaggaaaatatttgttagaggtggacgttcccatttcagaaggtctaaacaaattaagctctaaattaagatatttttacacaaagtgcttcaaattacatttctttttattattttacagactatatattttattttactagagtgaaccataaaaataacatataattcaatacaaatataaatttttgtgaaaacaaccgcgcgtccataattttaaacaaattgtaaattcatatttttgtcatttaattttttattattttttgatatttataaaaatatctctttaaattaaatatgttagagaagccccatatttagttttgttgagtgtcccaattcgttaggaacatccttgtacatgttaattcactttgataaatcatattagttttacactaaactctattgccatgactgattttattttattaattatttcataaaacatttactacaattacaatatacctgaggtagttggaaagccattatgcctgagtagccgaaaacgaagccccgtgttaaagaggtcatcttggccggaattgaaatctgacaacatctgaaggattactttgatttcttcttcgaaataatggccaactcccaaccgttggatgctatctatgagcctcattttgtaactttgatcatcagtaggttttcgtaatgccatttcaacctttttgatcaacagctcttctgaggtagtactcttgtaattgtcataataatcagcgaccatctaattattcatacaacaaaatccattctatgtcataaattagaaaaataactaaatatttcctacaatattagtatatatttatatagttacgtacccctggatcatgatctattgacaataatggtggtgatgatgatgatgatatactctggcattttgttgacatgaataatggattaccaaaacgaggaagcttataattcttcttcttcttcagtgaataaacttctctaataaccgatggcctctttgagaaagtagccgagtataaagatgagtagctaatgaacttcactcctgccatttgctttatttctatattcttcttctgtatgctgagttttaattactacaagctccataaatttatatatagatgcaattatgcatgcattatgacagcatacattttaatagtggtcaaaaaccaaccaataaactgtacaaattaatatttttatattattcaacttgcaaatgcattatggacaagagaataacgtaaaataagaaatctatattataatataaaattaagaaagcatatatctgactcgttttgtgttatataataatagattgagttatatattatatttctatataatatattttgataaattttaatttgtattaaattattatatattagactaattaagatttttattcactgaactttgacatgttttaaattatattctctgaacttttctgctaattaaaaattctccttgaactattgaaattgttggatttaagaaattttgtctaatttcattcaattttactaattcggtgattgttcatgtactaaattatgctttttagactttaagatctaccaaatcatgtccctcaaactttgaaacgtaccaaattatgtcccgtgaactttgattcatgccaaattttctttactatataattggacaaaaagttcttacatccaacaatttcaataattcaagagaaatttttaacggtcttatatgttcaaaaaatataatttggtacataaatatattaaaatttggggacaaaaatcttaattagcctatatattattatatacatataaaaattaggagaaataccccatatactatttttttttaacttttttttcaaatttacggtttgggtttct

SEQ ID NO: 227461 - DNA, 2959 bp, Cannabis indica
aaaaaaaaaaaactaaatttcagttcctagtggacaacttcaagtgaaataatcaccttgtcgtttgaggagtggtattaataattgattggtgacttagctgtgctgtcattgatagagtggcactagttcttctgaaaggtgtagtagaaggaatattttttgttatagatttcagcaatttggtagcataggttttattgttattcctttttgtaatcaagtgacaagtattctttactcaatgtctgacatcatgtattgtatccaacacttattgttattccttttttgtaattgaaatgctcaccctagttatattttattgggcactaatttttccaacacttattactattagagtattttttttattataatttaaccaaaaatagaatctcgatggtgataaaatgaaaattactaattaagtgatcatcagagaacatacatgtcatattgatgatgaatgaatactatgctatgatatatttatatatactatattattattgttaattagtaattatgtaagctcataattaatatgaatcaatgtacctgatatttgtgtttatagagattaacagcaatggcatgagcaagaatggtgtggtgaaccacaatatatggttcagtagctgaatttcctgcactgcaatttcccatggagctagagcatcgacctggtgcaaacacaccatagttatacccacctattgcaaatatgtttgcctcattaaatgttatccacttcttcaccctatccccaaattctttaaagcaaaactccacataatctctataatcattcctgtaatataataatcaattattattatatgtaacgtatcaattatggatctctcaaataatgttatatacataagtttgtcttacacaatattaggacttaagaatccaccatactcatcttcaagagcttgtggtaaatcccaatggaacaaagttactaaaggttgtatacctgtacgtacatgttcaatgacgaataacccaataatcatgctagtgtttgaatattatatgatgtattagactattattaattatatgtatatctatatgagagagagagtgagagagcatagcaactcaccattagataacagctcatctatgagactgttatagaactttacaccctcctcattcactcctccacttatttttcctcctatttttatataaatatgtatcttataaattattttaaacaaattgacaataacacatagaaatgaaagataatgtcaattaattcatccatacatataaattaatagtactaacccggtagtagtctagaccaagagatggaaaatctaaaggaatcataaccaatgtatttcatcaatgctatatcctcctataacattattataatatcaatcatttcagtatatggctaaaaaaataaaccgaaagaaagagaattaggttaggtcttataaatgtaaacaattttatcattgctatatacatattaatagagaactcatttgctatttggcagaggtaaataatgaaatgattattattattgttattatttattaaaaaaaagaaacaaaagcagaatattaaaaaaagaaacaaaggcagaacattttttaaaaatcgttttatatataagataagacatcacgtacgggctccacaattgagtgtggtaataatacatcgtttttaattaatgtgctatagttgctttaaatttaaaaggtttgattaatcaaatgaattgcaagtggggcgaccaaataaggtgtttctttacaggaagaaagaaaaggttggataagaacatgatagggataacgtaccaaatcgttgcaattaaagaataattagttgtgtaattattgataggggtgtgcagaaagtcacctaatccaattataattggcggatacaatcctaaccgatccaatagaatcagaaatccaatcataattagatcgaattagatgtaattttgaaaacaaattgtttaaacattattttttatattgtaaattattccgaatttctcaaaattttgtaaggtatcttaaatagttacaacgtacatgagtatgaaaaaaaaatagactaaatttttttgtaaatgtcgaaacaagtgaagggtgcatcaatacatccatttcgaggggtgcattatagaatcacccaataacttatatgcattaactataagaaaattctataataaacaccccaaaattaaaacttaaaagtaggggtaagtccaaaatccttattggctagctattattgttttgtggacctagttctatgtggtacatgttgtattagattttttttactgttaaaaagtggtacactagtgtgactcataaagtctcttattattggtacacatgtctacgaattaaccatcctcaacctcatctcaacacctcttcaatccaatagtaaacaatttactcctccaagaactctccaattgattgatcatccatcttaaaaacccggtttagggcatccatcaatttaaatactctaatttctttttaacaacaaaaaatctaatttgattgaaaacatgcatgctatcaagaaattactatgcgtaaacacaatataaacatgtatgtgtattatttgattgaatactttatatagagaagcactaaaaaaacttaataagggaatcaagacatattcttcaaatcccaaacaaaaaaacattgttgggctcaatatcaataatattgcccaaagagcactgaaaaaacccacatatgaaaaatgtgaaaagagggagacgagatagcttagagtcgatgggtggacgtaggaacaatggtgttcttacttcagagttctccggaagaagaagaaagttacacttttactttattttttaaaattcaggttgattagttaattaagtgaaatgaaacaatttcca

SEQ ID NO: 227462 - DNA, 1015 bp, Cannabis indica
attattagttgttagatcatagtttaatatttttaaaattgatgtttataattttttttagtaactatctagagtattacttattaaaaagtgtatctctatatatgctaaattgtggtatatatgtactggtcatgcatgcatgttataaattttgggtagatagatagctagcaaaactttttatattattaaagaagatgattacattacttgtactatcataaaatatatttgttacactcctttttaataaataaataaaaagttttctacactttctaaataaaaacagctacaaataattgtacctgtaagaaaggtgctcttctttccagtaattttaattttttttaaaaaaaaaagaaaagtacaaaccttttggttgaccactggtcaaatcccattaaggcggaaagtgaaagtacgcgcattagatgcgggtactgaatatgaatctgtgtaagtgtaagtctattattgatgaggacattgtacggtggtgaaagttgatgattggtgatgagttaatcagcaccatacacctgtcactcaattggtggttagtcctttcaccgccttcctccacagattttttccgaatctaaacctgtcctcaacctcacgccccactaaacaccaggtggggatacacacataaaaatagacactaatagaaagatactacttatatttctcttaatttattttatatttttttttctaaaattctttttagctaaccctattgagcatattattatgaagcaccaaattatttagtaccgctataagataatatttataaatgtttatatatttattaaaattattatcaagtaaataagtaagacttgatattgaattacattaataaggatattacaaattataagagcgttaggcaccaatatcatttaacatttctcttctttttaatgttaatttcttagtaattacaagaaattgttttttttttttttagtaaaatcagcagtgtttttcattactccaa

SEQ ID NO: 227463 - DNA, 1918 bp, Cannabis indica
aaaaaaaaaaatatattggtttaccatacgaatttttctttaataatagattgacttgtggactaaagttaattaacacatcaactacgtaaatggtttacgtctctttagttttgtattttattatttttttagttctcaaatatttaacttctaaaaatctcagtaaacatttagttttatgtaaaattcatagtgtcacgttggactattttataaataattattttgtttgtcatttacatgaaaattaaaacccaaatttatttttctggtagtgtcacgaaaacacattttaccatatgtatttggaaaacaaattcaaattttatatagtattcatatttttcattatcttacatcatacataaatatataaataattaataaatatctttcttaattataggtacatgtgaggtactgcaagtcaaatatgtatagtcatgctaacattcccttaagctctcaaccgttggatggttcttcaagccatttagaaaattgtccaccacccaatagtcaataaataacaaatttatgaaattattttttctgctggaaaaggaaaccattaggtcatcattacatcgcctccgtgaaaattgagttttgaaagagctaccgaattttggccaaatattacgtgccgttgtatttgaacgatgtagacatgcacgtgaagaatggatttaataataaccgtccgatgtacaatgtgcggattggatttaacttcaacggcttacaaccaccattaacggcaaaattaacgaaccattttcgctttcgttgacaaaatataaaactaaaaaccgcaatttatgtatttttatgacctgaatggaggggtctttgtgtaatgacttcgtatttcaaaatatgaaattaatatttaagttaaaaataataggattgatgtataactgatttgagatataaccactactcccaatttcaaaaaattctatttattataagaaaatgcagagagaaaggaaaatagtattagaggttttagaaacctatatagctatatgaaaatatgaaaataggaaatagcaaacctcatgtccttcaaaaggtataattatatatagtattgaataatataccgaagatatagatatgtatatatatagtaattcaggagtacttgggcacattttcattattgtcatacaatatttattagaatttgaaataaaatgaatgagattttattttaaaattaattggcattaaaaatacacatagtctattcgttttataaattttattatctttctaaatattagggataagagactattgatctaacaatattagtaaaagattttatatatgggatatgaggcatgattccacacctatatttatattattatagatacgctatatatctcttactctcttttaaaaagaaattctatatgacgtacaatacatatcatataacttgcaagaaacaaaatcaattgcactcgcacgccattgccccttttagtattttacatatacacatatacgtgaaggaaattcttactatttctaataaaacaaaggaaactcttgtgatagatttggaaaactaaatcaaattccttcttactatatattataattagctaaaaaagcatatggaataattggaatattttagaaaaacaatggaatcctaaaaaaataaaaataaaaataaaaacaaacgcacacaccatatggaagaacacgacaaaataacaaattaaaaaaaaaatatatacgtggatcaagaattataaaatctattctatataaaatattgctatataacataatgaaattattggttgacttttttttaaaataaaaaaaattacaaattattaaaaattaattttagattttgatatttagaattaattaaattttaaat

SEQ ID NO: 227464 - DNA, 1102 bp, Cannabis indica
aaaattattttaatatttgggataggttagagatgaataatcttatcaatacaaggaaggagaaaacagagcatgaaatgaaagaaacgtttgagcttgcgaaagatgcaagactcagagaaaggacttgtatttatagtaggagagttacacagttacagtagaagaagaaaaataacagaagtaactaacttgtaacagaaaaagaaatacaagaccctaactaacagtttgtcgaagacttgctttatcgagaggaaatcattaaaaatgagtttatttagaattaaaagataatagattcttcacgtgaaaaaaaaaaagaatagattcttaagtaagcacgttgtctattgtttgttatatatacattgtattgtacattaatatatattttgagtattgttagagtgtcccacgttactaattatcaattgattttgaggtggaacccattcatcttatcaaaatagtcacacgagcacagaacacagttttgcatctcaatatcatttgacatttatggaaaaaccacagatgacgaaataattcgcttcgcaagagagatcttggagatgtgtccagaattgttgatgcaaacccatgtaagaaaagagactcccttacttatggcagcaaggtgtggtcgtgcctctatggttgagtttcttattgaacgatgtggaaacgaccaagaggtgaaattacagatgatgaggatgaagaatatagaaaaggatactgcgttgcatgaggctgtgaggtacggacatcttgaggttgtaagaatattgagcagagaagaccctcatttctcgtattcggctaatcaagcgggcgagactccgctttacttagccatccaaagaagcaactgctggccggaattggttgatgaactactgaataattggtcgacactggacactggtgttcctaatggaggaggaaatgtactgcatgctgcggttaaaacaggcaacataggtaattaattaatattatccacattaatttgaaaccttttatttgagcaatgctataattaacagtgcctaataattacaatagacaatattatctaaccattaattttaacaat

SEQ ID NO: 227465 - DNA, 1945 bp, Cannabis indica
ggatcggggctagggtaagggtacgagtcagggttcgatccaaattcgagttaaggtctaggtcagggtcctggtctgagttcgagttcgggggcctggggttaagagttgagtttgggacttccccaactctgaaccctttgtaaatattataatacaaactaataaagatcatttgttatgtattaaataatacaatttatattgtattaaaatttatggtcgtaataattaatacaatataatattttatctaaatgtagtgttaatggttatttatttgatattcttgggaatatagtcatatactaattgtttatgactaaatttgagatgacaatataattcgttattaaattagaatagtaattaataattggtagtatttgtatgttggggtagatagagaaggatataagacaaagaagaggaaaagaggaagaaacaggcaaagtcgtcggatatggcgtcggtgacgccgcctaatcaaacctttggatttgccaaaggattcaactgtttgtctcatctaatctcaattcattaacacacttataattaattaatacatattttatcatttaaatgtaattaaatatattagtcggcatgcgcataatctctctctctttcaattctcattttttctttctaatatattatttatttctatatcatcagatgaagccaaataattcgtacacctctaatgacatcaaacactattattgcttcatcaaatggaaacagttttttttttcaatatttgtaatatgcaaatgcaagttaaactagctagctatagctcatcatcatgcatgacaattaataaagccaaattgatcatgtcgatacaaaagcttattaattaatgtatataaaaatatatatatgtatatatttatgacatatgtaaattaaaaaggtaaattttatttgcatgctttaaaaaaagtattcttaggtattatagtgtccaacacttttttatggcgttccacgattgattagcgatattttctaaaagttattatcttaagttatatgagacacgatacttaattgcacgaatcacgatatgatactgatgaatgtactagataccaatagttctttttaataattcttttaaaaaatactctctaacaaaatttagactcataattaagttatacaattaaatactattgtttttaatttttacctaaaatactatcattttcattttccctctctctctctctctgtctcttccttgcactaccgagaccacttagacctacgcaccaagaacaccaactaccaccaccgaaccttcgctcctccactagcgaaggatatgactagttcttctatacacggctatttagactttctttcttccacgaccagtacttcatctttctgctcgtgctgtagggtccgagcatacctctctctagccttgtttgagtctccagcgatgtgaggccctcaaataatcacttgtaagtgtttgtccacaggtgaaagcatcaattgattttgattattgtttggttggacagccttctaatcccggtcagtcttaacgtatgtagttttgtaaatgcgagtcttaacgtatcaacaaagtgctcataggaagatcgagagtgattttgttgaatttatctaagtaattcctcaaatctttcccttcatccattgttaggagagttgaatctcctggccattacactttagatgaagagcataacagtgaacaaagagcaaagaacagagagaaaacaaagagaaaagatgcagagaaagattgagaaagaagagtcaaaaggcaattcattactgggagagttcagtacaatatatactcaacaaggatgagtaaagactaaaacaagaatctgttacaactgaaaaggagactaacaaccaaaagctaaaacagttgataaccaactta

SEQ ID NO: 227466 - DNA, 1942 bp, Cannabis indica
ttctatttggtaaaataataattttgcaatttaaaaataaatactcagaaaattaaaaagaatatacgaagattaatcaagatgagagataagggagcactactacaaattacacaatttacgtcggtcaacactactattcatagcgttgaccgacgtgaatagtgtccaaataattagatatgtatatttaaaaacgacactaataataaattatttgcgccgtttagataaatgacgctaaaaatgaaaccgacgaaataaagcaaaaaaacttaaaaaactttctttttattttgcgtcaatttataacagtcaattattatgtttacgagattttataaacgccacaaattataattgtgagagttaaacaccgatgcaacattgataaaaatctttaaaatccaaaaaattgaatcactgttcacataatccctaaaactaactctcctcttcgattgctctggcaaaaacccaaccccgacaacccatcactgccacctcttcgcgaattgagccacgcactgccatctttagcaaccacccatcatctcgaggcatccacccagccaacgggagtgcttccgaaatcctcgaaggtccaacaccgtcgtctctagcatcctcggggcatgtcatcacaatcttcaccgtgcgactgtggttcgtgaaagcagcagccgcagcgtttgtttactggtgctaccatgaaggtgattctaatagttgattcctctgttacatttaggatttttggttactgtaacgttatggtgttgattatgtcttcctttgcatttttcagttcaacatcgccaagtttaccactgggtgccaaaagaagctcgagatccacgatgaccagaaattgttagtccttccctgagacttattttttagttagtgttttgtgctcatatatcagtatctttaatctttgtctttggtttaagtgaatatgccttaatttgtactatattggcaactaacgagtgaacttgtggcaattttgttttatgatattctgtattaaaggagactttttgtcactctatatctcgaagggtgaggggttatagtactcattgtataaagaaaaatgtccacttaagagtgaatttcttgcctagtttagtttttcaagttcctagctcacttattattttcaattataaagcatacacaactcctctgttcttttgtgatgattggctgaacttgtatctcgataactaccgtatgtataaggattctgatgtttactcagagagtaacgaaatatgctgctctgcctatcgttttgtttacatgggagagaaaggtacaaacacagcattgatctttacctctatttccttttagttatgacatttttctgtaaaaaaattaacatttgatctcaactgaaattatctgcctttctgttcggttaatattcaatccacatggaagtacctgaatttaattgttatgtaggatcttggactcctcttcatgctgatgtttttaggtcgtatagttggtttgcaaatgcgtgtgggaagaaacgttggctcttcctgtctccttctcaaagtcatcttgtattcgacaggtatgaatgcaatttcttgcattaaaagcaatcagagagatccatgtttataattataatgctataatccatgataaatgaaacagttttaaggttttgttgtgggtgggggaactatgctatatagtggttcatgctaatggattactagcttttactgcaacctcttacaagttttgctactttgaagaataagttaattgttacagtagaacctctatccaagaatacacttgggaccaagtcaattatattctaatttggaggttataactaaatagagttacactaaaaaaaaattaaaaccaaaaaatatcaatgtaacaataataacaataaataaac

SEQ ID NO: 227467 - DNA, 3269 bp, Cannabis indica
tatggtgatagttagttagtactatggtgatagttagttagtactaagtttgatcatatatatcaattatcatcatccacagtccacacaacacacaacatagacaagtatgaatgaatgaatgtatatgaaatatgcaattccttactttatattatcattattttgtttttggatgaaattgagattgtaattaaacacatttcattttgaaacaataacaaacaacattattaaatcaaccatagtaagatacatgggctgcatttccaagattatatttatatttgtttttaagtgaaaagaaaaaaatagtaaagaaaaaaagagtgggtatgaagtgcatggggagatgtataattaaagaaattaaaatatgaagtttaaattgaattgaatatatggaaatgacagacttacttgccttataataataacattttattgttttattatttaaaaattgaggatattatgtaactattatataaaagtaaatatacatatatacacacatccatcatatttgtccctaatttaaaggtattttaatttattagtaattaatttttttatggtagtaattacattgtagaaatcattttatatattattttttattttttttttctatttttcaaaatttttatttttaaattatttaatgaattataatttaaattgaattgtgatttaagttattccgtaaattaaattgtatattacatgaaaatatataaaaaaaaaacctttttaatgtataaataaaaaaatcactttgctattttattatatgccgatatgcataaaataattattatgaattctattatttttgttcttaatgtaatttattaaaataaaaatatagctaaaatttaccccataatatataaaaaaattccaaaaaagaagaagaaatgaggagagaagggagttgtttagtttgactgattcaaatgaatgacttaacaacacaaacacagatcctaaactgcttcttaatcttattttcttaaaatttgttattgctttggtctgaaattctaacttattattattattattattattattattacagaacaataattattaatttagatttagatttagatttagagtttagaaagaaagattagatgagatgcaaaagttgatttgagagaaagagaaaatggtggaagttgaccttcctttgttcagctaccaaagtccaaaaaggagctctaaactctcaaaactaagctaagaagaaaacccagaaactgaatcatcacatcaaatccattctaattgtaaagattgaatcttttttgatttgggagtatggaaatggaattgggttggcgaagcagggttgaagatgcggccaagtctaagcctctgtttgttacaatctatgccactgtcatcattggcgttctcatctcctctttctacgtcttctccgctctctactctcctaataattccacttcattctcttctatttctctttcaagtaagtacctttttcaattcaattctcttctattcattcatctatattaatatatatatatgtgtgtgtgtgtgtgtgtgtatacagctactcctgtgcctgtggctatagattcttctcaaccaccaccggtacaacaagatgcactgctgcccaaggacgctccagccactacctcaaaagcctatttgggagcctccacacactgaaaaaatgccacctttggatcattttaggctaactaaggagcttgttcggcaaagggtcaaagataacatcattatagtcacctttggtaactatgctttcatggatttcattctcacttgggctaagcacttgtcagatctccaagtttctaactttcttgttggtaagctaagctcacttttaactcactcactcattcattcactctctttctctatcttcaatgtggattttgctggttttaggtgcaatggacaccaaattgttggaggctttgtattggaaaggggttcctgtatttgacatgggcagtcatatgagcactgtagatgttggatggggttcacccacatttcacaaaatgggcagagagaaagttattctcattgattccatccttccttatggttttgagctgctcatgtgtgatacagacatggtttggttaaaggtaaaagcttttttcctttccattccaattcctttacttgacacataactagatacatacttataattctactatatgattataattttgctgtgttactcaaacagaaccctcttccttatcttgcccgttatcccgaagcagatgttttgacttccagtgatcaagttgtaccgacggttgttgatgatagccttgaccgttggcaacaaggtagagctttgaaaacaaatgagtaaatgaaaaaggataaaactttgcactcttcattaacatttttttcacttctagtagctataaggattgtaagcctatactagatgtcaagcttgtgttatggaatgtgctataataatcctaagtgagtattgttgctatttacttttacaagtacctcttagctctaacaaacttaatcacagttgaatttgtttacaatttatctagtttagtcaatattaaagctgtccatgtacatttatcctcagttcttgagtatgttggttgtgttttcaatgtagtggcgtgcaagaattatgcccacagatcatgatgttgcatgttttcaaggcgttcatgcgaattctctttcaatttaacaaagacttatgatttggctattgcacaactcattttctacttttaatctgcctctgtgtgtgttgtatttaagttcccattttgaaggattttttatattttgtactaactatataatgttttcccgaaaacagttggggctgcctacaatattggaattttccactggcggccaacagactcttcgaaaaaattggctgcagaatggaaagaaatgcttctagctgatgataaaatttgggatcagaatggttttaatgaccttgtccacaagcggttaggaccatcggttgatgaagaaagtggccttgtgtatgcttatgatggaaatctcaagctaggaattttaccggcaagcatattctgtagtggacatacatattttgttcaggtaaggataccctctcagttcaagcagcgtaattcatctttaggatccctttttggttgttctaggtcctaaattgtaacgcttaaatgtcaggctatgtatcagcaactcag

SEQ ID NO: 227468 - DNA, 2240 bp, Cannabis indica
tcaactactatctatgaccacactaatttgtcgataaaattaaatagaatataatgaaaagacccattactgtaaaagtttatatttcgagagattttattaatgagctgtatactatatgagacacaaacttggtaggtataaaaaattacaaggaaaaaaaaatataaattattctattggatatttatttgaaaatttattatttttttttaaaaaaaaaacttaaataatttatagacttcaaaataacttattttatgtacatataaaacaactttaaagtaacatatttttttatatatatatttttaacacatttatagattatataatcctaatatttgtatgactatgaatagtgtatttatttatcttctcaaattttaaaaatatttacaataaataatatgtaaaaacataaaataaattattttaaagtataatttatatattctagaaataatttaatttcaaatttatttttgaatcctaaactatttaaaatttagtaatagtaagttctaactaaataaaagccgcaaggaatctaatagaggtaagccttgtactaatgatagggatagatagacctagaccaaagaatctaatgaattattctcgactaagcttgcctattcggttcaagttttggatcacgctcctttgtgcaatgtctctctagccttgtggaaaagactttgaaattctaaagtgttcaacataaggttctctggtaaagcatactttctaatgcttttcctgtccgtgctcttcttgccaaaagaatccatttcgaagatcttgccttttgtgtgggaagggtgaggaaatgatggaacacctattcggctattcctgtactgtaactttgcgtcccacctgtggtattcctctccttgggagactatgctggttgctgagtccgagaagagaatgttggatcgggtcaaatttctttggaacctgaagtctagaggggttgaagtggataaactttttctctatgcctcaattgtggtggatacaatcgggaaggcccgaaacgatactttaagtaactttaaatagtgtatagactctattactttctattacgcaaattatgggtctggtttattttctttgttggaagatgttgtttctcataagtggactcctcgggtcaaaataaattgtgatttgaaagttagttgcggttccatgtgtggagtggcttggctagggatcacatgggttctattttgtgggtgaccactaacaagcttaacttagttgatcccctgattgaagaagctgcagcttgtcagttggcatggagaaagccgtgcttttgaaacacccttttgcgttaatcgagactgactcggagatagttatcaaggcgttgaatggaaccagttctaattggagtattggtaactatattcaccaatgtaatatgctctctaattgatttttgagttgtgatttttcttttatttttcagactttgtaactttgcagaatataatatggctaagtgggcttttcctaacaatattattgacttagttaatcagcaatcatcccgtcaaatattatttgtaatgatcgtgagatcccctcaaatatggctaacggttttttcttaaaataaaataaataaaagtcgcaagagaagggaaacggtttcggaccttcctctccatacattgtgtgttgtttttttcttgttttttaagaagtacattgtgtgttgttgaaaaataataagcacaaaatcagaagcacgtcattggcttcagtttcaagcttcattctctagtacttatccatcaaagtggcaacccaaccaaggcttatgtaataaatatatattacaagtataagttttgtcattcttagttctcatcaagtaaaagtaattctgtttcatcaacctttttttaatcagagcataaaagcttcttaaccaaaaataaaaaagaaagaaaacaaagttggaataagaacagacttttgcaggcacacttggagctatgaacgagttgaagaagctgagaaattatgccatcttcatccaatccaccattgtcttctacttcttcttgtgcaaaaattgagacaaagagaagaagaagaagaagaaaaatgagcagaatctaaagcaattagaatagtaatgtacttgagtagttgggttggggacccaattgaatgagctggatagatgcccccatcagtcttttttttctttt

SEQ ID NO: 227469 - DNA, 5553 bp, Cannabis indica
gttggatatgtgccttaaagtgtacatctctgtgcaaatattatttataactttaatagttgtatttcatttattaaatacagtgaggactttattttaacaagattacaaacaagcatggtctgtataaatatggtgagccctttaggcttatcaatacccaccgcccaccaaaaaccttgattttgtcctcaaggtgaaattaagaaacagttcagaaatggtgtgaaagtcttcccaagtagcgtgttcatcaaatcaaatggctcacaccgcataaaaatgcggtttaaaattattcgcagtgcggttgtggtttgtatttttttctctaaaccgcacagtgcgatacggtgtgcggttttgaattctataaaagcaatttaaaccgcaccgtgctattacaaaaataactatttttttaagtataatttttaaattagtcttaatctatgtatatatatacatatgcaagatttaggtgataaagatttattaaattatttgaataaaatgatattataaataaatgttgctcaagagttatatgggagcaggttcaagtctggactgcaacactggtttcaaaaccttggctatggggatatatcatatagacatagatcttaatgtagcaggtccagtgctgaaggaacaattactgtattatcaaggtttttctccatcagcatagaaatcctcatatctacctctctagtgcaaatcaaaatttggaatgcgattggtgagaagaattgcaagcttttggtggtgctctagtcattatagttggagtgtgcatgagaaaattctattctagtcattatagttattattattattttgcacaaatttttgcttccactggactcacacaatagttgtccattatttcttaggattgatgaacaaatttgcatagcactcaataattaatgtcatgaaaaagtatggccttataaagcagtagaacgaggatgcaaaagcttaccattcactcttatgagatgaagatcaccaagatgtaggtccttaaattcagaagctcggctataagcctctggtattcttgtagacagtttagtcagtgcatcaaacattcctccacgtccccaatttccagaatcatcaacacagctatgacatcaagatatatatcacatctcttgttaaataaagtcactccatttccaataagaaattttttagagcagtcatactaacctgaatataatggcaggctcagatggacaagtatcataaggattagtacaatctccataaacaaagtgaacagagcccaattctaacatcgaatcatcatccgaagggataacagggtctttgatagacagcgagtgatagccaagggtttcccatttcaacaatttcttctcatcagcctttttctttgcagcctcaagtttagcacgtttactctcatctaaatctcttcttcttcccaaatcaatgatttggtctccacttgtttgtgatgcctccttaaatttttcaacccacaagaggtatgatgcctcatcaaaaccagaatcagaactcaaagatacagcttcttgttgttgagaagaaagacatcccttcaacatatctgtcggattaacttcaaatttcctgccatcattaccagcaacttgttcatgacgcattgcaactaccctctcaaccattgttttcaactttgagctttgtaattcctcaatattgtcattgctagtctcatcaggatcaaatatacctaacccatatatgacagaacgcaaatcacctccttcaactcctgcagattctttattttcttcgttttcaacatcatctcccacaacattatggctaagctgcaatttcctttctgctctccgcataatgacctacattaattcatgtgaaacagaaagttgtacaaatgcctttgatgatagtgattgatgtctaatttctcacctcttccacagtacgttcagtaaccagactaatagacaacacagggctcatttgaccaatacggtgagctctctgcaaagcctgcttgtcaacctgaggattccagtctagctcgtagaaaatgacctagtttatagatgcatggaaatataataagagaactttttacatttgaagtcttcacagcttactagtcgccaggagaaaaatgacccagtttctataaatgcatgaaatataataagaaaactacatttgaacctccagtttattaggtgaagtaacttttacgagtcaccaggaaaaaatgaaaataataaatgtaaaaacgcctcctctgagagctcacctttgtgactaagaaaaattcatcacaaaactataacttgatacttacagtatcagcagctacaagattcaaaccaactcccccagccctagtagaaatcagaaatacgaaagcaccattttcttcagcttgtgaactcaaactaccttcagctgattgtctactgaaacttcttatagcagcaaaccgctcctcagctcgaatcgatccatcaagacgctcataagaatatcttcgtaactccaaaaaatcctgcgttggatataaataaacatttttcacaacatattgaatgaagacttgcatcagttaatagcgtaaatgttgttatattctattgatacaaaacctgtagaatgtccagtgtatgagtcatctgagcaaaaagaagaacacgatgtcccgaatcatgtagcttgtgaagtagctggtccaaaataataagttttccactggcctggatagaaagtcagaaacaaataaagaacacaattggaaagacagttacaagagtgaaatacaacttagtcaactgtgtcttcactttagaagagatttccttccgtgaatttttattattagtagctgttagatttgaatagcacataatttctctcaaatagatcattataatttatgcaatcacataagatatagaaggtgccttacacataagatatagaaggtaccttaacaaggtgttcaccttcttcatatggttcaggttcaatgccagggaataggtacggatggctacaagtttttcgtaactgcattacctgtaatgcaagtagcagcattcactattagaagggaggtatagctcttcagaaaatcattctgcaaatggaacctgatagctgttctgaaaagcaatctgtaaatggaaacctgagctacaatgaagtaccaacatattggtgatttattgttatttgtgacacaggcaacttggaggccctcatataattaatgccaaaacttgctcaacaaaaggttacattatttctttctatgcaatataatatgtgtgtgtgtgtgaaataagttcactataaaatttattgtacgcataaagtcccagtatctgtttgctaccccctacctgggggtgggtagcaaacccccttgtacaatgactcaaaatataggcaagcacctaaaaagccaagtaaattctgtacggccgccaggagattggtaccttgacagggaatggaatccttcattcatataaatgggtcccccctgtttttaagggttctgaatgcatttaacggacaaaagataatagttttcaaaatagaaatttagaagaataatttagtaaggaaaatatagatataagtgaacacaagagtagctgttaaaaatggtctttaaagggaaggacaagaatgacatacagtattctgtaaggactggtaatttgaggttccagatgaaaatgcaagaagtttagggagctctctcctcaaaattgacacgtacactttcttttgcaggctgactagcggtgccatcctaaagacaaatatcttagcattgaatcatgcaaatgctctcagaactcgagagtatatgacagtgtgaagatggattacaacttacatagttatctcagtaagtggtggtaggactaaatttccacactcaataagtcttgattttgtacgtcgaagcatgaaagttcccactatgctttttaaaatttttaactgctccttgactatagactgatcattccctgtttcaaaataataatgtgacatccatagaaataacttcccaaatccaatgcctgaacaaaatcttaagcagaaagaaaaaaaatacatctcttgcagagtttaagttatacctgagggatttgcagcttccttgaatgcaaaaaggaattggtccaacttcccaaagactgaaggcatacaaaagtgcatcaaagaccaaagttcagttagattgttttgaataggtgtgccagtcatcaatagtcgtcttggcatcagaaaacgctctttcaggacattatacaaaacctaataagatggaaacaagtcaaccaacataataattactaacagacatacaaaaggtacaaactactaaatatggaaatacaaggtcagaaaaaaccctcttaattaacgtccatgcctgttctatgaaattttgatgtgtattttcatgcaaaacaggaaataaatctaaccgtactgtatattgtatccaagatgatatgcattctacaactagtgtcacaagtcaataaattaatgcactagatgcatttatgagagtcggcagatttagggtaatgtttttctgttattatatttctaatacatagcagtgtatataacatgtaccatgatcctataaagagaaacaaatcaaataataaagatacaataaatctttaaactaatttcctaaaaaaatggtacaataaaaacataattattatacacctataatgtataataataataataattaaaaaagctgattttccaacactccccttcaagctggactaaaaatgttctccataaccagcttgctagtaagaaaatcaaattgtttcttacacaatccttttgtgaaaatatctgccacctaatcttcactaaaaacataaggcatacacacttgaccgctctcaattttctccttaataaaatatttaatctacttcaacatgctttgtgcgatcatgaagtacaggattatgagcaattgaaatagctgccttgttgtcacaatataacttcataggagatgattgtgatgacttcagctcttcaagcagcctttttatccaaataatttcacaaattccatgagcgacagctctaaattcagcttcaccactgcttctagcaaccacactttgtttcttgcttcgccaagtgaccaaattacctccaacatatgaacagtatagcctgatgtagatcttctatctacagtgcttccagcccaatctgcatcagtgtaggcttcaatctctagatgccctcgaggtctaaacaagaggcctttacccggtgttccctttagataccttagaatcctataaactgcatcgaaatgccttgaactaggtgaatgcatgaactgacttaccatactcacagaaaaagctatgtcaggtcgtgtatgagacaaataaatcagtctcccaactaatctttgataaagctctttgtccttcacacttttcaagtcttcaacagcct

SEQ ID NO: 227470 - DNA, 4912 bp, Cannabis indica
aaaaagccattaataaaggatagcatgtaaaagaacattataccaatttgatccttctggtttagacccaccacaattgaatactagcaatcaatacttttgttatcccactccttatcttttaagtgcgaacttacgatatactttttaaataactttaatgaaaatttgtaagaacaaaaaggccagaatggtcaattttgaattagatacgaatggaccacaaaagttaaataatcaccatttcaaatttcaattatcataaaatgacaaccacttacactcgtcattttctcataagaatttgaatttgtactcatcaatttgagctaaacaagatcatcccacaacctcactttatgctcaacatcactgtctaaacactaaactccttcatttgttatatccattatccaatatacggtatttaacctatctacttcaattaaaaactaataaaaatgtaagaaagagcattcattcgagtatattacttattacagctaaataaatacacaagtggggtaagtaggatgtaccttagaaaaaatggttatcacagagaccaccatgtatgaattgtgcatttgtcaatggttccttgtgagtagaaaaaaatcccaaaaggtatataaagaaccaagaaaattacagtaaagcaattgcagccacaaacactacaaatttattctacactgattaccaaaaggaaaaaaaaataagggcactgttttccccgagttttcctataatccatatactagtggagcaatgatgcagttttcttcattacaatttacagatacaatttttccagctaagtatgcaatgaccagcacaagaacttaccatgcgatggtcatggtgttgacaatatatcatttatctttcctcagcaaagggttagaaaaagtgttaaaattttgtgaaaaataatccagcagacaggtttagcgttctggtggagtggactgaccaggtggaatgtgtaaattagatgtgatcagctccatgcttgatcgactacgaggagcaacatccgccccagattccaagtcactatctgcatcattccccgttccagcattttctgaatggacagggcgaagcagaccgtgcattcttaaaaaatagctctgactgggagattggtctcttatgtaacgactagtcatcataatagggacagatgatcgttcagagtcagcacggagattagacaaggcactaaggtcaagatttgggaagaccgagcagcggcaccgaggacattttacattcagtcgaagccactcatcaatgcattccacatggaagttgtgagcacaaggaagcccacgaacctgcagttaagaaaatacatataattaaacttgagattagtgtgtagtgtggatgacatgtttcacaaaataaataaataaataaatacctcattgccaacatgaaactcttccaagcagattggacactcactgcaatcagttgggacggcctttaggcagaacttaggaagttcctgaattaatgcttcgactgcttccctctgataaaaccagacaaaagcttcaacaacaaaagaaaacagaaactacattttatatcaaggaatacttgaaattagagcgcacaagttttacaataactagaggtctttgcaaccattgacatgcatgcacatgtgccataaataattcaatacatcttaaaacatcaacacaccttcctaagtcagtgttaaaagtacatacattataagaacagcttatcacgtctgagctgccccgagatggtgtaacttgagaaaaactaataattacctgagctggagtcaagtataatcctggatggtaggtagcaacatcttggcccatgcctcttgtttcttgacctgcagcttcaaatgcccaatcagggacacgaaccatgtcaactagtacctgcaaaagggagggaaatcttcctatgaacagtcacatcactggatccattcatcatataatacatatacgagcaagcaacatagaataaacgaacacagcatatatcgacaattccacatggttaaacaacaaaggtaatacattattttcaacatgtaaagagtacagagaaataactataaatcctggacctttaagctgcacttcatccataagaaagccacaactagaaaccacatgagaacctcaaaattacaagaatagaaggtatactgcttaccccatactctgaaataggaattccttgttgtgcacgtaataagtgtgcctgtctccgagtcaaccactaggagaaaaaagtaaaggcaaaaactcaatactagaatttaaactttacataattaaattggggcaagaaacaaataattattagttgtgaggaaatcgagtgatggaaagtgaaataaacatagagaatgcccacttagtcatttataaattaaattgtaaattgtactatgtactgaatcttttacagaacaaggcaaacactgaccttgccaaatgacatacaagctatgcagaggagtgcacagtagctaaaaagtaaccaaataaggaagccccatttctgaccttgttctggcaactgtatgcaattaaaatatgtaagccagaattaagattgatctctgatgataatgaaggacaattattaaaggtaatgacttacacaaactttccctcttctaaaccacagggtaccaattactgtccaagcccagagaaatgggtagagtagcagagaaagtatggagagtaccactactcttccacaaaaacgagcatacctctgctgccaaccaaaatccctaagaagatggagaaaatgaataaatcgaacaatcaacatttacattcagctttggactttggactaccaaatgagactaaaaagcagccagtcattatgtagtctaaaagaaagtttgacagaaaattgtagaagagaaagaaaacccatacaaaacaggtttgagtggcacataaaaaatttgtgcccgaaacgtttatcacttataatgaaatactattcagtaacaggtcaatctagtaatgtctatgagatagtccccttcatggagacgtttaggtcactttgtgttcctacatgtctgtcccactaaccctccataactaaagatgtttcacttagcacactttccaacagtaatataatgtgtgtgtgacttggctctagagacacatggccttaaaagcctatttctctaaattttcaaaatctttttcgaccaatgtctgttggttctaatgactatctacttggtatcaagaaatctattgatcatttagcttcggttggtatctaccaaagatcacattaaaacaatttttgaagtctaccccaagatcatgacacttttattgtctttgttaactcaagttctgattcctattacattgaggagattgattccattttgtagcccaggaagctcatattgaaaaacatcacgaggaacaagatgctaatccagctgctgccactcttgcaacctatagtatcactaagaagccaacggcagatccaatgattcatcttaaaatcctcaagagtcaagactagttcacccctttttcatgatcagagaacagaaagcttgtgccctatttatgaatctgcgttcattgtctttatatacttccatttaaacaaagaaaacgagatatagaatgaaaggtacaaatgttctaacagttataggaaagaagccttacaaacccattccagcagcaagtccattatctacgaacataagcaaacgaaaagcaaacaccacggtgtaatcaacctgagtccaatcaataaataataacgaaacaaactagtcaaaaaaattaaacagaacaaaaaatcccatttttaactcttcagagttcagtcttgagaagctcaccacaatccatatgttcaatgggtacgtacaaccatgataacgcttccaattaatagcaacaattaacactacgcacgaaactgttataggaaacaaataaaatccataataaaactataatagctttaataaagaatgcatatttacttggagcaaattacgaatatttgtattccttcaatttttttttcttttttaattttggtgcaacatttatattatatactacaaaatcaagaggggttataattttcagattgaaaagggcattaaaattcccaaatttcgaaatcatataaggatacacactagtcgcgagcatagacaggaagaacccatcgtacctgtaagaccacaacttcacatcatcaaaaaagttgtctacgaattcaaattcaaatgcgtataaacagaaatagatataaacaaataccaatacataaaaatataaacatgcatatccatatttatacagatatgtgtgaagtataagaaggaaaacaaaccacttgaaatcaacgcctctaatggccatggagaaggaagtaagatgacaatccctagtgtgaagaagcccaagaatcgaggatcttcatttcaagaaggaaatgcttgaaattggaataacaatctttggaaaactgggttcctaaatgctgaattccatggagtggtagtaaggggaaagagaggtgtagagagagaaagtgaagtggagagagaaaggagaaggtggaatggaagagtggagcagtactgagagagactcgtagggaaaacagaataagaagagctaacggtgccgttattttaacccttaattttattgtaaacaccattttagatcctttagttttattgatcaaaccagccttttattttatttaatgatgtttgttatgtatttttaaaatgaaattttacactcggtgccccattttacttatttttaatatttttaaccacacacgatttattaaacattttttt

SEQ ID NO: 227471 - DNA, 2102 bp, Cannabis indica
aaagagttttatttagggcataaaacccaacagcaacagctctatcatgaggaagcattccagattaaaggaactttggaattggagccatctaggaagttgagtgatctgtcacggttaaccctattgtttctttgcatatagtccatatttttttatttctagctcagtggttaacttttctagcatatatgcaaaggaattttgatccatggggattttcttgatggagtaatgcttaaatttttgtaatagttctcaagatttttccactttactagccatcttttcccctttcgtctgatattctcttgaaattttatatactaccagttatgaatcactatagagctgaatattttaggctccaacttctttagccaattgtaatctagaaatcattgcttcaggttcatctttagtgttgaaggctttgaactcaaattggagtgcactttgaagctaatgttgttgtagagaaattagaatggttcctactttagaaccattcttatttgaagctctatctacatacattcccaatatttttagcttcaagatgggctctttaggattattgttgattcttatgcactccacaataaagtatgctttggcctttgatagagtctcttggctgatactgaatgtcaaattgagttagctctattgcccactttaaaagtcttctagatgactttggcttttgaagtacttgggggagaggatgatttgtaagtaccctgatggcgtgggcttcaaagtacagtgttagcttccgtgaagcaatccgtaagtaataggaaagtttctcgatcattggatatctggactctgtgcccaaaaatcttttgcgtacgtaatatacttgaagttgtgcccttcccttttctcacattagggtcgcagttatggcatgatcagacactactaggtacaaatacaatggttctccctccacaggtttggagaagagtggagatttggatgaatgttcttttaatattttgaaggcatcttcacactcagatatccatacaaacttgttgttaccatggaggacattaaagaatggaatgcacttatctgttgatttggaaataaatctgttgagtgttgcaatccttcctattaagctttggacgtctttgttcttctggggtgaaggtatgtctagaagatcttgaatcttttttgggttggcttcgattcctctagaattaagaatgaaccattagaattttcctaaagaaacttcgaaggttcttttcatgggattaaacttcattccatatttctggatgatggaaaagattcttctagatcttcactatgctccatagaggtttttaacttcaccaacatatcatcataaacctctacgtgtttgccctctttgaatattttattgactaaacgttgatacatggctccaacatttttaatccaaaaggcatgaccatataacaataaataccctcgtctttctagaagctagtatactattgatccaccacatgcatcttgatttggctataaccagagtatgtatccatgaaattgagaagctcgtatctaaatgtggcgtcaattatctaatctatctggggaagtggaaaataatcttttggacaagcattgtttagatctgtgaaatcaattcacattctctaggttctattaggctttgggacaagtactggattggctaaccagactgggtataaggcttcttagagaaactctatattggttagcttgtcacttctacttatactgcttccgctcaaactggatcaaatgaccttctcttctgatatactggatctaactttaggtgtatgttaaagcttggaagattacatgaggactgattccaatcatatcataatggctccatgttgtgataaatccaacacgcaagtatacatatcgttttaacaattaatactcatgtaagtgagatcattcccatgaggactgtagctaagtaccaataaatttaattcttgtttctatttggtagaataaataacaaggttgaataattaaataactaaaaattaaaaagcaggaaaaaataataaaaagtgtaattaatt

SEQ ID NO: 227472 - DNA, 6615 bp, Cannabis indica
ctttcctgagcaagcactccctgctgatctcttaaagaggtttgtcttcaagcctaagacgtcattatgaatttgtcttatgatttgttataagtaaaagtcaaaaaaaaaaatcatatttgattagaaaagaatgttaagaaattactttcaagtataaaatatagctaaaactttagaaaacatcttttgaagtagaaatattgtatttgacattagcgtgcctttacagaggagtggcaatcaaggatccaaattctccacatggtctacgcttacttatagaggactacccatatgctgttgatgggcttgagatatggtctgcaattcattcatgggttgaagagtattgctcctactactacaagactgatgatattatccaaaaggactcagaacttcaagcatggtggaaggaactcgtagaggtgggtcatggtgacaagaaaaatgagccttggtggcctaaaatgcaaacccgtggagagctagtagaatcatgtgccacagtgatatggattgcttctgctctccatgcagcagtaaactttggacagtacccttacgcaggatactctccaaatcgccctacagtaagtcgtcagttcatgcctgttcaaggtactgcagaatatgagttacttcgaactgaccctgaaaagggtttcttggagacaattactgcagagctgcaaacccttattgggatttccctcattgagattttgtcgagacatacttcagatgaggtgtatcttgggcagacagacactcctgagtggacagctgaagttgataccctgcaagcctttgagaggtttggaaagaaacttgatgtaattggaaatagaattatgagtcggaacactgatccaaatttgaagaaccgggttggacctgtcaagtttccatacactctattgtatcctacaagtgggaaagggctcacttctaaagggattcccaacagcgtctcaatctaaatgtatttctcctagccatactgtggattgctcttattatctgtcttttatttctttattagaaattatatttactttttttttatgcaagagcttatgtcaccacaaacacctccaagtcttggttgtttgctgaataatttgtgttgaccacaatactttaagatgtaagaattttccaaactaaataaatattttgagtgcatttgtaatggaaaaactgacttaaactttggaacttcggtatttttattcataaattattcaatttttaatcatttattttgtcataagatacaaagaaaattaattattcgcattagtgttggatcattctggtaaccacatgggctaaacttcttaattttaggaatagtttagagctttgagttctgccttcatagctaagagagcaacttaatcgaaccatatttgtttctaatataaaattttcaattgcaagtgtacagtgtattgcaatatagttttaatttaatagatgtcaaacccacagggattaaatacttaaattttgctaaatactatactttaaatctagaattttgattagaaaattcaacatgtaactcaaacaaaataataaaaatgaaataacaaaataatggaaaagaatgatcttaaaaatttattacataaataatgaatatattagagtaacaatttcactactttaaattataatatcaattttttttaatatcttaatcaattcttcgcatttgtataaataccagcaattatctcaattaattaatataatatctctattttctattaattaattaagaagtcattaagcaattaattctcttaaatgaaattcataatgttcaaggaatatctcaatctcacaatcactctatgtcaaatcttcctatgtccaatctaagtgtatctttctcaatcataaaccctagatctaaattcacaataatgatagccaaataaaaagatcaacttcatagaaataataataaaaatcttaattcattatttaaaatatatccattagtactctagcacaaaagaaatatagttctccattacaaacttaaacataatagcaatgtaattgttcatgattaaaaaaaaccctaaaacaaaaaggacaaagaaagaaactagatgtaatattggtgagatgatgaattttagcctcattctccctttccatgcatgtaattgtcagttctaatcccctctaaaacgtaattagaaccctgattatgtttttcgttttattttcctacaaaagacctcttttcccccttgaaaattcatcacttactatttttgtatggacatgggcactgcaacccttcgaactatagtgttttaacgctatcgcgagactaaaaagctactctccatatcaaatgggcgttgcagtcttgatggtggcgttgtgtccccaattcaagacacaaaaattacgttgtagcccttctcttgggtactgcatctcctaggtgaattattgggattttttttttaaaataaaatcatcattttattaaacgattaattcagttaccaaacaaggcaacaactcaacaggaacattgtccaagttgaaacgatgatcagggtgggatatagcagctctagcaaaagagtgagcaactatatttgctgatcgcttacaaaataaaaagaaacattacacaaagcatgaaataaggttttacattcactaatcactttgccaaacatcaaaaccatggacatagaacttcgcatagcttgaacaaccgagagacagtcggtttccaaggtgacgttggtccacggatggtctgtgatccaacttaaggcctctcgaataccaatagcttcagctacttccggcgtcgttgaaccatggaaaagctttataccaccttccacaaggaggccaccacgatctctagccacaaagccgactccataagatgaggaatcactaaacaccgctgcatcaacattaaccttaatactactatcaattggggcattccattgctcagcaccgtctcccgggatgtacccagagaaaagcaattcattgcttaatttttgagcaataattgattaaggtagtttgtagccgaaaaaacaatgctctcgactcctacagatttgttttgccaaaccttgtcattcctagcattccaaagtgcccaacataccgccacaagcacgtaagattggtctgtattcaacattgtaaaccgctccatacaccagtcaaggaaggacatttgctgatgcaacaaagttcctatccccacgcggttccatacagcagcagccactggacaagaaacaagggcatgaagagtggtttcggcatccatactgcaaataggacaggtcgaaataacattcacttttttttacaacagttgagacattgtaggaaggcaacctttagccgcacgccacaccagatttttcattttcggaggagttttatgttgccataactttttccaaaacttgtcttcagctgaggcatcaagagtgaagtcaccactaagttgctgaagtaacttgtaagcgctcctaactgtgtatatcccagaagagtcattcaaccaagtaagaacatcttcaccaggctgagattgaaagggaatactctgtaccagctggacgccccaaggcaccaacaagtcctctaagatagcagtttcccacccaaaaccatccatagagagcaaattacaaactttagcattatggagactaggatagttagaaataatcagagggttttctacatcagacagccacggttcccccaaaatagaaacgttttttccatcaccaacaacccatctcgagccttgtttcactagtgactgagcttccaaaatactatgccaaatgaagcttgggtttggaccaatagtagccgtgaggaacgaaccatggggaaaatatctggctttaaacacacgggaaacaagagaatcctaatttgccataagccgccacccttgtttacctaaaagagaaagattaaaatcccgaaggttacggaaacacataccacccttacttttgtgaccataaagacgcttccaggacatccaatgaatacttgaaggagaattactagaggactgccaccaagactttgccatcatgctttccatgtctctaataatctcaagaggaagtaagaagacactcatggcatagctaggaagggcttgagcccaccgttttaataagaatctccttacccgctctggaaagaaatttagtgccccaggcttgaagtcgtttccttagcttttcctttaagtaacccaaagtcgttgctttgttccgccccatagaactcggaagaccaagatacaaactctcctcgagggcaatgcacatgcctaagagcatagtcaatctatccttcgtttcagtactagagttggagctgaagaagatcgaagacttagagaagttaaccctttaacccgaagctaattcaaatttctaaagaatttcttttattcagagagcttcttcatgggtgcctttacagtacaagtaactatcgtctgcaaagagcatgtgggtttcttcttggcagcgtaccttattaggtacaggcaacagtgacatgtgagtaccaggctgtggtacgggcatcgtctaattagacgatgcaatacattggagccagtttgtggcacgggttcacctgattaggtgacgtaatgatgttatgtatgatattaaagtatgacacgggcttgcctgattaggcaatgcaatgtatgatcatttctatttacatgcatatggttggttaaattacacactcttgaatattattgttaaatcgctttataatagtgaaatcaataactagttatttaatgtattcttttttgttacttttattgctgagtctttgtgactcacgggtgctttgtggtgcaggtaagagcaaggaaaagttagagcagccatgaggtgaccgtcttctctagcaatgtacatattgaccccaccaacttgtgccccaagttgttaggagttgttttgggttgtatctgctgtgtatcttgatgttctgttttgaattgttcttgtatatagtacttttgtaaaacttttataacaggattctttggaatacgtttgtagtgtcgttatgatgtccgcttttaatattttactttattcaagtttttaatattatcacggttcttaataatttattagtctattagtattaaactagtttataaatcacacatgtggaattcctatgggttagagcgttacaacttggtatcagagtagccatgatttttaggtcctgaagactactcgaatatgtacaattgttgtgaagacaggttgactcatggtatagtaagtgtttatataaattgttattgcattacctgcttagacaaatataatgcatgttacgaaaaaaaaaaaaaagtgtagagatgtctatgataagaatatataatggcttatgcacattgatattgatatctgtttaaattctaaatggttgaaggttttgggttacaggcacattggatcatgcagcggcgatctagccgtttgaactgcgagttggggctcggggtaggtggtgagggagagcatcctccacctcctcagatttgggaacaaatgtttgcttccatgcaggagacgattaggcagcaaggggagcagattcgaaacctgagagagcaataggctcatcctgcacatatactggtacctcggttagtgctaccgaatatgggggatcgtatggacccattttatgagcggttcaggaaacaaaccccgcctgtgtttgagggtggtcaagaccctttgaaggccgaatagtggatgagtatgattacttctatctttgactttatgtgggtcgaagataatgactgggtagctatgttatttacatgttacctgatgatgcttggatatggtaatagatagtttcgtgatgtcataatctgaataccatgacttgggatgcatttagggtaataatttatgagaaatattataatgaatacattagttccactcaagctaaagagttcgcacaattagttcagggtagcatgactgtgactgaatatgctaccaagtttgacaggctggccaagtttgcttctgatgaagtagccaatgaagctgtaagaaaagctaagtttatcagaggccttgaagagtgtattgttagagatgtggttatggcagccaagcaatcaaggattgtgaagtgttgggaatattttaccaggatctagatttactaagaagtatgttgattaacatcctaaatatgaattctctaaaacaatgaaataaacacataagggtttaagaaaacattaaattgattgcagcggaataacatgactccttccattcaagatctctagcccttgattcctttctatagcagagcattatcaagatttgaactttgatctctttctctccttcgggtttggttaccactgtcttactcactatgattgagtacttgacttgctatgtgtgggcatggcactcattcactcaaggttcgaatatggtgaagaacaatgaaggaggtttgaatcactaaggaact

SEQ ID NO: 227473 - DNA, 4299 bp, Cannabis indica
atattttaaacactctattattgccctttaacaattcccaaaaggtatttagaatattataatatccaatcaaatggggtttttttttcacaaattctttgagcctctaaacaagtggggaatttgataattagtgtaagcaagaataattacctttgggaagatagggagtccattgagaagagctagttgaggtaggaaagcataaatggcaactggaatggaccaaatgggccataaagaataatgaccataagtgaagcccattacaaggcccataaagtgagtaccaaaggtaaatggagaatatttagagaaagtaacttcaagtaaacctatggcccatcttttttgttggttcaacacatcaactaggcttattgggaaatcaccataaaatgctgccttaactggattgcaaagaatggctttccaaccctcacattgaagacgatagcctgtgtagaagtcctccactaatgatccatatcttacacccatctatatattcatatacatttcatttcaaattaattagctcataatctcaaattaattagagtaatgttatatgcatataatcactaatcaaaatttacatgattgatgatgatgatgatgatgatgatgatgatgtatagcacttgaaattttataacatttgtgataaaataaagaatattcaaattgaatatggaaatttagaaacaaaaaaatatatattcatttgaaaatttgtgtttgcaattattttttttgactaattaggatttttactccctaaactttaacatataccaaattatgcccctgaatttttctgaccgttaaaattcaattttactatttaagtgattgtttatgtattaaaccatgttctccagactttgatatctaccaaatcatgccctcgaactttgacatgtactaaatcatgctccctgaatttttatctatgttagatttttttttcttctaaaattggataaaagtccttaaatccaactaatctcaatagttcagaggtatttttaacgacattaaaagtttatggggcataatttagtacatatcgaaattcgggggacaaaaatcttaattagctttttttttttttggttttgagttaagtctaagtaacatgcatgcaactattaaaaaaattaaatttaagaaagttaggtttatggatggttaggccatattttaatatgttaactattaaaaaaaaatcatatttttaaaaaccacctttatattttttgaaaataaatatttgtaaacatgaattttacctaaaactaacaatgttattttaccatatttaaaaataaagtaaaaataccataatactttttttatggaagaaaaataacataatatataattttttttttctcaagaagatactaaccttgtgtccccattgagtattgttttcataattgcaactagcaacacaatgagccaaatccatcacttgtttagattggatagagttactgacaacatgatctgggcctaattcagccatttctggtaataccaagtttaatgggcctccaaagaaaactcttcttctaaagaaacatccagttcccacataatttgggcctgaaagcccatccattcctatggcattaataaagaacaatcttttgacctcacaagcataggtatcattcttattgattccataaaatctttgaggaaattgaatatacccaagtttagattctaatttagaatctaataaatagcacaaaactcttaatggtgtttggggatcatttgagtatgtgtcacaatcaagggtcaagattattggtgcattcgtcatcgtggccgatactcgaatctaaaataaatatattaattaaaattattatatcagcgagatttaattaaattaaaaaagtaataattataatattttttattttaaaaatacatgtcgaaacatatatattaacaaaaaaaattgaattttttgaacgcgtatagtaaattagaatatcagtaatactattattaataaatattgtataaaaataacattgtaactataaagaatactgttgaattaatgaaaatttaaataagagattaataaaaattttaattgagaattaactaataatattattgaaaaatggtgatgaaagtacttacaaggacattaagggcaccagctttgaaattatggttggaagtcttgctcttttctctagagatgtatacaaggtttggcattatatgaccttttatatctttgtctttgttgttatccaatataacctatatcattacttagcacataagtatattaattaatgaaatactcaaacataattaattacttctactataaaggtatgatcaaaattaatggtttgattacatgatgctattgtgcttatatttataataaaatgaaaagagtattgttaattgtgtaattattaagtagtttaattaataaaatagtaattatataacataataattattttttatctcaaaatactaggtgtgtttaaatatgagatgttagttatttatgaatttttaatattttatttgacaaaatagttaataattacaaagaaaaataatatctattaatagttaatattttaaaaaaaaaattaagtaattacactgtaatcacattcaatttttataaatgactgagacatgaaaagtgtagctggaactcttcaattgtcttcaattacacaattattgtataattaaatggtcaaataagcataccaaattatataattgtcgataattatatcaaatccaattccaccataattttctaaacacactcttatatttacgcaaaatatcaaatcataatgatgcctaacataaaatctaataaagttgtttgttaatcaggtaaaaacacgtagcatcacaatataatattttaaaatgagaagagatagattatatttttttttcttattagttaatttgattaaaagattaattataagatctaacgagcaacagtcgttccctgtattgttgatgccctaataaattaattagttagcaattctcaaataaaaaccaatattattaataaattatatatgacctggatgaccgttggatgatcttgtcgcgagaatctatccgtccatttattgaaagctttgtgttcatcttctttggtgatgtactcatcatcaatttttcctttctcaacaacattttctactctcactttcatactttcatacaaagtctgcacccataatttgtaatatagttaattctaattataaattaaataaataataaaatattaatattattgtgtaagaaattcactactcaaaatgtacttcaaaatacaaatactaaaatataccagtagtatttagtatatctttttaatattataatattattagttcaattaagtattagatcttttataatttaaagtaataatttttagagaatatcgctaactaataataggacactacctttagaaaaatatcaggtacaactgatacccaatgcaataaaatgaaagaacaatattgttattggagaccagtgatgtccattattttttataggtgacatcttataattcgttagtaatattttttaaaacttattttcttaagttatataagacccgatacgtaattacaccaataataatataacattaactaaaatactaaatatctacacaccaaaaatattttttaacaattgtcaaaatgaaacctccaataaattggacagagatttcaactcaaattcaagattttattgtataaaaaggactaagttattcaataatatattggttaagttatgatatggatacatattgattatactaatatactaaatatatttaactattcgagataaacttgaatgtcccaagatgataactctaagataaagaaacttatctctgtcttttggtttttttttttatgaaaggaaaaaatgttgtcttctatcactatatccaagatttcatttgaggttgggatattattttttttgtacttgtagtaatggaagagtattatttttagcacttagctagataaattatattaaagaaaattattttatataatatttttaatatattttttaaaagaattataatttaagatgttctagtagttattttggtagttttttttttaagttattatataaatttttattacagtttagattgttttattagttactaagtgagttattaaatgaatttttataaaaatataaaaataaaat

SEQ ID NO: 227474 - DNA, 2496 bp, Cannabis indica
ccacaacataactaaataattacagcaacaaaaacctaaacttgcataaaaacctagctcaaaaacttgaaaattaaaagagaataagaagaacaagcttaccttgagctgaaatccttcaagttctataaattaccaagctcgaccactctgaattgacaagaaaaatggtgaataaaattggttccctttggttcttgggtgaggccgaacaagaagagagagcaagagaggttggatttctagattttgcaatttttggctaagtgtaattaatgcaatcactttctattattcagctaataattaataaacttaaggattactaccaaattcactcaacttacaaaagacaaaactaaggtaaaattactaatttgccctatttcttctacaagaagtaaacttaaaacctagggataatatggttcaaaaccataaccccaaatactcctgacatttttaatgtctaattatattgccccgctaaaccaagatactacaccatgtctatgtgactctataggctaaatgtcgtattatattgtgttatatacattcttggtaaaggacacgtggaatccaagtcaacatcaaaggcccccaagtgcgtcccaaggaatacaatttgggccaagcctaaattatgtaggacattccaagaacgtatcttatctccatgattagatgaccttccgctagttacagcttgtatccaaaagcaggtctagtactatgaagctgaaagagtcagacagaatgttcttggaagaccagtcaaatttctctttttattcttgcacacagataaggaaataattgcttgccaaatcttgacaaaagatcgtatgaagataaaagggtgaacttcctaaaacagagatcaagcaattgattcataattaatttcccgcaattataggacacgattttgaccaattcaaccgtatccaatctacctagtcaacatatcttctccttcgtgggctaggcttcacgagacaacccacattatgtaattcaatgtaaactccccaatacagaaaaaagggaaacaaaatataattctcttaatactataaatacccaatgcatcctatatagattaaaagttgaattttcttgcaatatttactttggaaaacttgagaacttatgttcattatattctcaaaggctttctagctcaaagtcacataatgaaattgactcatggactaaggctacttaacgccccaaccacataacaattgtttgtgtctctcttactctttttcttttaattatttatttcttcagttctgattattcataattggtttttcgaaaatctcgataaatattatggtgcattcattgagagctgaagaaagtagtgataccatctaaagattacgttcagtaaccatggtactcacccataacaaatctggtcttcattttacttatcctaatgccaaggcaggggataaagaagatcagaatgaggtaactagccatcataaagatcaggttgacaaagatacaaacctagacgctcctgtatttcaaaatgatgaatcagaggagaataggtctaacgatgttggagatgatcaataagataactcaaacgatgatcctcaggatgcattgggggacgattgccaggacaagaccgctaatgatattgttggaggaaaagataaacctagcaagacagatcccatgattatcatggtcaaaaagttccaattaatcaaaaataggatagctcaacaggataaattcaatgagataattctcgaaaagatgataagaatgtaggtcgtgatgatagccttgaccaatggaatccctaatgtgcaaacacctccaacaaattgatgctcctggaagagtggatccaaaagattctggaacctcaaatcctcacaaggataaagggaaaaggataatgggtgacacttcgaagaagactctcacaactaagcaacaaaagaagtctaaaactgtcaactaacctcaacagaataagaaagggaaccatctctagggaagggtgaccagactcattctagaggcacagtcgtacagaaggataagacttatgctagagtcaagaagtctgcttccaagaaagacaagcatcattgcaataactccatcggtcaaaatgatgatattgatgaggtgtattcgatcttagatgacaatagtggaagcatctccacaaatgatcttcaaagaagactaaacaagaaaaaagagaaagcaataacaaagaaagccaaaccccacgagaatgatttgagaaaccacaacaatgatcgtgttcacggaagggaatcttcaagtgataaagcccaacacttagaatgcaaagtcaaagagtttatgaagctcacaaagaagatatctagaaaacaaaatggtaatgtatcagactcagaagaagaagacacaaaattgtgtgggaagatatgttgggttttgtgccctaaataaaacccatta

SEQ ID NO: 227475 - DNA, 3678 bp, Cannabis indica
ataaatcacttcaaatttcttatattgataactaatcagattgtaaaaggttttatttagggcacaaaatccaacattagcttctcgtcactcctcctgagtctagtccctaacttggaattgtaagcaatgagcaaggtattctctttaccttacacttcgccaggagctcagcctccagtgtctttacctgctaccagagagcactcaaagatcccctagagttgccatgcaaaaagttaagcttcataaaggcctaaaacgaaatagggtcaagattagtcccagaagacaacactagctggccaactcctctacggtgctacctatgccggccagcctctaaaagtcactacaatggccagccagcttcatacaacaacccctatggtcgatcatcctacaataatacaaaaaagtgagcaaagttaaatgtgtaacttacttaggccaactcttgaagaccgatagaagagagcctctttggctcactgtcaccaagctcatgcagctcgttatccataataggaaaggctctgtccagacgtttgcaaactacctccatggctctctgccccatggctgaaactgatccccaagtaggcttttgcgtgcccttacctgaacgttgatccttcctcagcagagggtcatttatcatgggctgcctagttggcacaggtccaggaggaggaagaggaagagacgaccccgcagcatcaccaaaatgggtggttcgggccaccttggcccgcaggcaacctgaaggctcatatgaaggtcctccagctaaacctttgaatctagaggacatatctgcaagaagaaagttacagagtcagaatacaagttacaaaatattcaatgaaagataagaatataaaagatggtgcaatcaacaattaaataccatcatcctcagaagaggaattgtctaaatcttcaatggatacctcacccttgcctctaaatgtaggcaaggggcgagtaggcccagcagaactttggcttccaagcctaatctgcagagtagtatccccaaatggtgcccttacaagccaagtgctggtggatggccctttctctctaaacccctaactatttgggattgaggcacatcatcatccatgttgggagtatgcccaccaccagggcaggcctcctcaccagctgtgtctccatctaaaccatttgatgggccctcagcccctgcaactctagtaatcaggggatacattttgtatctctaaaagttggccacgctggccaaccttattatattcctctttattacggggagggacaagatgtagtttgctctatcccttatctatagagtagggatggagcgcttgtatgtaggcactcactggaagcagcgacgtcaaacttcctggacatcctaggaaatgaagtaattctgggcatattcaccaacttttgataaaggcatattatttgtgtcacccaaccattggtggctgacctagctaaagtagaagtaccctgtccgatttttctttggagcagacttcaaataaaaataatacccaatctcatacggagtaggttgaggccaacctagatctgcatagagaacaaacattacttagaggtatttaatacttttcgggatgatttgtgttggacacatcgtgaagtatacagctatgtctctaaaatatgggtgaaatggtagcactgccccctggtggatatggcgctccgaccaagccatccaactgaaggccagttgatgcgcttgttgatccctcgaaggaacctcacattgaatgcctctcaaccgtccactctctagtatcctattgaaagcctcagtagagataatagatggaggagagacccgccggtctccctgtgacccagcatcaagaacttgaggctcaaaagcctataccaagacatggtccaaacctatcaccaagggatgaccaagcttgttcaatggatgcctgttaacatcatacgagcccagaaggttgttggagaagataacataagtcttgtacatcatcctcctagtaggcgtagcctcttccacctcggactcggtgtccatactctcagcaccctagtcaaccacaggcacttctgcctagctgacccttggatctctataatcaagaagttgtgtggcttcttccgttatgccaaccctacccatcgtcgccaccttggaaacgtgaggatcagatgatggtacactacagtacgaccacttagttctagccatagtgtatcactatcagtccggagatcactcataaagtggcgagaggacagactggatgatatctctcaaaagtaagactgactggacctatgactaagcagttggcacctccccataccaacacttgaaataacctacatagaagagacaatgagaggtgagaaacctgacaaagctacaagatacagacaaagttctagccaatcgtacccaagggtacttgcaagataaattacactgtacaaggttggggatcagttaagtaccatctccagtctacctacttagacaaatggtgagtcctaagttgtgcatttaactataatggaatgattaccaaatcttatacagagttcccaagggaaccacatattagattatagttgtatatgcatacaaggtcatctcaagacccttgccgaggttaaaatagggcaaatacttggttgtctactaggaattttggccttggctggttaggattcccaagctaagagagggtcgaccaggtcccatgacctagccaagggctggctagggaccctatgcctagacatgggccggccagattttcgggtacccactatggtcggccagctcccatgagaaaggccctaggcttgctaggtcttgaacaatgcctctatggccagccagggtgtgcttcaaatctaaacgtgtatttttcaagaactcaaacacattcttcctattcttcgtgacttaaagagccaagaatcacaataaaggtcaaaatcatatcttttttgtcaagaaatcacatattatacatcctaagactattatacggataaaaataccaaaaaaatgacaatctaacgtgggaatcaaaaaatattcaaagtgaagaaaagcttcatgcaaccatagaaaaataaactaaaacaagtaaataatgggaatagaaagcttacccactacaagaaacctttggtgaaaggaatgggaagctttgatcgtcaaaatggcacgaaattctctagagttgaagcaatgtggggcgtcagcctctagtgagaacgaggagctttcaaaagttttttttctagagagagaatgaaatgtggaaattgaagtgtggtttcccacataagcttatatagcttctgtgggaccacatttttacttgccatgtagtgttcaactaaaaagcatgcagaagagcagtgcagttaacttactgtaacaagtgagatcaaacagtcaagagcaattatttcaaggctaaatatgttgcaagatttacccagttaaggctacatcaatcccaactaagctggaaattccttatccgcacagatgtccgtacagggacttagggggcgaatattatcccaattttttcccacctgacatagcatgtttatgtggccaacatccgtgccacgtggcagtacaactca

SEQ ID NO: 227476 - DNA, 4588 bp, Cannabis indica
gattcagttcattccggttgcagccaaattgttggacatccccgtaactttcctttgtgatatatttattgggaatctttcggcggggtgaaaaggtgcatgaatataagctaaggacactccctgatgtcaacgacaaggcgttcttggttgaaatacaactgaggtttcaacatcaaactagcacacaggaagaagagttgcaaaatgacagtgaaaacctattcatcttcgtgtttctccaaagaaaatggtggaaaagggatcacatcttggcttccaattggagatgttctttgaaaatgaagcagagaatatgccaagctattgatccattccagcgaccaagcttacaacgccagagacgaagatcaatcagtcggcactagagacgacgccgaaactgtagacgatgctgatgttgtataatgagaactcgagccaaatgttctcgtgtgaaattcatcaagcttggaatggtaatgcgtcgtggacaagaagcactcctccgccattgtcaatggtggctcactgaagttgtccatacaaagcataatgaccaattgagggtgtctaacttctcgtctcctattttgattcctagggttagttgtttcagggtgtttgactggggacgaacgatgtgttacaagacttttgctacatgggtcagctttgagctcttgccttctcatcctataggctaggaacgggtggttgaggggacacaatatgggcatttgaagcatgttcgtgtgggagttacgccagctctacgctgggttttggatagagggagatggccaaagtttcaggttccattgtttgttagaaactgctgccatggattggttttgctggatttccggagagggttttgtataaggaactgagaaaattcattcataggctccttgcaagaggagggaagtatacagaaggaaaccatactcagttctatgctacgaagtgcaaactctcaatctcactttctgatgcttttgattttgtattacaaatcttcaacagcattcctcatattgtcgcaaaggtggctcatcaaatgcatctgctggcgtggttctttgacaatggatgggcatagtctgcggcaattgaagcttgatgttcttcaccttgagggcaaggtgactttcaggcgggcgatattgttaggccttagatattaaataaaggggtataagggtaaatgtaatagagtattcgtagtatattatacgagtgagtgggaaaggggaagggggtgaagaatttggtttaatttgtaatggttttgggagagaactaggctctctgggtattaatgaaaggcattctgctatttttaaccaaacactattgctctttctctattttctaactaatcttgataaggaaatccctataacacaactcttgtttatttgataaatatgcaagcatcatgcattgttagaacgttttattaggtaaaaccaaaaacctcataataattaaaacaagtttaaaaagtttccaatatctaatagcaatatgatgcatacagaaactattaagtgaacaatttattttaagaatgtttctaatacaaaccttccagttcgaagcacaaattcctctgtttctttaataagatcttccgtaagcaagggcccttcctgtagataagggtgcaaaaaatctcaataataggagtgatcacaaacagtataattatttattttaacaaggctccctgcggaccctacaatatttagggaccaagaaccacaacaattactatgtaagtacccaagaagggcccaaacctcgaaccttgtgagagcaaacaatatgcttgattatttgatctactcctcttaagttcaagatgtagtatcatttgagtaaggtcatttgtcaaacctgagttataggagagtacactggttctccagtttccaacattgttagatctcccattgggcgatcagcgccgagtcggagaacaagttcctcaacatttattctagcatacaatatggaacttgcatgaacatctttgaacgtagctaactcttcgtcatttatattgccttccttaaggacaaagtctaatgattgagaggcaatttctcgacgtcttcttcgtgatacgcagcaattaatcacttgcagctgctgaaacagaagacaagaattcaaatctggaataccatctagagggatgccaggtatatattgtttgtcagaccaatgtcttctcagctgcatccatacaagagtaagaatttctcgttaaaccagaaacaaaatgttaagaaaaaatgaagtgtgcatgagaatatatattaacaaagatgttattgggcacttggcaggaaaatacccaaattcaaaattgaaggaattaattatcaaagttttccgtgttgctctaatatagcacatgataattctataaaaaatgatgagttatataaatttccagttatgtttcctaaaaaatgcaccaatatagagatatatacttcccaagaaagaaaaggctactgattgaataaatgcaccaatatagagaaatatacttcccaagaaagaaaaggctactgattgaataataagaagagctatataaggataagatttaagagttataatgtaacaaccttacagaatttacctaacttaaatttctaatgaatgacttacttcggcaataactctgcaccaaaataatgccatctttcgcagggtcctgaagctcccaataacttcagctacctttacaatgaagctttcaggaggtgcaccatgaatatctctaagaaaagatgtaactgtaattgcatccaagcaagatctaatattccgtttgagaaacaattcatctgtaaacattatgcaaatattaaaatataaattaaacatcacatgataagtcataagttagaccaaaaagctatatccaacaatatattaaatatgcctacctccactaaacagtgactcgattaaagataaaaccttctcattgttacaaaactcagatgtaagattatcctctttttcacgaagtactaaagacttcactgctgagagactcagacctgatctctctctgacaggtgaagaacctcctgatatggccaagaaatctttcattgagttggacttctttcccatcctaaattatgataccacaatgacaggaaatagattagtatcatcatcgaaacactggaaattcaaattcatgcatcctgctattcaagcatcaggaatacaataattaacatgtcaattaaaatgaattcaactcccaagttgtgcaagaaatttacatgaaaatggttatcaaaatgtcaattaatttaaatagcttaacattgaactttctggaataaacttcaaatcgaacaaaggaagccagagcagagggtcttgattaagggctaactataaactcaaagatcatgaataaataagttttcttacacaacctgactacaaccggaatcttaaatgttaattgggaaaaacaaaagaaaaacttactcaacagcagtagccaattgttttatcgtagagactgaaggaataagcccaaggtttgcagcacttaatccttctgctgagggagttgtttccacaacctaaagatatcaaatttcatttctaaatgaaattgaaaaccttaatataaaagcaacttgacagtacggtctattacttcaaactacatttctagcagtgatacacaatgaaacaatcaatcatctaaaccgacatgtgtagaacattattttctaatgtacaacatttctaacgtataaaagagcacacagtcatacaatattttctagtcacattcatcatgcaaattcgctaaacaatgaatcattggtaccttgtacaaagttttaacttctaagtataattttaactcagttaaacatcagtgttcttctcacataaattagaaccgacatgtgtagaacattattttcattctaaattagagtatgctaataatcttttttataaaatttgtcatctaatactatgagataaccttttatagagaacttatacaaaaactcaattgcaaatcaaaatatagaattggttgacatctctcacctttaaatcgacaccatttttcatattaagcatgtacaaattctcatcacagaaaggaatcatggttgaattttcaggtttatcagtatcttcgactcctttccttccaattctaatgtttctaaacttgtcctgccaatcctgctttgtcttaatgggctctggcctccgcttcaactgtttgaattcataaaaattaagaacttaactcgtcaaattaatcacaggtaaaatgcaggggggaaaacagtgaaacactttaatacgttgagttgtaatgtaccaacgcaatgagcatatatgtatcatatgatatttgcccattctattatttcttttagccttctaaataatcaatcttttcgttttccagtttattttaatccataaaaggagaaaaaataaaacacagaaaaacaagtgtcgtgtcattttaatcgaacattttcgaatttcaaaaaaatta

SEQ ID NO: 227477 - DNA, 2310 bp, Cannabis indica
ttggcatttcactataaaaatacataatcagacacactttaaattttttttctgacttaatcgcctatgtatatatgtatatattaatattatatattagaaataaataaaatataattaaaagttttttttaaaaaaaatgagatttttagtgatgtagtttaaagaaattataatgatgtataatgtaatataaatgtgttagtaaaaataaaaaaaaaaattagtaatatattttagataatattagagttgaaaaacttgtaggtagcattttctttttaataaagatctgcaatattaacggaatatatagtaataaattaataattaatcagcagcatgtatacattaaattttagaaaagggagtgatctagctagtatagttatcatcgctaggatttaacaaaaatgacaaataaggagacaagaatgactttcttttacgaagactttttcatttttcctttgaagtaggtgatggagattaatttacaggatgattatataaaaaaaaaaaaaaaacaaaaaccaatcctcaatttctatgctgtagaccatttggtcttcttggtagaattttatgtctaaaaagggccacttattttcttctatacagagatacgtccactccttgaagtaatgatattaatcataggtttacaattttattttaataaaaaaaaaaataccttattaatctgaagggaaaaagtatattaattgtaaaaaaaatgttctcttcaattcgtaataagctaatgtaatatataattatatgatatttgacgtacagttattatttgatcattatcgatattattttcttcaatttacaattattaccataaagtttgcagttatacttccctttcaaatgctttaattgtatatataaggctgatcgggatgtgtttgatcattgatgatatatatgtgtttttattttattttatgagatttttcttcttttttacgtatacatgtgtcatgcatgatattagttgatgagtattatagtggatcaatccaatattcaaaaataggttatctttcacaaatatatataaattggtatattaattaatgactcttctccaagagattaatgagagttagctaagccggcatcttaattaattagtcaacgtacgcgcccttattacttgttagaatagttaaaacttttaataatttttataataatgggttcccctcacgactatgtctccatgttactaataattaatcaatagttaattattcagtgttttttaataaaatatataaagaaaatcatggcattatgctccaaattccaatatttagctgagctatacaaatggaaaattttgaccatggagagagtctatatatatatatatacacttgaaacttacctaaactaagtctaaacggagtgaatatttatggaagctcttaatggccaaataagttcacatactgcagatttcttaaaaaaaatggaagaaaaagaaatgtagcttgtctcgtgttgaagaattatatataagagatgggtgttagatagagtctcacacattgacaatttgacaaagtgtggtgtggacactgccatatataatgcatattagggagacttatttggttttggtcagtgaagttcgctgatcaaaaataatttactaagaaattaacataaaatatgtgtgggtctataattaaattgacaatatattgggagagattacttttaaaggtgtgtaaatatacatttttaatgtatgatatgaaatttatatatttcgagtgcataatgatcattatgaatctgattttgaactacatcactcacccaaagtctttattaaaaattttacaatctaaaatttttattttataataaatgcatttttaaagttctaaaattataaaaatatatttttttaacaaaaagtaaaaaaaaaataaaaaattagtaaatcaacttcaccacaattataaataatttattaaacaatcaaaaattatctcttacaagtataatacaactataataaattatgacaaaaaatagtttattatttttattgaagtacattcttttgtaaataaaaaagttcaaaatcattaaaataaaaagaattccgtgttaacatattttttgtaatttttgaaaagaaatttgattttctatacttacatatatctaatattttatccttaaattaatccatatcaccattaaaaatatatagccactttatctaaaacccaaaaatacccctctcataactcaacttcatctctctcgcatttcagcaca

SEQ ID NO: 227478 - DNA, 4214 bp, Cannabis indica
aataaatgcaacatcaataaaaatccatgtttctgctcagcaaccaataaaaacatttcaaatgtaaaatcacagcaatgagtcatatccaaagttttgaatttgtaacggggataaactcaatgatttttttaacaacataattgtaaaactataattttcatctagtttcattagtacaaactccaatagtgtaaggttgagattctatattattaagtctgaacggaaacatgtagtatcagttgttccaaaatcttcttccaataaatttaaaaactaaacttagttacaaatttaatatactaccagagccgtatgctgtttacaaactcaaaactttgggtgattatgctgtaagaaaatacattaattcatgtctttcctcagcaagcaaaacacaacacaagattatatgatcacaactaccaaaaatttgaaattgcaatttgattacatctagttattcaacttgctgtcctagcaaaattagaagcattgaagacaaatctattaaacccacttaagaatcagataaatagtaagtaaagattgaaccttggatacaattttgaagacaaaactggcttcatgggcaggaggaagtattctcttgagaagagcattagcggcaagttcttgaactgaagcagatacccttttggaatccaaacgcagaagaagattctgaatggcctctggttcagataaagctactgggacaagtagcaaactccaaactagaaaaagggtcatcaaatttgacatctttgttggctctcctcctctgattatcttcagaggaaaactaaatcaacagctcagtttggtgaaactgaaatgtaccatatatatggtttagttatggaatggttggaggaggaagaatcacaccaaatggggttactatgtaatacaaaataaggtgggcattatatgatttgattatagttttacataataatcaaaagattccaataatgttagcagatggataatgatgaattgttttttcaacgtttgaaagtcaatgtttttaaaatggctacgtgagacgcttatcatagaccttgccacaccggattaattaaatttattgaatgaatgaaaaaccatttcttttcttttattttatttatggaaaattagttataatatagaataattagtatttttgttccataaatttttgataatactaagttgtgcctcttaagatatattttttttttttgaaataagcgtgatatcattacattaaattaaacaaagttagacctcatggtcgttacataaaaggttctccggtaagacagagaccgggatagtaccaaacatttgatgagcgaatgcccatctagccacattgtgagcggcaaaattacattaaatagtaattgataaatgaatgcaaattatatacttttcactcttaggttaatgaataatataataacagactttttttttttaataataattaatatttttaattttagatttttaatcattaccgtaaaaaagttgaaaagtatataatttgcatagctttgtcaactacaatccattgtgtcttcacgaaaaaaattgaatacagtgtgatagaaggaccacgtttaggagtgttcatccgatctaatccgcactattttgcttatagtgcatccgatctgcgttaagtgtgaatttcatattttagatctaatccaatccgcatagtaattcaaatctaattcaatccaatccacaaagtgctactgaaaaaaagatgtatcttgttgatatacataaaattttacatgacttcacttgaagcatacttaactttggagttctttcatgatgtgctaccgaaaagaagatccatcttgttaatatatgtagtaccaattaatctatttaagctctctttaactatgtagttctatacttacacagtctcagaatcatcacacttagtatttttttcgcgactactgactgtcacatatttacactcgaacaacttataggtgtaccacatttaaataatatttattttacatagaatatataactttatatatataaatattttttattttttttttcaattcatattttaactgttaactacctatagagttgcaaaatataacttatgtattattattatttaaaattaagtatttgttagtaactatcagttacttagcaaattactctataaataaatagatttgttcatattgttttccacaacagagttagggtttttctttctgaaaaacagagctagggtttcatattccttcacaccactccgccaccctcaatctcactctgccggactctacccaaaccttgcacacttctctctatcgcaaatcaggtcagtttttcaatttctgcaatttctttcattttggttttaatctaaaaacccactaacgaaccgaatcttaacttgtaatatttgatataaatgatcaaatttctaaccttgatctgttccaaatccaaaaattaaactttaaaatctcttaggtagctctattactcattctacaatagtaaaattataatctttttatgtagatattgattgattgatttatgaacatgtatttgaataaatattgtgagagctttgaattgagaaaatacgcgtccgaggccgagcgcttacctcttgaggaaggggtggcgtggtattccacgggagaggtttaaatcgtggcgcacaatagtgcgttggacgcatatcatcaacttttgttgggggctactttagccgctctgctgtaatagtttgcagacagagcaagggtttgccctacattcattttgttcttgaaattttaagtgttttacccaaataatcattaggacttagcacttacatgaatattgaaggtaatactttacttgttataaagacactatttttcataaattttcatttcaatcaaaagtttgagggaggtaggagaacaagaagaaacaatgtcgtatgacgatgtggagatcgaagatatggagtggaacgaagagctgaaggcgtacacatacccttgcccgtgtggagatttgttccaaatcactaaagatgatcttaaactcggcgaagagatcgctcgctgtcccagttgctctctttatattactgtcatttacaacatggaggatttcttagtccaatctgatcagacaaagaagggtattgacccacctaaacagcagcctgttactgttgcttgaaaattccaggttcatatctaatcagctctttgccccacttaatcaattacaaatttttgtatgaatattattcattatagtttgtttgaacctttagttatgttttccaaacttgggtttcaattcgaaaccaatcagaaatgtttttattgatatttatatacaattatttattgttaagatttcttaaatcttgcttatttggacagtttaaacttgttcatccatggctggaggtggcagagcaatggaaggaggattttttccaagttttgataatggaagattcttttcaagttttgacagagctttttgactacttgtgaaaaaaaaaacattattattgggtaaataccaggagaggagattatgtgagtgatatttttggtagagattatcattattattaagtaaagggtcatcactagttgaggcctttgatgtactttaaggatcaaccagtgataatatatacatgttatagtgaataataattgatttgataccttcttttatcattctgttcttcataaatgatcggttttatttgaatctgtttcactgtaaattatgctccttatgatatgaggagggagaggttgacaattgttgagttggcaagtgctgcattagatgtgagtttattttcacagaattaagaatcaaacttcagaaaaattgaacagaaccattcattctgatttgtacacatgagtggaaagaaaattgaaagagatggttgtattttacttgatagttgccaattctaatattgctaagccacccatcataaatctaatattgccaattagtaatttttccttccgaagtttgacatgtactaaatcgtgcccctgaatatttttggccgttagaaatttttccgaactattgagattgttaaatttaaggacttttgtttaatttcattcaattttactgttttagtgattgtttatatactaaacaatgct

SEQ ID NO: 227479 - DNA, 2791 bp, Cannabis indica
attcgaaactggtaaagattgttactttgttctatcaagggtcttttatgtttttcttatcaaaagcatttttgttcatagttttgctaagtacttttgatgtcatcaacagttgatcataactatttcgatcatgacatggaagattaattatgggggcactctgatatcttgtaggaaccagctgttatcatggaaaagactaacgaggaggattcaagcgtcgaggacaaagtttcaaccaacttaccttctgagacttctgattctgctgcaatcccagctgacattcttgaatataaaccattctctagcgaaattgatctgaagaatggcattctcgatggaactgataatgataacaacactcagcttttggtagaagaatatgtcaaggaagaggttgatgaaataaaggatattgatgaagagttactgtctgagttggatacagttggggatttcagtgtgaaagaatttgatgagccaccactccctaccgagctgatgctagagcaagctaatgttggaaataccagccccgagctgatagaaacaagcccggtattaccagttcttgaagcaaggtcacttgatgatattgatttggcttttaagcaacttcatgagggagcagatgttgaggaagtgattcttcctagtgtaattgaggagcaaaagattatggaagaactcaaaagttccgttgaaactacttctgaattggaagttgttgaagctcgatctttggatgatattcacacggctttgaagcacgtctctgaaagtagtcccggtgagaataaatcagaaactgcctctaatgagcaagtcattgaagctcgatctttagatggtattcaggcttctgatgagcttcccccaacacccttgaactctgagaataaatcagctgaagttggaataaatgaagcaagttcccttgaaatagcttctaatgtgcaagcggttgaagctcgatctttagatgaaattcacatggcttctgatgagcttcttgcaacaccctcgaattctgagaataaatcagctgaagttggagtaaatgaagcgaattcccttgaaaccgcctcgaatgtgcaagtcgttgaagctcgatctttggatgatattcacatggctctgatgagcttcctgcaacaccctcgaactctgacaataaatcagctgaaattggagtaaatgaagcgagttcccttgaaaccgcctctaatgatcaagtcattgaagctcgatctttagatgatattcacatggcttctaatgagcttcttacaccaacaccctcaaactctgagaataaatcagctgaagttggagtaaatgaatcgagttcccttgaaaccgcatctgatgtgcaagccattgaagctcgatcttcagatgatattcacatggcttctgatgagcttcccacaccaacaccttcgaactctgagaacatattagctgaagttggagtaaatgaatcgagttcccttgaaaccgcctctaatgttcaagttgttgaacctcgatctttggatgatattcatacagcgttgaagcctgtctcggaaagtagttctgatgagcttccaacacccttgcactctgagaataaatcagctgaagtagtgagttcttccaccgaaatggaaccagacaacgtagcaactggtgtcaaagaaggtagctcgaatgctgctgatgaaccgaaacatgaatcctcagtttctgctgatgaaccaccaaatgcaatgacggacgaaactaaagataagtcaattcctcgtaaagcaaaatctcgttcgagttccagctccagctcaagctcgagctcgagctcaagtgattctgagtgagaacaaaaatggttaacacttttgcagcttgggattttttcttttattatttatctatgagtatcagtttttgatcttggtagtgtggttttctttggtatttttttgattggtttcttcaagaatgagttttggtttgaattcttgaagtttgaaaaattttcccatctcttgtttgacaatttgagagtgagttgttcagttttgagaagaaaaaaaaaacatgtttatagttgttgatattgtacttatgtacattgtaatttatttttttcctttggatgtagatgttgagattttgatcctataaatatttgttttattctcatttcccttgattttattttttcttaactcacaagtaattgattcttgtattgattgcatgaccaaagttgtaaatcttgagagtgaaagtttataagggcaatcataaagtggaacttattttcttttttaaatgcaatgattgactttacaataattttcttccaaagtatggtgagttgaggaagaaatagattatatacaaattgagatagaagcttcaataagactttgcttttatttatttaaagattaaattagttgaattttacaaaaatatctttgttctacaaaataagttaaattaactcatcataaagtttatgttctctaattcttttttttttttttttccatatagtttgctaaattttataattcaaatcgagttatcgtgtatgatccaaattactacaacaacaaacatgcatatcacatgtttctgatcaaaatcaacaatccttgtaaaaaaaaagaaagaaaaacaaatgaattacaatgtaacatgttttgttaagattgttattacacataagattatatattctacaaggttagtgtctatacactaaaatgtaatctgaatgagccaaacaaaa

SEQ ID NO: 227480 - DNA, 2322 bp, Cannabis indica
ttttaaaatggaatagccattccaccaaaatggtggaaagagcattccattggaataccattccaatactttaaaatgcaaccaaacaaaggaatggaatgaaaattgtttcctttctattccattccattttattacctccaaccaaacgccacctaagtgtgttgaaccttgcttttatttggaataagttaatattccaaacattccgccattctttggttaacttgtttggacagattgaagactagaggaggcatgcataactttggtatgactatgaacccccattgtagtgtttcccatttgttctttaattgtattttgagtgtcttgcacaaataaaaacttagaattgggttggaggacccgagaaactaatatgcgtagattgttgagatgctttaggcgatggagatcatggtttatccaaattttccaggaacttttttgtggctgctctagcagctttgatattatcagatttggtgggctcggaatgggccgggctttttgggatttaggagttcatagagttgattatataatgaaccaagttaaaagagatgttttagctcaaattgattaatcttttttgaatgaaaaaacttgtatagataatagaaattggatccatactttacacgtataggtgacttgctgccatatgtatttgtttgtgcagtttcctctatgctaggatctgatattggtgttgtatttggttggtagcaataaaatttctcacttaattacttgccgaaaaataagagagaaaaaaaaaccgattagttttgtacttgtctgtcattgtcttgtacaatgtttagtttctgattcattgagtgttgacttagagaactgaaagactacttttattcatccgtgagtgtaattaaggccacctactcattttaattctatgcgtgacttagttcttgataccataaaatcaagataaaattgataaaaatcatacattataatttcttacatacatacacatatatttatgtatgagaacatatataggtatatatttatatataatataatatgaacaatatttgaaaatattgtttagaggccaggcaggtacatatatatataataatatgaatattatattaaatataatacatattaataattaattaattgatagtacggcaagatgctcggacctctccttgagaaccctgtttgagatcaagtaagcccattttgatgaaggcctgctggaagtccaagaagaacatggcttggttgaatgcgtaggcattgacaatggatcttgtccttggagaagcgtacagagtttggtctgaggtcagcacaccgttcttcctaacaagaccattgaagtaaacattgtcgaagtcgtttcgagtggcgtcgaatggctgctccgccgtgtcccctgcgctgcatgttttcgacagcgtccttgcgaagtccgaatctagcgttggatctgcttcgctcaaacgacttttgaacgatgagcatcgagcaactcctagtgtatgtgctcctgttaattattattattattaaatttcataatgataaattatattatacgataaacatatcaaattttaggtagtgtttcgtcctttttgtttttttttttcatatttaattgattgaccactatcgagatgacaataaaattatagtgtatcatttgtcatcccactagctacatgtggtcacagttgctcctatcatgaagtggaatctttatatgtttcgaatttactctagatccctttacaactatatatgtatacaacaatttaaattacatatattaattaaatgttcaactttactataagtctaaatttttctttcagtgctttctcataataatttaacatatatcaacataaccatattcttaacatttcgtgtgtcattcaaaattcaaataatttaaaataagaaacatgaaattaacaaaaataataaaagcacaaaggaaagtttaaaaatgcaataaaagaaatcatgtttgttcattatttatcttacagtgacacaatatgataaaagcacatacaataataatgtatatgggattggggttaattaattaggactaacgaattcattattacttcgataagtttcaacatctttgtagttaatttttgattttttaccaataaaactaagattcatatcttgagtatacatataaatttctctcttgatgtgttatgaatgctcttaatatagtacaaattaatgaaacaactaaattaatagagttgagttgatggaattaatgataaattttattatattataaac

SEQ ID NO: 227481 - DNA, 4372 bp, Cannabis indica
tttgtacttacttttatattaatctatttttgattctttagagatctcatttattattattattattagtaagttgttcggtaatcattaaaaaactttattttatgttgtgtcgtttaaaaaactgtacaggaaattgttagtgtgttgttgatcatgttcacacacaatgacattctttcagttttagttgaatgtagatgattaagctgtcctcgtcctttattttcaaagatttgtaactttctttcacttggttattttagttggaattgagtgttttcttagttgcattccatgacttgattcaactcaagaagcaaaagctgtgggagaacatgcagaagattcaggagctcaagcggctgtccgtcggggtaatatcgctcaagaagttgtgggagaagttcaagcggctgtcgaaggggccaatggagttcaagatgcagaagccaagccagtgaggcgtgttcgacaccgtttggaggatggaggggtccgggtcgtggaattccaagaagggggtccttcgtgggggtcttcgtgggggccacaatcctcttcctcgggaccattggcgattcaaaacattaactcagagtgatctgacgaggttgacaatgccagttcgttggcgagccttactaccagatcttaactatcccaacgaaatacctgttacggtaagggatgatgtgagtggtcaacagtttcaagttggttacacctttagtttctgtagaaagaatcatcgtgactattatacttccggtttttcaacaagcaggttggatatatttttctatgtttaagggattggccattggcgatactattttaattaatatggttcgtggggttgtcgtagtttcctgtcagaggcaagggtttttttttttttttttttttttaattttagtttcttttgtatacgatcacactgatattgatgtaagggaaacgctattcatgaataaaatctttgctttgaacttttggctataatctttgatggctgtaaaaattaatatgcataaagcttattcctcttgtgtaataatgttttgtctcgactaattcaaaggcacaagatgagggtaagattcatggaattaaagttactagaaatgcaatcctaatatctcatcttacgttcgcggatgacacaatcttgtttgctcaagctactcaacaaaatgctagtgctattggggagtgcttcaaaaagtatgaagagtggtcgggctaattgtgtagtaagcataagtcaggttttcttttttctaagaattgctcgaaacagaaaaggctcaagattgaaggcctactggaaaataaaacaactgttcaggttgggcagtacttgggtaatccttttgtgttttcaagaataaaatacaagattttaatttcataaaggacaaacttaagaaaagattggaagggtggagatgaagactttgtcatatgttgggagacttgcgtctattaatttggtggctcttgctaacccactttaatccatgtccatgtttaagatcccaactaccctttgtaaccagttggattccctggttcgtagattttggtggactaggggtgtcaagacaatgcgtttcttagcaactaagaattgggagaatcattgccagccaaaacagagaggtggattggggtttaaatgtccacgtttaagatcccgactacccttagtaaccagttggattccttggttcgtagattttggtggagtgggggtgttgagaaaacgcgtttcttggcgactaagaattgggagaatctttgccagccaaaatagagaggtggattggggtttaaaaggttcgaggattttaatcgtgtgttgattgcgaaattagcttgggagatggcttctaatatggataagctgtaggtgaaatttctccaagccaagtattgtttttgggactccttttggagtgttcaatctaaaagctctgattctgtgatttggaaaggggttttggaaacctataagcttatcttggaagggtcttgcatgatcttagcgaatggaacacatgttgatatatggtggcagtcgtggattccctagctcgattatggtgaattctgggagatcatggaaatgattcgactcaaggcccccccatttgaggaatgtggcaggccttatggatagatctcataaagtggaactctagatatgtttgacacttatttggagaggatctataggagagaattgtctaatcgatatgtcaacgagttgaaaaaggacacgatggtatggaaaagatctgttaatggaaaattcaatgttaaggcgactaattggttggatcaagagcatcggtttggtctagctcttccgcattggaagttcatttgatccaaaaatatccacccgagattgagtctgatgctttggagagtttgttgtggaactcttttgtctagaaataagtattcaggtgatggggaaagaggatgtgttctgtgtgattgcgatgttgaaatcctgagccatttgtttttttggatgtccgttggctaaaattctttggtttagtgatctgaaacctttaaaaattgaatgcttatatgagcaagatgtttctgtggccatttttgctgtgtttggagcttaagggtgatgagttgacatgattccttgtgtgttcaactttgatttttgatgtcttgtggaaccagagaaattccattttccatggaggtaaaggtaaggatttgagaatgctacatgaggatattcataaaagatttgcagagttttcaagcactgatgttctaagagtatcctcgttgtcctcttcaaggagtgagcctagattgaaggtctcgaaaaatactatatttttagtgactgatggagctttcaaagactcttggtgcagtttggctgttatggctattgattgcagtaatgtcttttgggagtataagtctagtcgagaaaagggtgactctgccttggaggcggaaatgaaagcaatctacttgtctttgagttgggctgcagagaaaggatgggattctattattctttgttctaactgtttggtggctatttcggctttggagaagaagcacctcccgaactgtcgcctcgctggggttttcttctctattttatctatcttgtttaagtttaagtttcatgcttttagatttcttaagcaagacttgatttctgctagggtccaggactcaaattgtatcggggagagattgcccctctcaatcctaatgtttttttttttcaaaaaaaaaagttctgaaactgtatgtaaaaagtaagagtgtttttcggtgcgggcgctatggattttgattattttctcaaatcaaactgcatttgtagttttctaaacatgtcacagcatcgcaagacctcaaatcagcataaatcacactgcaaaagtgcaatggagtgtagacgatttacactattgctaaataagcaaataatataatataatttcaccaacatactaaaaatacaacatattataaaaaattaaaaaataatgttaaaaatttacaacataacactgaatcaaaatttataaataattagtgtggtgcagttggaatagcaattaacacaaatcagacattgttttgaacatggatacatcaaaatcccaacattgccagctaaattgagttttcaggaaaaagagaaaaaagaataagctgagttgtgtagtttcaaatcaaatcttaaagacaatatgccattattcaagttgttctcttatgtctccaaccttcatagcaatcatttttatacagacaataaaaactatacattatgaaaaagagagagcaataactaattagaacagccttattattatccatagaaaacatgggaaaaattacatacatattgatcatatcatatgagctaccactagccatgattttgcattagtatcttatacaaaatttgcagactaaatcccactaaaatgacaattatttgagaccattttctcaatatttatacaccaatccctatgaatctaaaactcacaacaaccaaaaaagaaagattaaaaatgcattttttttttcaaagcaagaacaacttaactggagggagaagcatcaaaagccaattcttgtagctccttctgttttacatactgattcaacaaagtaagcctagcagtctcaaaagcaaagtaacccaatgccgaaaaacaagcactgtgaagaacccttggccccattcctctggtgaacccaacccaaccttcctccattagaatctgcttcactgtatttgagaacccattgtacatagctgcagaagccaccttaggtgctcccccaactc

SEQ ID NO: 227482 - DNA, 2459 bp, Cannabis indica
ataatattttctcaaaacctatagatatatacatggtactattttaatttgaactattcatacgtatctataactttagatatattatatcatcttaatcttgaccaaacccacccaccaaccaacaactgaactatatatagaggtggctcacaagatcaatataaagcaattcaatctacatacaatagagtatatacacatctctataaataagcctaaaactccctttataaacatacccatacaccttatatatcctaaatttctcatattattaatccatggcgccattttgtgttgtgaggaaagatttcgagcttgtaaagccctcaataccaactccttcagaggttctttctttctcaaccattgataacgatgttaacatggaaacaatctccccaaccatcttcgtctgccaatcaataattactaccaataataataacaacaacgccgaagaagacccagctaagttgatcaaacaaactctgtccgaggttttggtgcattactaccctttagcagggagactcaaacgacacacccacgacggaaggcttaggctcacttgcaacacaaacggcgtgccgtttttggaggccacagccgactgtacactctcttcactaagttacttagacgatctcaacttcgaaatagccaaagaattcgtctctacttcagccccagctgatttcatcgacgaaaagaccggttacgcccctctcattatgcaggtcactaaattctcttgtgggggtttcactattggatttggtctctctcactctgttagtgatgggtttggcgcggctcagtttttccaagccatagctgaggtttctaaaggtaaaaagctttcggttaagccggtttgggaaagagaaaggcttgttggttcacctattaaagagcctataaaggttgataatgggttatttcctgctaaatcgccttatttaccattttctgatgttgttgatgagtgtttttatgtgaagagtgaaagcataaagagactaaaagaaagtttagctgaagagatgaatagtgttcattgttctttaactactttcgaagtacttgctgcttatgtatggagagcaagattaagagctttgaaactcaaccctgatgggataacaactctgttcttcgcaactggtttaagaaaggttataaaccctcctttgcctgaagggtattatgggaatgcttttttgacttcggctgttgagataactggtaaagaacttgatgagaaaccgttatctgaggtggctaatttgattaaggagaagaagaaagatgtttttgataataattacattagaaaatctattgatgtgttggagactgagttggtgactagacagaatgagaagattaaggccacgggtgcactcatggctgttactgattggagaaatttgggcttagttgttgaggaaattgggtttggttggaaagtggtgaatgttacaacgttgcaatgggagtgttttgggtccgttgatttgtgtacttttttgcctcctccaaaatctgacccttcgatgaaaaatgccgttggggttttggtttcacttcctagaccagccatgaccaagttcaaggaagagatgaacgatcttatggttattaattaattaaattattcttgctttttttattattacttttaatatgttgcttaaattttcggtttgattatttatatataaattattactgtttaattaatcaaaaataataaatatctataattaaatgtataaaaaagcatactatgtattagaaggtacgtgcttaattaagggaatgttttataaagtacatttttaataattatgacttttattagcttgagtgttgatgaagacttttgtacatattttttatatatactgtatatgtatgtacaagcactatgtatttaatactatacacgtttcacttaattaatatatatatatggtctctcatttttatttcaaacattaattaatgtatttttcttcttacaaatcttcaaatttgaacgaataataaatgaacgatatatatttaacgatgcaaattaatagtactgaaccgcgatcagtaaattataatcatatcaagtgaaaaacaactttgatcaaataaatataacatctgaaataattatattaaaagtcaagggctagctagatatatgatccaattataggtcacccactttttgtggcactatatagcatgcagttggtattggtaattactatatatatattctttcacacacatatagatatatgggccagtttggcacagctgtgctgtggggatgtgctgtgggaaaaagcagctgtagcagaactgtggaaaaaagctgagctaatttttaaagtgctgtgagttgttaagattctattacaataatgataatattttaatctaattcattataa

SEQ ID NO: 227483 - DNA, 7535 bp, Cannabis indica
tcattactgtcttggtccatcacgtcagttatatcatcagacccaccatttataattaggcccacccgtcgccttttcaattctgaaatagataattctatatcaaaggaaaacttgttattattttcctttaaaaagacaactggctcatttatgtcaagggttgactgcatgggaaccttttttttgattatgttggtcacgtaaatcgtggctagattcatggtaaatatcttccattattttctcatcaattataggctggaaatcagagtttgcattaactgtatcagaaacaacatgattcgtcgctggtatgctagggacgtcggtcggaccttatcggagccatggagatgctataagaaaatttcttccttttggggtgctttcatgaacaatccataggatttcataatggcttctggaagcgtatcatagaggttatcacaaaaagtctcagagtggcccataatgccgcagataaagcaaaaagtaggaacacgttcatacttgaaatttgcccaaaaagcaactccatcgggttttagaaacctcattcttttcttcagaagagtatttaggggaacagacaccctaactctgagataatcacgccaaactccattaaagttgttgggatcctatttaagaaatatgtcgatgtaatgaccaactttttgaaccacttgctctgtcttgaaccctgcttgtaaatcgtgaatctggacccacatatcaaggacctcaagttcgatagtctttcggttgtcccctgtttgtagtcgcttgattataagttgtttacggtcatacatccatggactactgtcgataacccgcttgaagtctatttcgtgatagaactagaataagaatctgttttgctcgaggatcttgactgtcaaccccttacaaggcttctagagatctgctattatattttggaagacattgtagtctaagatcttacctgtgagtagacgaccgactaagcaccatcaaaaagtcaaactttgatacatcttcctcagtgatattgagaacctcttcattgtcttcttcctcctccatattgatgttattccatctatcctcaatatctttgacgatgccactactagaagccatgaatcagaaaaacaagccaagaaaattcaacttaggccaagaagaaaaacacacaaacacactctaaaacttagagatcaagagattcattttattttaaatcccaacaaataaagtcttttttaaaatctccacactaaaactctcccataaatatatataatatatattccgttaaagtatcttacctttcggtcctaattatgtctttgatagcgtaactattgtaaaataacgatccttcacggaacatatacaacgctatgtatgttattataatgacttctcgtgataaacaattatgtagattttactttttctttgtgacccaccttaactactcctacaacaattatagctgcagtaatcagatttttaccataatattattcaaacaaagagaaaaatagcgtaaaattcgtttctttttcttcccttttatgcaaagttttttttgaatagcttttatgcaaagttattaaaagagaagccaaggaaaaccttataattgattcaaatcatcagccacgtatattattatttttgcactggcgttgcacgagcataatctaggacgtgaaacgcacgcagatatgtagagcgtggacaatgagactgattaaagatgttatactactgtacaaaaatctaattattttacaatacatctcaacgaacgccgttttatatgtacacaacactggctccaaatgttttttttttaaaaaaaaaagaaaagaagaagaagaaagacattgtgtatttgtattttgtatataattattgttttaaggaaaaggatagggcgataagtaagaagttgttacgtgcgccatctctcacacgtgcgtcagaactccggtaacagttgacaatcaggtgacggtggtgacctcaatttttggaagtactcccgaatatcaaaaccggcatcagcctttaaacatttctttaattcaccgtcttcttcacgggacggaataaacggaggtcgtaaaacgtcggttagtaggtcccacctgagcccgctaaagaattcgtgttccttgatctcggtggcgcctcttgcgtaccccaatcgcctggtggggtccttctctaacaaccgtccgatcaaatccgttaaagcggagggtttccctatgaactcgggacgtttcatcaaaacattccgaaacgtttctttacgattcttacccttaaacggcgtcgtcccatacatcatctcgtacgtcaaaatccccagagcccaccagtccaccgcgaactcgtgcccttcgccacggaccacctcgggtgacacgtactcttccgttccaacaaatgagtgggaccgttcgccgttagagaaactcgttttctgtcgactcactgggctaactcgtgctgacttggctttttttaatccagtattattattattactgctgttgggacgggtactagtaccgagatcaccgggaatggcggttgcgatccagcgcgtgaggttccgccggtgtttacggcgagtttctggggggagagttgacttgctgtcttcagctgagattacggttacgacggttctgtgtttgaggctccgtgagaggtcgaagtccgtcagggtcacgtgaccagattgctgaattaggacgttctctggtttcaagtcacggtaagcgatccccatggaatggatgtattctagagcacagacaatctcggccaagtagaatcttatcacggtgtaagagaagactcggtcggtctggtggtagcggaggacgttgagatcgccgcctgggcagtaaggtacagcccagcccaagaaatcgtgggcctcgaaggagcccattagagaaggaagaaacgggtgagacaaacgtgagagaacacggatttcccaacgggcacgacggtcagcgtcgagcttcgtgtggattgaggatttgtccactactttgacagcgaaaggggagctggcagatgggtcagctgtacggtcgtagaccaagaagacggttcccatggctccttttcccagaactttgagagccttcagattatccagttcgagctccggcgtagaagaaggtaatgctgtatccattttttctgttatgtgatctcaattctgaagagagggagatagagaagaaagaagaaagactaatgaagaaaaggtcagaggtggtttttagcgtttgtttttggcttttatagctgttttttttttaatatttatttctttttatttaaattgtagaaaaaggaagagcatttgacatttttcagtggaagaaaaagcataaagtttgttcttctagtcataaattagggcttttcttattagtaatagattatagtgaaattaatactacaataattctataaatttatattacattaccatatacaattttttactcccattttttgtttaaaaaaattatcttgtatcaataccacaaaactaaacaaacttactttttaaatagattaataaatgtataaaaaatataactaaaatttctttttatggatatataaaaaactaataacaattaaagtaactctactagggttcccgcttccccttccctttcatccctaaatctcaggatgctctcattggaagagcctacacaagagtcttgcccaaacaacctacccaccatgaatgatttgatggcattaactcagaaccctcacagacacgacaaggacggttgggaagtcaacatcgacgacccatcagagataggtaaactttgtcttcttggtcatttatgtactcataagtccttttgtcgatccttactgaaaacaattctttgtcgattgtaaaatttgggggagttagaatgggacttgaaaatgaagaagacgactacaacaacaatgctcctaatatcgtctccttcaagtaggagactactctcaattgagtttacctagtgtaatggctactcttctaatttgatttatgagaggttggatcctgtgctgagtaatttggtctcggggaatacttttgaggttaataaagtgaaggacttgctagggtggtcctcggaccactatccattgattcttacttaaaatactattccttctgcccatgatcgaccatgatggatctcccacttctactatgaacaagtgtgggctaaggaggaagattgccacaatattgtcaatgaagtctgggagaacaacttgggtattcacactacagacgacctccatactcaattccagcactgtgggcagctcttggggtgttggaaatcataaaagaaaaaagactctcaagccactacaaaagctctcaaagaaaagctagctaccatgtccaaagctactactactgagaaccttgttgatcttcgatacattgaaaattctgttaatgatcatttgctgaaagatgaaattaattggaagtagaagagctgagccatttttcttaagcatggacaccgaaacaaccgttatttccaccattgctctacttcaaagtagaagaaaatgaaattaaaggcctttttgactcttctttcatttggagacagtcaaatgatgacctggaatagattacaaatgatcatttctagtctttatttacttccataggggcccctcctgacttaatcaaccaccttcaaaggtttgttttgcatcacctcagctctaagcacaatcacatcttacttaaagagtttttagttaaagaggtgacataactttttcccaaatcagccccctgaaggcccttggttaagatgttttacacaaactttttgatgagcatcactaggaaactataggcaatgatgttatctgcatatgcctggacattctcaacaataatgcagattgtcgggctctaaataaaacagtggtcatcctcatccctaaaattggttagccatccgtagtaacacattttaggcctataagtctatgcaacgtgagctacaaaataattgttaaacgcttacccaatcacatgaaagctagcctctctaaagtaatatcagaaaaccaaaacgcctttatcaaggggtggctcattcaagacaatgccatccttggcttggagagcctacactgtatgaaaaaggggcgatttggtaatgctcggggtttaccgagatttttgaaaattgattatttatatttataagagctaaagaataataattcaaagataaagagattttgaacactcaacattttaacgtggttggggcattaacaagtctcagtcaccgagttaatataattactataaggctagaaaagccttagggtttactagaagatatgaactctctctttttgcatgagcaaataagtaatgaatttctaaccctttgcatgtagggttatttgtgtatttacagtgttgagagatcatcctcattaccctttttctactaatgggatatttacaaataatatatttaattttgggcttatttggtgaagcctgacccatggggcgtcttgtgtatgctgatgtggattcaatgtcaaaatcgtgtactatctttgtgagaagtaaagacacatttattacttgattgccaattaccatttttacatatttagcaagatatgatcttctatccgggattctaagaagataattcctgatctcgtgggatctggaagtaaattggaaactttgcttggctttttgatacttgctaatgacttctgcagtttactatcttccgggtgtaaaccgtgctagatgggatctcgcctagatggttcactttgttctttattcgaaaggaccgagtaattattgatctgacccagttatctcgttttggctcgatattaggcctggagcatttaataatggttcgtggagaactagcagaatattaagaatgaacaagttaagtaggaacaacaaatggctaacttgtctcaacgatcagagaagcttatcactccgattgtcagactactcccagtagggttattttaaagttggtcggagagattccccgtcagccaattggccacatgggaagaagtactataggggaaactcttaatgcacgaaacaaataataggtgttaaggctcctcagagggaagaaaactttgagcaagagtttgaaagggctcaagctcgagcgtgcctaccaattggccctccacttgatatggagcgaccactgactactgagagaaccaacagaaatcctccaccaggttctccccgtcgtcctctaacaataccaaacctcgagtccttacaaagggaacgagacctcctactcacatcgaagggggaagttgaagactctactttgacattgaaggttatgagtgttagaacttattttactaggatctagatttactaaaatatatcttgattataatctataatctagcatcctaaatataaattttctaaaataatgaaataaatacataagagattaagatatccttacattgatggcaacggaagataatgactctttccatttagatctctagcccttgattcttgtctgtagcagagcattatcaagatttgaacttggatcttctcctccgtcgatttggttagacacaatcttcctcactatgctaggtattactttgacatgtgtgggcatactctcaaacactttagccttcaaaaatatgaggaacaagaagagggagttcgaaaataaaagctctttatattttctaattgtttgacaaaggagtctaataatcaattaagaaaataagagccatcttattctatttataaggtgacttctagggctaggtttagaattaaatgaaataaaaaagataaaattgatggctttattgaacccttatggccgaaccctatatgggcctatttggtttcaattttaccattttagttaacttatctttcttttcacaaacgatatcttttaattctaactctacaaatgtcaattctgtcaattatataattataattaattatcaaataaagttaccatttagtttatttattaattagaccttacaaagtctcttaattaataaataaaccttaaatcctcttttcttctcgaataagccattgcttagtgaaaaaatcacaaacaagacatagtcttatttagaattctaattgattaattcaaaccaattaattgagactacaaaacaatatcatctcagttagtgtggggaccatggccctatataaccaagctctcaataagtagatccgaaatttatcaagtaaatttcctaacttattaattcaatctaactccactatagattcgaaattgcactcctgatcacatagaacactctatatgccaaaaatagatgcactttgaattactctttatttcaatctaaataatcaaagatcctctatggatgat

SEQ ID NO: 227484 - DNA, 1694 bp, Cannabis indica
agatgggcagtaagcaatgttggacttttcttatggactgaaaatgctaagtatataagtacatcatctcaattcacaagtactttagattcaggactattccagactgcaaggctttctgcttcatcattgagatattatggtttggggcttcaaaatggtaactacaatgtcaaactccagtttgcagaaactgctttcgaaaattctcagacatggaaaagtattggcagacgtgtatttgatatttatatccaagtaatgtgcacattattgttctaagatttctatctcttagttttctttttgtctagcttttcatgactatttgtagtgtgaatttatgatagggaaatcgtgtaatacaaaattttgatataagaaaagaggcaggcgggatctctttcaaggaagtccagaaggaatttaaggcccgggtttcacagaactacctcgaaatccatcttttttgggctggcgaaggaacttgttgtatgccggtagttggtacttatggaccttccatttcagccatcagtgccattgcaggtaataacatggttttataatttgtggaagctattgcaaaggtgtctcaacacttacaagtgatcattattttaacaaattagggcagctagttacacaaataaaaacttggtctgaaattgaagagtttgacctaacaatagttactgtatttaacaccatataagtaatatgtagttgaatattgttgttttgatacagatttcactcctaccctcagtaacattcctccaactttgagcaaaaagaagaaccaaactagtcttattgtggggatcattattgggactgccattttaagctttttatctgttttagtggccttctatgttgttcaaactagaaagaagtctcagatgtttgatgacgacggtaagcacttttcgatgtatattgcaagttataagttgttgctttaaagaggaacataataggaaagcttaataagtgttagtttatatacagagtttttggggatggatgttaaaccattcatatttggttatgctgaactaaagacagctacaaatgattttgattcttctaataagttgggagaaggagggtttggacctgtctacaaggtacacagtttcatgccacacaattatctatgtttaaatatgacaatagctcattggtgataagaaaatgcaatacattaatagggaattcttgaagatggaagtgttattgcagtgaagcaattgtccttaacttctcaccaaggaaagagtcagtttgtggctgagattgccacaatatccgctgtgcaacatcgtaacctcgtcaaattatatggatgttgtattgagagacacaaacgacttcttgtttatgagtatatggagaacaagagtcttgatcaagcattatttggtataagagaaaatttcattgctgcttttatacaaacaataataactgcatattatattaaacatagctatggtggcttgtcaaattaccaggcaaacaaagcttgtatctgaattggccaacacggtttgacatttgcttgggcatagcaagaggtctagcttaccttcacgaggagtcgcgaattcgaattgtacacagagatgtcaaatgtagcaacattcttcttgactcttatctcactcccaaaatatcagattttggtt

SEQ ID NO: 227485 - DNA, 3326 bp, Cannabis indica
agagagagagagagagagtaatgtaggtgagaagagtaatgaaggaaatgagagagtgagtagttatagaaatgggaggcgttgcaggttatgtaagttttggtattcttttcttttgtttgaggttgaacaaatcgccctactcactcactcttctctacacttcttttttgggcggaggttttaaggagggctttgctttggttgtatcgaataaccaaagtactaacttacccctcttctctcctctaagtaacaattaatcattagttaattaagaaagcattactcctctctaccacatttttttttttttcatactactattggtctaattaaattattattagtgtaattaaaattaaaaataatttttaaagagtatcgctaatcaatcataaagagctactttaaaaaaaaatagatattattagtgtccaataacaatctctttaattaaataaataaaacttcacctgttttgtcaaagtagttgggacaaaatttgatttaccatacttttaattttgatcacgaaatatgaggtttttttttttttggaaagatcttgatttcaatgagaacaagaatgtaatcctttatcaataaaataaagagacatgtaactttaagtatcttttttacgtgttaatatcgttattggtgcaattaagtatgaaatcctatatagtttaatataataaattttatgaagtatcgttaaccaattgtaaagcgatctagaagatgctaagcattactaatgtttaagagaaatgctaaagggcaccagtggtgcttagcaccctcctatgtgtcaatatcgctattggtcaaactaagtatcgagtcccatataatttaatataatagcttttagggagtatcactaaccaatcgtaacacgacatatcgagaatgtgtaagacaccactagtgcctaataataatgctcaatgtttaataacaatgcgttaaaataaattagtaaatcattcttgaaaaaagtgagaacaagtgacaataagttctgatatagtacaatgtcccaagtcccaactatcattagtagttataactattaacaagtgtcgtactatcataaataataagtagagaagacaaattaagaaagttatttataaatctccaacaagaaaaaattttggaaggataagatgtgaaactaggagtttttgtagttagtggtgtaagttatagttttttttaaaaccaaaccgtttatatagtttttgtaattttttaaattgcaatcgcacctcaaaaatacggtgtggtacgatataatttaagcagtttacattatcactattatcaaacatttttatgaaaattttaaaatcaaactaataaaactttaacaatacaaaacaaaaaatcttatgaaagttttaacattataaactgcagaatatcatcaagtcattatattaaattgtctctaaaaataaaataatatacacttattatatggcggacccaggattgaattttaaggtagacttagttatacatttaatataatctaaaacaataaataactaactaaatttaagtgaaataatggtttagcagcatcctcttatactagtggtcataagtttgatcctagtttgaacattatacttcatttatttttaataaataaaatgtagatacacatagaaaataaggggcaagaaactttaaaacatggtctccaccctcctatgtaaatttaaagtatcttaatcaattgttctatttaactactatgtatatatgaaaataacaattgtatattaatatctttttaaatgggctttagccctccctcaatacccctaagtccgcctatgattatatatatatttgtttttatatgaaaaaaaaagaaataaaaatcatattttaaaaattgataactttgtaatatatagtgtggtgcgatttgaactgcaattgttaaattaaaacttgcacactgtaccgcaccacaaaaaattttaaactgcattttttatgtagtgtggtgcgataaaggtgatttgtgcaatatgaacaatttgatgaacacccctatgtagaactgttagacatcccaaacaaagaggccaacgcaacctccatgaaaccatctctcttgcacccaagcacaagaagccccacacccaaagcaagaagtcacatgcatgagatagtgttagaatttagtgaggtgtaattagggtacatgagttctatcacaaataaaaagaataacatctttatcttatatagatattatattttatatatggtatattattttcacaatataacataatgttgttggagtagaagaggaggcaagggaatagaaacacaacctacaaacataaagaccctcttgatcaaagccttacagagcctacagagtagagacaagcaaacaaagcctcagctcagccgccaagaaggattaaaaccaaaaaaagttgtacgatgtaaacgcaattacatatttgagagaggacaatttcttgttttattattgagtaaaatatttaagttaactttcagttgcaaataaatacctaaatttaattgttagtggtaataatacctaagttatatttctaaaactatataattacctaaccgtaaaatgttaagtcatatccacgtgtcattttcttattggtatatttaaactaatttttttaaataataaaaattaatgacttggaccaatcagggattgctacgtgacaatttatttaatcagtacctatagaagttctaaaattataacttaagtattattagcgccaaaaattaaacttaagtatatttgtaattgagagttaaacttaagtatttatggtacaaattactgttaattatttatttggtttatatctatatattatgtaagcgttaatgcgttattatgagttcgaattggccaaaagcatttattattttatataacgaaatatttattcttataactattaaaataataagtgagttgatcaatcggtttttaattattagaaactaaattacatcaaacttaatttattgtattagatattgcttaggcctattacttaagcccacctggttattgggctgcctactacatgttatttgtacagataatacctaataaataaaaagtcattttcagactttagattaatttttgaatagagagtttccctctttaatactctaatatggtatcagagcatcagtttctgtgtccatggctttttgccatttttgggtctttagttgccatttttatagccggtgggtttagcaatggagtgggcagc

SEQ ID NO: 227486 - DNA, 10966 bp, Cannabis indica
ttttttcgatttggttagattatgtgaagagggagatcaaagactactggtgtatgagtatgagatgagttcatgagcattaatgaaactctagcaagattgttttaagtgacatgagattgagaccaagttggaaccagagagaacccacaagactttttttcttacatgaagagtgcaacactcattgtgatataaagtcacaaaagatatacttgactttggataggcaaaggttttgttaatcaaccagttatgtcatactaatttctaccattggaggagcaaagaattatattgttgttgctcttgaatggagaaaatgcactatagattgcaaatgaaacttttgtagataaaagtatttttagccaaataagatcttccaaagttaaagttaggccaactctaatagtgaaacttaaatttagtgttaaactaacactaaaaatgtgtaattttagtaataaatttgttttatatttcaaccacaacattaaaaatatattctttattatgaaaattttgtaatattttgagaaattaggaaaaatttaacacgtcaaaataggatttaaacaatttatttcataggtgtataaaataggagaatcttgcatgtaacagaatatttaaatcttatttttagtatgttaaattttttcgaatcctcaaaattttataagatatacacgttatagttatttaaaacaacttgctttaaatacttcttgatttttgaaatactatttgtaattataaattattttaaattttttaaaatttgataagatgttaaataaaatatatttttttgcaatcgaagaaaaatttgtaatatttgactgaagatgaaaacgacagaaaagagactaaaacgacaagaattttccacaaacgcggtttcgagacttttgaagagtcttcacttgtcttcttcttcttattcaaaaccaaagaaaccatttttttattttctcagtaaccaaacacaccaatcaatggcttcaatctacaattgccacgaatgcggaaccgatctcaacctaaggaccgtccatatgtacccaccggaagtctacttcgaggccggtaacaagggtacactctcgttctcgacagtggacgctaccaagttcaaattcgtaaaagaggacaagattcgaccttttttcgaaaccctagattattgggggattcagagaaagaggacgaagatcaaatgttccaattgtgggaagcttgtgggttacatctacgatgatggcgttcctttgagtgatcaccctggtcaatttcactttggtcctagtcaggtcattcctagggctcctcgttacaggttcaaaaccaaagcccttcgaattacctctgaaaattagggcttttctttttttcctctaatttcattcttgaattttatgtatgtgtgtatatatatacatatatctgtgaaaagtaaaatgaagttcaaagctttgttcttgtgattaaataaaggtttttttttttttctgtgttaattatctttcttcttgtaattttttactgcaaaattaaagggttatttttgaatatcatgaaaattgaatctaatctagttattaacaaggttaattaggtttgtttagtggcaaaatagacatacttataaatggaaattatatgtgactatcaaatttatgattcattccttatttgttcttcttctctctgtttttaaaaattaaagtgaatatctttgataaaatttagttgacaaagaagagatattgaatatgattaatgcatattagacttttatataaacatggtttgtatgtatattgattaagtactaattttttttggtattgtttatattttgatattgttctctactatccaagtgttgatatttattaaaaaacacataagtttaatgataaatcactaaaaatggataataaggtgaaaagattctatggaagaggagcccaacttgtattgtactattattaagtggattagtgctaaaaatatgtaaaacttaatatatttttttaataaattatgtaattttattaatagcaattaagtaaaataataacttgtaatctaatccggacatcttcatgttagagacacgatcaggattcgaattagaaaaacaaactaaataatcagctatccaattcccaaactaacaaaaacaaaaactcaaaataaattaagaaacttaatacttaattacactaactcacggtattagatactaagaaacttattatttgaattacaaagaaattgaaagggaaactaatttagagctgccctcctattcaaaacattgttgtgacataggttgatctctttgcctatcaaatccaatttttctttgcattcgcaaatatctgaactaaaaaaattaaaattattattactattttcgattccttcataaatattttctaaaatccaaagagagcacaaaccaaatctttgagtaattcataaaagcataccctttttacctttcttctttagcattaccaaatctttctcaagaattagtttgaatattcttacgacttgtccaattttctcatcatcataaatcaataaatcgagaattaagtatttgcttcatgtttgattccatcgtgtacaacaaacaaatttcaataaatagaaaatatattattatatatactaaacattaatgatattacaaatttgacaatctcaataataaaaattctaattaaattctaatttttatcaagtgttttgctaaagatttagcaaaagcttcatacctaaatgctaatagtacctattctattctacaacaaacatagtttaagttgataaaattccatttctaataaaaatataaacaagatctacaaagaaccaaaacaagaagcatgctttctcgaataaggtcataaaatgatatgatttcattactaataacaacattacattaaaattggttaccaattaccatttcacaaaaacctaagctctctcgcctctaatcctacgagccaactgaatatccttaggcatgatcgtaactctcttggcgtgaatggcgcacagattggtgtcctcgaacagacccaccaagtaagcctctgcagcctcttgaagagcagacaccgcactcgactggaatcgaagatcggtcttgaaatcctgagcgatttccctaaccaatctctggaatggaagcttacggatcaaaagttcagtgcttttctggtacttcctgatttccctcaaggctacagttcctggcctgaaacgatgtggcttcttcactcctccggtcgccggagctgacttccttgctgccttggtcgccagttgcttccttggagcctttcctccggttgatttccttgctgtctgcttggtacgagccattgggaatcaaatatatcggattgaaagagagatgaaattgtttgtttctcgggaaaattgagtgatggaaatgactagatttgagttcggtatttataggagtgagtgtcaatttggagcgttagatttcttttcaaacaaggtgtagatttaatttagtgtcttcatacggatcgcgatccgtgtcttgagttattgaccaataataatcttttgttttggcgcgtacaattaaatatatatatatatttttttttactaaaacctcactaataatattaataatcaattgatctaaaaaaaaaaaaaaataaataaataataataataataatcacttctttcaaaaaattaataaataaataaataataataatcaactttttgttactacaaaattaaaatatttgtgatactataaagcaaaaatcggatttaaataaataaataaatcaatcaaaaatcaaattttcttttgttaaaaaaaaataaaaatctttaaataaatatcatatgatcttattctatgtttaagattaaatttattttgtcgctgaagaattagttgtttttaaatatggtatattattccatttcaaagaagaaaaaaaatattatttttatttattattttaataaagtataaatgtagaaagatagctgaaaaatatacataacgattttcatttttttaaattctatatataaaaaagtaattttgtatatatgtcatcctcccaaatttaaattataaccgaatatagatatatttatctacactaattgaaacaataatcttatcttatataaatagatatattagatatttattataattttaaagatcaaatttaaataatatataatatggttataaataggataatgattattaaaactactataaaatagtttctttcatataccaaaattgttattaatatattcattgaattattttgtattacccattagcaaatcaataaccatggtatcaaaattacaacgtaaagctattcgaaaagcagatattgcattgtgtcttcaatatgttaatttgacatttatgtttaaaagagaattaagttataatgatgagaaatttggagaagtcttgggattgattaaacaaattcttgagaaagaatttgtaaagctagagaagaagaatggtaagactagagtggttcacaagattttgaaatggttgaattttattactatgaaaacaaagtcaaagattgtttatggtatcaccactactactactactcctcttcttcaattcacttatcttatttatgatttaagttctcttactttggatttagaaaatatttataaacgcgttgaagaagaggatgatagtgatgataatgatgattttattgattttgatatttctaaattcaaagaaaaattagatttgataaaggaaaagacaaacttatggtacgaagatattttatatagaaaggaaagagtacttggtcggatattttaaacagttacttatattattgttatgattattagtttgtttacattttagaaaaagtttattttcatttttttttctttttcttatgtatgaatatcataatgatgttcttgatttaataatttaaatattaatttctccaatctcatgtctttacattgttgttataataatcataataatattcttacctatttgtttaaatttatgaatatgctaatgatgttcttaatttaaatattaatttctccaatctcatgactttacattgttgtatgataatatcataataatattttgcctaaatttttatatatatacatttaagggattaattgaagtaaaatctaattgaaaaatattttataataataataataataataataataataataataataataataataataataataataattggaatcgatagattaatgcaatttatatgaagaacgaaatttgttaagagtttaaactgagttaagatagcaaatggtatttcaattagcttatcaaacttagagatgtaattgttacacgaattttaattaactctccgatgactgcatctaaaatctgatataatggtattgtttgaaacaaacttttgatacctaaatacaagtacattttgtaaatgaccctgaatgattatttgttagcaagaaatatccttgcaaattgattatatatcttgctatatttacgaaagagccccgaaatctcttggtatattaggatgatggggtcctttgattggccttgcaaccttgaggagtggaaggctagactgaaattttggcagcctggtttgatcaattgtggcagctgttgtctactatatttagtgcaatagaaacaattgtgtatttgaggctacttgtgattcggctagtactattagtagctttgtttaagcttagtctttttttttgagtgtagcgtaatggtattttacaatcatatatttgcttaatagtttaaggatcctgggttcgaacccatgacctctccctctttcccatccctccctcaccactaagctagccttagtggcttttgtttaagcttagtctaaacgcaagaattttgtattgtaacttatataatctcaaatctagagagaaaattgtaattgccatctaatttgcttggtggtaatttgaataaaattgttcctttctcttcaataataataataataataataatagatattcaaatattgataattgaaaaattattaaaaatgaaaggaccttctataaaatttatgagacaaaatgagatttaattgtggttgaaaactgtgctttttttattttttttgaggggaacttagtgatttttatataaatattataaggcatgaatggatgtatcatccaaagggcaaacaataaataaattacattttaaaataataataataacaatgtgaggtaatgaaaacaattctatacaagcttgttgtcattaatagagtcctaaagagattaatcagcttttttcacaattgacttgagtgagtattaactgctttaaaaagtcagtgagaaactgaaactgccccatctaacacaacacaactcaactccaatgatgttggagaccaactaccactaccactactaatacatctcaaatcaactcactcattacatcctaaaatctaaaacacaaactgtattgttggcgaaacacgacgcaattttgtcgccttctttgttccaacacacttcgaatatgcctccgttacctgtgtatgttttcacgatcttcccgtcttttagcgaccagatatgcatggatctgtcaagggatccgctcgctaagtattcaccgttcgggctaaaggcaacggaatatacaggctccctggtgattgaaccaaaaagttttttaatcagacgaaaaagtaagcacataaaagactattatgtttttaatgagtttgagttcgagggcttgatcggttgttaagagtaagtacctgtgtccattcaaactgtagagaagtttcccatgttctacatcccacaacttcacagtcgagtcaaatgacgcactgtcaacgataaacacacgaaattaataatttataaacaaatgtatgtagagcaaagtaactataactatatcaactcaacattcaacttaaatgagaaaagcagtatattttaccttgccaacaccaactgcaggttaggattgtttgtcccggggccagtaggactccatctaatcgtgtatatctcctgtaagagagttattttaatgttacaaacaacttcaaacaaaaaaaaagggaggggacaaaaatattatggttatacagctttgaacattaccttagaatgctgtcttaaatcatgaacatacttatcgttcttcaaactccaaatctgcataatcattcacataatattcagtagaacaacacattaaacttcccaatgtcaagaatcaaataattaccacaaaacataaatacactgctattaaacacgagcaaataatatactacaatgcatttcttcaacagaatttacctttgcagatatatcatcggaacatgaagccaacaatgaaccggttggatcccattttacacagttaacttcaccctgcagaagcacaattttatagttattaaagcgagtgccgtggaatattttggcggtcagatatgatatgatgttcaaaattgaggtgccagatgaagatgttgaaaacctgatgtccagcaaaagttttgatagggcgaggttctccaatcctgaacacgtgtatcatggtgtctgtggagcttgttgcaaatgaattattgtttcgccagtctacgtcaagtgttggacctatataacaaaattataaatgttcacattccttgagcaagaaataattagatgacaggagagggaaccgcaaattgctaaagtatagatgcaacacctgcatgaaaatcaaattgttgtttacattcctctgatttcacatcccacactattgcagttttatcacagcttccggtgagaagataatccccttttttgttccatttgagagaaaatatgggccctttgtgtttactcaacgtactcctcagttcacctagaaatgaaacagcataatttaaattgaaacactatcaaaataatgcagtgttttgagaacctgatgagaataaaatttcataccgtttatattccaaattctagcctgtccatcgtatgaacctgtcgcgagcattgttccctcaccctgtgtatgagatagaaatgtgaaggttcgatgagaatggtgtagaaatacatcttagaatataagattatttattttcatttatattgctatgtccgtgggaaggaggagaactacattggttgagaaaaattcctattggaaatggaaacttctcagttgtttggctccacagactgcttggatgctcaataagtcttgcttgttaagattaacttaacctcccaaacaaaagttaactcacaaaatgggcgctacataattagtacactatgaaaaataaaagaaaaagaacaagagtagtagcagaactcacattccaatcaagcgtcgtgacatctttacttttctcatttgttttacccttgacatgctttagcaccaaaacagatggcaaaccattcatgccagatccactgtttttatctgataggttccaaatacgagctgttgaatctccagatctaaaaatcatattcttcagtactactatagaaaaatgtaactaggataacatttaaattccacagaacataaaatcccactcatctcaagtaatacaagaaaacaaatgcacagaggagggtgaacagatttctaggaaagtgaatacattaaatatatgcataacaaagcaaaacaaaattaatacacaagaatagaagcataccctgatgcaagaagagaaccggtagggctccatgcacaagcacacacctaataaggaaatgaaaagagatgttaagaaattggaaagtggacagatagtgagaaatggatgtgaaaattagacattatcaaacctcagaagtatgtccttccaaaattgtaacatcggaactagggatttgaaataaatgagaagttaaatccgtcgagatatccattggatctacccctatcatacacaatgaaaaattagagaaatcactgacatgaaacttgacgcatattgccagctgactgtaaatcaattgattaatcctaccattgagaattaatttttgagaatagttatcaagttacctccatgtttaattccagatactccattgacattttctctatcttcttgatcagtatccatatccatatcatcttgctgtttttctggatgcttatactttactatttctctatccttttctcgttctttctccctatcatgtttttccttctctctaattcgcgtgtgttctccttcacgttccttgccattctctttattcttatctctatccctatgcaaatttctctttttttcttttactatttgtcgcaattgatatacatcttttgtaatgagatccaggggttgcaagaatgagaaatcttcatccaaatcttggtcactctggcaagcttgaaatagacattaattaacataaagcatagtcatgcatgccaattctaaaccaaaacacacacacatctgtaagtacacaaacacaagtatgaacacaaaaaggaactagtcatgctaacattactcaagtttgcttccatctccaagaattgaagccctttctgtacaaatgttatgagtgcaccaggtggaaccaaattgccatcaatggggcttttgttgatacccgcctcgtatcctaatgcaaaagctgaatgtgtgaaacctacaaaaatcaggataacaaagataaggacatccttttagtgcacatatattccaaaatggtgttctcctataaagaagatcatgttgtgtccatacacgaaaagaatggtgttctccaaacccagttatataaaatatttgaaccatatagtaatagtttcttttatttttagatgcctacagtgtttcaaattaaatatacatatatttctctcccgttcttagttgtggtaatcctttattatttccttttggtttattcttttgaaattgttttggtagttagtttttttagcaaattttcaagttaatttatcatgcttaaacattttctaaaaattaaatttcaagttatgtatttgttcggtttttttccggtatgttgttaagttttttgtgagtattttgtagccataatttttctgttcttggtattgtctttgtttggttttgttctttgttggaagattgttgactttcacatgcagtttgataaggtcttgactcttgagtgtctgaataagataagtttttcatattttttattctaaatgcaattaatttctggaatttgttagtttgcttagtttattgatttaaaaggtttctaattatatctttttaacatttttgtaggagctcttattgtcatttaaacaagctatgtggaaatgttgatagtgtcggagcaatttttaacttgtggattgcctattacattccctaagagataattttttttttgttatttggatttttctttgatgattttgttagttagttatacgattttcctgccacatctctgattcatattcgtttatacatagcagtctatgcactaagggtaaatgacgaactaatttgaataaatgatttgtcatcgttttccgatgaagatgtaaatccaaattattttcaagaaaaataaaaaagaacaccaaacacaatattacctaattaccagctgctaaatgtaatataaaccccacaaatcactcaaacatgaacaataataaaaccaaacacacacacacacacacacacacacagaccaaacccacaatcactcacacatgagacaaacacacacacacacgtcttcttttcttgatagtattatcacacaacacatacttaccatc

SEQ ID NO: 227487 - DNA, 2263 bp, Cannabis indica
ttactacgaattggaggagaagagctccccgagattccacaagaactgtcagaagaaggtaaagattttctaagcaagtgtctcattaaggaccctaagaagcgatggacagctgagatgcttttggatcacccctttgttactggtattgaggttggtgaatgtgataatgagtctgataacaacaagactagttcaacatcatctccgaggtgcctacttgcttttcctaactggatttcccaagaaatcattggagaaggcgttcgtgatgatgacactcttcttctaccggaagatgctgaagtagtagaagaggaagaggaagaggaagaaacaactactttaccattttcacctaaatgcccctttgactttcctctttggatctcccaaataagcaatgtggaacaaaagcaacatggatcaggtaagtatgttccatgttttgaaagctttttctttttgttttgtgtttaatagatattgtgactgtttttcttaaatatgcaggtatgagcagcatggtacccacagatgaagaaagtgaaaaagaaactcctccaaatgctcttgaagaggttcatttgctattctttaatgattggatttttgttttgtttttatgctgaaaagttgtgtttgtttttgaagagtggggaggaagacgaaaagaaaatctgatcaattagcttagagcaaaaggtaaataaaaatctggtaacacaattagattttttcatcaaaactttatggaaaaagtctgcttctgaaagtctaaattggattttcagacttttgacttaggtacataagataaggaataagaatagagtgattttatgctgcttttcttttgattgtgttttagtttttgttttgtcatatgttggagaatttactaggattgtgtaataactcttatgttaattatctcacttgtatttatttcatttataggtatagagcaaacatgtaagttagagaagctatatacctttatgctcaactggagaaggttagcattttaattttaattttgattattatttggtttttgtgttatttaactcatacttactaaattctaaatgatcgaatcgtactgcagcagacatcgtgttggaagtcaaagagaaacactgcattggctactgagacggttgtttgctagtcattataactaacacaccattctgaagcacaaacaggttttatttaatcaaaactttgaattcacttggttttgtgcaaagaaaaagtcgttagtatctgcataattttagctcagtgttatggttagtatcacttgtcatatttatgaatcttatgatcggtttatgttatttctatttaagacacctagctgattattattcactgctgaaactgtggttccattttctatagaaagacctgattactagttatttggatgatttactgagagtatttctttctctattttctaagtaattatcatttgcatagcgactcctatgttaaggacggttgcaaaggtgagttgggcaccgcagttagagtgaaagctgtgatggggaggatttgagagaaaaaaaatattgagagagggggccaatgttgctcccatgaggcacaatcacacaatgcaccaacttgttaagatggctactgtgcatcgatgagtgaaagctttcccgtacaaaatgaaatattaaaaagtttaaagggaaaagctaacttttctactacccctacaacatcaaaaatcataagaacaaagggtgaagggttcctcagtgcatggtgaaataataaatgagttgagagtggaaaaaaaaattggagggagggggccgttgcggctcccatgaggcacaatcgcacacaccactctttcccgttaagaaggctacctaatttgtggttgaattgctccttaagcgactagctttggtatagtggtttggtttctatgattaggatatattacaaggggaataggttgggaaattcgatcggtttatgtgtctaatagcttgtggtcaggtttcttcttattcacatatgtttcacttttttggtcattttttctgtcagctttgtgttttgtttagtcatgacattgcttatcatttgcttcatacatcttattttgtgatctttccatgactaactttattcttcaatgcatgtgctctgtgattatttcaatgcactcttccctcgtgagtttgaaattcatcttttcggccttgtttgttaacctataatgtgtgta

SEQ ID NO: 227488 - DNA, 2619 bp, Cannabis indica
aggggcggcaacacttttttttttataagtaggggatgtttttttttttctacattgcataacatgttaaaaattaatgcaaatttatattttagtattaaatatactataaagtaaaaaaaataacaataaaatatatttggttcattaattaagacattaaatataagtattattggtagaggttcaaaaggtaaaataaaaataaacatgcttttattgggattagaactcatgacctcctttagatgcatgaaatgactttaccattataccaaagcttatttaataggtataatatcacttttatttgtaaatatacgttgtaactaactaaaatgcatgcaagggttagagatctgagtggaagaagacattatattccgctacaaccgctgtaaggtttctgaaacgaccaccttgacgtaatccaacagacaaagggtcaccttgatgtaatccacgtcctgacaacattttagcccaaacctcaccattaatgagaatagcgaagctaaccgatgtaacatactgcataattttgtccagccagtgtttgtgataccccaatttaagcatcataacttgtagaaactttcactccacctgatcataagccttcgtcatatcttgttttaatgccatcttccttccattttgaaacaagttttttctcatgcaatgtagcccttcataaccactaatagtgttgtcatggatcaatcttcctttcacaaaagcgctctgtgtgtccgaaatgaccacacccaaagatgatctcaactaattagataggcacttggagataatcttgcagataacattgcagagactaattggtcgaaattcttccacttgttttggcttgtcaactttgggaatgagcccaatgatagtatcatttagaaaactaaagttagcccctccattaatgtaacgccctgatacttaggcgctacagtgattttacaattactatgccacctttgctaatcaaaggttttttttttgaaaattgtgtaaaattaaaactttaaatttaattgctaaactttaataaaattttaaacatttaattacataagacgagatcccgttcttaaacttttacaaaatatccaaaatatatatagtcaggtcgcacattgactacaaaataaaatcccagatgtcccaagattgaacactccaggtcgcatcgccatgacatgtacaacatcatcctatctcgaagcttactcctgttcagcctttgccttttcctttacctacacatgaaagtagaactttgagtcaacagactcagtaagaaaagcatataacaaataatataatatcgacttgtatctacgcgcccatacacctatttatttaacaaatgagcaggaacgttctttactaaggtacaaccattgtaccacatacactacgtatcaatattgtattagtgttggtagggtttgttttgtaccctgagtaccactaagtgatataccacacacaccctgtactttctcgtacttgtgctggtgtaacaccgtaatgtactctttaattattatacactataccgatgcactctgtaccacttccgtacaagtgttggtaatgtactaagcataacaagcatgcatatatatgacacacatacatacattcgcgtatatatataacatgttctacgctattcttacctcgtttcaaaattcaagtgtttggctgacctgaacagaaaacctcgtgctggatggatgccctaatcacataatataatcaggcaaataacacgccaaaaccctaatctgggaaacccaaacctccaacttaagattctgctaatgataactaaatctataataccctaagcaacaaggaatcatccaaccaaggctctaaaatggacacgaatcgacgaaatggattgttcgagaaaccagtcccagaaccggttaaccgattttataagacctggtaaaccgattaaccggtttgcaccaggtttccccaaacaatccaaaacctactcaaaacatgtccaaatctcacgaaaccttctagaacacttacgatagcatcaaccaacataatccaagcaacagaacccagaaattaccacaaaatcaaaaagtgccatggatgaaccaagctttagttttcaaactcaaacttgtacatccatgtcaccaaacctccaaaccagcaacaaaacattaaaacgaactcaaattaaacttagaaatcgaattacacttcactctgtttgaatttattttaccaggatcttagatctactcataagtatgttgtttaccaccctaaatatgaactttctaaaacgataattaaacacatataaagttaagaaaaccttacattgatggcagcggaataatgtctccttccactcagatctctagcccttgtatcctttctgtcacagagtattataagaatctgagcccgaatgtccttctctttgtgtgtgatccttcacagtcttccaatctatgattcaggtaccacttgctgtgtgtgggcactactctatcactaaggtttcgaaattgagaagaggaaaagagagagggatagggtcgtagagagagaagtggaaggctc

SEQ ID NO: 227489 - DNA, 3737 bp, Cannabis indica
aaattagaaaaaaaaaatccttaaatccaacaatctcaatagttcagggatatttttaacgaccttaaaagttcaagggacataatttggtacatgtggaaaaaatcctactaattagccaatttataaacttacattaaaatcatgataaaaaacaaaagaaatatgtgtatgaattcttcttaatcagtttcaaaaaaatataataaaataaaaaacatgaacttaacttgttaatctaatttattttctaaaactacttaataaattgcagctaaattaatgaatatatgcttgggtaatgtttgacacaatcacacaaattgtcaaaattaaatgatagacagagaagaaagtaccagcatgtaaacgatcagtaggcttgccagacttggcaagaacttcaagatccacaaggctcatagacataaggcccaaagtgagcccagacattagcccagcaaacaaaactagcacaatgataatcataatccgaatgaagaaatcagtgttgcagcaactgtactcaacttccattctcttctctctattttatttatttttatatgagagagaccagagaattatacatatgcaagagaagagagaacttatatatgcattcttatataaaggaattaaaagatggtattaatcaaaatgttccctctttccaaattttatctttaaaaaaatgaaaattacaatacaagcccaaagagaataaaatcagattcgacatgttgtacagttggactcccaactttttgttttgtgatgtggtcgtgtgaagagtcttgaacatactttttatgtacacacatttgcattattttataggatcaaataaactttccgatggagctttgaaaatgaagcaaaaggattcttggtgcactttgttatgaatgtgcagaaattaaaacagtaacaaatttattcgtaaattaaatccttcttacctaagttaataatgtgttgtcatattagattagagcacttccatgtaaaatagacatcattgttgctaagagtagttgtcaaaaatgtatatataaagaccaactcaaattattacaagagacaaaatataggagtgggaatcacaagatcgatgagagagtgttgttcaaaaaggaaaaaaaaagttgagatgaaccaaccaagccatttaagttattcggtacttaattttctctccaagagagttgagctcttttttttaccagagttgaaaatttattcaaaaaggttgactgtttctccaagagagttgagtatttttcaacgagagttaaaagaatttttccaagaatttgagtgtttctccataaaaattgagaagatttttttatgtacatctctttgtataattttgcttacttataacttcaaggcaataaagaagaaggcctagtgcttattcttatgtagatgtatataggctcaagcaattcgtgtttcttgtcttagttttgttccaaattctagtagtttcatatgtagaaatagtaaatttgtttagcaagtattgttcttgctttattcatatatgtcaacattgaattaagttttaaatcttgaaattggttgatgtcataagacacttataaaatttcattcttgtgctttgagaaatactcagattgattaccatgaggacttggtttatgttatcaaatgctaaaaattagctcaacaataaaatagtattatgatatagatttctttacgccaggtacgatctaatcaaataacaaatctcttttagtttacacaatttcctctctacaacaatgatcactctctcgttcttcagtctcagtttgaaaagtttaaaagatgtattccaacagagttttgactagtttggtgtgagcaagaatccgtctgtctttttgaacgatgaggtcccctatttataggcgaaagtgattgttggtccttcgtgcatcctttgttcagattggtccacatggacttgttcctcttcacgttcttcgcgcgtttctactgttgattctccttatccaagctctttgtactctgtctttcaatctatcaagctttgctccacttttttatctagtcgagctctgctcttctcattctgccttttccttattaactgaaacggtgtgtttaatcaatcttgccacatcaccttatcatttcttccctacttataataaatgaaattacttttttattcatgagattatttgtatcacttataattgcccctcggttctataatttatgagctcgtgattgctttagtttgagataaagtgttgttgaactatttacccaaaataattttcatgtgtcattaatcagtcgtaattgataaaatggacaatcatttcaaatttttaagaaactgtccacgccatttcttatcaccctaatattttcatttgatttccattcaaatttaaatatgtagatacttattttaaaagaagaattaaaagtttaagtaactttcctggtactttttccttctagttcttcgtttcacctattttttctgcattcccaccttcatgttttgtgtatctaattcaagctttgttcttcttctttcctttgttcgcattctgcaacaatggcctcaagggtttcctagagaaaatccaggtgagaaagtttcccctgtatatgatcccaattttatgctagagtatgaaccgacctttcaaagcatctactctgagtgccccactctagaaggagtaaccttttgcatgctgacgaaagacgagttgagcaagagtttggaagagcttgaaatggataatggtaaaatttttgtgagtgggaagtatatggaactcctatgattccccattccctctctactggcatacattctctcctttacggggattttcatgatctagcttgtttccaacttcgttcaaatagttttggatttagttgcagtctgcactctcatgggcataacgtttcccatctctgagttattctattacttcaatagaaccatctgcacttctcatttcatcgcttggtacatctccatgaaaagccccaattatttggtctatggtcttccaacttcaaacaaagtttgggatgcctatgttattgtaattggtggcaactggcttcccagggttatcaatcatgaagtctttactattgcaaatcgactttttacctcaatttattggtctttcagattctacacagtccatagatctatttcgtttaaattagggattatccatcattcaaaatacctcacttattatatcgacaacaacttgattgatcaggaggtttttaattgttcttctgccctaaaaatcaagactaatatgactaggaccaaccttactaaattaatagctaattactaagatttcttgaaatgggttgatgatgttgatgacccatgagtcctttcagaaattacctctactcatatttaacttctcaaagccaaaattgatgctcatgactagtgggtttttgacagccacaaacgtttgatctttagttttgcaaccatcttgaatagaaaaggtattttatctctgagggcgtcactccattcacttgtggggtagatttggcttagccttcatcaaggtatgatcttctggatactggtgagtaatcaagtgcaatggtctcatcatctacttctatttgttcattcgtcacctctggtcctcaaacttcaatttatactcatgtacagatcc

SEQ ID NO: 227490 - DNA, 2163 bp, Cannabis indica
aatgcaaagttagactcgctcttcattaggatgggcaggggtcagaaggatagcaagaggggcagggaagtcttcaacctcggacaggatcccagagtcggtgcttgggccaagagtagaaggcatgggtctcttggaaggttcagagttagaaaccacacccttttgtttccgatcgagctaaggaacctcttcctcttcctactcgattagcactacttcttggcttccaggaacttcctcatctaggcctttgggagtcaccaccaccaacgggggattggccacctctagtttagggctatgtgtagcagtcaacatggccaacaaatcatccataggctttgttgttaaaagcaaaacaagggaaaggttaaaaaaagtatatgaaaaacatcaagcataaatatgaggcagtaaatgaggaaggctaatcctaccctgatgccttaattctaacctagaaaattcataaattaaagagttggtgtcatcatctcttaaataaatatttgaggggagaaaccagcttgaggttatatagcaagaatgatccaaaagaatagggattgggaggtcggaacccattcgagaccggcccaagaagccactcatgttagaaaaataaaaatcattttccctattaccccaccgtgcatggggcattcgaaatctatacagccttacaagcatttgaagtactggctccaggggtcccggagttggcaattggaaaagggaatttgggtttgacaagagtaaccctttctcagccttctcctggctaggcctcccagaagcattttgaaggtgggtgtaacaaagttcttattcctttgtgtacctatatttgttgtatttctcttctgcagttgcgataatttctatccatagcttcttttcggtccctagattctgagcgttaggacagtacaccttggataagttgaaatcctcaaccatttgatagtccaggattagcttagccctgcggcagttagcagtgatcaccaagtccccaacattcaggtgctccttcgtatagccgccaaatactatggcatggtttagaattagcttggtaggggctgtcttgtgcaatggatgaatcctaacccagtctgttagaagatccaaacgttcaaaagccttaaacctcgatgaaaagctttgacggtattccttgaaattcttctaagagttaaagggtactggggtttctttggctggatgggcttgcaacttataaaaaccgtctttgtacttgtcacccttcttaggaaccaaaagaaattcataaaaatacaaaatttctgcggggctaggggtggcctaacccctagcagcataaaaaatgaaaggcctggaagcaggcgataggcttgtgggatacgttgataaggggcaagtccgacaaaaactaaaaaatctatgaagtaatcttgtagtggtaacatggctcctgacatgaggtgggtctggctccatgctctgcaactgctatagttatggttgggcgtctcctcgtctttgggaagatggtggtagactcctaaactggatggcttgatctcgttcacgtccacaatcttctccaactgatgagcacacgtcaaggacgactgcagctcatcggcttcccaactgttgaagcgacagaaatacttcttgtaaggtaccagaccttgcataacatcctccaaaatggcaagctttttagtcgccttggttgaagaaggattgacagtgggggtagcattagacggtgctttagagtttgacatcgtgttctttgagtggagttctagaatttcctgatcgaattcgaagaaactgtgtttgtgaagatcctggagaacttcactcatctgaaagacaagaaacctagcaattagcaccctcgtcaaaccctaagtcaagaagaggaatgtgtcccctaaccgttgggaagaggcttcctccggtgaaagccaagaagaatcttacgattccaattgtcaaacattgggtgcaaaacatccaagccataacgaaagagccataaaaaagaaatagaaggagataagagaaaaacagtacgattcttcacaaatcctaaacctaaaaatttctactagaggctgaaggcaaagattttatttttcttcaaaaagaaatataaaa

SEQ ID NO: 227491 - DNA, 1927 bp, Cannabis indica
attattattattaatatttgtgtgaaggttgtattttttttcatttaaaagttttttagactaaaccttgtgaactttggatagtaaaaaagtatgcttgtcaaatatatttttgtgaaagataaaacaaataaaatttatattttattaaccataaccggaaaagataaataatgatattgtgttaagacatatttataataatgagaatataaaaaaaaaatatatcacggtataattaataaacttgagacacatattatagttaaaattatttatttagttcaatccaacctataacttattaactttgtccgtatttaaattagaaatatatttccttacaaaaaaaataaaaatatattttaattaaaattttaaggatatatgattgtaaaatactgacatttaaaaaaaaaattagggctccaaattaaaactataataaaaagtggagtgaccctttcctttaactgcattgtgtttcccatatactttacagtatttaattttatttctaatacattcttcaagtttatagttaaaacgcttgaaagtatggacaaagaagagcttaaatataacatgattgaatgttatatttaaatgatccctacaatgttaatttagaaattttgccagattaaaattgattgaatgccgcaaatttagtaaaataaattattgttgtctttaggtgagagaatctaacacattatatgaagcacgcaaaaaaagttaaaaaggtaaagaaaataaaaatttaacctacctctgatactacattacattttagagagaaatgctatttaagagtagaaatagatttctaacttaattgattagttaacataataattgaagtgccgataattttattatacaacataataataacatattattatcagatattaattatttttacttttaaattttatcaaccaacatgtttaaatataataaatacattcaattatgattaatacataaatatttatgataaagcccttacaaaaaatatatttatgacaaaataaatttttaaattaaagtttaaaatcactaataattgtaattgatcataaaaaaagagaaagatgtccattgagatggtgttaagatttatgccatgaaaagcctataaatatatttttgattattattaaagagttgaatattttgatatatgcataaatattaaattattaacatttattattgaataatttatatataaatatcagaaatttctaatttatatatgaggttgtgacttgtagctgtacagagaactaagactatttggttatgaataaaacagtcagtaacatattaaagttatggaatctttaatcaatgattgctagtacgattcactgatgcatgttttttggtgcaagtaatctcatatcggattatggatgtagtatgacaatgacatcaaagtgaaggtgttgtatataatagatattatatatgacaatgattgatatgaatgaagttgtctttatctaacatgtcgtttactataaagaccttattcatatcataacgatgatcaatagtagatcggcataaaccatgagtaatcataaactcttgttcatgttatttgttgaaataattccccatataagctgacctgtcacagttaggagttaaaacaagttagttaaaaccagttcagaacgtaactaacctaactgtgtacaatccaagatcaagaaaacagttagttaatcctaactaacttatccagctatgacaacaattataaatagaagcaaccaagctcataatacttacagcttcaggttacttctctaaaccagaaagagatgatgggagagatccagatccattgagagttcatcttgtgttcaaagaaaagcaagaaaaatagttagagagaaagagagagaga

SEQ ID NO: 227492 - DNA, 3272 bp, Cannabis indica
catcccttccccatcaggaattacgaatctgaaaattagcctaatgttagctccccatttagcaagcacagagctacacttaaatatcttttgctgaatagaatctgacacatatgaatcttaacaactcaaaacaagttgtttacacataggttctctcaaccatgcattctcaaatttgaaaaagacttgaccacccacaccagtagcaacgacaaggataagtaaaataggagtatggtctgaagttaagaattccaaattttgaagcttggctaatgggaaagcttgaatccaaaaattagacaccatagccttatcgattctttcctcagtccacatataagtatttcttcccctctcccaagtaaaagaatagcctttaggatccaaatcaaaaaggccacaatcacttaaagcttcacacaaccccacaatcaactgctctggatacttatgcccgccctttttctcgccttgagctcccaagttattcaaaatacgtattaggcaccaaggaagatcaatttcttccttaagagaacaaagcaactcccacgtatgccatcttaaatctcgatttagttccccataaattcttgtaagcctctgattcaccataccatctatacgaacgacaacgtcaatatagtccttagaaaacttccataaaacaacatcactctccaccttccataaaagagtcagacccacgctatggctttgggcctccacaacaaaacacccctcaaagcccaactaggtcctaaccctttccaccacaacacttttacaaattgtttcacaaagaaataaagtattgggcttcttttatgacattaagtccactaggaattgaacggcctgtgggttcccaagcctacggcaattctaacttagaatactcatggctcttagcgggcttgaacaccaaaactcgccaatacctctttgtttttttttaaaacccaataacaccatgtccatattatcatctaaattttccagctcattttcttgacccaattttgcatcctcatttattggcatttttcttttactctcaatcacactaaatatctcagattggaaatttttccttttctacttatttttaacctacctttatcaatgctatttcttaatcgtgaagattgatatgctaggctagactcccagttacaaatcccttgtaatccggctccaacattttggccaatcaatacctccattatctcggtttgattacccacatggaaaattttcttaggaagatcgtccctaccagtttcttactgcccaccaatatacgaattagcttctattgcacacttgttcttaaacattgagcaccaatattagcatgtttcttttgtggcaaatttttcaatccaattccatatggcttttcaataagatgaagtagagtagtgaatttggaacaatatctttctgattaaccaattattctacatataaaacaaattctagaatcctttcatacttaaaatttacccagaaccacgacataccatcctgacgaatcttcatacgtctcttgattgacttctccacattcatagtaacctggactcgtaaataatctctccacacgccaagaaaattatttggatcaactcaacaacttctccaatataattaccaaccttattgacaatggtttctgtcatataccctgtctgtaaaacatgtatttgaacccacatgtccattataatttatcgagaatgttctcggattcttcccttccttcaatcgagtaaaaataaatggctttctatcatatgtccatggactacctacaatcaccctctgaatattgacttcatgataaaattggaataaaaaaaaagattagaattcaactctttaacatacattcccatgctcggcttccaaggatatgtcatcatattttgaaagacattaaaatctgacactttcccagtcaaaagctttccaacaaaacattaacgtgtgtcaatggccacatcctctatctcacccctaaaacgtctaaaactccttctctttcttcttcttctgccaaattaatgtctgtcgtttgttcacaatatcctaaaccaaacagctgctagatgccatccctaaaaaaataaacatgaaaatctcacaacaaaatgaatcacaaacacaacattcacactctaaaatagagagacaactttacaagtcaaaagacatgaccccctcccattgaattattattacaatcaaagttataaattttgaagatgtgctaagtacaatctcctattacaatctcttagtcaacttctacgcttgaaattacatcttggaatatatttttttcatagcaatattcatgactagtttacagttcctgatatttcagtctaccacgcatgttcaaaaaacttcaaacttatttatagcactgtaaaatattcaaaaaattacaaggatgatgttgtaactataacgaacgttgccataaaactttttctaaaaaaatattctagcatgtattttgtggcgcataaaaattggctaagagactataataggaggttaatggcaacactcttcaattttgaatattggagtcactttttttctaggaattgtaactcaacttgataagcgatcactacatgttacaaagtgaacaaattaaaatattaccataaagaagggtcattagttgaatacaaggaagataatgagcatacaattgaagatcaagatcctattgaagtggtatgaactcaatttgactacatcagattcttacttgataaataatgaatgtcgtgtagtgaatgaaatcatggaagagaatgaattcatccatgattaggaaatcattgaatatgaaatcacaagtaagggtatggatagccaagtggagagcaagcaacaagaagaagagttgtaagatgaaagtgcagatactatgacattggaggatgaggaagcacatgacatcattgattcgatttcatcaatgatattgactaataaaccaccaatggatccatatattttatcaaaaccatattatattctctacgggctacgaaagacttctccccaagctcatcatcctaagtcttatgttgttggtgttgactttggttcaaattcatcgcttgccaagcttgaaggcaagtacaataatatttttcaagttgtcttgcattactcctattatgggcgtcaaccgcttgttgatgtggcgctcatgtaagtttcctttcctttttctt

SEQ ID NO: 227493 - DNA, 3439 bp, Cannabis indica
gtctaaaaattctacagtctagtctagacttagcaatccaaaacatcagtttattgttggatagctctgcaggtcgacttcaaatgaaggagaagttgttcaggttaggagcacattggatgactcctaattgatttgtaatgcaaggatagaatcccattctcacctcttccttaactgccactacagtaaaagcattttaacagagattcttcattggactagtcttcgttctcatcaactaagacttgatggaatacttaaatggataagagaagcaagcacaacagatttagaagacaggtgtatgtaacagtgataaatgctactatgtacaatatttgggctgccataaatgaagttttatggaatcacaatgtacatatgatttttacagttataaataccattaaatttaaaatgattgttattgatagaatttctcaaattaaaaaaaaaaacgaaaatttgtgttgttgatagagtttgatttgccaagtcttggcagataagagttttgtaatttgcctctttgtaggctctgttttgttgtgcaataaatctcatcttacataccaaaaaaaggaaaatggaaaaaacatcgataacacttaaatttcaaatttctttaattttgataccctctaactcttctttttcgaagcccaactaccagaaaattagaatttagatatcttttatacttgtcaaaacattattggtttttggtagcatgtgaaaaaatgccaacttttttcttttattccattccaaaattttttatcatcctggtagggtcatttaattttgatgctacatctttattggtttttctctgtagccaggccttatcccttcaagagaaattaaaaattaaaacgataaaaagaaactattttttgtattatttccactttaaataagtctcaaaagttttggctccccacttttctggaggttaaatagtttttctttttttgtcaagtttggagtttaataaaatagttaattacagaaaaacgattcaaaattatcactttctcttttattagttcatagtttatacattactctcttcttgagtcacaacatatatatatttaattaaagaaatattctttacagttcactattgtataacttttgtctctatcacatctttcccaaaactcatcaattggttactaatcacaatcttaattaaccatgattattaagattcttgatggatttcagatgcaacagttctagcccaaaacttgagatgtttcttcatgtcagcagctgcagtaactcttggaacccttagatttaaaagtggtgaacttggtttccttatgagccatgcttcagataaatatggcctaatcacatctctctctttatcttcttctccttgttcttgctcttcttcttgttctttttcttgctcttcttcaatttcattggcatgaactcgttctagtttatgagaagagctatagtacttgcttttgtacacttgttcaagcctttgtagaccaggtaatagattcaccattctaggacttacatgctctttcctgaatatgaaaccaagatccatgaacccttttagctcttctagctctagctcccccaagctcttgcaactcatcgatttttctagtaccattgcaattggactagggcatgattttctatttttagttgatggtgatgatgaatgagacctaatcatcatgagtctagaccctgctactaatcttgatcttgttggcctcttcttcttgttaatgagcttctcttcataatcatcatgatgatcatcctatgtcatgcataacaataaagttaagctcaattagattccaagtgaaagaataatacaaataattttgagagtacattgtttactatagtcttactttggaagtttttggtctgagcgactctgatgatgattctgaagagtttgatgagttcgaactatgcgaaaaatcagatgataagtcttcatgatctttttcatcttcaagagatgatgacatgaagtgatgacttggagataaggatttagaggtggactgaggtaatgaaattggttgtgaaacaagaatgatttgttgaaaccatagacgatccatggctcctatgagagaattgtagttgttattagttgccatatgaattgagaaaacgaagccaaaaagagaagggttttgtagaattatagctaatatgtattatatagtagtgagaattgtggttgtggtgtaaagacatagaacaagtgaatgcaaatacaagcttggaaaaaaaaaaattaaagtaataagtggtggaaccggttgttgtgattgaatatgatgatatggaaggatatcatttgtggtgaggaatcgagaattgtcctcctcatgatgtttttcacaatattccaagaaagaaaaatattacaagtagtgcttatgctattacagtgagacaaaatatgcttcgttatatattatgaaatgcatgtatgtgcatgtatgtattattgatttagtacaaaagtttcttgtcagtgtcccacaaacaaaatactatatcattccataattaggatcctagaaatgaacaggactttcaggtggccttgaaataactttactactacttttcttagcttattactgactcattgtttttcagataatcaaaaagtgtcaatgccatacataatttatctatgtatgtatgtgtatgtatgagtgtgtatatatgtgacttttgagtgcgttgagaaggcatttgtggttgtattcttatttttattgtgttttatgaatgcaatggctatataggccattggctcttatacggtgtaagtgatacatttgtatcttttgtttttctttcattattatacctatctgacataaatgtaaaagatatacccattacattgcattccattacctttttttgttttcttttttcttttttaatgaaaaggcaaattatgcatgtacgctctttagataagtcctatggtctcatttggatgagttcttggtttgctaattcttattggctcaattctaaccatgtactctaaataaaattccaaagcctgtttagatatatgtagcactcaattccatagatgcttctggtcgatagtggttacacacataacttttaagtacgtaccttcatatttctttcagatagatacatccatctcgcccaaaccgacctacacaaccttgcttcttgttagaatattagttgtatattagttgtaaaaattagggtaacttgtacttagtagattcctattttgtaattagtagtttcccatttagtctcttagctttgtatataaatatgtactattctatgaaatacacacacaattcgatttactattttctacatggtatcagagctttgtgattcgaaattcgaaatt

SEQ ID NO: 227494 - DNA, 2442 bp, Cannabis indica
cacgtaaaaatccttctctcactttcttacagctcaatagtataatcatattttattagttgccgaaaacctcggtcaacagacttaaacttgaaatacttgtctttcaaaagagaaaaagtcgtttaaatagaaatcatgactaggatcacttctcttgccaattgaccaaactacaaagtagatatcaaaagagtctagtgcaataaataaagacctgaaccaatagattatagaatagagcattggagctacaactagtatctagttgattttttttttttgaataactagtagttgatgtattgttatttctgttcgattgttttattggaagaatgtctacgtcatacaatacgattgattatgttcgggatcacttttcgatcattccgttggatgaggaggaggaggcggcagtccagtatggacgactgttggtggaggatactgaggttgatacgagatggagccttgtcggccggttcttaacagaaactcctatcgatttcacggcgatgcagaacttaatggcggttctttggaaaccaggaatgggtatgtatgtgaaggatttgggggaaaataaatttatatttcagttctatcacgagatagatgttcagagggttgttgatcggagtccatggacattcaaaaatgccctctaatttttgagagattgaagccaggtgacgttcctagggtcgtgcggttacaccatcttaaaatctgggtgcagctacatgatgttcagtcgggtttaaaaacggaaaaaatggtgacggatgcgggaaattacataggcagctttgtgaagtcagatgaaaataattttaacggagtgtggagagactatttgcgggtgcgggttcggatagacattgagaagccattgaagcggagaatgaagctccaacaaatcggagggaactggttttggatcaattttaggtattaatttgttcctaccttttgctttatatgtggtataattggtcatacagaacaatattgttctaggctttttattcaacctatatccaccattgttaagccgtatggcactttcatgaaagttgttcctagacgtactcagtatgctatgagggcgaagtggttgcgatcgggctcatcgagttctggagttcatggaggtcaggcgccggtgggaacaaggagttatgggggggattctagtcaggatattcagggattacatggaaaaaatttgcctggcttctcgggtacaggggtgcgattgaatgtaattgatattaatgggagaagtatgggggataacataggcgtgatggctgggagtaatgagggagctttattgggtaatttggagagtagacaggtggctttattgggtaatttggagagtagacatgtggcggtcaatgatgatgaggagggattacttttcttagataataaaagaaagaggttgggtaaggaagtggctaatgggccgattgggcctatggagggtttggtcaaagatattaggccaagtgggcctatggaggggttgatcatggatatgggaattgatactaatgctcaatcaaaaaatgatttattggcgggtccgacggatcgggctcgccaatcattatgagtactttaagttggaattgccatgggcttaggaacccagggacagttcaattccttaaagatattgtttatcaaaagaaacccacttttatttttctgtgtgaaactttgtgtgctaaaccaagattggagcttctctcatctcaacttgggtatgagggtatgttttctgttgatgcgcaaggacggggaggaggtctagctatgttgtggaaggataaaaatgatgcagaagttagaggattttcccaaaactatattgatttagtggttcatcagaatgaggttcaagattggcgtctaacgggcatgtatggtgagccaaatcgggctcttcggagaaacacttgggctcttttgagagttttgaaggaagaaacgcctctaccgtggtgtattattggagatttgaacaatgttatgagtcaggttgataaaagaggaggtaatccttatcctacctggttgatagaaggctttcaacaggtggtgtctgagtgtgacttaattgatctggatctcattgggcatcaatttacttgggaaaaaggaagagattctagtaatttgattgaagtacagttggatagggcctaattctgggtgggtggaatttatttcctaattccagattgagcaatcttatgtttaccacctcggaccattgtcctttgcttttagccctagtttcggttcggtctattctgtgaaactttcgtttgagacgcttggctccgtgaagaggcttgtttttctattatccaatatcagtggaaggtacggctctagcgatatttttgcaaaattgagggcttt

SEQ ID NO: 227495 - DNA, 1999 bp, Cannabis indica
agaaagagtaaggagaacttggattgtattaaaaaatataagaggaaaaaaaacataaaagaatgattgagttgcatcatttgccaatttcagtgggattaagttatcaagatgacttacattctcctctatgatctttgacagcaaaagggtcggttttagcttcacgaattcgagtgccctcacaatatcctggggaaaccttaacaccaagcctgaatttcctgctccttatccaactagaattgtcagtgaaagtaaggtctccaatggtacctactccttccttgagggtcacatgtacatctcctgtaagaagtggtcttttcccttcacgttcctttacctgatagttttcaaagtgctccactgtccaatcatcattagcctcctcactaaaatcgccttcaagcacgacaatattcagctttgcaccagattctggccctgtttgcacaacactgcctgtggtcatgtccatcagcacaacatggattgctgctccttgctcgccaccaacctttgctcccgtgaatatatgaggtggcatccttgttttgaactgaagttgcagagctcttccttgtggagcaagtattcttggcggaggtgacctgtaacaattgaaatcaaaagagttcatttcacaaatatctcaatgctcatcactacaaatatatcaataccatcccagtttccaatcatatcctatcattaccttagtaaaataaaatcatctttacatcaaaataatacaaaacttcaacaacagactcaactaactaaacttccatcacactactgaatagagcaacattgaaccaaataggcttgtctgtggaagttaagaggaatttaccttccagccaatttagcaggacccaactttgtcaaagcgcgctcgatctcttcactgacctatttttcaagaacattgcagaagaagcataagagttaaaaagacttaataaacttactaacaacaacttcatagaaaactgaaaattgaacattatgacttcattaagggaaagcagaagtataatttattataatgctgctcatcaaaatattatagaaagcaactgaataaaaatatgatgagacttgagcaagctgctacaactacaatgtgactcacaattctgcggagtagaggctccaaagatgagcatagtctttgcaggctatccaccttcaaagcttccacaattacactgcatatgaaataaataactgtataaacaataaggtggactccaaaattgacactatcccatccccttatattgtaaaaatggaactgaaaaaaccactttaaagtgaaactaatgaagccccagatacaatcaacagatatgaattaggttagtccttaattagacaattagtagataactatgttctattggttaaatcttgttccccttttagattggcagactagtagaacttgtgaggtataaatatatacacaaatccaaacacagtgccattacacttacactactgccatatcaaaactcactaattttagtaaaataacataatatctagaagaaaaactgagacttgtgaagttccaataattcttaaaatcaatagtagaaccaaagcttggtgtaaatgctcaaataattggtcaaaactaaaaagttgaataaaaaaaaaaacaaaaaataataaaatttaaagagtaccctttaatggaaaacgaataaatccaatgaaattaatgaaactaagagacaaacctggcgagagcaggcaacctgcgttttttggagtcaggtaactggtcatcttctgggtcatcctcatcaataccctcttcgtaagctctcttctcaacccttgtggtcctcgaactatccattttgagaaaccttttaactaaatcccaaatcaagaaaaaccaatccaaagaaaggaatgttctaaaaatcccacaaataaactctcttagaagcttcaaagaagaacaccacaccacaccaca

SEQ ID NO: 227496 - DNA, 1608 bp, Cannabis indica
gtcaccatggatagaaagatcaatggcttcgaaattcctccggcatcaatttatgccctcgcagccattggaatgataatctctgtcaccctctacgagaaagttttagtcccagttatgaggaagattacaggaaatgagagaggtatcaacatcctccaaaggattggaattggaatgttctgttcgatagtcacaatggtagtttcagctctggtcgagaaaaaaagactggaaaatgttcgacaaaatgttgcaacaaatacttttgttcccatgagtgtgttttggttggcacctcagtttgtgatcgttggttttggagatgggtttgctctagtgggcttgcaagagtactttatgaccaagttcctgattccatgcgaagtttggggattgcattttacttgagtgtgattggggcatctagttttctcagcagtattctgataacaattcttgaccacatcactgagaagagtgggaagagttggtttggtaaggacttgaacagcagccgtttagacaagttttatgggctactggctattatggtagcagttaacttgtgcttttacgtgctcttggctcgtcgttactcttacaagaatgttcaaaaggtggttgtggcagactgttatgatgacaaagataatccaacctctatggcttgacagtaattatataattattgtatggatttagatctaaatttataatatatatatatgatatatttaagtgatgcgttgggaagaatgaaaatcatcaagggagccaattacatatatgtagtagtatattgtatgggtagaaaaggcataccttatatctgtaaattctgcgtgcatttgatcagtatctcttgatcaatttttttcttagttgaagaattcaagcatgctgtatatgtaattcatatagtttataatttttatatgcatttgcaaatctaaaattgagctagaaagtttaatctacaaactttgttgaatctgtgagacattgcagaagagtaaaaggaagaacaaaagaaagaacagagaaaggtaaagagaaagaacagagaaaagattgaagtgagaaaaagaatgacttcattgtattagatagtactaaaccagtactatatatatactgatacattgacccaaggctagaaccgaaaacacaacagaaaacactaacagaatgctaaaaacctgtaacagactaacaaccattttaactaacaattaactgtctcaacaccgtccctcaaactcataattgatacatcttcaattttgagtttggttcgaaaatcagcaaaccgtgtgcttgaaatcgccttggtcaatccatcagcaagttgatctactgctggcacatgcttcacttcaacaaattcctgctgcactttttctcttacaaaataaagatccaactctatatgttttgtcctagcatgtaggacggggtttaaggtcaagagaaccgtgctaaggttgtcacaccaaaccacaggtcttgacagatgaacattcaattctgaaaatagggagtgaatccatgaaatctcagtagtgagattagccaagcttcaatattcggcttctgtacttgacc

SEQ ID NO: 227497 - DNA, 2501 bp, Cannabis indica
tcactctcaaagtgaatcattatctaaaataaccaagaagcgagcaaaatcatgttgatccatatgttcagtttcaacatatgaaaaatttggaatttttttaagcaaaatgaacaattgttatacttcaacaaccaaagaacaaaatgtaactaacatcaaattaaaaacaaggatagtagatgtttgtaatctcagttacagaccaatgagtccattggcagaacacatacttatattaatgaaagctttttcttagtactcctctccctcatcatcatcgtcaccttcggcagattctgccccaacttcctcatagtccttctcaagggcagccaagtcttctctcgcttcagaaaactcaccctcctccataccttcaccgacataccaatgcacaaaagctctctttgcgtacatcaagtcaaacttatggtcaatcctagagaacacctctgcaacacttgtggagtttgaaatcatacaaacagccctttgaaccttagccaagtcacctcctggaactacagtgggtggttggtagttgataccgcacttgaacccagttgggcaccaatcaacgaactgaatagttctcttggtcttgatggtggcgactgctgcgttcacatcctttggtacaacatctcccctgtacatcaaacaacaagccatgtactttccatgtcgaggatcacatttggccatcattgaagatggttcaaaagcgctgtttgtgatttcagacaccgaaagttgctcgtggtaagctttctctgcagaaatcacaggcgcatatgacgaaagcatgaaatggattctagggtaagggacaagattagtttgaaactcagtcacatccacattaagagctccatcgaatcgaagagaagcagtgagtgaagaaataacctgttgcccaaacatagaaaaaagctcattaagtaacctaaaacaagaataacataagactagattacatcaagtgattttatacctgagatacaagcctgttaaggttagtgtaagtgggtctttcaatatcaagtgattttctgcaaatgtcgtagatagcctcattatcaagaagaacagacacatctgtgtgttccaaaagagagtgagtagacaaaacactgttgtaaggttcaaccacagaggtggaaacctgtggagatgggtaaactgtaaacccaagtttagatttttttccataatcaacagagagtctctcaagaagtagagatccaagaccagatccagttccaccgccaacagcgtgaaaaaccagaaacccttgaagcccagtacagttatcagcaagctttcggattctatcaaggcatagatctacaatctctttcccaactgcccacaaaacaaaaacaaaaaatcaaaaatttgaacaaaaaattcaaggacatttcaacaaacactcacaaaacaaaaacctaaccaaaaatttaaaaagcttcttacttgtgtaatggcctctagcgaagttattagctgcgtcttccttcccgctaataagctgttcgggatggaaaagctggcggtaagtaccggtcctcacttcatcgatgaccgtcggttctagatccaaaaacacagcacggggaacatgctttccggcgccggtttcactgaaaaacgtgttgaaggcatcgtctccacctccaacggtcttgtcactgggcatttgaccatcgggctgggtaagagaagagaatcattgtaagtaagatccaaatgagaataaatcacaaaatgaagaagaagaagaagaaaaaccaacctgaatgccatgttcaaggcaatagagctcccaacaggagttaccgacttggattccggcctgaccaatgtggatcgagatgcactctctcatttctcttctctggttttaggttttgctttttcttctgttttaggttttcggttacttttttttacaagagaaaatatgattgagcagctagggttttttagggtataaaaaggacaaatttttaagtcggtttttaaaaaaattggggacgtttcaaaatttgaaactgaccgttgtggggatgtgggtgtggggtccagctgtcatgaccgttgtggttttgaattccaattggagggaattcactctattggacttgcctataattgtaataatttagtagtggaaaatatcactagacttgttaaagaaaatatctcttgggttaagatcccaaacatatatcaagttgttcattgtgcaatcttccaaagctaatttacaaaaaaggggaatctcttagtttgcttgtccaatgtgttcttctacagcaaaaccaacttctaaaagcttaaagatatgtgaattagtattcttttgttgttcatggaaatttagtaatgttattggatcacattttaatattttttggttaattttaatttaatctaattatatattagatgttagattttaatatctgatccgatttatttaatttcagtcatct

SEQ ID NO: 227498 - DNA, 6795 bp, Cannabis indica
aagttatgattatggttttatggttatgtttcatattagtatttattatatatataaaaatatattattaattacatatacatgaacataaatcggagcaaattaaatagaaaaaatatatatagtcaaacaccataaatagagttaacatttgatcatattttcatatcatcccttttaacgcatgtccacaatccttttggctctttccacttactcaatagcctcttctctcttgatctcacttttgcatggttaaggttgcattcataaatataactttcctaagaaagaaacaagagaaaaccatcgaatatcataggtgtgtttagtgttgtgttgtattgaattgggagatatggtaagggaattcccgttgtaccatccgcagtcggatgtggtaccttcaagcctgtatgggacgatgatgatgcatctggctaatgtttctgtgaaagctcaaaacgatgcaccggtgattccagccggtggcttattcatatgtcaaaagactcatcaatcaagtcaccctttcggcattttttatggtgacaataccagcatgacatactccttccctttaatgttgttagaaattagtttcgttgtcatcgccactcgcattgttcgttttcttctttcgcctcttaaacaacctaggattgtctctgagatccttgtaagtttttcttcttcatggttaaatttggattaagaaaataatggtaaaataaatatgtggatgatcatttgctaacaataaattagtgggtagtatatttttttcaagagaattacattatatactatatttttaacttttttttttttttacagtttggtttctaaaatagttgcagcgctagttgcaatagaaatttttatacgattttttgttgcaatttaggatgcgcaagttgcactaagaaattttatgtacaattccataaaaatacaaaaaaaaatctattttgaaatgtaaaaatgaaaaaatctctctttttctttattgttattattttattaatatactaatataacgattgaatagaataaacttatgtaaaaagaaaaaattgttggaattcagttatccggatttattttctagttatgttctctaatttaataataaaattataagggttgtaaaaaatatgcaattctatttcttaagttaaaatttgattaattttagcttattagcaatgtttgataataattcttttgttttgttttgttcaaataagggtggaataattgttgggccaagtgttttagggagaagcaaaaggttcactgcatttatgtttccagaaaatgcagacttcatggtgaagaacattggagtaatgggattcatgtactttttgttcgtatcaggagtgaaaatggacatgactttaatcaccaaaacgggtaaaaaacaggtgtggatcgccttagcttcagttgtattcccaatgggcttaatcataggcgttggattcctcttacgcccaacgatggacaaggatctcgccacattatcatcaataggagctgtctcatcctctgtcgccataacagctttccctgttttatatcctctcctcaaagagcttaacctcctcagctctgacctcggtcgaatggccctttcgacgtcagttataagcgacgccattggaatcaatgcgctcatagctttcgagtcatccaagcaaaccgaagcccaaagcaaaaacgcaggctggtacctgctctcaatggtccttatcttgttaatgttggtcggtgtgaggaaacttatgcagttgttagcttccagggctcgaaatggaaaacctgtcgagcaaacttatttagtgctcataatgacgtttgctatgtcaatgggattcctcactgacatgtttggtttggctatagccaatggacctatgtggcttgggctcatcattcctgatggccctccactcggatccatgcttgtagagcgtgtagaaactattgcttcagaaattttgatgcccttttcatttgcatttataggaatgtacactgatgtctcaactatctaccttgcatggccaagtttgaaacctttgttggccatggttgttatcggttatattgctaaaattgctaccacttgtttggcttgtctttatttcaaaatgtctttaaaagacagtcttgctttgagctttattcttagcgtaagaggacaggtggaacttttattgttcattcactggatggacaaacaggtatatacatatatatataaatattatgttctcaaatatataaacacttgaaatttcataattctgattcatgtatatacatttttctttttcagattctacagcaatctcaattcacaatgatggttcttttaacaaccatgataagtgccatatgctcacctttaataagtgttctatatgaccccacaaaaccttacatggtgaacaagaagagaacaattcaacatacagcaccaggcacagatcttcgagtcctacttgtcattctcgaccaagaaagtgtggctggcttaatcactcttatagaagcctccaacccaacttcggccacaccattctccatcacctcactatgcctaatcgagctcatgggccgagccaacccaatcttcatcgaccaccaaaaacaaagccacgtcccaacccaatacggaacctcagtaaccatccacaaagctctcgaattctaccaagaaactcgatcagaatgcgtgaagctcgagtcctacactgtggtcaccccaaaacgaacaatgtaccaagacatttgcgagcaagccctcctccacaaatcaactctcatcatcttacctttcaacagcgaccagatggaaggagtggcagacgattcagaaagacgaacaggtgttcgttcagtgaactcgctagtgctcacccatgcaccctgctcggttgggatattcctcgacaaaggagatctcaggaaccctttggcgacagcctcgttcggccatgcacaacaccattttgcggttctgttcttgggcggagccgatgccagggaggcattggcttatgctgatcgaatgctgggaaaccccgaggtgacattaacggtggtgagattcctgtcgtttaatggagaaggagataatgagatggagaagaagcttgatgatggagtggtgacttggttttgggtgaaaaatgaagcgaacaacagggtggtgtacagagaagtggttgtgaggaatggggcggagacggtggccgcgattcaagctgtaaacgacgggtcgtttgatttgtggattgtggggagacaacaagggataaatcctgtgcttgtgtcaggtctttcggattggacagagaatttgcatgagttaggagtaataggagattatgtgggagcaagtgattttggaggctcagcttctgttttggtaattcaacagcaaattctcagacaacaaggcaccactaccacttcttgtggtaaccttaatagattgggtgccttgtttggtagtcattattagttagcatcctccatgcaacaaccaggtatatatagatagttataattacatttataataagtttaataaagaagatcaaagaaagttaagtggtggtatattataaaacattaagttttttggatggtaatttttagaagcacaaaaatagatggaaaatctaagttagttgaagaatcaattgaatattattatgtttaatttttttaattgtcttgcttcttaacttatttaatgaataaaataattagcttaagcaattttcaagaattataaaatgaatatgatttagatacacttaaattctacacacattaattatatataataatatgtaattaatttaatttagacactaaaaaaaagtattgtgataccattcaaaaatataaatgattaatatatcattgatttagataatttataatcacttaagtattttttttttcttgcaatatataaactaaattttatcttaattgaggctctccaatttaaaatgtattgcaatattattatattttttattattataatctaccaaatttcaattcatttatagaaaaaattatcaaaattagagtttaaatatattgtaatgcaatgggactaaaatgtatagtttaattaatgcaggtcaatttattgagtgtgaaggaaaggagtaaaccataataaaaggctctttaaagtgtaagcttcacaagatgttattggtgtattttgatattgggtttaaccattttgatttaataaataacataaaaaaaaaataattaaccaaatataaagtatcaagttggtgttagatacttttaagtgccaaataacaatgatgaagtcaaaataatattatttcaagttgtggtagctcctctcatctagttccacattggtgacaaccaccaatcatagtctggttgtagtttgtataaaatgtgtaacttaattgatataatttattattagaaaaagatactgcgcttcgcgcggtttttataacaattgagaattgcatattattgtttaaattcatagttgactttatagttatgatacaacttaaattattaaaagaataaacaagtattttttttcttaaattattatcgagaaaataatatctgtgaactataatcgataataaatactctcccaaactatttatattactaagttgtgacaattctcttactttttgttctacatgaataataaaaagttaatttggtacattagaccttggtgtgccattgtcaaattagaataaataagcatttcaccccctaactatttgttctctctaatttattaaattcaatatactaatattaaaagttaaaaaatatgtatttaaaaaattagaccaataaaaaatcaatatttctacgtggacacatatttgatattaagtgtgtctatactacattgtatattaataaaggaaaatttgagttaccatgcttaaacatgtccctaagaataccactacacaaaacatcaaagaaaatgtgctaatatgtttatttagttctaattatacctctcaaataataaaaccaaacctctatgtttccctctctctctttctcgtctatctctagaaagtcacacatacacacacacacaagtcagtccatttttaccagagcacccatcgtcgaactcaaaataatgctattatgtatatagtttgttttcaacaaatatatacatttaaaaaattaaattttaaattttttgtatttaactgcgttttttctggctttctagttttttgcaataatttgcattattaatcatgtatttgcaatgatatacgaaatttgaggttagagatgaagtttagcgatgattagcatgttctgtggagttagaataaaataagaaatatttgcgtatttagcgatgtttagcgataattttgtgatgtatttacgatatgagactaaaatttgtagagcacatcactaaacgtccataaatcacactcaagttttcacgatgattagcaatgtttaacaatgtgctttgtattttttagtctcgtattacaaaattatcgctaaatacgaaaacatttattagtttagtcaaacaaggacaagcgtggatccccagtaccaagactgggatcccgaagtccacaatttaagaattccaaaggatgtagtcctaaacacagtcccaaaagttgcagtccaacaaggtgacgaagcccaaaactcgtcaagtcgccaacaaagaaggatacctccccaaagtggaagggaggcccacgctttgtcaattataccaaactttctatcactcgcgaccatatctatgcgattgaggaacataacgatattttagaaaaccaccaccgatctgaggaaatcgcaacaagatggatccaaaaaagttttgcaagtatcataacgatattggccacaccactcttgaatgctgattattgcaagacgagattgaagaattgatcagacgaagaaagtttggccagtataagaaaaagggagaagccaatcacagagcatatagggtagacgactcagaggatgcaagagtttccagagctccttgcaacatcctgaccatcattggaggtccacatattggtggagactccaagaaagcgcataagcattatgcaaaggaagctaaagaaaaacctttgacaaatataaataatctaggtgaaatacctgagaatttattcaagaaggagtgtgacgacatcattttcatggaaagtgatgcgagatgggtgcactatgatgaggaaagtgagttgaactcaatagagaatgctcttttggacaagccattttcctgcaaagacttaatctcgcaggttaggaagtctgacttgatgacgtgtgagagattgaagctaataaatactgctacaatgaagtccatgtcgatgcaacaccctcatcttccttttaccaacccagcgatcattctgacccaaaatggggtagtctcagttcccattattcgctgtggtatcacccttccttttcacttttttgtaaaggcaatcttgacacactacggcatctccacgttccaactcacacccaatagctatcgaataatcattgggttttatgcaatgtatatggaatacacgcaacaagaacccacagtcgaggattttagttacttttacgatatagaaaatgttgtccatgacaatgacaaaaagaaactaacataagtttcttgatcatattgttttaatacaagac

SEQ ID NO: 227499 - DNA, 1289 bp, Cannabis indica
aaaataaaaaaaataaaaaatcacacgtgtaaaaaactttttgaacactatttttgatgtgttaaaattttttgaaatttcttaaaattttgtgagatgtcttacataattataatgtatacggccataaaagaaaatcagactacgtaattttttgaataccaatataaattaaggtacattaatacacctattttaaaggagtgtattgtaaaattttccattctatatatagataatataataataattaaaaaagcaaaaccttaatttcatcttggtgtgcatgcggtggtaaatgaatcatgcaaataagcatcttttttccttgatcactattatcaattagaatttcgttccaaaacaaatctacaaatttgtctcttccttatgagagcttttgggtagaaggatttatagaatcaacactatctttattattattattattatttgcaaataaacatatttctttttctgtttttgtattttagtatgtattaaaatcaattgggtacgcatttgcattataaataaaaatttctcctaataaacagggttgagttaaacccctcgagatcgtaaactgagtaagttgatgccaataaaaatgtcagtgcttatatatgatcagatctaagaataagaaaggctatttgtattttataatagtgtaaaataaaaacaacagtgtgatttgcctgcaccgaaattagggtttgaaagtcaaattttatggcttatgtgtcaagcaacataaaatttattgtcaactaatttttttttaatacaaagaagaaaatgatgatctcgatcgactaataatgaaataaaatgaaagagtagatgatgactttactgtttggttcaaacatatacacaacaaattaaatcaaaagctaattaaaaaaaatcatacaataaacaaaacagtcagctcatttatttctatgtttccatttggcattacaagtgtcaccattccctttcaacagttcaacattttacatttatttatttaatatatatatttagatgcacaactagtactatagatagggcttagggaagtggattttaaattttgatgggaatatgttatttttgtgtggtagggactattactaaataatgaaaatggctttcacaaggggttgtccagtggggtggggcaaatatagagaaagacctattaagaaaggacagtagaacatgaaatggacaaatggtaaaacggtctcgaaagggtcagtttcaagtgggcagtttataacatggtgtggtcacgt

SEQ ID NO: 227500 - DNA, 3886 bp, Cannabis indica
ggagaagtgattgagattctggatgtgacagatgtcccgagcataggcagtaggtgtttagacattctaggaactcttggcctcacgaggaggcttgaccaacagaactagatcatcaacgaacataaggtgacttaaagatatccctcttcgacccatcttgaaccccttgattaacctcagctgtctttgagaaggatgaggcgagagagggtttcggctgccataataaagagggagggcgacaaggggtctccttgtctaaggcctctttcaggtttgaattgtcccaccgtagccccattaagtaatagcttgatccattgaacaaacttatcaggcaagccaaaatgaagtaacaccgagagaatgaagtcccaatccaatttgtcataggccttctccatgtcgatcttgatcatcataaagcccctcttccctcttcttcggttcatagagtgcacaattttccctagcaatcatcgtattttccgcaatatgtcttccttttacgaaagcggcctggttcgggatataatttgaggtaggaagcctctcaatctgttagcaattgtcttggagatgatcttataggccacattgcatagcacaatgggtctatagtcattggtaaaagcagggccatccttcttcggcacaagaacaaaggaagtgtcgtttatgaactttgggagttcacaagttctgaagaagtgaatgaccatctcgatcaagtcagcgtgcaccgtatcccaatgatgactgaaaaaacttgggggtaggcaatcggggcctggagctttatctttactcatttctgcaagggctgaagtgatctcatccctgtcggggatagcattaagtaacttgctatctaggtctgagatctcagattggaataaagtggcaagtatggaaggatcacagcttgagttctttttgaatagatcttcaaacttcctaagaaagcaagatgcaatcttattcgggtcactgatccaatcttccccagggcctggtttaatactctgaataaagttccttcgtctccttacaatcgtggaagccataaagaacttggtgcacttatccccttcggccatccattggactctcgatttttgtttccaatgaatctcttctctaagaagtgcttccgagagtttattcttagcagcttcaatctccatggcattatcggggtgatgactttcggtgaacctcagcttagttgtggcctcttgaacctagtttttgaggtgacagaattgagatttgttccactgtttgagttttctacttgtggctttaacctttctgtagaaattgatcatctaattggcatggagacattttgaccaagcttctttaacaacccaaaaacaacgaggatctcgagcccacatattctcatatttaaacgaacgccctctgccattcactccccccgaggtgtcaaggagaatggggcggtgatccgaacccgaagcagccagatgatgaacaatagaattaggaaacaggatacgccactcaatggaagcaagcccacgatccaatctagccctcttaacacccccaccttgggacgatctgtttctacctttagaccatgtataaccaggcccttggaatcccaagtcaactaaccccacccgattaaccatctgacaaaaatcaaaagcgtaacgggaagagttaccttgattggcatagttgaaacattcagagtcttttaacgtaccattcatatcgccaatcataagaagagggtcctggcaattgagcgtgaagtctccaactttgagccaaaaggcttctttatcagaattatgaggggggccatacatgcctagtaagtgccacgggttcccaggagggtcggaggagatgacacaggagatgttattcttattagagtcacggatggtgcagtcgactccctgcaaccaacaaattccaaacccacccgagtatcccaaagggggaacataatggaaattagcaaatttaagtttggaacaagttcttacaaatctatcttcagttagatgagtttctgaaatcaacactatctcgggattgtggtggcgaacgagggctgccaaatgtcgaactgtcgtggtattcccgagaccacggcagttccaagataaaatcttcatggctccactggaggctcttccgggccagcctccatagccccaaaacgaaaatctgaattggaattttcctcattacttctctgttcctcagtcactgtgggatctagctcagtaatcgtgcaattgcccctggggatgctctgtttctccacaatgacaaagtggttactgagatctatcttaagatcaaaatctcttccttcccaattgcgattgacagtgaatgtgcttccactcggtctcgggttcttttttgtctacttgaaaacttttggagtgggggatagatcacattgattcttggggggtcgtccccttctcttttgaggagtaggttcgttggagataatgtttttcctccccctgggtcttccccgttgttttgacgatcctggcgtaattaattctccagaggaaatatcaacactgcgcatgagaggctcgtgttcttcaggaattgtcaaagagggcgaagaggggggtatgggagtcgaagactcacctggatcctgaataataggatcttgtggaccgttgagttgggatacaatcccatttgagttacgggccttaggagaggggtagaatgtcaaaccatcacaggctttgcgttttctcggcccattagaatgttcctcaactctgaagtcatcaatgtctagaattgggttgaacaacattggttctctaaagaatttatccacagtgagagagcccatgagaagcttacgggcttgaggctcggcccaacattgagttgagggccaatctaccaattgggcctgggtaccaagtatggaagaggagtaaggaatggatttaccatttaaatctacactaggcccagcacttggtccacaaatatccttggactccggagtacaaagtgggtcacccccagttgtcggtttcttgcccaaatggtcattttgtatgggtacacttccaagtatcttatttgcctctccaaaagaggcatttccatcagtggtctctatctccaaacggctagctttggtgctctcagagccctcagcatcacgactcacagtaggttgtggcattccattggtgacatcagttgaattctcaggggcggcatccttcaggtcttggatgactaccacttttgaattattaccaaaaggagcaatctccccaatacccggcagtctcacaagagggatttgggtaatgaccacctcttgttggtgtagcccagaattggattcatcttcgtcggaggcaattcgttttttggccggaagttgcagcctgcattcgcgtagttcgtcggagtctccgtggagaatggccttgtggatcttgaattggtttctaaggaccaagtcatgaccaagtcgcttttggagagtccagtcttggaaccatttggctaaaggagaggtgaatgtggatttttctttggcttcatgtttcaaccaagtcccaaacattgggtagaagttacctttatcgtctttaatcaccgtgggggctttgaagcagatactctgatcatgggttagcattccacatttgaagcaaagtttgggtagacgctcatacctgtattggatccacaggtctttaagcttttgtctgcgaaggaagaagcctgagaagattggcttgttgaggtcgattgtagcccagaatctcagagtgctaaggcctacggcgtcctcaatacccataggcagttcatgaacaggggaggc

SEQ ID NO: 227501 - DNA, 2666 bp, Cannabis indica
ttttttttttttttgtaagggtggagtctggatgataaatacactgaaatgcagaaatatcaacttagctaccatactggtagttatgagttagggttcaaagcctaaattatgtattttgtatccttttatgcagataatcattgtcggatcgtttctttgtgattcatcagaatctacatggcattgtatgtttggtgatgttgaagttcccgctcaaatcattcaagacggagtattacgttgtgaagctcctcctcacccttccgggaaggtgactatctgcattactgctggtaatcgacaatcgtgcagtgaagtcaaagagtttgagtactgtcttaagcctagcagttgtgttcaaggtaatccacctttgacagaatcaacaaggagtccagaggagttgctattactcgtcagatttgtacagttgctcttgtcagactcatcaatgccgagaagagataataaagtattggatgcccctcaaaaattgatagctgatgtagattcttgggatagtctaatagagtctcttttagatggtagtggtactttatctagtactattaatttgattcttgaagagcttctgaaagacaagttactgcagtggatatcttctagatcccaggagcaacaagatcagacaggatgcccattatccaagaaagagcaaggaataatacatatgattgctgggttgggatttgaatgggccataaaccctattcttagttccggagtgagtataaatttccgtgacatcaatggatggactgctctacactgggcagctcgctttggaaggtactagaagccattttcactaaaaaacaaaactagttccttcaacgcctaaaactgttttctggcatacactagcttgattttgtggctattgtcctgtaaaatgtgtacatgtttttttactattaactattcatctgtaacagggaaaaaatggttgctgcgcttatagcttctggtgcatcagctggagcagtgacagatccatgttcacaagatccaataggcaaaacagctgcctctattgcagcctccaatgggcataagggtcttgctggttatcttgcagaagtggcattaactagccacctgtcatcccttactctggaagaaagtgagctttataaaggttctgctgagattgaagctgaaaacactataaatagtatatcaaagcatggccttatcgcccatgaggatcagctttcccttgaacctactttggctgctgtccggaatgcagcacaggctgctgcacgcatacagtctgctttcagggcacattccttcaggaaacaacagaaagaagccattgattctaatataaatgaagatgagtatggtttcagtttgaacgatatttcagcaatgtcaaagatgaagttccgcaacccacgtgattacaattcagctgcattatctattcagaaaaagtatcgtgggtggaaagggcgcaaagatttcctagcactacgccagaaagttgtcaagatacaggtacctcactttcatttttgtaatattggctaaaaagtattgtttgcaagatgtttttaaatgaggatcttctgtccaacgagtttgtaaaccttgcattcctttgaactctagactgttttgagcaaagaacaaaacctcatttatttatttattaaaatgaattgcaatttatgagtgtagttcatggaaaaagggggaaataaagtgttaactatcgttctaagtagtctgttaactcatcaaattatcttattttctgcaggctcatgttagaggttatcaaattaggaaaagttacaaagtaatctgctgggctgtgggagttctagaaaaggttgtactaaggtggcgacgaaaaggatctggtttgcgtggttaccggcctgagatagacccaattgatgaaagtgaagacattcttaaggtgttccgcaagcagaaagttgatggaacaattaaagaggctttctcacgtgtaatgtcaatggtgaagtcctcagaggcacgtcaacaatatattcgcgtgtttgagaagtattgccaggttaaggtaatgagtcacattttatcagtagattgtaactgtttacaggaatcttggattttacaaacttattccattattaccccaatggggtcccctttgtatgaatgtttcctgcaggccgaacgtggtgatgaggacattgaagcagcagcagcagcagcatcgtctgaacttgctgatttgtacggattagaagatgtggatatgttttcattcccatagcagcaacatcaagtcaacctaacttctttctaaattaccagttagttaagaagctaagctagtagatgagaattcagatggttgacagtagattatttatgtacatagtctagtctggagtggaatggagttaatgtaaagtggtactgattgatgtgttttctttacattttatgctagttgtcgttcatgtagatggattttcctataagcaacacttcgtgttgtgtgaatttaatccttaagtgcaaaattaaagagttaattttcaagattagcttttcataaatcagtcattttcaatattccaacagaaatatggtgattttgctgatttgacaaaactttatgccctttgtacaga

SEQ ID NO: 227502 - DNA, 1969 bp, Cannabis indica
aaaaaaaaaacaagtaaataactatatattcatgatttgagctgtatctttctctaaccccacgaacactgcaacaaaagttgatattttttaatgctataaattaataaatcaaatattttttactgtataaacgttaattgtaggatttaatgagttcattcaatttgttttcttgcaggtcaccttttctaaaattgaaatatgatgcgccctttcctatacggtaaattattatggtgtgtaattgtgtattctttattattgggtgtttgacagaggtagtagctggctcaagcaataatttccttttggtatggtaaaatgaggaataattgaggatggctgatcttaatgatttggcttttaggataggcatggtgcatatatgtaattactgaaatgaaatcattatattttaggctatctttctctataattaagctattaaaactcattattttagcaaatattaaactgatcactattatttggctcatgctctttgcttttaaatttgttaattttttccaacaatattagaaattagaagttgtcacacattcatttaatgctaaacatttagtacatcttaattaatttttatataattgatcttagagactgcatgtaaattaatctatgtgtaatacgttagttaataatgatttgttttattataactaactaacaaatactacttatgaatgtgagccaaaatatttaaattttatataaattattatattttaagattcattaagaaaattgcagttcatttcttaaaggtttgcttattattgatctcaactatattgcctatcagcattaataccttagcggtgttctggtatatatttgtactaatctgaaaatctcttcaatttttttttctttatctttagcgtgaaaggggtattaaaaaaaaaatagaatgacataagtaataataatcttatcttgaacacaacctatttgaaaacaacacaaaattggaaacctatacaaatattgaaatttaaaataattttgacaaaaatactgtcacactggaaattttttcaaaaatactatatttttataaaacaactgtagaacaactgtaaaaacataacacagtacacagtataaaacttacacagtatttttgaaaaaaaaattctgccccacagtaaaaaattaaaaaaattaaaaaattccagtatatggtgtaaataatccaaaattaaaataataaatcaaacactttaataaaaatcataaaatacaacatagtatttagaaagtaagatagaaaagtagtattaaaaagaaaaaaaattagaatagtgtaaatatttaaaaaaaaataatatatttcttaaaactttttatattttttattttttgaaataagaatttaaattttgaaaattatgtaagcaaaaaaaaattactttaataatttaaaataattttttaatcatggtctattttataccactttgagcatacaaatttaaggctaattgcagcaaaatatctaatatttaaagattgtttaaatatttttttttttgtggtaaaaatacccaaagtattaaaatattattgctcggagtaatacctttaaaattatttatcgagattttcaaaaatcaattaaatagagcttaagaaagatataaagcgataaataatagacaagtaatttttacgtagttcggacattaataatccctagtccacgagtccgttgtattagctttgttggacgagtgtttaaatattacaagtgtttacactataaatattaactttgttattcctatcgtttctcttggagaagaagaaatctcataggaattttagtaagaggtttgcgttaagtatctttacacatgaaaataagggtatttataagcacatgtgtgggtgagggcatacccttcacccactaggatttacgtattcaacacgttacaatggc

SEQ ID NO: 227503 - DNA, 3343 bp, Cannabis indica
agttgagaactgtgctaaacataatacttttaccttcaacatgcaagccccatccaccatcttcattctacacatgaaaacaatgagttcttatagtataagaccattgaatttaaaaacataatctcagcttataacttaatatatgcaatcaaaaaattatataatgtaactacctgatgataatatatataacgaagaatttctttgcaatgctcagggcttaaaatgatatttaggtgacctgtaatgtaaagacacatcacctgtacatacaaatataaatttataaagacaaaaatcatatgatccagtaatcaatttggtaatattaatgtataaacatattctaaaaacatacctacataagtagctgactagaagctgaaacatataatttatatctcatttgcaattttcaaaataggttgtatttatattttaataattttatattactttttacaaatttatgtatttaatcaaacaatataatttaatcagtaatctaactaaatattcttctgcataatcaaataaaattataagtttataggcaataatattctccacttcaatatttcaattaataaattaagtccaatctttttttttttctaaaacaccgttcacaatttaagtcaacattcaacaactaaaaagttatttttttttttttttacatattttcattttaaatgtgacaatactacttgttaatttaaatacagtataattctaagtctgaaattttagatttaaaatagtatactttattctgtcactatttcaatttattaatacagttaaattcatttaaattgaagttttaaaattaaattattgtgtagtactataaaagaatgtttcttatatataatttatattttataagtttaaactatatactttacactatagtatttaaattactttgcgagaaaaaaaaaaaacactataacatttaaatggggattaaagttaaattgtaatattgtttactatataaagttcttttagctatttaatttgaagattttggattatctttaaaagttttatggcataagatatttcttccattcaaatcccatctcggtgaggttttccttctcagttttggcctcttcgaatccgatcacttcacccttttagggtttatgctatcccgaattcaaagaacctttaagtgcatactcctggagtgcaatatagatggatgatctactggaaatggcaaagaatctgaatgttttggcagacaacgaatgggagatcgacgaatctagtgcgacgacaataggaaaactctgccttcttggtagattatgtacccagtaggaatattgttaagtcccttctcaagaccatcctttgtcgaatctggaaattgattgagaaagagttagattttatgtttagagagaaaatagaacaggcactcttcatcatcataaatttcaagaatccagatcacttaagatcaagtggtgtcaaagatgtcgtggttcattcagaatggattctttattctcgaatgaatggagagaacgccattagattaggagtctaaattgaaaatgtttcctctaaaggggcaggtcttgaatctaccctttccctcaatgattaagaacaatctggcgtgactagcgagtatggcgggtacggtgatttcaatccaagaactctatgtacctaaaattacagtaaatggatacttttggttcaaggttatgagctccatattcgatctaagatctgtctgagctttccgtttcccttcaatagtggtgtaatctgaccagaatttcaatataaacgattgcgtttcatgtgttttgattgtgggatggtgggacatgatggcaaacactacaatgaaccggtgactatggtttagaaaatgtggggaattatgactcatgcatatgggacttggttgaagatagacccattcttaatatttgagggaattaattagttggtggtattagaccaaaaaaaaaaaaaaattgggtccttacaggggacaaacatctcaaaaagggagacgttcaatatcgattcaaataattcaagggtgaaccaaatcatctttggggctcatcgaacaagggacctggctaagaagagtgagcgagtgttactccaaagggaatcttcaggcactgaggttttattgtaggcaaccattcaattggattgtgtactaaatgttgagtctcttgtgaaagttcctctctcttttaactcaggagtcactagtggtgtatagatggagggtctgcccaaaaggaggagatttgtggctcaacaaggagggaagaaacagtgaaggtttacacacaaatggaaaagtaattctcagctcaaaggaggctgagtaaaacatgttgtatttatactctgtagagagattacaatgacaaataagagtatgacaggtggccctaatgttggcaccaagggaacaagaaataacagaaaataaaggttgattacaccttagtaccaagcactaaaaacagagcaattaacactaatgacaattaactaattcttaacaccacccctcaaacgagagggtgagttcttcacaccgagtttggaaatcaggtaatgaaaccttgaatgagaaagaccctttgtcatgcaatcggcaacttgatcagctgaaggaatgtacctaacttctaattgcttgcttaacactttgtctcaaacaaaatgaatgtctaactcaatgtgtttagtacgagcatggtacactggattggaggcaagagcacttgcactcatattatcacactaagtgattgggatagcagtcaatggaaatttgatttccttgagcaaggattcaatccgtgttatctcagcacttacatgagcaagtgctttgtattcagattctgtacttgatcttgatacaacagtctgtttctttgatgaccaggacaccaaagtgtctccaaagtacacacagtagcctccaaccgatcttctatcatcaacattgcttgcccagtctgcatcagagaaacctgtgatagtcattctgtcactacaactgatgtgaagtccttgagtactagttccctttagatatctgagaattctcttagccgcactccaatgagtagtagttggagttttaaggaactgactcagagagttgacagcataactaatgtctggtctggtgtggcataagtactgcaaagctccaatgagacttctgtagactgtggggtttgtcatttccttgccatctgaaattgatagagatttgcctgctgcaatgggagttggacatagtttcagattttgcaagttattt

SEQ ID NO: 227504 - DNA, 1110 bp, Cannabis indica
aaaaaataaacattaagtttatgtcacttacaaatataaaactttgagtcatttatatagttaaataattaaaatttgaatttataattcataagttcaagaaatttcgatcatgagctttactgatcaaatttgaatagatgcatccaataagcattattgaaaaaaccaaatgagtacacaactgaggtaactatgagagaaaatttcaaagatgggattgttcattgttgaattgttcgatacctctgggtttgggactgaagctgggggaacaggactagcaacatggaacactccactacagccatgaattgcagaaaccaaagaaccataatccaacaaatcagccttaaatagcttgagattctcagatgccttatcgagtttattcaaatgagcatacttagcatcgtctaaacatcattacaaagcaatttacgattaacccatttggattgattaacgaaatagcaaaggggtttgcccaaaatcagaacttgagctgaaaaagagtgaccaagttaagaagaaagtacatactgagttgtcgaacagtgccgtggacgataatagtcatttgaaaggagaagctttataagggaagaagctacgaagccaccggcaccggttacacagaccactttacgagctttctcaaccaccgtcgacgccattgaactttgaatttctactgatatatttttgggtgtaaaggcttcaggagctctctacacaaaaaatgagaactgaggctatagagattagaaactatgagtcccacgtgggaaatgaagataagagctacgtagtatatcaaagctttttttttttacaaagttatcctcttttataaaacaaccttaaaacaataaaatagaacaattaaaacaacagttgaagaactaaaaaataatcgtagaacaaccctgaaaacttaacacattataaaacttatataatagttttgaaaaaaattccaccctacaataaaaaaaactaaaaataataaaaattttagtatgtggtgtaaaaacccgactttgagtcaataagctaattgggcctctacttttcaagccgagagttgggttttgtggattggacgaa

SEQ ID NO: 227505 - DNA, 2561 bp, Cannabis indica
tttttttttaaggaaatactcactaactttgagtatactaatcttcaatcaaaaatatatttatctaaaatgaacacaagatataatagatcaaatactcccattgacaagaacaacaacaaagacagaatcaaattagaaatatttatgtatgtactaattataaaaagggtagctagctaagagtagaagatgagatcatggatgatagatcttatttccacatctgcatctccatgagagtagataatatgtgtcatcttcaccgtgagaagtggtctttaaattattaggcttcttctggtgatttggaacaaccaaagtagcctcacatggtctacaattcaaacacttgtttacacactgaggtggtcttgaccccaacaccattttcctctcttcttctcttgatgaatattcaaaacccacttcaaaatacacatcaaaaaccaaaattaatataatatatgtacatataaaaacccaataggatgactaactttatatatatgtacctgttttgggtggtagaattatgatggaaaagatgaaaagcacagtaattactgctccaacattgaagtagttcactgggaagtatgaagccataataatgtggatcagtagctatagtagtctagaagagtgatattgttacagtgaagaaaatgatgtttggagagagacccttataaatatattttaatttctttaaaacaagaatgtttatgtaggaaaggaaatgtaattaggaggacaaaggttgaagattgtttcctccttaaacgacaattgcaaaggttttctcactgtgttgaatatggagttttggaaactgttgctctgactcactctcttgaggtttttagtgaaaagtcttcctccccaggtgagactatttgatcatctacggttaggtatgtattatcacttttcatcaataccataattaccatcttacccttattcaatataacacacacacacaaaagagatatgtcatatttgctagtactgtatgtaactttattcattaaagtatttatagttgaaaatgaaatagtacaataaacctcatttataataatatggaatttgtttaattagtatatgagtgaaacacaagcaagattataacatgaaacaaatgagtgatctgttctggttataatcttctgcagtgcagtggtatataattatatataatatatgagttaattatataattactttgaaagttggtgaaaagtaaaaaagtatataattttttttcatgtctactgttaaacaacagtagttaaaaaagaatctaagcaaagtaattgagtaggcaatactagtaccatgccatggagcagaaagaaagtacaggtggcttcctctgaacacttatattattattattattaatattatgacaaaattcctctgttttcatctctattacaatatgcttgggttggttggaaggagaatagagagaatggaaggttaagaaaagatggaaaataatccctctacattgtttggtaggagagatacaaaagtgaaatgataaatcactattcatttatcaaattactatattattttctaattactttttaataaatcttataattttgaacaaataagaatagagaatattaatgtttctattaatggaaggagttaaaaaatgtagtggatttattttcctctcacttttcctttccttccaagaatctttcttgacaaacaagaggatttgacctttcctccctctcatttccctcatttccatcctcccacttttccctctcaccaaatatagtgttaaggttaaatctatgttgtagcaaaaatatcctcatcatgtagttgagtttgatccaaaaaaatatactcaaaattgataaatatgaacatggtcataatcatctaatttcatcattggttccaaaaggggcataaaattaatattgttggagttaaaagaggtgaagaaaaatcaatggagttggtgagcttttcccgagatgaattaataagtgttggttctttaagtagactttttcagaggttgaattcaaaaaagaactagtttgaagtgcagtgaggaaaaaaaaaagactcttatttatttgaagcttccagagcaggttactttaatttcccaaagaactaggcaactgaggaagtctctgttccttttttccttaacacaggttttttaattcaacaatggtttttaactcattactcctctgctcaattaccataccaatcttcttcatattgtcaaacaatttggataacatttttgaaacttgcaacttagtttttttataatataaataaagtttaattcacttgatctaggctattcagaattataacaactttattaattggtcaaaatccaagaattagaatttttttaaaaaaaaaaaagaaagagagagaaacttggattatgtttggtattggagaaaatgagaaaaaaatgaagagaataaaaaaatgtttgtttggtttgaaagaaaaatagttgttgagaaaattttattagaaaaaaatta

SEQ ID NO: 227506 - DNA, 5596 bp, Cannabis indica
atatatataaatcttgatctttcttcaaagctgagtatattcattacaatatttcatagaagacagagtatggatgttgatgatcatgataagccgtgtgcccccgtcgcatgttcgcagaataaatacgacgttttcatcagttttagaggagaagacactcgcgcaaattttgtaagtcatctatataaaggactcaaagacggaggaattgaaacgtatattgatgatagacttgagcgaggagatgagatttccaaagctctttcggatgctatcaacaactctaaattttccatagttgttttttctgaaaagtatgcatattcgtcgtggtgcttggatgagttggtgcatattctcgaatgcatggagaagaaaacacaaatcgttctgcctgtgttttatcatgtatcgccaggagatgtgcgcgcacaaaaaagaagttatgcaaaaatatttcgggaatacgaagaacattacaacaatagtattatacatagatggaaggttgctcttgctacaatagctaatctctcaggatggcatgcatcaaaaaataggttctaaaatttctttccaacttcaattctatatatattttattattttgtatttgtctttcaatgattactcaaaattcacttttatttgtatatatatattaaatattttaatatttacactaaagtcgcccctaaaagtttacaaagttgcaaaaaaaaaaaaaaaactcaatttctttaggcgacaactttatgtcgcctctaataccaccctctttagaggcgacaatatgtcgcctctaatattgtcgcccgtaaaaactaaaattgttgtagtgtgtagatgtatggaaatttatgtggtacactctttcttaaaagggttgttttagcaggcttttttatctatttcgatatctaaaaaaaaattagatcgattttttttttttatgatcacgtacattgaaactacataagactatctataaattttcaaaaaaaaaaaaatctgaataatttgcagtactgaaattaagattcaaacagtaacaataaacaatcgagtgtacaaaataaaatatttgaaccttatttatttatagtattgtaaagtactcaaaattttctaaaaatttaaacacgatcttaaataacgtacgcaattatgtgaaaaaaaactaaaaagttgttatagatgttgaaaaaaataaaaggtgtactaaaacacttttttaattaggaggtgtactataggcttactaaagttaattatatataattatacatgtgtaggaacgaagctgagttagttgaagtaattgtcaaccatattcaagggatgttaagatttacaatatcttcaactaaatacttgaagcaattagacttagttggaattgagaagtctattcatcatatcaacatgttgttgtccaatgctcccatggtaggaatttgtggcatgggtggattggggaaaaccaccctagctgatgttgtattcaaattatatcgtcatcaattcgacagttattgttttcttcgaaatattagagaattgcaacaaaagcatggttcaacttatttgacaagagagttgttctctaaattgtcaaaaattaaagatttcgatgatgaaaatatggatgttgtaaagagcatgctttgtcataagaagctactcatagttctcgatgatcttgatgacctcgacgaatatgatgctttacttaaagatagtaatttttggttaagttccgaaaagtaaagttattataacaagtagggatcaacaagtacttcgaaatgttgttggagatgacgataacatatacaacctgaaatttctaaacgacgaggaagctcttgatcttttccatttgcatgctttcaaaaagaaaaaaggttgacgaaagctacatagaatcctcaataaagttggtgaaatatgctcaaggtttaccgttggctctcaaagttttggggtctaatctatacttaaagagcaagaaaatatgggaaagcttgttgaagaagttgaaagtaaatcctgatcaaggaattctaaatgtattgaaaataagttttgatggacttgacatatggagaagaatttgtttcttgatatagcatgtttctttaatggtgaagagaaatgtcatgtgaaaatcatattggaggatagtgactcatttgatgctattattgaagttctcattgataagtgtttgataactgatgtgaatggtagacttcaaatgcatgatttgttacaagaaatgggtcgatcgattgctcgggggttagatcataactgttcgggaaactatagtaggttatggaagctcaaagatatctatcgattcttgaaaaatactacggtactacaaatatttcatttttcattttttatagttacaaaatacggttacatttagttttacacattttttacagactatagttgttttttttttttacaaaaataaggatttattttcatgttgttacgttttatgtcgcacactttcatagctaattttaatttataaattctcaggcggatgcaagcacaattgaaggaatatttccaaatgatagcgaaatattcttttcagaagatcaagagcctttgaacttggaccctttaatcttcgaaaaaatgccatatttacgattgcttaaattggcatattttcaaattcgttgtcaacttcctcaaggtcttcactcttttcctagagatcttagatatctgagatgggattgttacccgttaagaacattagggtcgaattttacaccacataatcttgtttatctgagtatgactgatagtgagcttgagaaactatgggatgaattccaggtacgtatataaatatttatatatatttgcaacaattgttcttaagttataatatatttgcagtagtactacttaagtataattattctgttatgtatgcaatactcacaatatttatttgctgttataaaagtgtcatacttataagtagactaataattttacatcacacacatgcaaacttaagtacgtaccaaaaaataacttctgtatcgttaagtgttacaaacataacaatttgattatttttattataagaaaaataattaattggtaacctataaaatgttataaacataataattttggtacgtgcaggatatgaaaaacctaaaatatgtcgatcttggaggctcaaagaagttgacttgtctcccaaatttatctagagcaaatatttggaagcttgacctagaattttgtcacgaatttagttgagctccctccgttgaagtttcatacaaattttgacgatgcgaaagatgaaacaaaagcaattaatttctacaacggttgcatactcgatgagaaatgtgacttactacttttggagggtgtttggtttggcgtattgaaggatttttttcttaatctcaatatgtgctctaatttgagaattgtttctgagatgtctggtaatatcaaatacatatgtttgcgttccaccgcaatagaagaattgcacacttccattggatctctcaacaatcttttcgtgctcgatctctttggttgtcgacatctcaagaatcttcctagcagtatttttgattcgacatcattgagtattcttgatatgcatggatgtgtctctatcaacacatttccaaagcttccgaaaaccctaaaggcattagatttgagtggaacatcaatacaacgaatcaactcatcatcgttcgagttcatgccctttctcaagaatttctacatgaataattgcacaaaactcgaaagcattccaactaccatttgtaagttgaagtctctccaagtactttcttttataaattgctcgaaattgaaaagctttcccgaaattttagagccaatggagaatctagagatgctttatttaaacggaacagggattgaagtagtaccaccatcgatttcgcttctagctaagcttcaaaatttagatttaagagaatgcaaaaatctcaagtctattccaatatcgaacatctataatatgtgcaatgtttatatcttcattgatgaaaatccaacacaacaacatttgattgtttcgttaccattcgatgtaaacatttctacaatgcttgaccactcaaagtgcaaaggttcttgtttggacatgaatagagtatctttcctaaactcacaatttgttgggctcatagacttttctcgtgacgagttaatacattggaagtttaattattggaaaagttacatttgtagtgaatgcttcttattctacacaatacacaatattttagtcagcaaatataaaaatcaggtatgcctctctttcttacattacaaactatataataaatatatatatatatacatataaatagatattactttttttttatgaccattgatataacatatgaaggtaactattcttatttttgtcatatatattacagaaagaaaataaaattcgcatcttggtttgacaatttgaagttctgagtttgttatcatctctttcgtgtttcaggtaattataatctatgtttaaatttctgagcttttgaataattataggaatgatacactaacagatttaacacaatgtaacaaaaaaaattaacgtattaaattattttttttttatctaagatggatctcacttattaaaagtatttcagccatcaatctaatttttcctcaccttatccgtaaacaacggtcctttcttcttcatctgcatagtaaagcttaattttttttttttttttataacaattaggctcccacacaggcggccttgaattgaaatgagctataagtaaaaaaaaaaattcttaacctttactataaagataattttagtcacaataaatattgtaactaaaaatacatttaatcacaatacattataatttttatgactaatatttttagctaaggactttttgatcacaacaaaggaatgatgatttataattagtcacaacttttttacttttaattaaaaaaaaattctagtcaaactaattacaaattttcttgtcactaaaaatatccggctctacccaaacttttctggttcaccccaacattccccacttgtccgactgttgctgagcagtttttgggtttaattttttgtagtgaatatcttgaactaggtatatcgcatctatcggggaaccaacactgtttcccaaacgagttgcatctagcatcgccgagatcacagccagaaataggcacacattttcgatccgaacatactattcaacattcacataccaattcactacaacaaatcttcgtttccgccgagtgacagtattccccggctactctacaacgctcatcaccaccaccatcatcacaaacattaattattgtgcccacaaatttcttcattttctacatatgtttataatatgtggtgcaaaattcaactaatttatttttctatatcttttttgtcattgaggcaacctaccaactactacagtatttatattgattcacctgaaaatatgatttataaatcaagatatgttat

SEQ ID NO: 227507 - DNA, 1583 bp, Cannabis indica
tccattttaaaatttaattatttttaatccaataatttttttacattatttatttacgccatataaaactaaactatactacattttctcatatttatcaaaaaaaaaatccctatttataaacttttttaattattattacaatgaactaattttattagaaatgtactaatttttgttagaactttaaattttaccttagttaaaaaataaaaaaagagaatattctcatccaaatagtatattcctgttacattttaaggaactctcatctatttcatctgaaatatgaaatgtgttcatccttataagtaatctacatatttattgtgttaaagaaaaaaaagaaactttaatatctataaaacattaaacacagtcaattgaatacataaaaaattataagatacatggaatgatgcaacatttgctatttgacccacaaaactttcttgaaaagagcaaaattctaccaaaaataaatttagaaggaaatgtgtactcatttatatatgacagctattaatctatagtatttgtgactaaatataataaaataaacatttgcgtcttttgctaataacaaaaattaatagcaattttgttggtaaattatcttataaataggctaatacacacccattttcaacaattgaactagtaaaaaaggagattgagttagttataaacctcagaagatggcaactaaggtgtctcaaattcattttgttcttctagttctcttagtgtcaacattcctgctttcatgtaagtactactaatgttgcatcaataaataattttattgtatttttctagttatttagtgcatgattatcataataatcaattttttttttcagcacacattggaatgtgtcaagggaagacatgcactgccggtattggacgatgcagccagaactgcaatgaggaatgttgtgaagtaaaatgttggactaaatttggaaactctgggaaaggaatgtgttataatcctggtgaacttggcaacgtttgtctttgcagttatgattgttagaatacacatgcagacaacttgatgtgaaataaaatttgagagttaatcatttaaattattcatacagtaagaaatgcatgtcttcatttgagttggattttgttaccccatttttatattaatgttagccatttttttttgaatgttactagttccctatcctttgttatatatcttaccatttctgtggaaacctttttctttttctccttcaaaaaatggtaaaactgaatatgatcaatatatatttcattatatatattgaaaacaatataaccatgtactaaaagaaattagtgatgtaaaatttatatattttaatgcaaggaatatactagtgataattttagttgaagaaaaattgcaaaatgttgtggtcaaaagtataatctagtggttttacactttttctcaaaaagagaatttccaaattcaaatccccactcctccaatatctaaaaaaatataccaaaatgttatagaataataaacccaataatattacaattctatgctaaacaatagaaggactacaataaaa

SEQ ID NO: 227508 - DNA, 3328 bp, Cannabis indica
attattatattgtctattgctaagcagttatgctaatccgttttggacttagttatagtgtcttgatttggcatttcaatggatgaatgtgtcaatatgtctttgattgttttgcggttacgtaaattacttgtttattttttgaagggtttggaagtgcactagcccaggttgctgtaaacagagagctctcactagggttgcgccagatatccttttcctacgtgcttgattatagataaacaataatgtttgaatgtatatgcgactagaggtttatcctttcttttattgaatcatttattttccgaattatttcatcatttgctaaacaaaaatagtggtctaagtgcaaagtttgtacactctcatgggcacgtggctaaggagttttgattgttgaaagcagctcatggtattgactcaggaagaaaatgcttagcgcctaatgtagaaagggagggtagttttgtttctcatgtcttgttgtctcttctcaactctagttggagttaatttcttgggaggtttgtggaattaaagaacctttgatgtgaattgtaagcagtttttgcagaaagtagggtgttcatgggggtgccatgttctcagcggaactttccttagccgtttattacatgtcctttttcctctgtcacatctcagtaaaatatacaatgtcattcataaagatttatagattctccgctctctcaaagatcttgtagtttttctctttgtaaaagatatattgaattttgttatttatatatctagctatatcaaattttcttctctttatcttgttgaatttgacaaaaaagatacctagctgctgtccttctgaagcagtttattaagaaacactggcatgagggtgatgaatcttttgagcatcctgttgtttcctttgatgaaaaggtacagttcattgaaaattctttttgtttttgacttcatgtttaataggaaaaatatattatgtgcacttgttctagatagtatgtgtttttccttatctagcttctctttctttaatggagtaacaaatatgtcgataagttcatttttcctgctattcgaaaagcaatatgataagaaaattttcgtcttaagagtctaattattaacatagaattgttgttcaagttttatttcactagttgtagtgagctataaataaaatggttttataaatttaattttataactttagttttgctattgtgttgttggatcactttaatctagtgaacggcaacgatccataggcaccccatatcccccccacaacagaacatactgaaggaaattcatgttccaatcccagtagttcagtgcactgtcatattttggcacatcccacactagcttcaactctaaaccataatttaagagatcctacaatgggaatatatgatctgcagaatctctgttatttttttgcccagaacacccaataataacaacccaagccagtgagtcatgaacatgagacattccaaaatcaacaacagagcaagcaatttaaactttggtgtagctgaacttttacacaaaatctctggagaggggcattccttaatagatttcagttattgagctaataaatggtgctttgtttacattttaaaatttcagataaatttcccaaacatattctcctgttttcattattgctacaaatgctcagtcgaaaatgataaaacttccagcaagtttggaattttccatcagtttaattgtgcatgaatatctttttctggaagttttcataaggcaatgcagctgtgaagggttccatccaaaatcaaatgtgttcccacacttagccccgcccaatgcccctttcccacaaaaagacatttaaaatatttcagacttataattttagctgtgagagtttgtaattcagtattaataatccggtcataatatctgtatattatatcttatgatttccaaggctaataagaccatgttcacacacgcaggaaaaaatacgcagacttctattgttgtcactggatgactcctatagaaaaatgtgcactgcaattagtatggctattgcatcgattgcgcttcatgattggccagaggattggcctgacttgttgccttatctcctgaagttaattaatgaccagacaaatcgggatggaggtatgtatgctgtccttgctcttactggcctttgtttatgtgattttaaatacaatatttttctactacatggtctatgttaatgattttcatgttttcatatttgctttgcgagcatatattgatctatcaggctttgaatttttctctgaggttgtcacaatgtcctcaaaatcattttgtaagaaattggccaggttcctttgttacatggtttggccaagtcaaattatttgatggcctcaattatcgcgtcaatataaactttgtcttaaatcaggaagcccaaaaggaaactcaatgtataacatgtcatataccatgattttaatttctgttttaaacatgattactcatcatcatctagtagatttcttgtccagcagcaactagtgctgagctgtcttgtttatacagaaggagaatttgttgttattctgttattacttagtactgcttctgttgcattgacaactttaacctctagatgcgtcctattttatgaaaagattttgaaatcctcttggagcagcggtagtattttagggtattcaggattttaacttgctcaattgttgcaagttgttgtttgttatctgtttcatatttaagagtttcatgacttatacatctgaagatgcatattttttgcttctaaacgttgtagtaaatggagctttgaggtgcttggctcttctttctgatgacttggatgataaagtgatgcccacattagtgcctcttttgttcccatgcctgcttactattgtttcatccactcaggtttgtttgtgttatattttggttttgtcagctctttagaatcctatattgaaatttgaatatgttttctaaacataaatttttaatttttatttttgtaagaggtattattcaagaaaatctgaaataagcgtaaatagtcaattatgcttttgagtttacattagtatttgtgcatgtgcatagcaaatataacttttgagtcatttgctttttcgaacaaatggagtgaggtaaagagaccaagtgaatgggattttcatcttaaaactttatgaggaatttgagggttcaagtaaaagttcacattgctcattgaatgaggttcttaatatatatcggggggagacctgtctagacaagtggtctctttctcttt

SEQ ID NO: 227509 - DNA, 1778 bp, Cannabis indica
agctggtttgtagctttagttttttaaagttttgcaggacgttaaccatatgattgtacgcaacaaatcaaaaacatatgtcgttgtactttttctaattttaaaactaatttgacatgtttatttcatgatttctttttgttcttattattattattattattattattattattattattattcattttctagtttttttatttcactaccttgtttatgatagaataagcaaaaagtagaaaatgaataaattatgacatcacaagttgggtagccaactaaagaacttacacacaaagctaatcaattatccaaacatcacccatgagagggtaataggattgcaccatggcctctgccaaattgataaggaaataagattaaggatgattgtaattttgaagccatattttttaagtcatttggaattttttttatttatttattattattattttacgatacatcaatttacatgtattatctttttagagacttatgaccatatgaacttactttatcatagacatcaaatttggtaaatgatcctagatattttgtggaatattgtaataattttgcaacagcttgttggtgtgtaatttttaaaagttctatttcaatatatcaaactaaactcaagaaaattatttaatttaccagtctttgtcttctattagctacttgagagttaacaaaaataatttaaatcatgtatttcaacttcttactatgtatttcagcttccaaaattttgtatacaataaaatgtcatcacttgttatatcaattcataattgaatatgaattgacacttgtcataatgcttctagtgcccacaatttctagtactatgcttaatgatcactcactcttaatgagactttgataatggcaagctttaccctgtaactgttagacttgttgttgcatcttcttatgatatttgtttcctgctttgctgctttgttctctttgtttcttttgttcaaacttatttgttatttggagtttatgactcaaaatgttgaaatacataattaactcaacaactcatatttatcattcaaagggaatcaaattacatccaaaaataaaaatttgattaatcacctgattttcagattgagaaccatttctaaggttggttattatctatcttacataatcaaacaaaaacaaaactttgaaaactccgtcttctatgacagaaggattcctagtaagggttggagatcaaatctggtcggatctcgtcggagaaactgctgctgctatggccgccgcctcaattgtgttccggcgatccaaccccgcctactctagcgagctcctccgccacactcaccaggtcattctattttcagattttcacatttttattgcatacctcttaaatcatatataattaaatatcagtctcacatggtatggttggtatgttttgactaattgtaccactttggagattttttgtgcctctgttggaggtttttgtaccttcttaggtgatttatctacttttttatgattattgtatttgaattgtatcaatattatacttttctttctatgatgtcaatatttcaaagatcaagtctcaaaaatttgttcttcttctttcgaaatctcacttgtcaattcctttatatagatccaatttaactcttacgttttatatttaatctgaatatattatatatgggaaatttgattttttatacttaaatatacctaatatttttttttctaaacacataacatttaatatttgt

SEQ ID NO: 227510 - DNA, 5500 bp, Cannabis indica
ctctctctctctctctccaataatatttttccaaccctctctttttttctgaaactgatctttagattcaacgaattaaattatttgtacatattgctttttgggcatattaattgttaattaaatcttaaatatatgaccaaagttgcttttcctttatgattgacttacttttcattttgacaactgttcttgaaaattaatattcatttcttaaaattgaccaactaattgaatatggtggccaaaccatactcctttatatatagtcagccagtatttcttcttattatgaatgaattaatgttttttttttttttgaatttgaattaatgttttaattaccatatatatatatatagttacatacttacagttttattctttttatttttaagtaaaaaaaaaaaccttaacacctagcttctagatgtatatatatacacattagttaatttcttactatcccattgcatcgaaatttactctcagggtagacccgtattaaaattgattaattaaatcaccataataattgatcagcttttatataaatatatatattttgtgtatatatacatatccaatatgtgaaactagaattaaggacacataaataaagtagtatatatgaattattaatttattactataatataaagactcgatctctttaattatcaatcaggtagcattttctagagttcatcttaattataataaacatgacataagtatgcacttaattggttttaataatgcaatctaaaaattcggtgactttttaaaaaaaaaatattggatccatgaaaaacacatatatttcttttttccaagactactctcttgtacacagtatatatatatataaagatatatatttacttataagttgagaggtacaaacatatataatagtacttcttatgatcagttaagcacagatcgaaaaaactatacacaacttttgcttggtatgaaagtacattgctggattatatacatgcctttaccaaattattatacattattcctatattgaattaattagagttaatatataatttgttttatatagatactcgaaaccctatgtatatatccaaagtttatatataaaatctaaagcaaaagatatcccagaaatttaggttaatattttattctgtagtggattgtttacattaatattcatagtcacttttaaccttgataaaagtacatgattttctcattgctcttttcatgaacgggactgtaaagccgaaacatattgtctattatttttttttatcaattattaatctatattttgtttcaatatttgcctatatatattattatttgtcttgtttgatcatttgatattattttattttaagttggtattgatcgtgatccacaactgttttccttttccttttcgtttatcttttatcttttatatatttttgtggagagagactatacatcaacattaatttagtatagttactatgatatcttatttgaggtttttgctgagccaactaagattctgtctaaatcaatataatacaaaatattaaggctggtctatatatagcatattcactttccatgaaccaaaacaaaaagagaaattgctagaatgatattgatacccattatatcttgatgtatatataagcctaattaacacctttcagtaattactcatttaatctgctataaatagctagctaacattaataataagattataaattaaaaaattgtaagacatatttacctgaatggattcaattgtacatttatgatttatcccatatgaataagatagaagcatgagcggctgagacaatgaaatattcttcaataaatctgaaccaaaaaagaaaaaaaaaaaaatacagcataagtgtgccacctcacatacccattataaatatataaattaattaagcactggtagcaaggcaagctagctacaaaacttcttctctcgtattctagttggaaccaagtgataaaaattgtactatatatatttgtaattaatgtacgccactatatgttatatacatataaatagtagtagtgatcagtaattggttggtcttgtaataaaattaagtaacatatatatatgggtagaaaacaataagaagaaagagccagatttggatgcccttgcttggagtaatgccgaacaagttgcgccaaaaaacgtcaagggcgtgcactttttcgtgaagttttttctgctgcctgcttatttacttatacttatttgggtagacacatgcaactcagccccatgtgttccatccatttcatcaacacataataataatatcatcaaacttatatatatatatatataccaatatatattatatatttaattagaataaaaaaaaaaaaaaactaatattaaccaactatgactgcactcaaagtatagttgtgcctagaaaaatacggacccccggcccccccatgcagtgagtgcggaagatcgatcagaaattcagaataagtaaatataccgtttgttatatataatgtacagaatatatttatatatatatatatgtctctctgtgcagtcctattccgaaagccacagtcaccatcaactaaaagctaggaatctcagtatattttgttcagtacattgaatagaaactaaagggaaaaggacataatatagatcgttcagagaaagaaattaattattgatgagtttaattcattgaattaaaaaggaaaaaaggatttaagacataaataataaatacagagacatgaataactgattatctagatcttctaattaatttaaacaatgtgaatttctccccggccgtcccctcctcataacaatttttctccctaattaaagtgctcataaatatatatatatataagctagctagctatgaaagatatcattttatatgtagtaattaacctcacatgcatttacaaataatagtaattataatactaataattaataagaactagtgattattattatcatcattacattcattattggagtgatgatgaagatcgtggaagacatatccataaccagcagaatcttgatgatgatgttgaggattgtagtttccatagtcggaaaccaaagaagggtaattattattgttgttaaccaaggagctaattccactactgtctccagaattagtagtagtactggcagtcccagtagtattgctactgcttccgtctgttctagttaccatttctattgatgacccatacacaccctcatgatcatgatgtaataatgaaatatcatcaactgggtcactactactactgtaaatcaactggcttaactcatcttgaagtttctcaagcccaggatccatactacttggtagtacactacctccaataccaatattattgacatgattatgatcagcagcagcaaactgctggccctggctcccatgaaccataattgggagttgatgatcatataataatgattgatcaaaagggccgtaatactgatgatgaaaatgatctggggtagtggaagcagtggtggtagtagtactactagcactagtactatcagtttgatcagagaatcttcctcccaatttgagtagaaaactctttatagaggctgcagcttcttggtccttgagttgagaaacatcgtagtagctgctgttttgattaggagccataggatgagtcgttgctactgctggtagctctggccagtacggtagtgtctgatgattatgattaccactcatcattaagccgccagttgtaggaagaagaatattgttttgatgatgatgatcaaaagcaatagtggtggtagtagtagagggggtggtggcttctcttttgatttctggcttattcatcatcatcatgagattgttgttgttggctcggcgagcagcctgattagcggccgctgcggctgcatgttcttttcgctgttttcccaacagctttttcttcaatcttgtgttccagtagttctttatatcattatcagttcgtcctggtaactgagctgctatgatagaccacctgtatgtatgtacaaacaaaaattgtaattaaaagattgtattaattaattaagaagggatttaatctgttaattgcaatcaatatatatataattgaaccattataatagtgattaattacctgcttcctatgcttagataaaggctgcaaataatgttatcttcttcttcagagaaacccccatgttttatgtgtggcctcagataattcagccatctcagacggcagctcttcccacatctcttaagccctgaaaagtaaaacaaaatcaaagaataatgaattaattctcaaattaaagttaattcatgtatcattctcatatatattatatatatatatacctatcttctggggcaaagcaatccagttgccaccggtgccgttttgctcaatataagccttaagagtggcatcttcttcaggtgaccaagggccttttttcacattggctttgtcacagcaaggagctcttcccatggttttctaccctcttcttcttcttcttgatctgttttgattggttggtgtggataaattttgtttctggggtcaataattaagtaagctctagagagagctatgaattgagctaaaattagctatactgtagttcttctctttctccctctctctctagctctcctggttgttgttaccaattgatgataacgataatgataacgtttaattatatatatatttatataaacagaagagaagagaagagagagaaagtagtagtataatagctggagaaggagagacatacatggaaggaaggggaatagagtcacagaatttcaaaaaggtgatatggagaaaaagatgagagagacgcctttatgaatttaataatgcataaatttaaatttaattatatgccacaacagtataatagggcttttctcatttgtctttcttacttaagaatcaacattaatattaaccatccaccttgattgactctctctctctctctctctctctctcacatgtatgggtgcatgaagttgtggatgatgatgatggccatgcatgcatgatctaaataaaataaattaaaaaagttatatattggggtgggcccaaaataatatcaaagaaatgcataaagggctcttaattaatgataaacgtcttgcacagttggttgaatagttcttcattttatggttttactcagtatttatatatctctttgattacgcttgatatgtagagaccatgatgatagcatgcatcaattgaagtagccatctttatttggaaaatttctttcttctttcaaataattaattcatgatattaagaaaggaacaaatcaattaacttgtcatactttgtatactacttcaaaaaaaaaaaatggaatcaagtacaaatgtttcaattttaatatagggataattacataaaa

SEQ ID NO: 227511 - DNA, 2778 bp, Cannabis indica
agtttattttcttaatcttcctatcaaattgatttcccaccatgtttttgaactagaaaaattgcaactaaggcatctgactttgctttgagagggcatatccaagtatgtctactaaaatcatctacaaaatgaatatagtatcaaagatttgcattgggtatcatagggtcaggaccaaagatctgtatgaatcacatcaagcactctagtggctttgttgtcaaaaatttgaaatggtaaagcatggaattttccatattggaaagcttcacaaaataaaagattttcattggctaaaacttttacaattgcattttttaagacttaactcaagaccttagaagaaggatggcctaatcttctatgccacaagtctttggtagacacatgactcgaattaacacaagacattaactgaggaacagacacaactaaagtagaagagagactaaaacataaattgaaagactcaggactattgtttgatgaaccagagtttggaaattttaaattgcaggatttggttgaaccttctagctgatacagaccatctttaagcttcccctgcatcaccaccatctttgtttccatgtcattcacaaaacacacatcaaaaaagaactcaacaaacacttttgtagcagttaatttgaaaatactaattaagttctttgcaatttttagaacatgtaaaacatcattcaattgcaacttattaccacattcagattgtaaaatgcttgagccaacatgagaaatgtaaatatgataaccatcaccaactgttaatttttccttaccattgtaaatagttttgttgatcatgttatcatgattttaggtgagatgattactagccccagaatcagcataccagtcttcatgatccacaacttttagtgtggcaatgtaagcacttggatatccttcttttcattgcttgattttttggtgcttccaggttaagatcccataaacgattcatcatatttattatagcaaaaggtagtagaatgaccacaatgcccacaaacttggaaagttaatttggggtttcttccaccctacctctacgtttgctagagcttccttctctatcacttgtgatagtgtgagcctctacacacaaccatagttgttgttaaagttgaccactcaaaatttgagataaggtgagtctttgggtatggatctcctaaaagtgccaaactatcagcccaggatctcttttgttgaagatactcaaccattgaagtacttcccttacgaatggtttggatttatgttcgagtgtcatccatttggcacaagaatgagcaccataaaaatttcttagggctacgcagagtgctcttaatgttgtgcagcccatcactttagttgtgattgtctctgtcatggagccataaagtcacctcatttacaattgatcacagataatccatcttttatattctagattcagtacaggtcccaaatctaagatgtttggttccattcacatagccttccagtcaatgtcctcttatgattgttaagatgagattcctccagagtgtatagttgttcctatcaagtttaatggggaagggttgtgtaagagtgttaccgaatggtgcattactgaaatttgcaaatccaatttggaactctaattgagagttgtcattagtggcctgaggggagctaagatgaccaaaggttcattggtctacaccatttccttcatcatgttgttgatttcctccgtgtggagtctggctcattgcagacatggcataggtttagcacaagctctaatactaagaaagaatacaaaaaataattaattgagaaagctcagctcaaatcatagttgagagagagaacgaattcatttataggcaataattacaagatgattacaacagaaagaaattgacagatggcatagtacaatcattggaaaaaaataaaatgcataacaaaatggaaaggtgccaaaaggtgaagcaaaaaatagaaccttctgtgaaatttctatgcctaaatacctttagtgactaatcctctgcattactcatctaagcatatcttaacatacacccaatctataatcgaacaaccaaattgcaaggcatgatccaacacaaggtggttgatattattaatttttttatgtaacaatatattaaatatacatgttgccccaagtttttttaatatacgtgacagtctcagcatgggacacgtggcaaacaaatacccattatccagagatgaataaaatatttaaccagatcccttctaaaggaactaataactaagttcaagggtaagctcccagacatgagaaaacagccctgcttcctctccgggaggtgaagggcgtatgaacccctacagactagcgaaactggagatgaacgaccacctcgcatttaatgcagcatggggaaagcgtctgggaacacccataaaaggacatgtcagacgtcataaacccgtcttttagtgattacacgataattaagggtgcaagtgatagcttcattatgaagaatcacatcaatcaataaaggatgaaggctaatctcacctaaagcctagacagcctactacgtgcatgccctattttatatattttggaaacttgtgcatgctcatggatggcacttaaagacaattaagacctttcttcttcctaccaatcgctataaatatccctcagcaaaatttatgaggggatcaaaaaaagaacacaaaaaatattctctgtaagaaacacccacctat

SEQ ID NO: 227512 - DNA, 1899 bp, Cannabis indica
ctagccattctaagggccctttcttgctgccattcctcttctcgatactagtcaagatcttgtgggtgtgccaactactttctcactaggaatcaacaattctcaaccaacaaagtccacaaaaaagaagacttctgaaggagcaaagggctctttcaaaaggtagtccattttaatcaaaggagtgtctcgtaaagtgattaaacgtgctcgaaccattccacctctagtttctgatgctgaacttccagaggttggtcctgctcaggagcaggccgatctaaggccatgaatattgttatttggaatgcacgaggtcttgggagtgaccgtgcattccataatttctcttagatgaaccttttttgtaactgatattttgtttacttttgaattcaaactcgctactggttctttggatagcgtcacttaagtttcctaacagtttggaagttggtagaataggtcggggagggggtcttttgttattatggacatctaatgtaactttaactctcatgcatcaatctactaatcatttttattgttatgttttttcttcctcttttaatgtaccctcttttcatttgacttatttttatggtgctccaaatacttctgaccgaccccatcgcacacctagaaacttcttaattatattggttagaacattcccttggtctcctagatgatcattggatattttaatgctttcattaataatgatgataagattgtggaaacatggatgaaagtccctctaatgacttttaaaatactatcaccaatttcaatttaactccgcttgatttcactggtgacaaaatttacttggaataacaaccaaacaaatgagggaaacattcaagaaagaattgattggtgcatcaccaatgatccatggaaagacctctttcctcaagcctcacttgatcatggtggtttctttggttctggccacagagctctcatccttagtctatttcctcaaaccccccaccgctttccttaacaagcccaaacgcttcctttttgaaaatgattggcttcaaaacccgaggtgggacacaaacatcttggatttcttgaaaccctctgtagctcaccaaaacctaattaaccatttattggacatccaagaaaattatactcatagcctccagaattgaagtcacaaacctttattccaattcaaaaaatgtattgatagactctctagagagcttgagttgactcgctctggtcaaccatggaatgaagataggatcaatcagattaaatttgttcagaccaaactagacaatcttttgcaccaagaagaaatttactggaagcaatgctctctggtcaattggcttaaccatggggatggaacacaaagttcttccataaattttcctttaataggaaagttggaaaccaaatcaaagagcttcttaacactcaaggtcaaaccctcttgaatgaatctaatattacgggggaaattgagagatatttctgtgaactttttacaaacttctactccctcacccgagaataacaataagtctttggcttttttcaagactaattcactaaggatgaaattcaaagagcttttttcaactcccccttgataaaagccctgaggaaagatgattttaacataaacttttatcgaaaaaattgggggctggttaaatctgatattgtcaagcctgacctaacctttctcatcttcggagggaacgttgctaatctaaacaaaacccttattactttgatccccaaagttaaactatccagaactattaaagaatttagtgttgggttttgtgccctaaataaaaccaatttcaatataatcagatttacttattaataaagataaaaaataacattttatgttgcatggtt

SEQ ID NO: 227513 - DNA, 1704 bp, Cannabis indica
atattatgtatctatataaatagtgaatctctcatatcaacgtaattcacccaactaattagtacttataaagtattatcattcggtactaattaattaacataagagaaaaaaaaatgtctgaattgccaagatttgtggttatcaaatctaaacacaatggaaaatacttgacaaagttaaggaaggaagagagcgtggcaaaggggttctcagaaatgtttgtgaactttcgaggagaggacgttacgagtcctttggtgaagttcgaactggagaaagccaagacaaagccaggatgggttcacatacgttattgctacaacaacaaatacttgaccatgcaatccaattattcctggtattttttggcctcggctgaccaacccagtgaagatgatgaatagattggaaaatactttgttcaagcttatcaatttgatattaatggacagaatattttcgatttcaacacgtcactaatcgttatgcttgtctttccacttggaacaaggattacgagtatggtctatatgctaacgacacccaactggaggattctgatactttcaaagtattattggattgggaatcgcttgtcatattttcccaaatctaccgtctccattaggccagcgagtggccaaggttggtatctcagcaacaaagaacaaccatatctgagagtgctcaaggatgcaaaaaatcgtcgaccaatgggtaccacatgagatctacacagtcggcgatggtgacatccgcataaagaaccttttcaccaaccagttctggcaaagcagtagcgatggtgtcatagccagctcgaacgacaaaacagaaaagacatcattatttcatcccattaaagtgtccgacaatgtggtggtgctgcgcaatctggcaactacgaaatttctatcagtgaataattctggtaatgatagagacgcacttttttccatttacgagtctttctttgtcgataacacaaagttcatagtggaggagattatcacatcaaggaaaatctacaacatcaatttccgacaagaggatggtagggtttataatctgagtgttatcgagaagagccatacagtggtcaaaaaccctgaggatgtatataaaactttggacttgacgtttgagtttgatgaaacaagatcaattggtcttcgcaacaacatttcactcctatcaaatgttgatacaacattggaagtcgaatatattccattgatagtcaataaggataagatcgaattgtcagttgatgaagttactgcagtaggacagtggggaacaatcaaaactatggaaactttgaccaagactaactgcaccgttagagtgcctccaaagactagaacaagagttactcttgttgtgacacaaggaatgtgcgaagttccattctcttatactcaaaaggacagtttctacgacggaacctccaaaatcacgaaaatggaagatgggttgtacaccgggatcaatattttcaacttggagattaaaaccagccctgaaatattgccctaattaaccactaatatttcatgagcgtagctatataggtttatcaatcgtacgtttaatttcactatctttcattatcagcaaataaaaatgtaataataatcagtagtaacattaatgctacatacaattcatgatcaagaaataataataataattttcttt

SEQ ID NO: 227514 - DNA, 2160 bp, Cannabis indica
gcttgacaacaaatacacatgcagtagagtttgaagtaagaaagaacattattaaccttcttatgacatcattcacaagtgccaatcgtttagtgataaaaaaataaattagactgaaacaaagacgatatgataagcaaaaacaattaaaatatttatcatttttagtgatgttgtattccactcaagtttacgcaactattataacgactactcgctagactatcatgtgacaatgtgctatgagcttaggtgttgaattgtatagtacttctttgttatatgtaagaattagctgtgctctggtgtggcctatgagatgccactagtacttgggcccattctagaacctgcaacaataaatgtcagacaatacgagcacttgccaataagtgccagtttgcttatcttcttatatttgcacacacaaataagtatatgctgaaaaaactatgaatgtttagaagatttatatctttcctccaaatgttactccaaatctccaatcatttgatgatttctttctctgtaagtcataaccagtttattaagaatttccagagttaggaaagtgtggtggtaatggtttctctatgcttgagatttggtattttataagacaaatttctagagagaaagtatgaatttcctccaagatcaagtacatgtataatcagctggaaaagaaaattttaatcgagttactaagatatttcgaacccattaaagtacaaaatgggatacttaaatcctctaatattcagaggaatactgaccctgaccttagacctaattaactggtttatactggggtgagttggtttgtgtgatttgccgagggcctcaaccttagagctataacttttaccttgaataatcctttggataaggcattacatcgaatgtttctatgggactgatccttactcttgtggctacaactgcatctaaactagtctgagatgtatatcgagtcaatataatcttattcaatttaattgacaaattaagcaaattgcttcaacttctattggtatttggttcatcagtcatctttaccaagctttgactttcctgcagataccgttgatttctcttcctgattccatttctgaacaaagtggttgctaaatactgtgtctttttacaaacagaagaacttgctttacttctgttcttcaatttattctttgtgtacctctcagcttgtacctgaactgataacacagagcctatcaacttaccgtagctaatgattgtaataggtcttaaaacaccaatcaatcaattaagtaaaaacttttcaaagatagttataccaactaagacacaagtgcaatttatacatcctagataatcaagatttgctcttctataatttcgggttaatttgtcagcttttctagatacaaaaactgaatggtcgtgtgtggctgtgtctagtttaatctcaaacaatacatgtttacccaacaattagtaaacagctaatctgcatgtaatttttttttaaatgagctcccgttgtaaaacgggtgcttccaaaaattgacgggcaggtcaaattgaaagtggggctcaacccactcgcctcaactttgagtgttcataacagtgggtgttggcacgactcgttgtctctatacaatcattggcgagtcacctttaacccctgacaggacgggatgtaattactgtacagttacacttaaagtagctaatctttatcatctaaagcaaagaagaaaaacactcaaagtagatagtaaacagctacaaaagaaatggattgtgagtatctagaaaaagaaaaggatggtgattgggtaatgtagtagatgataagttttggggaagaaaaaaaaaatgtaaaaggtcgtcctatgtcaaaatggattactgatatcactgactcgcattagcctgatagcagcttgacaaacttgttaaaatgaaaatcaacttaaataacacagcctctgtggttgttagaagatcaataagcatcacaaatccaatgatttctagtgaagcattctttatttttattaacataatggaactctatacaactccctaatccctactattaccacccccatcacttatctgtttgtgttgaaaggactctaaaaagatttacatgatccatgatttgta

SEQ ID NO: 227515 - DNA, 1772 bp, Cannabis indica
gactttaatagatcaaggatatgctattgcagctcaaggcgacattattgaggtgctctaggaagctcaaggtgatcgacgagcaaatggaggtgcccagtgataaagtcttggcgaataaggcgttaagggaataagactagaaggttgcagatgaggccaagtctactattcgtgaagcttaaaattggcatgacatggacgtgtgtagtgcctagacagagatcgaggagcttaagtccaaactgagtaagcttgaggaactttatcgagttaatctttaatctatagccaaaatgtctgtggagcttaatgaacttcacgaatatgggactcaactaaacaagatgctgagaggtcttccaaaagtccgctttgaccccagtgatatgcgagcactgtgtaaaatactatgaagatggagttttcatgtgctggaggtccaacctgtttgagcctcgtctcgacttccttcctaatcttgaagccatcttggcctattttctggagaagaataagaggttagatgccaagttggctgaaaaactgggcccccgtcttcctctgcgagcttagagcagcttccttgtctagccaaaatactatatattttttcttttggagttttcatttgtaattttttaatcttttttaatttggggaaacattcttatcggcctttccctaaggtttattttaatatattccttttctgacatttaattataagagtaatatttttatgcattttcattatacttatgcactacccctaagtgactaaaatagtttaatcttttagagtcactttgcaaagcttgtccttacaatttggaaaagattaatagattacataatattttttttgttcacttgactcacaaaaggtttttttaatcgaaaaactagagataaattaaataccaaactcttaattattgatagtacttttggagatgattagcatttcacactcttgggatcacgaacccattcatacgcttgagcttataagtctcgaagcctatttcatctttgatttcataaaattcttcccagttcaggcccaatacccccacatcggggtcttgtgaggcgggaaagacccttcttagaaccaggtcacctgttgagaatgtcctatttttaatttttgaattaaagtgttttgccactttcctttggtatgcgaccaaacgtattatgactcctcccagagttcttttacgaaatctagtgattcttgtagcaacgattgattagtggctgggtcataggcggtccttctgtgggagggaattgtactctctaccacgatcattgcctcacatccatataccataaaaaatggagaatgtctaatggtcgtccgagtagtggttcggtatgcctagagtacatgcgacaattcctcaagccaattgttttcacaggccaagagtttattctttagtgtgaccttcaatatcttattcatggcttctgcttgaccatttgcatgtggtcttgcaaccgtagaaaagcttttgatgactccatatttttttgtataattctgttaatcactgtaaaactttttgccattgtctgaaactatcttctggggcagtccatatcgacaaacaatatttttaaccacaaagtctagggtatttttagcattgattgagtttattggctcggcctttgtccacttcgtgaaatagtctataacaactattacatgtttgactctcccaattctcactaggagagacctaataaggtcaatg

SEQ ID NO: 227516 - DNA, 4250 bp, Cannabis indica
ttttttaaaataaataaatacacatcaaaattcatccatatatatatgtgatgtgttatatatatttaaaattcatctatatatacatgcatgcatataatataaaaatgaaaagtgaaacacatcaaattttgtaatatttcaatgttggataatggaaaacactagttgaccgaagttcaaaggattgtgtacgggataaaattgttcaaattaaatacatatatatatatataatcttatatttatatatatatataaaaaaatatttagttatcataagttttatatggtagttttttttcctaattgattttatatatgttgtacaagttgaaaggatgcatattaatttgtatactaacttttcatttttacgactgaatatgtatataattgaaaattaaaataataaattcatgtatacatgtgtataatttatatttaatttcatttgttacattaatttgattatgtgtaaatttacctctatgctacaaagtatatatatacacattattttgagtgtaaatacatttaaatatcatgaaaagatattgattttattttttaatttttttagaatgatttttcagacaagatgcaaacaaagatatcaactattttgataatgtccgtgtatgtttaacgtgtttagggtgtttgaaaataatcatattttataaatatgaattataataaaaaagttattttgtaacgtgatataaattaaaaaagaaaatggctattaattgcagtcctatttatttatttacatattacattgaataggtacaatttgagtatagaatatgttttttatactaaggaggttaagggtaaaacctcaaagagtgttaacaatagtaggtattaattaactctccaaaacaaggaaaacaagtgagattaaatcatttagcccaaataagccatagcattggctatgtcttttttatccttgggaattcaaaagaaattacaactaagaataaggccatttacgaccttcagtggcgctataaagctccttgcaataaaacatagggtttgtcaccccaagttggatgatcagattcacagctaaaatctttgcacaagtctcaacttcaagggttgatacagtcgtaaacactttcgttttaatcaaagacgcatgcccatgttcattatagtattgttttcgaaacaaagtgtaatagactcttagtagaaaatccactaatagtatgaaatggaaggaaattagcattgaaaatccactcaaccaactcaaaagcagaaccaaactgaaatgaagtagtacaaataccccatttgcttaaaaaccacaaggcattaacaatattacactcccgaaaaagatgcagagagtgtccaactcaacattgatgcaacacctaaacgacgaacaaaaggacacactgaacttatcgcttgtaagaaggtagtcgactaccattttcgataggaagagcgttaacctctcggggatagaggcttgctaaattttcgaccataaagaagaagtgacggtgaacctatgtttgttcaaagcccaataagcagatttagtgctaaagtatccatttcgtgaacccttccataagagtacatcatcacattgtggagggagtttttgacttaccataatttgctccacatcctttggaaggaatgagaaggaaattttatttcgactccatagccctgtatccgttaacagctcaaaaactttaggagtggactcaatagaacttggattgaaggccactcttgtactattccaatcatcccaatgcaaccgttgttaggtctatttttaggttattttagagtctagttttaggtttattttgaatgttttttggtgttcctcggatttctagtgatgaaatgatgaacttttgcgaaaaggaaccccaagtttaaattcttgacttggtacattctagaggatttaaaaagtcaaatttttcaaaagccaggatcaaaggtcgcaacctttcactaaaggtcatgactctccaaaagttacagaatgtagtttttgtagaaacgtcaagagtcagcggcctttgatagaaggtcacgaatcttgaaaaatcacgcatttgtaagaaaagtcaagagtcgcgactctctatcaaaatttgtgaatcttgaatttttttagcaacttttcaatttcgataaaatcacgaattggggctacatcagtggggatcattcaatttttttggacattggaggctaaaagtgacagctgaaagtggaagaacaccattagaggctagatgcatatttgaatttaaaaagtagttaaagatatcttaagatggttgagatattctctcaaagtagttgagatattgtctcaagtgattgagagatttcctcataaaaaatatcagtaactaaattcggttatagatatttatttaaataattaaatataatttaattcattgaaaattaactactataaataaaagcttgatttgagaaatcaaatgatgcttttctacattgttatttttgaaataccagagagaaaatttaacaagaaaaaattatacactttgtcctagtagcccacactactccttgtgtgtcgtggatcgatttggaagaatacaatgtgagatttattggatccaaattacaaaaagctttgaggatacccaaatagtcattaagaggtatttattttttcatgtaatttatgtttcatatttaatgtttatacatatggtgatcctcgaagctatggtacaatgataatcagattagaattattccactgcgaatctaattcagtactataaaattaacattaatgactggagtggttccattatgtatatacattaaatattgtgtggggtttatacatttgtgtatatatgtgatatgtatgtgaatggatagtaatattattatgaatgtatatgagatgagataaatcgttaattatattataaaattgggtgtaatttttgttattattttttctaggaaataatgtaagccatttatggggcataaaattttttatgtaaattttatttttctgaaattattttatgtaaattttttataatgtaatgcttaattcatgaagctcggtttcgtaacaaaacccagccatgacaaaccatcccacctaatggagcttaggttcactgaggagccttggccgtgaactattgccagcagccgcttgctacgggttctatgcccatcgtccagtctagtagctgattgcaccgagggacttcagtccctgcgatcaacgttgttcaatgatagtaaggtggcctgaccaccatttgaggggcaaaggacattcgaggtccctgtgttgtcactgaggtcgaagcattcaaagcatgcatagatgttggacgtccgttccttcccaacacgaaaagacctgatcaggtctgggtcttttggacctatttcgtgcgcctagcttcgatacctcctggaccgtggccttccatggccaccgtggccatagtggctccctggagccggtgaccacagtgggccatggtggccggtcccatatacccaaactccactatcatatatatgcatatatatatgtgtatatttcggtatatatgtatatactgttggaatttgtgtcctaaaagaaaataattagtggataatatattatagaatatatgaaatacaattaaaagataaataatcattaattacaatagtataattattaaatatctgaaaatttcttatacatatggagaaggtataatcttgtaaggatgtacaagataataaaaattatataatatgaataaaataagtcggtagtgtactaaaataatgagaatctttcatatgaaaatgctaaatacaatttactatatacactataaatatatgaaattgagctcttaataattatagaattatagttactggattttactacagtgttcattgatataatcaattccactgattaacatttcttgtgtcggttcgtaattagttttgattaatttactattttacctttctaattatttctgtatcctttagttctgttaattcactagagaaagtataatttaaatccaatttaaatttgcacgtaactttttcagttccagaattaacacataaagagaactaacattcgatccattaggaaaatcaagattctataattgtagatcatgttcccagccatctacattattagattccca

SEQ ID NO: 227517 - DNA, 2815 bp, Cannabis indica
gttacagttgtacgtggagagaaagctagaagagagtatgaagtcttaatacagaagcatagggccgctgttatcatacaaaggaagattaaaaccagacttgctgagaagactatgaagagagtttatggggcctcaattgtgatacaatcaggtatattgattatagctcctgaaactgtatggtatctgatgaatgctaactcttagctttgtgctttaattttttatttgtttcattccttacgatcaatttaaataagtattagaaaatttggttgaatgaaatacctcttggggagaactatttattggttttaattttgcattattatgttttgtttccatttcaatctacttccagcctgaatttaggatatcaattgtcttgttactgaaaggcatcaagtgtaaatataacatgttcagatacaagagctaatgcccaatgataatgatgtttgaattacactagaatcactgttaagatcagtgcatgcaaatcttggatattccttacggtcatggctagcagactctacactgtaaactaaagcttattattcttgacgatttccttttgcagctattcgtggctggttggttagaagatactctggtgatattggattgttgaaactgactagtacaaaggtatacctttattttatattgctaatatgaatttgattatggctttattggtttccatttgaagtatgctacttttcatgtccattccattgaatgaaacagttccatatgttactcaaacagttattgtgtttctcattttcttgtttttatgagtctaaaaaataaacaaaatggaaagataaatatggaattcattacttttataaaatggtggtgaaattttaggaaagttattgtaatgaatattcgttatttaatcataggcatctctcttactgctctattcccttttgcacaattctatatttatgtgtgtgtattacaatggattgttgagtcaatttggtttgatttgttaatgttatatggctaacttgttcttccaggcaaatgagtcagatgaagtgcttgtaaaagcatctgtactagctgaattacaacgtcgtgttcttaaggctgaggctgctttgcgggaaaaggaagaggagaacgacatccttcaccagcgtctccaacagtatgagagtcggtggtcagagtatgagttgaaaatgaaatccatggaagaagtatggcagaaacaaatgagatccctacaatcaagtctctccattgctaagaagagtttagcaattgatgattcagcgagaagctcagacgcctcagtcaacgctagtgatgatcgagagtgcagctgggacactggcagtaatcataagggccaagagagcaatgggctgagaccaatgagtgcaggtttaagtgttataagtcgcttggctgaagaattcgagcaaaggagccaagtctttggagacgatgccaagttcttggtggaggttaaatctggtcaggttgatgcaagtctaaatccggataaagaactcagaaggttgaagcaaatgtttgaagcttggaagaaagattatgggtcaagactgagagaaacaaaggtcattctgcacaagcttggaaacgatgaaggtgctattgaccgggtgaaaaagaagtggtggacaaggaggaacagcactaggatgagttgaaacagaataatgtaattcgactttgctaattatatagtagtcctttggcagtttctacatctggaaaatgaggtctctttcattaagaaaggtgagggccaaagagattaaaatgaaggtatactgcaaggatcaccagatttattatctgtaattgggttagttctcatattgtttttgctagccccttctgtttatggccacggtttgttgtgacgagttttgttattgctacaaacaaatatggtgcactacagagggtaccctattccaatatgtatatcatttttaatttatagtgcgagatctaaatcatcgatgagtaatttgttcgctgtaataatatcacagcgcagtggaagtttaatgccatcgaatgcttcaaatcatttgccatggttgatgaaaaagtctgtttttcatttctgatttgcataggggccataagggtagatcgatgctattaaggtgtgtttttattgttattaaggtgtcatactatgggattttggaagaattacatatatattttaattctttttaattttagcgtttatatattacacaatgcataacttgggattcgaacacaggacttccaacacacaccctcctgtgaccagtgataatttatttctaatgaatacttctggttctattaagattattgacaaaaataaaatttgatgtctaggaaatagaaacaggagaggaagacaagatattgagattttcatgttagttgcggaaagaaaatgaatttaagggtgtacaattaatggggtttatatttttttaggacttttttcatgtatatattaaaatggtcaaaatattacaaaaatatattgtacacaccttataaacatttatacagtcgagcaataaaaatttacaaaaatatctcttgctctaatcattcagcctcactaaccaccttcttcaacaacaataatttccagtaaccagaccagcatgccaatcgaaaagaaatcgagttagtcggagaatcaccataaattctggcgacttcacctgagatgaagaccagaagaaatccaaacacataaatcggacagaaaaactggtttgaaactaaaatttaaccatga

SEQ ID NO: 227518 - DNA, 1903 bp, Cannabis indica
ataacatagaaaaaaactagcataaaattaaaatttagtatacgtgcctcgcacgtaatttttgctagtattatagataagtacctatagtgtttaacactatttttatatagtgcgttaagatgaattaacaattttttatataataatttattaaattaaatattaattatttatacctttatatttatattgcttgacaacttaattatcatttctattgtgaataaacatatattgatgatattgatatgtacatgcacgcgtataaaactaagttccattaatgaaaaacaatcttggccgtagatgttgcttattccattattatatataaatttttatatatgatcacacttcaccatactaactacaatgacacacatacatatatatacattacatatatatttatatatattgggagagagaaagggaatgtagaagaagaaaaatttgattcttcactcatcagccgttaatggatggattcgaaagtgggacccagagagtgagagagtgagatagccaccatatgtatagtcgtagttatattctaacaattcttaatttataattgtcaaaccttataattaagtatatatatatatatataaatatattatgtataagggacataattttgtcctgtcaaaaaaatggtcctgtagtctagtcaccagtgaccaaatatgaggggctaaaatgtaaaaagtgaaaaggccattaaataaatttgtaaagaagaataaaaaaaatcaatgtactggttgaattggattaagattgaattcatttagccgttgaaaattaatgtacatcaaatttaatcgggtacatcttatatacttcaccattttcattataatattaatagtgtgattatttaataattacattaaaaaatataattaggattattatagttttattactggctataacaagttattaattggtaaaagattttatttttagactgaaaatataattataataaattatatacttaaaataaaggataattaccctatatattattgggaattatcccatatactttttttttatttatttttttaaatttacggtttgaatttttgtagtggttgcagcgctagttgcaataaaagtttctttacgattttttgttacaatttaggttgcagctagcgctagttgcaataggaatttttatgtagaattctgtaaaattgcaaaataaaaaactgttttgaagtgttaaaataaaaaaagccctatgttatttttttaactttttttttaaaaaatttaattgtttgagttgctctgataatttctatatatgttactatagggattttaattgcgatttaagttgttctattagtttactataggggtttctgtgaacaattcagtaaaattattaaaaaaaaaaaacaatattttaaagtgtaaaaattaaaaaaaaaaaaacttttaaaataaattaattttttaattataatatttaataaaatattttttacaattaatgtttataatatttttatttttcatttataaaaaagtaaataaaataatttatttaatttttcaattaattattaatccaataactaagataaatataatcggtaaaattattaaaatcttctctaaaaatatatattattgtaaggaatgagaatcgaccacgccgtggtataacaataacacaaaccctatcattatcgtagtgtacgtacccggcccccaactgtacacgtgtcactaccatcttctaccatatatatatatatatatatatctctataatttctcattttccaaccatctattttgttttattttgttttaagtacacgtgttctacagaatttgttgtctcgtggtgtactttcacagaatgtattct

SEQ ID NO: 227519 - DNA, 2823 bp, Cannabis indica
gtgagagagatgcaattttcctctgaggcaaggtaccatttaggctatatttccaagaaatcaagtaaaagcacaatattacttgctttaatagtgcaatagtagctattatgaagcaaatgatgtaaagcaattaaagagagacagtgatatatattacaaagcagaaagtgaactcatgttgaatagggagtctggtatctgtccatttaacttgtttgaagctcaaatctctataagaaaaagtacaattttcaaagttagaaaacaatgcaggttgagtagttttgagtcccgtaaggagcttacagttgtttcaactctctaagctcgccaatatttgatggaattgagccagagaaatcactattcctcatctgtctacaggttatattatgagttgtttgattacaatccaaaagttattacattaaaaaatcatataccagctataaatatgattatgtgctgagaaaattttacttacaagaatgatagagacttcatattggtgagaaatgcaagagtagaacttgcattagaaatttcactcaaccacctacatttatatagtttacacttaaggttattagctttaaatattggtgaatagaattcgatttgttgagcatgttactcacatatctgttaaagaagttagattcgcaaacgttgaaggtataggcccttgaatagagttccctgaaagtgccctgcattaacatatttaagtagagctaactaatgttgtataatcataacatacacacacacacacatatcggttcaattttcttacaagctagtaagatttgaccaacttcctacgaagttaggtatcttgccggtgagctcattatcgtccacccaactacatgttaaagatgtcattagacaatacttttttcttcttatataatagtatgcctgttaaatatggatgatcattaggtagaagaaatagtttacaatgtttgcatgctttggagatttgcaaatgttgatggaatctcgccactaactccagaactcgtaataagcctatcaaataataaacaataatgaaaagcagaggaatcaagatgggaacaatgtacagttgtaatcattcaagttgaataggaaatctcaatggtgttcatgttggctttacgcactataacaaaatgtagacaaataagaactttaaatttttattagaagaagaaatgaaacaaagacaaaatgttaccaacttacagttgttccaacttgtttaaattccctagttcaggcggtagcggaccagagaaattgttcaatgagaaggtcctatatacaaaattatctccaagaattaatatatatcaataatttcataaatgtggtagttttattttccacataactaactcaactgttttaactaataaccaattcttggttagttagtttgctatgcctaacagttggtttttacatctggtttctagtcaattcatccattttgtttgttacaacttcactggttccctaggtagctggctatttaactaggaggaaattacactacataccttttttaaattgatgtctttactttttatttggaaaacacattgaaagattctgtaagggtagcaagtgagagagagaaggattgtaaggattgagttgtaaaagtgtctctactgttcatgtttgagtaaatctctgtactggttgtttattgctcaaaaactcttgagccttcgattataacagacgtgattttataatgatccctcaaaaaggaactagagtaggccaatttggtggctgaactaatacaaactacttgttgtgttcttcgtgttgattcatcgatcaagatgtttcagctttgattcagtggtcttactgttttgtatatttcatttaatttgtgatataaatttctttgagttgtgttgtagaattacaacaataaactataaaagaatgcctattacttacaaaattattagctcagtaagttgacccaattcctttggtacctcccctgacagtgcatttatgcctaagctcctagtattacatagccaaaaaataaatcaaaaatgaaatagcaattttaacatatcatcatactaaatcttgttaatttcaagcttaaattttaggtaggcatagaacttacaagtattgtatgttagtaaggtttccaatcaatggagaaatagaacctgtcaataaattgctgctcaaatccctacaatagatggaatgaaccaattataattgcacaaaagtgataattaataacttaaaagctccaataaacacatacagataggagagaaaggtaagagtccatagttcttctggaattggaccaataacattcagtccactaactttcctgcattgtgattatgaccaaagtgtcacttaaaatcttctatttgataaaaatattaatatcattttattataagactttgggatacagtttagtaatgtggcagagagaggcattgctgaaagtgcagttgcatttgatcaagggatttaatgagtcatcatcgtcgatgtcgatggagtcatctacggcggcaccactgcatagttccccacttatgttccattgctgagtgccagcctttatcatccattgctcaaagatagagttcaaagctgtcactgccattgaaaacatagattgaacgaaatttaagagaatttacaagtatgtgtggatcgaaagcccgttagggatatgactctgataccatgttaagaaatatgagtatccatctcaaaactaattggtaatgagtgaatatggctcaatatttttacatt

SEQ ID NO: 227520 - DNA, 3270 bp, Cannabis indica
gagttgaaatatgaaattcaattcaaatattaataggatttgttttattagtattttattatatataaataatagtttattattttattaaataaaaataaaaagtcaccccataaatttctcataaaccaagaatttcagttatatagacacactttatatagaatagatatatagagagaggactttttcccatttaattaacgaaacgttttattatattatactaattaaaatatcacgcacttgttctgtctgaaagaaaaaaaaggcaaatcacttattctgcagtgaagacattataacaagaagtaacatgaatgtcctttgtaataaaaaggcctatttcacaaccgtttgtgtccaaaaaaagtacttacatataattgggaataaaaataaagtattggatatgcttccaaaaatgggtttccctgaaagttcttgggaattcccatcgatattaggttcctttactcaaaactctagtggttcaaataaatattaattgtgtttagctatagttacttaatttaattaagtttatttaatttcttccttttgcatgccccaagaaactaattaatccaattgatcaatcttgtgcgcactattgatgagctccctaactgaacctgaacgtacacattttgtatgatataactatatataatatttatggagcaaatgtatacgtctttgtagatgagctcacatccgtcttcaccaggcgaaccgcaccacacgaagatatatatatatcatttgacataaatccgtaatacaaggggaagaagtatttgttcaaaaggattataaaggaatataataatattgtaaagtgcacgaaggcacaatgtgaaacataaaaattaaaataaaatgcttgattcatattaaatattattagtcaaaaaagaaaattagataattacgtggggattgcaaaaacatataatctgatacttttgtttgttgggtaggtcaaagtatacttgaaatagctaaacgactagttattagctctgagtcgtataatattaataattaaggaactaaggaaaggagggtttgcctttggcacgaaggtcatcgctccaaacaagttaataagataattattattggaaaatgctcttgccttgatgtttttctggtacttcctatgcaacttcctcgaaagacatccaaacagctttctcaatacacttaataaatcaaaagccattccagctgccaataacccttctccttctaaattctaaactttcaactaaaccaaatttaactcctttcatatgtaccctttgttctcatccattgccacctctctttcctacataacttcccaaaacatatatcttatatatagatatgtagaaccacattgatcatatcattaattactcataatattttattataattatagcttcgatcgatttaatattattatataataattaattaatatggcgtgccaaaacggaggggttatgtttgaggatttctttccggccatggtggacaagttgggagctgaagggttcatgaaggagctgtgtaatgggtttcggttgttaatggactcaaggaagggagtcatcacttttgagagcttgaaaagaagctcagcttttttgggtttggaaggattgagcgatgaagaactaatgtgtatggttaaagaaggtgatttagatggagatggaactttgaatgagatggagttttgtactctaatgtttaggttgagccctgctttgatgcaaagctcagatgaattgttggaggaggctttgattagtggtatttagtaattaataattagtactatatatctatatactacgattaatttatctacttaattagttttaaaatggatatttttttttctatctctttaatttattaacttaatttagaattgttggttagagtctcgtgttgtgttggagagcgtattttgttttttcatgagttgtttctgatcattctaatttgtattctgattcttagaaagatcattatctatttcatgtttggtttcatttctttcgcgttaatcctaaatattataagttattagtaccacaaactaaagagaagattggattttatcagtgacggtcgactatagtataatttggtacttaattatcgactgatcatctcgttctgctatcacttccattggaaaattatttatcatatatataattatataataatatatgatacctcggccagtcgatgtgattagatatattagatacggagatacactgtacatatatataaattaataaatataatcacaatccctcatcatatttgacaacacaaatatagtttttttttaaaaaaacaaaagtcaactataattcttttaaaaatgaataattatcatttttatccataaatttttaacattaacaagttgtatagcttaagatatgtgtttattggatttggatttacccgattcaatccagttatttattgtatattaaattttgttctctaattcacttttatcaaattgaatcatccgatctgatccaattcaatggatgtattagattagatcaatggattaactagtgtttctattggattggattgaatccatccaatctattttaactatcatctaagttgatttcattgaaaacctaataattatacatacataataaacattagtttaattcaacttaattctcatgattctataataaaaccataaaaaataaaacttattcaataagcattgacaattttattagcatttagatagatggaaactaataatgttttaaatttaatttttttttctttaatctcgtgtgatcaatacatattaaatcaagtagtatattttttaaataaaatatataaaattataaatatatacttttaaaatatataaatataattggatgattattgaatcaatttgattcggttattcattggttcggatgtcccatccaacaaccgatctgatctgattgaattttcaagaaattctactccccagtaaaaaagttgaaaattttagtatgtgatgtaaaaactaagggtgggcaacatgcaatccaattcaattgaaccgaaccgatccaatccaatccaattacaaaaaattagatatccaactacagttggattggactgaatgctaaatgttggattctaattggattggatcggttattggatgtcaatctcaaaatttaattaaaaactgatccaatccaatta

SEQ ID NO: 227521 - DNA, 3184 bp, Cannabis indica
  modified_base (47)..(47): a, c, t, g, unknown or other
attcgatgactcggaaagtgtttgagcaaattgaagagagacattanatcttgagttcattgatctggtatgctcaagaggaaatgtagagaggcaatggagtgtttaggcagttaagagaagcataaccatgaaatagatggtttgttctctcgagtgttatgggagttttcgctgattttgcacttgtggaacaaggcaagcaaatccatgctcttgcttctaaaatcccatctggtttagacgtatcagtagccaattcgattctcgatatgtatctcaagtgtggttctatagatgaatcagaaagatttttcgatgaaatggttacgaagaatgttgtttcatggactgttatgatcacaggcttcggaaaacatggtcttggaatggaagcagtgagtttgttcaacaaaatgcaactcgaaaatgtagagcctgatggggtagcttacttggctgtgctctcagcttgcagccactcgggacttatcgaacaaggccaagagttattttcaagaatgcgtcgtgacagaagagttaaaccgagagtagagcattatgcttgcatagttgatctccttggccgagctggacaattgaaagaagcgaagaatctcatcgagaacatgcctttaaaaccgaacacagggatatggcaaacattgcttagtacttgcagagttcatggagatgtggaattaggtagagaggttggtgagatactaatgagattggatggtgataacacagtcaactatgttatgttatcgaacatcttagccgacgcaggctgctggaaagaatgtgagagattaagacaagtggtgaagagaaagggattgaagaaagaggcggggcgtagttgggtggagatcgaaaaagaggttcactttttctacaatggagatgattctcacccacttatagaacagattcatgaagctttgaaggaaatggagaagagaatgagagctgaaatgggatacatcccgggattgagatttgcattacatgatgtagaagacgagtctaaggaagagagcttgcgaatgcacagcgagaagctggcaatcgggttagcattggttcgtggtggattggaagaggatgaggatgagaagaagaagaagaaaacgattcgaattttcaagaacttgagagtatgtggggattgtcatgtgttcattaaggggttgtcaaaggttttgaaggtggtgtttttggtaagagatgcaaataggtttcacaagtttgaagatggcatttgctcttgtggagattattggtgataatatcacacttcaatacacaatatataggacaaagactatagtagggacactatttttgttggtacaatttttctatatcacaatctacattatagttataatacacatttgatctgttttgaaaattctttcatatcattttttggattcttcccattttttacatgtcttcatatttacatatttggtaggttttattaccaattttgcaagcaataccattaaatctacttgtaaatatgcaattttcatttgaccctccattgaataatctccattctctttgaatcactttctttaagaagttgctatagtcacccattatccaagctaaggatatatgaggctgtggatcctgcaaattaaagtagttatgaatttaaataaccattaatacatatttttgtttatacattaaaaaaagaaaacattagttttgccatatttttgtcttttaattaaaaatcaacaatacctcataatattcaggaagaccatgaaacttataaacttcattgactgcttcaatttgcttttttatctgcaatcaattcttgaggattattataacaaaatcactaacaacaacacatataagatcatatgaaaagacttatcatttttcacaaaattattagaagatttggtcacaacatatcaaaaaccaggtttaaaacagatgctttatttgaggatatagaatgtttaaatcttaatttcgacaacctaattaaacgagcattattattgagcacaagtagtgtccaataccttttataggtagcgtctcacgattggttaacaatattctttaaaaattattctcttaaattatatggagtccgatacttaattacactaatagtaatatgataccgagaaaagtgttaagcactaatagtatctttcaacaattctctaattaaactatgttaagcaaataaatgtatacctctgccaaaccagtagaagtaacttctaaagacaagaaagtacgagtacgttggtcattaacaaaaacctcccacttactaaaatcaatccaatacctgtttcataacaaacattcaaattttattatttacaaatgtaaaaatgtaaatatatgtataatcgtttcgtacgccgtactatatcatattgtattgtatagtattatattaaattgcatttcgtgtaatatttttatgtaaaactatatgtggtaatgacttttatgggtacctaaatatataatattttaatataaattaaaatttaacatagtattatataaaaatatgatatataatctaattcagtataatacaataaaatacgatctaatacaacgtaccaaattatagtagtaatatcacttttatcgttacttgtcagataagaagagtaattattttaactatatttagagaaattataaattttcttaataaagttttacactataattatagttgacaacattttcctattttttttaaatattataaaatttattttgctaaaaacagaatttaatatacatgtgtatagaaaaaaaataataataaatatcatgcaacatgtttaaaccttatttttaacataataaatttttctaaatttttttaaaaaaaataatagttataactaaaatgagtagtattataaaaaaacttaagtagctaaaaatagagattttcctactgtaggtgcaaaagtagtgtgtcaatagaattttttataaaacattattatgtatgcaaattaatgaaaaaaataaagagtgaggtacctcgtttgatgattaagcttgtgttgcagcataggaagaagtgaatgaaagtggttactgtcattatgattaagaacacagttcttcccaagcttatgtggaattctcttcctaa

SEQ ID NO: 227522 - DNA, 2172 bp, Cannabis indica
ttttttcagtttaagtttggtttacattatatacttgattcgtattttgtgtgtatataatatacggtagggtgtattatttatactgatttattttctatatactgtataagttgaggtatattgtctatatttatttatgatgtatacttagattaggtgtagtaatataattttgttaaatgtgtatacttaatagtttataatatatgtatattacaagtatttgtgatttttcagtttaggtttttgagttttggtttgcattatgtatttaattcgtattttgtgtgtatatagtacacaataaggtgtatttttatactgatttattttttgtgtatattgtataagttaaggtatattgtgtatattgatttatgatatatacagtaaagtatattgatgtttgtatttattacttgaggaagcatattaagtatgacaaaagtgtgagagttgttgtaaataccactgatttttatttttttttttgcagcacttatatttaatttgtacagtaagctttgtgcaaataatgagaatattaattctgtccctatggttagcaagatagttgcatatattactgggttcggtatattgtacggtaaattgtggttggttttagatattacatgctcatgccagtaaatgtaattgctttggcacatttctgcattttttacattaagatgagttgtgttaaggagtataattctttgagacgtagaaattttaatgacaacactagttttgtaaatgcttttattgttattctgcccaatttattgtctcatgtgaacttttatggtcggaggtcgaataatgacaagaacacaaagtatttccaaagagtaagtgagagagatcctttgaaagtcaagtttgtagacaatatgccacaacaatcttagtaactatattgtatacttatttatatatagtcattaactatttagtttacaatgacgctaactttgttgttttgtattttttgtagtgactgtggtacattcgttataaagtatgatgaatactttatacatgaaatgatcaactatgtccccaaatctttgaagatcgattttattcagaagaagatgtgtgttaatctttttgtgcatggtatgaggaatgagttgaatgaatatgaatctaaatcaaagtttcttggaaagatgtccaaagctggtggtggagctttaaggattagatgattagtttacagtcacccaatttgtagtttggaaaactttgtttgttatctaatgttgttattagcaaatgcagtattttggaaccttaaacatgtaacttttggttttatgtttgttgagctattagacatatgtatctatttttatttgtaaggtttcttggaaacttttatgtttggaacattattcaggtcaatagaacttatatacttaaaagtttatcatctactgatttaaacaactaattagtttatttgtctaaacaatgatcaatctaattaaaatagatttttttttaatttcaggtagtaattcaaaatcatatagaaacggataggagaaggtaaaatgtacattttttttgttcaattattgtaagtgttctaatggttctagtcataaaccataaattatatatattttttatttgtgtattagaatataggattttttgtctgatcatcatcttttttatttaaaattgatgattttattaaaagtaaccaattagtatcttatctaaatcataaataattggtcttaaaaaaatatcgtatttgtaatgatttaaatattatttgtcactttattttttaattaactaatcaaaatgcatatattaatttacatttaaaaatatgagtgacttaaacatttatgatatatattttttttaaaatatagtttactaaaatggtagcttactggattacaattcattatttttaaaaaataaacttgaaagttatttaaatgtattaatatatcctaaatagtgaattgattattaaagtgcatacatataaattttagaggtaactagaatgtatctcaaattatataatatataagtaatatttatttataaaaaagttacttattggtttattattaacatcataactaactaaaaggttacttttaaaatgcagaaaaattaaaaaaaaaaaaa

SEQ ID NO: 227523 - DNA, 3669 bp, Cannabis indica
ttgattaaaatcatgtgtcatgattaaaaaacatggataacatttatccacaagcttccagggcgtataatggtctgagagcttgcagtatcttctcctgaaagatttcaagcatgtggggtttacgacaaaccctttattacatgacaccatcagctaccaattaaagtgtcattactcagaaggcataatttcttatattttctcgttagggttttaaatgctgaattttgagtttcgcgtgcgtgctaggcgcgtcttatgcgggatgcccaaaaacggcagtgattatatttgagcggactttccatttgccatgaactttttaggatgcatgcaatgatgggagccatctattgggaggcaatacatcttctcagcttcctacttatccaagcgttagatttcccttggatgaacgagtcaaactgttcgcttctcgtggaaggtgcctcaacctggtacccattaaataccttaagcagcaactttatacttttcatttttttctgaccgtcgtactagagtcctttggttttagtcctttctctgccctgcgaggccttcttaacacctccatacccaagcacatattccaccggcaggaacgcagcactagggtcaccaacctcattttctcttagtaactggtaagctttcttcaccatttacttgttgtagagtcctgagggaattgtgcatgttgtgtgcgatcatttgccttggaatattggcattgtgcctgcagtctttgagagttctggggtcttgtgctatgttgacctattttgtttttgtaccaatgtctggcaagtacattaggtctgtaatggagaggaccggttcttccaaggcagagtgtgacaatgcccctgatagaaaaaggcaaaggcttgagatagccacttttaaaactagggctcacccccagcgtcatgatctgccactgaggttgggccagccccaattgtatcatccttcagccatgccaaaaataccctcagtggggttcacatctcaaggaagctcgtccctcttgatcctcttgacatgcagaaggagagggaagtgaatagggccttaaagggatgcttggaggtggagaggctacaagttcttagaagggccaccgtgttcttagcggtgcaaaaggccaagattttagatgggatgcccactctacctcctactgggccaaccgtggaggttgaagccttggagaagcgcctgtctattaaggtggggagagaggttgcccccttcactgccgagcttttggatcaggtggctgggaatgcctctgagctgcccatggagacttgggcgttctgcagcagcatggacatcttcatgttgcccactttgccaagctgtaggtagtcgaggtaaggcatcgagacattctcttcctctctttttcattttttagttctaccccctgttctaatactagggttatttcaatttggaccgtttcgacaggtggccttgctagcagagaggactacccaggaggctggcatgctggtgacaaaataggagcaagtcaaggtgaatcatcgtgacttgagcaatgccaacgagacccttctagtcgagctcactgaggtcaagcttcaagttgaaggcttacataaggagaaccacctacttgaggccaactattctcaacagactctcctcatacggggtatgaagaacattcatgacttataccgagagatggtggagcagtcgtttggagcagggtgctctggcccatcttgtgacgcccagtcttgaacttcagtaggcctttctgaattgttgtttttatttttttttttcttttttgtatatgtccctctttttgctgtaattttcaagacgcggaggtaattttaattttccctggctgcgggggctatttgtaatagtaactaaagtgttttgacatttcttgacgaagattaattttgatagagttcttaagggttgttcacgtcatcaaaacatctggctccaacagctagtgtttcaacctttcctgttagtcttaatcatctttcaatcaatctaggaatcattttttggctttaccctttcctccccagagatgtaatgcttcttcctgcaacttaccctcttgtttggaaaaaaccacctgtcaggagttagcccgaagacattttcccttgcaaaaaggatccttagttttttcacacattctcctcaagctttacttcttttacgaggttcagtctcgagagccacgcccacgactgctttagacttccatgcatttttcttatctagattgttgtcagcctgaagttttagctaatcatgcaacctaatggactaaacttataggaagtccaaagagatttgtaagaaggaattcaggcgtatttttcttttcaagaattttggccgaatacacatcttatccccggattcatacttaagtttatttgaggaaagaattcaagcgcgtttccctcgggaagacatagttgaaaacatttcattcttttggttacatgtgttcacttaaactaataactttggcaaacagacgtatgaaattactgttgtcagcaatcaggcgtactataccccccaaatgagctgagaattttagcctcaaattctcaatcatttgcttgaaatctaactcgttttcttttccagcccttgaggaggagatttaagtgtggttctattttgctctaggaaacatactatttactcgagccatgtcgttcctctccgtgatagcttgaaggcgaattcttgaaagtgtagcagtaatctcttggcttttgtgagaaaaagtcgtggatttataggtgaaaacccaattgtatggctggccccaaatgatccctccatgacatggaccttgtaaagggaaaatatagaccttcacgacactgtaggcttctggtttcccgaagggagagctgggccttcatctttgtgctggaaattttccttatgctgaggtccatttcaatgagaaagagttatgtcaaattttacaatggaaaacttttggctttgactaggaaaggctgagatgcacaaaaaattctaacacaaacttcacttgtaaaaactggagggtgtaacattgccgggtgcgtggcagacttcaagtagtccttttttttcaagaaggagggttgaagatgtgccacacgttcagtgatcttctacacacgagaaacattatgcatgcgagagtcatgttgaatttttatgtagcaagcttcagcttccacgagagaaggctaaagttgcataaaaattaatgcaatgacttcgcttgaaaagatcaaagggaggaagcatcacggggattaaacagacttcgagcagtcctaccattctgggaaagagggttgaagatgtgtcatacccccagtgatccttcttggacggaaaacaccgtgcatgcgagagtcatgctgaattttatgtagcaagcttcgatttctgtgaaggaaggataaagttgattaaaaattcaagctttgactttgcttgaaaagatcaaagggtgaaagcatcacggggaataagacagacttcaagttgtcctaccattctgggaaggagggttgaagacgtgtcctacccctagtgatccttctcgcacaaataacattatgcatgcgagagtca

SEQ ID NO: 227524 - DNA, 3437 bp, Cannabis indica
acataaaatcaacaagaaaacaacatcaaagtaacatcaaaataacatcaaaataacaacaaaaaaacaacaaaaaataatatacatataacaaaaaattaacaacaaataatgaacaaaatttcaacataaaaagactgaattttatgtaaataaaataaaaaaaatcgtaaaaatgtttaaaattctgtgaaaccgtatttttgttatttttgtgcatttgtgaaattaacccttaaaaaaatagtttttttttttctgaaaatgtaaatgtacttaatagcaaaaattattgtatgtcaaatttaaccatcttgtagcataccatcaaaaaggttttctttttcgctcatgtattaatcctagactagtaaatggcgttgtttatgcttaggctaagttaagtacttttaacaatatttggtgtaagagtgtaaatggatcgggttggatctgatgcggctataatccgacatgatctacatcatgtaaggatctgccccgctagattagatactcgaattggatcagatccgaccggccttttttttgtttgttttttattaagaattttaatttaatatctaaacttataattttatatccattttaattttgtattagtattattcaatacaatactatgtttggtattgacttgtattaatagattgtgtaaagctataatatattttcaaaaagctcgaccccaacaccaactacgggtcgagtccggatcccatgtctgggtttgggtccccagttcgggtccgtatcccagtccgggtctgagtcacgggtctgagtttggatccgggtttggattcgggtcctggtcttgggtctaggtctgggtacggattcgagttcaggtacgggtttgggtcttggtctgggtcccaactccagagtctgggtctcgggtccagatccaggtcttgggtccaggttctagtccctggtctaggtccaagtcccgggtccatttctcgagtcccacgtcctagatccgggtctcgggtatcggatcccgagtccaagtccaaattccgagtctgggtctagatttgggttccggggccagatctggtccggatacctggtctaggtcccgagtcttgggtccgggttcggtcccaggtccgagtccaggtctcgggttcaggtccagtcccatgttcgcgtctcgtgtctcaggtttaggtcctaggcccaggtttgggtctcaagtattgggttcgggtcaggtcctgggtctcaagtcccatgtccaggttcgtgtccgagtccgggtccgagttccaattctgattccgggtcatggtcccaagtttaagtccgagtcctagttctgggtctgggtctcgagccgcagattcgggtctgggtccaggtgctggtccgggtccggagctgggtccagggtcccggttcgggtaccgagtctaggtccgggttcgggtttgggtccgagttcgggaaccgagtttgggtccgattcgagtgtggtcccgggttggggttcggatccggatctggtcacagattcgagtccgggactcagaatctgtgcccgaatccgggtctgggtctcaaattagggccctgaattgggtctcgggtttggatccaagttcgggtgttcgggtctagttccgggtctgatcacgggttcaggtctagtcacgggttcgggttcaggtcctgggttctgagtcccaagcttggatcccaggttcgggttcgggtctcagacttggatcctaaattcgggtcctggtccgatccccaatcttggatccaggtttgaatcctggttggaactacatatatagcatgcacaatccagttaaacaatgccttggatggagcactcgggcttcttgaagtacctatctttgcgcaaatacaaatcaagagcattcgtgcttccaatgaactggtttctaaaaaaataaaaaaaaaaataaataatgatctttatgtttaagcaaacacaaatacccagtgtgcagttgtcatatcaatagagcacaagcatattaataataatcataaatgaatgatcgtatattgcacagagattctccacatttggcagacactggaacgccaagatggaattgctatcttgtcccaaatattattcagatcagaagaacgaaacaaaatgaacaatgtacccaagacaaatgctaaacaaatgggatcatccatttgacatttcaacaaatcctcactaaaattatccaatatgatatgacagaaaaacaggcaagaaacgaatgtgtccttcctcgcattattctcgaattttgagatatcatcccgtatgttgtatcctaaaacaaatagtttgtattcgataattgtcaaaatcatttttattgtttcacttaaccatcttttatagcattagcactaaacattaaagccttcagctcggagacacatacgatgagcctcgatccattttgtacaagcgtcttccccatgttccacaatacattcatctctcagcctcttggtatctgggcaggcacagcaaattttcttcttcggctttgtttcaggtgcaggcttattgataggtgtttcatgtttttgctgggaacttgccaaagctaaagtagacgaagtatcgtctgttggtaacccacccatttcagaataaacttggaggaaatgaaattgaactctgaagacaaagaaaaaaaacagaggatcatgagcagtaatggaagtattatgcacttcaaagctcatgggttaaactagttcaagtaaaatattgtctgataaaatgaatgaacacaaaaactaaatatgtctagacgactagaaggttgaaaaacaacacatgaaatatcaacagcaagatcatgttatgtaacaactgagcaaaaacaaagtctagctttattattatacaattgcacaaagtaaaagctacaaatcaaaagtaaaacccataaaactgagcataacctcaacttagatataaaagtaaaataaaaatcacagttgaagatgccctcattgattgtctaggcccgctaagactggaatcaacttaaagagaatttccagttggattttcaatcgaccacatttactaaactttgaattcatggtggctcgtagtgggctgtaattggaaatcaaataaaaccttgattcatgcaccaaaagcaaaatccaatacataaacaaaagattcattaattattagtactagaatggtgaattgttcttcaactggacatgccacaaatcttattcaaccgtgaactcttttgggcctttgatcaaacatatggtgcgtgtattgttatatatgtatgtaaaaaattcaaactcacaacaggatacatatatatatatatctataaacaaaaaaaaaaacaaaaatttgcagaaacccattaatctacatg

SEQ ID NO: 227525 - DNA, 2412 bp, Cannabis indica
accgcaaagaatttcaaactgcattttttttgtggtgtggtgcggtgcgggcggtttgagcggtttgatgaacacccctagtcaccggtctgttgctcctttccttcgttggtctgctggtctggtggacttctttcgtggcctctgaatagagagagggagggagggttgggaagggtattaaggtcggggtggaactgggaagggaagggaaatgttttatttttagggtttcacttttgggtttagggatgatgaaaggtatataaatacatattttttttaatatggaaattaggtttcagtgggttccatgtgtaacccggttacaaaaccgtgaaatatgactaatctgaacccaacccaattagtaaccaggttacacccgaacctgcccagtaaatcttaaaacttactttttagggtttcacaagtttgagtcggtcgagtttcacgagtgggtgggtttttgagtacaatttatctgccctaagaacaacactttgaaagtccatctcaaaccaaatattatccaacccaaaaaaaatgacactgattcaaagcattgcgaaaaaccatcgcttcagccacctcgagagcaaaccatcctttaatacgccaagcaccgaaagcaatcacttgctccgaagtgtcccaaattaccaatctcaaaccacaaaaacccctcctagcatcaacaacaacaactatattaaccttataccaacctatcagtggtggcagccaacaagggtgagccaccgtactagaaagtcaaggactctccaccgtgatgcaaaaagaaacaccacttggctgattagcacgttgaaaagcatctaggaagtccatagtccaagtgaccactagatcatgagtaagagtagaattattatgaataaacatatttctaataaaccaaattctctacaaaataagcaaaattaactcaagatgtggaatgaagagtttatccaaaactcgcaacacaagtctgtaaaaatcatagaaactcaatgatgggtcacccaaagaagtacgagaaagtttcctgattgccaataaactagagcacctccataaagcatgatgagttgcttccattttagctgagcataaaggataaatcccattagaatgcacacactgcttattaagattagccatggtaggaatctaactagacgaagctctccaagctaacatcttaaccttaggaggaatagataaactccaaaatttcttccaccaccctacgggcccactagaagaaggactactcaaactcaaattacaaatagccaaccgataaccacttttaacaaagtacaacctagaagaatccaaactccaaattaacttatccttagaagcgtgattaggccaaatgatagaaataatagctttggcctcataacaaaatagttttccaaactccaaagcatgttgtgtttaccttaatcgtgtcgtgtcataaacgtgttgacatgaacacgatacaataacacgcattgtcagccctatttttcctaaaaaaaaactcgttgtcatgcaattcccaggacttttagaatgatccatttacaaataaatactttggacatcaatatcaaaaaaaaaaaaggcctaaaccattacgcatataggagaaaattttacaaaggaaaccgcaaaaaacttttatccatagaccatagaagaaggattatcagaagtgaaaaagagaaaaaaaaataatcatcaaaaactagtcacttcctccccatctctggagaaaaatttttgaaaatctcaatcctagcattttgagaagaaatacacttgtgaaaataaacagaatttcggtcctcaagcttcaaccaactagtattagcccgcgaggcccaatgcttctcctctttctcattaagagtatcaagctctttctctaaatgatgaagtccatcacaactaactgcagacaagtcaacatccacgataacaagctcttattaatagctgtttgacgacgatgaaccacacggttccaggtatcaagctttgaagtcacgacctctgcattcaagaaaatattaataatagggtttgtgtctctgttcatcattaataacctttacacattcctcctcaattgcctaagaatttttaaaataaaagcgagatttaaattgaacatggtttccccacaaggccataccactgcaaacataaaaataggcttatgatcagaacccgtaaattcaagattaagcatattagagttaggaaaataattagacaaactcgcactatagatgatcaagcctttcttgtacaatagcaggatcacgatgcttattataccaggtaaactttggcctcgaaaaatccaaatcagtgagaaagcaatcagcaagagcaggaaaattattt

SEQ ID NO: 227526 - DNA, 1711 bp, Cannabis indica
aaatatatttataaacaaaaaattttaaaccaaatcaggttaaaataatatgtcattgttggcatgaaattttcattagaataatctagcttaatcacttcattaataaaaatcttcattaacaaattatatctaaaagttgcaactaaaaataaactaaattataacgataagtgtaatctagtaatttacatctcttaaaaaaatatatatataacaagttggaattcctttataaaacaagtaaataaattgcatacaagtaaatctcaattttgaccaaaaaaatgcctcttcattggaagtttgtttgaatatttagtcttaaccttgttttgtgtttttggaataagatattttcctagtgaactcttcattatttttttctttagtcttttatcttgggttttggagagcaaaaattgtagactttgtagttttgtaactgaatgaatggagtgattacaaaatttgagggtcacatagaagttggtgaaaattctatgtaatagcaggtttactaaaataattgaagtcttctcatatatataaactttaattatatataaattttttactctcgtgataaactaaacatgtaacaaacattatacaccactactataaaaaatagtattcgtgacggttttaaaaatattgtttttggggaactgtcgctaaaaaaattaagtgagtgtttaaaaccgtcaaggaaaattggatattcccgacaattttaaactgtccgaaggtataggcgaggatttttaaacatgtcttaaaagggaatggcctacggtttaaaatcgccatcgtcgcctataatattgccgacggttttaaaccgtaggcaattctcatactttaattttacacgtttcgggtctaaaatgtcatttcccgcatcttaaattttaaatttttactttccctattttaaattttattttcctccttttaagatataaaccccttcccaaaaaaaattatatctcatttttcaaagtttctctcctttgcgacctcgagccacgtcggccgtctctctcttctactctctctctctcactttaaccctttcctccgctctctcatggtagcataaaggtaagctcaacattctcttatttgttgtttaaatttctataagtcatgatttggtttgttgatattgatatgcgtgtgtgttcgaaataaatgcgaagaatgtttcaaggatcgtcaagtgaaaagtaatttgaaacttgtcaaagaaaattttgacgaggatgaagacgagcacaacaacggtggaagaggatgaagcttgtaaggattttgaaacggatgcaatatatgcgagaagtggtttcgaggaggatgacaacgatattttttttgggcaatccactatagcgacggttagtatagccgacggttttaaaccgtggcctatagtcgacggtttaaaactgtcgagaattcttttataacaatatttttccactgtcgcctattctacccagtatttgcgacactcgtacaggcgacagtgttatagaccttcgggaattctttacccgacggtgtaaaaatgtaaagaccgcttagtttaatttggaaattagcagttaatcacgtttaattataaaattatttatagctatttaaataattaattatactgttattattgaattatgggatgcattttatgtcattcagtagtttt

SEQ ID NO: 227527 - DNA, 4001 bp, Cannabis indica
tcttattaattattccaaaaaaaataatgtattatgtgattatttcaatttagtgataacccaatattagaagcccaagcccaaggtcaatatcagaacttgaagcctatacttgaagccaagccatagtcagcttaacttcattacttcacccagcctctctctctcttacttctgtgactaactcatcaccggtgccctaacctccttcactgctgatcggagagaacgaataccgtttgccttcattaccacctgcgcttcactcattgctctgataaacaattacttcactcacaggtaccggctttcatctatttttaacttctctccgtttctgtttgcttctatggttgtgtactgtagtttcatttatgttctctgatcagtgttaaagcaattaaatcaaccttctgataaatggcttagaagaagagcatgtgttattggttttgaaatatgctagtatattgatttgattctgttacggtgtaatccggattaagttctccacttgaaacatgtagtttcattatgcagccctaaatgcagagaaacgattgaaactttatctggttgtttgatttttctcaagtgattctctctgttcggatatgattgagctattatccatttattattttttcctttttttttaatggtgtcaggtttgtcataattaatttatcatgtttagttctaagatttagaaattgtgtataaatatgttgtaattattatacgagattttgttctcattctttttccatttgaaaaaaagaaaatttcatatttttgtaattttagttctatgggattacacctacagtaaagaaatatctgcttctttcatacgaactacatggtatttgttcctcgtttgcatccttgatcactctagatatgacatgactaataagttcgtcaatggatattattgtggggatttttttttccttttagtactgtgtttaagtaggataattccgtatatggggctctgagaaataaaagtattggttttgacgaagtgtttggtgacattgagaaacttctctccaaataaaatcatatttatggtgtttctaggcaatttgaattggaattattctcatagtgacaaattagctacctttgcatgcaatgtggagcaatgctgtgttgttgttgattggatagataatttgtagttgaaaggcaatgctcattgaattaatttctaagtaatgacctgttccgagaagtttgaaccaaacatgtttttagcattttattttttgaaaactgtttatagaaacattagccaaataccattttgtgaacaaaattattttctattctcatttctgagagcagaaaacattgcatgcctaattcattttcactcgtgggtgttaaagattttttgtctcagtcctatggatccatcgattctcatagcgaagctgctgcccccagaaaggtttgtgtgataccctgaccacctttgtctcatttcaattcttcctatgatcattggtgtactgaaaatctgctttgattgctgcagaggagattcataccaaaagcaccccctcgccgggtaccaaaacctgaagttaaaacgtaattgtctcatgtgctgaagtatctacatgctacccatgtatagctaacgttttattatatcttgtctctaccttattgtctaactgcagcgaagtagttgaggactctgatgctgaccaggctagggatttgttgagacgtttcaatgtactactaattacttgatctctcattccgaattcttttgaatgttcgaatgtgagttacggttctcttgctctacactgtttatgttagcattatgatgtttcttcctcctttgcatctcttgcaggaaaattcaaccagggcaaggcctaaagttgaaaagaaaggtagttgttcttacctatcatgcttgtcatttccctccttttttcaaattttattgacaaagttttacttctttaatttacagtgacagcttcgcgaattgcatttggttatggtggtgcatcaactaccattaaatcatatggtgctcctaggggtggtagtaatagtcatcaaggttcagcttccagtggtgtgcaattcattgttgcagcttttcttatttgcagtgtatgtgattttttctgatgtctaacgctgaaaatcatttttaaacaggtggggcatttccgccgggtaatatagaggagaaagagtacaaagagccatgggtatgtacatcaccattgatagtttgtagttttctgttctgaactatctgtatctctcatctttttatgagaattttgacagtggtttctttggatgctattgcaggactactacagctattaccctgcaactcttcctttgaggaggccgtattctggaaatcccggtaggttctagtattgcagttttcttagttattgagttgaaatcattgtcctattatgctcagtttttttctttttttctttttccctctactgtatttagtggtatctaacttcttggcattactttagaatttcttgatgaggaggaatttggggaagatcctgaaactattcactatgaagaaagattagaaagatcagcaatggaacttggtctaatggttggtggtgataccttgacattgatcaaatgttccgtgtaaaatagtcagatttacttttgatgttttctttataggaggagaatccagaaactagtatgctctttcttcagttgccaccaactatgcctctgatgaaacaattagttaccaatgatggccagccagtaaacgaaagcacacgggcacctttggctgcgaacactgtcaagaagtcttgtgcattgaacgagatacctgcaggcttggtgggtaaaatgcttgtatacagaagtggtgccatcaagctaaagattggtgatactctttatgatgtgagtagagttttcaactaaatccaatcaaccaaaaccacaaggattatatacgcatcatcattattgttatctgcttaacttaaattttttaagctaatctaaggtaaatatgaatttttttaattattaaatgcaggtctcctcaggtatggattgtgtgttttctcaggatgttgtggctatcaatcacgctgagaagcactgctgcattgttggggagctcaacaagcgagccgttgtaacccctgacataaaatccattttagatagtatagaagatttgtgattgttgttgatcatttccaacacaattttgatttatagatgatttattcataagttttcttttaaatgaaaaatataggaattcaaataacttgagctttcatttcgtttgaaagagagaatatagatgagagattccaatgtaaagccaaaatggttttcattcaaaatgtatttgctggtcaaatttatttccattatttatgtcctttttagtaaatttcaaaatttttagcaaaattttaatgcttgattgcatatcatgctctactatcatgctttggcaatttcacatacgcatttgtgattcacaaacttcactatttccattattaattaagccttgcaaactgactacaaacttagagctggtgtaacttaacatgggctccttgttgtggttgaagagtcataatagtataatgagcatgaggatatgagcagaatcatagccactgtaatctttgctgctaacatagcaaaatgttgtccattgtaggtctttggcccccttccaaacggaaagaatgctacatggtggtctttacccgcctttgaaattcctccaaagaattttttaggattgaattcttctgcatcatcagtccagatcataatggaagagaaacttatgtaggtttacatccaccctaccccgactggaatggtgatgtcctctatttttgttttcttgtaagcatgtcgatattgaacagcaatcactgggggttttactcttaatacttcactcactgtca

SEQ ID NO: 227528 - DNA, 982 bp, Cannabis indica
ttttaaaaaaaaaaaaattaagtttaataagtatagaaaatcaaatttcccattcataatgacctaccaaatggaaaaccagatgacatggctaccaaataaaacatatgggccctaagcattaggaatacacaaggtgggtttcaaaatcaacaagcagtagcaaataaaaggcaaaaagtttgtagttttttttattattattattaacaatctcttaatattaaagtatagaagctttcaagacaacatttaatgacaaagttgcataataaaaaaaaccctacaaggtaatatttttttttgcagtccctacagagtaatattagaaccaaattaagctcaataaacatagaaatatagaaatacttggccacaaaatatgattgagacattagacaagttgaagaatatggagaacaattgatctcaaggctttctatatgtttgtttatacaaaaagtgacaaacttgtcgttttttttaacccaaaaagaaaggaaaatgaaggttttcggttacttttgaatgttttagaaagtatgaaagccatccttgcaccaaacgtacaaaacacaactgatcagggtaggtttccctttctttttcttataatagaaaatatacgatatttgaagatatcaaatataagcttccaaagcagatactccatatcacttacagttcattattaacaactaggatatgttttttagtaagtccgaacttaaataaatatttcacatttttttttttgaaagcaacgtatgaacttttgaccatcctatatatacttcttttataatatttttttccttctttaacagtttgtccattactaccacttaaactttaacttacaagttaaggcaatatagccccctccatttttatttaatttttataattattcgttattattaacccaccaacatgttaaaacagattagacaatacgttagcatatatataaatatatata

SEQ ID NO: 227529 - DNA, 3974 bp, Cannabis indica
ctcttcgttagagtttttgagggaaatgtgaaggtgcatccgcctcagggacactgattcagtagcatacctcttgggaatttcaggatcaagccatgaaccttttaacttgtgtcgacttttgacaggtacattatgtctacttcgaagaagacggaccttgttgggatggcaagtagtagttcttattctaggaaaaattagaggctcgaagtgtttgctcttggaatggggtccacctctagcctccctattctaaactccccttagccctgccaagggttccttgtgtggggttcgccttcccctggaaggcaatttcttttcaccctctcaacttgcagagggaaaggaaatgaacaaggccctgaatgggcatttagaggccaagaaactaccggttctccgcagggcaattgtgatgtcgattgtttgcaaggccaaaattgtagacggcatgcaagctgtgcccccaacaagttagatcgtggaagtcaaggtcctagagaaacagatggcctttaagctaaggcaagaggccgcacctttttccatggagcacttagaccaatggtcgagagtgcttctaatctgcccatggaaacctaggcatcttgtagtattgcgcatatttttgcactggcccattccacaaagcggcatgctattagggtaagacttcgagatgtttgcctttatttttgcttttgtttacgtctatttgtcctgtcccctgttctggcactttagctttctaactttgcctatcttttgacaagtggccctattggcagaaagggctactgcggaagtgggcatgctggtgacagagttcgaataggttagggcgacaaaccgtgacatgtgcgtcgccaatgagaccctctagccgagcttactgatgccaagtttcagattggggccctacagcaggccaaccaacagctggaggaggaaagtgcctgacaggcatgattcattcacagtatgaaggccattcatgatctttatacgaagactatggggtggatatcaagtgcaggttcgacctctcagtcaattggcgtccaactctgaacttccagcaggcctttgtaaatctgtttgttattgtttgttgtttttttatatccccttttttaatcacacttttctattcgcagagacaattaatattttccctagccgtggggggcttttaatagtgaaataggatctttctttttgttgttccttccttggagatttgttgtagtagactgtctaggggctggtttcgttaatgaagtacctggttccaacagccagtgtttcaacccttttcctttagtcctgattatctcctggtaaattcgggaattgtttttctatttgacccattctttcttggtgataagatgctttttggttcgccacccagaaagttgtttgtttggccagaagatggcctctctccacaaaataggtccttcacaatttcttacatcctcttcaaggtctaattccttcacaaggtcgagtcccgagagtgatgtccgcaactgccttagacctagatgttttccttactttggtccttgtcagcctttcattcaagcctattgcgcaacttgatgggataagcttacatgaatcccatggagatgtttaagaagagattcaagcgtgtcttttccttttcaaaaaagatttggctgaatgtgcttcatatctctgggtttagtcttgagtttagctcttgagggaagaaccttagcgtatttctctcgaggagactttggttaaaaccatttcccattttttgttgcgtgtatacttttgggcggaatgacattggaaaacagacgtaagatgttatagctttcagcagtcaaatatatcataccccttaaatgagcatggaatttttcactcaaattctcgatcatttccttagagtctaacttgtgtctctatttctgaggaggagagttcagcgtagctttaccttactttaagaagtatattgtccttccagtgtagtttctcaaaagtgcacaacaattgtcaggtctctgggaagggaaaacatggggttctgggcgagaaccaggttgtatatctcaacaatttcttcatggcataaaccccgtatgggagattctaggcttctcatggcatgggaagctattggtttcccagagggaaagctgggcttgcatccccgtgcaaccaatcttccttaggtagggatatgtgtaagggaaaatcatgttgagccccgtggcagcaaactttccgctctcactgagaaaggctaaaagtgcgcaaagagttcgaacattaaatttggttgtaaacaccgaagggtaaagtattgttgggtttgtgagaatcacattgaattcttatgggacaagcttcgactttcgagaaggaaggctagagttgtataaaaaatcaagcatagactttgcttgaaacgatcaaaggggaagaatcacaaagagtaggatagacttcacgttccttccaatctaggaaggagggtagaagacatattgtacccccagtaatctttacctgcacgaaaaaggacgtgtatgtaagagtcatgttgaatttttatcaaataagcttcagcttccgagaaggaaggctaaagttgtataaaaattaaagcttagactttgcttgaaaagatcaatgggaaagcatcacagagagtaggatagatttcaagcagtccttccaatccgggaaggagggttgaagacatattatacccccagtgatctttcctgcacaaaaaataacgtgcacgagagagtaatgttgaatttttatggaacaagcttcggcttcttggaaggaaggctgaagttgtataaaaattcaatcttagacttcgcttgaaaagaccaaagggaaagcattacagagagtaggatagactttaagcagtctttcctatctgggaaggagggctgaagacatatcataccgccagtgattcttcttgcacaaaaaaaacgttcccacgagagtcatgttgaatttttatgaaacaagcttcgacttccaggaaggaatgctaaagttgtataaaaattcaagctttagactttgctagcaaagatcaaagggaaagcatcacaaagattaggatagacttcaagtagtctttccaatctgggaaggagggttcaagacgtattgtaccgccagtgatgtatcttgcacaaaaaacatcgtgcacgcgagattcatattgaatttttatggaacaagctttgacttctgtggaaggaaggctgaagttgtatataaatttaggcttagacattgcttgaaaagatcaaagggaaagcatcatagagagtaggatagacttcaagcagtcattccaatccgggaaggagggttgaagaagtatcgtatcccaagtgatcttcttgcaacaaaaacaacgtgcacgcgagagtcatgttgaattttatgaaacaagcttcgacttctaggaaggaaggctaaagttgtataaaaattcaagcctagacctactcttaaaaagatcaaagggaaatcatcacaaagtgtagggtagacttcaagcaatccgttccaatttgggaaggagggttgaaaacgtatcgtccctaagtaatctttcttgcacaaaaaacaacgtgcatgcgagagtcatgttgaatttttattgaacaagcttcagcttctaagaaggaatgctgaagtggtataaaaattcaagcttacactttgcttgaaaagatcaaaggaaagcatcatacagagtaggacaaagttcaagcagtccttccattccagaaaggaggattgaagacgtatcgtacccaagtggtatctattgcacgagaaacaacgttcacgcgagagtcatgttgaatttttatggaacatgctttagctttcgggaagggaggccgaagttgtataaaatttcaagcttagac

SEQ ID NO: 227530 - DNA, 3398 bp, Cannabis indica
ttttcacaccctttagcttccctttttgtaaaataggtttaataaagggaagcttaattaaggtccaaattgtagtagtgcatatttgttgaacaccttgagtacttaaaaggaataatactcataattttgtatgtgtagtacttgatataaaaactttcatacattatacaatatgaatgtgatatcacaaaaatgtgaatcatactaattcaattgtatgtaatttctttttagtgctacatataagactttctttagacgaaaattgccatgttctggctgtttagactttttagtgatgttatgattaaccaactaacttttaaaagaaacttttgaaatgaatagtaaggcaaaataatttatggtacaaaccaattagtacggtacacaacatttgatgtatacatgctgcaacattatttgtgatactcactattgaaaaattggttttttcccgacgattttaaacaattaggtaaagtatttccgtcaatttttataaccgttgcctattcgatcgtcgtaaaatggggagaatagtactatatctattattactttcatcaagcaaaataagcatatttagatcatatgtggggcatactcattattcttacataagacctacaagtccttaacaaatttcaaagcaaacctatccttttgagatagtttattttcattaacaaattagttaatcgagctacgtttattttgagtttttatatctgactagaattacaaggtaattagctaaggaaaatatctcagattctagaaagagatgctagagagatgctctgaccttatgggacttagaaaaatgtgaaaaataaacttatggagctctccttttatatgcacggaagcccattaaaataataataaaatattacaaaacatataaaatatattatctatggtgatcatgaccattgatagtgatccaatggctgagatgctcatttatgactttagatgatgattgtcaattttcggagatcgaattgcatctcatggatcgatttagtggtcacctacgaaaaaaattacactttaacttgagaacaatcttttggcatcaaatctttaaaattaaggtataaatgtgagatctaggtagaaatatcttttcaagatatttctaatgaacttgaaatcacgtccattggagtaatattgaacgagttatgactgttttactgaaggttgttaacaactctactaggttgacattcctgcgatttaggagttgtccaatgtcaacttagacactgtataattgagaaatcatgctagaactgtattttcttgaagtctatgtgatatgttcacatcacttaacaaaatttttggttttggtgaactcatttacaagtttttggagactttgtattttcgcgaaattgagagactctaaactgcccgatttacaactacttgatcgatatttcactttgctgaaaatgtgaagcatcaaagtgtgaatttgacttgttacaagtcatagatctcatttactatagaaaaataggtaaacgctcgaagctgatctagaatctgatatgtagaacccagcgcaccaggccatatgtcaacctgagcattagggttttatttccaagtctttaggacatcatttttgtacttccatcatacttgatatacaaattagagcgcttcccctgttatagaccaagataagaagaatgcctaaagcaaaatttgcgtctgagtagcaaaaccacgcgcaccaagttgaatgtgaacctgggcactgggaccagccctagtgtcaacctggatgccggtcaggtctttttcccccaaatcctcttgtttactccctgatacacaatttttttctgcaagtgtacaacattattctagcaaacttttaattctaaaaaggttgtctaactcacagggattgattcttaaatttcaatatttgattttttattttatgctttatttagaaagttcaaagtaaataatgattaagatcgaaatactgaaataactgaaaagtaaacaattaaataatggtttaatgacaaagtaaagatttagagcattgaattccccatttcaaactatgaatctcaatttattctataatttacagtttcaagaatcttcacgtactctattaacatctctcgaattatgatagaattaacttaattaataagaaaatatctctattctatattaatcaatcaagtaataataaagcaatatgattctcatagaattagtagaatctcttcgtcttgctctttttctatgtcttgcaattttaagtctttttttagattacctttctcaaatgtaaaatataaaatcttaatactaattaatagtaatcaaccattaacaagatggtatttaacacaaaattgtatcaacaagtagcaggaataaatatggaaattatcaaagaactttaattcataatctaaaatacttccatcaatactcacaaaaaagtatttagttcgtaattacaaatataataaccacattgttaatttaattttttgcatatttaattgacaaaaatattttattatttattttatatttcagctggtgtgtttaatttggtgtccatattttgtgtaattgaatttggaaggaaagttgtctagttttgctatttatagaaattgaggtaaaaatagtaagtttggttacacaatttattagctggtatattctgatctatttgtgagttttctattttgttagatcagatttcttgaagagaaaaccagagctaaactatccttttctataaaaggaaagtgcacttactgcccacgattctgtagatatagaaatggaaattcttgggctgattgaaaatttattttagggaattttctagtgggctggggtcttgttcagaccgtgtgtaagctgtcaataaggtatatactgattataaatactccttatagcaactaggtttagtacctatcttggatctttgaatttcactcatatctttagaaaagaaagtctttgttttgtagagaagagcttcttcaactcttactctatttatttgtattttgtattgtcttgagtctgtattcaagtctacaaagaagaagaacatcattgaaaccttcagaaaaaggttttacaaagctttcgggagattacttttcaagtcttgcatcgggaggaagcaagcactcttcaaggtgatcgaagggatttcgagctcttagagttttatcaagattcggttacaaggtggaatacatcaagattgtggcatataataagagggagtctatgttgggttttatgcactaaataaagctctttacaatctaattagtaatcaatataagatatttgaagtgatttatgtttgc

SEQ ID NO: 227531 - DNA, 3028 bp, Cannabis indica
tctgcaaatctgtatgcaagaaactgcgaaatctgatctcgaatgttcacttcgctaaattgcattttgctcgtgcaaagccccaattgttgatcaggactcttgatccgactcgaatttcgcgaactctgtacttggttgagcctgatattgaagatggacctggtttcgatttagaatgctgctcgtgtgaatggaaagagaaagatgataacagttattgtcacatagaactgaataccaaattgaagatcccactgcgaaatgcagaaagtgttttgaattaccaaattgatcatcctgaaacgaagcataggaagaagcgtagccttaatttgaagccaaaggatcataagtacaagattgtgaattcttgcaatggattgctttgtttgtctgagccgtcgcggaatgatcccatttcagtttgcaatccagtaacaggagagttcataaaccttccacccagtaattgcgatgatgaagctctcagtggtgtcattgattgtggattgggattcagtccagagagtaatcaatacaaagtcattagagtttatcagaagaacacttatgttacacgtcctgagaatcattacgatacctctttcagatgtaccaactcatttgcagttgtacacactcttgggacagattcatggcgtagtgttgatcatgctcctcagtcatgttacaagcttggatttcctacctatcttgatggagctctgtatgggctttatgtcaaacacgagagaccaaattatataatttcttttaatttcgaacacgagcaattcgagctacttgaacttccacgccaatgctggcactcgtggtcttcgtggaggaatatgagtctgggagttttacgtggtgaactttgcctatgcgatggttctgacatttccatgaagatttgggtacttaagaaacgtagcgattttggtaaatcttgggagaaattgtttagtatggactctgattttccatatgggttatatcaacctattcattacttcaattctggagctcttttgttgtttcgtaacaacacgagtggactggtgtactctgagtcaggtggctacatgttcaaatatcttgggctttgtggccctaaatcaaggtacgaagtcatggttcacactcccagctttgtttcgctcaaggacattgttgctgaaaataataatgttgagatactcaatgtcaatacaaggtacgtatttactacaacttgttttctctactttgattattttcatgtggtgagttgattagacattggagagtgtttatgtgttaaggttaattactaacattgagcatcagtactatcattattacataacaaaataccattgtctctctaatttttgaccaagtaatcttaatctacaagttattttgattcacaatgatgatacagatgtgggagcttgaaactgctaggagagactaaagctctgtttttggagggacaagatgaacttgatgggtatcttgatatctctgattacgaagttgaagaagattactggaccaagtacttgtggaggaagcattgacgtaatctttctagtgtgcttataagattagactaatagatcaatcaagctgatgtttagagtggtaatacctttatttctccttaattaactttttgtcatattggagatagaatgtttagtatatcaacacttatatgttgttggatatgattgagactgctttgttgctaacttgctagtgttattggttattagtattacatgcaaagttcactttttcacaacttgatcaatagacatgcctatctattttaccctcgagataaatatatatgtgcttattatgtattattacttgaggctaatcaaaccatatgttaattatctcagtttgtttttcaaatttttaagttatacttgcgatgaattatataataataataagaaaaaaccatcaagagagatgtcatagaactgaaactgatcatatgagattgaaggtgtgagtgtgtaaattttgtatatgtgttgtacttctttactgagcaaattatgctatgtaagtttgtagatgagatcctagtcaaaagaatattcatatccatcacctttttgttagggagtttgtggaataaaagaaaaattacattgcaatttgaaataagcaaaagccaacttaaaacattttacaaacaaaaaaaatgcagtttataaataataatttttaatattatcacacgattatatattttacaaaacataaaaactctaattattttgttaaaattattattgatttaaatacaacaacaaaataataataataataaaaaagaaagaatatgaaaagtttgaaaaaaataataaataatagtaattttttttttttttttgcttaaaaacaataattgaattgaaaatgatttttgagaattggaatgcaagtcatcaatgacaagttgttagtttagcccttcgaaaagttggattcattaaaaaaaaaacatgaaagacattaaaaaaaatatattagatcttttattttttttggccttatgcagtagtccaacttatataccatatgggccaatcctcacactaaaccaaaccaccatcttagctcttttgtagtttgattgtagctttggtttttgaattttgtagaagatcctctttttttaatgaattaggatctttttagaggatattattagtttgctatccaactttttagggacatctttgatttatgtttgtcatatagatgaattaaccttgaacttgaaccttagatttcggccccaatgccagatctcggcccccgccctagttttaaactcaacttaaataaaataaagggtaaatattattttagatctgtattttgcaaaaattaccaattagactttctgttatattaaatgataaaatggactttatattttctaaaatggttaaaaaaggatcatgagctccattttcaacaattttttttttttgaattaatgtaacta

SEQ ID NO: 227532 - DNA, 2556 bp, Cannabis indica
taaattttttaatatttaattaatgattataaatatcaaccattagatatttgatctaatggtcaaaaataaaatacccatgcatgggtaatacccattaagagcatacccatatatatatctttttaaaaaaattattaatataattattaggtggagtatattgagtcccctctacatatgctatgatttaaaaattaatgatatatattattgttacaaattacaaacagattatcaaaacaaagccacaacacaagcctttattatgagagacaaaggtgaagaccacgataccattgtggtggcctttagaggaaccaaaccattcgacgccgacgcatggagctctgacatagacatatcatggtacgagattaaaggagtaggaaaaatccacggtggcttcatgaaagctctaggattacaaaagagtaaaggttttcctaaagaggttggttttgaaaagaacaaaccctttgcttactacgaaattagaaataaggtaaaaaagcttttggaagaaaacgacaaagccaagttgattgtaaccggacacagcttgggtggggccctagctgctgtgttcactgctattctttcttatcatgatgagaaatggttactccagagacttgaaggagtgtacacctttggtcaacctagggttggagaccaaaccttttgtcagtttatggaagataaattggtggaacatgatattcattactttagattcgtttatggttacgatttggtcccaaggcttccttatgatgatgattcattaatgtttaagcattttggcacgtgcgtttatagtaacatgcattacctggcaaaggtacgtaccatatataataatatagtaacctattattaattacgacctttagtttttacatgtgtattagtatttaactatttatatagataattttatgggtgtctctctatgctttctgtacttgtataacttatatccataaagcttattctagggtgcagcatcttttcagagacctaagtactattaaacaatattacaattaaaactttggaactcaaatctttacaaagactcaaaccaatcaatatctatacaattttttttggcacaacactattaatcatgtttttagtttccttaagtattctttgaactaccaaatcaattcagttcacttgattcatccatatagcttcattttgaacttttacacccaatgtatagccacgaaagttgcatacaattttttgcaaaatttactgatcaattgtgaccaagatatgcccctaatcaaagcttctagaaaaacttaaatatagttattatactgaacacatatatcaatgaattacatgtgtttattattatattatatgcttatacacaatcccattcgaaatatataaccaaaaagcaggggtacaaatgtttctagaacaagaatatctggccataataagagaatattcttctgacatttctaacaagaaagagagagaaagagaggcttaacagtattcctaatcatcacaaattatggaaaaaatcaatggccggacactaacagccataaagaataaaatatgaccaaaaagggactggtaaccaattcattttttaacacctcctctcaaatcaggtagggttaaaaccacacctaatttgtcaatacgaaaataaaatcttgagttgaaaagacttttagtgagacaatatatgcaacttggtcatttgatggcacatatatctgatgtcaagaatcttagcaagcactctgtctcttgtatccaattctatatgctttttcctaacatgatagacaagatttgaaataagggcacctttgtccatgttgtcacaccaggttacagagatttcttgaagaggaaagttcaattctttaagtaaatattgtatctaggccaattcagtagagacttaagtaagggctctatatttctgactctgtgcttgatcgagagactacaacttacttcttcgaggaccaagagataaccaaagtaagcaaaataaccagctactcacttcctatcatcaaggcaaaatgcccaatcaacatttgaatatcttgttagagcaaatctgtcgatgttcttaatgtgcagtccatggttgatggtgcctttcaggtacctgagaattatcttggttgcaaaccaatgaacctctgttggagctttgagaaattgactcagcttgttcacaaaaaaactgagatcaattctagtgtgtgttaaatattgcaaccttgtaatcaagcttttgtactcagtaggattttcaaaaattgttccacctaatatagatagcatttttatcactgtcatgggtgttggacaaggcttcaaatgtgtcatattgttgttttggagaagttctaatatatatttagcttgagataaatacatccaagtgtcatcgtagtggagttaaacaccaaggaaatagctaaatgatcccaaacacctgattcaatttctttgtgacctgtcttagcttctttgagttgttgcttgttacaataa

SEQ ID NO: 227533 - DNA, 2877 bp, Cannabis indica
gatcaagttaagattaacgcattaagacattttaaaacttaagttactaaaccgagatatcacttcatatggattaaaatgcttcaaatgggggaaactatatgctctcttcctatcgattccaaaacttcaaaccaaataaaaagcaaaagcaaaaagaaagaaaaagtgcctcatcatgttcaatggttagtgaaactgattgctgaccaaactaactacataggggtcgcacatatagtgctcctgtatcagcacaaaacatagatcttttgagcaatgaaattttattggcagtgttgtgcactagccacagctgcagcagcagcttccaaaattctcctagcttctgtgtccggctcaggtaactcacttgggatctgacaaggaagatcattaatcaggaacataaaaatggattggtcgattattgaaatgcaaagaatagctaaaaagaagactgtaaatgtaaagagagatatatgcacagacctttccgtacaagttcggcgtagtaggtgacgctccagaagccagcaataatcttacaatatcatcatgctcgcctctggctgcatgatgaagaggctgaaaaagaaaatataaaaacaatgagcactgtagagtgaattttgtagaggaagtaacatggaaaattagactaaccctttgtttggtagagtggattgaaggagggatggattaaggggtgtggaatgagacaaaccatccttaggttgcttttgtttggtaagagggaaagggagcaaatgatggaaattgctatggattgtcaatctcttgggaccaaatgatcctcacacatatgggtggattgaggaaaaaaattaaaacgtacttttaaaataattatatggctaatttttttaatattgttatttattgtaaataattaaaaaataccacttctttctttccttcctattataccaaacaaaactaaagaaagatccaacctatactcacttagtacttttccatacctcttacatagtctatcttttcctatttcctatttccatccttcttaccaaacaaaggataagaaagaattaaaattgaattagctacttactgtatcaccctctgcatcaactgattctaacatcctctttaagcagtctgcattgtttgctcggctgagtagaaattggactatttcagtgaaccctgcaaatatccattgaagcacataagttacaatcaatatggaaaactctcaacagaaaagattatcatttatcaattataatggcaaacctaccactggcacaggcatcatgtaggggaatagccccatcttcatctttagcctccaagttagctcccctttctatgagtaactacaaggacacaactactctactcagtataataaatctaaaattcaacaaaatgaagataaaaaagaataaatgaataaactgtttaactgacctgaacacagggcaaatgcccatagagacaacaaagatgaagagcactgtccccgtcttctaccggttgatcaatgcttccttctaagttatctgcgtagaggtaaaagaagaaaaataaaacttcttctccattcaaaagtccaaacgccataatcattaaaatatataatgtgataggttttcccagagaaaaaggtatagctttacaggatcatatagacaaattttgtttaaaatctcaaaattcaggttgtattaagccaaaattaaactttgagaccatagagtagaaaaccctaggttcgattctggaaggttgagactaaaaaaaggaatggagttttatgtttgttcgttggtgtttttggtgggttgaagcaaaacaaatgaatttgggcaatgaaaatgcagaaaaaattggaatcataaataaaaaagataaaaaaagtgatattaaagttgaggaaaagagaagaaagtaccaagagcgagacggaaggcgtcgacgttgccgagctgagcagcggaggcgagggcacggaggtgaggaggcgtgtccaagtcaagctcacccaaatcttcgtcgaaaagagcattgtcatcttcaaagtcatcttcttcctctagaccattacgcctccctggaaccgccattttttcaattctccactatctttctctctcagcttaggggtttttggtttttcggtggactgacaaaactaattttctttaatgcataatgtttctcataacgtagtgtcgtttatcataaattatgtcgtttcttatattattgatgtccactttcaattgaattaaaaaagtgaaaattacataattatggaatttgataagaaaattataaaaatatgatgttgccccaagtttttcctaatatacgtggcggtctcagcataggacacatggcgaattaagacatattacctggagatgagcaaagtacttaaccaaatcccctcttaaggtaccaacaactaattcaagagtaggctcccgaacgtgggaagggcaaccctgcatcccttatgcgaggtgaagggcgtatgaacccttttgggctagcaaaactagagatgaattgtcacctcgcatttaatacggcatgagggaagcgtttaggaacacccataagaaggcatgttagacgttataaacccgtcttttaacaattacacaataattaagggtgccagtgacagctccattatgaagaatcacatcaatcaagaagggatgaaggctaacctcacctaaaacctaggcaacctactacgtaggttgcgcatgtcctattttatacatttgggaacttgtgtgcgcccaaggatggcacttaaagacaattaagacatttcttcttcctaccaataactataaatacccctcaacaaaa

SEQ ID NO: 227534 - DNA, 4143 bp, Cannabis indica
gcactttattcttgaatctaattgtcttcaagctatccaattgatccgaaacaaagaggacgggatataaatggagaactagaggacattcgtagattattattgtatgataatgttgctgatattttctttgtatatcgtgaagctaatcatgtagtttatagtttagctaattatattttgcgtcacaaaattaatgttatgtggattgggattaatttctcttttatgtgagtcgagttttacaacttgacttccctaattctttgtaattgtttttatttgtaaatgaattccgtttcaacaaaaaagaatcttttgatgtatttagaatttctctttatgtgttatatgactagagataatttttgttttataaataattaataattattaaattaaattatataaaatataaaatataaaatataaatattacttttgatatttctaagtattaatatgattataaataatttttttaaaatattataattataaatatttcccgtttccttacttgttattgtataaaaaataaataaataaataaaataacacagctattatttttccttttctttttaaatgtgttttggttttattcacagaagagcactattgctatgtcgtctcttttcttgatctttatcctaaatttatttatttattaatgttgcagaaaccgggggaagagggcatgtgatgtggggttgcttctccaaatttttataatagaaattttgtatagaaattttagcggttaatctttttaaattattattttatttgtactcaatttttaaaatttaaaatttaaattaataaattattaaaaaaatataaggtgattctacaatggactcagggatgtactgatacacttttactaattttagcatccagaagaattttttaatctaatttttttttttcatattatagctatttaagataacttgaaaattttgagaaattctgaataatttacaatataaaaaacaatgttcaaaccgtctattttacacgcgtataaaataaaatagtcacgcatgcaatacacggtttgaatgtagttttcgacgtgttaaatttttttaaatttcttaaaattttgccgaatgtcttaaataactataacgtacatgagtatgaaaaaaaaaatttactaaaaattattttaagtgctaatacagataaaaatgtattaatatatccattttaggggtggaattgtgttatctaattaattgttactatcaaatattattattttaaaatttaataataatggtgtagctaaagttggacctggtgcctataagagacttgtcaaataaaactctcaaacacattatacatctctctttcttcgattatattctacacagtaactaataacactaaccataatccattagagctagaaatggagaagatagaacacaccatggttcgtacaaacggcataaacatgcacgtggcgtccatcgggagtggtccggcgatcctcttcttgcatgggtttcccgagctctggtactcctggcgccaccagatgctctccttatcctctctcggatttcgtgccatcgctccggacctccgaggttacggtgacactgacgcgccaccgtcgccagattcgtactcggcgctccacatcgtgggtgatttagtgggcctattggaccatatgggcctggaccaggtgttcttagtgggccatgactggggagctataatcgcctggtacttctgcttgtttaggcccgataggattaaagctttggtgaatctcagtgttcccttctttcgaagagaccctactattaacttcgtcgaaaaattcagggctgcacttggtgatgatttctacatgtgcaggtttcaggtgatttatttgtttatatatggatctcaactttaaaattagagtaaagaattgcaatttaattaattcttattttaatttatataaatacgattctcaacgatttttttttcaatatttaaacttgttttaaagatgaatttcaacaattaagaataagattgctttctgtaataattaattaaataattttttatttttataagtaaatttgtcataaaatatcataaataattgtataattagtacaaaaaactttttacataaatctgtataaaatctcttgtattgatgggacatttatatatatgttaaaagggcatttatatatttttgaatacaagtttaataatatatattagttttgtgtggaaagttatttaatattttaaaaaatttcacaactttatgtgttacaaaaatgaaaaagtgaagagaaaaaagtgtgatttgccaaaaagcaaaaagaaatgctgattaattatttttttcattttaaataaataaaatcagtagtattggtcataatgggcgtgctaagtgaaataataattgaggtgtaattattattaaacaataattggggccttattttttgtcaaaggtatataattgagttaattaaaaataatttatatggctattattaatggtttggtaagaccaaacactaataaagtaataatatttaagtttttttggtgtaaaagatattattgtgagataaatttaattaattaattaatagatatctggagaagcagaggaagatttttcgtgggatacagtgaaagtatttacgagaatccttgcaaatcgtgatccaaaacctccattgatccctaaagaaattggtttcagaggtatatacaaagacccacccagtttgccttcttggttgtcccaacaagacattaaccactacgccactaaattcaaccaaactggatttactggtggattgaactactacagagctttaaacttgtaagtagtactcttatatgatctataattaattacttaaattaaattgggaattttattattaatttgtagatatatatattattacagaacgtggagtttgacagcagcatggacagaaggaagggtgaaagtgccaaccaagtttatattaggagaccttgaccttacttatcattttactggtatgaaagagtacatacacagtgaagagggtctgaagaaagatgtgcctgcattggaccaagttgtaattgttgaaggagctgctcactttatcaatcaagagaaaccacatgagatctctaaacacatttacgattatttcatttccaaattctgatacgtaaatcatcgcacccctcccctcatcgtgcgtctcaataattaattattataagtattgaataatatatatatatatagttatatatataaatgtatgatcgtataattaatgaagtatctgagtgatatcatgaagatcctatctttttatattctagtcacatcatatcaaaattcaagaaaaaatcctaattattaacttttttttttttttgtagaaattttccatgttattataaattaaaggtcatttacaataacagagaaaataggataaggtatttctcttatccaagttacatcttcatccaactctagagcgtacttagctaagccatgggcagcttggttagcttgcctacgaacatgagcaatagtaactccagggaaagaggataaaagacaacgaacatcatcaatgagatcagaaaaacaagacaagtctctatgaaaagaatttaaagctgaggagactcgtagggcatctgtttccacaaacgctagaggtaattgatgtttagtggcccaaattagactgtggaatagcgccttcgcttccatttcatcacttcgaaaacaaccttgagatggtttagaaaacgcagcaataacttctccttgattgtttcggacaactgcaccaattcctagcttcttatccgtaatattgacagcagcatcaacattcatcttaagagaattacctacaggcggggaccaggaaatcacatttgtttgtggccgaatgcttccaggaggttggacttgtaaattttgtgccaactgacgtgaattttctgcaatattctgcaggttttcacgtgatacaccagcaggatgagagacaacagaatgctgcttctggtgtgtgatatgctgaagtgaagaaactccatggtgagtattttttggca

SEQ ID NO: 227535 - DNA, 2112 bp, Cannabis indica
caattaggtcctaagacccccattctcagttcttgcaaagttgggaaaactcttcgcaagatgagatctccaacatcaaatgtatgatgcttgactttagaattaaagtgtttggcaatcttgccttgatacatctgtagttgaacttctgattgttccttaagctctttaattaaatttaatgattctttgagaaaagtgtggttctgggctggttcataagtatctcttctatgagagtgaactgtggtttctactgggatgaccacttcacatccattagccattgaatataatgtgcggcctgttaaagttctctctgtggttttgtatgcccagaggacttgtgggagctccttcggccaatgggctttacaagcttggagtttttttttcaacattaactttaagatcttattcatagctttacttatccatttgattgcggtgtagtcatagttgagaagctcttcacaattacgtgttacttacaaaactcattgaactgataactatgaaattactacccgttgtctgagataatcttgtgtggatgttcaaagtatcacacgatgttcttgatgaaaaaatccaaggccttcttggaggtgactatattcattggctctgcttctacccatttggtgaagtagtcaacaacaactatggcgtacttcagtcctccttttctaatggggagaaatcctacttagtcaattccccaaacaacaaaaggccatggactgctcatgagggtgatttttgttggtggcgatcgcggaaccttggtaaatcatttgcactactaacactattggacataatctatacaattgttcatcattgtgggctagaagtaaccctgacaaaggatatttttgggtaggcttggtccgaaagtatggtctccatagaaacctccgtgaacctcatgtatgattaaacttattttagtccccgctatgcacctcatgtatggcacaaacaacccaatatgataaagcttcccatctagtatcacatattgggaacctgatactagaccttatgggaagtttctttgtcctctaaaagctcacccaaacataagaactagtggatgagccatatctaggagttggaatgatcagcgatggcatttaaccactgtgtttctatacttaaagcttttaagtgggccataggcaccactccgtattgaatgatctcctggtctattacaagttctcttcgaatatctgcaaatgaatttttgcctgaaggcctagcaaatgtcgttgcttttgagactttacagcagttcctgggacatcgtcacataggtagccattctttaacctttggtctgatattccccagatatttaattcaccaccgattgggaatcactatacacttggatgcattgggcttctacttccttggccaatcacaatcttgctagcatggtttgtgtttttcttcattattagaggtagggaatttgaaatagagagcactttggagctgatgtccttatggagagatcagtatgactcctgctccaactcccttctcatttgatgctcacttaacatagacattccaagttggtgtgaccaagactaacttatctaggaggtcattcagtcaagaacattctacgatgaagctagacggagcctgccctttgatttacacccttggttgatattagctgtgaaattggctaagttccatagcccatgttagcagcctactgaatgactctggcttttgaagaattttgtcgagaggattgtttgtcagtaccttaatggtgtgggcttgaaagtagggtttgacctttcttaaagagactattaagaaaaaggtcaatttctcgagcatgagatacttggattccacacctagtaatcttttgctaatacagtacaacggtagctggacccttccttcctctcccactaatgtggcacttatggcatgataaaatactaccaaataaaggtacaactacttaccttccactgactttgatagaactggagtcttggtcaaatgctcttgcaatttttggaaggcctcttcagattccttaatccattcaaatttcttttttcctcaaagcac

SEQ ID NO: 227536 - DNA, 3724 bp, Cannabis indica
ttttaatatataaagatatatatatatatatatatatatatttatatatataaagaaaaaaaatgttgtctaacttgttggttttgtttttggtcgtattatatgttacctctgaactctccttttcaaagagacaaactgaatgaataggaaaattagttaggccaaaattcattatgaaattaatttgatcatatatactattttttatcttttgtaagtatatatttatttattattgtgtttaaaagataaataatgtaacggtgatgtatttatgacacttaagaaattgttatattacaaaatgatatcttagcaaaaagaaaaactacacccatgtctgtgttatgtgataaatagatacaattcatataaagtataatttttattagggtaataataatagatactaatttaattaaagttgatgatttttttaatttcattatctacattaaattcatttacgaaattcaattttaattgaggataataatatattttattttttgttattttaaaaaaaccataatactttgggtagtggattaggtcttggatggcttaaaatgcaatgttggataagtttggtcccgtcatggattagggcctaaggactgaaaatagcagcccatctacgcatatggaccaccaactttgttttctccaattgcatcaactttttgaacatgcatagcataataagtttcgaaacgccatactaatcatgattttatttacagaaacttttattaaatttatgtttaatatctggtttaataagtatttttttccattttttctttgcctctaaaaactaatcaaaaaataaataaaacaaataaataaacaagagaaaaacaaaagacaaggaaatcaatttttttcaatgcaattttatttccttactaacttccaaacacagtcttaattttactatatataataaatataagagttaatatgtctttattaaataaacttaaaaaattaaagtttgacagatgcaagattactttttacatattttataacataatagattatcatgaaaaatttgaaaacagaaggaatgattaatattgaaggtgatgaaggtgaatctgatagccaagttgacaatacatcactattatgattcaatacatctataagaaaaacacaccaagtaaagaaaaataaaaattgatgatgagtccttttctgtcacattatgttgggatagcattggtaaccaatcatttattattgtttttattttatttaattctcaacttcaatagcatgctaaaatgttgtattgcattcctttgagaaaagggtatgtatgtatgtaagtgggaaattgatgaagaaagaggtgggtatggtgaggtgtggggctctctaacacaccaaaattattaacccacaaacaaaacaacaagcgtgtttgatcatacaattctagacagacactatcatacacttatatttcaaaaattcataacatgggctctttttttgttattgcaggctttgatgttttagtgcttgtaatcattttgttttaatttaatcatgtattacaaatttcatcatctaatgggccttaaaagggcccattaaagcttttcttaatatctacaaacatatgatcgacttaaaactaattaatgagactgattttcctaattttgttttgttatagttgcacctcactattattacaagccactaaatccaaaaaggattggtatgaatgaagtttagtgatgaagatgaggcactcaactaaagcgtattagattctatgcacataaaccaagttgtaattactgtaattaaacaggattatattaagaattaaataaaaactagttcgatatgatttgtagggtgagagaaaaacaaaaaaaaagaaaaagaagaagataatggagtccaaacgtgaggggacaaaaggaacacaatccaacacataattagtaaaattgatcaaaacaacgtgttttaagggatgaaaagagctttgggctttgaactttttcaacttagcccaatgttattatttaatttaatttttattttagagtttttttgagtaaagcgaatctttccacacccacttcccatttcaattttcaactatacacccaaaacgacacaataataaaatacaacttttttgttctaacttctaagctctttccccatctcttaccaaattttcatgctacttttctaatatatacaaaaattatatacaatacatttatgtgagttttcaacaactacgaagtttgggtccacatatgctaaatttggccaagttcatccacatgggtgagatttggggaaaaactatagaaagtaaataagtaatagacgataaagtcattaaaagaagtaaaaaaaagtgacaccaacaaaaatatttaccctttttcatctttataaactcaaaagacacttcctttccctaactaagttcacatgaaaaatacattgaccgaaaaaaagaatacttatgccaaaaacgaacgttttaatacacagttctcagctttctataacccaaaagaagattctgcttcactaatctctgtaatttatttattttggggttacattttgttcttgataagaacaaatgctgcctaaatcattgccaatttgaatttcttttttttaaaaaaaaaaaaaattaatttcagctttcgagtttccaagttcaaacatgctaaaaatcttgatagctagacttaacagccgaatttaccaatataccctggcaatcacatgacctgcttgttaccccgattgagacattttactccaaagactcgcgaaagtaaattaactgccgacgaagcagaagggcattttagtaatttcacggtaaacaggccatcttctcttctattatctgttaataatacccataaacgatgagaacaacattgtgtcgctttcttcggccgcgaaagtgaattgtgaaaggaggactgatccgtcatttcgctttctgattctctaggccccaattttatgggtccactccactccacaacagtactctcgtctcggtggtgggttagaaaaatggggaccatctcactgagccctcctcctcttagccccccacccgtactaggctcagaaatttatcactttgctggagggtataatagtaatttcattacatgggccaattaagtaagtaagtaataataatcaacaatgatagtttttctcgtataaaagaaaagataagattaatgagagaggaataaacgggcaagcggcgaggtctctactcgtgtgtgaccctctgtgtcagtcaactttgcttgaccagctttatccaaagtaaccaaattattactatttaataataattacttattatcatcataatttgttttcctactttcttttttttttatttactgaagcataaaaggtttggtttcgaagcaatgggacccaaacattgtgctcccatttatttgtctcttaataattccatagtaaaatgtgggtcccaaaaatttcccactcagaagaatatttttcaccgtctgattatcattaataaaaaaagtgagaattgtagtaccaaaagagatatacttttcttaagaaaaaaattgacacgttttattgtgtttttgtctttcgcgtaattatgttacacaaaatttaaatgaatgatattggttgcttcttacagtacacc

SEQ ID NO: 227537 - DNA, 4396 bp, Cannabis indica
gcccccatctagtactgaaagagtaatccccttttatatatataaaaataatctagaaaaagaggggcgaattcgcatcattgattcatcatttggatccaatgggttcttagtgggtttatcacaaagaataagcataattaatttaaagctattggtgacagatgtctgaacatggtaaaatcttcaggagagcactaaaaatgggattagagccgttggttattggtaactccactactcaggaaattgatctagaaaaatacaattagtacaaaaacggcataaatcgttttatgatagcatgatgtgtgtgtgtgggataacccccaatcccagacaaagacaacagatatttttgggttctgtagttggcccatgtgaaccatatctttgacgcaacaaaatcggttcatgaataataaatagtagtaaggttccttgactgttcaatctaatattctattacatgcatcaaatatttcttttgtctcaaattgtaaacatacggaaggattattatatacagataagaatttattacacatgcatcgcatatattttcttagtatttaactcaaaataacgttggcacaataacagtttgtctcctcagaagtcagaacagcaaaaataaaacgcacaacttaattaacataaatgaataaataaaaaatgtacacgatttcattttgcagtcaagaaaatgtgatccattatccaaattgataatggatttaacaacaaatagtgtaagaacagactagaaattctacaaaatggagctgagaatgatggattggctagttaagatctattctctagaaccaacacatgtatcaatgaagggggaaatggaagtgacattcacaagttatattctatatcttgtatgtgaaatagtgaaggtataatttaccatgtcgtttactcttttgtcaaagcaacgtgtttcggactcgatacaaaaccaaagcatttgagtaaacttcacaagtttgacaatcgacaccaataatttcataaagcaccgaaaagatttagcttgccttttcagataggattgacacaagctctgatcgagctttctcaagtgcgccagctaaattctcaggtttccttccacctgcctgggcaaagttaggcctgccgcccctccccctccacacaacttagctataggccctatgaacttccctgcttgtactcccaggtccacaacccctggagtgaatgcagcaactaaactgacctttccttcacctggacacgagcccagtactacagcagctggatcaggtaatgtagcaatcagatgctcagctgcacttttcagtgcatcagcatcagtatcatccatggactccacaagtaccctgacagaaatttcgagatgatgaaacgatttgtaacataatttctttttaaactcaagagtatagttgttttagagagtcttttctgatgcaatgaacaaggaagcaatttggctcaaaccaaaaccttctagctttaactagtgtgcttgaatgagtctgttgtgaaaatgcaaatgctacaatttcaagaattgcttcttggttcattaggtgtgcagaagctatcaaaaacgtgatatacaatcatatatatatatatatatataaatatatatatatatctacaataacacaaggtcacagaaatacctgatctcttgcgaagttcccactgaaaatgcgttggttgataaaattgaggctttaaatattgctgctttttcacgtaaagcagaaacttcatttctggttgttcgcaactcttcaaggagattttctactctgtttgcaacatcttcagctttcaccttcacagaggttgaaaaaaatgctgagtattttgctgtttactggagtttgtagaaactgaaagagagagaaaaaaaaaatacaaggcatactttgagagtggagcatagattcttcatatgataatccctggaatttacatattcaatgaaagcatcacctgctacagcttctatacgcctaactccagatgcaataccctgttcggatatttttgaatccacgaatttcagcagtgttgctgacgtgggttccaccacaaagttccatggatacacccggaacttctaccacccgtacctacatttacaagagataagaggtaaaaatagaattaatcattaccttcatatggagtttttgtgtagtaaagttgaggatactcaaacctggtctccgatttttctccaaacatggcaatagcccctgcaccttttgcatcagcaagaggcattactttagtctgaagaagcgtagcatccccaatccatctattaatcaatccttcaatttcaatgagctcatcatcgataagtggccggtggaagttgaaatcaaatctgagacgatcgaatgccaccaatgaacctgcttgtgatgtttcctgacctataactttcttcaatgcagcttgtagcaaatgagtagcagtgtgatgaacctacaaaatagtcaagttcagttagtttttaaactacaattgtgtccagtatgtgggaatggagaccaaatgagcctaaaacaatttgtgtcgaaactgactagcgacaatcatttattgcatttacctcatttgagctccaaaattatcttaaatgaatgatagaagaatttaatttagcacacgttacaaaaagatcacattttagacttcggtacttaagaatattggacagtaccttagcccgttgcctcagattggcatccactgttgcttccacttctttaccaacctctacaattccttctttgataacacccttatgaacaaatatgctgcccaatgatttttggacatctttgatctcgatcacagccttctgttggtttccagcttcggtaacatacaagaaaccattatctccaatttgaccacctgattcagcataaaatggagtcctgttcagcaaaacctcaacttcagtaccttcagcaacctgtattactggttttccattcaccataaggctttccactactgctcgggcagaaagggattcatatccaagaaactcagtatcaggaacattttctgtaagatctgcactattttcaacctcaagcttaacagtattgtgtgcagcttgagattgacgcctttgattttccatttcaacattaaagccagccatatcaatgcttacaccacgttcttcagccacttctgtggttatttccactggaaatccataagtatcatacaaaagaaatgcatttttaccagacaagcaaggtgctgttttgttttcttttgcacttaacaaagcatcagcaagcatttgttcaagcaacttctctcctctctctaatgtttgaacaaatcgaagctcttctcttttcaactccccaagtatgcgctgtgctctattctttacatctggatcgacatgtgtgcttaactctattactttttctgcaatttctggtaaaaacgctccctcaaagtttcccctaccatcgccgtctatgcctagcagccttccagtgcgaacagcccttcttatgagccgccgaactacataccctctaccaatatttgacgggacaaccccatctgatatgagatatacaactgcacgcatatgatcacctaatatctgaggtaaaataaaagcaaatattcgtgatgttcttacaaaagtgttatatttgttgaaagacaatattgataaatataacagtttctttgataatatcatactttaagattcatttttgaacgatcatcagcaagctcatatgacacatttgccagctccgatgccctctttataattggatagatcaagtcagtctcataattgtttgggacctgcatcagaaagatgaaggacataaatagaatactttaagaactgagagacatctttttttcttgccaaaattgcatgttcgtctttattgatggtgttaattcctgtgagcgtacaacttttatagcattgaatcaagggaaattaagaaccatttttgcaaagtggataaacaatcaataccttttgaaggatgcgagccatgcgctctaggccaagcccagtatctatatttttctgttttaagggttcaagggaaccatcgtcttttttgttgtattgcataaacaccagattgtagaactcgataaaccttgtatcatctccaagatcctaaatttaattttattgacaattaaaagaactaaagtagaaaagcttcaatagacaaccaaagcagcccacatcctcctcaaacaaattttatttaacacttacagcattttcatatcctctctcaggatggaaatcatagtagagctctgagcagggaccacatggaccagttactccgct

SEQ ID NO: 227538 - DNA, 3760 bp, Cannabis indica
accaaatgtatcctgtggcttttgctgtagttgagatagaaaataaagactcttggagttggttcctagatttgttgagggaggattcgaagattgaaaactctaaccattggactttcattacagataagcaaaaaggattagaacaagctttgaagagtatgtgggaagaagggatacctgaggctgagcatagacattgtgctaagcatttggagaaaaatttcacgaagattttcaaagataagacattgaaatcactcttgtggaaggctgccgccagagaagtaactgttcgaaggtttgaagctgttatggatgcaattaaagctttggatgagaaagcttttaaatggctaatggatgcaggtccacaccattggagtagagcacactttagggttcatccaaaatgtgacatattatgcaataatatgtgtgagggatttaatggttcaaagttaatattagctgctagggataggccaatattgacaatgttggaacgcataagaatgtaccttatggaaagacaatccaaacataggcaatctataatcatgtggcagtctaatattgcaccaaaaatagtaacacaactagagaagaataaagttgatgcatgagggcatttgccaactaattcggggaatttgatgaccaggtagagagtatgtatggggacatgtattcagtagatttacgaaggtggatttgttcttgcagaagatgggagcttaatggaattccttgtagtcatgctattgctgtaatttggagtaatagagaggatccaaaaaaatatgttagcaaaaggtacaccaaagaatactatatgaaggcatattctcaacaaatttttccaattcgaaatcaagtcgagtggcctcgaagtgggaagacaggactgatcaaacctattggcaaagtacaacctggtaggcctaagaaaaataggagagtggaccttgatgatgtagctccaccaggtgcaaagaaattaagaaagagattccacaagatgaggtgtcgaggatgtgatgcagaggggcacaactataagacttgcagtacaaataacaaaaacaaggtactacatttactcttatgttatttcttgtattttaatatgtaaactcagttaatatattgatataactaatttttgtttttctaatctgttgctacatgatagattgtatatacattgaaaacaagtggtttatatcatgtatagtgtttgtaaatctaaatttatcatttagattgttgcattatcttgtaggaaaattcaacaccaactaaagatcctgggaattatgttagaaatacaaatccaacaccgatagagtctgtaagttctgcaacagttgggggctctttgcatcagacaatttcaccaactgactaagaacaagacaactacaacatttagagctttttgaagcttttaaatttttttttgacaaaaaaaaaagattataaattgatagctgaatctagtttttgggatattattttactttgacaatctggtatattttgcatattagtgagagtttttggatattatttttggttaagacaattataatgtatctttgtttaatttggtttaaatttttgattgtatgaaaactggcagtttatgttcaatttgagtgaaaatctgtcaatatttggtgatttttttaggtgcaaatttatcaacagtttggctggtttttagttgatattgtccatttgtttggtgaaaatttgtcaaaatttagtgtttgttgaggtgcaatgtgtcaaaatgttggctaatttatgtcaaaatatagtgtattttctaggcaagaatttgtcaaaacttggttcaaaatctgtcataatgttgcttaaatttatggtgcaaattctactggacaacttcagtagaactactagtattttttttctttcaaagtctatggaagcaaccacttataccacaacaagcttaacaatattttattcctgatcaaagagagtaacaacaattgtttccttatcaaaattaaacaaaagttttataacaatttattcctcatcaaaacaagctttgtgaaatacaacaaagtaacaacaataattaaaaaaagtttgattgggaacaagtttcttggtggaaaaatgaataggatttggtaagaaaagtaaagtgaaactagccatggaatggtactcactctgccactttggtattttactcccttttatcttatgttttaggagaatgggtatatttgtaattttaagaaatttaaagaaacaacacaaacaaaaattaggatatcttatccataccatactcatgtttacacattattatatctcacatttcaccatttgatctctgtttttcatatattttcagttacaatagtgcaattgcttgctttcgcgccaatacgtatgacctatctcggcttcacaattgagatactttgttactgaatgttgtttcaattaagaacatgctgtatttctttgtttgtgattttaaagataatgaaagagggttactttcatgtttagcattttgtcagttattgtaatttgtagaaggaagcaagaagaagttgactagtcaattagtcatggtcatattgctgttaattcttaccaaattatattcaaatcacattatcaaagtatagacattttatatacacttttatttctgaaatacactagaattccaataactacgactaaaagacaaaaacaaaacttgaaatttccattcaatttcttatcttttcaatctttctcaaaaccatattattacaaaagttttacataatcctcaacctctttgtggttgataagctcgaaacctctctgtaccccttcaaccccttcaactttcctttctttttcttcatgttcctcttgatgtttttggtgtaatgtaattcctttgttttctctctctattgggctttacatccctagccaaacaagataccatttcatatatagaagtaagtggctcatccttacccaagagaaaaatatgagactacctgagtaaactcttcaagagcagtgaaacccaagataaaaggatcacttacttccataacccgcgcttcaagaagtccggcagatacggctcaaaaacccaatcggcagtttcaaaagtcaaacgacgatatcaatgtcaccctagtacggagagttgttatgattttgtaatttttatgacttgtaatttattttcctaatggtatataatttttcaactactatctgtgtataatgccacaccattaatctaacagtcaactttagtcaattttaacagaattagatagaaggattatactattccaactgatatattttaagaggtatttttaactacaattatagattaagggtcataatagtacagtgtcataagtgcaggggtaaaaaaactaattattttttcatttgttatagtgagatttttctcacctagaaactcgagaccagacccccactaaaaggacacgtatactcagattttccacagaaagctgagatgtccctgagggactcctcgaagttttaaaccttgcttaagatataaccagcgagaggtggcgaacatgaccgaagtctaatcgcatccaagacaagaaagtagatcgcatatatcgaatatatgcgatcatcctccccttttcctcgtataaaccaggagaacgattctctgtaagtacgagttgatcttaggaaccctaca

SEQ ID NO: 227539 - DNA, 2893 bp, Cannabis indica
tcactaccatggagttaaatatatgcaaaatgttagtaagggagagtatacaaatgtataaatagataatattgtttgggagagttagaaaaatttgtggtccattaaagaaagataaatataatatattgggcataggaaaaaggagtagtcattatctataaactgtgacacatgtatataaatattctaatactatttagtgacaattaatggttgcagaagatgaaccaccatacatacataacaaacctttttctttttagttgtcatcacacacacatgcactctcccaagtccccatacaaaagtttcaatttcagtttcacttcttcttttttttttaaaataaaaatgtatatattattatgaattattattcacataaaaattctcagtgagcttaattaatgaatgcaacgtatatccaaaacttcacaattagttatcaacccatttcacaagctaacgactaacaaactcaattgaatatgcatggcagggcttaattaagttgaccctcaaatttcaaaaaggttatataattagtgtaagtatttatttgttatttggtcgacttagttttgaatctaattttctttaaatttattttctacttttttttatatatataaatttattcttttgaaaaaaaaattataaagtattaatatagaacattcaaattattaatgatttttctgttaaaaaaaatttattaggttaataaactgttttgaattatatttatcaataattaatacaagttctcacataaaaaaacaaaaacaagagttataaatcttatattattatttagatgtaccaaaatttgttccaatttataacttcatcccaaaatttcagtacaaatttgaattagtctaccctaaaattattttttggatttgcagtactagctgagtctatgatgactattagttaactaggcaatatagccgctctttgcgcgactagtttaatttcttttagtgttataataaaaaactatttattaatttaatatgcttaaaaaattattctaatatataataataataaaattgtatcatctaattacatattattaataatattttatttattaaaaaataaagatatatatatattcacaatatattattattgagtttatttgatattataaaatttaaatttatactatacatatagatttttaaatttctttgttaaaaaatattattattataaaaataagtaaatagagtgggttaggaaaaatttaagtgtttcccataatataatgtattatttttaaatataatcattcaacatcgtatctcacctgttgttatcaccgtatctcacccgttgtctctcatcgtatctcgctcattgtcatcattatattattaaatatcgtatctcatctattatcatcaccatatcactccatttagtctcttacaatttttgaataggcatcttattgatgaacatgtcttcgttaagagttttcttcttaacattataacttccacactcttagagttggtggaaagttttttagattaatgagcagtttaatccatgtcaattatttagttaaattctttatttttaaaattaacttttgaatcttttttattcgttattatatgttaaaaattaattattaaaattgtaaattatatgtaaataaatttatgttttgttcaaaaatctacaccattttgaacatgtattttaattaccctattttgattcattatttttaaaacttaaaattttgaattcttatttttgtctggtcttgtgttttctttttttcattatcatagattatttttattgatatttttaaacccaaacaataattaaaaattagaaaaataaaattcaacaaaaaatatatttttctttcttaaaaaatgatacatagatatttgtatcaaataaaaaatataaattacatgttaagcaaaaaaaaattatatgagtaactttttactattcttaataatattatatttataatttaataaaacaactctcattataatatctaatattcttaataattaaatcatgtatcgtttgaataaaattataatttaaattaattttaattttaaaatttacaaatttaataatcataatttatattgaaatgtggaataacaaataacaaattaaatatctaataaaatttgaatttaaatactacataatttacgtaattattataatagatactaattaagaatattaatataataataactattatttatttgtgatgaaaaaaattgtttatttataaatttcttcaattccactaatacttgtataacaatattacaataattctattaaaaaataaataacgggagtcaatgaaaatctaacaatatatatattatatatactaggtgattgttacgtgccaaagccacgtagtgttagttttatttaatattttagttttttattttaattaataattaaaatagtataattatttgaacgatttgttttataaaaataaaatatgtgtcagtatatttagtaagtaaaacatagttgtgttataataatgtatgttattaatagtaaaatgtacattaatcttctaattgaaaaaaagttctattatctcatttcatatctaataatagctacacaactatatatttatagactttcacattctttgcaaattactaataagcaccaataatattttcatattctaatatttttcaaccttctcctcttggtggtaaattaaaaataaaactaaaaataagcacaaacatataaggtaaatactaattacagcccatttcatcttctttttatttttttaagcccaagcccaaaaatctctaagccaacacaatcaaatctc

SEQ ID NO: 227540 - DNA, 5525 bp, Cannabis indica
cgatctgtctaagagaaagagaggagaaacacgattaagagagaaaacgagggaaataccacaggaaccttgcaatatgtcttcatttagttgtcagattagaccaccgaaagtccaacttttccatttctagtgggcagctccaacaacgagagagaaagagagggctgcattttttttttaatagagggaggcgcatggagatagaaaggagaaaggaaaagtttgtattagggtttcttaggagggaggcgctgatgttatgttaggaaagaaaaagagttattaggtttattaggttaggaaagagaagataataggtttttctttatttttttttttttaaaaaaaataccatgtgtcagctgacatgatagggcaggtttttatattctattaaatatgattttttttttatatttttaattaattattccagttgtatttttttaaatagtattatcatatagtgacacgctaagtgtgtcgggaaacatttatccaatcgcatctagcgcgtcactataggctatagatttttaaattaataaaaataaaaaattttggattttactctttagtgacactctatatttttagcgacacacattacatgaggctaatactgaaagtttagagtctaattatgcatgtcactaaaaatcactcctaactatttagtgacccgcacttttgtgcgtgtcacgaaatagtgtcacaaaaaggctaaattgtagtagtgacaacactaatagcaaatttctagtagctactcgtaaattttctctgatttgtttccttcttgttacaaaaataatgaagacacatggtttggcttgaggtaagaatttggttacggtggtgacagaagaagcatatacaaggcaactaaagttgtaaaaatgagtgtaaatgggtgacttttgatgcagttactcataagaagttttatcttgtaataggatagaaggaggccgctgtttaagatgtatactgcagtttgttaccaaatagctctagtaagttagttgtaattaaattcgattgaaaggcaacaactcgagccacattaaggaaatgttgatatttcctatgaactgcagcattctaccgtggtctatcaacacaagaacagtaatgtagaaccccttttgttgcataactttaacaagtagtgagattcagtttatatgttcggacgaatttaacgtttactttatattaagtatatatgaaagtgaaaaaattttgtattgcaaaaggagcatatgatttagctcttagtacatataattaagtgtgtcgtgaatggtcttgcactatggttaacatatatttatgtccctcaacaaaaggagtaatatggtcctcaaatatccatatgtacaagatcaaatatttcaggggagatattattatttgaatgaaaatgtaatctttcttgttttgcaatatgacaagtaggataattataaggagtaaatatttcaaaaacttttaattatttattaattttattagtaataattacatatagatgtccaagacgagtatgtcattagagtttatctaatcaaacgtacaagtatgtatagtggaacccacttttggaaggatttgttgttgctgataataaagatttccaaagtgcttagctgttccaaatctcaacgtcttagaaaggccctaaatgtaacagtaaaactcataaaattctgattgtgtttgaaaagtgcactaacagataatagattgaattaaaattgtagtacaaatagaacattgattagagtaatgttgaaattaaggatgacagtaaatattttttaattttgaccttagttcgattaggtaatgtgatagaattggccttgcgatttgaattaattgaagaataacatgtaagatgagaacagacgtgatgagtttcaccactatctacaatccatgatggagggttagtaagtaatacctaaaaaattattcacaacaacattttcattggatgttgaagcatcggtagaaagctacaattgttgtgttaacatggaaatcagttgttgacactgagctggagtgagttgtgtattgcttgaatcatgtaggtggtggaaatttgtggtgtatgtgggagatttctgttttgcaaggcagattctggtttacgaatggtgaaaacaagagaatcattaggctttcgagtgtcataactatgggaaaaccaattagaaaatagtatttatttatctctgtaatgacctggtttttgacagttggtacaatgtggatgagaccttttgtttcttgaggctacattagttgcaagagttgaatcttaaggcacagaaggagcattggttgctgtagggaatggttcaatttcccaaggttctttgtcattcttggttgatgactatagagaaaactttgttaagcaaaggacaaggatcaagaaggaagatttagtcacgaacaacatggtaggattcgtttaaacctttgaaaaattgaagaacctagtcatgattctattggtccttgttttgagcagtagcaacagatatacaaggtatacaaggcctcaactggttaatttcgtcccacatgacagtgagatttgtgaaataggcgctgacagaatcacctccttaatggagataataagttagggtttcatttaattcaaaaattgttggaccattgccttggttgaacccataattcaaaataatccacatttcagagggaatatctaggtacataatgatacttttgatttcaggagaaaccgagtgcaagattaatgacatcaccatttggttacatctaatccatgaatcaagaagaggattattaatagggggctgagggagagtacctgcaagaaagggagtttttatttcttgctctaatggaaagtttgaagtcacgtttttattgttggaaattttgctccgtaagaacaggtgtaaccagtgccaatctggagtgatctgtaatgcttagattgtagagagatctaatatcttcataagcgggtttgtccaccagagttgagcgaggaactggagcagggagatctgttcttggaggaatactagcagaagtagttgatgggggaggaggcatgggagcatcgaccatggaatgattttcattagtggtagtacttgaactggtggctcatgttcgcaccatgatttttggaagaggaaaacaaaattttgaagcactacaagaaaggggaccttttatcccacttttttatgttacaaaataaaaaatgagataaaagatatattgagacttcttatcctacttttagatttggcgcctcaaatatggagcaaaaaaatttttagacaagggccatgtttggtagaaacgttaaaaaaaatatcaaaaggtaaaaaaataagttcaaaattcaatttttataggtttgttaaacagggattaaggttttggggaaaccttttatcctggttattagttaaaaccaggataaaagggtttagtgtgaaacccttttatcctagtttttaactaaataactaggataaaaagtgtttccctaaaaacacaatctcatgaacagattatcacatatctctaccattaacctcgatagaaacccacccaaacccagaaaccgtcgcccaaacccatgtgagcctcaatctcgcccattccagaatcgcccaaacccaacagctgatcaaacgaataaaggtatgcttttttttctttattacttctccctattttgcattttttttccacttttttttctggtatcaagaaaataaaaaatatggatattttttttttttgtgaataatttcttctagtttagggattatttattatgtatcattttttaaatttctagttcttaaggatttgattttattaatatttaaatgagttattgatataattttttataaaatgatagaaatttttgctatgataaaaaaatatttatatatatacttagtttggaacttttgaattatagtaattttaatagtcttgacaatggaatagtaattaaaatagctagtaatgtaatgtaatgagttatatagttttagttagaaacttttaatacttagtaaaaaatattcatgaacgaaaaattagtaataaggtgtttgttcattgtaatgtaatagaaattgtaataagaatagtaatgtaatgtaataagaatatatagtaagtataaattaattgtagtgctaaataattatttaagtatgtagtcattagttatatattaattagttattactattcttacttaattttaatttgaaaattttataaattgcatttaatagtgtaggttgtggattgttattagaaaatgaatcaaaatatcagtgatcattgattgctagctaaaggtacattattgaccaacaaatttttactaattataaaactattagaggagtttgaatataatagatattcatccgtagtgaaataggttttgtgatataaatgtactgcggtcagatgggtgacaattattatatttttaattgcttttatgattattttgtcctgttatccaatttacttacctgcattgttagatagttattaaaaatgttatagaaagaggagatactgtggccactttttttaggattcttaaatgaacatgtttgttaatatttaattactaagcgtgtttaggatttttctacgaactattaagttttttttttcaatcttgtttgttaggaatattatttttatttttaaatggataagtcatgcatggaagagaagagagaaaccccacaatttgtagaaagatttaaaaactttttagagttttccttaaagaattgtagcgatcttgaaaaaatctagtgtccttgtatctattgtggtaatatatcctagggaaatattaccatgtcaaagaatcatgtatattgtcctggaatcgataaaagttatactaaatggtattggcattctgaatcgatgaagggtgacccatatctgttgggtaggtgagggcgcgaggatcattttgaaagtaatcattgtgatgatcatcctacagaattgcttgatgatgatcaagaagagtttattcatgatcttgaaaaatttgatagcattgttacagatgctgataggtcgttatttagtggctgtgaaaaacgacgactatcaaccatggtgaaatattataacataaaggcagagaatggagtatgtgaaaagtgttttattcaatttctatttgcttttaaagagatcccgctgatggaaaattattttccggagtcgacgtatgaggtgaagataactttatgttcgatagggttgaagtataagaagattcatgcatgtccaaatgattgcattttgtatcgtaaatagtacgcccacatggacacttgtccaaaatgtggtttgccacagtatatgcccaataagagtaaggagatctgtaaacttattccagatagagtcagatatgagagctcaatatc

SEQ ID NO: 227541 - DNA, 7009 bp, Cannabis indica
aaaacttgatatttatgtacaatcgtaggcctggaatgaatcgatgcagtgttactgaggaggaaacaaacaaacctcttattgcacagttccagcagcctcctgctcttcagagtcaagccaatcttaacagtaattctggtgtcacagaagccacactggctaattttaggcaccctgatcaaaatccacgtgatatcaatggaaagaagaaacatagtttaaagttaatgtccagttcagctaataaagatagccccactcagctgccaaactctatgaagaaaagtatgcagctgtccctgaaaagtagaagtttaaatgatgtacacaattctcctctagccagtgatcctgattttccactgctaagcaaggctaacgacttgataccaggtgataaaaaacgtaagtacaaagtaaagaacacagtctgcgagccccatgcttttggaggtattctattatatgcagtctttctttcgtaaaacctcttaattttttatttttatttactgtctaatttatgacttgttattaggcgatccaaaaaatttaaagcttaaaagcagaagagaatctgatcaagattcttctagagcttccaagaaaatgaagactcaggctaggaatggtgttgatgaaggttgggcatcagaccatagtggggcgattgggaaggttggtcctagctcaagtggtggtttcccaacttcttcagcagggagggatcgaaataaccgctcttcctctagagattcaaaatttgatgtgaaagatcggccacaagttcccatagtgaaatcaaatggtaaagttgaagttgcctcggagaatggctctctagaaagagggaggactgaaagtagagagaatatgaagaaaaggaagagtaaggaatttccaaatggatcctgcccaagtacaggacgtcttcctgatagcacaccttttgtgaaggagtttagtgataatgactataggaaggaaaagaagccaagaatatctatatctgatggaaaagagtccagtgcaagcaaaggcaaggatagaacagacaagaaacgtagccattcaaagaatcacctgcattcacgggatcttggcatcactcagccaaatttggataatatggatttattaaaaagggatttaggacctatacagccttctttagctgccacttctagttcttccaaggtttctggttcccataaatccaaatccagttttcaggaagtgaaaggctcacctgtagaatcagtatcatcttcacctatgagaatttcaaatccagataagatttcatccatcactagggatgtcttagttaaagaagagtttccacatgctggtaattatgccttacgtagtccaaaaagaagctctaatggtgaagattgtagtgggcgtgatcacactcgtgtaggaagaaaggataatgcatccaatggggctaatcacaggtctcaagagtcttctttgcatggttcacaggaaagggattttaatcatatgtcagggacaaagaatatgatacaggttgtgtctggtgttacaaaccacatttctgcaaatggtcctttggataatttaggccaagatgctgaatatcctaataagccacttggtttgtgtaacttttcttatgaagagaaacagaatgaaagccattatgatgcgaatgggtcccactcaaggaagtctgccaaggggtcttcttcaaggtcagagaagaatcggagtcttaaatctgagcttgatacagtcaaggtaaaaagttctgatgctgtcggtgagctgcatggtcgctcggcatctggggacataaaatctagggatggtaaaaacaaattgcaggaaaagtatggggtcaagtctgataaagttgatgagaagattttgaacaacaaaagaaatgtaacaggaaaaccatcaactgagagctgtaagagggagactgagctaaatgttggagggtgtgacaatgtagatttaaaagtagatgcaatttgtcgaaaggatgctgtgtcaaccccacatcagaatgtgttgctggacagcaaggatgatagatcttcgaagaggttggtttctgataaaactgataaagtggaaacagtttccagtggagagaggtcaataatcctaccaccctctggaggacctcaaggtgatatactgaattctttcccccagccaggtactgggttgcacaaaggaaatggtttggacatgtcacatgctgacacctctgaaggtagcaatgtactgaaagtgcaaaaacagatcagaaaggcagataaatcccagcagtccagttcaagaaatccatcaaagaatggacacagggtcagagatcttgatgtgccatccagcaatgccgctgctagcaatgctttgaaagaagcaataaatctaaaacacatggctgatcgtttcaaggttataatacttaaatagttatatatttttctgatgttacatggctgcttttgtttattctttgtactatcaatcttttggcagagtgctggctctacccatgagaggacaggactttactttgaagcagcccttaagtttctttatggggcatctctgttggagtctggctgcagcgagagtacaagccacagtgagatgcttcggtcactaaaaacttatagtgatactgctaagatgtgcgagtaagttgaaacataagctggccttttgagtctttggatatattttcatgagtctttattatttttttagttgacatgaggatgtagagtttggtacttccattgcctttcaggagaatgcacaaatatgtacttatattatctcatgttgttttttctttttcttttttcaatttaaaactactaattggatcaagttcttaattggtttagcaatgctattgataatttaatgccaatttactaatagattttctatgaacccatcttgactatacctgttctcacagtgaatcttttttctgtacaagtttgaaaaactgctaggtcttttcccgggttctttactcatctcttttacgttaataggtttattgctcttgagtacgagaaatcgaaagacatggcctctgctgctctcgcatacaaatgctcagaggtggcatacatgagggtagtttattctttgcatcccagtgcaggtagagatcgacatgagttgcaggcagctctccaagtgcctcctctgggtaattttcatatgatctagaaatatggtctttttatgatatcactgtacttgctgtattatttcatgtcttttgattttcttaaccttccccaactttctgacagttgtacttctagttatttctatcaatagacctgataatataggggcacatttctataataatagaaggttatgttttcactcataaattgaagggagtggttgtatataaacattctggcatttagtatggccatgtgaattattagttaattattattttttggttgtttataataataattttaatgcactttctgtgtgttagctttttaacctttacccttttggtacatagactacagcctacaccaccaatctatcatagtaactaatgtaatttattttgctaaattcctcaaagagagttttttgattcgagggaaggaatgcttttctccataaaaatgttttgggaaaaatgttcctactttttattgctcattttcttttctcatctaatccatttttgttttttcattttatcaggtgaatcgccatcttcttctgcttctgatgttgacaacttaaacaaccacgcaactgttgataaagtttccttgcttaagggtgctagctccccactagttgctgctaaccatgttgttattgctgctcgaaatcgttccagttttgataaagtccttcattttgtgagtacaaactgtctaagagcttttaatgttgaattcctgatttaggttatatttggtaggaaggatggggagtgggatggatgaagaacctagagaggatggagagtaggacgcatggggagtgggttgaatttaataattaaataaattgtaataatgagaatagctgctatcaaaattgatggagaaaagcttcctggttgtttcctggttgttctgtatcattttgaactaacacacactttcgagaagaaaatgggtaataagtttaacgactgttattcatgcaaaatggggagaagtgttctataatttagcattttttggtcatgtttatgttagaaatattttattcttaatcacaatgtctcgtatgttatgggttagttccatgctaacacaaacatcttcatcaagccttcaccgtcagttttggttgtagttttctcattaaccatggattaaaattagcttcttaacctgtcataaaatatgatgacttgcaggcacaggatacaattgctgctatggatgcctcaaaaaagtcacaggtagcttttacagctgcaagctcagcagaggccaaatctgaggaggttatctcttccattaagagggctcttgattttaatttccaagacgtcgatggattgctacggttggtacggcttgcaatggaggccattagccgttaaagactcaaaagtggttgtggactttttaactccgggattcaagataaacaggtggagcaagtagcaagaggctgacctgatctatgcaatgacagctctctctgtccatgtttataatttttttttatttgctgaagatcagcttattggcatgcactgcagtgccctgaggttgtttgtggtatattgattcaaggcttctgcataaaagattctgagatcatcccgattggctgatctgtttcatccagaaggagctaaagattttcaagaaaataaataataataatgaaaaaaaagaagtggagaattttattataggtgttttttttttatccatactggtggcgacaacccaaggattgggagctgcctgatgcataaaccatctagctttacttactgcgaagagaatttcaaaaactgccctactaacatcacttgaagaaggtaagagatggcaatttttttgtggacttgtcctttagtttttctctttcaaactactatttttctaattttctttcagttatgagaattttttcacttcatgcctttctatttctgagttgatatatatttactgtgcaggttattgagtttctgttattgcagtagcgagatttgttactctatttttatagatacagttagtaaataaatccacatgatatagcggggaaataatgtccgagtgtgtagctcccatcacaggtgcctgctttacatattaagattaaggtttgttgtactgtaatcatgaaagtttgcctctctatattattctattaaacatctcttaactttctttttttgcctctgcagttgtatcatgtacatacagaatatattgaatcagattagtctaagttcagcataagcttctcttcaaggggaccaagagaacttcaccaatgtctataagaaaaaaatctgaaaaactgtttctgaccccattcttattatttatttttttaatcccactttctgcgcacaaaaacgccttctgaacagaccccccctatctctctctctcttatccctacccttgtttcaccttgactgccattccttgaaagagttggaatggccatttagcaatggaccttggcagagggctgactgataacagaaatgagagggtagagggcactgcatgttgaaagaaagagcttttgtcactggaatattctctctagttctgagtctctggcctcacttttcactttttgatgtcaagaagagctggtgataagcctatttgatgcagaggtacttgtagttgtacaagtattttgttaatttctcttcatctttccatttaggggttgtttgattgattagttctcagtttttgtctttggaaaactcagtattttgtttgaatgactttcaggtagacactttttgagacaggctgagaatcagtataagagttttttcagaggataatgaagattgaagaagtgctttaatgggataaggaacatgtatcaaattaatgcttcaacttgtttaaaaaagaaaaattaataacattaaatgaataaagcaattagaaatgtactatacccttttgtttagttagtttttatttcatcaattttaaaatgactagtagtcatcttttagtgacttgcagtcaattttttgtgtaatgtgtcaaatattttcacacaaaagttattgaaaatagtaaagctcacgagctcatgctgtctaaaagatcattatgtcgtgttgtcttatttcattaatttgaccaagatgatacgtggctatagttgttaggagagtggtggtatatcacaatattttacatgtttatttatttagtaagtttttgagtgaaagagttgaataagtctttagttagtttagctttgtgtatttgggttagttgttaaatggaaggctgtagagaagttaaataaaaacttggccatggatgaacaagtggacaagttaataaaaaactatggaagccataaatgtgcagggagagcttctccatcaattgacataaattctcaacaagcttagtaacaccaattgctcgacaaaatactggagggaattgggtaaatcaatccaatcaattataaatgttgaaaactttgaaaattgattttccaccctttgatggacaaattgacccttctatctggttgtttaaagcggagcaattttttcaattacatgaggttacaatgattttatgggaagatttcactgaaaggatgaacactaggtacatgcgaaaccaatatcttgatttatttggagagctcacatggttgcaccaaatgagattagtccaagaacaccaacacaagttcgtcagaacaagctcgtcaagtaaattgtttcgttggaggcctttgtgccccaatg

SEQ ID NO: 227542 - DNA, 2151 bp, Cannabis indica
gaagcttcattagaatgagtaacactaacatgatgttgggtttcatcaagttatattccatgtatgttttgtatgttcagtaactcgatttttggtttaacctaattcagatcaggaggtggtggtggtggtactgtggctaaggatgctcttggaaatgatgtaattgcagccgagtggattaagacccatggccccggtgacaggactctaactcaaggattaaaggtacttgactcttggttttttttttttttttttaggtaaaaattaaaatgttggaaattaattcaattgtggttgtgatcaaaattcagggagatcccacataccttgttgtggagcaagataaaactttagccacatatggaataaacgctgtgtgcacacatcttgggtgtgtggtgccatggaatgcagctgaaaacaagttcatttgtccttgccatggttctcaatataacaatcagggcagggttgtaagaggacctgctcctttggtaagctaactgaaccatttactattctcttaagagtgttcacctattttacttttccttcttcacatgattttaattgaaaaagtagagctatccctctgattaaggaatttttatactatctatttggaacagtccttggctctggctcatgccgatattgatgatggaaaagtactgtttgtcccatgggtggagactgatttcagaactggtgatgaaccatggtgggcttagaccaacttgtccataaacttaagctctcaattttatgctgggttttctgtaagccaatcattttgaaagtcggtatccaaaattcacgttggaatcagatttcctgttattattaagttcatttatatacttctgttgtaccaatttgaacataatatcagcttctccacaaacaatactgtggactttgacttttgtttttttttttgtttttcgtttcatataaggtattttatggaagaagaacgtttttagtttgtgtataataaggacatttgtattcttattctttcacatgaactttggtaaacaattggcacaaaggaaactgaagtagcaaataaaaatgatcatccatgttattgtagagtaagctgctaacgaattagggatgttaatggggagggccaggctgagatcgaccaattaagctttttaagttggggcaagtcagggctggaccaggttgaatttttctctaaataatatatattgttgactttggttttagctgggagtcttaaattaaagcgatatagatcaaatatacaatagaaagtaaagaactataagtaaagaaagtaccagaatttctaaaagttcgacctcatgatagtagtaatagcctactcctttttaatttgtattgatttatgagacaaagaacaaattattctctctctaaagaccattatttataggggcacattaaattgaattggtttctgttaatctataatacataaaatggaaaatagatatgttttcataattacaatgaaggaattggacaagttcgggctgattgcccttactctctaaagatacgagtcattcccacaaaagtaaggatcactttgtgtcatgcaaacttgaagatatcattgatcaatgttgaaattaccaactcaaatttcttagcctgtaatatcccgataagtctaatggtaaaaaattagggtttatattatatcatgggttaattaggaaattagtggaattatgatcctactaatctatttcagcataaaatttaaattttattataagtgagtaaataaacataatttataaattacggaaatttatatagcatgtgtgaatgtaatatgagctatatgtggaataaaaatatttttaagttcgacgaccctgaagactcgataagtcggtaaataagtgtaatttgttaattacagagatttatttgagatacgtgaataaaatttgagttatttgtaaaataaaaatatttttcaggttcagcgaccctggagacccgattgaaggccaaaaatgtcataacagatttagttagaaatattgatgggattagtgggataagctgattttagaaataccaaaatattttaggatactcgaaattggctaaatactttaaaagtagaggttt

SEQ ID NO: 227543 - DNA, 2200 bp, Cannabis indica
tactagaattagtaacggcctgaataaagcactcaagactggctctttgggagccacactgcctacagaggcttctcggacccatcacccgcgtgaccacgagaggtcaccgtcaccgtacttctccttgttctcctagcgaggccttgcggaccaaccccaactttcccgtcaaaccaccattaacggagctaccaacacggaaagacttccccggagccgaggccaaagcaccacgaccgaacccagaaattattcttgagaatacatccaaatatgtagaaacagtagaaagtcatggcctgaaaatggggaaaggggtacctacgctgttcacaaccataacaggtgaagaaagcttacatccccttcgttgatgtcccaacacgccacgtttataacaaaaaataccaattttttcaaaacttgaattgtatccatctcttttcactattagctaagtcaaagtaacatcctgaggtcagtggttttgcaaagtcaatatcaacttgcactttcataaacttacaccatgaggaaggtttatgatcttctaaatccaccttcactacgtttctagccagattacctaagagatttccattggcctttgaaaaatactcatgtggtaagttatggatttgcatccataacctcaaaagctcaaactcaactctgccattcaagctcggagtccaggcctgtagaaccaaagtatagcctcgaatgcaccggggaccattttcaagggcttagtttctaacttccacatcctcaaacccaaactcaaaagaattgccaatttttgaatcgcctgccaaagccacaacagagaccttttttttttccaaaatttggccacaaaagcgaccatagtagattcctccacagacattggggccaccagttcgccatataaacacaaagtggaaagggctttcagagaagagacactaggggttaaagtgacagtggtttcaaggcaagaaaagcatttgcctttaagagggggaataatagcaccaccagtctccataacagccacccgacaaaaagcgacaaagagcaaacaacagaataaaatcctaccaacctaaccaactcacagacaaagagtaaatgacaccacaacaaggagagaacaaagtcaaaacacacaacaaaccactcctaccacaagacaaacacacacgacaacaggacagaatcagacaaacgaagagagacactcaaaacaaacgacaagcgaaaacaatgaagcaggacacgaaaaaaatcaaaagagagtggctagcacaggagacacaacggaacaagaggatgaagggctggtataagaccattccttcaaagagagagagacttaccaagagagtaacatcaccattacttaatcagcaccttggagcgtttccatcccaataaaagtggcccgccacaacaaggtaaccactcaaaggatcaaacatatacctctcattaagatttctaatcttttattaattagtaaatctgattgtattgaaattagttttatttagggcacaaaacccaacatcaatgccacacatgacattagtgcaataatggtatttttttctctccattatataacatccttaaattttattaagctatccacctcagtaaatatttcaaaatttgactattgaagatgctcttcaaaaacttttaacaactatacttttcttttattgtttctttattgacaaaatacttatcatttaattaggcttcagaaaccaaaatatataacaccaacatgtatgtaaataattttgtgatcattatagtaatgtttaaatcatttgtcgtcagtatatatttggaaagtgaagacaaatttgcttaagcgtatagcgtttaaggtcattttatagtttatgtacagtgaaccatttaacataatcctcggaaaggagataaaggataaaaagcttttaaaaatttgttgataaactcgaccagaacatgacataaaaagactgctatactaaagtggcgtcgcattaaaaaagttaaatagtagatcatagtgttttactggatcataattctcacatcctggtgctaatgttacgtgagctttttttcctaatggatgttatagaaattaagagaaatgaggaaaaagtaagaaaaaatgtctatctatctatatttagaagatgtgtgagtg

SEQ ID NO: 227544 - DNA, 3664 bp, Cannabis indica
aaaaaaaaaaaaaacagtaaccatgtctccattatcagattgtacactatgttttatcaaaaaaaaaaaattgtacactatgactaccccaaaaggcttgagccttgataaggtgaatgtggatcagacccaagtttaggaccgtcaagcccaaggtccctaaattagaatttaaaatgataaaattcaggaatacttcacaaatacataaaaataataaaaaaaaattacaaaaataaggttatatgaaattttaaatatttttataatttttaaaatttaatttacataaatacagtattttttttatgtattttcacggtgtacttttgttatttattattggttttttattatttatatattatttttttttatgttgtttagatgttgttttttagtagttttttttgttattttttgtgttatttttatgaatacagtaaaaatataaaaatatttcttaaatgtaaaagtgtaattttttttaccaaaattagtagtatgtgtaaatttccctaaaattagaaaacccacaaattacaattctactaatgcttttaaatttcgataattacataaagcactattttttataaaagatttacatttttacgttctaaattttttatatatatttttacggttttctattaaaacaacacgaaagcaataagaaaattacataaaataataagaaaataataataatatacaactgacaaaaaataataataaattaacaagaatacaacataaaaatacatcaaaagactatatttttaataaataaaatcataaaaatatttaaaattcgtataaccgtatttttataatttttttttattatttttgcgtatttgtaaaacaatcctttcttaaaacttgaatacccgagtcacagtgacctaagcccacattatgcatctcagttctactggggcttttttttttttcgaaacaaagttctactgggtttaaagagatgatattaccttgtaaaataaattttatctctgaactttggttcaaacaaataaaaataaataataaattatttgtgtattttatataattataatactcgagtatagttaacaaataaccacattttttataatcgatttgtaagtttgtttggcacttgtctttagtgattatatttctttttttcttttttcgttcaatttttatatatttaactgagtgacatttagctccatataatattttccttaccttaggacaaaacctatctttgttgtttataatgattaatatctttacattatatttgtaactaaaattaatttgcttgtcttgaaatcataatcatccactgccctcaaattttttatatataaaaattaaaatatatatacatacaataacaacccatgtttgattaatgagtaattattaatacaaaacagaaagaagaaaaatggtcaaggcattagaattgttgagagaaaaatattaaagaaatgcccaagtacataaaagtttcacaatgctgtttacatggtttcaatatgtatattaatttatgcactaaagctttctttttgaccaaaccactaacattttatagtgttagttcaagaataagttgatgaaaatcatgaggagaataatttttgttctccattattatttcacttttgaaacccttatgaaatgtttgggtcgttgtaatcataacaaaaatgagataaaaatctttgcttttggttagaagaatacaaaaaacgacacataaaatcgaaactaacatagagagtatttgggttttctcaactaatttccacgaggaagatgaatcaaacaaaacgattaaaatataaactttgctattattatatcattatatgataagagttcagaaacagtctagcatcaaaaaatgacaagaaaaattgaggtaaaccctaataggtaacttgtatccatatggtaaagttgggatgaaacacacatttttgaatggcaagcaacttatgatatcttagcccttgaaaaatccatctccgggtgctgtaaaacaaaacacacaaatctttattagtaaatataagtgaggagttgatattaaaaaagatggttaatttttgtgtcttaggggttcacctcagccatgaatttcttcagaaggttctctttctgcatttcttcactgcttgggagccccatagacttctgtctctgatcaaactgtaaacaagaacaaaatggttggattatagtttcagtggtctaggtagccaaagcatctgtctgaatatgtaaagcataaactaaagaactcagctgagtatgaacctgatgaaaaaaatttaaagtccctttttgatgtaaataatgaaaacatatagcttaccatcatcttttcaactgtctgtcgagtttccgggtccaggtcagataacttgcttgattcaggttcaactttctgggtgtcaatctcaggatcacctttcaccaaagatttccaccaatccatttgatcatgcttggtcaaaagaatagagatagaactttgatcctctgcattaaggatggcacattcaaaaactcatatgaatacaactttcaaatatcaaagactatcacattctcagacatggcacacacacagtgatcccacaatcacatatgcattctcaggcatagcagaagatttggcaatctgatattacccgttactcatgaatagaaccagaaacttggtcatgaataaaataacccagcaaaagcacataaagcacaaactccaaaatgttgagcacagaaagaatcaaagtaaaaagagggttatttaacagtcaattggtaagcccaaacatttacgctgtgagttgttttgatatacagaatagtctttggaaaaatgattttatatgtgtttgcagtaccatacctatgctccagtaacaatcatcaggcttgacgggccgaaagagctccccctacatgaaattgatatttatattaatagtcggcggtagcaacaaacaaaattaacaaaagaaactccaccaaacagctattacattacagactcatacttacatcaatgataggtggctgacccttgagtccaacctttagatggttcttctttatatcacaaacaaccgaccttgacttggttccagcgggcactgggataacagcagtaacttcttgcaggctctgcgtccatgagtatttttcaagatcaagcccattcccaagattgggagctgtccaaaagttcataatgttaagtgaaagggtacaagaaaacaattactaggcaatgtagagcaaaataagatataatgctttaagttcgcataagaatgccaatactattatgaatttcttaaaccctaaaggcaaaacggagtcaaagtttaaccaatatgacaactcacgtaaacacttgataatgtctacacctaagatttgcagctaactaaaattcaaattttcgacagctacctaactataattatgtgaaattaacttattgtctaacctcacataaaaggatctctatctgtattgcataattcacattttattttcatcagcatccaaatcaaaaataaaaagattgcggtatagcacttacaaatcccaacagaaatcagttatccgtttttaattgatcttggtc

SEQ ID NO: 227545 - DNA, 2486 bp, Cannabis indica
tagcttcctataaatgatatttcagtaatctaatataattactgaataagagctcttacatatatctctgttaaccaaagctcaaaggaaatcatcattccatttctatgtcctcatagaagctatagattttgtatctatgattagcgctcccactcaaaagtcaaagaacaagttaaagaacacaaataatacagttaagttagaaccaaatcatctcaggattaagatttattgatctaagatcaactaagtgatattgacttagaaagtacgatggtaagtttatgatatattatccaatatcaatattggtccagtctgatgtatactatagacatctgatactagcatactttgtcaatgccctagaaaggacataccacatatcaatgtgtaaataaactgtaacgctgattatccatgaaaaggccatcatgagcctcccttagccacttttgtaaggcctcagcttctgcttcacccttcgatagttcatctacagcgtagttgtctttggcgatacaaagctgcactcgctcttcatcaggatgagctggggttaggaggatagcaggaggggtaggaaaatcttcaacctcagataggatcccaaaatcaagacttgggcaaggagttgctgaatgcttaggcttctttgaaggtttagggctggaaaccacacccttttgcttccggtcgagttggggaacctctttttctttttcctctattaacaccacctcctggtttccaggtgcctcctcgtttggacctccaggagttaccaccacctgcggagggtcggctacctatggttttgggttgtgtgtagcacctagcatggccaactatccatgggtttcgatgttaaaagcaaacaaaggaaaggttaaaaagaaaacacatatatgaaatacaaacataagtatgaggcagcaaacgagggaagctaatcttatcctggcgccttaattctgccctagcaaatttgtaaattaaaaagttagtgttgtcatcccctaaataactatttgaaagaagaaaccacctcgagaacatgtagtaagaatgatccaagagaataggaacaggagaacagaatccatttgagactggcctaaggaactactcaaattagataaataaaaacccttttccctattaccccagcgtgcatggggcattcgaaacctatacagcctcatagtaaaactaatcggctatacgtgagagtattcttgagccgagggaacaaaatgaaggttcaagggggacttacgggcaccagagttagagttccagagttgggaactagaaaaatgaatatgggtctagctggtcgggctaaggatttctcaatttcgaacaataggatgttactttataaggcccgagtatgtgttatgagcaatgatgagcttaggaaagaaatgctagatgaagcacatactacaccttattcattgcacccgggtactactaagatgtaccaaagtctaaaaccttattattggtggtgcgaaatgaagaaggatgtagtgaattatgtgtccaagttcttgacatgtcagcaaattaagtagaacattagaaattgatagggttacaataacctttgacacttcctgtgtgaagtgggaagatgttataatggaccttgtggttgagttaccaagaaccacgggaatgtatgattcggtgtgggtcatagtggactattttacaaattcagcacacttttgccgataaagacaccctatacagtggatcggtatgtgaagttgtaagtaaaagagatagttcgtcttgataaagctctgaaattcattgtttcggacagagatctaaaattcgcatctaagttctaagaaagtcttcagagagctatgtgtacaaagctgaagttcagtaaaacttttcatctccagactgatgagcagtcgatgaggacgatacgaatattagaatatttgctacgagcctacgttatgaacttttagggttcatggaataaatatttgcctttgatggaattttcttacaacatcatctatcagagtacaatattgatggctccttacgagatgttgttgttgaaattatttaccaggatctagatttactaacaagtatgctgaattaacgtcttaaatatgaactttctaatatgatgaaattgaacacataagagtttagaaaaccttacattgattgtagcggaataacattactagaaaagcgggttttcatgacccagattgagtaactctaaaactgtatagtgacacttcaatacgtgtcactaatgagggtgactggaaaaatagtttttagtgacacttcacacgtgtcactgaaccattttacattcactttttgcatgtcactataggcgtatagagtcaaattttgtcaaactgaaaaagtaacagccacacaaataaagtatcactatatccctttttttcttcttattttttatt

SEQ ID NO: 227546 - DNA, 857 bp, Cannabis indica
aacaaatatagtgttggacattaaattttttttaaatagattttaagtccaataatcatggactagaattttttttgtattatgtccattaatattagactaaaaagagaaaaaagacgttatatatttaaaaatttcattatatatattttttttattattatttttgggttaaattctcgtccaacactatattgaaagtgaagcatatggatcttttttaaactatggtatggaaattaaattacttttttttagaaaatggaaattaaattactcataacctaccatattagttaataaaaagaaaataaaaaacaataaggcgtatggaaaatgctcttccattattttcagaaaaaaataattctctcatctcctctatctccttaaacaataaaaaaccctagcctcctaattttcaaccttctcttctcttctcattttgatgacgactgggcttcagtagcatgtggacggcggttgggcatcgacggctagagaacgacgcgcgactggtgttcgatggtttgggaacggtgatttctttcctttttagggaagacgctaatataggtggggcttgagggttcgcattctcggagttaggggttttgttggaggcaaagatgggttttatcggaggtgggtatcttttagatttaagggttttgtagaggcgggaggtcgtagtttcgcggagctgcgggttctcagatttgggggtttcttaggaacagaagttgtggtttcacagagctgagggctcttggattttggggtttcgtaggaggcggagcttgattctcctcgcaggtggaggccgctgtgcatgaagagtggccttgatttttttt

SEQ ID NO: 227547 - DNA, 2496 bp, Cannabis indica
ccttcatttcatctaagaaaaactgtgatctaggactgagtaacaaggggaaaagaaacccagtcaccaatttgatatcaccaacctctctaccccacagatctagaaaatcctagcttgggataatctgaaaatgccaattcaaataataatgttgttgaagctctaaaacccaaatacacaaagtggaaacatttggcactcgctaaggaatctctcgacacctacttagagttcataattaagttacaagagatttgtcacattcatatacatgtgaagacaaagtaaacaaaatagccataaggataagatagcaggcaaaagttctcctttttatttcaaaaaaaaaagcatttattagtaaagaatatatatgaaaactcatctccctaataaagaatcccatttttgttttttaatcttttttaaaaggaatagtattgatcaaacttctatacttgtatataaaattcactgtacctaccttaaaaagagttgagctgaaacttgagagcccaagctatgacaaaacccactaagatcgcatacaagcaaagccttaaccaaactcctctgaggaagaccaaacgaattgaaccaaaaaaaacgctcaaaacttaagaaacaaagcaatgcccatttaagaacatgaaaaaaggctcagaactctaaagttaaagcaacccttttccaagaaccatttctatattctgaagtttacattaaacaattgaaaaagggaatataaaacaagaacgtgaaggttcagctgaggaggcaaaacaaaactgagggaatcattaaatggtggtaatgagaaaaatgaggaacaaagtggagaaaaaaaagggtgcttgtttattcagttgcagagagatctaggagcaggaataataggacgtggattaaatattacgagaagaagtacatgttggttgtacaaaaacagtcaaatttgaaatctgagaattttggtgatggatatacagatactattactattagtattcatttatttaacatcccttattttaatatagtagcctagtcggagtagggtcatctcatcttcccttttattatattatattggtccatccaaatccaatggaaatcaaaacacatgaccacgtggaccaactaccaaagataatgacaaattcagtcaagtcgcctcctaacacctgcttttgtttatcaaccgtctataatgctaattctttttcatcttttttgtttaggtaaaacgtgtcaacgtattaaaacagaggacaactcataaaacaagattagtgttacgaaagagttcaaaatgcacaaagggccggataaaaatcaccatttaaaattttatggtaaatcattgcttcgaagaatgagggaaaaaaaaagccaaaaccatagtggttaaagaaaacaaatttatccatgatagtaggtgtagaaaattaacaacggttatcaaacaaacaagaataatccaaaaatgaggaaaaattttcaaaaataactgtggcttataaagtatgcggattagcattccctactgatttattgaaagagcaacccacaaaatcacaaagcagagagcagcttaaattggactggatttgcttatgaattaatctagtattagaaaataatatattttattgctgctataagcaattattgacaataactccaatctcaattctactataatttagcaaaactaaacaatactaatatattatttagtaacgactaacatcagagtcaccaagtgttgcattattagaattctatgctattttttaatgagatgataagtttttttttttgaaaaaaaatggaaaatcagaaagtgatggctaactcatcttcataccaaatcattatattacaaagccattctatcttcttcttcttttggatgtagcatctaattaatttgtagtttatattatctaaatatattcatgtaatttttttccttacaaaaagaaaaacctgatacttgtttgttttgaaatcgtgttataaaataaattttaaaactaaaattgactatatataattgtcaaaatgaacaaaaataatcagaaacaaatttagttcaacataatttttatttaaagaaactaatcaaactagttcaattttggtaaaattaattttatttataataaacataatcagatgtttagttaattatattcagctagatacaaactggattattttattctgattaggaatttcatatgcagttttgtttttttcttcagaaaaaaattataccttatatatatatattaaacagtataaattatgaaatttataaatatatatttgtgtaaattaatatgaacgtgaactaattttaaacatttctttatcaataatgctaatactagtaaattacaaattttattatatataactaaaatatagttacacatatttacaaaaacagtactcgtaatgccgaacaacacccaccttaacaaa

SEQ ID NO: 227548 - DNA, 7904 bp, Cannabis indica
aaggacttcaatctctaggtggaagggtgattcgcatgctcggtccagctcgagatcagtgagttttggaccgctcaggccttgtaccatatttttcagttgattcaattgtgctagcacaaatggatgaactggttcagcctgttgaccgacatgtgtcacgttaggatctctttgacctggatcctagataaggatacctagttggatagctgatgggacatactattcatctaggccttttcttctatttaagtcagtcttaaggtcatgcgcaacacctaacctattaaatatcgaggtaccaggtggtctcagcctctaacttgtttggccggtaggttggctagagatttcaatagagataaggttattaggagtaactccacccaaagggcagtcaggaaggatctggccgtctactgtttggcccacaggttgacctgtggatgtggattggatggctaaccattgcgcgtttaggcagaatgcccagcagcatactcttctgtaccgcccagagggatactagatgcggtagctggctgttgactggcaacttggtaggccctccttatcagtaaggtggcctgcctcgtgcgatcatcaatggttgcttgttgagcccttaaagtttccacctccctatccctccattctataaattgacgcatcttctcatgaaatgcaaggtttatagtggcagagagatcctcctgatcatggtgcaaagcgttattatggccttgcatgagtccaagcgttgtacggaggatttggatctcattataatctctgattatccgctaagcattagtggtggacgagacctcagtattgggaatggattgatcggctgctaaactggtgttcccaatctcttgcacgcctggtgtgatcccagtcagaggggaagtcacaccatggcccatagtaggtggctgtgtaattgcatgtttggggtctgtccctggtggtcctctcgttgtcctaggggtctgcacgttaggatctatcaccatcgggtcaccctgatcagccaggcctttacgggtttgcaccaccatcttgtacgcctgttgaaacttaagaaaaatagaaaactttggtatttgctctcaatgagagcaccaaaatgttgacctcgcttttggccaacgacagtgagtcaattaataagcgattaagagtataattaaaatagagcaaaaacaacaaagtattaaagaacaccagattttaaagaggttcgcatccgtgagtgcggtaatagcctacaccccttgagttatattaacttgagagaaagaacgaattttctctctaaaaatctctcttacaataaatctctgagtaattctcttagatctctctctatgaagcaattctttccatccctttcatagtgaggctaagtcactatttatagggccttaatgcatgagggaaggtttcctttttccttacaatgtataaaataggaaagtacatttattacataattatgatccacaaaacaagaaactagaagaggtttccatatttctcttatttgatcccatgattttagggattgccttcgtgtctgaacttcacaagatcattatgaagtagttaactcctgataagtagttcagaaagccagatttatgtctacccagatgatctacctttcatcctgctcgggtactcaaaagtttatatatgcagatgtacaatatggagtcttttcggaacattcacttccgcccaactgtgagaaatgcaggacacgtgtcacttgagtattcttccatgtcattatgcaaaaaaaattggataatacattcctacaaccataaaacaaacttgtgccaacaaaattgggatcatcacagtcacaaagttgttcaagtttttgaatttaccaacagacagggaattacatactttcaaacagttacacctaatgtcaaatatgatcacaatttaatgtgtcaatgaagaaccattcactggaatcaaaacataatcaagcaaactatgactttaaaacaagcatgtggaaccccttaatatagccagcagccttagaattcttaggttcagaaaagctattctccccttttctcagatagtttccaaacaactcaaaaatttgagttgcaaaacaataatcagttgtattgattttaagcttgatagattcgtcatacttaatcttctttttcagatagtaaaataagacatcaatatgctgttaatgattgatattttcggcaactaaatcattaatgctctaagaatgattagaagagagtaaatgcaagtatttttatgtggttggggcattaatcaatcttagtccacgagtctctaatatttaatatgcaggtatttcttacagagaatgttctgctctcttttttttcaatccctattacaaatatggttgggggtatttatagcagttcatcggagaggaaggaaggcctctattgtcttaagtgtccaccttggtcatgcacaagttcctaaattgatgaagtagggtatgcgcccctacctagtaggatgcgtagggtttaggtgagacaagcccttatccttccttgattgatgtgatagtacattatgtagtcgtcacttacatctttgattagcatgtaattgctaaagaatgggtttaatccgtctaacatgtattttcatattcgtccgtatacgtttcctccatgctgcattaaatgccaattaataatgcatctccagtatcctaagtctagaagggttgggtgttacccagcttctagaggtgaacaaaagatggatccctccggacctagccatggctccaggaggaacttttaggttgtctcaggggtcctgcctatgtaagattttcctttgactatcttcgggtccttaagcctaatctaccacatgtcgtgtcatgggatcgccacgtatattgggagaaaattggagcaatatttacccccaagtcttatttaaaattttgtaaatgagacttgtatattgcttctattctcagggagtgacgtggcaaataccctgcatgtacaagggctatttaatttttataatcattctgccttgtttttggcaggcaacgattcgattcccacctgtttgacagacccccttcattagtgtagatgtcagagaggtactcaaacgcttcaactgccattttcttttcatcttatgattttatcctgaccattgaatcaatggaatttgaatcggtttgaaccctcgccatacgatggcactcaattaatgtcggtgcttaccctgaagggcctataaaaacttataccttttgtgactgggttgcttacacactgcatttcaacttctaggctttataaaccctctcgccgaaattccagactctcccaatttccttctacttttccttcgctgttgccaggcgaactactaccgtcgtatggcagcttccacctctacattacctccatcgtgtaagttcttctttctttttacttttccgtgtagttaagaaaagtttgacaaattgtgcttcattcctttttaatggacattgtatgcaaattcttcctgggtaatggccatgcgattatccctggaaaatcttttctcaaaatgtctgatgatatatttttgtctttcttattttttttttctttggcgggcaaaaggcaagaaacccctcgtcttacatttttctttgtgtgagtattttgtcaatgtgaatcgttagattcctttcgtcattcatcaggagagggcctcttcccagcagttaggggacccccattctcctttttgacttaatatttgatgtggtggctaactgcttggcttcttatctttcagatgagtgaagttctccatgaccttcataaacatggtttctttgggttcaatgaggaaattcttgagctccattcctcaaactccatgtcaaactccaacgtatccagtgccaaatcctcaacaaaggcgacaaagaagcttgccatggtggaagatgttatgcaaggcccggtcgcttataagaaatactcttgtcgctccaatggttggtaggtcgatgaactccattcaaccttggcctgcggtcatcagctggagaagataatggttgtgaatgggatcaagccgaatggttctggagtctaccaccgtcttcccagggaagaggagacatcgaaccataattataatggttttggagcctggagctagacccatcttatgtccggagccatgttgactctgcaagactacttcatagacttcttagtgtttgttggactcaccccgtaccaatttattacccaagcctaccgcctgcttttaggcctttttattttttattttgctaggggttgggccacccctagccccgctgaaattttatatttttatgaatttctttctgtccctaagaagggtgacaaatttaaagacagtttttataagttacaagctcattcggccaatgaaaccccagtaccctttaattttcaaaagaacgttaaggaatatcatcacgggtttttcttttcttctaggtttaaggcctttgagcgtccgaatttgttaacggaccgggtttgggttcccccgatgcatcacacagcccccactcaactcttcctgaaccacgccaaagtctttgctggctataagaaggaagatttgaatgtgggggatttggcgacgaccgccaactaccggagggccaaactacttttggagagccaatcactcgaggacttcaacttgtccaatatttaccccaacgcttgcaattcgaggaatgaaaggacgctcaaggtcgacattattgtggctgctaaagacaaatataacaagtatagatacaaaaaagaataacagcttcattacgctcgcctccaaagtgcctctgggaggtccaaccaggagaaggcaggaaaggaaaagacgtcaggcaggcctaagttcccttttccagttctaaactccaagatccctggagccagtacctctaaagcatgtaagtcccctttgaatcttcatttctttccttcatctcaagattactcttacttaaggctagtgggttatgacatgaggttgtataagtttcggatgccccatactcggtggggaaataatgcaaaaggtttatatttttcaaatttgagccatttcttgggtcgatctcaaatgggctcttgtcctcatgttcccatccttttggatcatacctactacatgacctcgagttggttccttcctttagatagtttttaagggatgacgacaccaactctttaatttatgaattttctaggacagaattagagcatcagggtaggattagccttccttcctgtattatacttgtatatgtggttcttatgtgctttctttttaaccttttatttattttgaatagcgaaacccaaggataatctggtgaccatgctagccgccactcatagtcttgagtcggaggtgcataatccttcccaagtggtggtgactcccggaggtccgaccgaagaggcgcccaggaaccaagaggcggtgttaattgaggaagaggaggaagaattacccccacttgacaagaaatggaaaggtgtagtttccattctggagccttccaaaaagccaaaacgctctgctacccttgatcctagtgctgactccgggatcccggccgaagttgaacattttcctacccctttagccattctcttaactctagctcatcctgatgaagagtggacccagctctgcattgccaaacacaactatgtcgtggatgagctgtcgaaaggcgatgttgaagctgaggctctaaaaaagtggctaaaggaggttcatgatgggcccttccaaggcgagtacattggggaggtctgggacctaaatcttgatctcatgaccgactggttcaaatggtacttgggcccttctctggaaccctttgctttcgagatggtgagtcattttattgctgacctaactcagctcccgaccaagaggtatgcgacttgcgcctcctccaaccccatctactaaatctaggacatgagcgtagcccttacttccataagtatatattttttgagttttcttttttttttttatatttctcttggagatctgacccattcttgctaattgttgtcaaattgctatggaggcagaccgtctttctaagacattaatcgaccaaaggtttgtcgtttcggagttgggtggcatggacggagttttaaggaagcttaggtagatagagagccagatggagactcttcagaatgacactttggcggagaaggccctcagggagcgggatcaggagactctaaaggccaaggatgagaccattcactttagccagaaggaccttctaaatgctcgagaggagatttaaggactcacaactaaactcaaggctcttgaagagttacaaaaaactgacatggaaactataacaggtatgtcggttgagctcaaatagttgcgtgagttccgatatcaaacctagaaggaggccacgaaggctgcgagggatgcattattaactccggtgacctgtaagcattatgtgcagtgcttcgaggatagagtttttatatgctagaaattgaacaagtttaaacctcccctccacttcatgcctgatcccaaggctacggtgactcgcttttgggagaagaataagaagctggagtaggccttggctcagcagatgagtccctgacttcctccaagaattgattaattaaacctcatctttttcatttccttttactactaccccttttaagacaatattttaattttttagtttatattatctttcttttttgttaggggtgacatttttatagcctttccccaggcttatcttttttggacaactttcattctaagaaagcacttgtattgattacctctttgagtttttagttttttcctgcctttgtgtatatttatgccatggtatcccctagtgtcttaataaagattttaggtcacttagcttaaattttattaggataatgcatatatcattgttcgctacaggttagcttaagaatgtaaagatgaaattaaatattgaactcctaactattgatagtattttcggaggtgatcagcattctaagctcttgggattatggatccatccattcgcttcaatttatagtcctggagcctatttcatcttcaatttcaaacgggccttcccaatttcgtccagtacccacactcctggttcttgggaggctaggaagacccttcttaggaccagatcactaatggaaaatttactgttcttgactttggagttaaaatactttgccactttcttttggtatgctaccatgcatattttgactcttcctagagctcatctactaagtccagtgtcacttctaacaaggcttggtttgtccttggatcataagtagttcttttacgggagaggattataatttccactgggaccattgccttacatccatacaccattgaaaaagaagaatgttcggtggtagtccttcctgtggccctgtacgcccaaaatatgcggggcaaatcttcatgccaattcttcttgtaggctaaaagcttttacttaagggtgaccttcaatattttattgacggcttccatcttcccatttgcatgcgatcgtgctacagcggagaaactcttgatgactccatgtttgttgcaaaattttgtgaactcatcacaaaagaattgtttgccattgtccgagactatcttatgaggtaacccatatcaacacacaatgtttttgatgatgaagtccaaagctgttttagtcgttatagacttcatgggttctgcctctgtccatttcgtgaaataatcca

SEQ ID NO: 227549 - DNA, 3263 bp, Cannabis indica
tataattatataggggtaacatttttttattttaaaacatatatctacaatatttaatattagaataatatgtttactgtatttttttgtacagaattataggagagaaacactattattataattatatagataaacgagatgtgtaatgattaaattatgtgaataacatttatgttgatacctaaatatttaatataaaatagactaataaattaaatatttatgtatattttattatttgataattagatctaaaaaaatacaatttgaaagtgatacataaatatatgccattttttaatttgtaccataataattttataaaacaaaaattattttaaaagagtaaaggtttggtcaaaatataaaaattccatttcattccagactataccaaacatcacaattcttattcagttattgattccgtagtctttatcaaacaaaagaacagaaattccattctattcctattaccattcccgctcctattctatttttattttgtaaccaaatgccaccttagaggaaatcagacaaaatagaggcaggaatgcaagggacattgaagtacttataaagtggaaagctctaccagattttgaatcatctttgattgagtacaatatgatcaacaatcagttttcagattttcacattgaagacaaggtgaatgttcgggcccagggttccacctattagtcttacttactctatgcatcagccaagaaataattagctaagtaattttcacttttgggcttaactgtcattgtgttttatttaattggctggcggggcctagttgttttaaaaaattaattgggcaatccagggcttagttttgagtcaatgggttgagtatatatgtatatatttatatatactcagcttttctcttaaggatgtgtggttattgtgattgtggaaagtagtaaactcttttttgtggaggtaccaagtgtctcaaagggctaggaaccttcccaatctaatttgatgccaacacagatttcattctagttttctccaatctattgtgtgtcaacctgtgggtctttttcaatgttatcttctctttttggattgcagacattgcattatcagcttaaacaggttgaagaagctcaacagtctagtgtctatttgctaatgattgacaggtttgttttggaatgtggtgtattttaattaaatagtattttttctcttaattgacaggtttgctttggaatgtggtgtattttacttaaatagtatttttcgcttctatagttctaaatcattttttttaattgccaacaacttattgtaatacaaaggggaccctttgcatatgtctcagttcaactaaataaagcacctagaagctggaaataaatgatagtgtttctgaagatttagaggattttttagattttactggataaagcaattattgtttttatgggtgtttgataccaaagaatctaaagaattaccttttactatttacatagaagctgctgtagtcttataatttgttattacttttataatctcatttcatctaaatccttgttcctctgtattaaacaaatttactgatagattgatattaataataaacggctaatctattctttttttcagcattggagcttttcattgggttgaacgtgcttcatcattttctcagtcaagtacacacaggtaattgtatctatgtgttgaattggaacaatagatgatacgtcccattaatttcctcctttactcaaaatttaatgaactgtcatgtgttaggattgtatccttagcttgttagtaaaattgtaagagtatatgtattggcttaccttgttagtaaaattgtaagagtatatgtattggcttgtcagctacaaaattattaagatagaaaggaattattctaatatttttctgctataactaatctctaaataggatattcttatcagtaatggctatctgattcttttgtaatttgagagcctagctctactgggaaatagagaggaccaagcctctcaaaagcttggaacctatgctatcatttgtgtgtttctttcactacgataagaaaggaacaccagttttattatttagtttaggctttttagaatttttggtctccgaactattgtggctgccacgtttatcagcagatttaatgtcagggacatgcagcgcaataaaatccattacttttatatgagttatttataagtgctacaaaaccaactacaaagggagttttcccttagtttaatatagtataattccaagcttttctatcaatttttattttccccctctaacaaacaaaagaagttacaagtcagtgtctctcctgattatgatattaaaatgctgataagaacatttattctgataagatcatgtcttgtgtggtcatatttgggtgaaagtacaatcgcagatgagtaggatgaaatactatggaaatattaacagcttagtttgcaggaaaagcctttctcttcagagtgtttcagaaactgttgttcaagagatgaagaggcttctcctaatgcatcctatgcttgttatagctacaaaaacagtcagcttgggggacagatacgccaatgaggtccaacggttagttctcgaaacttatatatgtttttgttggatgcttctatatgtgaaactaattgattttcactctgtacttaataaatacattaagactgcagactggttataaacacataagccttgccccaaatttactataacacaattagcaaaccattgtagatgtggcaaatggtgttgccttctgatgtaacaaatttcttctgtacccacgtggggagtttgtgcacctctctcgagggttgaatattttgttgatcgataatgagagatttgtagggtctggttcaatatcatagttgtaacactaatgctaagaggttagctgtaattactaattcgatatatttccaaacatccaaattgaatggcaatagcaattgtgatttggagggttgattcatttgttgttttactttcacttatgagtttagcagactggattaatgagtccagctctcattctttgagttagtctaaagggaactcctctaagggcctgtttggttagcaggactggattggattatgaagcaaatgagagaaaatgatttgtatttttagatgatcaattttagtatatacaaagggtatatataatacattgtgaacacttagaacactagagtaaatga

SEQ ID NO: 227550 - DNA, 3292 bp, Cannabis indica
attaaagattctcagaattttaacacactaccaacttattttattcatatcgtataattttaattctcttgtacatccttacaagattatacattctctatatggataaagaattttcaaatatttaataactatactcttataattaatatatcagttatcttataattgtaaaccttacctcaaaatttagtatttttttaaaaaaggcccataaattttcaaagggatttagattttgtttttgaaaattttcaaaactatgattctcgttttaaatattaaaaaatgactaaaattcagtctattaaagaacattgtcaaaagataatattattaattcctgaattaatgactataaggataaatatagggacttcttctttatgataacagcaagtccaacttcacaccctataaagttaacattatcattattatgcactttcattttattttatttctctaacttatatgcccaatttcaaataattaaactatatagttgagggggtgaattatattcaactttaattcctagaaaaaaaaattgtaacaaaattaaatgatagaactttcaaatttaaaaaataaataattaaattgtcctaatttaaaaaaggatatatttcaaaaaaaaaaaaagaaggatatattatattgttgaatgatgatagagaataaaagaattaataaagaaaaagaaagagacaaatagatatgcagtgtgtcaaatcaattgcagaagatacattgaattagaaagcgtctctctatagcttaatcatatcatgtggatgaaactctgaacaacaaaatgtagaaaattaaaagaaacaaaacaaggtcatatttggagtggaggtgaggtggtagagtcttaattgggatttttttaatggaacctaccccaaatattgcttatatatacattccacatcatcttaaaattaactaatactcatattataaatacacaaatacaattttagttcttatggattatattaattgctatattatctttccatcctgtacttttctatataaaatagattaaagagtactgtaattaatcttatactttacacattaggctaattcactaattaccattagttgggtcaaattgatagtttgggatcaaattctactccatacggtttggattttgtgccctattattgttataagggattgcacttggttagtgatgttttataaaaattaatatattaaattatataagactcaattaaaaatatttaattgtaacaatagtaatataacatatttgaatatattagataccactaatattttttagtattttttattatcccaactcatataaaagtaagaatcatatctagttgtaccaaactcttatatgataatttgtaggattgatatcttcgtatcatgttgagttgcatatcatatttctaaacaaacaaatatttattatttttgttaacgttaaattattgagctttttaacatgtatttttaggttagttgattcttatttaagtgttatacatttaagcttgtcatgctatgctcaattaaattgtacataaaattttgtaaatcactcaaaccaaatcaaaaaatttaataaaaaatacaaagtcaaaaaactgacgaaattataacctgcccaacgagttaaaaatacaattaacttgtccaataaacttgaactaacttaaccaacctgattgagattttattaaaaatagttttcattatacataatataatttatatacatgtttaaatatagagtaatttgcggcataaatacctaagtttaactctcagttgtaaataaatacctaagtttagtttttggcggtaataatacctaaattataattctggaacttttgtaggtacctgactgttaattattaagtaaattgccacgtggcaactcctaattggtccaagtcattaaatttttattttttgaaaaaaaattaattaaaatataccaataagaaaatgacacgtggataatgacataatattttaacggttaggtacctacagagttctaaaaatataacttaggtattatttccgccaaaaattaaacttaggtatttatttacaactgggagttaaacttaagtatttatgcctcaaattactcttaaatatatataaagtttaaattatgtttatctcatgatggctaatttgaactgtttatttaaattatatttgtcttattaccacaaataattaaaatataattttttgtaaaaaaaatcattagtgatcagtttggaccaaaccgagcaactcattagatgagttactatttttttcttttttttttttgggcgggtatcacttaaattttaaattttgtaactcttaaaatgaatattaatgtgtgattataattagtagtatattttaaatttatgtatctattttgtgtaatatttttcttgcacaattctttaaattctttaaatgaaggtgttaaaattgagaggaaattacatataatatgagaattttgttgtgtcttacaaaaatatggctgttttttttattattaaatttttatggtatatttttaaagggattcttttctatatgtttttagtttctttttctagcaaccaggttctcaatatttatgaatgtatgatagtaattagtttatatatatatataatataggtgtatttttttttaataaattatggagttttaataataacagttaactaaaataatagcatgcaatctaattaggacatctcccttattgaaaacacgataaggattaaaattagaaaaacgagtcaaataatcaaacgcctgattctcaaatcgtttaacaaagaaaaactaaaataaaattagatgaaaaagaatgcaccatcacaataaattttaagaacacctatattctattttatctaccgctcagaagacacaatagtagaaattattgtagtaggttaattgaacctcatagcttgagcactcaactattgtgtaagatacgtaactgcactactaacaacccattcagccactaagaacttgttattcccaactactaacagcaatttgatggcgagcaatcgaagaaccaacgacgaaacaaaacaaaacaaaaccatgtcacgctgacaagactaaaacactcaaaagtatatcacagagacaagactaaaatactcaaaagtatatcacagaaataaaactaatcgtagtaataaaaattgaaattatggtatcaaaacacaacctcgaccaagcc

SEQ ID NO: 227551 - DNA, 3689 bp, Cannabis indica
taatattatgcaatagatttgcaattgcaaccagttttatggattccagaaactcagatttaagaaattttgtgccatgattataagtatatgaataagatatatgcaaatgtgttaattaataaatgttgggcacataaaaagagtcaatataataataatggtcttattattagcataaaatttggagtttttttattattattatttgagagagagatctacacttcaagttcaaattctctttaagaagaaagcaattaaggaacataacctaccacatctaactttctgtcattatttaaaaacatgtaaatttcgttatttattttatttttctttaattttcctcttttggtaataaagttaaattcaatgttttcccctaaaataactttgcatatcacttggaaatttcatggtatacgacatttttcttttgttatgctccactgttccattgtttttaaaattaaaataggttggtattgaaagtagttgataacagtaaaggttttttcttcttatatgtaaatatttattgctcttttattgtttttcttaggatccactgagatcgaaaagtacgtatttaaagcgacaattaacggattccgttacggaatttactctctctccgccgttaaacatttccgccgaaacgtttactctcgtagcggactactgttacggagcccatctcgtcgtaacgccgtttaatctcgcggctcttaaaactgctgccgagttattagagatgacggaggatgacggtgacggtaacgataacttggtgcagtttacagactcgtattttcggcgagttgtcgccgttaatagggagtacgcgactatagttttccgttcgtccttgtctctacttcctgaatccgaaacggcgtcgtttctcgtgagtaagtgcattgaagtgttgaacttaacggacgatgatgacggagatgacggcggttttgacttgtttgaagacgttatactaatggttcaccctgacgactttcatatagtcgcagaggccatgcatcgtcgtttcagcagtcatgatgtcgtttataagattgttgatcaatatattcgggtaagtcatccctcttaagtcttaaatagtttaatttatattatttcgatttttgacaaattcaccttctatttttataaagaaactatatattactgttttatttatttttaattttaaggtttttggtatgagtaaatacaattatggttttgtcagaaaaattagaaaaactacaggctccttcaaataataataataatagaaaattattagcattaataaaaaataatttgaaaaaatgaatgattttttaaaattattttaagttaattttttttaatatagggggtctacttataattttgcttactctctatatatatcattctggactctgtgtttaataaaaattactaatttttattccattaaaataataaaatggacttatattttacaaaatagtaaaaatataacaatttataatacgaataaatacaaaaaatgtaacacttttaccataacatctctaaattgaattattattacgttttattttgattaaaaattcatttagcttctatttgtactattttgaaaaacacaattagtaacttttgcaaaaatagagtctaaaatgttatttaaaaaacaaatttagtcgtttttaatttttataatttttggtgtgtattttttttttcatttatcccaaaaaagaaacaaagatagtaatatttggtatgtgtattttagatagttttcaaaataacactttttgagactgtataaatattagttatttttcaaaaatcctctatcatttccttttttatatggagattattttcccttttttaaaatatatatttgcacctttatttgcatgtcccattagattttttaggtacatatataagtaacaattctgtcggttaagtactcttattaattacccagcaaaaaaagtactcacattaattattcataagaaaaagaaatactcgtgtttattagaattatatcaagctttttgtttattgtctactctctgatttataccaccatttaatgtctgaatgtacgaatataatacttataaattaaataaaatcaaattgtataaagtctttttttaaaaaaatggtaatcaaatagcatttgtgaaattactttaggatggtcctattgtagtgttgctttcaagattgggccgatatgtgaccctttaattatagtgtttcttgacttttttgaggctttgggctaccaattatccaaatgtacaattcaactatagatttcgattagtaccaaaaagaaaaaataacaaacaaacaaaaagcaaccactccatgtaatgtattgtactccgagtcctaacatgaaaattgcaattaattagaatagacaatagtataattaagggataagttaaggaatatttttgtatatattaattaacattatttttatattattttattaaaatatatttatttttgtgagtaagttgtgtaatatatcaattacctacctaatttatattaatctagtataattagaatattatttataaaaaataatatgtaaaataaagtgggtatgtaaactaatttcactattgtttttactaattatgggattattaattgattaatgacagggacataatgggaagatgacagaagaccaaaaatcccaaatatgcagtagcatagactgcaacaaactctcccctaaacttcttgtggaggctgtccaaaaccccataatgcccctcagattcttggtccgagccatgttagtcgagcagctcaacacgcgccactgcatgatatccaccaccacaaaccaccaccaacggccgccaccacccgccgccggtacacgtgacactcctccgcagtccgttacaacgctcggcgccctactccagcgtgacgcggctcaacgccaaaactcgcagctcaaggcctctttagaagcgaccacatcgcgtatccaaagcttagaggaagagctcaacggcatgaggaagctgttaagggataattttcttgatgacgtgtccagagagggcacgaatagaataaccgatcgcgagtcgggtaagtcggctagcttccattttggcgccgagaaaataataataataataaggcgtgtaataggggagctgcttcgtcggctagttttcgcagtggtggagagaaagtagttagtcgaagtccgaggagcaagaacaagaagttgagtgagagattaatgagtgggctaaagaaggctttttgggtacgatcaagtgataatattaataataataataataaggtggatcatcatcaagataatgatggagggaaatattacaacgagatcatgttattgtgattatatatttaaatatcttataaattaggtctaacatcagacaattatatatattgtattgttttttttgaaggaatatatattgtattgttagtgctataactaattaatttattaatttgtttctctacttccactttttcttttacgtatagtaggttcacttttatataaaatatatataaaattatttgtggcagattatttttttattagattcatttgagttggttggaggtaatgaaatggaatgaaa

SEQ ID NO: 227552 - DNA, 2613 bp, Cannabis indica
tgcacagcttacccggtatttcctcttacagatcacgggactactgactgtcacaggccaaaatcaaagttccaccactagaccaccaaaagagggtaggaatggctaaaaccaacaccacaaacccaattggaccaaggtcccacacgccaacgacctcctcctttttccaacataacccttattgagaccttaagcaaccacagcgagaatcaaaggatcaaagtaacttggtatgagatctcgatcatggcacctaaggcctcagagcacacccacacaaccaaaccacctcccactgacgcccgcacccatggaacaaacaaccaccaatcctccaaatctatacttacaaagtgcacccaggcgagaaaaaatgtcccttaactagggaaaagcccggtggcctccctggccgagagggtgaagaaaactagacaaaaccctagaaaagaaggaggagagaatgtctcgtgaggaacttctatcttgacttacgtcgacccacgtccatgtcgtcttcaacatctgatcttgtcactgctcctacttcttctcaatggaatcccttctctcattcactcatttcctcactcacaatcaagccagatttctctaaattttattgcttgaaaattgcaggtggttcctgcagtcattcgtcgtgaccttaacgagatttcgtttataggtatctccccacctcaaaacttttttattggtgcacctgttcccgagtatcaacaatggcgtcgcaaagattagctcttactttcatggttgcaatcgccaatgtctgaaagttttcttgcttcagtcgccaacttcaccacctttttcaacatatggtgtgctcttaagcaaaagttctcgtctcatgccaaagttcttctactacaattgaagggtcagtttgcttacattcaaaaaaggaattctctctatctctgaatatgtgaacaaagttcaatcgatctttgatgctcttggggtggctggctcttcgatgagtgattaatatattgtattacaacttccaaatggtcttggactagaatacaactctattgtctccgatatcacttcaagaagtgatgctttgtccattgagaaagtccagaccctcattctctctcacgagagtcaactcaaacatcatcatgccatgacagatctatctgtaaaatgcaagccaatcttgcatttggtaatgggagaactggaggtgttcgtgttgattttttatgttccatatttgtaacgccctaatacttagacgcactacagtaattttctaattaatgtgccacctttgctaatcaaaaggtttttctcagaaactgtgccaaattaaatatttaatttaaaactattaaactttataaacatatatatttacataaatcgagatcccgtgtttaaacttttacaatttatatatcaaaatacttttacaaacttgtcgcacagtgattacaaaatacagcccaagatgtcccgagactgaacacttcaggtcacgctgtttcgacatgtacaatcatcatctgagctcagaactcacacatgttcagacttcaccttttctttacctacacacgaaagtagtatatgtaagtcgacaaactcagtaagaaaaacatataacataaaatatattattgactcgcctcaaggcgcccatacacctatccacaaggcttatcagataagtaagaacgttctttacatttggtactatcgaccatgatatcagtcactaccagcgctatgattgcactgcgggctcgatactatgttcgtactgctatgataacatcgatacatcgataatacccaaaagtataattgaccatagtatcactcttaaccaatactatgctcatactgttgaatcggtactatgctcgtaccattatgatagcatcaataaatactttctgaaattacatatcagtcaaacctagtactatgctcgaattgttgactcgacactatagttgtgtcgctatgatatcgattcataatatttacaaatcacatacacatcatgcatatattacacgtacacatattaacatatataacatattctatgttattcttacatcgtctcctaattcaagtgtgtcggtcaacctgaatagaaattcacgcgctgaacggaggccctatgtcacaatgtaaactggtaagtgtttactctagaccacttattttaaacctgaatagaaataaagattttccaccaatctacctacgtattttggctctaaaattatacacatgctataaagctttgaaacagtatatagaacatctaaaacggacactcgagtaaaaagttatggctaaaatactaaagttgaccttcagggaaggtaaccttcggggaagctaacctttagggaaccaaccttcaaggaagctaaccttcagggaagctaaccttcagggaaccaaccttcagggaaccaatcttcagggaagctaaccttcagcaaaattaaccttcagggaaccaatcttcagggaggctattctttagaaaaccaaccttcagggaagctaaccttcggcaaaaactcgacagcaatggcacagaaatttcca

SEQ ID NO: 227553 - DNA, 5076 bp, Cannabis indica
ggttcggttccatgagtcgctacgattctaacccttttgaagaagaagaggttaatcccttcgcggtaagttcttttctcaatctttatctgtttgtttatgtacattcccatagcctgatatccatttgcgagggtgtgtggaatttggcgcgccagatttggtggattcttattatgtttgttcgatttcgatttgtagttgggtgaatgagttagttttttggtgatttattataattgttgagattatcttaactctgtgatttgaaaacctataatgtatgtagttcatgaaatttgtgttattgatttcgatttgattctagttaaatggatattgtgcttcgttttggattcggataattggattagggacaaggattccatttgaggaactaaatctccaatctaaacatattagtttttggatattactttcctttcttatcctgttttagttatgtaccaaaaatttaaagagttaactcaattcaaggaaataggaaagtcattatcttacgttttaaagaaagaaagttatatatgctccattaattagctctactctttattttgcacttctttcacgagatgttgtggcacacaatgtttgcctgattttattcattcttttctttgccattattcatccacagctgatgggattgtataaatatatatgtttatatatattgtctttggttgagttttgttgcttaatgaaaaagtgccatttgtttcgatttgtattgtttaatgctctaaatattaggaccatggaggtagagggaaaggatcggggcaatcgaattatggcgggggtgctttttacatgacagtaagtttgcccttcgcctttcccttgcacataagcatctgaaaaagcttgggcaatgagagagtgcataatttgaatatttaatacaaactgccctttacttttatatggtcattcatataaagcactcttgagcctcacttttaggttgtcaaaactagccagtactaaagaggcttaataaataatcaaagaacatgtgaataagattttgaggattgttgtgtttgttcataagaatcataagcagaataacaagcaagttacaacagttattcttgagaaaccgaaaaatagcatgctttgacttgttcctatttcctatatccttatagtagaacacaaacgttttacaaatgcaacaaagagcatctgattaattatcaataagctgcataaaggaaatatcaatgttagccaacgaaggttgtaatgtagatgacatcccttcatcttttataatgcaactttagagttttcagtgattatgtttccatagtgattagggtatattggttagtaattatttcagggttgttataacaagtatagaattatatgctcataaatatttaataacttttacatttatcaggcccattagactgatacttcaactatcaaatcatcttttaatggaaaaaggaatgctataacttttttttttttaatttatatatcttgtttgagatgtttgatgtttgaatgtttagttgtgatttaattgagatttttatctgaattctagtattatgtttatgatttatgatttatgctttatgaattttgttattggttcttgctatttgtacactctttaagtgtttttttaatggaaatcttgaggcttatgtctcaatactttttggtacaaaaattatcctctgttcaaacatttgctattttgttgatttacttttagaatcctggaagtgttcccccagcaacctcaaggctttcacccctacctcctgaaccttatgatcgtggtgcaactattgatattcctcttgacaatgcgaaggtaaattgcattgtgcactaatcttcatcctcagtttatgtatgtgtaccctgttataaattttcttcttcttatatatcattaattagcttcttaaatttcaatttactacattgcaaatgcttatatagttatatgtttgttatgctctattttactttttgaggcaaatatgagaactttcttttctagtgatttgctttaaacttaaatgcttactaagaataacatttagtcatcttgtagattgagttgtacttgtatgttagtagaacattgaaattgtattttgttttactgtttctttgtttgttatctcaaccgttctctcatgtataagtgtggaaagttttattgctttgcttttattgtgtatgatgtagaatttaatcccgaattttgacgataacattaaaattgagtttggatcctcttgtgcttttctgtataaattattcttatgtacatttttatgctttattgtagtaactcttttttaactattgattgctatggtttgcaggaactgaaaaggaaggaagatgctattcaacgaggttctaccattttcttaaatgtgcttcaaagaaacacatgaccatgttgtgccatgtatttttttacataaatatgaatcacttgttttgttttggcagctggtattgttatagaggagaaaaattggccaccgttttttcctattttccatcatgacattgcaaatgaaataccaattcatctccagaggatccaatatgttgcatttacaacgtttttgggtatgttcaagtgctgactagaaagttttcattgtttgaactttttaagatatatatgtatatcttattatcatacattatatcaaatttttttttttggtttatgttccattgtttcagtacttagtcgtaagagtagctaactgatattaaaacttaaagatcattgggagacttgtatcagtatttcattttgtttttcacaaatattaaggttttgaacatgccattatttgtttagacatttttagttaccatttacatttggttgcatagagaaagtaacaaaagattggaatgtttcactcttctatgacttaaaattattgaaaatttactttttattctgcaggtttgattgtgtgtcttttgtggaatattgttgctgttaccacagcctggatcaaaggagaaggtgagttttgcaaattaagtgcttgcataataactgcattgattttttgcttgatttggtttaaacttgtctttacttgtaggtccgacaatatggtttctggctatcatatacttcatttcaggggttcccggagcatatgttttgtggtatcgccccctttatcgtgcaatgaggtactgatatggtattgtttatagtactttatgatatggtattgtttatatgtgactagggaaaagaaaaacagtgaagtatacgacacttcccacttgagaggcctgtaaattgaatccaaaaattgatttgcgaattacttgttgggaacaaaaagattttttatacactgtatattttgacatgatacaagcaagcaagtttagatggtaaaacaatctgtattcatagccagctatgcatttataaaatttgtatggacatactttcttgcgatcaaggttatagattcagcattggttttttatttattttaaggaggggagagggtatctgtagatatcagtggagcaaaggcatattgtggcatagttccaataatatttatttaattttgttagtttgaaacattttttcccattgatggaaactgctgttaggtatgatctttgttgagccattactttgttccagtaataatatatattatgtggtcaacttaattactttatttcaaaagactgcatattagctttcttaactgttatgcacgttcaattgcaggaacgaaaaggccttgaaagttaacctggtttttcctgttctatctggtgagcataagagatgattttaaaatataagattttttttcattaaataaaaaaagaaatgacgataaacatttcttacttctttgctctgattttccttgtagctccatattggcttttgcatctttgctgcagttgctcctcctattatttttaaggggaaatctctgacgtaagtgttctttttgttctcattcgagaagattttttgtcacaattatggctgtcttacacatatttctgaatctaaaactgaattttgtttattttacataaacagaggtattctgcctgcaatagacgtgttaggtgatcatgctttggttggagttaagttttttttttttcttaattgttattgttattattattgatttgttaattaattaagtgcgctcaaaaagagtactatcatattagtactaacttgtattaacatgatgaccactttatttattttatcttccttcatttatgtaactgctttaggaatggcaagaagttgatgtttgattttgaatagtgactaagaatgcttaataattgatgcagattttctacttcattggatttggactgttctgtcttgaatcactgcttaacatctgggttattcaggtacagtattctgaaggttgaccatcttggtcataatactactgtcaccaattttctgatattttctttcacgtgcagcaagtatacatgtacttccgaggcagtggtaaggctgcagagatgaaacgtgaggctgctagatcaactatgatggcagcactataataaggaagccttcattttggagaagatacttaggagcagggcgattttccaacatccaatttcttcattttgccattccttcattcggttgtttcgcagcttgtttctagctatacttgatgtgttttattatgttgattagagaggcatgttcaaggaccagatgattgagatgagatacttgttacaaacttagctgtgcagtcagagatagttgcatctttgagtcccatcttggaagtactgttttttgttttacatttgtttttttatatataaaagtgattgtttctccctccctccctccctccttttctttgtcccactttagggatactgatttgaacccatatttgtggtcttgcgcagatttttgttagggttgtagtgtctgaattctgaatgctttaacaagaacacacagatgtttgttagggttgtagtgtc

SEQ ID NO: 227554 - DNA, 2392 bp, Cannabis indica
aaagattttaacaaaactaatatagatataccataatgtttaaataatttgcttctaattctaaaaaaaaaaaaaattgaaatgaagacatttactaacatagtcttatgatttagggtcatttgctatatttttttgaaatgaggacataaactaacatactcctatgatttgggaccattttattgacaaccatttcaatgataatttaatagctaaaaaaatataaccatgatggttacatatttaattgtaactattgaaacctcctttattagtgtttatatatcattataaaataataataataataataataatgataataataataataataattccatttttttcataatttttatattattattttggtaagaaaggaaagaagaaaaaagttggatttttctctactgtctgtgatacatatcttccatttcaggtagcaccgattgaatacagctcttggtcacgtatggaaacctcttcactctcccagcaaacccttgtgaacccacacccaccaaacccttccccacttcaacatatatataaaacactctaaacaacaacaatgccgtcacacacacaaaacaaaaatatatatcatcattctcccaaaccaaatcatcaccatggattccttcctctcctcatcctctgtctctcaagaagagttcaacatcttccacagggttgaccgacttctctaccgtcgtctcgtcatagatctgcgccgggatccagcccactcatctcaagtcatggctctctggatgtggctagagcacactctcttctacttccgagggagtggttacgatctcatctccaaatatgtcattgctctccccgaaacacttctcattgcctttgctaatgaatctgaagccgtcttgagctgtgttgagaccgatcatttccccttcgcttcttccattattcctaacaccaccggggccacccttcgtccccgcgccccagccctaccgatgttcgagatgctgatcgattgcacggcgagcctagaagtcttttacaagatccggcttcgagtcatctggggcgtcgctgacatgagcaatagggtttgtgctcgggcttttacggacatcatagctgaggtgactgagaggaagatggttgagaatatggctatgagtgaggctattgaggctatgtacggaggaggagtaggaaggagatggcttaacaatatgaatcggatgatgatgatgatgccaccggctggttttgcttataggtctttggatattccgagttcatttcctgctggactttttcagagtagaggttatccttatcaacacagatcaatggtgccttcggttgatgattttgtcatgccaactcggcctgctgctaatgctgtcaatactactacttacagtgattatcatgctgcgattgttcgtgatgaaatggtcgataatgataatgatcattatcagaagaatgaggagaggagtttcaaagctgatgaagatgttggtgttgatggtgatggtgatggtgatgatggtgaacttgaatttgatttcatgagagagatgttggacagtttgcaactgaatgatggtactaagaaggatgatgatcctgatttgaggactatctttctcactttttccaaagggtaccctatttctgagaaagatgttaaactctttttcaccaggtatatatactacttaactaatttttggttgttcatttttataatacgataaacttaaatttattataacctaatattaatgtatcaaaggagtaatatgaaaatgaaaataacttagggcttatataatttaattgtttgggaataacattaatcgacagtacaaatgagaaataattaatacatatctctctctggaataatatacaggtctagggctcagaatatagcattgtataaactatgtatagggctaagaaatacatttttgttttgttgaaaaattgaaaatatgtttgaaagatctcttacattgtacatttatttgaaaacatcatgacatacatataatttgattatttttcgatacacctggacctatataacactagtgtctacatgtacattatgtgtcttattattaaaagcaaatataaaaccgatcccctggttgtttgattaaattattatgttttcccttagtattggaaacgaaactagctatttaattaatgtataatttccgtagcaaggagcacataatttcaaaatatatatggtgataaagctacgtgttcttttatatctcttattaaaaaagtacactatatatatatatatagaatttgactcttgtaagtcttgtttatgtatatgtatattggccggtaattggattacactcatatt

SEQ ID NO: 227555 - DNA, 4301 bp, Cannabis indica
taagtacatataaaaataaaataattatttattaattagtaaacattaaattttattgtattttttattaattaaaataaatatttttatatattttatcactatgttatttatttttgttcgttatgtcatttataaacaccatccgcataaaatttatgtataataaatatatatatgttattgctaataatataaaatactcagttaaaaaaaaattgatctcacgaactaaatatatatatatcgtaatattttatttataataaatgataatattattggtatttaaatttatttattaattcaaaaatgttattcaaattaatataatggaaggtaataaatcaatcctactatttttaaaggtgtaaacattaccctcctcaagggtagttatattactaggggaataacattccaaggctaaaccctccaaacaaacaaggtaatatttcacattaccattcctttactatcattaacctattccaaacagcccctaagtattattcatttagtttgaatcgagacttgtagtgatatcttgtatcttaattaattgataaaaatcactcattattttttttattaattaataataataataatacaaatcaccacacccctaaaaatcagagattaccatacaataaataaacaataatgcaattcataattatgaatgcatattcattgataataacaaaataataatgtcgatgacgcctatccatggctgaacttcatagcttcataatagctttatttggttttgaatgaccaatgataggtcatgaaaatttttcacatactagttcttacaaatgacctctgtatgtaccagaatacctttattttggtttttccaaatggaagtgacttctgaacttatgatactgtaaattgtgcctcattccggagaatgatcctctttcaactcttaagcaacccaattcaaattctggaagtgagagcacgaaaattcctgtatattttggcccctgaataaaatcgagtatgtgtctcataagacatgattgtcagccttgaagatacatggatatttatttggcctgcaacacaagcaattttaattccaggtagagtgtagtggggagcaaaccaaaatttcttctcaaataatagttatgtaccaaaatctgtccagcaagaaagaccctggtcaaaccataattctaagcaatttttctgcaccaaagctcttcctcctaaatctaaaatcttcttcagattaatggaagatggatagttatttctaaatccccattattttgagggcacaagaaagagatgtctttccaagtaagaaatatctttgtccccttggctgcacacctattcaatttatccagtgtcatagtgatactcagaattgtcttggcaccactacaaaccaagaaagtccatcagctatggataatgaggagctccctcacaagatgagaaatgccactagtatatggaataaaaaagaagtctctcatttctagcgtaaagaaatcataagaattctccaatctccatcatcaattctaagaagagtcaatttggcgccaaagtatttgggcataagctttctcttcttccttctcttctgcaacaaaatcagtttcctgaactgattcgtcttcatcgggacttcattgtcttctttctcttggttccttgttgctaatacccccctcattgccttttttgtggcaggcctatctcttggtccgtatttcggagcaggcacaacaaacggcagaataatattatccaagttcctgctaatttttctggcactaacctttccatctgttggggggaaagtgaaaacaatcccaaattcatagttgcacacgtgaagtcgtggacccaatgaagatttagatttcccttcttcatctacttttagaccatatgaattagaaattgttcgtccccaggcagctgcactaaaattatgtgagccacaataaatccaaccaaaagaagatgcatctgtcacggacttaaagcgccttcgtgccacctgcatgcacattttacaattcaatatgtgagaaaagcaaccaacgatgaacccaacttataaaggtggaagaatttttagaacatagaaagcaaaaaaaaagaatgacaacttacttaagaggaagtgagaaaagatggattaagatgtaatttgtaacaccagttgtcatttaaataagatgctaccatttaaacaagttcgccgcaaaagtaatagctaatgcattcaaatgaaaattgtcctttacataattatacagttgatatgttagagaaacatcaatctatgattttatgttcttaacttatcctgtagctgaaaatccatttttcacgtagaacttagaagttcgaagaaaggtgaaatactgcatcgaagtaaagcattaaaaaaaggaattaagcaaaataaaattgacatgcatcacaaaaggatcaagcaaatctacattttgtcatattattgagaaaaaaaaaacaaataataataatacaagtaggaaagaaaatataagataataacatgaatataacataatttcttgattaagagagggagagagtgagagaaagatgagtctatactatatactggtattctatttcaataatatccaatttaaaaaaatgataattttggagctaaaaaaagaccagagaaaactctaaattaaaatgctgaacttttatttctggatagaaagtcaatttcttttataaactaacctgaagataccctctaaattaaaactcttcataaagagccataagaaaacttaagagaaaaactctgctcaagtgtaattgttgcaccaagttaacaataatttcaaaagagaaatatcttaccttcgtatgcatcgggtgccctactctagtataaggatgaggaattgcatcatggagtatgttaatagacctcaatctttcccatgttttctgcatcatagaaaggcaataaaataaacttctggaactaagattgctgtgtcaaatatcacattattcaaacttaaccaatgatgtgccaatttatatataggtggtgtttataatcataaaaatatcatgcttcgtggctgtgataaaagatactgtaatgctaacgaagggaaactgaagctacactaattgtcacaagctaaaccaatcgcaatggataaaagtgcaaatgtaatagaaggtggtctctaaaacttcatactatgctttattggagctacaatgaacatattatctgaagactgaaattcaggacaggaacagaggagagggtacatcacaacacattatctaacatctccgctctacctctattctattccaacttaaaaaatggcaaactttgatccctacgcaaactttgatccctactaatgtgtggaatgcatcatacctcagagaagcaaagtatacgctttgaaggcaaagccccattacatgcatttttaactctgtttatcgttggatagatgactctaattgatggatttttcaattcttgactagcactccagcagccccactgcgaaaaacaggtaggagaacataactatataaagagagcaaagtatcctctcaagaaaatctataacaaatcactgaatataattacctctggatcagattcttctgaatcaaattgtgcagatgtttttcctatagctgctgaaaatgcagccaaaaattttgcatcgatagacccaattgaggacgcgccttaagaaaaaagcacaggcatcaagcaacaaaaaatacacactgtagtttcttttagtcattatcaatatcttctttaaaataaataagcaccactcaccgtaaatgaaatcagattcaagttgttcaggccatttatattgagacagaacctataggagaaaataaaaattacattaagaaactaaacaatattatggaatcaggatttactaaaacaacattacattaatgaaatgcctgagtaacttcatttaaacacctgataacaaaaagttgagtctaaaaatgcaaagaaaagtaaactttctgactaattggcaacaagatacaatctaaaagaaagaatgacacaagaaggaacttgactatttattacagttaggagaataaaagttgagtcttcttagactgcccaatccccctataccacccttcccgaaaaaggaaaaaagaaaacataaaggggaaagactacaattacctcttgtaagcgccagaggcccgtgcacctttgaattgcagcaaccattgagcat

SEQ ID NO: 227556 - DNA, 2529 bp, Cannabis indica
caaacttaaaactttaggtacttttgccactatttacggtggtggttatcgtggtgctgatggatataatatgggggtgtagagtagtggtaatggtaatggaatttgaaaaaaaaaaaaactggggagagaaagatatatatgcggcagtagtaatttaatttgatttaaaatttttaaacaattataatattttattatgttttattatttgaaactaaagttgtaatcacgtgcatgccatcagctcattgtatatctatggatggtcacacttattcagaccactatagacttaccaaaagatataatattatataagtgtattgtgacaaaaaggaacccaaaacctaagaataaatttttatttattatttatttattttagtgatgcaagaaagatataaactatcgtatatatattcatgaaaaaagaaaaaaaataaaacttgttttacaacagaaacatatatattcattgatggccacgagctcactatacatgtgaatctcgtttcagacaatgaaaacaatcaattaagaaattcttcgaataaactaataatttttatggaacttcaaagttgtcgaaataacaggtaaaactattaagaaaagcaaatgttccattttacccaattaattgttgtatcaagtaatattaattattagtcagtatgaacttcatctacacgcttcaatcatcatcatataggagtaaataaatttagaaaacttgacattaattaattaactcaattaatttcaataaaataatataatataacttgcaagagagactataatctactctacatggataaaaagtcaaggaaattgataaattaataatgtacctgaaatttctttagcagcttctctgtgtctactgcaacctcatatatgctgtatgcaagtgaaaggagtttgcgatgacttttcctgcaatatttccgtccttaacaatggaatatggaagctactgcctcatgtagtagacccaaaaaggataattagtcattaatttttattttattctaaattctagtaatcgttgacgaagacttaaaaagcaaagtaaaaacaaaatgtaataataataataactgtgacgaagaaagttccccgaaatataaattagtgaaaaaaacagtgttaggtgtacctcgcgcaccacagtatcatgattgaggagtcaataatattagattaatcaaaagtttattcccatgatggaatggaagaggtacttactcattactcaacaacattattggctgtcccatttattcattattatatcttcaacttctgtggtgctcaaatttcgacattttgatattaattaaaaagtaaatatcatggcaacagataatttaatatgcaggtccaaagtagtcagtataaatttgactccacactaatttagtcctgtcagcatcttcgaggcagctacaacgttttgtcattgtgctcttcagaaactaagaggtgtccttgtgtaatacttttatttttttaattttttgaaaaataaaaatatgttatgtaataaattttattttttaataaaataaaagtgtgttctctaaagtttatttatattttttattttttgattttatttaagtcgggtctaagttcagggtcgaatttgggttcctctcagaggctgggttcagcaccaggaccgtgggaagggatttgggtctaggtctaatcggagtttaaaatattgatcaagaaaaaaaactgttcaaaaaatattgaaaatgttttttttaaaaagaaaaatattggattgtcaattaaaaaaattaaaagaaaaaaaaagttttatagaatatgtttttgaaaattattttcacttttttaatttaaaaaatagaaaactgattaaaaaagtgttaccaaatgtcaccttaagttattctttttactcggatctccttattgttttcttccaataaaccccaaatgagatatatgatttcccaataccatcccttgacattacccatatttcttttcttttttaataatatctaatccgatcaaatattatccctaatttagtacatcactagaatttcaaagtgttgaacaatattttgggagaaccaaatgcactacataatataaagaggacattgcattatagacccattttactttatttattttaatttttaactttcattttcatattctttaagatatactcacttttatagatgatgttctcattataccctttaggttaatataaaatatgtgctacacttaagtagagagtgagtgtatattagacactctattcaaaaaaaaatgggtatattctaataaaatataatatgaaagtatttttgattaatgaataaaaaaaaaatattcctcaacttatctctaatataaattatatgcatatgaataatcttacatggatgcaacatttgtaatcaaaaaacgcacccactcgacaaacctaactgacgcaaacttgaaaaactcaaaaaattgggttttaaa

SEQ ID NO: 227557 - DNA, 4316 bp, Cannabis indica
atatgtgagttgttaatatgtgaatttttgtaaaaataacaaaaaaaaaaaaaaaaaatttaattgcatgtaaaaataattttttttagtataatttatttttgaatgaaaatcagcactttattaagaaatatcctctaaggatgaaacaaaaccaggaagagtattcaaacaaaagcgagagattgtgctaacatgtgcgtcaccttattagcagaccacttgacaaaatttaaagaaaaagagcttaaactattaataatagccttacaatcaaagagaacacaaccataaggagagatcatgtttttattaatattcaaatctgctaaggcaatctgattcaagaatcacattcattcatctaaatgatctttaatataacttagcgcttctttgatgctcatcgctttaactaatagtggttcaaagacaccctctctactaccacgcttagctttcaccaccgcaccaagagaatcccgagccacacagccatagccaaagcgcctactatccatgaacactgctccgtcaacattaactttgatccgaggatacaacggttttgtccaatgctcaatctcaacctgcctagacacaaggttggtaactatagaaagcttttgagcattactccattcttcaaaacttagtttagcaaacagaataacatcatcaacggtcggttgtttctccttccaaaccagttggtttcggtgatgccaaatcgaccaacacatcataaccacttcagtaatttcaccagcctcccaatgccttaacccttcatcaaaccagctggagaatatcatcgcagcagcgcctactgctgcaacccgagacccactccagcaattctgtgcaaatggacaacgaacaaggatgtgaagagtagtttcaggagctcctttacagacaagacaaataggattgatgttaacatgtctccttagcaaccgaaaacaagttggaagactattagaacaagcactccaaagaaagtttagaacttttggtggtactttcaagttccataacttcctccaaaacccaacattgtcactaccactccaattctctttctatttctgcaacatattatatgcagacttaacagagaaaaggtcggttctctccttagtataatttttagtgttggttgaagtagaaattatatttttataccaaatttcataatagtgtgacatgaaatttagtgtgctaaggatcctctaaaggaacagcagaatttctcccatttaacaggatctgcgtacgtaattttctttcttttctttttttattttttttttgatagatctcaatctcagtattatccaattatcatttacgtacatgcacaatttaaattgaaaacaaacaaaataacgaaaagcaatacataaactccaacttgatcaaaattttgtaaaccacgcccaaaaccaagatataaagaataatatgcattatatattatccttgtattaatatacataaaggtacagatgagaaaatttagagctcgatcgtatgaactgtacagcatatatatatatatacacgttaattaattaagcattataattatttgtaggttgttgttggacctcaaatatagggaaaatcctgttgtttttcatgttttctctgaaggcaatgacgacatagaaaattgctgggaagatgagaaggatcaagccaatcaagtggaagaggaacaataaattgttggtagcccatggagacttattgcttgaattattggtaatcctattcgaaactaagaaggcacatatatagaaaatcaggaaacctatatacgcaattgcaccgcatacatttccatgtatcactctctcttcatcatcctcaccttcaactctcatcatcttcaaaccattccatgcacctacctaactacctatttattatacgaaattatattatgtttggaataaagttggatttgattttcgatagtgatgatctttctgcattggtaatatttaataatatgatcttgtcatcatcaagtctcatttttttcttattttcttaatttctgatgatgataataatgatgaaaagaaaagggagaatcgtcgatataaaagagttttctaattaaagaaaagaaaacttctctctaaatggaaactttataaatgaatgggagaggatataaaatggtactaattaataactgtatttagctaattctgttttatccagagcaaattaattgaggtggaaaagatgaggaggttagtttttaagaagtggctaaaatataaagcgccttaattaattacttcttataatagcaattcatcatcaatcaatatataatactgtatatgcattgaataattatttattatagataaaagaaaaagtaaatttatgtattagatttcaattaataagtattttaattatttttgggagtatttaatataaatatattttttatttgtttcgggagtatacaaaaatatcatcaagttcataggtgcatcaaatctatgaatgttgcgggtgcgttaatgttacattgctacaaatttgtagtgcccataaccggtacacaactctttatcgttattagttgtttgacatttataggtgccctataggtatacttaaaagagttcatattgagtgctaattatttatttgatcttagaatataattaaaactcatattcctaatacaatatatgtagggaaatttgaaatttaatgcttaataaattctaaaattagtcccctaatttaaaactatacataatttgtaaaatgggatgacttttcctaaaatccaattttaccccctcatttctaaagtgactctctctcttcctcccctttctctcaaccggttgaaatcgcaccaattgcaccacccacgaaaccaaatttccccactcgaacgatgaatccaaccgaacccaccacccccaagagggaaccccgccaccccaccagaccgaacccaccacatatgattagatctagggttagaacatgtcgatctaggttttgtgatgaatttgggtaagaaatcaattttttcaagctggcccgatgcaagtctgatgcattgggttgtctgggttgttttgagcttgaagatgaaggcccgatgtggactcgatggtttgactttttaaaaaagtgaaacctagtctgatgggcccgatgcatggcccgatgcccactttaatttttttcaaattttttttcctgtttataatttaggattggcccgatgggcctgatggtgcccgatgcccacttaatttttttttttaaatttttttttcttgtttatatttggagaggtccgatgggccctagggacccgatattaggtccgatggtctgacttttttgaatgtttgacctggaccgatgggcccgatatagggtttataatttgtgattataacacgtattgtgactaagagcacatctagtcacaataaattgtgatttttgtgactaatacctttagccacggaccttttagtcacaacataagaatgttaatttatattttgtcacaagtttttttcttttagtcacaaattttattgtgactaaaagtaaaattttttgtagtgatgttaggttgtttttagtattatttttagattaattttaatgtatttttaatttaattttactcgtatttcgagcaattttacgcttatcatcttttatttttgtaaatttaaaatagaagaaaatttgaaagatatatatcaaaggaaaatggaaaaaaaagataaaagatcgcattaaaaatcactgtgcgaaaattagattttgcgtagaaaaaagattgcacgccttgaaaatgtggggaaattgcacaggggccgcgacccaagaatgggcatgtcgcgacccatatcgtgaacaacatgcatcatcgtgtgaagattacacacaggccgtggcccatgaaggagcatgtcgcggcttgcccctattccgaagcagaaaaagatttcttttctcaacgtggacttattgtggttgcctaattcaaagttgaatagaatttttagcatgtgcgatttttctatctttttagtccatcaatggctatatatagagtgaacttcagttgatttcggttggcaatttagaaggaagtgaaagacagaaaaaggagtacgaattttagagaccgacttcaatactggtggcattcttcagagggttttcaacatttttttcttctctattttcctctcttttcttaagttaatatgtgtgatatgagtagctaaacatttaat

SEQ ID NO: 227558 - DNA, 2501 bp, Cannabis indica
aaaaacaaaaacaaaaaaataattaaattaagtaaaatataacaaatagtaatatacttcaccaagcaacagtattaatgtggtaaaccatgaaaaaagactgaagttaacacacaagtcagtgttaatatcaaatgatacaaatgacagagttaccaacattaaggctacacagtgggtagaccaagcagcaaagacccacggcacatcctacctctcaacaaagtggcacagcatgtacctgtaagcatctttatggctatggaagtcacacaaggtcataatacctcggaggtccttacgtaaagagaataccttcgagtacatcaataaacaaataagaatgaaacaaccagatgtgacaagtaaaaaattcatcagtaccaactcaagtaccacaaaatgatgaccaagtaaggtaatgaactggtaaaagctattaaatacaaaaaggatggattttgattcaaccaaaagtgatatgtcagcaatgaaattgcttaaaaatgttagataatacaacaaaccatccacaataaactagattattgcgataaaaatgggggaaagcaaaagtttcacaaaaatacagactaaaggagaaacgtaaaaacttatgtatattgccaaatgcagtgtttgacatcgctggactaacaaagtcatttacggaaaccagtgaaaatagcaaacaaaaaagaaaactacacacaactctacaataaagattgggagcaaacatggcaatgtgagctttgaataatgctcatcggcataatcaaaatcacacaatgaaacttgatttaacaaattaaaatagtacttcagatttatatcaagaaaatgaattcacttgtatgactcacctcaatgggcgtcattaaatccaccggcttctcccaactggaaagttttgtcctcctattgtaatagtatctgaaccattcattaaaaaaatatctacttcagtaaacgagacaagtacacaatcactaagaaaaaaaaatcattgaaaacaaattggaataactactattccatttatttttactggatgaaatgctacgttgatgattaacactaattattaaaaatcatgacaaggacagggaacagcaatcaaaattattactttcttccatcaggagacgtgtgttctaaccactctgattggatgaggttgagctgaacattggatacctgatatttttacataaattttaataacatcaatgaaaaaagaccgttaagatagcaaaggaattaaatttggcaagcacataggaggagaaaaatataaaactcttactggagcactgatgtttgtcattgaaggcttttcaatagtctgatgctgggatgtaacaggaacactgctttggctttgagctgataacataggctgcccttctgaagaaacatttaccacatgcatttgtattgattgatactgggtggaatcactgaaacctctttgcatttgaccataggaagcggcgaactgcaattcaagcaagttacctcaagaaaaaaaaaaaaacgataatcaacccaacaactaaatcatcaaccaggagagagtaactagtgaaacttacagtatatgatgaagagagaggtgtccctgggccaactatattaggagtgaaattgtttggagtttgagcactatgctgaggatgaccaactgggaagagatgattgtttggatgagcaactggcaaggggtggctgttcggatgagcaattggcaatggcattggttgtggtggaaactgctgcacttgttgggaatagaagggctgaggagcttgaggaggaccaggaggcattgcaacgttcatgggtggaacacctcgcccaacaggctgaaaatgctgagaagtcacaggaatgaattgttgtgactgctgtgcgggaacaggaggccggaactgcatcaaaagaaattaaacattgattatttgttgctgttgtttctttccccttataaaggaaaaaagggaaaagatttataagatttatatagaaacaactggaaactttatataaaatatttgtgaaagaaaaaatatgcattacttgaaaaggcagggcaggcaaactttgaggatccatggtacaacctaagggagaccgaacagactatccacacaaaacaaaaaaccaatcagcattagcaatgaatgaaaaggaacaaaaaaaatgcttgcctatttggtttttcttttagcacaaaatgttaacagaaaatgcaagtcttgtctttggacatggtctcaatgggttcaggttcatgaaatacagcgtggttttatgtctgaacgagttcttaagaattgggaattatgttgcgagtcaatttaaacgttaaaagactatcaaaagaaggaaaaagatgaggaagaaagggggggactggttctggtgcaatctcaattctgaacgagttcataagaattgggaattatcgatttcacgcgatcgttggtttgacaaac

SEQ ID NO: 227559 - DNA, 1804 bp, Cannabis indica
attatttttttatttattttcttttctttttttttccttacctctttctttctccaccaaaaatccacttacaaacataaactttaactacacaattattcaaaataaataaataatcttaaacacaaaaacctattttgtccaaacataagttaaaatcaaataagaaatacccgccactctatagccttcaaatgatatagaaagaaaaaacttgtaataataaaaagaccatttttgaagcttagttaagaagaagaagaagaacactaagagcaggaggagctggaagaagaagaagaacgaatcgcttttctcctcaaaaaatgtcccaacatgagactccttcgccaaatccatgcccacatcctcactcgcttccttcccatttcctcactctcttttgctttatccaaaatagcagctttttgctccctttctcctctcggcgacatctcatatgctcgaacagttttctctcgaatcccatgcccaaacatattttcttggaattccatgataaggggttgttctcaaattgaaaacccatcaaaagagtcgattgttttattcaaaaaattgactcaaaaagggtacccgggtccgaatacttttactctggcttttgttctgaaggcttgttcggttgttatggcctcagatgaaggtagacagattcattcgcgtgtttttcgatctgggtttggttcaagttcttttgttcaaatgggattgttgaatatgtatgtgaaatttgaggatgtttgttttgcacagttggtgtttgatgaaattactgagagagatttggttgcttggagtgtgatgattagtgcttatttgagagttggacttattgatgagacttttgggttgtttagagaaatgcaaatggcgggtgttgtacctgatcaggtaacaatggggagtgtagttatggcttgtgcatgggctgattctttggacattggtaagtgggttcatgcttacatagagaagcataggattgaaattgatctcgagcttggaactgcacttgtttatatgtatgcaaggtgtggttgtattgaaaaagcaaaagcaattttcaacaaattgtctgtaaaagatactaaagcttggagttcaatgattgtgggattatctattcatgggttatatcaagaagctttaaaacactttgctatgatggaagcatccaaggtatgattatatttaagcattgaaggttaccttagttaaactcatcatttagcagtaagtatgtgttaggccatgatattagtcccttaaattaattgattcttagttgttgagatgaaatatttctaagtgagctgtcctaaggtgttagcttaaaacagtaagggatgaattagtataaatagagggaatgattaatcctgaaggattaagaattgatttgtactattaagtgtaaaatttactcaggcaggtatccaagtgtctagaaaagcttggaaaaattgtaaatctttctatgatagcaatgagattcctattttctaattctttcaatattggaatggaacaatagcgtactagtatgtcactagaataatattttattgctattccttttgtgcattgtcattaggataggaatttgttctcacaatctcattatttgtgaacaggtgaagcctgatcatttaaccttcagcagcattttatccgcatgtggtcactgcgggttggtttcagagggtcgaagattttggtcccacatgattgaatctggaatcaaaccatccacagagcattatggttgtatggttgatct

SEQ ID NO: 227560 - DNA, 4149 bp, Cannabis indica
aaacaaaactaaaacactcaaagtcatatcacagttaagacaagattaaaacactcaaaaccgtatcacagttaagacaagactaaaacattcaaaaacataacatatcaatgttaggcaagactaattgcactatcaaaaatggaatggcactagtaaaacacaaacgggacttaaaatgaaagaagacccaaaaaaaaaaaagcaaccatatatgataactatttaagaatgaaaaatcctaaattttctctgaaatttgaattatttaatcaatacaaacctcaactattcttactcacctcaaaataataagaatatggagtaacaaaaattttaaattaataattattataaaaaagaatatgtacctcatagttgtgttgtagtacctaaaatagcaatgatcctgcaccgaatcaaacacttaacaaactaagcaatctgttgggacaatctcctacgtccgatgaagatctaattacggatatatgccatctcagcaatgcttgtacacaaaggagaaaacgacaatgccagctcagcatgcaaatatttacaacactacacaaactgacatcaatcacacctatatatattttattttttatatatacaaaactacggaactgacaaacatgacagcacagagctcatacccaaatcaacctgtttggagaaaataatggaggaataatattatacataagtacattatattttttaaaaaaagaagtaataacgtatatatatatgcccattacttaaaagataataaataatatttgttaatatactttacttgtactttccatctcgccaagcccaaggaactcattattttaacttacttcacccttttacacacgcacatatatagatcacacaacacacactacttaattatatatgaacatataacacaactttggtacttgattttgtaatttttttgttaacaaacttcggtacttgatttgattataaacattactttgagaaaaaaaataataagactggtgggacagtcaacacaagcagtagtcgttattattatgtcgatttcaagtttttagagtgtataagataacatatttaaataactcttagatacagtgtggaaaaggttattcttcttcttcttcttcttcttcttcttcaaatgagtgaaaattgaaaatagtatattaagggtattaattataatattacattataaaaataatatataataggtaaaggtggtgtcgtgaaagccaataaaaccatgaggctagctccaagttccaacctctgagactgcgttttagccccactagacatggacatggggcggtctttatgataccaaattgcacgggctataaactactattaaccatacatttaattaaacaatgttaatatatatataaatatgccactacagaaacctggccaaaagaataatgacaagcaaaccaaccagcaccctccaatttttctctctaaaaattggccatcaactactgatcagattcatcatcataagctcttctcagaataatttttatcaactatattgaaagcgacgtaacctaacatctaagttctttgcatcacattaaataaatataaatagtatgtacaaagaaattgagtacgtaaaatataataggactcttcacttaatattcttaatcatactaaatcacaattataataacccaagatgaaaaaaaaaagagagagaaagaggaaaaacaatgctattttcgtaaagaaattaatacgtaaatacgatgatcatgacaagtacttttctctccgtgacgcagatatttagtgaaaaaaaacgtttggccagctgggaagggtaaaaaatgtaaaactcttttgacttttcaactagaaacaaaattgatctggtgaaagaaagaaatgaatgaaaaatttcgtgtgttttttgttttccctacaaaacaatttcacagtaaaatgagaaagaaaaaaaaaacctgtcatgacttttctctatagcaattattgatcatatatatacacactgtatcgagtagtactgtagcttcaaaatgaaatgacctctaatataacatttcttatattggaaaagaaaaaccggcaggcaagtgaaatgaactcgtactagtgaaatacagtataagatcatcaataattgaaacctagtacgtacgtgaagaagtagagaataatatctattgcaaaaccttacaagttacacacataatcactaatattattaatagaactaaccgaacaaagcacacattatacctgtaacattatcacaaaacacattgtatgaatgaccagaaagaaaagaagaatatacaacatatatattcataataagtgatgaaaaatagcaaaagggagctcccttcagtccaagcatagagaagaaaaggatgaaattttatctcccgcatcattcacacatccacagtagtaaatattagaccctttttctactgtgtttgaatgaatgagtcggcagataattcaaaccctcttacccatccatgagtggactgaaggaagctcacttaaacaatctctatatattaaaataaattatgttaattaaaaggggatattaatttatagacacaaattacaaaaagtactactacaactactacacaagaattaactatatagtattctaatgaatggttaatgtcaagaaaataatagatgaaaatctagcttaatttcaagtacgacaatgtgttgtacggtcttaattaattctctcttacacattaatataccaaatcaaattccagaagataaggggtttgagaaaatattattattaattattaattactagtataaattaagttattataccctagcttgcagcctagctagctagacctaattcccgcagtccaagacttgaaaagattaatcaagttccaaagcaacgattaatgctttgcatgaaccctaaccctagaaaaatgtcattaatcagatgtagatgtaataattaaaactaaaatatcaaaagaaaaataccaaattgactagaagaatacttaatccagcacctgaaaaatcagattcatttattgagaaattaatatatacataaacaataagattaatagccatatatatggaataacatttaagaaattaactatagaaaagttaaaacaagtaaccaaattttttgattacctgatccacagatcatatatattcctttgcctcttcacatgacctaatctgatgtgttcaactaaaattaattagcaaaaaaaaatattacgaaaatatgaacaacaccaaatgctgtaagaagattcatttttgtttcataagggaaaattaataaaataataattattccatcaattaatatttatatatacaacaaatatgtaataaataaaaaagaaatataggcaagaaaataaaataaaataaaataaaaaagaagaagttacaaaaatacacggagagaggaattagatggtatcaggaaagcagggggggaaggtgtcactatcttcgtgagagttagagaagggaaagcgattggagatctctgatctcaaacacaaatctggtaaaaaaataaatacttaaacattaaattacttttaataaaaagaaaaaagaaaaaaaaaagactaggaagaactatgtattcttcctcatcttcttccataagataataaaggaaggaagaagaaggagaaatgaagccacaagctaacacatacatatgcatatatatacataaagataatatgtgctgttgtggttgaatttggaattaggataacatggaaaaaggtatatatatattgttaaagggagatgatgaggtagctagggcgtcctctctcatatgtcatgaggcttaggttgaagaagagagaaaaagaaggagatgagagaggtgggtttttgtttttttgtaccagtagagagagaaagatagagagagagagagtgaagtatagtgtacaaactactgtggctgtcctctcttgctatatctggcagagagtgaacagtatcgcactactatcaatatattagtcttttattacagaaatgcttaaagatggtggtggctactcctatatatataacatatctaagtac

SEQ ID NO: 227561 - DNA, 1428 bp, Cannabis indica
ttttttttttttcaaagaaaaaacttacttcctctcgtcaacgaaatagtccttgaaaagttgaagcctcttttgtttgacttccttacatatcttcaaataacctctcaaaaagggtctcaagacaggaataaagtcaccatagttgtactcgaagctctgggctagtctactcctctcaccattcaaagccttgagtttaacgaagagtgggtcatcttcgctatcgaatctcctgtcaaacatgatcctgtacatgttgttgtacatcataagctggagcctcttcctcaaaacgatgccgtttgtggcagattcaggattcttcttcacgtcatcaaccacgctacctgcctcggcttcccacccaaaccggtactgttgaacaaccttgttagtgaagaaaggaacggtcatgattctcctcatctttctccaatgctcaccgtacactgtaaacaccatatcctgacccttaccagtgaagatatcgaatacaacgtttcgggttctggatccgaattcaactccctgggtatggagcacctctttagctagctccggtgatgaaaccacaacgagatttctttgtcccattctaagcaagaaaatgtcgccgaatttcttggctaagtcggttaagttgcggtggttcaagtcatctccgacttggagccagtttccaaatacgggtacgggtatgggtccgggtgggagcttgaatttctttcctttgagctttgcgatgactattgcgaccaccacagctacaaagagagctatgagggtcttctccaagaggaggagatccatggcgttggataaggaaaagtgggcacacaataagaggaacagaattaaattagagagatggttgggtttaaattttgtttgggttttcggtgggtgttaagggattttatagtcgagagcagaaagaaggtgtggattgacggctcagcgttaggtgaatcgtgtggtcgtgtgtttgacgcggggagttggtggtgagggagagccgtcacgctggacttaacgccgttagagtttcaacatcttgtgggagtaggtgaagattaaacatggcattatactatataataataatctcctgagttcccaatcacgtaaatccatttccattggccaatagtattgtgccacctcatcgccgtaattgcccgttactactgtaacgcacgcacgcacgcacgcacgcacgcattgaacgttactactactctatctgtttaacctctttttataattattaaattcacatgtagacattggttctattttaattctaaatccagatttaaccatataatggaaaagagaaatggtaaggaaagcgcattaaattaaagtattatcacttcaaccacaatactaaaaattagactaataaaatattctttaatatta

SEQ ID NO: 227562 - DNA, 1517 bp, Cannabis indica
aagatggtgtacatcaactgtacaagtgtctagtattcctttttttagttgttcgtatgttggaagcctctcaattgctgcccaattaacagcttctttgtcatcaccttctactctattggcaaaagaatccatcttccttcctttatcacaaaaataaataaataaataaatctcactgcacccttatttctcttaattcataaacaaagttatcatatagaattttttacaacgattatcttttgttatttttatgtttaatgtgttaaataataatattttttaatgtgttattattattttcacacaaaaacaaaaacatctaagaatataagaatgatgaggcggagagaaatctgaccaggtcgcgaggttaagagagagacgcaatggactcgatacgagaagacatagtatttcttcactttccattatttcctttttcttatttgtttaattaattacatttattttggtcaacctcgtatagctttttgttgcttccttttctatatctttcacttttgccttgagcttttctacctattacgagttttccctgtttacggacacaatttaatagcacgagtggttgtgtccaacactctctccacgtagaaatattctttaaaagctattaattaaattatacaaaattcgatagctatatgatatctaggaaggtgcttaggcaccaataatccttttagtacttttctaattataatttataacaatttctaacattaatgaatgctccttttttaaaaaaaaaatctctaatatttatttttctaagtaaaaatacaaatatttaaaatgtaaaaatatattcggataaaaaatatcaaacatcaacttaaactggattttttattgtaaattcctcatctcttgatcccattctttttttcctttgtttttgttcataatttttccagcaaacaaatatacaattttattttacttatttatttatttgttttttttttctaatgctgaacatctcttctcctctgcaactcttcaactagtgctttcttcttgccttgttgttctgttctgttcccaccttcgtggcttttgacaagcaattctcttccattctttaaaattatttaataataataacatattatataaaacataatactctctctctgtgcttctccctctaagactttagacttttgatggggtttgaatgggagggtgtgggggataaagggatttgcttgcttgtgtaaattttcttccttttggtctttgccacctttcaccttttgtgggatttataaattactatgatatgataaagatatatatttgaggagaagagaaagaggagatgcgtttaactaataagctttcataatgattattactaatagattgtacttttcagttgcagttgataggacaaaatcaatatcatcctcaaaattaaaattgaatttcaccaaacaatttattataacctacattaatactatattctcatatctatcaattaa

SEQ ID NO: 227563 - DNA, 4017 bp, Cannabis indica
gagagaagccgaggacgaggaagagagaagatttgagggttgttggatttagttttgggtagatgaggaggttcagtggtggaggaaaggaggttcggtagtggtggttggtggtctcggtgcctgggtttgggtgcctcggtggtacgaaaaagcggaagaaaaagagacaaagagagaagaaaaacaaaatatatatatatatatatatatatatatattttgagtaaaaattgaaaacaataacatttaattatagaaattgattaggagtctaaattttattagagagtattttttgaagcatttaaaataaatttccctaataaaaataaaaaccgtgacattagtcatagctgccatccgggataaaatttgctcagttgacatctataagttgtttttcctttatatattttagtaatagacaggtacagctagatcttcggaactattatgtaggtgttggtggtggtgcaaatgtcactgaatctcaaccaaacctgacaaccaacgtgtcaccgacacttcaaagtgtcggcaacgcaaccttgcctaactcaaacctttcccaaaacaacctgtccgacacactaaataccccttaaaaaaaaagttaaaaaattaaaagacaaatctttccaccctcaacaaatctcatacatcaattttaatttataacatattattctccacatttccctcatcaccatccatactattcctcacccatattagtaatccatctctttctatttccccacttttttcttcttccttacaccaattttattttcgaccaccaccgccgaaaaaaaaaagctgaggcgacgaaacgacgtcgtttgattaagtccatcaaaatatatggcgcctcgtttcttcgcctgctttgggaaacgtggttcgtcaacctcggcggttgagagcagtggaggcggtggtggtactgctgacgtggcggtggaagagcaaaggcgaggtggggccgtcctggtggagttgttctcgtcacaaggttgtgccacgtcgcacgaggcggagctgttgatgtcgaggcttgggagaggggattttaatgagatgggccttccgccggtgctggttttggcccatcatgtggattattgggactataaagggtggaaggatccatacgggtccagtctttctacggttaggcaaaaggcctttgtggaggcccttaatcttgataccatgtttacgccccaggtggtggtccagggttcggcccattgtgttgggaatgacgagaatgccttgctgggtttgattaagggtgcagctagataccctgctccctcgttccaggttcgtaatattcttatagttgtttgtttgctcagaaataattatatcaagttcttttttattataatcttgtattgtattaataatgattctgatatgctttggttaagatggacacaaattggtttaaattggcatcagaaagggaaaaaaattactgtcagttgcgatatcattatgatattatcataattaattgccaaatggtgctaattatatgtcttcattggactaatcatcacaaaagtacgttttgggaatgatctaagctttgctcattagtagtaagcaatttacttttaaatttatactatcgtaatgttactaaaatatttaacaatatcaacgcatttgagttttaattgcactaaagatggctcggaattatgtttggttactttggtaccactcacatatatcacagtgttagcttcttacaacactattattaagattctcaattgtgaatttactattaggatcagaaaactacatcagagaagcaaagaattttggattgtcaaaacgtttaaaatccttaatttctacatctaagaatagaaaaaacatgttcccagtttacttttttattgttgtgtgtaaagactatagcctaattaccatttcatatattttgggattgcacaggcgaatttccaaaggcaagcagacaccttgcaagtctctctaacaggtgcattgaggacaaaggttgacagccaaggcgcaaatgtgatggtggccttgtacgaaaatggtttggtgactgactgcccgaggggggagaacaaaggccgcgtcttgtccaatgactttgtggttagaaaattagaaaagctttgtactgtgaaagatatctcagcgaagaagacggtatctggaacggtcaatttccctctatgggaaggattcaatggaagcaaatgtagcttggctgtgtttgttcagagtacttctcaccaagtatttggatcccagaacattgaattaccaaacgacatgtgaaattcatcaactccaactcttttcatataggtcattgttatgtacagaatcatgtgtttctctgtaggatattgattttttatttgtatttttaattctcttcattatgttattttggagatggtgaggatgatggtctttccagattggttggtttaggggacggagaaagaaatttgctttattcttgataatttgagatgtgattgaactactattgttttttatttcctaaatttgaagagtaatgaagaattgagatgcactagtgatttctatctcttgcatggtctatttactaactgcagctgtgctgtgggcatctatgatttgtcacaaagagtcattcgttcaaatgcttatagttataagaaagaaaagaagaaaacaattctgactttagaataaatttaaaaggtgaaagatgcataattttgttatttttcgttattattattatttctttgaaaaaaaatgaaatcagctctttctgtcataaaatcagccttgtgtcatgtccacgagattattattactattttaatacatcaatattattagtagggatataccatttttccacatccaatttttgctaacgaaactatatttaagactatttgaaaaatacttaggaccccatgttttttgaccaaaatcaattttttattattgttattatttttttttttgaaaaggaactattacaataaacttgagagagaaatatttacaacggataaaacacgtccacttatgcaggatgatcaacaacagacggtaattttccattctaagtggctgatgccttaatattcaaagcatactatgctatactccgaaccagaaaattcacatatctatggtcaaaacaaaggctaaaagaatcaagcttacaacagaaacttgtaattgtttgggagagaacaaaaaaacggtttttcttacaaaaccctattaagggaggaaaaagctagaaaaaaaaacggtgtttcttaaaaagcccattaagggaggaaaatgtcagaaaagaaaaacgactgttcttacaaaacccattaaggaatgaaaaaccctaaaagagtgataaaatgtaagctcatttataaagagaactatgacgcgacatcttaaaaacttacagaagacgatacagacaaacatgaataacttagatcaaaaatcttagcctaagcaaggccgagataagatttaactcagaccaaactaaggaaggccatgactcagactaagtcgagataaaatttaactcggagcagaccaagaaaggctatgaccctgactaagctgagataagatttaactcggaccagaccaaggaaggccatgactcagacagtcgagataagttttaactaggaccaggtaaagaaaaattaaactcggttcatatcaaaaaaagatgtcatgcagcttgaaccaagataaaacctgacttagcaccgactaagacaccgaaacttcaaatttgaccggagccagttagatctcggattaagcaaagataaacgatacctcagatcgagtcaagatagaacgtgtttaccataccctggatcaggaaaaagaaaaatacattgaggatccgagataacttgtatctcaaatcaaaacgaacgaagaatacaaattggattagagataggataaatgtaagag

SEQ ID NO: 227564 - DNA, 1854 bp, Cannabis indica
ttttttgtctttaaaattgtattagattctcctatattgcaatatgctgtctcgcattgctgcatcagttgaataaaattaatgttgagaaggctgtgaagtatatcgttagttgcaaaaacctggatggtggatttggatgtacacctggtggagagtctcatgctgggcaaagtaagttacaagtttgttgcaatatatgagtttcataagttttaattatggatgtgatttacttctattcctagcatgtttaatttagtccagtcaagaataacgatagtgttttgtcaccaccttcactgcagttttctgttgtgtgggagctcttgctattacggggtctctgcatcatatcgataaagaccttcttgggtggtggttgtgtgagcggcaagtcaaatctggaggtcttaatgggcgtccagagaaacttccagatgtatgtggtattcttatttaaaaagaaatggcatgtttatctttttaataagatatattcagagccctgcttcttggacctctccacttattttgaatcatttgagctaatctgctattgaatttgtttttcttaactaggtctgctattcgtggtgggttctttctagcctgatcatgattgacagagtacattggatcaataaggaaaaacttgtgaagttcatcttggactgccaggtaaacttatcactaagcgaattactcttaccttccagatcaccttcgagatttttggttgacttttgtaatctcaggacgttgaaaatggaggaatttcagatagaccagatgatgcagttgatgtttaccacacatactttggtgtagctggtaaaattacttgagttcttccattgtcttttgaatttgaatgccactctcttactaagaaaattaagtctttaaggatttaattgcattttgaaatcatctataatgccaatattttggatttaattatttgtcctctattataaatttataataaattctctacatattagtaatatttcatagttcaggatagttgagtaatcatttctaatagtagtaatttaggaaacagtggagttatctctgttgcttgtgccctgaatttgattgggtgctaattaaatgatctttatgttcaattttatttttatgactttgaaattggttgatacaaggcaggactttcacttcttgaatatccaagattgaaagccatagatccagcctatgctttgccagttgatgttgtaaatagaattttcttgggcaaataatgatcctgatgaacaacttagactctaatcataacttaactcattgttttttttcaaagtataaaatattttgttatagacattgttttcaatcaaatgcaaagtcatggtcaatgtgaattttatttgagtgtgaatgtgcaaagagcgtgtgaggaaaatgttccattaacattgaattcaaaagtataaatatttgaaagaataattagatttttgtcctctaaacccatgacgctactagattgcacttttaaaatatacggccggttaaaaattttccttcaactttttaatttattaaaatttagtcatttcattattcaaatgttgatgtggcattgttaattagtgtggttttggtggtatggtggtggtgataatgatggtggctctagtaatggaaagaagaagattaaaagtatttatattaggactcttttggtacgttgtaggactcttttggtacgttgtattaaattgtattgtattgtattatattaaattaaattatatatatatatcatatttgttagacatttatatgtataaactaacacatatatatttatgtataaagtgc

SEQ ID NO: 227565 - DNA, 3356 bp, Cannabis indica
aaactaaatttatttctttctttacaattctagttgcactaaaaattacaaaacggatcaaatatagataacacaaattttagaattaacctattttgtgaaatttgagaattatgattaggaataccgacacttggtcagaatcacttgtggctcgaaatatctttacatacattaaaaatcaagtaagacaatgaactaagcacatagactacagcgcgctgatgcaattatatgatattcgattgttattatgaaatcgtgacctaagattatcaccttaagtacgtattcttatatctcaatatcttaaaagcatctttacatatttatccatactttcgaaaaaaaattgagaacaataaaattttctcactttaatgaaaaaacttaacataaattaaagaatttgaacaccaaattcttttaacccttaatgaagatttagcttaaagtaagagaggaataatatttgacgacttagcttaaatttttcatgccttaataaaataatatttgtagcattaaagagtaaagtgacaattcttatgttcaagaagttttttctttcttgtgttgttaatagaatctaagttcaacaagttattctccccttagatttgtctcacatagttgactttgaatttttattttttcacaagttatttgatgcaaaataaatttgtggtgtcagttagatataaccattaaatacgactgtattaatactatattagtttcaaaaatttactgtcacgtgtacacaaatatacacaataattatccaattaatatttaacaataatattaaactagcgtctttttttaaaaaaaaaaactaaaagaaattttaccaataaaaaattaaataaataaaatgttaccttttagaataaaataagtaacatgaagtaatggtaagtaccataataccccatacaaaattacaaatgctcaacatcttacacaaaacaaacatatcttctatgaagtcgcaaagattattgataggattctacagcaacaagcaagcatatatatatagtatatacataccattaattttttcaaaacagatacatatatgtattgattagtgtcaaaatataattagtactacccaggaatagaaattcaaaccacaccaactatgccctaatggttgattttgtagatgactattttacaccaattgtcactaaaaactaatattatactaaacaatttctttcaaacaaacatacaagacaatgactataatcctaatcctaatcctaatcaaccactaatctagtgtcatataatcgataatgtcgacttccccatatatcagatttatccaaataataagatttcaggcagcattgcaaccatggtggatttctagcaataccatcttccacttgctttccatcatcattcgtcgccactccgagcaatgcatttcgcttccttgtcagtacatcgatggcaggttgatcgccaaaaagcttaatctgtcataagttgaaaataatacaatacagtcaattaaagataacgatggtaatgcagatgacattttggcaaaatagtaattggaaaaatcaaaatcattttgctaagtttatttttccaacaaacacttttttgcgaaaataaaaaccagaagaaagtataaatgctacaacagcaatggttcaattaggggtggcaaaatgggttttttgcgggacctagaatatccaggttactatctgggtctttgccccggcctggcccgacaaaaccataaatatgactatcgagattttaaatacaagcacaacaaaaccataacatatcgaatcaaataaacatgaacaagaacttacaccgtctttcccatacaaataagcatgaattcgagcagttgcatcttctaaggtcaggcgaactctgtaaattccattaaaggaaaaatctttagcctgccatggatacattgctacaacccgtacaacacataagaacctagctgtaacctgtcggttatgaaattaaacaagcataaattagctaagattgataatttgatgcaacaaaaatgcatttgacaaagccaatggagtttcatttcaacaaaagaaaatgactaagattgatacgtaaatttgataaccttaacaaatttttaacaaatttttagtttagtcgatgataaagccttcgatcagtgtaactatgttcgacatatgaaaccatattatcgttaaatgtcctagaattatgttgataactctagaatgtcttagaattagatttatttggatggttaatgagaataaattcggaaaagaaagacggtacgagaagaagtatacatatgagtaatcgaatagaataacaaaatatgatacctctggatatgtaagaatatccattaaagtaacaaccggtaaatctttgtagttcacctctgcatgacaataaaacacataaacataccatcacttcactcgagaataattttcaaatgacgaacggtataaacaaatatacacacaaattaacaaactcgcaattaaaacctgttataggagaagtttgtggaaagctccagtatggatttcgcccgaatttcagaccttcccgctcattgtataacctgaaataattgttatacaaaacttaattaatggaattgtgtggaacaatcaaatgagacatgtcaagagtaacagtcttagtgaaagcgtgtaacctttggcgctctaatacaagacggtccttgtcatgagtatatctaaactttgttgaagacgtaaatacaccacgccagaatcctccatttacatcacaatatacattgataaacttcatccacttcccaatgtgtagcaagtggaggccatgctccttggtaccttggtcaaacaccaccctcaagacagttccgagagtaggaaaagtacttaagatacctcttgacaaatgcaattgttcaggttgtaggggaagaggattgttcttttcatcttctagcctgggattttattatttagttaaatcattaatgattattgacataagtgaaacaataagactaagcaattcatctaatctaaggtacacaccaaaccactcaagctagcctcaaatggcattggtaaccaataaacaataattggatatcattttcaaggaaacatccttcaaaacattcattcagatatactcaaatcaaaatactcaggcacatttcgaaaattgagtaagtgtactctgtagaaatttcttgaagatgagaaatgagaatatatcatactatcttttctgtaaattttgcaattttcttcttttttattttttgctcatctaatttgcttctccttttt

SEQ ID NO: 227566 - DNA, 5231 bp, Cannabis indica
ttttgatattttttttttatatatttttgagggccccaaaatttaattcatcttaggcccatattttcagggccagccctgcttggacgtgccaatatcctcttattagtgtagtgtaaaactcaaaacacttcttcttgagaaaaggaaaaagtatataacataaaattataacaagattggccatccagttaagcaaaagtagtcttccacataaaaagaaacaatttggattaaaccaagaataattgtctcaaccttagggccatggatacaaaataataataataataaaaaaactaagtcccttttgcatgagacttagagagaatcttcttcctcctcctcctccttcttcttcttcttcttcttccttttcttcttcttcttcttcttcttagtcaacctcaggtctaacttcatccttgacctcaccaatcccttgagtagctcgtctaagtttctccttggcaagctcctcttcttccattttttaggaaaatggccacgctcttctccacgttgggctttaaaaaactaagggtaatgcctttgtttctctgccacactttaaaaagtgaacgttgggccatttccttaactctcctcttggcttcttcctctttgttagtcaggtccttcttgaaattctcagtagcttctttcaaacttcattctagagttgcaatcgttgaggatttctcttggatatcagtttgaacgttgctaacttgagttttgagcttctctctctctctctctctaatagtagaactccctttcagactccagagcttcacgtgtcttaagggccttgttgagctcaagagtgagccgagttatattctgctagtgagattggaagccaaggcttgccattaatgccgtctggttaaaaaagaaaaaagagattattgaaaaagaaaaggaagagaggagaaaagaaactgctcacgctgagtagggaaagaatacttacagagaacattatgtccttgcttcagctaaggaggtcagaagacgagccataattgatcagctcccagtcatccttcacaaagtttcagatgtaacaactttcttggtaataaaaccagaacatgcctttgcttcagaaactcctaccttgtagggaagagggaggattgggtcaatgagctgcacctcagggaactcaagattaaaggttactgtgcgtggatcttgaatttcacatttacctttatctcgagcctagttttcgactgcctttggtggagatagtggggcctcgacaaagggaacagtctcagtgttggctagttttggaggaggagctatcttgtcagccttcttcttaggtgcttgaggtcgcttggaggatatgtaagtggatgaagtaacttgctttttccctcgcttcacaggaatggtcgaactgttcagagctgcttcaaagtccacatcaagatctatatctgcaaagataaaacaaaaatggattaaaatctgtaaagcgaggataactataaaatggcaagatcaaaactcccacctaaatagctgttagaagttctaaaaccaatgatcataatagatcaaatgaattttgtggagacaagtcccaatcccaactagcagctctattagcatttatgctatattgatcgacaatttcataataagaactgagtcaactgaacatgaaatttcagttaccaactatcaaacttatggcgtgagaggtcgacacagttctagatatagaagttatattggctatccctgaattttaccaagcttaggggactatcaataaaaagagaggaattaccttggggagccccttctgatgccatgtctgaaggttgacaagctacgacgctggatagctgcggtcgaagtaagtctcttcagaagagctgaaaaataaaaataaaataatgggaaacaacaagagaaaaataaataatcaaagaaccatgatggaagtgtacttactgggtagttggatgaaaggaagccttgaagaatttttcactaagaacttcttatactaggggtctggttcgtaacaatgccaaggttgagagaaaaaggtggcagaaactcaaaggaaggtaagagacaaagagggcattcactttcagagaaaatgggggttggcaaattgaaatttttaaaactcagtgaaacgggaatggcgatatacatggagtttttgatcttatattcaaaaaatgataatcgttcgatcgtaatgatgaccaatcaaacgagtgggaactattgagaaaaaaattgtcagattaataaatgctaaaatgatatctttctcaaaacactaaaccacctaaatgaagcatgcattgtatgttaagaaaaaaatacgatcatacccttcattattaaaaagtcattttaatcttaaaagatcatttttagggagcaattgttatacatatattttgagcaagtaatatggttacgacacgtatgaagaagttaaaaaatgaaccggctcagattgcgaaagaataaatacgttcaataaacttgcctcacaaaatataattggtagaaattcgaattcatcctttctaagataagagtgagctgtgaataacaacaactgttttgtaagaccatcaagatgaacaatcaacgtaaaaggtctatctcgggatgcacagagtatactacagaacaacagtcaattaaaaagagtagataatgagttctttaagagcttacaaattattggcccacatacttacgagtatgttgaaagaataaagtatatatacacaatgtaattcgtcttgtaattatcacattatgacagtatctcaagtagatacatttgtctccttcaacattatagaagaacatgaaaaatacttcccaagattatacttagacacaaaaaagtatcttcaaagtaaagcatcaggagatgatcatttgtgttacaaggtgaagaagcataatcagcataaccgtgtgtacataaagacaagagtagttattgcaataatttatttttatcccatgtgttataaatatgaaatgtgaggattatccacgtttcatgaacggttacaaagttaagacctctagagaataactaacatcccaaaatacctacaaataggaaaggatttcccagagtgggacacagccaatttaaggattatagagaacaatccgaatattatttgtattctgtattttgtaaacactctgaaaaatctcaaaaataagatggacacatggactagtgagagttaacttcaaaccacgttaaaaacttattgttctttatatatatataatattactattattatttattataattgtggagtttatttactaatttaaggcttatttattagttaataaaattcgacgttaacgcttaaaatgacgaatataatgttcaaacagttacttactaaacttacaaaaaagacagttatgcgtgcaagaaaatatttaaatcttattttcagtactgtaaactatttagagcattctaaattttttacaaataattttatataattacaacgtatatgaacataaaaaaaagtaaaacagaaagtcattctgagtatgaaacaaattaaaatgtaccaaacaatctttttaagaagtgttaacagaattctactacagacattgctctattgtattttcatcccttattgtcacatgtttatttatgacagttgagttagttagataaattaggtttgttagttatggttattttccctttctaccctcggttagttaaagccttcttggccttttcttgctttcctttcctgtataaatatgtgctctgaacatcttgtaaagttagttaattccaatcaattgaatatttctctttcttttcaatttgactctccgcaatatggtatcagagcgggaaagtcaagctttcccttgattcgatcctttcctcccaacctagctgcgttctcttctccggcgaaggtggtgttgtttcttctctccgatcatagttctgtatgatccgtttatcttccatcctgtgaagatttctgctattcttttccctctttcagcatgtcgaatgacaatcaaacaatttcgatcgataatgacggaaccaatcccgccattgttacagctcaacaagcctctgcaaccacgagaaatcgtctggaagatccaagcaatcattattttctgcatcatggtgacaatccagggcacactctggtttctcagcctctcaccggacaagacaactatgtgtcttggagccgtgctatgcaattagccatctcagtgaagaacaaaatcggcaaaatcggtttcttggacggttctatccctaaaccttcactttctgattctaatatgtataatgcttggattcgcaataacaatatcgtaatttcttggattcttaactctgtgtctaaagaaatttcttctagtcttctctatgatgaatcagctgctactatatggatggatttgaaggtgcgttttcatcaaaggaacgaccctcacatcttcaatctcaagaaagctttgatgaatctgaaacaagacaaccacaccatcagtatgtactataccaaactaaagaccatctgggaagaattatcaaattacagacccacatgcacctgtcatgggtgcacttgtggtggagttaagaaactccaagattatcaccatatggagtatatcatgtcattcttaatgggactttcagatcaatactcccaagttcggggaagtattcttttaatggatcccatgcctgaagcaaatagagtttttcatcttattactcaagaagaaaatcagaagggaactcaaaatgctgcatctgactctaatatggctttcgccttccaaggtgataacaccagcaacaaacagcgtgatactcaaggccccaagtcccatccgaacaaacgaaataggcctttttgcacccattgcaacattcttggacacacggtagaaaagtgctacaagatccatggttatccccctgggtataagacaaataagcctagagaggaaactaaaaatcaagtgcaaactaccaatgatactgatgcaaagacagatgaaaccagtactttacttcctcaactcacctctgtccaatatcaataacttctgaacttacttgacaatcaacaaactggtatgaccaccttcgaccctagtacctcaggaggcacatcaggtat

SEQ ID NO: 227567 - DNA, 2878 bp, Cannabis indica
acatatcctatgatttggggccatttactacaatttcccaaaattctacttgataacgtagacacacgtggtataaagaaaacaactttggaccccacatctcgaatatggtagtgttatttatatgtggccacaattctagtgcctaggtgagcataaggggcgcttaggtaggcacttaaatcatgtagagttatttttagtatcgtccttcaaacagtccaagaaaacaatttaaacaactatgacatagtacatgaaagacatgccacaatcaagtctcgagccccaaaactaattttagaatagaacttatctcgggaactcctaggtaggtatccatgcccaggctaacatcatgtcatcctgggtacacaacaacaaggttttaggttttcacgaactttttcaattcttcaaatccatcaataaacgatgtgtatacataagattttacaacgactacctaggtggggcacaaacccatagtagccaacaggttgactgtgtgcaatgatcagtaggtgcccatgtcacttgagtaatatttttgaacaaatcatctctgattccaataaaattggatttgcgtgtgcactttctaccgagtagatcataagacattagaaagacagaattcagatactttcaacatggactcgatgcccaagttgacttgtgccctattaacggcgtcctgattaacatatagtagacatggctattttctagcgtcaatattataaaattataatttttatttatatacatcattatattattttttgaataagtgtttgtatatatacatataatattgaacgtagtttgagaaaattatgttaaaaaaacactgtaacaatttgttaagtacaaagcagtagttttgcatttgtcaaacaattaagccgtggaaaactattatattagtacaaagtttaagattttatgaaagtgatatcacatttcttataaaattttagcatagaatattatatcctgtaaaattacatcaagaaaatgtttggggcaatgaatcaaatgcaacaaagagaaatttgcgattaattaaaagcaataatgtccaaaaaaatatatttcagatgacaaaaccttacaagtatgacataggataaaaatcctttttcataaaatattaatattaaatagaggtcaaaatgttaattcctattttgtaatttttattaagaaacaatgtaattaaaatgtcaaaatcatggagtaagagaactaataatttgactaaataatgcactaaactaaagcataattgccgccggcgctaacaacttcattgagtctttcttaaaaattgttctattttaatttcaatatcgtacattagaaaataatagtatttaaattcaatatttatgtgatgtataatggctcacatgttcattattttttaaagacatcaaaaaataatattttttttaatagtgatctatttttattctcacctcaattcgtctaacttcaaatataaagaagtggaaattatataaaatatgagaaaacttttgtgtcttacaaaaatgtgtcatttttttattattaaatttattaaagtattttttaagctttacatttttatgagatttttttctcttatatttgtaatgtttagctttcaaaagatatgtaatttttttttcttctaaacaattagtttctgaatatttatgagtgttgacgtaaaaatttagacatagatctctgagctacattcgcttgctagattagcgagaataaattattcattaagtatgtatatgagagagacatgaaatttattgtagttcactccctatatcacgacagtaaatgaactacgtctacttcgaattttatttctcatgagatggataacaaacaaatagctataagtctagatgttctaatttttaaagggagaaagtagagagagatgctctgaccttatggatacttttccaaacttaaaaaatgagttagtggagctctcctttgatagaggaatgaggtcctattaaatgataacaaattaatccaaaaatatggaaaaatttattgaggctattttttaccatagatgatgatctaacagtgaaattgacttcagaattagatcgtcaattttcagagcttggtcactttttcaagacccactttaggtaagttgtagcttaaatttgtaactcccttggcttgaaatttggagtcaataactacagaattgtgattgaagtgtgagctatgacttgatatagcattgaagtagctttgaaacgcaagttgaattgcatcaatcagatcgttattgagtgagttatggctattttacaagaagttgttgtcggcttagcgcccaagttgacatcccaacgcccaggttggcatgttatgtcaaccatgtcaacttggatgcaggatgtgtaggaaaacatgttagagatgtagtttttggtggctaagtaatatttggacatcacttagtccatttttgtattcaccagttcttggagatgttgttgttttgcaaaaacgggagcctcgaaactatctgattcctaagtaattcaccttgtcggaaaagtaaaaatataaagttacaaatttgactcttctaacttcatgactcccaattattgtgaaaaactagaggaatggttcagacggaatcaaaattggataagaaaaacccaacacactcggccatacgtcaacatgggtgctattatgaaggtcccaggatgtcgttttgatacttcaaggttttggagcttgacgatgagttattctaccttatttttcaccattttcgagagaatgcttggagcagtattaattttaactgatcaaaactagcgcacca

SEQ ID NO: 227568 - DNA, 1781 bp, Cannabis indica
atgtaaatgtcattttattttcattgtgaaagaaaaaaaagcatataaatgaaaaaacaagtggtgttaccttagcaaagaattgagttataagagattttgaaagaaaaaaaaataaagtagaagaagggtcaagggagtcagtgactctcggtggttagaaaaaaaaaacaagaaaggaaaagaatctcggtatacgcatattagattattaattgaaaatttgttatattgtgagcatttaaatattagagcgtatttttataaataacttaaaaaaaatgtatgttggggtaattttctctaaaaaataatcaaacaataagtgacaaaaaaaaaataatcaagcaataaaaagttactaaaaataaactcctaaattgtagttataatatgctaaataagatttaaaaagtaaagtaaaatattaaagttattttgaatgcaaaagttatagattggacagtttgttttgttaaatgacaaatgaactttgtatttttcaaaatgatactagtagaattttgagcttaattttcgataattgttttaatataactaacttgaagataatttctaacacgaatagatgttgaaaatttaactaattttatcataatatttttaagtcaaattattattaaattttattttaataaataatcaatctaaagtcttatttatactttaaaaaatacaaaattctttattatttaacaaaataaatatataaatacatatcaatattttgtaaaaagtggtattaaatcatgtaaataataaaagatgtctatggtaaatcttattacaaaacagttcattaatctaatcttattataggagtctcggccaatgactcgaaccctatatataagaacatctttaatggaagtataaatgaatggtgaaaagctaaaacatagctcatttaacaaaaatatgctccaattatgtgcaaaaaagtgatgtaaatttgacacatagtaaattttgtgccaaatttaacacaacattttctatgatgtaaaattacaccacaataaataaacatttatattattttttattatgtaacgtattaaaataataataaaattaaaattattagattttttttttttaataaatattaaattttacatcaaattttacaattgtatattagagtacaaaactaaaatttggtataaatttaccacaaaactatgtagcacaatttttacatctctcgttacagcaatctaatgataacaaattcgttgtggttgaattgggtaatgtaatgattaaagtattcaataaaatttaggattccatccgaaaccaattgagggaacctctcccaacctcaactgtgtggctgaacttctgttaaataatgggcagtgggatattcaaaagctgcgtgataactttgaccgagaatcggtctcggacatacttaaagggggcaatccctctggaagtgggaatgatagatggatttggacgctagaaagcaaggggtgcttctcgactaaatcggcgtatttggctcaagctttggaaagagctcctcattgtgaagttgccccgaagctctggaacaagctatggaatagcaaaattttagagcggcacaaggttctgtggtggagtatcctgtcaagtgctctccctactagagcggtgattgggaaacgtttccacatagaagatattacttgccccttatgtgaacagggggaggaatctcttgaacatctttttctgtcctgcgatgtggcttttcatctttggcg

SEQ ID NO: 227569 - DNA, 2837 bp, Cannabis indica
ttttctccaagccaacatcgtagaacatcccacatggcatgatggctagtctcttcatggagctcccacagagaccaaagaccatcagataagagaccatgaggagccaaattaatcttcacaagaatccaataagaagacacttgtcaggcaaacaatctcaactttggaagaagttcaaggtccaactgtttttccaccaaccaaccttttcaaaattatatataagtttatcgtccacatcaaaggagagccaaggaatagataaaatagcttccacttcattagggagaaaaagacctcgaaccaaacccaagtcccaaccccctgaagcctctcgtaacaaagagactttgcttccctcactaagaaaatgaaataaggagatgcaaaagggaccctatagtctgaatatatgtttatatttttcccatttccaaccctccaaaaagcccagagtcaaaaagttcattgccccagaatcaaaaaattccttaccccataaaaagtttttccacacaaaagagcccttccttgaacaaacaatgtcaccaaagctcatattcctaaaatacaagccttttaaaacttaggcagccagggaagaacaaaacattgtaaattctagtagctttcttcgcaagtaaagcttgaattaaatagatgtaagtctttgaaactcacaccaccatcttctttatgcaagcacagtttattcaaagtagaccagtacatttttttcacattattttccctaccaaaagcgagcacacatcctatgaatattctaaacaaaatgtttaggaagtttaaacaaattcacagtgcatatgaaggaatagactgaatgatgaccttgatcagaatctcctaacttgccatagaaaataatttagatttccaaccattgagttttttccaaatcctatctcgaatagaattgaacatgcctgctttgttatggcccgcaaaataaggaagaccgaaataactatcatgaaaatctaccgcaacaacacccaataaatccattgatatttctctttcatgccttgtatcattgggactgaagcacacaaccgacttagataagttaacaagttaacatgaagcttcaccatacaaatgtagaagttgcttgaatctcagacaacacacatgagaagccttggaaaaaaaaaaaactaatcatcaacgaacaacagatgggaggtcattgggccacctctaccacaaggaaaaccaaatagaaaactattatctcgattcaccaaacccgaaaggccctccatgcaaagtaaaaataagtaaagagacatgggatctccttgcctagggtcacgttgaggagtaatggggccaatgaccttctcatccaggagaatagaatattccaccaaaaagatacaattaagaactttttctgacaaatccatatgaaacccaagtttcaacatgatgctctctggaaatctccactccatcctatcataggctttaaacatgttaagtttaagtgtagaaaaccatcacctttttttttctttttcaaagaattaatgcactcaaaaccaataagtgcattatcagttttaagacgtccaaggaagaatgcactttgtgtaagaaaatctttaattaggatcttaatttactattcaagtatgttgattatcactaatctaatatcctaaatacgtaattcctaaaataataatgcaaatacataaatggatgtagaaaaccttacaataatggcagcggaatacaatgtctctttccttttagttctctaatcctagatcttttctgttgcagagtatgatcaagaactgaacctggatcttctcatccttcgattgtgttcatcacagtcttccacaaaatcttgagtatcaacttgaatagtgtgggatgatactcaaaatacctttagaattaatttagagattgagaaagcatagtgaatttcaaaaattaaagagaagagaaagatgtgagattaagtttttcaatcttcttctctttctttatatagggattcacttaggattaagtttagatgatatgggcttaaaataaagacttgggttgaaattaactcttagggctgaattcccatatgggctttagagttagatttttgccattttttaaagcaatgaatatattattaaaatgataaaccaatgtcatacaacttataaaaaactataagaactgaacattccaaagataatatgaagaagttcctaaccaaacaagttgttcatccatccaaaaagcatgccaagccaatctatgtgtaaccatatgcctatccaatgaacataaattagggatactcttgagaaaatctagatgacgaacttattgcaaaatatttgacaataattcaagatcattgaaaaagaaaataatgtttcttagaaaagcaaacagaactgctacacattatgtttcacccacatagagaaaatcaatccagcgttatcattgtgctacacaatttgcttgaataaccgtagaataacctacaaagaaaaaatatcaatgaaacatactaacattagtaaatgactaaataaaataattataagaaatataaataaatattattgaataattagaaattatagaataataatagtcattatatggaaggagtgaaaatttatcttgtctactgcaattgattttagaagtagatcccaccttcaaataattagcaacttttaacaactgaataactttacaactcaataaccaataaataagcactttaatagctaatgttatagctcggtaacttttcctaaatgaaacgtataatattg

SEQ ID NO: 227570 - DNA, 2529 bp, Cannabis indica
taacagcaaaatccatctaaagagagttgagagagcgaggaagcccgattacccacatcaaccagttttctttgcagatcaaagcttatgtgggtttgaagctcaagaatcaatggctggaggtatttcgatccttattcatagtgtatatatgtttgacttaattccgcattttatacttaatcatatatgtttcagtttatacatataaatgtctaacaacagattgaagattttttgtattgatactaataatctctctgaagctttaaacatgagcaaactgtcatctacgaagaacaagtgactaattggtggagtatgcttagctattttgagacctaatatgtctctcttttcttttatatgtcgaagaagtgctaaaaatccttctgcacatataaaaaaaggtatggtgaaagtgaatctccttgtcttaagcctctagtcggtattacttctccataaatcttcccatttaattaaaaagagtaccgaattgagtagacacatttcatcaattttcccacccattgttgttcaaaacctcattttagcaacattctctctacaaaaactaactccacccgatcataggctttgctcatattaaattttattgtagtaaaatattgttttccccttgtatgccttcgtaaactatgaagaccctcataagcaattaaggcattgtctattattagccgacccaaaacaaaagtgctttgcgtgccacttattacctttggaagaaaaggctttaatctattgatcaaaacttttgaaatgattttataaagaacattgcataggcttatcgacataaaatcactgacagttattggtacttttattttgggaataagtgtaactattgtagaattaatcaatgataaatcttcattttcctcaagaaaatttatcacggtcctcgttaccaatggtcatattatatcccaaaactcttggtaaaattttagattcataccatcagatcttggacttttatttgcagacatggaaaacacaatatttcttatctcttctactgcaaacagtcttcttagctttgagtttatttcttctgttactacaagtttaactgcttgaagtaactgctcactttttggtaaagatggggttcccgttggaacaactgtccataaaaatctgtgacaatcttggtcatctcttcaactttcgcaccactcattattcctatttaaacgtcctgacacaaaaacaaatattaaaatcttaaggaaatcaaaataagagcaagaactggcttaatgtagagattgagactgataatttgctttctatccaggccattcgaagtaatcaagccatgtcctctacttttagtttgcgtattcaagattgccaatcttgttatcttctctatataatgtgcatttacgttttattagataatcaacaaatcgagtaactcatgttattgctagacattctcaatttctgacccgttagcgtatttgagcatatgtttggactaatttaaagtccttttgtattcagaatgctaatatttcaataaaattgttatttacaataaaaaaaaaaaaaaaaaaagaaataccttttctaattaacaactgccaaaatgttatattcaatcaaaaaaatcataccaaaatataaaaaatacttatttgttttcttttagtttcgctaaagatttaattatgctactagttgaaaaaaaaaatatcaatacaatttatttatattgttattcattgatttttttattaccaaaataatctttaaattatttttaaacaattaaaattaaattcatgaaaatatttaatcttgtagcaatataatatttttttcttaaaaaaaaggattttttttttttgaaataaagagaaaatattttcaaatttcatactaatcgtgcactgaaaagattataattttttcaaaaactctcactaataaatcaatatgccaaataaatttacacaaatactttttgaatggtccaattattattaggtttatttgtactgcacagttctaaactatataaattttgataacttcatcctcaaacttttttttgtgtgataaatttgtccttacactatatatttttgacaatcggtccacaaactttatattttgccaaattaattcacaaattttttttttcttgaacaacaaactttaaatttttggcaacaaatcttcttcaaaattaagtaagtgtaattttgttgatttactattattattttacatttttaaatttattttttgtgaattataaattttttctgttattttatataatttgaggactaattttttcacaaacaaattacaaaccaacttatcaaaaatctatgtgatttttaacttccactgcaaattatagttttttttagcaatagctatattcacttataacttcttaattacatagaatacaaacagtggcggaactacatacatctatggagtggccatggccccccctaactttttagaaaaaga

SEQ ID NO: 227571 - DNA, 3089 bp, Cannabis indica
ttcagtatttttgtaaatttcccttttcttttttgcctgattgtatttttagtgagcatgatgctcctattactttacgtcttactgtaacagaaattgtttgaataaaaatttacacttcgatttaagaaaaataataagaagaaatggttgataggtgttaaaatagtatttgaagaaagttggcatcataattctttttcatataaagttaataaacaatttacttatattttctctcataacaaacagtcacatggtacatattgaacaacatgtattcagttatattaccattgaaggaatgatattacattagtggcaacaattacatatagcccatgataagccaatcttaaagttttgtctcagagaataagaccagaaaatattgatgccttcacttaatcatgtaatttaaaatacaacatgtaaaaaaaaaattagtatatatagcatgcaaatttaattgtattaaatatttttttaaaagaaaaatattaaaatatgagataaattatcatagataagaagaaataccataataaacttaagaactcgtatataaattttattcagttttctattgaaaaaaaaaatatatttttataaaaaaaaaaacaatttctttatgaataatctttggtgagttttgctctgaccaatcgtcgccgaatggattaaaaatttaataattcagtgtataaattttacttctatataatcaaaactaatttattgatgaagaaattagtttcataataaaaaactagtttattgatcaaagatttctggtgagcaaatttatataaagattaaatatgagttttgaaatttagatttacataaatatgacaaatactataaaaataatttaaaataaaaaaatgccataaaaatggcctaacttactgtcatatttaagtaaaaaaaacttttaaaacccggtgtaaattgtaaatgggtcatccccttccattattcaacaaatgggctgtatgggccttaaaagtgcgttcctggtacttacttatgggcccactagtccagtctgaggcccagaatgttaaaatcacattgaaaggtccaacggagagagaggcttcgagttccgatctccatttacttccaaaatccacagacggtgtggtttgtgtggttggtgtagagagagagagactaaagagagagagagagaggaccagagaacggaagagaagagagagagaagcacgaatcccaaccctaatggcgttgcggagtctcgcactacctctggcttcagctccggcggtctccccaaggtcgtcttcttcttcgtcatcaacttcatcatcatcttcatcttcttcctttttttcgtctaccaactgtcgcaatagttctcttactccaacaccgttccatggccgccggcaattccctgtagtattctccaaccgtcgatttccaagtcatgtagttcgaatggctcccgatgaggaaaagatgactcgccgctctccgcttgatttccctattgtaagctcttctttcccctatatgtatactatattctcgtttttactggattttcttatccttttgatttagggatatgttgcttttgttactaatcttcattgtcaatttacttaccattcaacaaagattaagccactgatttagggtttattctgtgttcaagtattggttgaagttgttgctgaagcattaggattgtacttgcttcgcatatattaaaaatccatatattttcatattttaaactctggcctattctgccaattcccaaatccttatcaaaagcacaacctcaagattattggaaccattgtgactactgctaatttcgaaacaaattcttctgttagtgttactcaaggtttgtgttgttttcttcgaaagaatggaaatttaagttatactaattatcgtgttaaacatgtttgttactcaagatgtgtgtttttccttttttttttttacattattatcattaattgatagaatggaaattttattttcaggataggcaattcgtgattgttatgcataccttgttacctaattatccaacaaacaaatgaagactagccaaatttacttgactaaaaaatatgtttaactacttgttggataaactttgtaatctattatcataaaatcgtgtcgaagttccaattttttaatggaatttgactgttttgccaaactatataatgtgttctcctcatcttatcttatctaaaattacttgacaatacaggaatgggaaagacccaagcccggaaggagaccagatatatttcctcaattcgcccccatgaaaacgccgatgcctattccaatgccagcagatcctccggaagaagatgaggaagaggaggagaagagagaggaggaagaagaggaagatccaggggaaaacccagataacccggataagcaataagaatagcttcataaaataagagtttttttgaactgtatttgcagtctccagtctacacattccgactgatatgattttagcttagaatatctgagattgctgccagcgacttgaagaaagtcctatttttgcatgtccttactttaggtgtaatgtcctctataagcaaattatattgatgttcatgctctataattcatgtgaatttgaggttggttggttttggttactttaagattcataaattagtgacatgacagccacataaacgagaccttagaagggcaactcgaagtaaactacatcgatgttatattaatagggaaatttgattttttttatgcttacatttggttattttttttttcctacataaataataactaatatttataaatatgataacttttatgatatttctaaaatactttccatttacattacctccatttactcaaactcacatctgatctcatatcagacccatcggattatccatcggaccactataagactatatttgcttactattttttttttttttaggtataccatcggacctcatttgctacaatttatttatttatttattttttttttttatgtttttgtacataaaaaaaagtagcatcag

SEQ ID NO: 227572 - DNA, 4903 bp, Cannabis indica
tgatatttctcttttattatccttctttcttatagtaaaggtttctcatgttaaacgggaagctaataaaactgctcatggcttaactagatttgctcttcgattagataataattatatatgattgggggaaattccttctctaatctactctgttgttgttcttgattctattcaataataataaaagtttttcacaaaaaaaaaaataaataacattttaactaccaaagcttacaagctcacgaaccaggcccaacttacaagctcacatgtctcaaccaatttttcttccacgtgagagtgacgcaaaatatagtattataaataaaattgaaaaatatattaaataatattataaacaatatctcatacaattattccactataactatagtaaaatcaattttttttgacaagttttaacttatcattggacaaatttcttagaagatgactagagacaagcactcagttattgattattttccaattatgtgctgttttttggatttatttttttttttttaattctgagaaaaactagtttttggattaactcaaataaaattgatttcctcttgaagtgggtgcgacgtggacatggagaaaaggagccaagtggcggaaccccaaatgactcagtccacaccaaccaatgacgatagtgccaataattcaggtgatgacgtggataaatgtaggtgtgtaacgaaattattacaatgtgccacaaaattcaaaaaaggagacccattttcttccaccttttgtctgtccagtcgggtataaatatagtgtttgtgggcattgttggcctttcaactgcttttagagctttcaacaaagctttcatagtctggtcaattgtcaaaagcagaggaatgttcaaattgctctggattggactagaataatcatgatggaccatttcaaacggtgtaatgtaaataagaaaaaaaatggatgcaatcagcaaaaagagaaaaaagttaccaaaagcaaagaaataataacaaaaaaaaaactgagatccacatttgacaacatctacaatctagatcttttacatattctacgccaatttgcaaagcacagaatgcactggaaggaaatagaccaaaggaaaaaaaaaaaaaaaaaaaaaaacacctatatggatggtagttttcaattttcataaaccatcctaattgcacctgaaattggaaatgttagggtccaaagcatatggtatgtcacaactcacaaagtacttagcaaaattattataaatatgaagatacacaaattagacaatattttcttgacttaagaagggttaaactataatgtgatatgaaatttgtgtgcattagttggtgtatgtatgtgctgagaattatagaataaagaaatgatgtgcctcgtatattaagcaaagtgaaatgaaaatgactagaagccgccaccccttggaccagtcaacaaggagacaagttagtcattgcaggtgagtttcaccaaaccctaagaaaattattttcaactccaattttctcaattaatcataggatctgttgcttttgcttgcacctcggcataaaattatggcccatcattttctattcttatgttaattaaaataaataggcaccaagcttttattgagtcaaacatatatattttccctctttcttctactacccatcaaaggcaatgtcatagtcatatgctatgtgaacacatgcatttaaaagattaacaaaaaagaaaaataaagaatagaaaccatgatagtaacatttgaggaaataaaaatttatatacaagagttggaattgattgtttcatggacactatacaactctattcttcttccttctttgcttaaatgactacaacttcagttgaagtcattaacaaataaagggacttaaaaaagaaaaagactaaaaaaaagaaaaacaaaaaacaaaaaagagagatatttacaagcatcttttaactaaattttcctatctaagaaaagaaatggccgtgttcctaatgtcacaatttcagtaacatggtctagatttctgagcaagctatgcaaatcttaggggttgttatgtacaaggtgacctagctatgatcactgatcagtttctctatttttttaacttcaagaataggacctaactaaaccgaagttaacaaaagatctagacttgaacagacccccaaagaggaacctggtgggagattcttgagaaccagactttaattcttcagggttgcctttcacttttagtatagtttgtccaattacctgccgaatagaatctatggttttggaatcaacaggataccctgatgcatcaccaacatagaacgtgttcatggctttgcctcctttggttgtaacttccgctcgtgtaacggtgaggctattttcgcgaaagatgcgagtaacatcggacaatagcccaactctgtcagttgtacaaagttctagcttcaaaccctgaataagaaataaccaaaatcacaaaacatcaatacaaagaatcacaatgggcttttttcagaacaaaggtaaagaaatgatagctgtccaataagcttttccttttccgcagttctttacgtgatgtttcttgacaagaagaattatttatatgagctggaccaccaagggatgcttctaatgaaggtaaagtcattgggtttacaaacaaatcagcataacaaaagtggactggcctagcagtaatttagcttcctttacaaattatagtacgcaaacatacaggaccaaataattaaacaaaagatacctttacataatgggaacaattaacaatctatatgatcatatcagatacaaatattttgagggttagttaaaataagaatagagtatatcagcagatgatagtgcacatacctctgatactcttctctcaatggctgcttcaaggcaatgtatgactctttgtctctctgcatctgatttcacaggtgaaccatccacgtgcctaatgtagtattcctacagataaatccataaacgaatgagacgaaacactcatgaaaatctaaaaggcatatccaaagcattaaaatagagcatacctgatagcattcttgtccctccgcatcaatatttgcatgataaactacatacttcatatctgtcaaagtgcaaactgtatcgaatagaagtttgggtctatctttgctccgaattgtaacaactgaataatctttgtcacaccaattcacaacactgacattaggcctttgcttttcatccgagtattcattgttatctgatcgttcgtaatccctgtcagcaaacatcatctggtgaagccttctatcagtgtgggtgactccatgtgagaccacagtcttagctcccctggacttgttgcttcctttgagtacattgcatagtagtgccttaatcctagagagtctctctgggtcactaataggagaacccgtctcctcatcggtgacatgcataacagctgcagcccttgtgttgtgtgtccagacttcagcacccactacattgcacttgagatgagtaagaactgcgcttacttctgaaagaagccctggcctatcacttccagtaagttcaattgcagtgtgatccatagatggtgttacaccaactgatctcatagaagatataaagcaagattccggcccaagtgactgcaattcaattaagaaaaaaaggttttagtatagcactaaggttaagaaaaatagcagaaaggaaaaacaaacatgactcaccttttgtatgtagtccaaaaccccttcattagtaaccttgtttccatcttggtcagtgacattaaaaactggttccaaaacaaatcacaatcaatatttttttttgaaggaaaagaaaaattaaaagattaaaacgcattaaagtttatggagtaagcttaccatccatgaaccaacatccatcagaagatatgaatgcttttgttatgataagattaaggtctgttaagtactttgaacaacttccagaagtattccatgttcatttgcactatcgacctacatcattgaaatgaaccaggaacaaaaatatcttgacttaattaaaacaatatagatatatatatatattatattataaatctcaagagctgcagagattgaaaaaaaaaaagtcataccctaattaccgtagcattcttgcaagaatcattatcaattacaaccctgaaaggaaaagagaaaaaaaaaaatggattgaggtctgaatctgaaaatagaaacaattcaagcaccttagcagagccaatgaagaagacgaggttatatacctgggtggattcatccttcttatgagtttctcatactcatcatccatatcatgcgagaagctcatgttgacctctgaaataggaaataaattaataaataaaagaacaaaagctcaccaatcagagaataaagccatttatactgaaccaccataaccaatgaatccaaagatacttataacgattagtaaaataattaaaagaatgcattaaatatcaacaagcaaatcattttcacacatcaaagaaggaaagggatagagatagaaagcgagagaagatagagaaaactgaagcgagcagataagggaaccaaccacaatacaagaccatttaaggcaagccaccaccaaaaggtggcgtccatgaatgttggaattgggcattaatgatgtgaaaagaaagaagaaggaaaaaaaaaaactcaacccatcaaagctctagccattataaacagagagaagcttcaaaataccagaaatgagagagaaaacaggcaagatttggcttgacaaaatatcacaagcacaaaaaaatggagtacagagcaggaaaccacgaatcaccatgaccca

SEQ ID NO: 227573 - DNA, 2959 bp, Cannabis indica
ttgagaaaaagaaagaaagaaagatttttagctgaagggaagggagtaaatgaaatcttaaaactgaaaagaagaaagcaaatagaaaacaaaattagaataaaaagtcaaatagaatttatataatatagtccaaaatgagttatacagggaaaaggggttttatgcaaattggcagacaatattttggagataaaatattataagatgttcgtactcttatcagtaacagtaacatgaaatgtgaaagagagagagagacaagtcagtcagttgcttgcttttgaagatttttcttttgttgttgtaattgttgttgttgttgttcttattaaacatcaactagaagtactatgatgtttaatataatgttataagcatgtgcattttgattagttaaagaattcttaacattctcgaaattaatgatgatactaaacaaaacacccgtgaattaatttatatagtcttttatttatttttattactgtatatagctttgtttgcaggataatcctagttcttgagaatctacatttacctaattagcaggttaactacgtgttctacattgcttttatctagaaatcagtgcaaaaattgttaatccaaatatcaaatccaggtactatcttccaaaccaagaagtctctagttttaaagatataatagaaaaattcaactaaagaatatcatatgctttgataacttataatataatataatatacgtgtctatattgtattgttgtttaactcaaaatttaggagaattctttttgttaacttacacaaactctagttcatctaataaactactctctcccttgttttatggcagttgtcagtgcttaaaaaaaataccaattattattattagtacctaataaatcgctagtttcaagagtcccttttaataagtatagattacaatgcaattatggatgtttactagaatttgatattaaattactattcttttttcttagttgatactataatatattaccttattggacaattatggtaagggacaaggctaaagaaatatattatcatggtatagataaaatttagagttgaaattcgagattgtttggtgtaatacattataagaaaataaatagtattgttagttgaaagcttcaatattaaaactgggttcaacttgaatatttgtaatgctaattaataatttttttactggggactttatatagtattgtttctaacatttgtaagagtatgcatgcttgtataactatatggtatttaatatggtcttaagtttttaacattcaactttaagtgataacttatctatgtgaattggcaaatttcatttgaaaaaagaaaaaattgactatgtttatatttgaatttgatgacagcaatgtattaacttagcatatatataaccctttctaaaaagatgttatttcttcaaatgtaatattacttaaattaaatttttctttttgtagcggctatacaacttttttttttatactttttcctttttgagttgactaatgtgaacccccaaattacatttcttttcttttttgtttctttaatacaatatttgctcttattggtccaactttgtgaacgatcaaataaattaggtgaggaaaatactactattattacattacaaatacttttcttcgtttatggaaaatttactactctttagttttttattataaataaaataaaaaaatggtagtcattgttagaaaaagagaaagctgaaataagaaatgtgatttgtgagtggtgtttttgtttgtgcttttcttgagatgttgctcaatgaaaaagtgtattattaataataataataataaacatgtgatttgatgagacaaagcatattttctaagataggttttacaatatttggtgtagaaaagaaaacatgttgagggcaaaaacaatgaatatatttaggatgagggaggtagctttaactttaatcacaccgtagagcagagtcaccatgtttggcaaaatttataggtgtttttgaaaatgaaagattatcaaacaagatagttttaggcaccgccacccccaaaactcacactaaaatcttcattgcctttttaaatgttatgcattgcaacacatcaacacaaaagtaatataatagtaatgtagttttagcatcttataaattttctcttccaactattaaaaccgaagatacacaaaaacatttttatattattaaaaatgataaatcataaaatattataaatttacaatatcatatataagataggttttagagttgtccacttcaaatatatatatatatgatgagtatgaaatacttctatttctcaatattccaaaaactttattaactctaattaaaatagcataattaattgataatattgattagctacccaataactcttaaatattactaatatatattaagatttcaataccatgtgtgtggctatattcaatatgggactaaccgactaagtataagagcccccattagttttttttttttaggtaaaagcactcccattactttctatactttattttttttaaataattcatcaaaaccttattttttatattacctcacactcttacattacaacatacatcaacttttttatttttttacacaacctagggcaggtgggttgcccccaagacatcgtccacgtccttctcgcactgatggggaaggggcacatacaaaccccagcaggaggcatgtatcaacccgttctcaaaagagaaggctagtacgtgacgaggccaattttagttctggacgtacgaggactcgagttagtccacgcgaagaggggatagaacccttcgcagtacagatcgagagagtacgggcacatctagaactgagttccaaaaaagaggattgtctcatgcacacatataacttttcttgcattcgacattga

SEQ ID NO: 227574 - DNA, 3643 bp, Cannabis indica
ggtaaaatattcccaacagttcttggacctcctgggttgctcttgttccttcttgttacatatgtgatgttcatagagagctttggatctcttcaatgttcacattgccttttgtgctcttgctaccaaggcactttttttacaaggtatttgcctcttttggcttttatgccttgaggccttttattgtatgtggcacccttagtgggagactcttggcctcatgagctacgttgacccttattatggtgtgcatgtatcatgttaacctacgactcttgcctcttgtggggtaagccaatggtttgtcactttttcaatgagcgagtataggctctttgagtcaggtctccctcttacaggttgtcggcttttgtaatgagtgagtatgaactttttgccaagtctttctattatcatctgtttaacgtaagaatgtatgagttatatgaacttgtctcaaccttttatgtgttcatatttttgcacgcactttagaatgttcattgagaagcattcttcttgttttatggtaccatttttcctttccaaaaaatgaataataatgctaaatgtatagatgctttttctcaatcagttttacctttatactatattttctgatacacttattaaagattatcatttagatgatcatgtcactgcagatactaccacataggtacaaacaacaattctactgtccctgaagtcctaaatactaatactaattctcctacccatgataattcattgactaatacctcaactccacaagatattaataatgtagcatcaattcttagaaaatctaataggaccttcaaatcctccaagctatttaaaagactttgagtgttactctactatataggatctttcctctacaccccacaaacttcaaaaatttttatcaactttcagactcatatcgggcattcatttttgcagtaacatctcaaaaggaaccacaaaattataatcaagcaattctcttccaagtatggcttcgtgctatgcaatatgaattacaagcacttattgcaaacaaaacttggaatgtcgtgccactaccacctaaaaaaagagcaattgggtgtcactggtatacaaaattaatacaatagcgatgacactatagaatggtacaagactaagcttgttgcacaaggttacacacaacaagaagggtttgatttctttgataccttttctccagctgctacgatggtatacctttaaacttttactagctatctctgccattaaatattagcatacattacaattttatactaataacgctctcttaaatggcaaccccaatgagaaagtctacatggccctacctaaaggactcactttgccttcctctttttgtgcagatacaaacctggtatgcaagctgcataaagaaacctatggacttaaacaatcgtctaagcaatgttacaagaagatcctggatgttctcatctctaaaggtttctagcagtccaggcagattacactttattcacaaaaggaacaaatgacacattcatcgatttacttgtctatgtcaatgacataataattacaggacccagtcttcatctgcttcattagttgcaagaatctctcaacaactagtttaaacttaaggcactcagacctctcaaatatttcttgactttgaaattgtaagagcgaaagatggcctttttatctctcagagaatgtataccctcgaacttcttcaagacatgggttgcattggtagtaaaccaagcaaaacacccatggatccacgcatcaagcttgataatgaacaaggagagccacttgacaatccatctacctatcaacaattgattggttgaatctatacttaacattatctagacctgatcttacatatgtagtcaattgtctcaactaatttatgttagcccctcgcaccactcatctttaggccacatcaccttcttcattacattaaagggcacccaggccaaggacttttatactcttccaagtcttctttacacttacggggattctcagactctgctgagtatcttgccctattactcctcgatccactactggttttgcatcttcctcggggactctctcatctcttagagaacaaaaaaaataacctaccatttcaatgagtttagccaaagttgagtatcgtgccttggcaaccacaacaaatgagataacatggctgcagtatttacttcataacctccaaattcctcaaaacactcatgcattcatatactgtgacaatcagtctgcaatacacatttccaataaccccaccttccatgaaaaaactaaacatatcgagctagatcaccattttattcatgaaataatcaacaactcaacaattagattaatccctatttccagcacccttcatttagtcgatgcctttaccaaactactttcctcacctattctcaactctcatattgctaagatgttcgtatatgacatatacgctccaccttgaggagggggtatttgaacttagttatttagttttattaatttatttttgttttcaattattttgcttttttagttgttagtttgttagcttaggcattagttgagttgatttcttttcatgactttagttagtcttttttgtcccttgtcttaaggaaagtagggttagttgtttaactaacctccttcttctcccctaattgattatatatatagtgctctacacttatttgtaattcattaagaaaattcacatcactgaaatcatttttgctctttaatcttgttcgcaatagcacttttattatttcaacatccaagataaattttaagcttattttttttattgttgtatgtgttttaattatttaagatattttataaaattttaaaattttaaaataaattaaaatattgaaagacccaattcacgattgacaataggggtgttcatcaaaccgctaaaactgtccgcaccgtcgaaaaaatacggtttgaaattctttacagtgcggttgcggtttgaatttttcctaaaccgcccggtgcgatgcggtttgcgatttgaattgttaatatgcagttcaaaccgcaccgcacattataaaaataccaatttttatatttatttaggtctaatatgtaaatgttcaactcaaagcccagtattattgtattgttaaaacttaaatttttttttcatatttattttcaagccttatggtatttttgacaagtgttgctcaaattttgttgtatttgtgatagtttaattattttgtgatagtctaaaccgcaaaaatcacaccgcacctcaccattttctgcggtgcggtttgtgcagtttttagttttgcggtgcgggtgcagtttgagaaattaaaaaaattgcatatgcgggttagtttgaaaaaatggttaaaaaccacaccagccgcaccgcgaaacacccctaattgacatttactttttcggacaaaatggcaattcacaaaaacgacgccgtttggttgtagtgaagtggagagtggagacgaagaggtgtttgggtgggagacccagctgcgtatttcagaggttattttcacttatggcgaccaaaccccaccggctccatcacagtaaccctctctct

SEQ ID NO: 227575 - DNA, 1522 bp, Cannabis indica
aatcaaatagcctcatgaaaactgaaagagctatatagaagcgaggtggaattagttaggatatatatttgtaataaaaaattatatttataggcataatattaactttagtgcaataattaaataagataacatatagaataaaagtcaaattttcaagagcatagtttcctttttattttctttactggcccactgtaacagctccaaagttggtattcccttggcaataacaagaaaaccttgatgaatataatgtgcaaatacaagaaaagaagaagaagaatattattattagattattatatattatgaaccacatacccatagcctaaaagaacactaagcatacatgattatagtatgtgaaagtaataaaattaaaaaacatattgctatctaaccatgatgagaacagcaagtttatgtttagatttatattattaaattagttgctaaatgatcaaaaatgatattgtttaaatttaaattatttaattcaacaatctaatggagttaatgtactccaattctgacaatgataaatagccatagatatcatgaaattcaaattttagtggattaattaaaccactgtaatctcactgttagaacataaaacagtaataaaaaacacatataattcaaacataatcaacttgaatcaaaattagtagcattaaacataaaaccgaaaacttagcttgagaaacaatagagaaaaagaatgattctttattgatgattcaactcactacaacaagagtttacaactcaagaggaatattgatcaaacacacaaggaacctattacaaccctccttcactcaaaaatttcttggacaaaactggactcgagagagatgaatatgtacatgtgagagatatacctaggtgctgaattagtcttgaatgtagagttatagtgtctagttgtagatggacagttagagttattgagctgaaatgaggaccaactaacttaactaccattctcgaacacataaaattagaatatgtgaacatccggtaagtgaatcaaatccacaacaatttcacctgatttgatacattttcttatgtccaatagtgaattgaaagttgtactagtgagaactcttgcaatccagtatgttaagtagattcaaacattgaagaactttatctctgattacactcttagtaaatatatcagcagaatgagtgtatattttctgtaaagcactttggttatcacaataaatagtaatatcctctaaattatatccaaatttcattgtcaatcacttgagcttgattgcctccgtgatggcttcgttgtagccatattttttacttttgtagatggcaagtaggaataggcaacatcttatccaatctaattggattagtcgattatcattgaattggatcgatttatgggtagttattatttataaaccaattcaaaactaaaatcctatgtttataagtaattttctcttcttctttttcctaaaatattgggaaatttacatagtat

SEQ ID NO: 227576 - DNA, 2067 bp, Cannabis indica
gagaatatttcttattttttttttattaaggcccaagcagcttgtggtagagacacttattttgttcaccatccttgtactgaataatttgttgtcttgtcatacatgttaatattatcttgcttgctttgtaggatccttcaaaacatgtattccaccttgtaacggacaagcttaactttggagccatgaatatgtggtttctgttgaatccacctgggaaagcaacaatacatgttgaaaatgttgatgaatttaagtggctgaattcaacatattgcccagtgctgcggcagctggaatccgctgcaatgaaagagtattattttaaagctggccatccaaccacactttcgtctggggcttctaatctcaagtataggaacccaaagtatctctctatgcttaaccatttgaggttctatctcccacaggtttatcccaagttgaataagatactatttcttgatgatgacattgttgtccagaaagatctgactggcttgtggtctgtgaatcttaatggaaaagtaaatggtgctgtagaaacttgtggtgagagcttccatcgattcgacaagtacttaaactttacaaatcctcatattgcaagaaactttgatcccaatgcatgtgggtgggcttatgggatgaacatctttgatcttaaagagtggaaaaatcaggatattacaggcatatatcacaagtggcagaacatggtgagttttcttatccattttctcttgccatgtggttttaactgtttcacatgcaagcacctaggtgaagggtacaagaatggtcactccgaatatcttagaaattattgtatataaaaactattttctggaaacgactatctctatcacttatctatttctctttgttgtgtttgtatttagaatgaagatagggctctttggaagcttgggacattaccaccaggacttattacattctatggattgacacatccactttcaaaaacatggcatgttcttggtttgggttacaatccgagcgttgatcgatctgacattgaaaatgcagcagtcatacactataatggcaacatgaagccatggttggagttggcaatgacaaagtacagatcatactggaccaagtacataaagtatgatcatccatacctccgcaactgcaagttaaatgaataaatctctaatggaacccttcttaatatggtaaaaaaaaaaagaaagaaaaaatctctttcctttctaatacggataagcaattctagtttgctttaggataagggatgggttttacatattgtatgatgttattttctcttatttttccttcttttcctcattgtttattcttctttttttaattcattcgatttgttagcgctcaccccttagtagtacaaggtatcttacaaattcttttgccttgttgacctgtaaaaactccacttattttggtttggagctaagatatgaaccctaataggaattgaatgtcagttgctgtattctttgaataacttgctcacttatgtaaaatgccaacttgtatgcttctcatctcagtggaatcacgtcctctcaccattaaattctctgcaatgggatacattattattaataatgattctattagtataattctagccctgcgtttcaattctccaatttctgattgggaatagaattttctgccactttatgaaaacttggtgtttaactgcgaagatgtcccaagtttgctttcttatttttccacatggggtaaggtattatgtcaatttgtcgtctatctgatcattttatgcacttgacttctttttctgatatttttggaactttttgacggatgaataaagtaaaacatcaaaagcaatatatgcaaaatgattggccgttaatgtattgtaacgctttacaatagttggtttgagttggtgggtgtgatgggttttttcaatcagtcagatactgatttcgatgcactgacattgagcttcttaaagcaacaaaatgaattggaaactgtctatacgaaaatagtgatattgatttgctctaaaaagtt

SEQ ID NO: 227577 - DNA, 3463 bp, Cannabis indica
ttatattaattcatattgggtcgttaacattgtggtcaggctgcatctggtgctgtgcaatgtcagatgattgacatgacttatccaggagttgttccaatgcacaaggtaagaacatgcttctgtcttgattagtagcatattttaatggttttccgcatgtattgcattcgctaacttgttttctatcctgtaggtcaatttcgatgcaaagacagaatatgatatgattcaaaactataaggtcttgcaggaagtattcaataagctgaaaattgaaaaggtatttttatcaactcctttgtttcatgtaattatagtggtccctgtttttctctttttgtgttccccttgtgaagatttagttgctaaagaatgcttccgttgggtgtgtatgaggtcaatatattcatactaatatacagctaaatgcatttattataaggtgaaaaacatattattgttgatctaaactctatttctgtccaatctggtttcatgcctaccaagatgtaggcaacactgcattggtgtacttggtggtaaacaagcctagatgatcttattgacttaggcatctatcgagaattcgttgtaaacaatcttttctagtttttctagcaaactctctgcctcctttttctgcccctccctcccttttgtatattcaattctataaatccattcgatgttctatccttttgctgcagcaccttgaagtcaacagacttgttaaaggcaggcctttggacaacttggagttcttacaatggcttaagcgctactgtgattctgtaaatggtggcattatgaatgagtatgttctgttgtttatgtcccgaaccattccttattttatttattttttaacacttgttttacgttgcttgaaggaattataatcctgttgaacggagagtcaagggtgggaaagaacggaatagcaaaggttcacagaagaattcaaaatcactgcaaacgaataacatgcataactccagctcaggtgacgctgctggcctgagaacctctggtcagctttcacccatgtttttcttttctagttcttctctcccctggttttgtttctagactcttctgcccttttcatggtattctgatgtttcttgctataggaccaaagcaagggaaaacctatccagcatcagctgctgctgattcttccaatcaaattgaggctttatccagcgaggtattcatattagtcttacgaagacattaaatcttattagtgaaaatgctatatgcttactttcccttggtatttggatggttgcttcattatatgcttatattcttctatctgtcagtggaataaacagagaaactatcatacaatgtatttgtgttgtttcatcttttgatgtgtaatcttttgtttctaaatctacaatctgttgaatgtgtggtattgttacatgtttgggtagtctagagtgatgacagttttgcatatctattgtgataaagatgctttttgcattcttttgttgtgcagattactgatctcaaactctctgtcgacgttttggagaaggaaagagatttttacttcgcaaaactaagggatatagaaatactttgtcagggttcagaattggaggatatcccggtaagattcttggaagggtagtattcatcttttctactcgttttttaacattttattttatgcattgcccttctttttgtgcagatggcagtagcagtaaagaagatcctctatgctgttgatgcaaaagaatctgctctatctgaggctcaggagtacctttaccaggctatgaatgctggtgaacctgaacctgaagaaacagaagaagaaaaggaaaatgatctttaaattggcttaaagagtcacttcattgtgatcaagggtagtaagtgaaaaaacttgagggtgcagtagagggtccagtgatctatgcctgtagctttctttattttgaagaattcagtgttccttcgctttgatccaactgtgaaataccactagatcttgatgaaggattgtttagagtgtattttcttgcttttctccatgtatgtcttggatagatgtttgacaattgaatctgagtgattgacattaataatagagcttcaacttttatttggaaagaatttcaatatttaggtggcgtttgatgggaggtaatagaatagaatagaaagtaaataatttttattttatttctttgtttggttgcattttaaattattcgattttcacttctttagaatgttttttttttttttttaaatcattttaatagaatgattattttatttaaaattaaaacaaatattattgcaacgcttgaaaaaatttaataatgtttttatcaatttatttttattatgtattttttaaattttatttctatttccattctcaggaaagtagaaaggattattattatggggaatgcataaaatgacacaactataccaaagtttgcaaggtagaagacatgagtccgatggatccaattgtgttcgatgtgggggtcagtttgaagcctgatagaaggttgatgatagaaagagtttagcatcaacaagctttttgttttctttcttctagccattggccaatgatacaactatcccaaagtttctttaagtaacaaaatattcatgcttggtagatggattgaattggtaattatatgaattattttatgctatttgcatcaacatactgttaaaatattaaagtatccgatctaatgtatcgtttcaaacaaggcgtcaatcgatgtttttaactttatcctttttgctcagccaaaaaaaatgccattatattgctgagatatccgaaaagtttctcattttgttgatgtaagtaatcaaggtaaaggccctacataactttgccacttctgttctattggaggaagcaatacagcaaccaaatttttaaatttgaatatagagcatggagagggaggtagttatcataaatacttatggtagtcagaacccaggaaattgggtgataataaaatcaaacattaaatataagcagcatattttaagtgaagacaacaaaattatattagaaaaccattcttttgtaccttaaatttaagtacaaaaatcaagcttatgataaataatttaccactctccatatataatgaattgtcccagaactaaataatgaattgtgtcggcagttttgaagtcgctgtgataaataatttaccactctccatatataatctttttgcaactgcccaactagacgaatgaagagaaacttgcaagtaccaggagagagttgaaattttgcaaacagctaacttcatagtaatgagtccctactgcttttggagtttatgacacttaaaccccaaagccatgttcttcttctcctgtcattcctcttcttgtttttaattgatattaattagttactgtggaagaaaaagaa

SEQ ID NO: 227578 - DNA, 1255 bp, Cannabis indica
catctacaacaccccgccacatccctcatacccgcttccttaacatcgcagagctaggcaaccatccattacaaagacgccaaagaaagtgtttaatctttggtagctccttcaaaccaaaagctcacctccacgtccaccattgtttgacattgtccatattcgacccctcctctattttcttcttctttatagccacttgatacccactctttactatatactctccattcttattatagtgccataaaataagatctttagaatctaacgcattaggcaccaaactaagaataagagagacatcatctttatgaaaattagcttttaagaactcaacatcccattccccagaaggcaaccttaaatccccactctaatgtttggcaataagataggcccaaccaaaaaataagaatttgaaggtcttggcagccatcgatcctccacaatacgaactcgattttccaacccaatacgcaactgataaccctccaaaataatctccctcccccataacagactcctccaaaccaccaaaggaaaagaacccaccttggcattcaaaatatatccattacaaaaataggaatgcctcaacacttgagccactaaagaattctcattccgcagtagctaccatacctattttgccaacatggcctgattaaaaagctccaagtttttggacccaaaaccccccttccttcctcttacaaaatccctcacatttacactaatagatctccctgttcctttccgtaaaacccaaccaaaatttagcaattggaccatgaacattgttaataaaattctttgtaaacctaaaacagctcatagcatatgtcggcattccctgaataagataagagtgtggttgtgtacgtgtgtgagggagatggagaacttgctctatgatgagcttcttgtagaattctttcagaaactctcactaagttcatgttcttcggtctctttggtttcaaaatgctggcttcatctctaccgttcttccaagtccaccctctctctccaacttacccttttctgttactagtttattttgttattgttttattaatgttttaagattgttttactgttattttccttcttcttttttatcacatttgtctaaatattattgtactgctctatttttaataataataggaaaataatgaaatttatatgtaagttattttcttcattatcctatgctccaattgttgaatattattttaccaggatctta

SEQ ID NO: 227579 - DNA, 1804 bp, Cannabis indica
ttagtttttatttatatatatcaccctgggcattattgtttgttttgtttttgctttatatttggtgttataatacaggactttaaatgggttctatgtcgagtccacgaaaggaagatggaggatatttctctgaagagtgtccagtatgaggatgatgacaatggaaccgagctttcttgcttagacgaaatgttcttgtcggcattagatgatgatgactttgaggaaattagtatgcaaatactagattaaaatcttacatttatacaaatataaatgtatgctatattagataataattaaataatagctaacaatatatatatatacatatctgatatctctgtacatgtttatatctgtttgtcatagttacatatattaatacatagatatatacatgtatctgcattaatattcatattatatcaaacaatatatacatatgcttataattaatgtatatgcttaaactaagtgaatgttctatattgtgaaaaagagacatgtatatataattatatatgttaattttggagcttcatgttaattagctggattatttaataagatcgcgtacgtacttttcagtcttaattccttttgtccacagacactgaaaaaatataactggtaattaaatatgtataatttaccattacttaataagtataaacgatttgttttaagaaaaaaattaaaatcgattaaatgatgcgttaatttgaaattaatgacaatgtctattttaaatataaagttatgcattgatttatgtgctgaatgaacaccctcaaaatttgattgttaaagtagtaataatgttcaagaaaacacaattccaactaaaaccaattataaaatcaaaactagaacatgaaatttgataaaaataaacatagcatgagaatgaatgtattggaactttgttatgaaattactaaaaaatatatgaagtgtgtgatagtaatgagagtcttacatgggataaaaacacttctttgaaagtgtatagattgtgtagccatgagatttgggtttgggtcctaagggtctcccgtttgtttgcataggtgaggactcacacaccggaccaccacatacgcgcgtgccgccgtccgatcgatcgagtcgggctagcgagtgaggtgtcacttaattttttaacgaaaaactaaataattttttatttttaatttactaattaattaattatttttaacgttaaatgaattagtaaaaaagattagtcaatgatcttcttttttctgtcatgatccaactctgccacgattatattactgttttcttaccgtttaatcttcgatcgacttctctatataagtcgtattagaacaacgaaagaatacatcttttcaacaacaaaaattctcttcttccttacgatttgtctcagggcaataatttaggtgtaatctagcgatatcattcggtacataacatatcatatacagagaatgttttatcttggagacgtcgtggttgctagactgtcgtgcacactttgggtagagccgcaaaatatcttaaagaaaacgacatagtctgtggctcagccagaatcttctttcagtaatttattccagttttattgttttaaattcactactacaaaaatgatattttacgtcggtcaacgtttctggtcaaagttgttgaccgacgcaaaagtcaacccgcatctttttacttcagctggtaaccaacgcaaataatgattaatttatgttggttgtatctctgacagtaaaactaaaaccgactctagagattatttttt

SEQ ID NO: 227580 - DNA, 4442 bp, Cannabis indica
ttttttactatgctttccttctttctttatctacagatttttccttttcaacttagattctcttgtgacacactattaaaattgaaaattgctaaatgacttacttccctgccttcccttgacttagattcgtatgtctttctctttttccgctgttgattgattactggtttcacttccaacacttatcaactcttgagttcatctgaaatgttcatatgatcctttcttacagatgtggattataaaacagtgatgtatgtatgtatgtatttctcagtattaaggtcctagtgttaagtgtagtgatgattagttattaatgtaaacaaccttcatctctctctgtaaatctctaccagtacgtttttcttagctgtttaagtgatgctttctttactaataaaattaacttagttaaatatgtttgtcttttatttggaagccaatttgtcgacataaactcctctcctcactgatactgataaataagaattatttttttcccctcaatagaggaaaatattttattgtaataaagcttgaacttatttgtatgaattatgatcaccacgttttgtgggcggttggttttcactaatgatttactaccaggggctctctttttctgtactggtatagtggctatgcaggcatggtagaagagacatggattcacaatatgaagagaagaatgatgtacgcatgtttggttctgatgaagaggttggcactcaaactcaaatcccaacccaagcgcaatcagttgttgaaggatcaggctcagttttagtatcagaattcaaacctgctcccgatgtggattatctacaggtacaacacaatatcacatcacttagtttctctactgactttttaagttattcatgatgtatgttattccgtaacaattgtgctttgcctccctgccccggcggatgagcacctttagttttataaacagatagccaatttgaaaattaaacagattatcaaatagatacataatgattacattacatgtgtgtgtgtaaaataaaaagatgattgaataaacatttgctgatcacatccatacatctgttgcaacttcatactttgtcaattaaatatttataggaacaactttagatcttaaagggtatttatttattttatctttcaggaattattagccattcagcagcaaggacctagagctattggattttttggaacacggaatatgggattcatgcaccaagaacttattgagattcttagctatgcaatggttataactgtaagagctcctgatctagagtctcttatgtggtactataatgttataggtctttctaattctaattatattaggtgatcagtgatgctttgtcttatgatacgcatgtccacgtagtcagggttacatttccttactgttccctgtgctctttcttgtacaacattattgtttgctgaataattaatatttatactgagcatgccagatgtttgtgttgtttctttatttttctaatgctagggtataacactattatttgcagaagaatcacatatatacatcaggagcgtctggcactaatgcagctgttataaggggtgctttgagagcagaaaaacctgagctactaacagtaatattgcctcagagcttgaaaaagcaaccgcctgagagccaggaattattgtccaaagtaagagaaatgactcgactatcttttaattcatgtcttttagataaatggttttacttggtggagctctgaatatatctggctcagttggaatttatttgagcttgatttatctcttgcttcaattccctaccaaagttaattgcttacaatgaatttaactagtaagtgtatactgcatattgtactctataatttccaaagaatcaggaagcatgaccagaaacaataaatttttacaaattaatacttgttatgctattcgcttagtcaaggcttgatgtaaatgaagttatcaaaagtacaaagcacatatggctggttttgtcaccaagaataaatcatttaaagttattgttcatttctgaatgcaggtgaagaatgttatagagaagccttacaatgatcacttacccttgattgaagccagcaggtttctactgaacttcactttatgacagtttaattgattgtctgctttactacagcctttgcaaatttccatgtctatagaaagaaacatgtacgcaggctttagcaccattactgtccaccagtcaatggacagtattggtgttggttgcattgctcgctattctgtatagtgagtagggtagtgtactgtgtatttgaatttcatttgacttagaagaggaatttggcttatgctaatatggaaatgataactgagtatttgtgtggtgaaactgcagattatgcaatatggacatcatttcacaagtacagcaagtgatttgctttgcctttcatgatagtcgactgctcatggaaacttgtcaagaggctaagaatctccgaaaaattgtgactctattctacctagattaattccataaattcttttatgtgcatacattattagagggagaagtgcttatttttgtctgtaaattaggtgggatgaggacaaattgcctggatttttttgtagaattgatttgattatattggcaaggaacggggccaattgctccatactgctccctccttttgttacgagattttatattgtacgttccagtatgaaaatggatatgcaattgcctgtctcacacagataaactcaactcagttaaaccctttttttttgttctttttatttttcttaaaaaaatactcttctttgtggaattattaattttgtattttttttcaaagaagtcttggtaaaataaataaattgtaaacataggattggaatatcgaaatcaatttcaattattggaaaaagtgtagtagcatcaatcagtgtctaattttggcataatataaaagtttggtttaagtaagtacattaatgaaaggaacagagcagatcagtgcccctctgtttctgtgtctatccgttcggaacaaataggttgagattttgaaccaacaaataataatgttgtttattattcttttataatgcaaaagtaatgtttttctttttattattttcaattaccatacaataaaagtaaaaaactttttattgtttattactacacaaactaataataatggtaataataatagtaagaagaagaagaagaaaaggagaagtgatgtggagaatggggaagtgcatgggaggggaggggagggggtacgtgtatggtgttgctatgtaataggattatatttggtatatacgtgaagagagaagaacaacgtaagctcaaattagcaatgcatgcggatcatcatccttttccttttctttctcttcttcttccttcatcatcatcatccctctctttctttcatcaaaacaaaaataacaaaactctgtagacatcaccaccttctctttctctttctctttctttttctctttctgttgtcttttcttaacttccattccatcaatggatgaactcagaatagaagacgatgaaagagaagcactcgccggtctaagtagtgtcccaccgccacgcaaatcccaatcttacagccaacagctccggacaacctctgctccagcccccaaacgcaaccaccaacaacgcaaccacagcctcgacgacacccagatgccccaactcaccctctacgactccgacgacgacgatgaattctttccttattcttccaccaccaaccccaaccagagactcgaccagaacctctgcgcagacctcccctccgaggatcaccgccattatcagccactgcccgagtttattggaaacggcggtggtgctggcattttcaaagttccaggacgtgctgctgtccaccccggacggccgccgtgcttggagctgcggccgcatcccctaagggaaacccaagtgggaaaattcctgaggaacattgcttgctcggagacgcagctgtgggcaggtcaggagagtgggctacgtgtgtgtcatttcaaggatgcttacgaaggtgggtgtggcctcggtgggagggtttgagggggtgacgaggatgcagcgccctaccaagaatcggccaacacatcccccatcttgtgtttgatggctgaccaggggaataggcttgtttggagtgggcataaggatggaaagattcgatcttggagagctgatcaacctttggatgcaaccccatcaaccccttttaaggaagcccttgcttggcaggcacaccggggacctgttcttgctatggcaatgacatttcatggtattatatatatatatctataattcatctcttttcttttcacatatatatatatattgtatgcgtttgattattgatgga

SEQ ID NO: 227581 - DNA, 1965 bp, Cannabis indica
ttgtactgggggacaataggacatcattgaatttgattcaatggcaaagttgttgtgcttttgtagtcttgttcttctttcacgaccaattttactgggtgcaatgcaatccaccgttatatatactcaacattgcatattaatacacatgaattttagcattgaattatcacatgagaactgatactttgcaagtacttacattatggtgttgagagattggtttataatattcaaattgaattcaacttaagttgatattttatgtgaaacataaaaagttaaataatacaatacattgtattaacaaatttggtacctgactacctgagtgtttttcttttcttttatgcaatgattttgttgcaagaaaaataggagtgacctctttgttgtttagtatgtgaaaaagatagttggagatgtacataggatcctagattgtgaggttgaggatattgtaatccatttgaatatattgtgatcgtaactaaattaattgtcaaaccatgtaaattcttgtccctctttttttgttctatatcactttgttccaaatgatactagccagccaaatacaaataaaatataaatatatatatacatatatattatacagtgggcattgtcattatttggaaaaaaaaaaatgaatacattctgttatgtacggcagattttgttcgaaagcatttgatcaaaagtttaatgaactataaatttggcttattattcttttgtttataatgattactatccactcgattaactcaactattatacaaacgattattagccaagaaaatacatatccaattcgagttagtgacacattatttaatgtttacgtgtacaaataaattatcatatatataagataaatgagttatttctttcattgctaattaattttaaaatgaaatttaatacaccttaccatacacttaactattctactaccttaaccatacatttctgcattttaacataatataacatattaatatactaatttggtttgaaaaaattatctccgatagttatactattttggtatactttttacactaatttagtgtatttttttttttatttttagtacaacaactctagtaatacacactaaataaatatattttacattttatattatttatatttacataatttatagtagctaatttattattaatataattatgtatattgtttacaaattaaataatatatacatgtcatagctactcctaaaaatttaaaatattaaaataatttagttttataatttaatattatgttatttttattttacttaatattagtatttttattattttgtattttcatatatgttagtgttaaatcaactatttattagaatatttttgttgacactatatataatcaattaattataaggagaattattctatatactattcttttattttttttttcaaaatttacgggtttgggttgctccagtagtttctatgtaggttgtaatgtgaattttggttacaatttaagttgctctgtttgttactatgtgaatttaccgtaaaatatatatatatatataaaaaaattactttgaagtataaaaataaaaatcctaattagaattgattaatttggtatatcaaatcaatattctattcatagacaaaatattacgattgatggtcatcattatgttaattatccaatttaatttcttaatagattgttaaaatattcacacaattaattgtgacagaaatttcgatggaatgtctcacctatttaaatatagagtctcggtccccgagctcgctactcattttgtgaaacacaataaatctatctaaatagagtagagagagcttagaagctcgattacccacactaatcaattttcttttcttgaacagatccaaaattagtgtgggattgaagcttaaagaatcaatgacgggaggtatt

SEQ ID NO: 227582 - DNA, 1747 bp, Cannabis indica
atagttccaaatatgaccataatttcggtggatgaagtgatgaaccttgtaaatggtcttattagggtcatatcatatgatcataaattccaaaatgtcacatcctattcatatttcccaaaatgccacatcccataacctaatttcaaatatgaccataaaatttttattcacaaggtgatttgtttttttggacatcaaaatgagaaaaaaaaacctaataattacaaaattagtaggaagaaataaataagaaaaaaaaaaagagtgaaattgtaggtgagatttggtccaaaaagagggtgagaaggtgataagacaaggaataggaataggaagagcgagtagtataaatgcccaaagcttcattccatacaattgcacccttgaggttcacctcttccttttcaatatcaattgctttcgctccttataccaaccctccctcctttcttcgtttctctttccgtactactactctcaggtaattcatatgtgctgtgccttgtggaattgttatatttagagatgcaaatgcagatactaatcaaaattttagaataagattgtcatataattattggttatgatgtgaatttgttattatgatcaattttatttgctgttatatggttgaaattttgtttgtgggaacagagcaatggcttcccacattgttgggtatcccaggatgggacccaagagagagctcaagtttgccttggaatcttctgggatgggaagagtagctctgatgatttgcagaaggttgcagcagatcttagagtatctatctggaaacagatggctgatgctggaatcaagtacattccatccaacacattttcttactatgatcaggtgttggataccactgctatgcttggggctgttccctcgagatatggttggaatggcggcgagattggctttgatgtttacttctccatggctaggggtaatgccactgttcctgctatggaaatgaccaagtggtttgacaccaactagtaagtttttatttctctcttttttatttttggttttttcaaaagctatcaataagtttgctaactttgtttgaatggatgactcagctaatgttgtatatcttctttgtgcagccactatattgtccctgaattgggtccggatgttaagttctcttatgcatcacacaaggcagtgcaagaatttaaggaagctaaagctgtaagtataagagttttacaatttctccaatcttttatgccatcaacttgtctaagaatttgataacatgaggggaagttcctcaataatatcttttgtttgtttgttggtagttcattattaaaagttatttttaatttgctctacaaattaattacataaatcagagatacttctactctcgcaatttgcaactgttgaatattgatgattacagaattcaaatacccaacaaatactttcaatttgcactaattttttacacaacatatggcatgtttttcatccagccataattatttgaaggtagaatccactatgttaagaaggtatgccatgtcattgtgagtaaaatcttggtaaattacttgtgtgcacatatcattgctttcaatctctatatatatgtgtgtatatttctgtgttgaattttttcccttgccttgtgagaatacaagatgaatttctggaaacccatgtcacatgttcatagaaaacattgttgcttgtaaatatgtgtattgtaattttcatt

SEQ ID NO: 227583 - DNA, 2520 bp, Cannabis indica
aactacatttccataaagtcatttttcaaaatgactccctcaatgcaatccacttcatggatagtaaagaatagtgataatgttcctttcaatcttaaggaaccttgtctttggttcaatgaactggatacctagaaactgtaacggggtagctcacaacatagccaaatggactaactctactaatcagtttggcaatactataccacaaaacatcaattgctctctgctgcaggaacatactggttttgtaggtggaggagttgcatctggtgtagggaatactaagtggttgagttaatttatgttatttcttttctgttatcattaggtggctgtaatctctgattttatttcttaatgcattccatcccctggtttagggagtcgaaacctttgccaaactaacaatataaaatactaaaatttacaaaataatctcacttaatttactcgataggatcatgatgatcacaaagtgtaaatctatagtcattttgccaccataatagttgtttatgctcccacaaggtaattaatttatggtcgtttctgcgaccataacaagttcattttgctaataaaaatatctaaacacatgtataaaactaaacggttaaagcaacgaagtattaatcaatatttaatgagttccacatttttcaaaattttggaattaattaacccatatgtgaaagtataatgaaatgggcaaaacaattacttcacaatccaaacacaaaccccattgatgcatacttaaacaatcaagaattcaggttataaagtttaactaaacactagattaaggaacaattgggaatctgaatcgaacaatgatgaattgcattacgtaatcaaatcccaccaagataatcaacacaaatgaaaaatctgccctttttttcttcctttcttcgatctagaagaaattgaaattgaaaaaaacaaacaattaacaaaaaaaaaataactaaccttagctagaatcgagtaggatcttgatgagaaagagaaaaacttttaggtttctccttgagtatttatatatatatatatatatatatataaatatatgtgtgattggatgaagatgatttgtgccagagatttgtttaggaaacaaatgagagagttgtgttgtgtttgacagcttgagaaatgagagagagagagtttctaacgtattctattctgcaaaaacgacatgtaattattcacaaaacgacatgtcgtatttcttcaatcgcaaaaaaaaaaccgtttggttggacaattgtggtgtgtgaaagaaacgtgactaacagtaacagagtttgaccgttaaatttcttttttcttcttaaataaaataaagatgagcattgttattattattcaaggatattctattttcttaaattatatgtcacttgatattagtgacgttagatagtttttccttcaaagttcgttaaaatgattgattctgacctttagcaattgtgtttgcttttgctaggagatattctttcttcagagaatcattgttagtggatgcaacaagtatgttatccagatctcctttcttaaagtgtccttgatccgtatacatcaatcacccaatgtagctacatatgaattagttgtgcatgctcttcaaatgaataaacaacttgtttgactagaaattgtctattattttagtatttggaatgcaaaatcctttagcatgtacgacattatttaattatcaataatattggtcattacttgtaaaaaaaaataatataaaataaaataaaggtgtcctataacttataattagaagattatatttaaggggtcgtttggtatgcaggtttcatttcataagaataggtttaacattgctgagagagtgatgaagggaattataaacctaggaaagcaacattaatgtgtttcgttatgtgcagtaatgttatgatgatgcttagaaatatgaagattactttgtttggttgagagaggaatggaatgtgacaattttttttttacaataatgattatttttaaaaaaaaaaaaaaatactaatgatttaaatttttttttcttttttaaatgttcaaaataatttttatttattatttttcatataattttataaaaaaaaattaacaataataaataattataaaaagtaaaatatacatatataaacaattcttgaaccatttccacctctcatcagttgaaccatcaagaattggttcaggcttttttaataatagcccgtgaagacgcaacaaagcattcaaaacaacattaaattgtctactcactgtttcacccgaacgtgcaaattgttgtctcacaattctattcttaatgtcatgagatataatatgtaaaaatatagcaaccatttcttcaacatccatattctttgttcccttcaaacccccgatagttctaagttggtgacacaaaataccaaatgttttcctatccatacgagtattttctatacaagctaagtcactagcatgtatcattct

SEQ ID NO: 227584 - DNA, 1503 bp, Cannabis indica
gtcacaagtaactttttgttgtgtttatattgttactaaaagtagtagttttttgtagtggtcaacatgttataatttgaaaacaaaataaaaagcgcatgatgctaaatatttttaactaaaacaacagtggtaatgtggtataatattcattatattttatcaattgaatggtattattactagtgagcattaccttctataccattagagttagaactggctaaaatgagagcgatggaatcgcattactccactcaatccggttctgtttctagctttagactcgcaaaattaattctttcttcttttctctgttagaagatctatcacaacaataattgccacgtcatcacatgcatgcacgtggatcatttgacaatttcaaccagatctaatctaattattattataatccactacttacgtttcgaccatctcacaacatcaaaaaaaatagtaataatcacaacaagtataacttctactactatactactactactactacatacatttccctcgtttctgtaaacgaaagatatattattacgtataattaattaataatattagctctacacccatggcttgcatgagacttggctctaaatctgaagccttccatcgcgagggccgaacatggtatacatatatatgtatatatatctcttcatctccacgtaaatatatagatacatccatatacatgtcaatatatatatcatcatatatacttgttgttgttctatcaggttatgcacaactgggcttccaagcgatattgcaattgaggttggggagatgtcctttcatctccacaaggtaaatttctcgaaatcatgcatgaattaacatttaatatgggatgtttagtatcttcattcaatattctatcaatgccttacatatatatatatagatataatacttctgatatcacgagtatttgctatttatataagaaacactactgatttcaaattgaaatcaactactgatttcatattgaaatcacatagatataatgtaataatttggaaacggctaaccagtgccacaagttaaattaccaaagagagatgctctttcaacataaaccaaaaaatgtattaaaagaataccaactgacaataaaaaatagtatgtagctaagaaatgtcttcaaatgtctgtttgacctgaattattaattatacatattattttaaactaaatatatgttagacctacaattttatttccactaataataaaatacctcgttaaatactaatacgaggagcagggccggtccaagtattttggagtctcgtgcaaaattttaaaattgagtttttttaaaaaataaccgtgtactttaaaactaaaattttattactagattttttttttaagatttattcataaattttcaattataaattttttatttatgtgtatataataggaaaaaaaaaagaaaaaaaataggcattttctttaataataaaaataaaaaaa

SEQ ID NO: 227585 - DNA, 4416 bp, Cannabis indica
tatatatatatgtttcttaatttagcttagttcatcagaaaatttgcaacaggttgtagtcaatcagttttcacgtgttgctcaacatgaaagtatgctctttctttggaaatgtctttcttggatcgtccatttctctctgtgagcttcgcaagctgtatgacgtggtttgtttccacttcaagatgaatttcggtttatgtgggctttgccattttggtgtgcacattttttttactgatgtagtttggatatgagcaggttgtgcttgcctatggtgccgaaagtgatagagttcttggcattccaggagaagtatgtttagagaacttgatgctctgtgattttgcattttacttttaatttatttttatatattactgggtattcggccccctgtattactaattccaacgggacaccgcaatgccaagtcctggaagacaacaaagatgtgtgcagctactaagatttaaacttgtgatgttttcttaagtccttccttgccgctacaccaatgccctgggggcagtggttttgcttttcttgataatggtttttgacaaattaaatttagtgcgttttgatcatttattgagtttgcttttgcaaatgattaatgttttatgctctttttcttctctaggatttggccgggatatactcagcaagagaatttgtttggtggtataatggtcatccagattgtgtaggccttaatcctgacttaaaaagcactgatactgctgtaattcttggccaggtatttaaattgttgatggattgttgatcagaaaggttgctaattttttcaatcttctaacagtaactttaatcagttggtcttcctttctcattgaggcccaggtcaaaaattctaaactgttttatgagctaacaatgatgattgaacaggctatatctcaagtggttgggtgagggagggttgtggggactaactatttcttctaagatacatacacattcagatttccttaataattaagttttcttgtcattaaacttgttttttaacttacagggtaatgtcgctcttgatgttgcacgtattcttttaagaccaactgcagaattggcgacaactgacattgcaagccatgcattggctgctctcaaggagagcaatataaggtttgttggcttgctacactgatctctatgctattaggaatgttatgctatgctaaatcttattgaaaattatgctattttaggaaggtgtacttggttggtagacgtggaccagtccaagcagcttgtaccactaaagagcttcgtgaacttcttggtacttttagcatcatgccacctttggttttaacatagatatctaaatatgattatgtttataattaagttttcatatcacgtgatgctgagaaatatgtttatagagtatgcttgacctgtaggttttttttcctaggtatcagagatctgtatgttcatatacagaaagaagatcttcataaaaccccagtagatgaggtatttcttatcttatttagatttacatattacacttaatcatagtaatattttacatttaaataaagccatgttttagtggttggatgattttattgttcgtattgtttctttcaacttatgttattatttgtacgtgacatcttttgcaaggaagagctgaagaataatcgaattcagagaaggatttatgagttgctttctaaggcagtcaccacaggaccttctcaccccagtccaggacaacgcgagctacactttgtcttttttcggaagcctgataggtttctacaatcacatgaaagaatcagccatgtagctggtgtccgccttgagaagacaagtcttcatggtatgtactgtatgttagcagttgtaatataattgcttatctgactttggaaagcaatatggccttacctaaaagaaagaaatatagaaattagatccaaatgtttgggttttcttgtttagattgaaatgttatttatttatcttcctttcataggtgttgaacctggaaaacagatagctgtgggtaccaaacaatttgaagaccttggatgcgggtaccttgttttgcatctctagatttgatcatttacagttttaatcaacgaggcatttatccatttactgatactagatgttggtctattccacataattattttattctaatggtcatgtcatgtcactgagtagattggaaattggaatttttttccttccagaaactgataatttgatttaccagatgaggaagttggaagaattaatattccttcttcctttattgatgtcgcaattattttggatcaagtttctgcctagtttctaatatgcaatctgttctggtaggatggcgctaaagagcattggatacaaatcaaaaccagttgatggcttaccctttgataatcaacaaggtatgttacaaaatcctaattttagttggattttaaaaggtttcatttggtttttcctttcttctttggagaaaacttggtatgtgctggttcatattttgtcttcgaaatttgacaagataaattgaaatcccatgtagaatacaaaacatagccactttgttatatatctgatcctccttccatctgtgtctttctttgggggtgattgagggtggttcaattgcttttaatagatttctggcatggcacctttaaatggaaaaaatgatccaaattcgataagtgtttattttagcttatggcttgaacataactaaagttaaagaaggcttgatatcattagattcatttcagttctaagtgttatcccattccctaacctgtttctcaggtattgttccaaacatcaaaggtcgagttttgagtgatacaagtacagattctcaactggtcgaggaaggtttgtatgtatgtgggtggttgaagagaggaccaagtggaatcattggtacaaacctctactgtgctgaagaaactgtaagttgtctcttgcattgcatactaagcttctcattatagtccgtcaaaccaaaatatgattacctaattgaactgatggacatggcaggtcgcaagcatatccgaagatgtcgagcaaggattattaaaatcgacttctaggttgcccaagccgggtagagagggtcttcttcagttgctggatgatcgtaatgtcagagttctaccatttactgcttgggaaaagatagattctgaagaaagaaggcgtgggagcataaataacaagccccgggaaaaactggcgacatgggaagagctgctgaaagtagcaggggagtaatttcaggctccaatgtactctttttcggattttctttttgaactagaagaagagttcttagtcttattcatttaagtttatttttgtgattcttcttgttcactcattccaattttatgatgcatcaagattgaagatgtctatttgagactatttgagactattatttttattcagaataaaataaataagattttttctccgaactattactattaaaattcacctaccaattttgtttggttaaaaatttatctaaactattagaaatcaattttctatcaaacattcggatatgcaatttgattgtagtgatagtttgggtggttcaacactataattaggggtataatttgacagaacatccttgtagagaatggtgaatagaattgtatattgtattctatagaatagtatatatttatatataaagttaggagactaaatagtcaactactaaatacaaataggaaattactaaatacaagttattgtaatttttacaactaatattctaacactctccctcaagttggaacataaatgttaatcatgcatagcttgttacaaagataatcaatccacaccccattcaatttttttgtaaaaatatctcctaattgttatccggtctttacatatcctgtggagattagactttgttgaattttcttacaaacaaaatgacaatcaatctcaatgtgcttagtttgctcgtggaacacgagatttgagacaatatgaaaagcaacttgattatcacactacaattttgctgaaatagaagtcttaatcccgactttagtcaaaagttgataaatctatattacctcacacacagactgtgccatagttctatattctgattcagcactggatctagacgcaatattttgtttcttactcttccaagagattagattgcccccaataaatacacaatatcctgaaatggatcgtcaatctactttagagcttgcccaatctgcatcagagaaacactcaatctaggtatgtccatgatccttgtaaactatacctcgtcttggtgctcctttcaagtaatataaaattttctctagtgctgcccaataatgaattgttggagaagac

SEQ ID NO: 227586 - DNA, 4071 bp, Cannabis indica
tagtacgaccatcgagcccgtagtctgaaaacagtaccaagacgtatttccctgaaaatgccacaaattgttagcataaacaggaattgaaaatgttgttgtggattagtgtattcataatgcaaatcttaacaaagctaagcaagaataaaaaagaaaaaagaaccacctggtacatttccagtactggcaatagattctataaatgtgtccaaagcagggagcggagattttcccattaagtatgttgctgaagagttaattccacaaccattcaatgcgagttcttgagggcaactgtaacgttgttcataactacgattgacctgtattaggaaagtagtggcttatgttaagtgacagaaaatgcattactactcttacaaagaacaagttaacagaaaaattcaagatcacattacctctgtattgaattgaaggatctttgtacagagaagatccattttgcagactaaaagcttctcacaatcagcatccatattgcagatcaaggattccatgaacatctcctcatcactctatatgataaaacatgcaaaatacttttttcatgaagcaaaaatggggtagctaacgctatcaaatctaagaaagcacactattcatcttaccaacttgctagttttaaaacacataagaattagcagtgatctaacagacttatatgggccattaggcacatatgatctaacagatcaaaaatggctacacactaatactccacgagaacatctcttctacagtgagaattatacaattttaacgaactttgcaagaaaacttggtaaataatgcatccctatacttggtaaagcatctcaacaatccgagtggttaataacacaaaaatagttggactagtcaaaaccattcataccatgttcttagctctgcaacgtcctgtgggtaaaagcacagaactcttcccagcctttgatgatagagctagacggaaacaacgatttctggaatagactgcagtgtccacaaacagttgacaaggagagtcggtagaatttgactctttcttgataaacaatttttcaagttgtccatccttttcctttccgttgataatccgtgagcatatctgacaaaatctcatcagataatgacaacaatcaatatttctaaatggaaaagaaaaaggaaatacgttgcatcttaagcagaattttgcttgtgatggaaaactaaaaagactacagatatacatggaagtttcattttacatgggatttctatgtgcgtacttggattgcattaatggatttaacccaattttatatcatcaaaaaaatatatataaatatacaccaggaattctttatctatgatataacccaacaacacattccattttgtagctataggctaaagttgaaaatcacgcccatataatgtcatatccgatgacagctgaatatcaaagctggtttcaatggaatctatcagctagattggcgcgtcaagttcaagagaattctaaatttgttctcagcatcacgccacaaccagcatccaccattttctgcagccttgaatctcggtctaatccacaccacaacaaaaactttcttgccataacctcgttttcgaaggtcaaacatttgaaaagctttatattgatacaagaaatttagagcgtgtgaaagagaaaatatttttgagggtttaagaatctctgtagtaaaatgggagttcaaccagaaagtcggcagtgtttagccgaacctcactaaaattactcatgtttctctcctgcttgttggtttaattttgttgtgctgtgcatgttcttggttgttttgagattggtgtgagaaagttttcattctcctacagtcatgatagccctacagagtaatctaatacttgagaagaaaactgcagtggtatcttattgatatcaatgaaaattacaagcccaaactaattcgagactaattggtagtctccctagaaagtaggtttactttctctacagttttacataaacaattcagatgcctaaaacatttaactaaaactagaactcaattaaagaccatttagaacgtatgcttttgagacatcagcctaatcctttccacagcagtaactaaacataacagaaataacagtcattatctaagcctatgccttttgttccacctagaataagtcatccttatgggggatctaacaggataattccataatgctgatgtaataaacagtcagtgtttattcttttatcaataaatacctcattgacaaatgcacctgcatgtgagttgtctttaaaagcagtctttggtatgcgaatgattaaatgtcgagagaacttccctgcaaatagatacatagcagcaatcaattcaaaacactatttataattaatctttgaaagagaacgatgtttagaaatcatataaataacacaataaagtcataagcacaaatggaaaatttgtttgttgcataatcataaatatgctaatacaaagatttccaaactgaacaaggaccgtacattatacatctcctagataatcataccatcagtagaagaatcaagctctactatccattctctacttccttcaagtgagaatttatcacgcaaggcttccaaaataaccgatatcagaagatcaaccatttcatctccatctttttctgcattctctctcctactgaactccaagtcaaagtaaagatggcatggcagaccctgaaagcaacacctaaaacctttagcaagcgaaaaccaagggtggttgatttgagagtatcagtagatgttcacctcctgaatcacttcataatggtggcgaaacttcgagtccatattcttgtatctgaactttgtaaacacataacacacagaagcatgttcagaaaatttccaaaatatatacacaacaatattttttttttcactctttaacataaactgactataaagacaaccttttccagaattccatataagttgaaacaaggaaccttctttgcccattaaaatgatcttggtaactgaaaagacgagcatggtcatgccccttggcaaacttcattgcttcctcctgcctcggaaatgtagaccatatttctctaccaaacacacacaggaaaacccaagttacatctcactgaaatgtgaatcacttaacagaagtagagatatcagtaacaatgatatttaaaaggaggagaatatataaaataaaagaaacaccttgagctcgatttactatgttcaaaaagatccacacgaatttcattcaacaatcgcaacaacaaccgtgacggtcgttttggaggcacaccatgcggtgaaccatagaatacgacaggtgaaatctgcttctcctcgcttgtcgccgaaccacactgaaccaaagaggaaaacaaaataaaaattacatcagtggattacagaaatgaatagagcataaataaaataattgaattaagaagcaatcacaagtaaatactttgtcaatggaagattgtattttggatcgtttcttgggtttttgagattgtgattctggagaaagaatagatgggcgtgtagaattagaaaccccatgcctcaactttcttttacttgcctttctctctccaacagcagattctgaaattgaaagcacataagagaaaaccacacaaacgagaatgaatttctaagaccctttcgccctaacaatcagaatctgtaaatgacattgatgattgaaaatgaaaaacatattgattaatagattgaatgaaaggatgataagaaagagaaattaccaggagtagaaatgccgcacttgaagcactgatacaaccgatcaacgtaatccattgaaaataccaaattcaacttcaatttctaactatgaaattgaattaataatatcatgctttgttcatctgccaaaaaaaaaagcaaatatattatgattgttttatttcttatatatgtatatttttatatttttttatatatatataaattaaaaccgaaaataaaatacaatgtgtacaataaatatatgtgattcgaaccaagca

SEQ ID NO: 227587 - DNA, 5215 bp, Cannabis indica
aaaatctgcgttaacaatcacgactctgtcctttaaaccactacttgtattagccaaggaaaacctccagccaatgaactgggtgctccaagcatgaaaaccaagccaatcgaacagctcatacacaacctgccttgaaagcaagcagtcaaaaaccaagtgctaatgatttttagcttcctaaccatacaccgggcattctggtgatagaacaatgatgtgaaagttagcaaactaatctctagtgagaagttggatatgcaccgtttgcaaagaatgaacctgtgattaggaatactgaatctataccagacagttgtgtaatacttatcttcctcacaagtcgtcaaactattatagagtcttgaagccctaaatttgttattcctcctagcagccaaaagttgctactgattgaaatctttccttaaatgacatagcttcctccaataccaactagaatcttgagcaagcttatagttccaaatgtcttctcctttcagataaaaaacattaacccatttgacccataacacttcatgcttcttcataatagcccacaagtacttagccaaaattgccttgttccactttgccccttccctcaacccgaggccgccaaagtgcttaggcctacacaccttctcccaagaaccaatatgaactttactacggttctcgttatgaccccaaagaaataatctatagtgcttctcaatgtccttgacaacactttggggaagaatagaaatgttcatccaataatttctcagaccaagtaacacagtatgtataagttgaagtctacctgcataggaaagatgcctcgtagcccacgaatgcagcctctttttaatcttgtccactatgactcaacaatcttccatcctccatttggtaggtctcataggcacccctaaatattttagaggaaacctaccctgctctagcccaatcaatctggaaatctcagatttggttgtctcatctacccccccccccgccaagtacatattagatttagtaagattaatagacaaaccagtaatcttactaaaatcattcaaagcaaccttcaagtgactcacaacctaattagtacctttgcaaaataaaattagatcatttgtaaaacagagactaaataacttgaggcttttacaaagaggatgaaatttgaaggtaccttcatttgattcttgcaacagtcttctagtaaggaattccattgccaacacaaacgacggaggagaaattggatcaccatgtctaagcccttttttgcctttgaacctgccttgtagccttccattcatcattagattataagatgttccttttaaacatgtcataatctaattcacaaatttagcaaggaagcaaaggatattcaggaaactttccaagaagttccagtccaccgtatcataagctttactcaaatcaatctttaaagcacatcgaggagaaacattcttcctattataattcttgataagatcctgaaatatcaggatgttatgagcaattgatctctgttgaatgaaagctccttggttctggttgattaagctcggcaagacttcagcaagtctagaacacatcaattttgaaacacatttgtacatagtagtacaacaagcaatcggtctatagtcgactgcactacagggaacattagttttaataatcagggagatttttgtctcattaaacgattcagggatggaacctatcttaaaaaatttatgtattgttgaacaaaattcttctcccaagacatgccacattcttttgtagaactccgagttaaaaccatcaggacctggcgattttatgttgggaatgctaaacatagctttcttgatctcttttctcgtgaaaggataagttaataaaagctgttgatccaaagtaagctttttttccatactctagacagtgaaaagatggttgtactgctagtcttgcactccccatgaagctggtaaaatgatccacaaattgtttaattacctcaaaataatcgtctaccaactcacaattatgattcttatagcaagttatctgattttcttctcttctttttttaatgcaagcatagaagtaagcattgttctcatcacccttttgcaaccaattaaccaaaaaaaattgcttaagaaagctatgaagcattttatctctgtcactaaactcctttgtcgctgccctttcagcctctaataaagagatatttcctggatcagcttgagcatcaaacctcaaagtaatgtacaattctctaaacttagtaattattcatttattttaaaataccatgttatcaaacatacttaacaatttcagaaataatattgttactatcaattttaattagattaaattaatataattaaatctaatacaattaatttaaactttagcaaatgagcttttacaattggggttgctagtatggaggaagactgggtctagtatgtcattcctactttaatggttccctaacttccataaaagatccaaaataaatgaatttaactttagttttaattaattattattcattgattaaacccaacaatgtcacttagtattctaattggggctaaataaaacatatcattctatgattttttttttttgacaaaattctatgatgtttttatttagtaactacaccatatataacatacatatgaactactatatgcatataagttcaatagtaaatatatagcttcacaaagtcaaataatttggatgggtcctattcatgttgataagtatgcaaatcaaattatgaaagaaatcaattaattagatttattaacaagttaaccaatggttaatttagatcctatttctaggacctatcatcaagttaaccctcacaattaatttaaatctaattacttaatagattttgcaaaaattaatttatttaatgagatttaccatcaagtacccaaggttaaatcttattattataattaatatctttaatgaaaaatataacaaagttggttgaaagatactttctattttataaccaagttatataattaaaatatctttaatagaattttgaataaattaattagatattatataagatataaaatctaatgccaacctaatatatcaaattttatttatatttcaaaatatcacaaatatctagttactgatcgtcatttaaaaactattaaactatttaaagggaaaatagatattaatattttaagtaagtgatataaattcaaataatcaaaatatatcataaaaatcattattctgattttataattttataatataaagataaataaggtatctataattttaattttgaattataatgattttagcacaaaagtttcttttttagactaaagatatcgaaaaatatttcaaaaataataaaaatattaattttattaatttttagtttataatatttaatttttgatccaaaatataaaaattttagaaacttcaaaattattttaatgaagattgaattttaaaaggggaaatttaaaaaaaatatcgtaatgtttaacaaataaatctaggatatagtaactaacttattaaagtttcctaggaagcctccatcatgcacgcacgcatgcatggagtttggagccgagaaacttggttggagcatcatgctctacacgcgttaagcaaaattctagtcccacgaagctcgacatttggccttcaatctgcgcgcacaatatgggacatcagctgagaaatgttggtccatgcccagggatgcatgtgcgcgtccctaagttgtgcgcgcataatgtctagcatccccaaaattgtcaaaatttgaccccaaaacctgatttttcatctcaaaaaattttctaaacttaatttgatcaattttcaaccaaaatatgttccaaaaatatttttaaacacaaaatgtactaataaaaatattttatcatagaaacatacataaaaatttttaaaaaaaaatcataatgcataaaattactatgaaaatcatccaaatctcaaacaaaaatatataattccattttaacatgttaattcacaaaaaataaatattatcaaggctctaaggccattgttgggaataattaaacatacaaaatcttattatttatttaagcaaaggaagaaattttttatttcaataaccactaaacaatacaaactgcagagcagcaacccaacaactcaaaacttgtttatagtttatattacatcaatctctcttttactaagtttagaaaaattgtacaattaggatttagctataacaaccaatttcacgtgataattaataacacgagctaaaccacaagcatcatcaaaacacgtctattcttgttgcaccactcataatacacaggagcaacaagaaccacaaaaagttcagccaccaaacatttcaaaggcttctcacaacttcctaactagctagccaaattagttggccaaaagaaccaaccaaaccagctcaagacttccttaattaccatcctggaaaagatgcaagtgaagaacacatgctcatgagactccacatcaaaatcacaaacagggcagcaaggagaaataattggcacaaatctcccaattaagtcatggttcaacaaatggccattagtggctttccatagaataaatctgtgtttcgggacattcaatttatgccaaacaaacttgtgaaactactttatctttgttgaggagagagagataaaaaaacttccgccttctacttcccttttcgaccagcctccaaaagggcatccctgtctatacaacttctcaacttagttagttttttgaagtaccaactagtatcaatttttgtaacatgaagtcagaaatatgagttcttaaaatacacagtattaatccaaatttacttaaacaaaattgctatattccactacttcaatttactttgattaccattacaaccccaaagaaaatcacaacataatttatcaatgatagtggtaaccttttgaggcaagataaagatacccatctggtaattacgaatgcctaataaaacagaatgaatcaactaagctcgaccaacaaaagaaaggtgcctactagtccagcagtgaagcttctttcaagttttctcaaggatactattatgttgggttttatgctctaaataaaactctgtttcaatgtaatc

SEQ ID NO: 227588 - DNA, 2811 bp, Cannabis indica
cttcttcaaaatagagagcaaagttgcctattggaatgtttgtagtctcaacattggaaagtgacctcaaatcagacatgatttcattcatagagtagagaatgtaataacttgatgattgagttttgtggtaatgtgcatgtatatatagatgaaggattctgtggcatacttaggcaattgggttggtttggtatttgcaaagaaacataagtatttgagtcttcacatggattcatcttgtgactcacacatgatgaatacttaattattgtgactgtgacatatgtatagacatcaccaggtgaacaaactacaagggtaccccacttgatgcaaaatattgcagaaaagataaaccactttggaacatatttgatcatgacctaatggatccttcaactaacaatttttattttctcgtgtggctttcaaataattaggaaagacacaaccatgtgatttcccaaagattaagtcactcactagagcccatctcattaattgactctttagtctccaccattcatttccacacaacacattgattatatatactcttaagattgggttcttcaacatctcaactcctcacaactccaagtactagagttttctttttgagtactttgagagttcttcttctacatttagagacttcagcaatcatgggttttcgttttcccggtgtagttcaagccaagcaacttattcagaggcctttttcaagtgcaaaagatgttccaaaagggtatttggcagtttatgttgggaagaacaaaatgacaagatttgtgatccccgtatcatacttgaaccattcttcattccaagaattgctgtgtcaagctgaagaagaattcggattcgatcatccaatgggagctctaacaattccctgcactgaagatgcttttatcaatcttgtttctagcttaaatgtctgatgatgagtatagattgatgataactactaacacaaatgattgttacaattttgtaaatggtaaagaatgtcaataccataccatgtaaatatttttccttgaggactgaaatgaaaatgtccttgagaatgatacaaatgaaaatactaaagcttttcttcaatatattgttttatttgtgttaatttctttaaattaagatctagaatctctggccttcttattgatctgcaaaatagtatttagaatgtatatttttggattagttttaaaacaaacaattgatatacagatagcattgactgaatagcaactggtataatgaaaaaatgtgtaaaaaaacaagtgaagaaaacttaccttgaatccattgaagcgtgtatcaatgtgtttaaatcttaggccactcttctccttctttatcataccattttttaacaaaggacattgatagagtaatctttcagctatttcccaaaataaatacaatttatcaaatgatctttattctgaaaaacaatcatgaagttacaatatcgagctttcaaaaggctcgtctctccaaattcccaatcttttgagaggattggtcaatccacaaagagtctactcttatctaattccaagctaatctaaatgaggttgttccctctctatttataagcattgatcttaaaaaagacttaggccaactagaattacaattggaccaataaaattaaaacactaagacaactcagtctatgtacataaaagactataagtatttcatttaatcattttgtgctgcacaagataagccttaggcttatcagacatgataaacgagaaaacgaagtaggcagccctttttctggcaaggacctcggtcttttacagaaaactaaaaacaagggatgtatgggaaataagttgttgtaaggccttacataaacagagaaacttcctatttgagtgtcatcccccccagtctaaaagcgactcaaatacttgacagttaacaaaattgttgtgttcttgggagtagagggaatatttgaccttcttgcatagcttcattactacatgaccaatctttacataccaacatatttccaatccttaacctttgtgataaaactcatcacctatagagatcacaccatcacatccatcaatagtgaatgaaagctttgagaaaggctaggttgagacttgagtattaacaaagtgataatactttattcatctcagttataaatttacatttatgagtaatgtgaaagtgatgtttctgattctaagttattcaaaaataaagggcagatagctatgaaattggcaaagacaaaaatattgattagaaaaagaaaaatggaattcaaccatagagacaacaagagtgttaatcaaatgaccagtaatttctcaactagtcaaaaaaattccctttcttttccaagaaaaagggtaaaattgaatatgatctacaaatttgttatatgtgaatttctatgtcagtgctgcaaattacaattatcagttcaactgagaagtgatatcattgaagatgtcttcagtgcaaggaattgtgagtccgcccatgggatgctcatatccgaattcttgttcagccatactaagcaagtcttgaaatgaagggtcatttaggtaggaaagaggaactacatgacgcttcttctgatcttctccaacatagactgcaaagtagccttttggaatggttgaacacttcaaacttgcttctttgatgcctgaaagcgatcttcgaagagccttcttgccctgaacaaaacgagtcaatccaaatgccatgttgatattcctttgtatgatttttgtttagaagaagtattagagtaat

SEQ ID NO: 227589 - DNA, 5548 bp, Cannabis indica
tataatttcttagcttgtgtttagaaagatataaaataatgttttaagtattcatagtttcactgatgcagatattgttttagtgattagttttgaataaagaatactagcactttgcaaaggaatactagaatctttttatactagaataagtactagatagcgtgatggtaatggtgtttatggaaactagattggatgtacattatgtaattaactaataatttgttgttatacagggacaagatgtttatattatttttattgaaatagtactagatagccatgttaatggcgtttattaaaactagatttccattgcacggaaatcattggccttttaactccatttccattatttgattactttccattactccttattaatgtggttgtggtttcatctattccaaggaaagagcctgctaatgaaaccaaaaagtccaccaccaccttccacccccgccgccactgacactcatatctgtttctttattccatgggaatggcttaattggtttcgttgattccaaagttcttccgtcggaatctttggttttgagggcggcagaggaactaaatggtggttgtatttatctgtgtctgcagtgtattgctgcataaccgcaagaagacatgtaaggggacaattgaaatataattcaagttagctttgaaatggcatattctttcttagcaaataaattaaggttgcttacctgatcagcatgcatcttcttcacaaaaatcttgaataaatcgaagtttgtctgttgtaggagatcgctcgataaacgaagatatgttaccccatacatcctcagttttggtggccctgctttgttaattccatttggtctggcattcagaaggatttggtcataagctgcactgtcataccttgaaagtgcattctcccctgcaacttcaatcttctcatgccaagcatcactcaaaacctacacaaaatcaaaaattgctatcattagaaaggcttttggtttaattgggtcctaatttcatatttttcataactgataatactctagtttaatagaaaacccaatgagctagaaaactctgtttaatgtgtgtgagtagtacttgactactttctagctatacctgctgcacaagttcctgaggtccactcttggcatctgcgctctgttcagaatccttcatttctaaacatgtgaaattcaaaacagcatgatgccttgtaagcaaccttgctataggccgatagccatctctatcgttgaggttgtagtatccagcagtaagctcagcagcatgattctcagttttgtaccaccagtggattccagagacctgttttgttgataaggtaggtgccattaaatcaattttattaaaaagataagttttatatagttaaagaacattatgattaagtgtcaataatgttatagttattggcattgtaagacttactttgattgccaacactaatttacagcccaggaaagctttattggcttcctccaatatctgatccccatgattcaggagtttgtttgagtaccaagtcaagaaaaacttccctttttcagtagtgtatgtcccatttgatttaaagaattctgttgcatctggtgtgtcattgtattctcctgcatcgtccggcaattcccattcgggatgacctgcattacttgcagcctctttaaaatcttctttgagatacttatcatagcactgcagcatgttacatcaacttgttttagtcttaaaattccttgaattagacatggatcaccagagtaaatgaaatcagtttcacctgaaattctccaataccaggaaaaacccatccttgagtttctgggtaagaggggtaccgaagttctcctgctgccccaaggccaacttcaatgtccagtataaacccagattccaaaaagtcagacatattctctctgaaactcttcatgtagtcactgtagatctacagagaagaagataatgatcacaatgcaagtaaaacgccaatttagagttttaaacaaaatatcaggtatagttttcttaagacaaagtaggccaatcctactaatagatttcatgcccttttcaaggtatgtatctcttagactacatgtaactccctcaagtatactcttaactgtttaattttatttaggtgactgaaaaaattgtcctcttctacagtttccacagggatttatatgtgttgttggtctgttgcttgatcattcaataaaacaagctttcccagcaacttgagtcaaataacaatttatttgtcttcatataaagcaaagtactaagagagtttcatacaagatggcctcctgacctaaccactgaccactttaaaactgtttctgaagcttacctcaacagcagttctgccatgaaagagaggcttgttatccacacccagagtgaggtattctgggttttctgttacctttgcggttggtgtagaagatatcagggtctgattctcctatatcacgaacccattgaggaattgggatgtaaacaacatctccaacattcccaccacattggtggaatgacataatagcttgcattttcaagccacaatcttgaactagcttaaacaagctcctatagccactccaatcatactgctttgggcctttagattccacaattccccaccagacatctgtcatgacaccatcaacaccagccgctctcagctccttcagttgcttctcaagattgtctctgtctccaacaacattgtcagccgtaacagcatccaactgcaaacattcaaaacgtaaaaaacaaaaaaaaaaaaaacccagaagttaaatgacattatccatgctgttttaaaatcaaatttcataatatatgtgtagtagtgagtagtgaactgggattttgttacttaccgggagcataacatagattggcacgtagtttgctagcattttttcattgcaagtctggggagatgaagcctgcattttttggagtgaaaggaagagacttggtattggtaatctttactaacagagaattgaaatggagaagaatattggagggtgctactacaaacttcttctcagtcttgctctctttataaagaaacaccatacctctgcataaacaagttgtcatcaattattgtggcccccacaggccccactacaattttctatatataatagtattgatcacatgcattatcttttctagccttatcatcagctcagtagccggaatttgacgttgcagaatagtggaacacaatcctatatttttcaatcaaaaaaataaataaataaataaatcctagcctgatatttttggtcagcaaaattgtcacttttttttcactaccgctcactcatgctgtataattaacatctattatattatgtgaccttaacatgcctaataactcgcatgatatttttttttaacatgggggtatttttctttctttcaattttttttttttgttttttttaagctaaaagggggtcaggtggcggagatcatatcctcaactccttcggcttaataacaatccaaaaaccaccgaaagagtaagttaagacatatacaatccttaattgtcactttttctttcgttctctatctatatacaaaataaaaagagaaatatattaaaatgaacattttattacttttatgtataatgtttaattttaccttggcttccatacgggaaatttcagacatcacagcttgatggctactactactactgaccatgctgctgaatggccgattttgtgctcggtttgctccttgttctctcactattatgtttattaatggagtttccttgtcaaagtaccttattttctctcttaaacaaccagttgttgaacatataatggttgtcatggtgacaatgacttgttacctttttctggttatcagtggccaatgcgttgaaacgacaaccctttgtgctaggaatgagcaatgagcaacttcgaattgcatatacaacacatgtattagattttttgacccttttttctccttccccttttgcctgaaatggctctggtttttttttttctttttaaacgtttgatcattagatacataaaatgttgaatggagtcctctagttcggtaggagaatagttgccagtgattaacaattggtttgtgggcttcttcagatcgcttgcatgtcttggtgaataaggatcgttagttatatacctggtcatggtttatttgttttccttttcgcttgtcattatcttttcttttgttgttttcttatttttgacaacaatcaatctttttaatttttgaaaagaaaaaaaaatggacgcaagcaaattttgtagaaacttttgatgataatatcttcgtctacttctgaaaaatataaaaggaacaattattaaacattagttgagttgtctattgtgtattactccacgcttaactcataagtaatgtaataattaagatgcagaatttctcactatatgtaccgctaaagaatcacgtgagctaaaaaaaaataataagcatcatattcatgaagcttttctttggtaaaattaataatgatcataaatacaaagcacctaagaattacctttccagttaattatcgggaatcgaagagttggatagctgatatggtatgagaatgaggcagcttgtttggtacttggtagagttattgaatttgaatatttggcataatatatagtgatattttctttggctgagcttttgctttctatttctagtttcttggagaattttttgaagttaaaagcaaaaatttacagtcatgcaatagaagtacttttggaatttcagaagcctaaaaacaacttttaaaaactctgccaaccgaagccattttttttgacagtaatgaataatttcattgaaaaataaattataatgtcttacaacctcaaagattaagatttcccaacaaaagaatgagtctcatctaaccatataagttctcatcactcctgaaaaaaataggactattttggtgggttcggctccctgttattgctctaactcggcagtctaggcccgccctgtatttcgatgcctagattaaatatgggtctatctcggtggtcttggcccatagttattaatagcaatatcggcagtttttgcccgccgttattgatattaatctcggcggtcctcgcctatcgagataagtatatttaacacaattttagtactatgttacaccattattggcaggctcgaccctcgttattagtcaagctcaatggtcaatcagcccgccgaaatatgttaatgttggaaaaaaaataattttttttttaaaattctcaatgctattacattgattgtaggtattaatttacaatgtaaatattatttttaagataattccatgtgcattgaattgatatatctaatgcacctacaaatataataaagtgttattacattatatattgtaataagtttaaaaatatgataattgttagaaaaataattacaataataaaaatgataa

SEQ ID NO: 227590 - DNA, 2810 bp, Cannabis indica
ttaaaattataacttaattactttataaatgctattaattcttgcaaattattatatatcttgcatgaatactagagtggttgctcttgcctatttatattttggaaaccattttcctatttcataataattattaattacaagacttaataattaattatacgaataataatatttttgaaagagttgctactaatgttgatgtgttatatatgtttgcaggtaataaaaatctctgtggacctcctctaggctcatgcatagacccatcatcatcatcgaccatggataacgtcactttgtcacctcctcacactagtgatatctacaaaaagaattcacaccttctaaaattcgtgctaattatactcatcatagtcctcatattggtaatttttatttcggctatcatcatagcttgctccaataatcgaagaagatcaccaatgttactagataggactagctcaacgatgagcatatctcattgtcaccgcaactcagttgttatgagatcactagaaaacaaccaaatggatacaaaactggacgctgtagcggcggccaaagcgaataatggccacgccaccaagagatcatcggtagtggccggagaagggagattgacgtttttgaaggataccagggaaagattcgatttgcctgatttgctaaaagcgtcggctgagatattggggagcggtacttttggtgcttcgtacaaggcaaccattcattgtgatgccatggttgtgaaaaggtataggcaaatgaacagtttaggaagagatgagtttcatgagcacatgaggaggctagggagattggcccatccaaacttgcttcctcttgtggcttattactatagaaaagaagagaagctcttggtttatgactttgtggagaatgggagcttggcttttcatcttcatggtaagttcattaattaaataattgctctatatatatgtgagtcaatcacattaccttatattgttttacatatgttaatttaaaatagactagctaattattaatcagtataaagtaaagttagacactataaatatagaaagtacaacaacaatacttatgacaatcaatatattaagatatataattatatatgaatgtacgtatccatggtatactatttcttatatataagatttgtttatttaaaataacaactttatactaaccatgcagcagttttgaccaacatgatatgttaatataaatatgtataggcaatcatcgtaattcaaagcaatcagcgctggattggccaacgaggcttagaatcataaaaggcacagtcaaaggcttgcaatacctctacaaaaccctaccaaacctggtggtacctcatggccatcttaagtcctccaacgtggtcttaggtgagaacttcgagcccttaatgacagactacggcttactcccggccataaacctagaccacgcggaatacctcatgatggcttacaagtccccggagtacgccaagctgcggcgcatcaccaagaagaccgacgtgtggagtctaggaatactaatactggaaatactaacgggaaagttcccggagaactacctgacacagcgatacgaccccgaggctgacctcgcgagttgggtgaacaagatgatcaaggagaagaggacgagccaagttttcgatgaggagatgaaaggtatcaagaacagtaaggctgagcttctgaagctcttgaagattggtgtgagttgttgtgaggaggatctggacatgagaatggatttgaatgaggcttttgagaagattgaggaactcaatcatcatgattgtcttgatgatgatgatcatgataatcataataatgcaggagatcatcatcatcatctgttttctcccattgttgttagtggaagaaaattgtcatcagatcaagaagatagttacatttccagagctatgtaatgatgatgagaaatatttgagatgagatgatgatctgtctagctagctttctatatccaatgatgttttaatttgaagtttttctcatatatgtataatacattggattaaagtacttttgaagatatagatgacttctcggtttgtagggtatatatattaaaatatatatagaagtgatgagttctctgactaaaaattcatgttttcttatgtatgtcaatgtatgtgcagtgcttgttttgtagagagaaaaattaatttatcaacaccgttatattgttgactctcttttgtatcaaaatattatcaattttattttcaattattatttatatatatatatattttaattaacaatattgttattgagtattagtggtgcttagcatgttctatagaggtgtgacgctctacgattaattagtgatattttttaaaaattattttttaaaattatataggatattaggattgttagtccttctgttcatgattcaagaatcaaagcaataacaatgaagaaaaagaaaagagaggaagaagaataaagatcaaaaagagagagagtgaaaggaatattctcttattgtattattgttattttgttcagagtacaagagaaagtctttatatagagaatacacaccagaacacactggacgaaaacagactaaaccaacaaataacaaccacttaatagtatttaactaactctaactaactctgaacaaagatcccttaatacctcctcgcaaactcaaaattggtagaactgtcaattgtgagtttggatcgaaaaccaggaaagcactagcttgaaacagatttggtaagaccatctgca

SEQ ID NO: 227591 - DNA, 1790 bp, Cannabis indica
gtgtcaaagttgaaggtgactggtgtctttttactcttggacactaatcagtggttaacaactaactgacaagtcaatcctctgtatatatatgtcatgtcatcatattataaagcacaaccacaaccacaccaatcacattacttcttcttcatcaatcttcatctccatttctatggacttcttctcacctctactcacctcatttctcttccttctcttctctctatatctattcattcattattatcaaacaacacccaatatcacaacttccaatactttcacagccaaaagctaccccatacttggtcacctattcgaattaatcaagaaccgaaacagaatactcgactggttcaccgatttccttaaacaaaacccaaacaacaccgtgctcttgaaacgccccttcaatcaagtcaccattgaaaccgccaacccttcaaacatggagcactttgccaagaccaatttcgagaattaccccaaaggcgattatatcttatcactcttcggcgaattactcggcggagggatattcaactccgaccacgaacgctggaaggttcagcgaaaggcagtgagtcacgagttcagcactaagtcattgagaaactttgtcgttgaaagcgtcgtcttcgaaatcgaaactagattacttccgattctccaaaaggcttccgaaacaggggagattatagatttacaagacgttttggagagattcgcttttgataatatctgcaaattagctttcgatgtcgatcccggttgtctctctgccgtcgccggtgatggtggtggttccggcgatgaactgatgaaagcttttgcagaagccgtcgaaatcagctccaataggttcatggatttgatcccttttatatggaagatcaagagatttctgaacgttggatcagaaaaacgtctgaaacaattaatctcaaccgttcataaattcgcagatgagattataaaatcaagaaaagaagagaaaaacactaaaggagacttactgtcgcggtttatcgaagacgacgagttaaactcgcccgagtttttacgagatatcgtgactaacatgattctcgctggacgagataccacgtcagcagctctatcctggttcttctggctcatctcgtcaagaccaaaaatccaaaataatatattagaagaaatcaagtcaatccgagatcgaaccaccgacgattcaaatttcagaaacacttacagttttgatgaaattagagatatgcaatacttacacgcagcgataacggagagtatgagactgtacccacctttgccggtggattcgagagtgtgtaaaaacgacgacgtttggccagatggaactttggttaagaagggtagtttggtgtcgtttcatccgtacgcgatggggagaatggagagtatatggggtgagaattgctacgagtttcagccggagaggtggatggtcgacggagtatttcggccggagaatccatacaggtatcccgtgtttcatggaggtccgagaatgtgtctgggtaaggatatggcttatattcagatgaagtcgattgcagcttctgtgcttgggaggtttgaggtggacgtattggataaagacacgtgtcctgagcatttgcttgttgtgacttttagaatgaaaggcggtttacctgtgaggattaggaaaagaaaaggtcctatttaatttaataatctttttttgcttatgtggattaattaatactagcaaaaatttacctctattaaattttatgctaagtatt

SEQ ID NO: 227592 - DNA, 1832 bp, Cannabis indica
tatatattatattattataaataatataacaatattttcttttcttttcttttttagtctaagcctcactaataaccctactaatatcagtaaaatagttctcttatctttctgtttttactgtgctaagaatgaatgaatttagttataaaagaaaagatgttataaactggtgtagttatatctcttaccatgtcagttggcatatgaaaataaaatatataggtataataaagagctgagatcattaaacattatttgctatgcaacaatcaataccaaaaagtaaaagaaagagaaaaagccattgatgaagtggtactttaaatagtaaatagctcttcctgcacaagaagaaatcttttaaatatcttatagctttgggaacaaaatttattgaagaaaaaagggtgagtacttgtaccacaaaataacttgtatatgtaagcaaatgagtaaataaagactttaaataaatacagcattaaggatatgttgaaagaaaataacagaaatccaaaatgacccataaatattggcttttgcacatgggatttcttgactgcccagtaaacttgtcactgtcattaagaaaaacactgtgccacaaccagaccaccaacacctctacaacaagagccagagagagccaaacaaaggacagtagtaaagtaatagccaaggagccacttactcctgtcaatttcactgttacatcctttttctttacttttataaattcaaacattaaaaaaaattaactcaaattgagctggggttttgctcttaatcacagtagaaaagagaattgtagtgtgtcttgtctgtcaccacactcaccaccgcccactgcccacatcacatgctcactctatctctctgagctttaacagtgagattatatatatatataatatataatatatatgactctgctgtgggtatgacctgactttgagtaccatttacaaacaatgtctgtgcattttgtgtccttgtctatgcctaaataaaaataagacagagagagaagaggaagacaatactcctgaaattcttgccatttattctccaaaattatttctgtataatttcatgagctatacctatcagagctactaagaaagtttcaacattgttcattgtcatatattagatgtatacaaaagaacaaaacaaaattactttatggccttttgcattgtcactctttctttctttcattcaataaaacagaagataaattaataaacacttacttttttctacagaatataaatcaactcaaaaatgaaatccaattttttgttgtatgattcgtatgcttactcatcagttttactactcaaccgagctcaaaattaaaacaaagaaaaagaaaaccgaagaaaacaggtcaggactaaagagcaaagacaaattcagatccaaaaaaaaaaaagaattaaaaaataatctcaaatggtggtaaaagctccaaactttcctttttcctccattttcatataaaccaaacataccatgcaaaatgttaaaaaaaataatagcaatagacccctctctctccctcgctttttttttctattttttttcctcattaacaaaactaatgattaaaactatgatgcagtgttttctgcttcgccggatccataaaaatcgaccagtttctgcaaaatcacgacctgggtcctcaaaaggacgatgtaatcagccgtttgctggaacaattgttcgggtttaactgtctcctcttcgtgggtaggaatgagattcttcaacgcttccaacttgtccgcgaccttcgaacacgtgcctccgccattgttaca

SEQ ID NO: 227593 - DNA, 4352 bp, Cannabis indica
ctctccttctcggtagcagctcgtcgatggcaaatatcgcttttggtaagacgtgctcggggcagttttatgtgtgtgggttttcgtttgcaaccctcagggcaagagttgattccttgtcgacctgtttgttatggatggcggttctccttacctatgatttcgtggatggcttggaagcggttgtggtgggatgttaatggccttctcccttttgattttgtggttggagtcgtgtgatggcctttttaggcaaatgcttaggcagtagagtggtgcttttcttccttcttttttggttcttagtgctagctcttgggtttctttttcaggcatccatgctccttgcacaatttcttgttttgagctctcagagttttgtagatgtaaaaagggagacacggattttatccaacgagatgtgcttttcttgtcttgtctcttttactgaacttatgtaagcggtgttattcaccctatgtcgtcgactctaagccattattgtagggtttgtccctttagcagagcttgcatgagctcagggtcgacccaagaattaagcaagtttgggttattacacaaggcctcccatattaaaaaatcctttttaattatacttatatataatataataaatgtaaagattatattatattataatataccaaattcatttttttttatcagatgtagatagggagagatgcgatggttgttccggtttgaatgattgatttagcagaatgagaataaagtattgtatttttttttttttttttttttttttgttagtcgtataatgactagtatatgaataataataatgctaataattataataatatatattattctttatacaatattttgtttggtttaaaattagataaccctctaaaatatttaaattttcatctaaccatactcatccgtaaccacataccataaatcatataaattaataataacaaaaataataaataattaaatcacacacttaatatataaattagcaacatatttaaactaggtattattctcattttcttgattacattcatttaattctgtttttgtattggtatagtgttttattggtcatgttcttctattttattaggacgccactttatcttaatttttaggttaattaggatttttttctccaaattttgacatgtgtcaaatcatgctctctgaatttttttagccgttaaaaattttctctgaattatggtgattgttagatttaaagacttttgtctaatttcattcaattttagtgtttcagtgattgtttatgagttaaactatgctctccagactttgatatctaccaaatcatattcctcgaattttgatatgtactaaatcatgttccctgaactttcattcatgttagaatttttttacaaaaattagacaaaaatccttaaatttaacaatcataatagttcatggggtacttttaacaatcttaaaagttcagagtacataatttagtacatattaaagtttagagagaaaaattcttaattagcctaatttttatatcagtatgatattatttgttttaaatttaagactttacaattttatttgtaagtatcttcctaaaattattatgataaatgtaatacgtaactcttgcctattacacactgcaagctaacgatttttggccttaaaaggaatagtgtgactgtgaaaccaattcactaagaacaaactagaaaaaagttaataatttattttattaatcactgaattagggtattggaattacaaaaatggattttagttgtacgtcatatgtaaatctccatgatgtaataattctattagtataattcaaaaaaaaaaaaaatactaatgtctaagaatttttcatgtattaatattattattagtttaattaagtatcggatctcactgggccagccctgaattaagacgaaagaggcagccgccttaggtccgccaccgctcaggccccgtttcgaaaaaaaattaaaatatagttagtaataaaatgaataataatattttaaatgctaaatatgtgttgtagcccagtgataatttaattagtttaaatctcaatagcctcactttttcattggccccaatttttatattttcctaaagcccaaattaacataggacccgccctggcatctcatataatttaatataataactatatctaaaataccaagcactattagcatctaataacaatgctccttataaaattttctttcaaaaaacaaaatataagaaaatggaaatgatagagtagagtagagtagtcaatctctacatttgaaattacataccataatttttttataatgaaatttgttataattacaatattaatttgtgaaaaattctgaataatttaccgtactaaaaatagagtttctaacattttgatctaccacacgtgttcaaaaaacttcaaatttatttttgttattttaaattatttaaaaacttttaaaaatttacaaaaataatattatattcgtaacaaacacatagttttattttttaatttttatgaaattttatataaaaatttgcaacttaaatcgcaatttaaattcatataataacttacataaaaactacaaaaaaaactaccttagatattcaaatcataaactaaaaaaaatagttaaaaaaatagtatataaaataataggagattctacaatgcaccccttaaaagggatgtacagatacacccttaacttgtttcgacatccaaaaaaaaaaaaattagtctatttttttttttcatattcatatatgttatagctatttaagataagctacaaaattttgagaaatttcgaataatttataatataaaaaataatgtgaacgtagttttcggcgtgttaaatgtcttaaataaatataacgtacatcaccatgaaaaaaaaaaaattaactaaaaaattatttcaggagctaaaacagataaaggtacatcaatgtatctatttctaaaataatttacttaaaaaaattattaaaaattattttaatatttattttcaagtaaaaaaattaactaacaaactgtaacaagaaactgtaatagtaaattaactatagcaccgctctattttgatttactcaaataaagcagaaaccataagataacacgtgtagacattacgttacaacagcacgaatccaaattcaccgacacgtgactcgaccatttccctttccttttcgttgaaatttgagcaacgaatataaatctctacaacaacgattttatgcctctcttcttttttttatttttaaatattaaataaataatttttgagctgagtgattattaatctttatacaaaaaaaaatgtcaagcggtggagagaagaggaaatcggcggcggaggaaaacgacgacgtcgccggacctgcaaagacggcgagagtagaagaagagagcacgaggacggaggaagaggaaatcgaggaattctttgccatccttaaacggatacaaacggcggtttgttacttcaagaaaggaagccgtcaacgtcaattaacggagcaaggttcgaatgtcagaacaatgttggagacgggaaattgtgacgccgttaaagatgaaacggtgagtattaggccaaatgatgatgaagaagaagaagaagaattagagaatgagaatttgggttttgatttgaacgcttcaccagctccggattgtgatcctgtttagatatttttatatttaatctgattattatccttttcttgtttatgaatgtttatttttattttattttatgaattggtagaagaatagaaactatgattatatattctataatataataggaatttctctttcaaaaaaaatataatagaaatttgagtggatttgtttgtttgttttttttttttttggaataaattacaatattattgttagatttttggaaatttggttattttggtctaacaattaatatgtacttttttaaatgtacaaatagaatttaactgaaatagtgataagacttaataataatttaatcctaaagtgttatgataatattcattatatttttatctgttttttgtgttagaaattggtttaaaaaagttaaagttagttatatttaaaagtaaacaattaaagaatttaattgataatttttataaaacatacaatttaagtgcagataatatttaatttatatttatgaaacctctctaaaccattatagtgaataagtgtatttaaatgaatttttaaataataaataaaaataaattattgttttgataagcaaaataataataataataataat

SEQ ID NO: 227594 - DNA, 1702 bp, Cannabis indica
aatgttctaatcctagaaactaattaagattcatattcaaactatgagggcaaagaagatctaaatgtgaaaacacagtattagggtttgagagataaaatccctttgtttagaacacgaaggcttggcacaagggagatactaagtaatgaaactcatgtaatttaagcacttcaatgggtttattagtgtaatttagtgatcttagcaaagccagagagattgaaaaaagtgtgataaagacttttcaactgttagaatggagataattgcccataataaacatatacaaaaaaaataaaaatacgacccatatataattaacttgatactccctcaagttagagcatggaaatcacaaatgccagtaaatacaaaaacttgtgcttgcttagaggcttttgttcatcagtagagagtggtaaagataatgccattacaaatgacattatgactataatgacattccacttcaatttgcttggtacgctcatggaacatttgattttgagcaatgtagagtgccagttgactatcacagtataagagcatgggtaactaatgagagacacccatactttcaagtaaaactttaagttatttcaactctgaagtgatagtcgccataaaacgatacccgccttagtagatggttgtgacaccatgcgttttttcttggtcttacaagaaatcagggaagaaccgaaaaagaatatccaactagtaaaagactatcgtgatagaggacaagtggtccaatcagaataacaccaaccggttagataactcacaatcactgtaaatatggctattgtaactttgatgaatcttttaacaaaatataggagtgttctaatgtgtgtgaagtggaaagagtcccacatgagatatttataaggatatatagagtgcaattttggcatttgggtttgggccccaaaggatacctagttttgtgcaaatgggtgaggactcacacacttaacccaccacacgcgccgtctgtccgattcgagctgggttggtgtggtgtgatactctattatttttacagaaaaattatttaataaaataattatttttatttttttaatataattaagaaacgtgttaaattggaactgattacttagtcgtatcagttaatgagacacgttcaaacgaactcaccccacgattataaaaaaaacgttcttattcccgctatgatttttcaatccatccgtccatataatgcaattgaactgatgggaagaataaaactttccaaaaaaaaaaacacagttttcataaaaattaaaattccatctgcgatatcaaaattctttgggtgtatttgatggtgctctacagtgcaggggttccgatacagtacgactgggctgttttatcctagggacgattggcaaatttcgactgcttgcacactcctaggcagtgtcgcgaacgtcttaaagagagcgacctagttcgtgactcaacccaaaattttccattcggtaatatctttcctcttttatttttactagcagtttattcaacaattttaagacgttcgttctgctatgaatactaccgatgaattttctagttctactgctggcattaatgggacacgttcaaaccaactcaccctacgattcagaaaaaacgttcttcttcgtactatgatttttcattccattcgtctatataatggtac

SEQ ID NO: 227595 - DNA, 5739 bp, Cannabis indica
tatttaagtttaattttagtagtaataatacttaagttatacttctaaaactcagtaacagttaaatgattatctacgtgtcatttcttattagtatttatttttaaaaaaaaaaattaacaacttggaccaataaaagattgtcacgtgacaatttacttaacaattaatagctaaatacctaacaaaagttctagaattataacttcaatactattaccgcaaattactctattagaataattagttcttacaagaaatataaatatattaaaataattattattttttacccctgtaaagcttttttcactatcaaattataacttcttaatccttttatcacatataaatatagcggtaaactgtaaatacacactatatttgcagctatagtctcactgttggaattaaaaaagtaaatttaactagtgcattcaattttgatacacatgattggaatagagataaagatggaatattttcaatttcattgagcttatatatgaaccatggttacaacattagcccctataattgaatatcatatagtattacaagtgtaaaccttcccatctttattaatatgtaactataaaccaaaaacagtttctttgctttttcactaaactgtatgaaccattgtgagtccaaacttctaagcacaaggctcttcatccttcaaatcatctctacaagatgtatccaaagaattaaaatcgggtttggtttcgatttcggtttcgtttgtgcagctttcgggggcaacatcgccatcgccacactcagatgctgagctctccttttcgggacaatccaattgtacacattcaacagcttcgctatcacaatattctgagtcttgactcctattcgacaacgataaattgtctttctttacaatgttgaacatctttcaggctgcaaaagatcaccttccggacaacaatgcttgatccgttaatggtaactcggtttctaacatccctttgatcaaagtctgtgccatctgatgttgtccctctcgggctgagaaaaaattcagtgttagtaacaagcgatcctcggttcaattcactatcaatgtccaaattatgaacaaaatcaatgaacatatttgctgaggctgttctcatcaaggggccaccggttcttgtccaagaaggttgatcaacactctcagattcactatcacttccatcgtgtggaccacgatgggttcggaaagttttaccagatgttccaccagcagtgaaagcgcttgttccatgatgcaacgaggaagcagcatcagccagaaaatcatcgtcgagagaaccagttgaattctcacgagcaatgcaattccacgagggaatccttctagaaccactgaatttgacggtggtgcttaggccgtgagagaagcagcagcagcagcacggtccacactccttttgagtctccgcatgtgattgagaatcgcaacacactcgtcgagaacaagctcaatgccacagttcgcttttattgcagaaagcttctcccaagtacaccttcttccttggttggcagctttttgaagctccccatgagacgggttttgtaagatcttcgagtactataagcaacgaatacaaacaacaactagttagaaacaataacaagactgcaatttgtgttttttcccgagtttcttcacaaatttttcggttataatgttaatagaattccaagaaattagttacctgagcaagtgtggcgggcatgacaacagttacatcaccctcccaatcttgagcgaataaccgagcaagtccacctaatggaaaaccgagttctaaaaatctggctgcatctatgttttacttccatctcagcaagatgagcaagctacacaaattatacatgtaaacaccaattaattttcgaatcgccatctaacacaaaaagaacaagctattcattttaaataatcgcttcacaaaaagcaaccgagctctaaaatacagtatgttctgcgtgtgtgcaaacgagaggatcgaaagatcacattgtaattcataacatgacatcatattaacacatacaatagagaaaaagataggcaaacaaaggtatttgatgcacttataagataacagatttcgggtctagatttataccttagcagcaaagttgcctccaagttctctccaaaactcctttagtctcaacaatggtgcaatgtgaggattggcttgactcacaatgaagtgattaacattgaacagttccttcaattgcatcataggtaaatcaatctccaagctcccgtccctccaccgacgcactggggtagaccctgcttccggccccaagttaaatggaggatgataaggaacaatttcgccacttctatccttcgccatcagctcctgcgcctcaaaaagcccggggaaagcacaagaggctgtcactgcactccatatgacaacatggggatgtcaagtagttaaggcatctaggaggttcatgcttcctcggggagcaaactgttatcccgagaacccgacctgtcatgtcataagcctcttgaaacgtaagattactcgtaagatgccttaacatcatttgcaactgtctgatttcatggacagcaccctgtgtcattaccctcttaacaactgtgaatataccacccatttgatcgaaaaactgcaacgaatgccaagaatcctcgaaaaagctttgcagctcgggccaagacctagtggcaacaacagaacacattatggatccaacactagaaccagcaatgatcctaggcaaaagcttatgttccacaagtgttttcaccacaccaacatgaaaagctccaagcgaagcgccaccactcagaagcaatgctgttcttccgaaagcatgtctagtttcgtgcataaaagcaagcttctcttccaacataagttcttccgaatcagtatcacaaaccattctcaactgcgtcgaaacctcatcaatgtaatccttaataagtttaggaatttgcagcctacccttatgcaattcaggattacacatattcccaagatttctaacaagatcagctctcatacaaaagataatgtctcttcgagacccctcttggcgacgatggcgaagctcatcaagcttgttcctaaccaattcctcatcatacaaatcagactcattcatttttggggtctctttatcaagcattttagcagcatgagcccattcctcataactcaaagcagttctcatcatatttctccaaaatttcctcctataagccatttcagccctccctttaacatttgtataacgtttcaatacaaaagcaatgattgtcaccattgccaatatcccttgtggattcctaggatgtaaccatgataacatgggacctaaaaaatccttaaatctatataacagttggagaaaaacatggaatacttgatgtctcaaatgggacattgatttgcaaaacaaaactctaaaagcaattgttctaccaactaatgttgaaggtccaataggaaaagcatcaacattagcctcattacttatatccatttctaaactaacccttttgttatacaaactcaatttacagagatcaaacagaatgaaattgaacaggtaaatcaattatcataaacaagaaattcaattgtttggatataatgaaagaatcaggggaaaattcccagaaatttaaggttgaagaaacttaatttgcaatatataataagatacacaaagtaagagaattctccaaccttatataaactctgaaaatgggtttcgaagcttcaaaagagaaaactaacaccccaacagatctccagccaaatgggatttaaaatcaaactttctttttctcaaattccccacaaccctaaatacccaaactcaaaactttcaattcaagatttaatttttataggtgaggaacaaattatgctccaaatcccatttgggtttcagctcaaattctcaaaagggtaaattttttgttgtaataagaattcaaacaagtgattatgtacagataacccagtttgaatatcaaagtttctttctttctatctttttccccagaaaactagaaaaagagaggctttttatgtgaatagtttgaaaagttcatggaagaaaatgaataaataataataataaaaaatcattgggaaacgtgagaagataaagatatagatatggtgatgacgttgaattgaatcggcaaggcggtgaagatggaagataaggcactgacacagattatatatatatacaaacaatgtttgtcagatcgaactttctaattctgattaaagaggaaattagtattatttaacttagtggaaaattttgttataaacatttgtaaaatgagtgttttgcaatatttgtttccatatttaagaaaagaaatagttttggattttggtaatttacattgtttaattttgttaagtctactgaacgtgatagtttttgattagtttaaattattaaatttttattttttaatttaaatttaaatatgttaacaagaaagcgattaacttgacatttaacgattagttacctacaaaaattttagaaatataatttagataaaattaggctgcaaattagtcttttttctattatcatatacgttcttattgtatgtataatttttgaacttttcatattggtaaaaattttcataaattattaagatggttggattaagatttttgttcaattttatctaactttattaatgtggtgattattcatgtattagattgtgcactctaaactttgatatttatcaaattatgtcttccaaattttaaaatatattaaattgtcccccttgaacttctatcaacgtcaaaattttgttagtataattaaataaaaatcctcaaatttaacaagctcaataatttggaagaatttttaacagcttaaaaaatttcaaagcatgattcggtacgtgttaaaatttaaaggacaaaaattctaacaaaaaatttttaatatataacaaaacatgtgaattttatttttggttttataaatttttaaaaatatactaataattataattttatattttttttattatttttttttttttagtaaagatcaaagtttcatttaaggaaaaatcaaagggcgagcaaaagtaaatcaatcataagaagggtgagcaaaccacaacaaagttattagacttacaaaccaaggcatggtcattttggaaggtaaagaaacagaacaagaatacaaagccccaaatctctaaaatgaaacaacacaaaataaaagcataaccatagatcctagttcaacgaacgaggaagagacatccaaccacaagcaaactttcgacactaaagggaaaacgagaccggaccacaaaactaccacagccaatctaattgatcatcattaaaaaaaatagataattacataaaatactattttttgtaaaattttcatttttatgttcaaagattttttatatatatttttacggtgttcaataaaaataacatataaataacgaaaatgaacaattaattaacaagagtacaatataaaaatacattaaaaactcatattttctgtaaataaaataatttaaaattctataaaactatatttttattatttttatatatttgtaaaattatctcataaaaataattagcacataagtactcaaatctcctttattctttttttaaaagaaaa

SEQ ID NO: 227596 - DNA, 1134 bp, Cannabis indica
ttttttttttcatctctctgttttagtttttggaagtgatgtttgtggttccataatctttccaatatgtgtattgtgtgtcgtttaggtgatgagcatttcaatgtgttgaattttttgttatttcttttggaaaatacttcaagtgattattgtgttttttttttttataatgttttatgtttataggtattttttgttttagtttggttgtgtttagtgttttgttgttgttttgtgtaatttcggtttttaagggtttttttgtgttctatgtttatttatttttgggaggcaatgttaatcatcaaagagcttatcatttgtagatattattcttaaaaacccctttttgcccaaatttatggttgtccttttttaggttgttttagaaattgatttttatgtttgttattttgttcttttgatattttgcccaaatcaggtgtcattgtcgtttttgttattttgatatgtttatgttgttttagaaattagtttttatgtttgttttcatgattgataagtcttttgggtctaatttttattttgtactcatgttttttatcagatggaagtgcatcagattctaaagttctttctcttattgaaaaggttgagccttgcaaaaaggctaaagttcgatcaaagaaatctgcacgacaagctaaaatatgttttaagatttttatgaaatcgatttttaatctttagtgttgtttttattttctttgttgatttttatgaaattggtttttatatctttttttaggatgcttctgttgaagaagaaaatattgttaaagttcaaacgaggaaatctcccaaaaaaactaaagtatgttctaagtttatatagaatctagttttttaagtttattcattttttcctttattaattgtttttgatgaaatcaatttttttatgttttttaaggctgccattgttgaagaagaaatttccgttaaagtaccaacaagaaaatctccacaaaaagttaatgtatgttttgagtttttattgaaacttgattttgagctttattattatttttttttgctctgttcattattgtttcttaattgtatatatttttaattttctaaaattttgtaccaaaaaatctgtgtttt

SEQ ID NO: 227597 - DNA, 3087 bp, Cannabis indica
tgtatcactttacaaataacataagaaaaagactagacattaaaatttagtatacgtgcctcgcacgtagtttttgctagtataattatagtatgcatcatattcaattttttagaaaaattcaaaaaaaaattagtatactaaaagaatattcaaaatagtgcgtataaaacaaaactagcacacgtgcctatttgaatcatatttttgatatcatagattatttataatttttacaaaaataaacaaaattcttactataattatagtgtacaccttcaatctatcatatataaaatttaatttgtaatttctttgtaaagatatatatattattattaataaaatttcctgtatatttgtaataacagatgtgtatttgacataaaaataaagtacaaaaataaatattttctcaaaatgattttactaaattatatttcaacaatgataaaattcaaggtgcttaaaaaaaattgatataagttaaggtactatttattttttattttattttgattaattagaatttttgtcttttaatttttaacatgtactaaattttactttctgaattttttagactgtaaaaaattttccgaactattaaatttgttagattcaataacttttgtctaattttacaaattgaattctaatgtggataaaacttcaaatgacacgatttggtacacgttaaagttcgtgagacaagattgaatagacattaaaattcagagagcatgatttaatatatggacgatcgttgtattaataaaattaaacgcaactaaataaaagtctttgaatctaaaaattgtaatagctcttggtgctctcacaaatgagttgactgggtctattgaactaacttttatccctaaagattgttagtgtaatgatcaagagctgagctcttgaatcaaattggcttttaatttattacgtttccttaaaaaaaaaaaagtgtttgaattcataaatcttaataatttttaaaaaaaaattaacgaaaagtttaaaaaacataatttaatactctgagagtaaaattcttaatttataatctttttactcaatattaaattccatcaatgatattacacacaagaatgttagatttgtaaaatagtaacctttaagccttttttatttcttcagtacttaagtaccaatagttttggttcagcagaaagaaaagtatttgtattatgtttgttaggagtgggagaaatagtggaagagagagatggtcttctactatctctctagtgtgagtctgccctcatttcgtgtgtgtctagtgtctgtctttatttgctctataatattttcgactccccctctcagtgtgtgttaggttagtcttgtagtggtgcgctttgctgattgttagtgttttcatcttttctttcagttttgttcatttggtctgttgcttttgttttcttctctgttggtggctcgtggacctttttcaccatctttttctctgaggtagtattgtcagttttaggagaggttggtaagattcggttggtgaggttggtttgtctcttaaaagctttgtttggtcttctttgttgggtatttatggagtcaatcattgtttccaaatccactcttaaaggcaaatgcttttcatgctttgaaacctctgtcaaactatcaccttgtgacacttctctaaaggccctggcctcttgctgtttgtttgggaaaatcatagcgcctatggtggtggatgatatgactatgactgagtttgtggctaaaaactggaagataccagtttcggttgtgactttggaggatgaagagaagcaaactaacgttttcaagtttggattcgagtgcgccgatcatagggactgggctcttcttaatggtccgtggtgtattcgtgggtataccctggtccttcaagcctggtccccgaccttcgatggtccgacaactttcaagcttctgcgtatttggattcaaatccatcaccttccccatgagtacttttcaaagtctaatggctgtatgctgggggggttggctggaaaagttgtgcaagtggagattgatgaaggaaagcctgcttcatggagaaaatttctcagagttcaagtggatattgaggttgataaacctctattttcaggatgttttttcgacttagcatcaggtgtaaagaaatgggttcaaatgaaatatgaaaaaattggaatattttgctatttctgtggatgcttgggacatcaacgcaggggctgttcactatcgacgccggtgacggtgacgaaccttgatgatattccgttccccatgtatggcccctggctctcggttttgtctgcataccagagtgtgttttctggccctgtacctggtacgtcccgtagttcctcgtcggcgactgggagaaagtttagtggtgctgtaatgttaacgccggcgactacgggcgagggagaaaatggatccactggaagactgtccaacctgcctcgacgtcaaagccaacccgtgaaaaggactgctcatacggctgagggtcctgggaagtcccaccgtgctgtgtggttccctaagaggagtcctatcggtgcagagaacacagttgccatttctggctttggaggagagaaagaagacctgggtgtgagaaaggaagcagagttattacctgttttgacttcaaatagccgagtcattggtttaaacgatggtcattggaattttacgaccgttacagagaaacaagtggaaggtgggcctggggttgttgggccgtgtggtgcgttaatgaaaaaggctggggtttatgaggattctggttatgggcccactaatttagttagtaataataaaggagatgctgataatgggcctcaagttgtttctagtaaaaagaattcgggtgggcctgttctggagggaaatttggccgaggatatctcaaaaaatggcttggtgggaccgtgtaatttggatattggctctatttctaataggccggtttctcttgcccaagaccaaattgggcttgtgaatgctaacttgtctactaatctccatgaagcccaggagcactta

SEQ ID NO: 227598 - DNA, 4389 bp, Cannabis indica
ttaaacaaagttcatgtaacatcataagataactagtttggtaacaaaatcttttctctgtaaaaacactgaaatctatattttttttgtagtaaaaacactgaatattttaaccgaataagaaaatttaagatttttgtattgtaaaatggaaatacaaaatccttttttttgtttaaactttttttcttcttttaaataaaaaaattgaatctatgaattgaaaatttgagatttttgcattgtaaaatagaatacacaatcctactaaaaaatcttaaaaaatataattactctaaataacactaaatcaaattttaaattaataataatattaattttttttttttgtcttaaatcttaattaccataaataatatctatctagttcctttgtcgaactcattctcattctccgagaagatggagagtttgccgacgacgacgacgaaatcggagagacgatggagatcatcgaagcctctacagacatcgaaaccatctctccttttggctttgttctcttgcattgcttggctctatgtagccggaaggttatggcaagatgcagagaacagaacaatcctagctcatcttctcaacaaaagctcactcaacagacctaaaatcttatcactcaacgataaattatcagtcctaggctgcaatgatcttgaaaaaaggattgttgaagctgaaatggatctcacattagctaagagtcaggggtttgtgaagaacaatttgcaacaaacaggttcttctgattctgaatctcgaattctagctgttattggtgtttacactggatttgggagtagattgaatcgaaatgtgtttagaggatcttggatgccaaaaggagatgatttgaagaagctagaagaaagaggggtaatcattcgatttgtaattggtcgtagccctaaccatggtgatagcttggatcgtaatattgatgaggagaatcgttcaagttcagattttttgattatggaagatcatgaagaagctgaagaagagttgcctaagaaagctaaggtcttttttagcacagcggttcagaattgggatgcagatttttatgtcaaagtagatgataatattgatcttgatcttgaagggctaattgggcttcttgaacgccgtcgttttgatcagaaaaacaattcttcttcttctgcttatattgggtgtatgaaatctggagatgttgtggatgaagatggaaagccttggtatgaacctgaatggtggaaatttggtgatgagaaatcttatttcaggcatgcttctagctctcttttgattctttctaataatttagctaagtttgtttacataaatagtgcttctttgaagatttatgctcatgatgatgtatcaattgggtcatggatgatgggtttacaagcaacttatattgatgacaatagattttgctgcagtagtattacacaagataaagtttgttctttggcctaattaaggggagaaaatccaataattctttgttttttggttggtttgtgtgaagaaattgacatatttgttgttgttgttgttgttatagttttgcttagatatttcactcaattcttttttaggatttacaatctgaattgttggaagagttgaaatagaatatctgtattgaatcacttccattttatttatttggctaaatctgtattgaaactgtttgtacatattagtaactgatttgttgaagttatgttatttgagacatttattttgtagggtgataggaatttcctctattaattgataacagaagtgaacaagaacaattgctgagagctactgctcaatacaaaagaaccctctcccctctatttattctaggttaattaggatttttggtctttaaaaaatcttcttaaactattgaaattattgaatttaaggatttttgtcaaattttattcaattttactaattctatgatgatttatgtactaaatcatgtttttcaaactttgatatctaccaaatcatacctctcaaactctgtcatgtattaaattatgctctctgaactttcatctatgttagactttctttactgaaattagattttagtcattaaatctaacaatctcaatagttcaagaaggattttaacagccttaaaagtttagattgcataatttgatacatgtcaaattcatgggacaaaaattctaattagccattattctaattccttactgttggcgtatcacataattaaatgcaccttactaacactcatacccctcctccccttaactaaccagatgacttggaaaatacctatcacagggttatgaaattgtcaagcagatacttaaatcaattgctgaattgaggcatcttagcaatttggacccctcttacattttacagtcattaggtgctcatgcaaatgtgtaatctgaaaagccttaagaacttgagtgcatttattgtgggaaacaattgtagagccaaaataggagagttgggtgagctttcagattttcagtttaaagattgtagtgaaagcttatgatggactttgagatgaggtgaaaaaactaatgtagcagaacatgaaagagatttacttgacatgttattgaccaaaaacaacattgaaaaagctcagcatcacatattatgggggataaaggggtgtatattggaccacattcaatatttttagatctattcagatccgattcaattatatataagatgttttttactatccgattcgatccaattaatttcaatcatctaattgattcaacattcattggatgttggattggatcggttctaaccattgaatgtatttcatgtatatctattagtgtaattttagatttattattttaaacctagtattttttggatccgatcaaatcaaatccatctaatattttaaatccagtatttatttaatttaaaataaaataaaataaaatttaaatgctaatttttatatatatggacatatattttattattgtataagttataacaacataaaatctaattattcatctaaacaaaattaaaatattaatatgttcgattggatgttggatatagtagatttttggacaactcattcaatatctgatctgattcaattggatatttaaaaataatatctaatccgatctgatcataattgaatattcaatatttgacggtaaattataattagatcagtatgtgattattggattgtatggatttatgcttacttcatcaattcaaataatgccaaccatgaatacagcagcacttaactactacactaagcttgttggagttcaagcagttgtctccaaaatctgagtatttgcttctgccaatgtttagaatttccatattgcaccactcaatcttagattgtttccttcctttcccaatgcactgaaagttgccaaaacctcgagtctttcaactccttatttaaaggcctaaaatctcttttcatctatgcaaatttaggaatacatatttatttattttttttcaaaaaaaaaaaaaacaaaagaaaagaccatgcatacaaatacaatatataatgttagggatatgattttgtcccgtcatttgacttttacggattgtagccgtcagatgagggagttatttgatctgacagttgagattgatctatgagtaattagggttaaaaagtagaaacgtaccctgacactcatttaatgtaccctgagacccatctaatgtactacggaatacattccgtgaaagtacatcatgggttaaaatcatatccctataatgttattttatcagtactttttcatacttagcatagcaatacatatgcacagaaaacaaaacaatatgtaagattctattcaaggcacatgtctgacagttattttctcctttacattgaaatttcaacaataagaatcttattttcttactttggtagtttctctgaatctcaatattttcattgctcattagctttctgcaaatcgataactaagagcaccatggctgtggagttggtggttggacctgttgtttctgtttccattgagtttttgttgaactagttgaaggtcacttattctgaagtggtcgggttcttaaggggaaaagactccggtttttgttaagaatgcggaagtatacacttaaattgactctatttaatgatataaatagttaatgattaatgttagatacacaattaaacttaaattgtatacacttattacacacactgttgtataatcattttttctaattatttttcctagttaatataattcacacacaaacttcatatatgcatgttcgattctgagtataggtgagttacttaggcctgtacttaaggcccacctagtc

SEQ ID NO: 227599 - DNA, 1025 bp, Cannabis indica
gtacgatcctcgggacatcagggcttttgtagttagtcgctaggcgacaaatatttgtattgaataacaaactttttgtaaagtattttgtaaatgggatcccgaagtattttgtatgctatattataagtatttaattaaataagaaaaatcttaattaatcacgattttcataaacctcgttgattagtaacgagctgcacagtacattcgaaattacgttaatacgcctatactagttagggtgttacataatttcttttgaattttctgtagtattgttttatttttagtttttgatctggttttcattgttattttattgttagaactagtttgttttgattttttatataaaatttcattgattttatttataatcggttttccgatactgttatatatgaatgcataagttttttttagtctatatataaggatgttcttagatattttatttttattctatatgttaatttaatcggtttttttatttatatttttagaaaaattttaaatgttcattattatatattgaagtttaaattttttattttcatttattctttagatgatatatattttcaaatattctaggttcataaatcattattatcatatatataattttaattgttgagtgtatatacttgatttgataatttttgagaattgtcgtcaaagattgttgtggtgtataatctattttgattttaatttgtgttttctggctaagcaattatgtatgcattaatttataggtttcccattgccgaagaagacaataaaaaggaattgacaaagtcaacgaaactagagaagacatcaacgataatgagttttgctgctagtcggttgacaattattgaaatcacttgagaaaaaaatgaatttgctggttttgagattgaattgctatagtgaatcgctggagaagatcgcgattctaagagaggaaaacatagagaattttagagagagaatctgagtttaattgtttggaaaaattatggtttttttttttt

SEQ ID NO: 227600 - DNA, 1613 bp, Cannabis indica
gtattttaacaagagaatgtgattaatgatctgaaattctaattgtttataagagttttgataagctcacacacacatagcagtagtagacaatagaatagagcagaactgcaactgtatatccacaaccaaaattgacctttgtactacaaattgttccatgatcacaaaataaaaccccacaggatttaagagggcttggaacttaagagcctgttttcacccacttagggattaccccacaccacaaaatgaaccccctccctctatttattctattctttttttttatttatttcacactaactctatgctgctaaggaaaagtctatcaaccctgcccaaagaaccacagtgagaccctggctgcactgtacagaaaatgagtcgagaaatcgaaccaggatctgatttgccatagaatattaagcaaacctagttgcacaatcttcaagggcctggaacctcacaatacaattctttctatatccctaataccctcttaatcccacccctctgtatttatatttcctctcaatttcctaagatatacgtagcagaattagttgcgattaaaactcaactatgtcactaacataagtttgcttgactaggccctatcaagttcaaaggcattaaagccaaatgacataaaatggtcacaaattgcagacaggcatttgctactgcacactaaaaattaacacccgaaaagtaacctaaataactactcagattgagttagacctcaatttaaaaagtttaaatcaagcaatattagtttacaaaaaataagcagacaataagtggatgaacgttcaattctagttacacaattagtcaggacgagaaaaatacgaacctcagtttctaagctctcaaattctgctaagatctcttcttcgtcttctgctgataactgctctcccaaaatagcattaagctcctgcattgatacatatccaattataaactcagaatgtttggagaatagtggtaaaaacaatctataccattacaagtgaacaaaattttgcacagcagcaattaaataaataaaaaaaatcttaatggcaacaaaagaaataaaaaacaaactgttgtgaatggatcttcttccctaagaccatagacatgctcgttttcaaaaaagcaaagatttgatcctcacagagtacaatgtcattgcatgaatgaactctgatttgctctggcttatcaattaattgattttttcgaaaccaacctatacttaagcttaatgaactgacagagatcaataaaaaagaaaactcaataaaacagttaaaagcattgaaatcctatctcaaacccggagcatgggatttggcagcaggcctcaactcttgtaaggaaactaaagaaataaagaaaaataggcagccaacacccgtactctagcaactggtgcaaaatataaaacaaaatgctttcagtgtcctatacaaaaaattggggagttttcatttttatgggattaaggtataagtttgcaaaaatatgactcattataaaaaaattattttatgggaaaaaaaaaggttaaaataatatgggaaaaacagtataaggtaatgactatcataagggta

SEQ ID NO: 227601 - DNA, 2712 bp, Cannabis indica
gtttttacaaaataaagaactactgcaaaatttttttattctaccattataaaaatgaaaactaacttgaccattaccttctttttggatcaaccatggaccatcaaacacctcctcaatgtcttatttaataaattataagatttatatttattaatgtcaaatatgcacgcggactgattatttgaacacagaatagttattattaatgacatgtgaacaaaacatattattattattattattattattattaatgacatgtacgacttttatttcttcattttttaggtcacttattgattagtttagggcatcttaaaatatagcacgcacagttgattattactaaaaattaataggaatggcagacacttaaaaagtccacacactccacatgcatcacaagtcaataggccaggaaaattaggtgtactagttttttttttagaagattggtgtaacattttatattaaatttaatcacgttattcacgtatatttgtaaacctcgagataatgtttcttttctttttttttttaatttaagaacaaaaaataaataaatggcgcaacaaccagtagtggatggtgtaaataaatgttaatgaattgaatcaattggtcacatggtacgttgtatgtggtagggtcgagcttttgttttgagttttgaccatttcttttctttctttcttctctttttgtaatagtatctttttaattttgttaatattatagaactgtagaacatgtgtgttttagccttttaggacgcgtttgcttgtagatatatattatatctcgaaaaaaaaagaccaatataaaatataaatttgtattgttaaaggctaattctatggtaggctagggtgtattaaattaataccaatccaactattagtgactatttagagcatagattttgtattaattaacgtcaaatgtacgttactttaccaccaaatttgtcactcacctaataatatagtattttagatatttttggataaatttttatattattttgtactattttatttaaagtggatcatattttgtacctagccttaaggcacccaattctctctcattaagtaggtgcgtggttatgttatattttttttttagagagaaaacatattatttcattaagataaattaactattacagaaaaattctgaaatcttggataagcattcgtctatatatactctcttatactagtaacaaaagtaaccagtgcatgaacaacatcattcgcatactgcaaaatgacattacaagacccaccactaacgtcagctattaaaaaatcaacatccaaaataatagaatttaaattaacaattcaatgagaattattcaccccgcccacagccacaattgaatcataataaatactaacaagattaaattcaaaatagtgtgccacacattagccctatctgaatagcaagaagcttcgccacattaacactaaagtctcccaagagtctcactgcccatgccaactaaaaaaatccatcatcaccccggatcacccttaaccccaaaaactccttgtcaggtatcaccgatgcatctgtggccacgagaaacatccaggaagcagcggtgaccactgcacaatccgacaaactgtcggcactgaagatgaacattccatcaagagtccacgctgatggtggtcgtgaaattttatctattggttttcggaaagctctgagacaacattaatttttgcttgagcaccgcaaaaacaacattgaatttctatcataccacaaccaccacatcaacatcattacaaactcaaagctctcccaaaataactcttcagagaggaaagtcaaaaccttatgtagcaaaccctggccacatcatcataacaatggccaaaccctagatgaacccacataggatgtagaataaaacaaaatagcactgcatgttccggagtttcagcagcttcttcacatgtaaataaaatatctgtgagccgactaactcagcacaaaaaaatatacacataacataaacacaaaccatttataatcaggcgtccatacacccaattacaatcatatcccgcgttctacacgtactaggtttggaatattcgtacgacaaaacttaatatatactattgatatctcagtgcaactctatgtacacttcaccaatatcctccaaaattcacaaagactaatcttgcttaacaaactaagaatgggaagaattacaaaggtacaagcgatataactagtccatgaagacaagcacacctttgccaaaacttgatgagaggaggtggttgtacaaaaaggtacaataggtatgagtagtggagataccaccacattgctactacgagttgacaccagaccaacgcaacctccactactcctcctggcacactgatccacaatgtactgtgaggacattgtccctcaacttctaatactacttgtatttaagaactaatagagtttacttgtaagtataaatacaccatttgaattcttgtgaaggcggatggaaaatatcacttataagagagttttgatatttaagggctcgtttggaacgccgtattaggtcgtattgtattgtattgtattatattgaattgtattttatgttagactttttatttgggcttacattaacttttattggttttattaaaacttgggttgattggatag

SEQ ID NO: 227602 - DNA, 1929 bp, Cannabis indica
tttgtttataaaaattaatgacagggtgccacgtgtaatgcgtgagataattacaaatgttgtttggcgttcgaagatattgggctttgaaatcgaaactcccaagtccatcgccccaaacaaaatgacccggaagaaaaggaagaacaaagaacaaggcccagcgccgcctgccggacctggaatgttcgccggaatggtcgtcttcttcgtcgagaacggagttcagaaacgtcgattgcaggtactcacattgaactctaaccttagaatgagttctctttctcttagaattactctcaactctttcttatcagatatggaagcagaagctgaagcaaatgggagctattgtagaaaaacgtctcactgaaagggtcacccatatattttcaatgaactccgattctcttcttcaacagattgatggtgatctcttggcccgatttcacggagtgagttcttcagttagtgtttattatgtctatatatatatatatatgtatatgtaagcatgtgttgttgtgattgaatttgatatgttatttttgggggaagagggttctgctatatcaatggctggaagatagcttaacttcaggagagaaggtatctgaggatttatatgacctgaaaatggcaatgaaatccgaagcagagagtgttaaacacaagtccactgctgaaaattcaccaaaacgagaagtttctagtgatgggaaagaagaaaaagatgaagaacactaaattctgataccaaaaagatgaaatcttttgatggtattattaaagctaacaccgatactacaaagtcaactgaaacaacgttgaccttttacaatcctcctgacttgaacaagaacattactcagatatttggaaagctcattgacatatatagaggtgagcccaaatcctctttcctattttaatgcatttctttaaatttgttataatttactcttagcttactaataatggatttctaaagctttgggagatgatagaagatcatttagctattacaaagctataccagttatagagaagttggatttcaaaattgagagtgcagagcaagtcaaacacctgcccaacattgggaagtccttacaagatcatgtaagtatatgttgaatcaagattggtgttaattatttctcccctttgttcaaagtatgatcatgtggagaaagttgctgttgaaatgttcatttttcgcagattcaagagattgttaccactgggaagttatccaagttggagcattttgaaacagatgaaaaggtgttgaaacttttaagggtccttttaatcaataaagaaaaacaaactatttgtttctgttgttgctaacatggatcactaaatgaaagaggatctcatttgttgaattatatgtttgctatttgtatattctcaagatgtttgatgagtttgaagataaggctttaaattctgtatatgagttctctgagttttctttttattttattttcttccttcctaatcagtgatacctcttcactgctatgagtcatttctttatacgcaaatggggggaagttgaaattcactttctttgtcagtgttgatgatgggtggctattgagagtttgacctttatttcaggttaaaaccatcagcttatttggtgaagtttggggagttggtcctgccactgcattgaaattatatgaaaaaggacaccgatcactggatgatttggagaatgaaaattcattaacaaatgcacagaaacttggtttgaaatactttcatgacatcaaacagaggataccacgtcatgaggtcttgtttgctacttatttttgtgattacaaacggatattcatctggttctaccttaacctattgacattgtttgtttcttttttgtcttgtggtttggtaggtccaagagatgga

SEQ ID NO: 227603 - DNA, 1191 bp, Cannabis indica
attgatctaacctgcttgtttcccaacaaactccttatgcttgtcaaactctacgcttcgaccagccaattcttgtgtaatcttttattcggttatgaatctcaatttaagaaaatggtagcaaatttatgtatatgatagtcacgtgacaattaaattgaagaatgagaatcacaacttaataatgcgaacatgctttaatgagtttcaattcttgaaagaaacatctaataattaaagtgttttcctttcaattttgcatgatgttattttattttcacgaatttaaattttatatagctacgccacccattattattgattattattataagctagcctccttggtggtatgtattgtacaaggtttcaaatcaagcattttctcagttgttattatcacgtatgtaactgcccatctcaacaacttgtatgattatatttcaatatctaattaaggtgataacaacttacataatgtaataatatataagacgtatattaaatcaaaagaagagtaatgttaaaaaaaaaaaatcaaaagaaagagacgtatcatcaacggtagtactactccctcccttctcattaattttacatatcttatattcttttaataatacttatgtgatactttataattaattagtaatttttatattatttattaaattaaaatatttaaaagcttataacattaaaatacatcaataatagtatcctattttgttgtatttgatgtcttaaagtgacttttatgagacatttcatatgaggtttagagttaatgagaatgagaatataaaattcaaattaaatttaaatgataataggtttgtgtttccaagaaaatctcattttttaattaaaatagtgtaaaatattaatctcctcataggcatgagttttatattccttacatgtctactctttctaactctactctctcaaacttaaactcacataatagagactccattagatggcagaaggtataaaaatatagctaaaataaaaataacattccaatactttagaataaaaccaaaataataaataaaataaaagttgtttcatttctattcaattctatttcatttctttcaaccaaatgtcacctttgcatttcctttaaacaaaggcctaaaacgcactacaaaaaatcttactttaattcacaacaaaatttgt

SEQ ID NO: 227604 - DNA, 1989 bp, Cannabis indica
ttgtacattgattcctcgtctaagaccttacagtcagcgggttacaaatatactctgatacttacgtaattaatgagttattccataaaaagctattgcaccgattcacattccctttatcttaacacgtgtcctccagccgaatttcgggtataacatgagtcactcctcttcaattcacctgccaaaccaagagtaagccactagttggcatatgcaatctcgataactaaaatctaaattaaagtcactgcaaagtaacactggcttggcaatccaataagctttagccacaattcttgcatgtcaaccacattattactcccatgtataaagtaattaagacaaaattccttgtcctaacatgtcattctaaccttgcagttaataaactgagtgttttccaccataatatcaactataacaaatgttttgtgccatacaagcgaaattttacgttatcgataaatagggtggaaatactttaaatactcctaaaatatgaaaatctaggtaaattcgagactgaccaattggttaaacagaattaccaaccgatctactggttgacacactgccaaccggttaatcggttaaccggatctactagagaaactacaactcaaaaaatttcgagttctttccttctacaacctgctcaaaactgaatcaatcttgttcaagcttctcagatcaatataatatcactagttcaacagatctagaagcttgaaacacaaattaatccaaagaagcaagaattgccattaaaatcctagcttgaagttctaaaactctataacacctccttcaaacttaatacctagctattatgctcacaatttctaactccataacagtttgaaattcatccaacacacaaataaaagaattaaaagtcaacactaaactcacactaaaattactaatacaagtcctaattttcttatacctatttaatatgtaaagtaagagtaacctcaattctccacttgattaaagcttgaaattcctcctaagatttgctcttaattttccttgagttgaaaagggattgaagatgagatgggagataaattttcaaagtatatgtgtgtgtgtgtgtgcatatatatggatcggccaagacttcccagggaagagaattcccaattaaatcaaagtttttttcttatttattctttgatgaataatctaaaaagaagtctaaatgtcatctccaccataactccctaaaatcatctatacctctaatataaatcaaataatttataaccaccaacattgaatttcagcaaattggctaacagtcacaacgagataattttagtagtatagcagtaataccacaaaaataaaaaagtatccaaattctcatattataaatcaaatataatatttattttaattgtttaatacttagtaatactttaatcatattattattattattattattattattattattattatttactaaatactctctactgcttctccaaattctcataattctttagaatctacataacttactaaactcaccagtttttccccttggaccctaattaagcactgacattagtgtaactaaatagctcatctttaaatttttaactaaaaaataataaaatagtgctacatcaagtgagctaaatcattcttaattttagctcaaacactatttccttgtttacatgtagagatatttttctaaatttttaggattcttcaaatttttttcttcatcaagatatgatattacaatgttgtaaaagaaaatataaaaaaaaagggatgtatgatataacataaaagtgtgagctaaaatagataaagttaaattttaatgaaatattttaaagaataaaatagaaatgctgatgtgagtactctaacacgacatttgcttgttggcccctgcagagtaccagccctatatgtaatcaataattaggaaagcctaatagtcttatgtttatttag

SEQ ID NO: 227605 - DNA, 1623 bp, Cannabis indica
attggaatccacacccactgaactagatgtcctgcttgggccaaagttcttatctcatccttcaaatggtcacattcgttggtggtatgactgaaatctccatgatactcacatctcttgatttgatccctttttttcttctccccttggtactttttaggaggcttcttgtaatggaccatattgatagtttccttatacacgttttctcgagtatctatcaagctagtatactcagtgtacttttatttacactattttcttcctttctttggggcctcactttagttctgactctttttgcttctcttgttctacaattaacttacatttgctttcagaaccttcatcttcacttgtctgggtgtagcactgcatccagtttgtatgactccatagccaaagaaattagtctatgcggcacataccctgaggtaacggatccatagactgtgggagttataaattgacttctagcaactggagcaatcgaaactgagaattacagagtgtaagtaggattgctaacatgtggagttggtgttggagcaactccaaatgtcttagtgtaagcgtcttccagattaatgactctttgagctcttctctaacaaaggtgccacccttttttgttgcattttgctccacaagaaggagccaacaatcaatccagattgaagggctacaagtttcatgtcatcactaactttgtcttagatgctgcttccatcatcctctggtttaagcttttcaaactctcccttgcttgttgcttgatattggtcaaggatttgacctccatactgtagtctttggtagttatgaacttcttctgaagcatagaccataagtccttccagccatgaatcgatccaggggagccttttctactagtcttcggctaacttggttagcgtcaatgagaaaagagggatttgcatctcactggctctggccacttgcatgagtcggttatatttgaataaattagttctaggattcttcctaccctcatatagctccatctggggcattttaaaattctcaggtagcggagcctctacgatctacttgacataaggttttggatcctcgtcttcaaaattcaagatggtgtcgctttatttctacacaagcttggttagggaaactatcatctcttccaagtatttagtatcactatcctaaagctaacgcccatgaatcctgtaattgatatggttctagagatcatttccttgaagctttgccttttcacctttggcattttcccgtttggcgtctaggcgcctacggaggtttatagtggaccaactatcttcagaagaaattaattctactccattatcctagttagcagaattactagggaaattttttcatcctcgaacagtaggtatttgcacctgagcatcaggcctatcgttttgcgcaactctgcctcacggatcagaagggcgtcctagccctagggcatcgttggccttctttttccgtagaggttggttggtagtgtccacgttgttcctttgagccgtttttctctagggttcacccacctttcctttccccttgttctcttcaggagcaaagggtccagcattagtaggatttacctttttt

SEQ ID NO: 227606 - DNA, 2496 bp, Cannabis indica
aaatactatttttttctaaataagggcccaaaacataatttttaccctatagcccactacatttcagggccggccctgacgacacctctagaaaatactgagtaccactgatgttcaataacaatgctcaataatatatgggagtaaaggcggattagaattgcctccacaggacccacccaatctaggaattcaaaatttcatatattcttttgaaagcaaaactctttattcaaacaagtggctcaaggcaactcggcaacaacagctgcgacggcaaaatcccaaaacactaccacaccagtagttattgtaaaaattagaacaagctaaccgagcaagacaatgtactacccaattagatgtttgaaaagaatattagacagatgtatactttataaagtgaggatccaaacgaatgcttgcaagcaccccccaaaccaatcagtaaaacgagcagaattctctaccaaggttgaatcactactcgacagtccaatgtcacttggaaggctatattaagtgacccaataagtttaacttcctgagcaatggccaaactttctgcaatttcaatagagtacactcccttgaagaaataggcttcagaagctaacacttgagctttctagctatgaattctaattgggtcagggaccttgataagagccttcttggatatgggagggtccccaaagatcaatatgaactaattctagggattgactagcacaggttcgagatatgggaaaaggtaatctatgacttttgccttgttgacatgcattacagaactgtaatgtcttaagagaacctgtaaggggtaaatgtggtaacagtttgcttagtgtgaacatggatggatggcctaacttgcaatgctaagtattaacatcattaaaaacttgaagtaagaaaagcagtaggcaaataaacagtggaacaatgttctttatttattgagttttgagtacaagcaagtacattatttttgacattacaagaatggaaggcagtatttctataagaacattggatagactcgaatccagtagtgagaagacattgtagattggacatggacttgtctcaaccatcactcagcatgtaaagtccatctttacgcttgcctttgaggagaagggcacctgtttgtttgtctttaacaaaacaacaatttttgtaaaattcaagaaagatatcattgtcatcaacaagtttagaaacactaactaagtttttagtgatagatggaacttgtaagacacaattcaattttaaaggacaagaagagtgatagggaggaagaacagaagtgccaatatgagtgatgagaagtttcttaccatctcccacaaccaatgtctcagatccattgtaggcctgttgagtattaaggttcgagttgtcaaaggtaacatgggttgtagcacctgtgtcaacataccaggaggtatcatctccaaaatcttgaacaagagttgtggaataagcttgagaatcatactcaaattcaagttttgtgagatgagcccttggaggaggttgatgagatttgggaacaacccaattcttgtcaaacctgtaacggcaaacaggggttatgtgaccagttgttaagcacacttgacaaacaacacgttgttgactgtatcttggataaccacagccacgaccagaggtgggttgggagacttcattagaagaattcttggatgaggcaaatggtcgagcaccaccagagctgccattcccaaatgcaagatttgcttgcattttggctgcaagatcagtcatattctgatggtgttcgagcctgcattcatgagcaagaagaagagcttgaacttcttcaacagtaagggcatcactttgtgatgtaatttcagaggcaattgagtcaaactcaggaccaaggccaattaagagttgaagaacaaggtcttggtcatcaacaggggaacctgcaatactaagtgcatcagatgttgattgaactttatcaatgtactcaacaatggattgacttcccttttgaacatttgagaattggcccttgagttgaagctttcgagctctggtttgactggcgaatttttgctccagggcgcgccaaacagcagcagaggagttgtagtttgcaacagaggcaagaatgccctctgacatagaggatcgaagtaaggataacaagagttgatcctttttcctccattgtaagtattcagggttggagttgccattgacaagattctatggaggaggatctccggtgaagagaatctcatcaagatcatgaactatgacagttgggataactttagatttctaggataagaagtttagacgatctaatttgagggtaagggacgaagtaagagaattggaaaagggattccagagaggatttgcaggagcaacggaagaagaggcattggccattgttgcagaggtaagatcggaggttgaagatgacatggaagtgagtcaagaagc

SEQ ID NO: 227607 - DNA, 1345 bp, Cannabis indica
ttatggtataagagaactacacaagctctatacaaaccctttacttgtattaatcgattcattcaattcaatattaatgaacaagcttttctctctaccgaaactgaactcctctaatacacaaaaagcttctaaacaaaataaagtccatcattatatatgcttaaatatattagtaaaattaacatatatagctactttatatatatatgaagcttaatgaaacctattgcaattaatcttaagtagctttctttgtcatttttatagagaaacctaactactttgtttgtcatttttattaaattccatatacctactacgcttatatatatacataaatgtaagctacattttgatttcaactagaaatatctttataagatcgtttgtttgtcatcagtactgcatattcgacaaattatcaatcgatcttatagcaaatggtatatttatagactatacaataacgaacaatatattgtcatcaaataatgtagtttttggctatatatatatatatatatatataaatgatgggatgtatgtacttgtttggttataggaaggagtgacttcgttgggagcatatggtggtaaaggtggtgacccttggagctacattctgaattctggattgaaagagataatcatccatgtagataagaatatcaagtccatttccttcaaagactccactggctttacctctgggacattcggtggcaacagccctgataattcagaaaggggtaaggagagaaaggtacgtactatacacataattaattaattaatcttttatacatacatgcatgattctatataaatatatatatatatgattatgtagattgttctcgattgggtttccgagtatttgatatccataagtggaacacatggtgagtttaatggtgtagctgatgttatcgtttcactatctttccaaacaaatctcaaaacatatggaccattcggaaccactactattggtaaacctttcaccatccccatagacaaagacaacgtactagtcgggtttttcggacgctgtggctactacctagatgctcttggtgcttatgtaaaaccagaaccaatcatttactttggggaattgggtggttcaggtggaagcccttttagtttcacggtgcggatgagttggataaaacagatcaccatttgccatgatagttcaaatatcaagtctctcttcttcaaggacgggaatgacctcgagtatggaccttttggtggtgaagatccaaacaatcgtggtgtaccaacaacagtaagtatttattaattgaatattttgattatatatgggaaatttgat

SEQ ID NO: 227608 - DNA, 2406 bp, Cannabis indica
aaaatgcaaaagaaaaaaaaaaatctgttttgaagttcaaaaatgaaaatggcctaaatttttttttcctatttactttttagctaaaaatagagtttagttaaagatgctcttaagaattggtaattgtagttaaagtgtttgtaactatatatatctctctctcttttaataaattataaatttttatcaatgacaaaagtcttccattatataatagaacctaattaaggaaacatattctgctttcacactgcacgacctaaagaaaaacaagagccacacacaatgagtgatagcctactacaatcatgagccaataaaccaaacatagcatttgcatattactgcttagacacacaccaaactatttgtttccactttccaacactacataatcagtcttaatgtcttaattaatttttaatcaatcctaacactttacactcagcctcgataatgcaagtgtcattcaaaataaatccattttctaagtgttcaaactttgccagtgacatgaattgtcgtaaaccccattcgttactggatgatgagaaacacttcctggctgcaacacaaagtagtattaaccaaatatttcaataaatcatgatcattaccattaatataattaaagcaccgtaaaacagattaactctatcgtgagctacctcaccttcttcctcaaaattatttcgattattagtttggtttttcaaacgcaaaacgaaacgaacaaagagttttgtgtctggtggaagacttgacatctccaattgcaaaaataatgaaatgtgtgttccttcgccttctcctgaccccttaggataaaccaaaatcctcctgttcatgatcagattcagaatatacacacacaaaaaaatctataagaatgtaatttttttacattcttaatacatcaaaaacaacaaaacaaaataaaaaaatgccaattgaataaaatataaaaaatacttttttttacataccatttgtaggctccaccaacaaatggatcagactcataccattcttgattctttgttgaaatagcatcaaacttccaagtatgaatggtctcaatggggtcgacaatcattgataagcactctcctttgaatgtgtttttgaccacaaaaacctctgcaccaaaagtacaactctcattcacaaggtatccattggagccatcgttgaatgtctcaagctcaatatatttgggaatatcccattctgtcctcattgagtggaacctcattagctttgcattacctatacttaaccaatcatagaatattattgagagagtacaatataaaacattgatgatagaaatagaaagagtagatatatatgtatgtataattataccttgagaggttacatactggtcccgaatctgatcatatagaaaaaaagtgaagagagcatgtacctcccaaccaatagggagagattttgagtttaggagttccaatgaaacagacatatgaccttctccaccattttcagtgtccccatttgggaagatacttagttgcctgccatgaccatatataatattaatgtttagaacttagaattggtacataaactaaataaaccccaaatggtaattaatttgatatataaaagtaggtaccatttgtagcctccagtttcaaactctgaactgtaggaagctaatgctgaggattttgaaagagagtgaaatgagtcgattttgagtaaaaagtgactgggaacaacatctcttcctgaaaacaaatatactaaaataattaataaggaaaattcataataaaatttaaaactaatataattaaacattattattagagtagttacgatgaaaggttggagacaagtcctgttcctgctcatcatcatcgcctttctttttcttttttgatcttagatcaatggaaacattattaagagtattcattatatatatttgttatataggtcaaaattatatctgaaataatagatctatatggtacatatatataaatagaaaatgcatgcatggatgcgtcttttcattttctgcggtgataatttattaaaaaattacacctttttatgtaatgtttattatataccttgggactagctagctaggatatgtaggatcatttcacaattatcactacatttatagctaatatatataatacagtataattaataaaacccatctcctctccgttgattagtaatgtcatgtttccctcctctaatcaaataattatttattattaatttgaacaaattattataactattattttgtcttttcggttcacctgtgctactgattattgtgaacattgtcctacatagaataaatggtagagaagtgagccatttataagaacatgggctactccactcattgcc

SEQ ID NO: 227609 - DNA, 1770 bp, Cannabis indica
gcatcggtggcaactttgatgtctaattacagtaatttttcggtagcgacgactttttcgacgatgatagcaattatgttgaatattcccattctattctttgcttttattgcggctaatattttgttttttagtggatagtgacggttttgtgtagtgggttgataatcgagtcttggagcttctcaaaaatttgtaattagttttaattttggtcttgtgttggttttagttttgatactggattggtggtcaagtcttagagattctaaaatgcatgtaaaatttatatgagtatttgtatttgtaaccagtttttttcgttaagaaaccagtttttgattatatacagttaattggtttattaatttatcatcttaataaaattattttaatattccttcaatttattaacaaaaaaaaaaatatgtcaaaaaacaaaccttaaaatcataattgtggttctttagcaaatgatgatcaaatactggttgtttataaaattcattacaatcatatatatctctattgcgcgtctatgcaagaaaccaagtcatattataaatataaatgttaagaacgtacaccttaaataggagataaagatttaaaaaaatatacttttatactcttgacggatgacttgttcaatcgctcaagtcggttatctatttcaagctcttcatcttttgataattgctttagttgctcttcacctttgcaatgatacaaaagtgtacacaatattatagcaaccaccataaaatgtgcccttgtatccatatctatgtatatagatttgatctacgataaaatatcaatattaatattagcgccaaaaaaatttataatcttaataataatatacatgaagtaatttgtatttatagagtaatcgaaaggaatggagatttaatttgatagggttatactacaaaagggaaaaaatgtaatattaatgtatttatagagttttgctaaaaaatatatataatttgtgcaatttatttatttttaaaacttattgcagtgaatattttattttattaaaaatagttataacatattacgtccaataaaaaacataaaaagttatcaatctgttaagtttgttagaattagttttggttagttattagttagttgtaggattgagtgttggttataacagctgtaatcaacatcagctactataagtagcttaactgtatctgtaattttctttgagcattattgaataacagattcagttcttctcttctattctctctgtattctttctgttatggatttgtgaaatggtatcagagccgccattgttggttgggcttcatcttcattttctttctgtttcattgatttctgtttttcttcaatggcacatggtggaggagctcaaactcgaaccaatcgtgatgctactaatgcatcaaatgattcgaacagatactctgttcttggagaaaactcaagatccagcactgccaatgatttgtcgaatccattcttcctttcgaatggtgataatccagctgcagtccttgtaccaaaaatcttaacaggtagtgaaaattacagtacctggagaaggtttatgatgattgctcttgttgctagaaacaagatgaagttcgtcaatggcaagattccacagccagatgaggaacatgaggattttgatgcttggtgtcgatgtaacagtactgtaatttcttggatactacatgcgatttctggtgagattgcagatagcattatgtaccttgataa

SEQ ID NO: 227610 - DNA, 2154 bp, Cannabis indica
aagaaggatatgttttattagtggctaaattccgcactaaacaatttgcatgtaatgtcattaaaaaaaacaaacaagggaaatacaggttacacaaactgtaatattaactataaattaaaatctgcaaatgttaaaacattctattttggtataaagttctcgaaaaagtttccttccgcaaactaaagttctttccgtaaagtaacatcataaaaatggaaggaaaacaaaagcaccttttcagcaatattctcaagtaattgcatcaagaactttcctagtcccctgcctcgcacacgagcttccagctgcagttcataaacataaagaaccggtatgccttcctccctgacaaatcggaaatgaacaaatccaaccatagtccccctatctaccagacaattatttatagtccttttcccgtcagaggtttttgatatctcacaaggacttccatttggaacctcgtaaacaaatatataacgtgcttcaggtgcagccatttccctgcgcttaaccttttcttccaatggccactgagaaccatagtgtctttccatattgacctgtagatattcaagaacttagcaaactgtatcacctagaccaaaaaaaaaaacaaaaaaaaggaagaatatcacacagcaccatccatactataatttgacaaacaaataaaagaagccatcttaatgtaataccttgagtaggttttggatgtattttttcacaggagcggaaagcttatcaccacgtccagattccaaacacatagtcatgcctaaaaaggttggattaataacaattgttagctgataaaatgcggtagtgataagacaaagaacacacatttatcacagtgccaagcggagtaaccattgaatgaaaaatggaagtgaagccaaagactgaattactgataaacttcatttctaaaaagtgtcaagaactcagaaaatgttgaaaagaacatgaaacgtttatattagagagcaaaacacaacaaacagcccaaaagacatgacacaaataaatttaacttcatacaataagccaattaaggctatcatttattagttaagattcaagggttatgtgatgtgtttgtgtgtgggaggttaagagagaggatgagtttaaatatgttacagcttggatagaactcaactctgaaacactagccagaacggtgctcaagaagtatgaaatatgaattcttaacctaaaggacaaaatctttaaaaaaaaaaaatattaatggaggatgaaccttaccatgcctgctgtaaaaccgaaaagcagggaaagccgataaagggtccttatgggcagaggcagctttaatcacatcatcaatgaccttcttcttctcaagaatctgcctagtgcatacccacactcattacacaaactctgccatttttgaaaacaaagatggtacatttatagatgaaaataaataaatacagatagtaaacccagaaattatgtacctctgtacgcttagtcttaacaatagtgtcggttgatttattgtcgacatagttgcgaaagcttcgagagatcccctcacactccattactgacaagtgaggttggataatttgattgtgattctttagagaaaatgattttttccaaagaaaaatttgaaatgctggattggggttggaaaataacgaagaaagtagaatccgaaggctagctatgatcaacgattaaggaagttttctctttccaaccaaaaactccacacaccgatcaattatactcaacacacacattcacctaagcaagctcccaaatcattttatttttataatagaatcatttaataattcaaaaaaaaaataataattttctttttatttttttttcaagtatgtgtttcgaatatattaaagcttgaatctgtgcttgttttttttcttttttttttctatgaataaatgcaggtttgctaaaaataattttttttttaaggtaaatactattttgtactctttacaaatttgatcttatattttgttaaatgataaaatggatcttgtattttttaaaatggtaaaaatagaacctgaccttaattttttattttttttttaaataatcaacttgaagcaattcttaacacggacagatacaaaaaat

SEQ ID NO: 227611 - DNA, 2946 bp, Cannabis indica
atttttttctcaaattattttgtgttaatgtcaatacttattttagttttatttttcatattttttttttaaaaaaaatcatatataatctttttatatatgtatattaaaatttcacataactttataattttaatttttttgttaaagtatttaaaatataatttatttttatttaatatatattttttttcaaaatatgaattaaaaaaaaaacataattcaatacatatattttatgtaaaaaaaattattaaaataatatacatttataaaattttatagtgtgaataaaacttgtttttttgtaaaacgatttgtaaattgtgtcaccataatatattttattgctaaagtaactaggctcactactgattgtgcatgtgtcatctgaattagcaaataattttatggttgattttttatttattttttttttttttttgaagaatgaacataattttatggttgatttgatttaataagatatgatgatatttttaaaaaaagtaaattaagaaaaattaattatatgaaaaaatgtaataattaattaaaaaaaaaaaagaagagagagtgtgttgcccggcaaagaagtcgtgcccacgagttggaaagggctttttgggcccataaaattaggcctttttactttaattaatcacatcacatataccccattaattattattattattattattaattattataattattattctacttgttaaggggatttttttgtctcttaatgaagacaatagtgacaaaatcacaagccaaaaatcccacttaataattatttaataatttagtattgggatgacgtggccattgtctactggtcgccacatggatgcctacgtggatttactctccactttcattacttaataattattatgttaaaagagggatggattgccaatcatttcttcatcattaatcaattatagtggtataaatttttagctctaatgcccctagagtattttttaaatttgcaatttggtttttgagaagtgtttttcttggaatcaagaccaattgagtttttttagggattattttacaaatatacaaaaatacgtatagaattttaaatatttttattttttttatgattttatttaaaaaatacaattttttgaaatatttttatgttgtacatttatttaattcttgttgatttttgttatttatatgttattttttgttgttattttgatgttatttttctgttactacttttatgtagtcatcttgttgttttcgtattgtttttataaataaagtaaaaatgtaaaaagaaaaaatctttaaacgtaaatgtaaaatttttacaaaaaattaatattttatataattattttttttaagtctttatgatgttttaagtaattttgatatttttctatgatattcacctaaaataataaagatttatttgctaatgtctataaaagttaaggaattatttgtcaattttttttattaaggacaaaattgctaaactaaaactcttttaaggacatttttgctaaaatctctttgcgaaattattactcattcattgccatttcaacttgacccattggccatatttcattattagctaatggaatttggataagtacacacacacattgtgtccaccaaatcttgaaaaccttttcaacccattactatatttgcttcacaatcattcatatttgtgataaaattttaaaaactaatgggattattaaattatcattaagaagtttattatgtaaattgcacatgttctctctaatatctttctaaaatgctatatatatatacacttatactattcattatatataatggaatgtccccatcatggatttggtgtccaaaattctcttgagctagataaagaccttaacaaatgtatatatatcaactcatgaaagagttggagttgcatttaaagtaaataaaactttctttaattgtataataaatgctttgagaaagagaaagagagagagagttgaaattaagaaaatttggtgtggtccaataaaacccaacaaagagaagaaatatatactatgtaattatataatggtaacgtgtgatgtatgtatatttagttgtatttttaatttttaatttaattttgtaaattttagttatttttttttagaaaaattagaatgatttattttatataaatacaattagtaatgaagtcacaaatcataaacattttctttattgtattgtttttaaaaaatactaatagaaaaatatgtgcagtgagtttaaaaaaaataatttttttatatatataaatatatgtcaaacaaataataatataaagatattttttaaaaatatatactgtaaatttatttaaaaaagataatattttttttttgtttaatagccacatttaatataaaagatatatgaatatagaatagggacttttttttttacattttaaaactagttttttttttttttttttttgtcattttacaaaattctacatagaaatccttatagcaactaacggagcaacttaaatcgcaacaaaaatccgtatagtaaccaatatagaaactaccggagaaatccaaactgtaaatttttaaaaaaattaatattttatggataattttccaatgtatagtgaagaagggaagttgatgagaattaatgtcaagaaataaacaatgaaacctaacccattaaagacttgaaaacatacattccaaaacttgatagataatatgtctcctaatattattgcctacctaaactctctaaaaacatccttaagttcagggtttaactttaaggaccacttttttctgcacaaaatagagacacaatcactttagttacaacttaaaatgtttcttcaaaaacacaataatataaagacatgattaattatttatttatttt

SEQ ID NO: 227612 - DNA, 2544 bp, Cannabis indica
tctctctctctccatctctctctctatatataatatatatactttatatatatatgtaaaaatatttggtgccctttttgcttttaacaggacgtgtagaatggtcagataaaggacataggaagtgaagtgtcttattctctggtgaaggtggttgccactacccattcaatcgaagactttgatctggtgaaggctgatatataaatacatacatatgtacatatatattttttatagacttggtagttgaccatttgggcattcttatctggaacttgagaaggtcaaattaaagagtggtgttttgctgactttctacaatcccaagcatcaatgaggcttcttggaagtctcatgatgcttttacttctgatatgctttttatggctgtcagatctcaatgctcaatccattcccgagtcttcaggaagccgtgctgaagctctagattcacttctccaagattatgcttacagggctcttgttcgtccaaagactggaactgtctatgatggtaatgttccgaccaatttaacaggcataaagatatcggcattgaggctcagaagcggtagcttatacagaaaaggagttaagtacaaagagttcaatattcctccgggtgtctttgagactccatatgtaaagaggcttgttttggtgtaccaaaacttgggcaatcggtcttccaccttctacaatttatcgggttatagctacttaactccagtactgggtcttcttgcttatgatggttcaaacttagaagccaagaatttgcaagagttggatatcagagtaactggtaatcccatatcgattagattctcaaatgtttcaccagccccctcgagggaaacagcgaagtgtgtttggttcgatctgaagggtgtcccaaccttcagtaatgtaatatcagacaatgtatgttcgacagaccaacagggacacttctccattgtgacagagtctattgctccttctccggcacccacatctcccgttccaactccaggtttccaacctccaagcgagattcctgcaccaaaaggcgaagaaaataacaaggggaagagcaattctaaagtatggataattgtcgggtctgtagttggcggagtggcacttttaggactcttggccttgttgcttctttggggacaaaaattccagcaaaaaaagaagatgcagcaaatggagagagctgcagaggttggagaagcactgcatatgaccccaatcgggaacacaaaggcaccagcagcaacagttacaagaacacaaccggtactcgagagtgaatatgtcccttagacaaaacaacattattgtgacaccatttgtacactcggaaaattcgatattcaaagttcattccctgtaatcagaaagaaaaaagaaaaaaaaaattgacaccacttttcggtggcgcgtcttcggtaggttgtttgtttagtgtgagtaatataggatttttgtgtaattttcttcccatttccctcctctttggttcaattattctttactgtgtgaaatcagccagatagtgattttttttcctctttgtgatgaattcagtttccccattgactaaaggaataaaatctgtccagtgatgttttttatttctccaaaccgattgatgatgctgttattgagattgttggatttaacatcttttgtctaattttactaacggttgtgttcggggtccgtacataaacaattattgtgttactaaaatataatgaaattagacaagtgacaacttggatgatgatgagggcctaaaattcttcatataatccaatcatttcatccaacaggtgagagcttggcttttctacaataattttggtatgttatggactttgaattgttgcaaattatttataaccttaacattggaatgtggaggtaagctcttatgccattgctaacacaagaaggagatcatgaatttaggtggaagtttttacagagctaaggtgataatacaagtaattttattatgggatattatttgtgtataacatagggacgtttaggattgaaagtccaaagaaatgttggatttgagtttatttatccaacttagctgtgggatgaatcattttagatgacattattttgatttttataaatgtattataaatttaaaaagaattcataggggacaatgaagagatctatatgtatatagtattttttttttaggtgagcatttgtgtttggcaattgattaattgaactggtgggagtatagggctgttcataaaaaaaaataataataactcgttgagtatgtagattttaactacaaaaccacgtaaaaaattttaagtggtctatatatttattaaataagtaataattttttatttacaaggcttcatttattattaacgaaaatctgatttaacactaagcgacaccttaaggtgtcaagcaccacaagagttggcataccgctattggtataattcaatatggggtcttatatattttggttaataattaatgtaaaaaattactaaccac

SEQ ID NO: 227613 - DNA, 2214 bp, Cannabis indica
taaaaattatatatctaattaaaaaggctgaattttacccgatgagaatgtatttgttttgaatattagaggaggagaaaaattcgaatttggaacctttgtgaggagaagtgttagaatgtgattttaaaagggtaaaataaaagtgtggtgtttgtatcgatattctaactcaaaattaattggtaataagtatttctaatggaatgctaaaaaaaagtaatttatttttatattttagcacacttaaggaaaaaaaattcaataattgtgttctaaaagtgccaaattttgcacatactaaagttgtgttagatttgactcacaaattaattttactttttatttagtataattacactaattattagatatatatatgataattattgatttttataaaaaattaccttatttatttaccataatttagcacataattaaaatgttgcatttgtgataatttaaatgatatttagcttacacattctctaacataatttataaagtatgaacattaattcacaaaatctaatatagttatatattaaaaaaagagccacagaaaccgcgaatgcataagattctattgtatgtataatcaaaagagttacaattagtcaataaacacaagtgaaaaacttagattagatacaagcaaagattagagataatgacaagcttttcattgatgattatttataattaaaattcgatcaataatgtttttactccttatataatttgatcatcaaataaacatatttggatcatgttagaattatagcgtgttgttaaagtatttttatttaaaaattaattgataataaaagtagtagtctatgaatcttatgtataatatttaattatgcacattagcaaaataagattttctaaaaaatattgtctaatacaattgttgaaatatatacgtagcagatactagattttgtgttacatctacagagttaattggttttttttttcttttttgaaagatataggaataggagagtgattttcattgctaataaaatctctgtgtacagtttttaagagaattatggtaattattttacaaaaaaaaaaaaggaattatggtaattaatgaagccaaatgaagggattaggaaagactaaccgctaacgtactaacgtcacttatattgaaattctatcaaatgacaattttttattaaaagtgctaattataatttttgtgttcgaaattttatgttcaagtttttttttatagcagtatttgttatagttataatattttttataatttttttaaaaaaattaaataatttaactagtaacaaataatttattacgcgtgttcaaaaaattttaaatttatttttaatattttttttaaaaatttataaatataacattataattatagtaaacactactttcaaaaaattatttgagtacgtatttttagatataattaacttattcattttttttttacaaagaaatcattttctttgtatacatatatgtagtggcgagggaaatgtgtgtgatgcgtttgacttttataaatatatagaatgggtaagctatggggaagatggaattggaatgtcagagacttactttttgaccgtgaaggggtccataatatattcatagattctgtattctacctttggacatactcgaatcctcgaataattcaccataaagttaatttctccaaaaagatttatcatatagatatactttaattttctggtccacgcacactaccgtatatacaacaccaatttttttttcttttcatcattatgtacacatatcaatacaatattaaattgtttggtagtgctggtccatggcataattatatgtatatgactgacatgcatagatatatatatgcatggatgtctgtcgtattttcaattcaagagaatgtcaaagtaataaaaagtcaaatattaaagtaaaaaaaagaaataataataataacagtatatactactatacttactactgtatctgtatgccatttctatatacgacaaatagagacattttttttttgttaaatgagaatagttgtattgcttcgacaaactgtttttacaacctggctaaattagtttagcaagttccacttttcaaaccacaatctttcttatctaattcttctttattggtttaactgtacgtcgaaattaattcccagccaactta

SEQ ID NO: 227614 - DNA, 1726 bp, Cannabis indica
gaccttggatgcgaagggaaagggagagatattccaagtgagtacatggagtttaaagatgcctttaatgcgactcaagctagtctagaaacagattcaaaaaattgccaattgcaacaagtagaaaagattgccattgagattatcttactgcttataggaaacatgcaagctttatgcaacaaacttccaaaattacttgatttaaatttggagatgagaatactagctattttcatgctttcttgaagaaaaaataacttgagaatcaaattacttcttattggcagtagaatgaagtgattgatgactatccgaaagtcgttgaatattttctaccatttcaagaactttatgggaaagaaaagttcaacaactcaaaggatagactttgattgtcttaattaaggtaataaacttgacttgcaacaacaagttaagttgatcagacctttaagtacagaggatgtcaagaaggccttatttggtattcattcctccaaaagtttcagtcccaatggttttggagctagtttcttttaaaaaaatttggtctaatattggagaggaaatttctcaagttattttgcttttctttcaggagagtgagatgccgaatgagcttaatgaaactgtcatttcgatcattcccaaaaatgacaatcctaaagatgctagtaattatagacatattgcttattgcaatacgatctataaaggtatatccaagatgatctattcaagactctcagaggttcttcggagtttgattcatgctaaccagggtgcctttattaaaaataaacacttgacccaaaacatcttgatcttttaagaccttcttaaggggtatactaggaataatatttcagccaaatgtattatgagaatcgatatcaataaagcctatgatacatctgatttggagtctttcgaggatcttttgaaggggctttgttttccttcgagattcatcaagtggattttggtttatttacaaggtacctcttatactttaatgatgaataagagattccaaggcacttttaaaggcgaaaaagggttgcaccaaggagaccctatctcctcactcctgtttattttgatcatggattacatgactagattcttggcttattattctagtaagaagggattcaaatttcaccccctttataagtctctcaaaccggttaacctttgctttgccgatgatttaatcatatttttcaaatgaaacatttcaatggagcttttactttcttttatgtgaatactggattaaaggctaaaattttgaagtcccttgtttattttgagggtgttaaagatgagttcaaaatggctatcttgaatatgattcaaatggaggaaggttctttctcgctcaattatatgggtgtccatcttcagtcaacaaaatggaagactttgaactgtggtattatcctagacaagttgcactcaaagcttcacaattgggccagcaagaacttatctttagcaagtcgtgctcaaatgttagggttttatgtcttgaaaagtctataaagacaattatgattattaataaagagttgaaattttgatatatgcttggatgttaaattattgatatttattattgggtaatttatataaatatcaaaaaattccttattcatatatgaggttatgacttgtacctgtatagagaactaaggtcacttagctataaataaaatag

SEQ ID NO: 227615 - DNA, 4634 bp, Cannabis indica
tttggatgagtgtgtggaaagcttttgaattaatcaagggagcttgaggaagtgtgtaggctcgggtgattatttagatttttggttgatctttgcctttctatggaggatcatccttatatttcatctgatatgagggggctagaacatcatgtaattagtagtttgttttaagtgaggtggcacccttgggatgatgaggtggttcatgatattttatactcaagatgcgaagattatcttcagtatctcgcttagtgatcaagttgagggggactcatggttttgggtggatgaacatcatgaatagtactctgttaagagtgcttataatttggttcaaatgactaatgagcatgcgagtggtgatggtgatgttgaaatttgaagatgtccttggcaattgaaagtttcttctaaagtgaaggattaattgtagagaaaaaattctaattgtctccccactaaaaggagaatgcgagataaaagagtggaggtggatttagtttgtcctttgtgtggaatttatggtgaaaaaaattatcattggttctttgcttaggaatgttggcaatatgcagacttttatttgtttgataaagaagtaaggtcttttagaggttagtttaaggagattatgaggcaattagtttttgtggagtgtttggctcggtggctatgatttgttaggctattttgtgggcttgtaatgacctagcatggaagcagaaggcgttgtttgtgttttagtttcttgatagtagcttaaagcttagggagtaagcattactccatcgtttaatctgttgcttgtgggtaatggtgctgagcggtggagcaaatcaattgaaaaatagtattatggtcaatgtaaatagtgctatttttaaggaaactagaaggtttggttttggcttcgtggtgcgagactcgacgactcaatttttggtggctggtaatcagctttgtaccagcagagttgaacaagttgtggtcgagcctctttgataaaaaaggttctaagcttgcttaaatctcaatctttcctaaatgttgttgtggaaacaaatagcttatttgctatgcaagtcattcataattattaaaactcaaaatatgcgaaaaactcattttgcatgcattaggtgtgccgcgcacaaaactcaaacatgttcgagatttataaaacttgcagcatcccacgccgagaaaatgcctaggggcgtcactaggttactatcgagaaaactaggcatctacacccctttgtgcatgcgtcactcaggtgctaatcgaaaaatatcaatcatgcttaggtgatagtggtagctagggtgcaatttttcaaataagcatatttcactcaattttgatccaaattgagttccgtaaaattttaaattgcataatttacaaccaactatcattgtaaaataatttcataaccaaaataaaattattttttgtagaatttttttaattattacatacattcatcaaagcatataaagaaaccatgaaacatccatatcatacattaaaacataaaaaattattttaattcaatatttcataaataataaatcattaccatggctctaagactagttgttagaaattatttaatcaggatcttaatcttttcaagtatgtagactattactaatctaacatcctaattaaatacaaaattactaaaataagtatatatatatatatagatatccttacattggttgtcagtagaattaattgactctttccgtttaacttttctaacccttaatcctttatattacaatgtatgatcaagaactgaacctggattctctttcagttgacaaagactacacagtcttcctcactacgcctgagtatgtcttaatatgtgtaacacctactagattatgcgtattacaatgcaaagggtttaataaaaatgtgatcgattaaaacttaattaaataacttcactttaatatttaaacataataaattacataattcgagatcccgtttaaaagttacaaaaatttataaactgattatatttcaaaagtcgtcgtatagcaaccaataaaagtgagccaacattattctgaagatcgttaacgctccaagtctaattgtattgatatgtacaatcttcatccttagctttagactctcaatggttcggttctagcttttaccagcatatacatgcaataactgtgagtcatagactcagtaagaaaagtataatcttaagcataaatatatatccaaatcgtaaccaggtgcccatacacctaatcacgattttataactgggtcaggaacattctcgacaaagtatgactaactgcaaatccagcctatactcagtactctagtcgtattgatgtggtagcagttaattcatactatctagaggcctagcatatatatgttggcatctctgtgcaactctatgtacacttcacgatactctgatatgctaatctaatggccacaaatttgcctaacatatattttttggtacctcggtgcaactctatgtgcagctcactgataccctgatatgttattctgacgataactaacatgcacactaaacatgtatacatatatgcgaatcattctactaatcttaccttgattccgaatgtaagtatattggtaaatctaagtagaaactgctgctcgataatttacaggcccctaagtcacaacatacgtacaactaataagtgtttactctagaatacttctctaatgtctgaaaagaacctagggttttcctacccaactatgtggtggagataccataaaataaaatacataatttggctctactttatataccatatcgtagagctcgtcataagctttaaaactatatatagaacgtctaaaacagacacccgagtaaaaagttatggccaaaatacgaaaaatcagtctttctcgatattgtccaaccgaaatttgatacagccctaaaccaaagttgtttgggcagaaaaacacgaaaaatttccaatctcccaacccccataacttggtccaatcaaatccaaatgctaccaaactttccagaataccaaaataccacataaggaacctattacatagcttaaacacaaaaattatacttagaatcaagatttgtcatggaagagcaaagtttgagctcttaagctcaaactttgtttcacacaaaaactagcaaccaaataagcttaacaattacataatccaacatataaaacctcaattaaacctagaatgttcgcacaacaacatctagctcaaaatcatacatggaaacctaactttaaaactaaaaccaaaggaacaaaggagaaggaaacttacctcaactcatacttgagttttagcagctcaaaatatcaaagattaggtcagaattgaggaaaaagttggctagtttctttggtgtcctatgcaagcgactcaagagaagagagagagaaaggaattctaatttcttgattttcttatattttctaaatccgtaaaaatctattttcagcatataacttaatcactaaagacaaaactaagtattcctattaaacaatcaaccgataacaccattaaaagctaccatgaaatgacttcaataccctttttacactaaaggtaacttgaaacctaagggtattacggtccaaaaccataaccagagcactcccgacattccaaatatctatctaagttgtcccgctattactaaaatactaaaatatttctaagtgactctgtaggccaaacatcgcattctactgttaccgagcataaaacatgaaatttataaaaattcacatatatcataattaatgcacttagtattcagatatatcttcgtaattaagaaaatattttcctaagacttatttctgacaataagccttaattactactaggaaacacaaaatcacataataattattaaatctcttaattttttttgctaattctcatgatttaactacgcagccattacaatatatgtgggtaatcactcaatactaagccacttgaaattttgagaagaagaagaaaagaattccaaaattctatatataatataatatttttttattatttattttttgtttttgtctaacaaaagagagtcaaagtgttattaaggttaagagctatcatattatatttatagtgtaacactagagctaggtttagaattaaaattgaactaaaataaaagatgaaacaacttaataaaaaattccatggcaaagatctatatgaggcccatgggtattaattttgtcattttattgaaactcatcttttcttaaaataccatttttctattctatctgtttaaatgataattttatctatttaataattattatcaattattaataaaattactattcaattaacttatttattaattagattttttaaagtctctcaattaataaataaaccctaaatttctctttttcttcttaaatttgcccttgcttagtaaaactcatatatataagacatagtcttacttggaattctaaaagattatttaaaatcaattagttgagtctacagaacaatattagctcaggtggtgtggaggaccatgggcctatataatc

SEQ ID NO: 227616 - DNA, 2721 bp, Cannabis indica
agcctctaaccagaatcgaattcaaacccgaatctaaatcgacttaaataaaattaaaaaataaatatgaaaataaactttacaaaatatatttttatttttattttaaaaataaaaataaaaataaaatagttatagaatgtatttttatttttgaaaaataaaaatttaacttgtatttttgtgattaaaataatactttcttatttttttttaaaatgcacaatattatcaagtaagccttctctggtttccctttcatcgaaggtgaatctacctgaattgatataaaaaatttattgtcgtccaatgacctataaagtataaatgcccaccttgttgtaacatgtaactattgggattcaggaattgactatgtaattattttttttttttttttgtaaataaatattttttaatttagtaaagaaaaatatttatgaaaagaaagagaaggctggtgtggtggtatggtgtaataaagtagcagtacaaaaaaagagtcaaagatggtcaaaaagagagtgtgggttttgtggccaataatccaaaacagatgacgatgacatttgagagcagaggaatccgtgtggggacacaacgtagccaagtccagcccccttctatcccataccacgcatttccacgtggcaccattaaatattttaccctttttgtccttatttgcacacgttttcctttcctttatccgttaacaccttttctatgctgctggcggcaaattctcaaattttcttctcgggacaatatcaaaatatcgtaatgttaacgttaagtccgtttgttaggcttaacatacgatattttgttgataataccgtaacaagatgatttatacatatcaggcaatttcatgccgacttctctcgtgtcgtcttgtcactatctccttaacaaaacgttaagcaaatagtcggctaacagaaaagaccaccaaatcatcaatgacgtggcagatggatttggagtctgagtctgtgttttcccttttacgtgatactgttaattcatttgtattaaatgaaataaacactaaacaagtgtactgctactatgagcttttaggtagctaatagtttagactcatctactaactaattgctttgatcccataaaaccaataacatctctcttgtaacatgtgaaaaggatgggaagtagtttaataagccaatatgcaattaaaaggtgattcccaagggaataagaatgttgattttagcggtaacttacatatttcagtctatacacaaaccagtcggagaagaatgaagaaaacagtgttctatgttctgaggtggtaatatttgtcaagaagcttctctgtgtactctccgaatgtaagcggaccacttgatgaaatcaactgaggaagaaagagagtataaatacaggagaaaaagtttaaacacaaaaaagcaaaacaattgaatcccaaagcaaaaattatatctagattctacatatggatccctgcacaggtattggttttggtgccaaaaaattgctcaaacactacgtacctccttatgaatatgcacttcctcaggaaattttagtttttcttccctacaaagaaaagaaaaaaaaaaataacgcttttgcatatgtgaagaaggaaaactcgtcggaggttttatatagagacagtatttgcttttagtataattaatctttatgagaaaagaatagtgtaaagttagcaaaacttcagaatttggactaaagttacgcgtgatgttggtttttcacgaacttttcacacttaacaatatggatgataataccttgatctttctttaataaattattattcctaataattttttctcgatcccttctactaaggtatagagattctacatttatcactaaggacagacaattttcggtccagtagaatcacctcctcaaaagaaagtattagaaaataacttatcagaggcgttaaccacaatagaactccactattgctgatatcaattcaatacaagcaatactgccgtattaattagaaatgaatacttaccagtcaggctgcataaataatgcaaatgttgaccgctcaagacgagaagcttcttgtcctctgggtgcctgcgatcaattagacagtatcagtttcgtcctatgtcagtaaagtacgtaagacttgattaagaagaaaatcagaaagaagtcttgataaaaatggtgctagatagtgatgttagaaccttggagacataaaaactgtactctcaaaacactatcatcagatacaaaatgtgatcaaacctttattttttaggggaataccgataaaaagttaaattaaaaggtaaacaaatgttacaaaagaggtggagggtttctaacatcaaaaaaaaagttcattatccatatactaaggacatgctaaaccaattcaaaatgtgatcaaacattaaaacattattagttgttaaaatcatgacgcttctatgattaaactaaaatgatataattatttttttcaagaacataatctgatatgcaactcaagtgtatttaatatactgccaagtagggagaaccttgatactttgaggggcatcgctaattgtaacattataaaaagaggataaagaatagaaaacatctgctgcttctttcttggattgatatgttaacatcgtacatgagcacatattattgggaaagattaagtacccgaacgca

SEQ ID NO: 227617 - DNA, 1145 bp, Cannabis indica
agtactgtacaatataaaacaacttttattactacttttctttgacaaaccattgtatatatcttcagggatctatcaaacaacagcttaactgggacggtccctgaatttttggctcaactctcattcttaagagtcttgtaagtaaacttaacagactttgtaattgtttgtttacttttataagttaaaaaaaattatatagaatcataatatgtatgctctctttcacttcgcagaaacttaaaaggaaacaatttcacgggtccgcttccaccttcacttcttgaaagaatcaataacggtctatcattaaggtttgactcttataaaaatatacattgtcgatttgtcatatacataaaagaacaataactattctcttttttaaaacaaactttttgttttcatatttaaagagagggaaaataacataattaaagttaaagcataaattttactataataactccctaaagaaattattatgctatatgtgaactaagtaactaattaaggttgattcctgtttttacatgcagtgttgatgccaatttgaataataattcatcatcacccacgaatgaaacatcatcatcatcttcactatgttactggtgcagaaacaacaagtttgcggctcccttattttcaacaattggtcttctatattttgtactatagccaaatagtattgctcaccatctatctcttgtactgtttttccaatcattttttttttcagaataataataataattatttgcttatgtggtaaattaaataataagaataagcaaaaaaaaaaaaaaaaaaagagagaacagagcataaggctggccatgagaaagtggaagccattatagtaaaattgcgggtcagtgtcaccaccaaaagaaatatattattttttacttttgctttttttttttgggaatgaaatttctctacttcatattactatttagatagtgatacttttcaaagtgcatataaataatagttacttttcttaagaagaaaagaaaaacttaatatttttataagtagagggccggtccgaagacaattattagctagaccaaaattttaggaattatttcataaatacacaccaataatgaaaaaattataaaaaaaaacgg

SEQ ID NO: 227618 - DNA, 2362 bp, Cannabis indica
tcctatagagatgtaactcatgcacaccataactcctataccattaagaatttcaaataaagatgtgtaacaccttttacactcttaaagttggtgataatggtggaagttactcatagtaacaactcctccaaatattacaaaatgatgacacataatatataatgtcatatgttacatattagtttgttacatgtatttaatctacacattatattattgataaataatataacagaagattccatgactctttgaaagggaaaaaaggtctttgccaaggtgaccatatttcccccttgctttttgttttagttatggattatctcactaggttgttaacccaagcctctcatgctaagggctttaggtttcatgctatgtgtaaatcttttgagttggtcaatctttgttttgaagacaaccttattatgttttgcaaaggctatgcgagatctttgagattagttcatggggcttttatggagttttgtgcaactacaagattgtttgctaactatggaaagtctttcatttattttggtggcattaatgatgattgtaagaatgagcttctgagtatctctaagatagaaacctgaacaatgctgttaaaatatatgggagttcatcttcgccctactaaatggagagcaacaaattgtgagggaatttcagagaagattagaaggaaattacatgactggtctagccgccacctgtcttttgctagtcgtgctcaactaatccactatgttttgttgagtatttagaatttctagatgcgtaacatcattatgcctgagaaattttatttaccattgataaactttgtcctgaattcctttggggcagcaatgggaatcgtaataaaatgcattttatttcttgggagcatgtttgtttacctaaggactatggcggccttggcttttgtgaggggaagaaatggaacatagctttgatgtcaaaatatatctaggtcatctctaccaagcaagattgattatgggttcgatggatcaatgttgtttacctgaaaaatataaacttctagtctttgtctccaatccaagatgcaagctcgtactttaaaaaaactttccaaactcagaaattgtattgataaagaggctttgactgaggttggtcatttgaggaaattcaaggtgaaaaagttctatctttctcttatttacaaagataaggtgaactaccacaaaattgtttggcatagactaagtgtttcgaaacacaggtttatcctttgggaagccattaatggccatttgttaactcatgatcttattggaagattcatctccattgatttctttttatgccaggtccgtgaagctgaattgaaaccccacaaggatcttttcttctattgcatttctctagtaaaatcattcaggtggctattaaattacttggtttgactgtttggtcgagccatttgtttgactagggtaaacaagtggttaagttcgttgaaaggcctggtagctaaatttgcttcggctgcagtggcaacaatggtctactttgtttggtgcaatcgggatagatgcatctttgaggccttttgtggttctatcccatcgatttgtcaacatgttaagatgattgtgaaggcgagattctaatttatcgaattttctagacttagcaaaaaaagatcaagaggtaattgatatgttaaacactatgtaatttgtttagttattcttttaccgtgtgtattattcagtgattgttacaataaatttatctttcgttaccaaaaaacataatatactcatgttaccatcaattaaatgagaattttgaaaggggagatagtgggaggtagttgttccaattggagacgaagagaaatatggggttttggttaagagggatcatcttaaagagggtattgaaatggttatggataaaggaaaagaaggagaagagagaagattaagagctaaacaatttgctatccaggcaaagaaggctgttcagaaagaaggatcttcttatttgaatattacattattgttagaagatattatgcaaaattttcatgcatgatatgcttgtgttttgataaaaataaatgtgcactaatttaaatatggtggaagtcactcactctggactacgatcaaaagatctacatgtgcattccctattgttttttaattttgaagtgtcaaagttttgaatattagagatattaaaactcttctactatgcggagtgcggacgtctgaagtgggtattttttgctttgttacaatcctagatgaattgggcatggaaagaatcaagttggagttttttccttgtcctcatcatggttttttcaatcatg

SEQ ID NO: 227619 - DNA, 2258 bp, Cannabis indica
accaagatctttattgtctaaaataagcttcagtttctcaactgtctcttctacttcaggttttatggtcttatcaaaagatgttaaaggagttgatgagatcaatctcatgagtgcctgacaagtattatgcaataactattagcggtgtacaatttttttcacaaacactccgcgctctctaaataaattgcctaaaccaaaccgaaaaaactaaccaataaaacctaaaccattcaattaataaaatgaatggattgaaatataagttgaataaaccgatttactatttcttttaaaatatatatataatatactacataaattacatttaatattattattttttaatcgtaaagtaataaatttattattaccttactagtacaagtacagctgctatgagattcataaggaccaccaccttctagtttgtttcgcgatgcctcagtgtcgatcttgtaaaccaagtcgtctgcatcatagatggcgtccttgagatcatcaagccacttcctcactctcgggtctttgatgagcttctcctcagcatcaatgagcagcagatcagcataggacagcaaagttttcaactccttcaccagtttaagaatggcatctttccctttgaagaagtccttgacctcagaagctaacttttccaccaacggatcaaggaaagcagagagaagcgctcctccaaccaattcagcagccatcagatcttggaaaaatcagaaaggattaaaagaaagacagaatgatgaacacaaaacaaattcaaactagtaaactgagctgaatgagtgagtgtagtagcatatatggtatagtttacaataaaattttggatacacactgctaagtgctatgaaagaatagcacgggctccattgaacattgtttattatttctgagtttgttaattttaattttggtaaactgtggtagctgcatggtttacataaatctaaaataaagaaatataatagtacctcattacatgtgccttcacgtgtgtgaaacgacaaagcaacaggctgtgaaaataaagagaaactttgaaatctgagcattttattatataataatttagaggttcccttatttatattaacagaaacaatagaagatcaattcaattactgaaataacaagtttagttagttaaaattgattatttggtataactaacgtctacagctctcaaattgtaagtgaatccaatccatcaaaaagtaagatatatgttgatctgaaaccttgcaaatgaacaagtttcactctcaatcaagtaagtattgatcttaatttctctcacaacctaaagaatgtaccatttggagtatgctgactttatttcaaatttgttagcctccacggcaggtggtcttatacatgactgtaccccgtcaatgttagaagaacatagtcccttaaactacggtcaggtggattacggccgtttgcctggtcttctacgacacccccattattactattgttgttgtcattggctttgttagccatgactacttcttgttcaactctcactacactcctttcttgcctctcgtttcttctatttcttctacaagtcttctcaatttcaggatcaacaggtactattacatttttgccttgaaagtcaaataaaccccaaatgcctgaaatagagtaagaaaaattgaaaagaaataggttagcaataagcagaaagaattaaccaaagtagaatttaatctaattattgtaatatcaatacttaattaattccccaacaatagcgccaaaaactaggggtgtacgtcggtcggattggtcggatcatagcatatttttaccaacccaatataaatattgagatgcaaaaatttaattgtacgtaacccgcccaattaaaaattagaaaaagttcaacccgcccaataattttgtcggtttggtcgggttaactcgtccaaaccgttcttcacttttttttataattactattgttagtttttaattcaaaaaattagatctaaaaaaataaaaatatactatttattgtaaagttcttttttggcaagttagttgacaaaataatttttccttatatggtaagattattgtgcattcatattcaatttcttgccttataaattcggtttgtagttgctcttttccttgttaggaaagttgcactttcagctaaactttcctttgttgaaaacttcttaaaagagaagcaattctcttttggaaagttgtctttt
